United States Patent Application Publication US 2026/0125700 A1 - sequence listing, part 2

SEQ ID NO: 4569 - protein, 280 aa, Homo sapiens
  VARIANT 1: note = misc_feature - Xaa can be any naturally occurring amino acid
XNNFVIRRNPADPQRIPSNPSHRIQCAAGYEQSEHNVCQDIDECTAGTHNCRADQVCINLRGSFACQCPPGYQKRGEQCVDIDECRTSSYLCQYQCVNEPGKFSCMCPQGYQVVRSRTCQDINECETTNECREDEMCWNYHGGFRCYPRNPCQDPYILTPENRCVCPVSNAMCRELPQSIVYKYMSIRSDRSVPSDIFQIQATTIYANTINTFRIKSGNENGEFYLRQTSPVSAMLVLVKSLSGPREHIVDLEMLTVSSIGTFRTSSVLRLTIIVGPFSF

SEQ ID NO: 4570 - protein, 182 aa, Homo sapiens
DECESGAHQCSEAQTCVNFHGGYRCVDTNRCVEPYIQVSENRCLCPASNPLCREQPSSIVHRYMTITSERSVPADVFQIQATSVYPGAYNAFQIRAGNSQGDFYIRGPTPSEEQEGATLPAATLAEEPVVRGRMRKAQGPPLTGAGSSAPRASVTPRGEEVTRRADSRPRPRDLDLAGLQGS

SEQ ID NO: 4571 - protein, 183 aa, Homo sapiens
MLPCASCLPGSLLLWALLLLLLGSASPQDSEEPDSYTECTDGYEWDPDSQHCRDVNECLTIPEACKGEMKCINHYGGYLCLPRSAAVINDLHGEGPPPPVPPAQHPNPCPPGYEPDDQDSCVDVDECAQALHDCRPSQDCHNLPGSYQCTCPDGYRKIGPECVDIDECRYRYCQHRCVNLPGS

SEQ ID NO: 4572 - protein, 202 aa, Homo sapiens
MLPCASCLPGSLLLWALLLLLLGSASPQDSEEPDSYTECTDGYEWDPDSQHCRDVNECLTIPEACKGEMKCINHYGGYLCLPRSAAVINDLHGEGPPPPVPPAQHPNPCPPGYEPDDQDSCVDVDECAQALHDCRPSQDCHNLPGSYQCTCPDGYRKIGPECVDIDECRYRYCQHRCVNLPGSFRCQCEPGFQLGPNNRSCV

SEQ ID NO: 4573 - protein, 443 aa, Homo sapiens
MLPCASCLPGSLLLWALLLLLLGSASPQDSEEPDSYTECTDGYEWDPDSQHCRDVNECLTIPEACKGEMKCINHYGGYLCLPRSAAVINDLHGEGPPPPVPPAQHPNPCPPGYEPDDQDSCVDVDECAQALHDCRPSQDCHNLPGSYQCTCPDGYRKIGPECVDIDECRYRYCQHRCVNLPGSFRCQCEPGFQLGPNNRSCVDVNECDMGAPCEQRCFNSYGTFLCRCHQGYELHRDGFSCSDIDECSYSSYLCQYRCINEPGRFSCHCPQGYQLLATRLCQDIDECESGAHQCSEAQTCVNFHGGYRCVDTNRCVEPYIQVSENRCLCPASNPLCREQPSSIVHRYMTITSERSVPADVFQIQATSVYPGAYNAFQIRAGNSQGDFYIRQINNVSAMLVLARPVTGPREYVLDLEMVTMNSLMSYRASSVLRLTVFVGAYTF

SEQ ID NO: 4574 - protein, 443 aa, Homo sapiens; identical to SEQ ID NO: 4573

SEQ ID NO: 4575 - protein, 436 aa, Homo sapiens
MLPCASCLPGSLLLWALLLLLLGSASPQDSEEPDSYTECTDGYEWDPDSQHCRDVNECLTIPEACKGEMKCINHYGGYLCLPRSAAVINDLHGEGPPPPVPPAQHPNPCPPGYEPDDQDSCVDVDECAQALHDCRPSQDCHNLPGSYQCTCPDGYRKIGPECVDIDECRYRYCQHRCVNLPGSFRCQCEPGFQLGPNNRSCVDVNECDMGAPCEQRCFNSYGTFLCRCHQGYELHRDGFSCSDIDECSYSSYLCQYRCINEPGRFSCHCPQGYQLLATRLCQDIDECESGAHQCSEAQTCVNFHGGYRCVDTNRCVEPYIQVSENRCLCPASNPLCREQPSSIVHRYMTITSERSVPADVFQIQATSVYPGAYNAFQIRAGNSQGDFYIRAQGPPLTGAGSSAPRASVTPRGEEVTRRADSRPRPRDLDLAGLQGS

SEQ ID NO: 4576 - protein, 77 aa, Homo sapiens
MLPCASCLPGSLLLWALLLLLLGSASPQDSEEPDSYTECTDGYEWDPDSQHCRGPAQETGCAQQAPLCRCQRVSDHP

SEQ ID NO: 4577 - protein, 58 aa, Homo sapiens
MLPCASCLPGSLLLWALLLLLLGSASPQDSEEPDSYTVGTVRAAGLGQEGCQRVSDHP

SEQ ID NO: 4578 - protein, 76 aa, Homo sapiens
MTITSERSVPADVFQIQATSVYPGAYNAFQIRAGNSQGDFYIRQINNVSAMLVLARPVTGPREYVLDLEMVTMNSL

SEQ ID NO: 4579 - protein, 74 aa, Homo sapiens
SIVHRYMTITSERSVPADVFQIQATSVYPGAYNAFQIRAGNSQGDFYIRQINNVSAMLVLARPVTGPREPRGPH

SEQ ID NO: 4580 - protein, 69 aa, Homo sapiens
  VARIANT 1: note = misc_feature - Xaa can be any naturally occurring amino acid
XFQIRAGNSQGDFYIRQINNVSAMLVLARPVTGPREYVLDLEMVTMNSLMSYRASSVLRLTVFVGAYTF

SEQ ID NO: 4581 - protein, 54 aa, Homo sapiens
  VARIANT 1: note = misc_feature - Xaa can be any naturally occurring amino acid
XQINNVSAMLVLARPVTGPREYVLDLEMVTMNSLMSYRASSVLRLTVFVGAYTF

SEQ ID NO: 4582 - protein, 183 aa, Homo sapiens
MEFLWAPLLGLCCSLAAADRHTVFWNSSNPKFRNEDYTIHVQLNDYVDIICPHYEDHSVADAAMEQYILYLVEHEEYQLCQPQSKDQVRWQCNRPSAKHGPEKLSEKFQRFTPFTLGKEFKEGHSYYYISHSPQAHDNPQEKRLAADDPEVRVLHSIGHSAAPRLFPLAWTVLLLPLLLLQTP

SEQ ID NO: 4583 - protein, 205 aa, Homo sapiens
MEFLWAPLLGLCCSLAAADRHTVFWNSSNPKFRNEDYTIHVQLNDYVDIICPHYEDHSVADAAMEQYILYLVEHEEYQLCQPQSKDQVRWQCNRPSAKHGPEKLSEKFQRFTPFTLGKEFKEGHSYYYISKPIHQHEDRCLRLKVTVSGKITHSPQAHDNPQEKRLAADDPEVRVLHSIGHSAAPRLFPLAWTVLLLPLLLLQTP

SEQ ID NO: 4584 - protein, 213 aa, Homo sapiens
MAPAQRPLLPLLLLLLPLPPPPFARAEDAARANSDRYAVYWNRSNPRFHAGAGDDGGGYTVEVSINDYLDIYCPHYGAPLPPAERMEHYVLYMVNGEGHASCDHRQRGFKRWECNRPAAPGGPLKFSEKFQLFTPFSLGFEFRPGHEYYYISATPPNAVDRPCLRLKVYVRPTNETLYEAPEPIFTSNNSCSSPGGCRLFLSTIPVLWTLLGS

SEQ ID NO: 4585 - protein, 201 aa, Homo sapiens
MRLLPLLRTVLWAAFLGSPLRGGSSLRHVVYWNSSNPRLLRGDAVVELGLNDYLDIVCPHYEGPGPPEGPETFALYMVDWPGYESCQAEGPRAYKRWVCSLPFGHVQFSEKIQRFTPFSLGFEFLPGETYYYISVPTPESSGQCLRLQVSVCCKERKSESAHPVGSPGESGTSGWRGGDTPSPLCLLLLLLLLILRLLRIL

SEQ ID NO: 4586 - protein, 193 aa, Homo sapiens
MRLLPLLRTVLWAAFLGSPLRGGSSLRHVVYWNSSNPRLLRGDAVVELGLNDYLDIVCPHYEGPGPPEGPETFALYMVDWPGYESCQAEGPRAYKRWVCSLPFGHVQFSEKIQRFTPFSLGFEFLPGETYYYISVPTPESSGQCLRLQVSVCCKERNLPSHPKEPESSQDPLEEEGSLLPALGVPIQTDKMEH

SEQ ID NO: 4587 - protein, 207 aa, Homo sapiens
MRLLPLLRTVLWAAFLGSPLRGGSSLRHVVYWNSSNPRLLRGDAVVELGLNDYLDIVCPHYEGPGPPEGPETFALYMVDWPGYESCQAEGPRAYKRWVCSLPFGHVQFSEKIQRFTPFSLGFEFLPGETYYYISVPTPESSGQCLRLQVSVCCKERRARVLPRSPGGGGIPAACTGGANSDRQDGALMGEIRGSEVTLAGACPLITG

SEQ ID NO: 4588 - protein, 553 aa, Homo sapiens
MPLPWSLALPLLLSWVAGGFGNAASARHHGLLASARQPGVCHYGTKLACCYGWRRNSKGVCEATCEPGCKFGECVGPNKCRCFPGYTGKTCSQDVNECGMKPRPCQHRCVNTHGSYKCFCLSGHMLMPDATCVNSRTCAMINCQYSCEDTEEGPQCLCPSSGLRLAPNGRDCLDIDECASGKVICPYNRRCVNTFGSYYCKCHIGFELQYISGRYDCIDINECTMDSHTCSHHANCFNTQGSFKCKCKQGYKGNGLRCSAIPENSVKEVLRAPGTIKDRIKKLLAHKNSMKKKAKIKNVTPEPTRTPTPKVNLQPFNYEEIVSRGGNSHGGKKGNEEKMKEGLEDEKREEKALKNDIEERSLRGDVFFPKVNEAGEFGLILVQRKALTSKLEHKDLNISVDCSFNHGICDWKQDREDDFDWNPADRDNAIGFYMAVPALAGHKKDIGRLKLLLPDLQPQSNFCLLFDYRLAGDKVGKLRVFVKNSNNALAWEKTTSEDEKWKTGKIQLYQGTDATKSIIFEAERGKGKTGEIAVDGVLLVSGLCPDSLLSVDD

SEQ ID NO: 4589 - protein, 554 aa, Homo sapiens
MPLPWSLALPLLLSWVAGGFGNAASARHHGLLASARQPGVCHYGTKLACCYGWRRNSKGVCEATCEPGCKFGECVGPNKCRCFPGYTGKTCSQDVNECGMKPRPCQHRCVNTHGSYKCFCLSGHMLMPDATCVNSRTCAMINCQYSCEDTEEGPQCLCPSSGLRLAPNGRDCLDIDECASGKVICPYNRRCVNTFGSYYCKCHIGFELQYISGRYDCIDINECTMDSHTCSHHANCFNTQGSFKCKCKQGYKGNGLRCSAIPENSVKEVLRAPGTIKDRIKKLLAHKNSMKKKAKIKNVTPEPTRTPTPKVNLQPFNYEEIVSRGGNSHGGKKGNEEKMKEGLEDEKREEKALKNDIEERSLRGDVFFPKVNEAGEFGLILVQRKALTSKLEHKADLNISVDCSFNHGICDWKQDREDDFDWNPADRDNAIGFYMAVPALAGHKKDIGRLKLLLPDLQPQSNFCLLFDYRLAGDKVGKLRVFVKNSNNALAWEKTTSEDEKWKTGKIQLYQGTDATKSIIFEAERGKGKTGEIAVDGVLLVSGLCPDSLLSVDD

SEQ ID NO: 4590 - protein, 66 aa, Homo sapiens
MRGSQEVLLMWLLVLAVGGTEHAYRPGRRVCAVRAHGDPVSESFVQRVYQPFLTTCDGHRACSTYR

SEQ ID NO: 4591 - protein, 273 aa, Homo sapiens
MRGSQEVLLMWLLVLAVGGTEHAYRPGRRVCAVRAHGDPVSESFVQRVYQPFLTTCDGHRACSTYRTIYRTAYRRSPGLAPARPRYACCPGWKRTSGLPGACGAAICQPPCRNGGSCVQPGRCRCPAGWRGDTCQSDVDECSARRGGCPQRCVNTAGSYWCQCWEGHSLSADGTLCVPKGGPPRVAPNPTGVDSAMKEEVQRLQSRVDLLEEKLQLVLAPLHSLASQALEHGLPDPGSLLVHSFQQLGRIDSLSEQISFLEEQLGSCSCKKDS

SEQ ID NO: 4592 - protein, 273 aa, Homo sapiens; identical to SEQ ID NO: 4591

SEQ ID NO: 4593 - protein, 273 aa, Homo sapiens; identical to SEQ ID NO: 4591

SEQ ID NO: 4594 - protein, 273 aa, Homo sapiens; identical to SEQ ID NO: 4591

SEQ ID NO: 4595 - protein, 293 aa, Homo sapiens
MGSRAELCTLLGGFSFLLLLIPGEGAKGGSLRESQGVCSKQTLVVPLHYNESYSQPVYKPYLTLCAGRRICSTYRTMYRVMWREVRREVQQTHAVCCQGWKKRHPGALTCEAICAKPCLNGGVCVRPDQCECAPGWGGKHCHVDVDECRTSITLCSHHCFNTAGSFTCGCPHDLVLGVDGRTCMEGSPEPPTSASILSVAVREAEKDERALKQEIHELRGRLERLEQWAGQAGAWVRAVLPVPPEELQPEQVAELWGRGDRIESLSDQVLLLEERLGACSCEDNSLGLGVNHR

SEQ ID NO: 4596 - protein, 293 aa, Homo sapiens; identical to SEQ ID NO: 4595

SEQ ID NO: 4597 - protein, 258 aa, Homo sapiens
MGSRAELCTLLGGFSFLLLLIPGEGAKGGSLRESQGVCSKQTLVVPLHYNESYSQPVYKPYLTLCAGRRICSTYRTMYRVMWREVRREVQQTHAVCCQGWKKRHPGALTCEAICAKPCLNGGVCVRPDQCECAPGWGGKHCHVGSFTCGCPHDLVLGVDGRTCMEGSPEPPTSASILSVAVREAEKDERALKQEIHELRGRLERLEQWAGQAGAWVRAVLPVPPEELQPEQVAELWGRGDRIESLSDQVLLLEERLGA

SEQ ID NO: 4598 - protein, 1009 aa, Homo sapiens
MDLIRGVLLRLLLLASSLGPGAVSLRAAIRKPGKVGPPLDIKLGALNCTAFSIQWKMPRHPGSPILGYTVFYSEVGADKSLQEQLHSVPLSRDIPTTEEVIGDLKPGTEYRVSIAAYSQAGKGRLSSPRHVTTLSQDSCLPPAAPQQPHVIVVSDSEVALSWKPGASEGSAPIQYYSVEFIRPDFDKKWTSIHERIQMDSMVIKGLDPDTNYQFAVRAMNSHGPSPRSWPSDIIRTLCPEEAGSGRYGPRYITDMGAGEDDEGFEDDLDLDISFEEVKPLPATKGGNKKFLVESKKMSISNPKTISRLIPPTSASLPVTTVAPQPIPIQRKGKNGVAIMSRLFDMPCDETLCSADSFCVNDYTWGGSRCQCTLGKGGESCSEDIVIQYPQFFGHSYVTFEPLKNSYQAFQITLEFRAEAEDGLLLYCGENEHGRGDFMSLAIIRRSLQFRFNCGTGVAIIVSETKIKLGGWHTVMLYRDGLNGLLQLNNGTPVTGQSQGQYSKITFRTPLYLGGAPSAYWLVRATGTNRGFQGCVQSLAVNGRRIDMRPWPLGKALSGADVGECSSGICDEASCIHGGTCTAIKADSYICLCPLGFKGRHCEDAFTLTIPQFRESLRSYAATPWPLEPQHYLSFMEFEITFRPDSGDGVLLYSYDTGSKDFLSINLAGGHVEFRFDCGSGTGVLRSEDPLTLGNWHELRVSRTAKNGILQVDKQKIVEGMAEGGFTQIKCNTDIFIGGVPNYDDVKKNSGVLKPFSGSIQKIILNDRTIHVKHDFTSGVNVENAAHPCVRAPCAHGGSCRPRKEGYDCDCPLGFEGLHCQKAIIEAIEIPQFIGRSYLTYDNPDILKRVSGSRSNVFMRFKTTAKDGLLLWRGDSPMRPNSDFISLGLRDGALVFSYNLGSGVASIMVNGSFNDGRWHRVKAVRDGQSGKITVDDYGARTGKSPGMMRQLNINGALYVGGMKEIALHTNRQYMRGLVGCISHFTLSTDYHISLVEDAVDGKNINTCGAK

SEQ ID NO: 4599 - protein, 1017 aa, Homo sapiens
MDLIRGVLLRLLLLASSLGPGAVSLRAAIRKPGKVGPPLDIKLGALNCTAFSIQWKMPRHPGSPILGYTVFYSEVGADKSLQEQLHSVPLSRDIPTTEEVIGDLKPGTEYRVSIAAYSQAGKGRLSSPRHVTTLSQDSCLPPAAPQQPHVIVVSDSEVALSWKPGASEGSAPIQYYSVEFIRPDFDKKWTSIHERIQMDSMVIKGLDPDTNYQFAVRAMNSHGPSPRSWPSDIIRTLCPEEAGSGRYGPRYITDMGAGEDDEGFEDDLDLDISFEEVKPLPATKGGNKKFLVESKKMSISNPKTISRLIPPTSASLPVTTVAPQPIPIQRKGKNGVAIMSRLFDMPCDETLCSADSFCVNDYTWGGSRCQCTLGKGGESCSEDIVIQYPQFFGHSYVTFEPLKNSYQAFQITLEFRAEAEDGLLLYCGENEHGRGDFMSLAIIRRSLQFRFNCGTGVAIIVSETKIKLGGWHTVMLYRDGLNGLLQLNNGTPVTGQSQGQYSKITFRTPLYLGGAPSAYWLVRATGTNRGFQGCVQSLAVNGRRIDMRPWPLGKALSGADVGECSSGICDEASCIHGGTCTAIKADSYICLCPLGFKGRHCEDAFTLTIPQFRESLRSYAATPWPLEPQHYLSFMEFEITFRPDSGDGVLLYSYDTGSKDFLSINLAGGHVEFRFDCGSGTGVLRSEDPLTLGNWHELRVSRTAKNGILQVDKQKIVEGMAEGGFTQIKCNTDIFIGGVPNYDDVKKNSGVLKPFSGSIQKIILNDRTIHVKHDFTSGVNVENAAHPCVRAPCAHGGSCRPRKEGYDCDCPLGFEGLHCQKECGNYCLNTIIEAIEIPQFIGRSYLTYDNPDILKRVSGSRSNVFMRFKTTAKDGLLLWRGDSPMRPNSDFISLGLRDGALVFSYNLGSGVASIMVNGSFNDGRWHRVKAVRDGQSGKITVDDYGARTGKSPGMMRQLNINGALYVGGMKEIALHTNRQYMRGLVGCISHFTLSTDYHISLVEDAVDGKNINTCGAK

SEQ ID NO: 4600 - protein, 47 aa, Homo sapiens
MDLIRGVLLRLLLLASSLGPGAVSLRAAIRKPGRCWRMTVTKTWTEP

SEQ ID NO: 4601 - protein, 375 aa, Homo sapiens
MEFEITFRPDSGDGVLLYSYDTGSKDFLSINLAGGHVEFRFDCGSGTGVLRSEDPLTLGNWHELRVSRTAKNGILQVDKQKIVEGMAEGGFTQIKCNTDIFIGGVPNYDDVKKNSGVLKPFSGSIQKIILNDRTIHVKHDFTSGVNVENAAHPCVRAPCAHGGSCRPRKEGYDCDCPLGFEGLHCQKAIIEAIEIPQFIGRSYLTYDNPDILKRVSGSRSNVFMRFKTTAKDGLLLWRGDSPMRPNSDFISLGLRDGALVFSYNLGSGVASIMVNGSFNDGRWHRVKAVRDGQSGKITVDDYGARTGKSPGMMRQLNINGALYVGGMKEIALHTNRQYMRGLVGCISHFTLSTDYHISLVEDAVDGKNINTCGAK

SEQ ID NO: 4602 - protein, 775 aa, Homo sapiens
MHPGPEEAGSGRYGPRYITDMGAGEDDEGFEDDLDLDISFEEVKPLPATKGGNKKFLVESKKMSISNPKTISRLIPPTSASLPVTTVAPQPIPIQRKGKNGVAIMSRLFDMPCDETLCSADSFCVNDYTWGGSRCQCTLGKGGESCSEDIVIQYPQFFGHSYVTFEPLKNSYQAFQITLEFRAEAEDGLLLYCGENEHGRGDFMSLAIIRRSLQFRFNCGTGVAIIVSETKIKLGGWHTVMLYRDGLNGLLQLNNGTPVTGQSQGQYSKITFRTPLYLGGAPSAYWLVRATGTNRGFQGCVQSLAVNGRRIDMRPWPLGKALSGADVGECSSGICDEASCIHGGTCTAIKADSYICLCPLGFKGRHCEDAFTLTIPQFRESLRSYAATPWPLEPQHYLSFMEFEITFRPDSGDGVLLYSYDTGSKDFLSINLAGGHVEFRFDCGSGTGVLRSEDPLTLGNWHELRVSRTAKNGILQVDKQKIVEGMAEGGFTQIKCNTDIFIGGVPNYDDVKKNSGVLKPFSGSIQKIILNDRTIHVKHDFTSGVNVENAAHPCVRAPCAHGGSCRPRKEGYDCDCPLGFEGLHCQKAIIEAIEIPQFIGRSYLTYDNPDILKRVSGSRSNVFMRFKTTAKDGLLLWRGDSPMRPNSDFISLGLRDGALVFSYNLGSGVASIMVNGSFNDGRWHRVKAVRDGQSGKITVDDYGARTGKSPGMMRQLNINGALYVGGMKEIALHTNRQYMRGLVGCISHFTLSTDYHISLVEDAVDGKNINTCGAK

SEQ ID NO: 4603 - protein, 112 aa, Homo sapiens
MRFKTTAKDGLLLWRGDSPMRPNSDFISLGLRDGALVFSYNLGSGVASIMVNGSFNDGRWHRVKAVRDGQSGKITVDDYGARTGKSPGMMRQLNINGALYVGGMKEIALHTN

SEQ ID NO: 4604 - protein, 152 aa, Homo sapiens
MRFKTTAKDGLLLWRGDSPMRPNSDFISLGLRDGALVFSYNLGSGVASIMVNGSFNDGRWHRVKAVRDGQSGKITVDDYGARTGKSPGMMRQLNINGALYVGGMKEIALHTNRQYMRGLVGCISHFTLSTDYHISLVEDAVDGKNINTCGAK

SEQ ID NO: 4605 - protein, 152 aa, Homo sapiens; identical to SEQ ID NO: 4604

SEQ ID NO: 4606 - protein, 152 aa, Homo sapiens; identical to SEQ ID NO: 4604

SEQ ID NO: 4607 - protein, 128 aa, Homo sapiens
MFNNCEVVLGNLEITYVQRNYDLSFLKTIQEVAGYVLIALNTVERIPLENLQIIRGNMYYENSYALAVLSNYDANKTGLKELPMRNLQEILHGAVRFSNNPALCNVESIQWRDIVSSDFLSNMSMDFQ

SEQ ID NO: 4608 - protein, 1210 aa, Homo sapiens [sequence omitted]

SEQ ID NO: 4609 - protein, 628 aa, Homo sapiens
MRPSGTAGAALLALLAALCPASRALEEKKVCQGTSNKLTQLGTFEDHFLSLQRMFNNCEVVLGNLEITYVQRNYDLSFLKTIQEVAGYVLIALNTVERIPLENLQIIRGNMYYENSYALAVLSNYDANKTGLKELPMRNLQEILHGAVRFSNNPALCNVESIQWRDIVSSDFLSNMSMDFQNHLGSCQKCDPSCPNGSCWGAGEENCQKLTKIICAQQCSGRCRGKSPSDCCHNQCAAGCTGPRESDCLVCRKFRDEATCKDTCPPLMLYNPTTYQMDVNPEGKYSFGATCVKKCPRNYVVTDHGSCVRACGADSYEMEEDGVRKCKKCEGPCRKVCNGIGIGEFKDSLSINATNIKHFKNCTSISGDLHILPVAFRGDSFTHTPPLDPQELDILKTVKEITGFLLIQAWPENRTDLHAFENLEIIRGRTKQHGQFSLAVVSLNITSLGLRSLKEISDGDVIISGNKNLCYANTINWKKLFGTSGQKTKIISNRGENSCKATGQVCHALCSPEGCWGPEPRDCVSCRNVSRGRECVDKCNLLEGEPREFVENSECIQCHPECLPQAMNITCTGRGPDNCIQCAHYIDGPHCVKTCPAGVMGENNTLVWKYADAGHVCHLCHPNCTYGS

SEQ ID NO: 4610 - protein, 705 aa, Homo sapiens
MRPSGTAGAALLALLAALCPASRALEEKKVCQGTSNKLTQLGTFEDHFLSLQRMFNNCEVVLGNLEITYVQRNYDLSFLKTIQEVAGYVLIALNTVERIPLENLQIIRGNMYYENSYALAVLSNYDANKTGLKELPMRNLQEILHGAVRFSNNPALCNVESIQWRDIVSSDFLSNMSMDFQNHLGSCQKCDPSCPNGSCWGAGEENCQKLTKIICAQQCSGRCRGKSPSDCCHNQCAAGCTGPRESDCLVCRKFRDEATCKDTCPPLMLYNPTTYQMDVNPEGKYSFGATCVKKCPRNYVVTDHGSCVRACGADSYEMEEDGVRKCKKCEGPCRKVCNGIGIGEFKDSLSINATNIKHFKNCTSISGDLHILPVAFRGDSFTHTPPLDPQELDILKTVKEITGFLLIQAWPENRTDLHAFENLEIIRGRTKQHGQFSLAVVSLNITSLGLRSLKEISDGDVIISGNKNLCYANTINWKKLFGTSGQKTKIISNRGENSCKATGQVCHALCSPEGCWGPEPRDCVSCRNVSRGRECVDKCNLLEGEPREFVENSECIQCHPECLPQAMNITCTGRGPDNCIQCAHYIDGPHCVKTCPAGVMGENNTLVWKYADAGHVCHLCHPNCTYGPGNESLKAMLFCLFKLSSCNQSNDGSVSHQSGSPAAQESCLGWIPSLLPSEFQLGWGGCSHLHAWPSASVIITASSCH

SEQ ID NO: 4611 - protein, 405 aa, Homo sapiens
MRPSGTAGAALLALLAALCPASRALEEKKVCQGTSNKLTQLGTFEDHFLSLQRMFNNCEVVLGNLEITYVQRNYDLSFLKTIQEVAGYVLIALNTVERIPLENLQIIRGNMYYENSYALAVLSNYDANKTGLKELPMRNLQEILHGAVRFSNNPALCNVESIQWRDIVSSDFLSNMSMDFQNHLGSCQKCDPSCPNGSCWGAGEENCQKLTKIICAQQCSGRCRGKSPSDCCHNQCAAGCTGPRESDCLVCRKFRDEATCKDTCPPLMLYNPTTYQMDVNPEGKYSFGATCVKKCPRNYVVTDHGSCVRACGADSYEMEEDGVRKCKKCEGPCRKVCNGIGIGEFKDSLSINATNIKHFKNCTSISGDLHILPVAFRGDSFTHTPPLDPQELDILKTVKEITGLS

SEQ ID NO: 4612 - protein, 1091 aa, Homo sapiens
MRPSGTAGAALLALLAALCPASRALEEKKVCQGTSNKLTQLGTFEDHFLSLQRMFNNCEVVLGNLEITYVQRNYDLSFLKTIQEVAGYVLIALNTVERIPLENLQIIRGNMYYENSYALAVLSNYDANKTGLKELPMRNLQGQKCDPSCPNGSCWGAGEENCQKLTKIICAQQCSGRCRGKSPSDCCHNQCAAGCTGPRESDCLVCRKFRDEATCKDTCPPLMLYNPTTYQMDVNPEGKYSFGATCVKKCPRNYVVTDHGSCVRACGADSYEMEEDGVRKCKKCEGPCRKVCNGIGIGEFKDSLSINATNIKHFKNCTSISGDLHILPVAFRGDSFTHTPPLDPQELDILKTVKEITGFLLIQAWPENRTDLHAFENLEIIRGRTKQHGQFSLAVVSLNITSLGLRSLKEISDGDVIISGNKNLCYANTINWKKLFGTSGQKTKIISNRGENSCKATGQVCHALCSPEGCWGPEPRDCVSCRNVSRGRECVDKCNLLEGEPREFVENSECIQCHPECLPQAMNITCTGRGPDNCIQCAHYIDGPHCVKTCPAGVMGENNTLVWKYADAGHVCHLCHPNCTYGCTGPGLEGCPTNGPKIPSIATGMVGALLLLLVVALGIGLFMRRRHIVRKRTLRRLLQERELVEPLTPSGEAPNQALLRILKETEFKKIKVLGSGAFGTVYKGLWIPEGEKVKIPVAIKELREATSPKANKEILDEAYVMASVDNPHVCRLLGICLTSTVQLITQLMPFGCLLDYVREHKDNIGSQYLLNWCVQIAKGMNYLEDRRLVHRDLAARNVLVKTPQHVKITDFGLAKLLGAEEKEYHAEGGKVPIKWMALESILHRIYTHQSDVWSYGVTVWELMTFGSKPYDGIPASEISSILEKGERLPQPPICTIDVYMIMVKCWMIDADSRPKFRELIIEFSKMARDPQRYLVIQGDERMHLPSPTDSNFYRALMDEEDMDDVVDADEYLIPQQGFFSSPSTSRTPLLSSLSATSNNSTVACIDRNGLQSCPIKEDSFLQRYSSDPTGALTEDSIDDTFLPVPGEWLVWKQSCSSTSSTHSAAASLQCPSQVLPPASPEGETVADLQTQ

SEQ ID NO: 4613 - protein, 1165 aa, Homo sapiens
MRPSGTAGAALLALLAALCPASRALEEKKVCQGTSNKLTQLGTFEDHFLSLQRMFNNCEVVLGNLEITYVQRNYDLSFLKTIQEVAGYVLIALNTVERIPLENLQIIRGNMYYENSYALAVLSNYDANKTGLKELPMRNLQGQKCDPSCPNGSCWGAGEENCQKLTKIICAQQCSGRCRGKSPSDCCHNQCAAGCTGPRESDCLVCRKFRDEATCKDTCPPLMLYNPTTYQMDVNPEGKYSFGATCVKKCPRNYVVTDHGSCVRACGADSYEMEEDGVRKCKKCEGPCRKVCNGIGIGEFKDSLSINATNIKHFKNCTSISGDLHILPVAFRGDSFTHTPPLDPQELDILKTVKEITGFLLIQAWPENRTDLHAFENLEIIRGRTKQHGQFSLAVVSLNITSLGLRSLKEISDGDVIISGNKNLCYANTINWKKLFGTSGQKTKIISNRGENSCKATGQVCHALCSPEGCWGPEPRDCVSCRNVSRGRECVDKCNLLEGEPREFVENSECIQCHPECLPQAMNITCTGRGPDNCIQCAHYIDGPHCVKTCPAGVMGENNTLVWKYADAGHVCHLCHPNCTYGCTGPGLEGCPTNGPKIPSIATGMVGALLLLLVVALGIGLFMRRRHIVRKRTLRRLLQERELVEPLTPSGEAPNQALLRILKETEFKKIKVLGSGAFGTVYKGLWIPEGEKVKIPVAIKELREATSPKANKEILDEAYVMASVDNPHVCRLLGICLTSTVQLITQLMPFGCLLDYVREHKDNIGSQYLLNWCVQIAKGMNYLEDRRLVHRDLAARNVLVKTPQHVKITDFGLAKLLGAEEKEYHAEGGKVPIKWMALESILHRIYTHQSDVWSYGVTVWELMTFGSKPYDGIPASEISSILEKGERLPQPPICTIDVYMIMVKCWMIDADSRPKFRELIIEFSKMARDPQRYLVIQGDERMHLPSPTDSNFYRALMDEEDMDDVVDADEYLIPQQGFFSSPSTSRTPLLSSLSATSNNSTVACIDRNGLQSCPIKEDSFLQRYSSDPTGALTEDSIDDTFLPVPEYINQSVPKRPAGSVQNPVYHNQPLNPAPSRDPHYQDPHSTAVGNPEYLNTVQPTCVNSTFDSPAHWAQKGSHQISLDNPDYQQDFFPKEAKPNGIFKGSTAENAEYLRVAPQSSEFIGA

SEQ ID NO: 4614 - protein, 464 aa, Homo sapiens
MSSLTKIICAQQCSGRCRGKSPSDCCHNQCAAGCTGPRESDCLVCRKFRDEATCKDTCPPLMLYNPTTYQMDVNPEGKYSFGATCVKKCPRNYVVTDHGSCVRACGADSYEMEEDGVRKCKKCEGPCRKVCNGIGIGEFKDSLSINATNIKHFKNCTSISGDLHILPVAFRGDSFTHTPPLDPQELDILKTVKEITGFLLIQAWPENRTDLHAFENLEIIRGRTKQHGQFSLAVVSLNITSLGLRSLKEISDGDVIISGNKNLCYANTINWKKLFGTSGQKTKIISNRGENSCKATGQVCHALCSPEGCWGPEPRDCVSCRNVSRGRECVDKCNLLEGEPREFVENSECIQCHPECLPQAMNITCTGRGPDNCIQCAHYIDGPHCVKTCPAGVMGENNTLVWKYADAGHVCHLCHPNCTYGCTGPGLEGCPTNGPKIPSIATGMVGALLLLLVVALGIGLFMRR

SEQ ID NO: 4615 - protein, 77 aa, Homo sapiens
MASVWKRLQRVGKHASKFQFVASYQELMVECTKKWQPDKLVVVWTRRSRRKSSKAHSWQPGIKNPYRGVVVWPVPEN

SEQ ID NO: 4616 - protein, 1231 aa, Homo sapiens
MASVWKRLQRVGKHASKFQFVASYQELMVECTKKWQPDKLVVVWTRRSRRKSSKAHSWQPGIKNPYRGVVVWPVPENIEITVTLFKDPHAEEFEDKEWTFVIENESPSGRRKALATSSINMKQYASPMPTQTDVKLKFKPLSKKVVSAALQFSLSCIFLREGKATDEDMQSLASLMSMKQADIGNLDDFEEDNEDDDENRVNQEEKAAKITEIVNQLNALSSLDEDQDDCIKQANMRSAKSASSSEELINKLNFLDEAEKDLATVNSNPFDDPDAAELNPFGDPDSEEPITETASPRKTEDSFYNNSYNPFKEVQTPQYLNPFDEPEAFVTIKDSPPQSTKRKNIRPVDMSKYLYADSSKTEEEELDESNPFYEPKSTPPPNNLVNPVQELETERRVKRKAPAPPVLSPKTGVLNENTVSAGKDLSTSPKPSPIPSPVLGRKPNASQSLLVWCKEVTKNYRGVKITNFTTSWRNGLSFCAILHHFRPDLIDYKSLNPQDIKENNKKAYDGFASIGISRLLEPSDMVLLAIPDKLTVMTYLYQIRAHFSGQELNVVQIEENSSKSTYKVGNYETDTNSSVDQEKFYAELSDLKREPELQQPISGAVDFLSQDDSVFVNDSGVGESESEHQTPDDHLSPSTASPYCRRTKSDTEPQKSQQSSGRTSGSDDPGICSNTDSTQAQVLLGKKRLLKAETLELSDLYVSDKKKDMSPPFICEETDEQKLQTLDIGSNLEKEKLENSRSLECRSDPESPIKKTSLSPTSKLGYSYSRDLDLAKKKHASLRQTESDPDADRTTLNHADHSSKIVQHRLLSRQEELKERARVLLEQARRDAALKAGNKHNTNTATPFCNRQLSDQQDEERRRQLRERARQLIAEARSGVKMSELPSYGEMAAEKLKERSKASGDENDNIEIDTNEEIPEGFVVGGGDELTNLENDLDTPEQNSKLVDLKLKKLLEVQPQVANSPSSAAQKAVTESSEQDMKSGTEDLRTERLQKTTERFRNPVVFSKDSTVRKTQLQSFSQYIENRPEMKRQRSIQEDTKKGNEEKAAITETQRKPSEDEVLNKGFKDTSQYVVGELAALENEQKQIDTRAALVEKRLRYLMDTGRNTEEEEAMMQEWFMLVNKKNALIRRMNQLSLLEKEHDLERRYELLNRELRAMLAIEDWQKTEAQKRREQLLLDELVALVNKRDALVRDLDAQEKQAEEEDEHLERTLEQNKGKMAKKEEKCVLQ

SEQ ID NO: 4617 - protein, 1160 aa, Homo sapiens
MASVWKRLQRVGKHASKFQFVASYQELMVECTKKWQPDKLVVVWTRRSRRKSSKAHSWQPGIKNPYRGVVVWPVPENIEITVTLFKDPHAEEFEDKEWTFVIENESPSGRRKALATSSINMKQYASPMPTQTDVKLKFKPLSKKVVSAALQFSLSCIFLREGKATDEDMQSLASLMSMKQADIGNLDDFEEDNEDDDENRVNQEEKAAKITELINKLNFLDEAEKDLATVNSNPFDDPDAAELNPFGDPDSEEPITETASPRKTEDSFYNNSYNPFKEVQTPQYLNPFDEPEAFVTIKDSPPQSTKRKNIRPVDMSKYLYADSSKTEEEELDESNPFYEPKSTPPPNNLVNPVQELETERRVKRKAPAPPVLSPKTGVLNENTVSAGKDLSTSPKPSPIPSPVLGRKPNASQSLLVWCKEVTKNYRGVKITNFTTSWRNGLSFCAILHHFRPDLIDYKSLNPQDIKENNKKAYDGFASIGISRLLEPSDMVLLAIPDKLTVMTYLYQIRAHFSGQELNVVQIEENSSKSTYKVGNYETDTNSSVDQEKFYAELSDLKREPELQQPISGAVDFLSQDDSVFVNDSGVGESESEHQTPDDHLSPSTASPYCRRTKSDTEPQKSQQSSGRTSGSDDPGICSNTDSTQAQVLLGKKRLLKAETLELSDLYVSDKKKDMSPPFICEETDEQKLQTLDIGSNLEKEKLENSRSLECRSDPESPIKKTSLSPTSKLGYSYSRDLDLAKKKHASLRQTESDPDADRTTLNHADHSSKIVQHRLLSRQEELKERARVLLEQARRDAALKAGNKHNTNTATPFCNRQLSDQQDEERRRQLRERARQLIAEARSGVKMSELPSYGEMAAEKLKERSKASGEQNSKLVDLKLKKLLEVQPQVANSPSSAAQKAVTESSEQDMKSGTEDLRTERLQKTTERFRNPVVFSKDSTVRKTQLQSFSQYIENRPEMKRQRSIQEDTKKGNEEKAAITETQRKPSEDEVLNKGFKDTSQYVVGELAALENEQKQIDTRAALVEKRLRYLMDTGRNTEEEEAMMQEWFMLVNKKNALIRRMNQLSLLEKEHDLERRYELLNRELRAMLAIEDWQKTEAQKRREQLLLDELVALVNKRDALVRDLDAQEKQAEEEDEHLERTLEQNKGKMAKKEEKCVLQ

SEQ ID NO: 4618 - protein, 310 aa, Homo sapiens
MASVWKRLQRVGKHASKFQFVASYQELMVECTKKWQPDKLVVVWTRRSRRKSSKAHSWQPGIKNPYRGVVVWPVPENIEITVTLFKDPHAEEFEDKEWTFVIENESPSGRRKALATSSINMKQYASPMPTQTDVKLKFKPLSKKVVSAALQFSLSCIFLREGKATDEDMQSLASLMSMKQADIGNLDDFEEDNEDDDENRVNQEEKAAKITELINKLNFLDEAEKDLATVNSNPFDDPDAAELNPFGDPDSEEPITETASPRKTEDSFYNNSYNPFKEVQTPQYLNPFDEPEAFVTIKDSPPQSTKRKNI

SEQ ID NO: 4619 - protein, 1196 aa, Homo sapiens
MASVWKRLQRVGKHASKFQFVASYQELMVECTKKWQPDKLVVVWTRRSRRKSSKAHSWQPGIKNPYRGVVVWPVPENIEITVTLFKDPHAEEFEDKEWTFVIENESPSGRRKALATSSINMKQYASPMPTQTDVKLKFKPLSKKVVSAALQFSLSCIFLREGKATDEDMQSLASLMSMKQADIGNLDDFEEDNEDDDENRVNQEEKAAKITELINKLNFLDEAEKDLATVNSNPFDDPDAAELNPFGDPDSEEPITETASPRKTEDSFYNNSYNPFKEVQTPQYLNPFDEPEAFVTIKDSPPQSTKRKNIRPVDMSKYLYADSSKTEEEELDESNPFYEPKSTPPPNNLVNPVQELETERRVKRKAPAPPVLSPKTGVLNENTVSAGKDLSTSPKPSPIPSPVLGRKPNASQSLLVWCKEVTKNYRGVKITNFTTSWRNGLSFCAILHHFRPDLIDYKSLNPQDIKENNKKAYDGFASIGISRLLEPSDMVLLAIPDKLTVMTYLYQIRAHFSGQELNVVQIEENSSKSTYKVGNYETDTNSSVDQEKFYAELSDLKREPELQQPISGAVDFLSQDDSVFVNDSGVGESESEHQTPDDHLSPSTASPYCRRTKSDTEPQKSQQSSGRTSGSDDPGICSNTDSTQAQVLLGKKRLLKAETLELSDLYVSDKKKDMSPPFICEETDEQKLQTLDIGSNLEKEKLENSRSLECRSDPESPIKKTSLSPTSKLGYSYSRDLDLAKKKHASLRQTESDPDADRTTLNHADHSSKIVQHRLLSRQEELKERARVLLEQARRDAALKAGNKHNTNTATPFCNRQLSDQQDEERRRQLRERARQLIAEARSGVKMSELPSYGEMAAEKLKERSKASGDENDNIEIDTNEEIPEGFVVGGGDELTNLENDLDTPEQNSKLVDLKLKKLLEVQPQVANSPSSAAQKAVTESSEQDMKSGTEDLRTERLQKTTERFRNPVVFSKDSTVRKTQLQSFSQYIENRPEMKRQRSIQEDTKKGNEEKAAITETQRKPSEDEVLNKGFKDTSQYVVGELAALENEQKQIDTRAALVEKRLRYLMDTGRNTEEEEAMMQEWFMLVNKKNALIRRMNQLSLLEKEHDLERRYELLNRELRAMLAIEDWQKTEAQKRREQLLLDELVALVNKRDALVRDLDAQEKQAEEEDEHLERTLEQNKGKMAKKEEKCVLQ

SEQ ID NO: 4620 - protein, 1160 aa, Homo sapiens; identical to SEQ ID NO: 4617

SEQ ID NO: 4621 - protein, 41 aa, Homo sapiens
MKQYASPMPTQTDVKLKFKPLSKKVVSAALQFSLSCIFLRE

SEQ ID NO: 4622 - protein, 95 aa, Homo sapiens
MKQYASPMPTQTDVKLKFKPLSKKVVSAALQFSLSCIFLREGKATDEDMQSLASLMSMKQADIGNLDDFEEDNEDDDENRVNQEEKAAKITEIVN

SEQ ID NO: 4623 - protein, 108 aa, Homo sapiens
MNWQPDKLVVVWTRRSRRKSSKAHSWQPGIKNPYRGVVVWPVPENIEITVTLFKDPHAEEFEDKEWTFVIENESPSGRRKALATSSINMKQYASPMPTQTDVKLKFKP

SEQ ID NO: 4624 - protein, 110 aa, Homo sapiens
  VARIANT 1: note = misc_feature - Xaa can be any naturally occurring amino acid
XLEKEKLENSRSLECRSDPESPIKKTSLSPTSKLGYSYSRDLDLAKKKHASLRQTESDPDADRTTLNHADHSSKIVQQQDEERRRQLRERARQLIAEARSGVKMSELPSY

SEQ ID NO: 4625 - protein, 223 aa, Homo sapiens
  VARIANT 1: note = misc_feature - Xaa can be any naturally occurring amino acid
XNTNTATPFCNRQLSDQDEERRRQLRERARQLIAEARSGVKMSELPSYGEMAAEKLKERSKASGDENDNIEIDTNEEIPEGFVVGGGDELTNLENDLDTPEQNSKLVDLKLKKLLEVQPQVANSPSSAAQKAVTESSEQDMKSGTEDLRTERLQKTTERFRNPVVFSKDSTVRKTQLQSFSQYIENRPEMKRQRSIQEDTKKGNEEKAAITETQRKPSEDEVL

SEQ ID NO: 4626 - protein, 154 aa, Homo sapiens
  VARIANT 1: note = misc_feature - Xaa can be any naturally occurring amino acid
XRLLEPSDMTESDPDADRTTLNHADHSSKIVQHRLLSRQEELKERARVLLEQARRDAALKAGNKHNTNTATPFCNRQLSDQQDEERRRQLRERARQLIAEARSGVKMSELPSYGEMAAEKLKERSKASGDENDNIEIDTNEEIPEGFVVGGGDE

SEQ ID NO: 4627 - protein, 322 aa, Homo sapiens
MGLPERRGLVLLLSLAEILFKIMILEGGGVMNLNPGNNLLHQPPAWTDSYSTCNVSSGFFGGQWHEIHPQYWTKYQVWEWLQHLLDTNQLDANCIPFQEFDINGEHLCSMSLQEFTRAAGTAGQLLYSNLQHLKWNGQCSSDLFQSTHNVIVKTEQTEPSIMNTWKDENYLYDTNYGSTVDLLDSKTFCRAQISMTTTSHLPVAESPDMKKEQDPPAKCHTKKHNPRGTHLWEFIRDILLNPDKNPGLIKWEDRSEGVFRFLKSEAVAQLWGKKKNNSSMTYEKLSRAMRYYYKREILERVDGRRLVYKFGKNARGWRENEN

SEQ ID NO: 4628 - protein, 126 aa, Homo sapiens
MILEGGGVMNLNPGNNLLHQPPAWTDSYSTCNVSSGFFGGQWHEIHPQYWTKYQVWEWLQHLLDTNQLDANCIPFQEFDINGEHLCSMSLQEFTRAAGTAGQLLYSNLQHLKWNGDSLFLCLSLPC

SEQ ID NO: 4629 - protein, 126 aa, Homo sapiens; identical to SEQ ID NO: 4628

SEQ ID NO: 4630 - protein, 158 aa, Homo sapiens
MILEGGGVMNLNPGNNLLHQPPAWTDSYSTCNVSSGFFGGQWHEIHPQYWTKYQVWEWLQHLLDTNQLDANCIPFQEFDINGEHLCSMSLQEFTRAAGTAGQLLYSNLQHLKWNGQCSSDLFQSTHNVIVKTEQTEPSIMNTWKDENYLYDTNYGSTV

SEQ ID NO: 4631 - protein, 166 aa, Homo sapiens
MILEGGGVMNLNPGNNLLHQPPAWTDSYSTCNVSSGFFGGQWHEIHPQYWTKYQVWEWLQHLLDTNQLDANCIPFQEFDINGEHLCSMSLQEFTRAAGTAGQLLYSNLQHLKWNGQCSSDLFQSTHNVIVKTEQTEPSIMNTWKDENYLYDTNYGSTVAESPDMKK

SEQ ID NO: 4632 - protein, 277 aa, Homo sapiens
MILEGGGVMNLNPGNNLLHQPPAWTDSYSTCNVSSGFFGGQWHEIHPQYWTKYQVWEWLQHLLDTNQLDANCIPFQEFDINGEHLCSMSLQEFTRAAGTAGQLLYSNLQHLKWNGQCSSDLFQSTHNVIVKTEQTEPSIMNTWKDENYLYDTNYGSTVAESPDMKKEQDPPAKCHTKKHNPRGTHLWEFIRDILLNPDKNPGLIKWEDRSEGVFRFLKSEAVAQLWGKKKNNSSMTYEKLSRAMRYYYKREILERVDGRRLVYKFGKNARGWRENEN

SEQ ID NO: 4633 - protein, 173 aa, Homo sapiens
MILEGGGVMNLNPGNNLLHQPPAWTDSYSTCNVSSGFFGGQWHEIHPQYWTKYQVWEWLQHLLDTNQLDANCIPFQEFDINGEHLCSMSLQEFTRAAGTAGQLLYSNLQHLKWNGQCSSDLFQSTHNVIVKTEQTEPSIMNTWKDENYLYDTNYGSTVDLLDSKTFCRAQISM

SEQ ID NO: 4634 - protein, 300 aa, Homo sapiens
MILEGGGVMNLNPGNNLLHQPPAWTDSYSTCNVSSGFFGGQWHEIHPQYWTKYQVWEWLQHLLDTNQLDANCIPFQEFDINGEHLCSMSLQEFTRAAGTAGQLLYSNLQHLKWNGQCSSDLFQSTHNVIVKTEQTEPSIMNTWKDENYLYDTNYGSTVDLLDSKTFCRAQISMTTTSHLPVAESPDMKKEQDPPAKCHTKKHNPRGTHLWEFIRDILLNPDKNPGLIKWEDRSEGVFRFLKSEAVAQLWGKKKNNSSMTYEKLSRAMRYYYKREILERVDGRRLVYKFGKNARGWRENEN

SEQ ID NO: 4635 - protein, 300 aa, Homo sapiens; identical to SEQ ID NO: 4634

SEQ ID NO: 4636 - protein, 300 aa, Homo sapiens; identical to SEQ ID NO: 4634

SEQ ID NO: 4637 - protein, 370 aa, Homo sapiens
GLGRPTPGLSQGPGKETLESALIALDSEKPKKLRFHPKQLYFSARQGELQKVLLMLVDGIDPNFKMEHQNKRSPLHAAAEAGHVDICHMLVQAGANIDTCSEDQRTPLMEAAENNHLEAVKYLIKAGALVDPKDAEGSTCLHLAAKKGHYEVVQYLLSNGQMDVNCQDDGGWTPMIWATEYKHVDLVKLLLSKGSDINIRDNEENICLHWAAFSGCVDIAEILLAAKCDLHAVNIHGDSPLHIAARENRYDCVVLFLSRDSDVTLKNKEGETPLQCASLNSQVWSALQMSKALQDSAPDRPSPVERIVSRDIARGYERIPIPCVNAVDSEPCPSNYKYVSQNCVTSPMNIDRNITHLQALDMFLPAQPSP

SEQ ID NO: 4638 - protein, 1298 aa, Homo sapiens
MAAADAEAVPARGEPQQDCCVKTELLGEETPMAADEGSAEKQAGEAHMAADGETNGSCENSDASSHANAAKHTQDSARVNPQDGTNTLTRIAENGVSERDSEAAKQNHVTADDFVQTSVIGSNGYILNKPALQAQPLRTTSTLASSLPGHAAKTLPGGAGKGRTPSAFPQTPAAPPATLGEGSADTEDRKLPAPGADVKVHRARKTMPKSVVGLHAASKDPREVREARDHKEPKEEINKNISDFGRQQLLPPFPSLHQSLPQNQCYMATTKSQTACLPFVLAAAVSRKKKRRMGTYSLVPKKKTKVLKQRTVIEMFKSITHSTVGSKGEKDLGASSLHVNGESLEMDSDEDDSEELEEDDGHGAEQAAAFPTEDSRTSKESMSEADRAQKMDGESEEEQESVDTGEEEEGGDESDLSSESSIKKKFLKRKGKTDSPWIKPARKRRRRSRKKPSGALGSESYKSSAGSAEQTAPGDSTGYMEVSLDSLDLRVKGILSSQAEGLANGPDVLETDGLQEVPLCSCRMETPKSREITTLANNQCMATESVDHELGRCTNSVVKYELMRPSNKAPLLVLCEDHRGRMVKHQCCPGCGYFCTAGNFMECQPESSISHRFHKDCASRVNNASYCPHCGEESSKAKEVTIAKADTTSTVTPVPGQEKGSALEGRADTTTGSAAGPPLSEDDKLQGAASHVPEGFDPTGPAGLGRPTPGLSQGPGKETLESALIALDSEKPKKLRFHPKQLYFSARQGELQKVLLMLVDGIDPNFKMEHQNKRSPLHAAAEAGHVDICHMLVQAGANIDTCSEDQRTPLMEAAENNHLEAVKYLIKAGALVDPKDAEGSTCLHLAAKKGHYEVVQYLLSNGQMDVNCQDDGGWTPMIWATEYKHVDLVKLLLSKGSDINIRDNEENICLHWAAFSGCVDIAEILLAAKCDLHAVNIHGDSPLHIAARENRYDCVVLFLSRDSDVTLKNKEGETPLQCASLNSQVWSALQMSKALQDSAPDRPSPVERIVSRDIARGYERIPIPCVNAVDSEPCPSNYKYVSQNCVTSPMNIDRNITHLQYCVCIDDCSSSNCMCGQLSMRCWYDKDGRLLPEFNMAEPPLIFECNHACSCWRNCRNRVVQNGLRARLQLYRTRDMGWGVRSLQDIPPGTFVCEYVGELISDSEADVREEDSYLFDLDNKDGEVYCIDARFYGNVSRFINHHCEPNLVPVRVFMAHQDLRFPRIAFFSTRLIEAGEQLGFDYGERFWDIKGKLFSCRCGSPKCRHSSAALAQRQASAAQEAQEDGLPDTSSAAAADPL

SEQ ID NO: 4639 - protein, 808 aa, Homo sapiens
MAAADAEAVPARGEPQQDCCVKTELLGEETPMAADEGSAEKQAGEAHMAADGETNGSCENSDASSHANAAKHTQDSARVNPQDGTNTLTRIAENGVSERDSEAAKQNHVTADDFVQTSVIGSNGYILNKPALQAQPLRTTSTLASSLPGHAAKTLPGGAGKGRTPSAFPQTPAAPPATLGEGSADTEDRKLPAPGADVKVHRARKTMPKSVVGLHAASKDPREVREARDHKEPKEEINKNISDFGRQQLLPPFPSLHQSLPQNQCYMATTKSQTACLPFVLAAAVSRKKKRRMGTYSLVPKKKTKVLKQRTVIEMFKSITHSTVGSKGEKDLGASSLHVNGESLEMDSDEDDSEELEEDDGHGAEQAAAFPTEDSRTSKESMSEADRAQKMDGESEEEQESVDTGEEEEGGDESDLSSESSIKKKFLKRKGKTDSPWIKPARKRRRRSRKKPSGALGSESYKSSAGSAEQTAPGDSTGYMEVSLDSLDLRVKGILSSQAEGLANGPDVLETDGLQEVPLCSCRMETPKSREITTLANNQCMATESVDHELGRCTNSVVKYELMRPSNKAPLLVLCEDHRGRMVKHQCCPGCGYFCTAGNFMECQPESSISHRFHKDCASRVNNASYCPHCGEESSKAKEVTIAKADTTSTVTPVPGQEKGSALEGRADTTTGSAAGPPLSEDDKLQGAASHVPEGFDPTGPAGLGRPTPGLSQGPGKETLESALIALDSEKPKKLRFHPKQLYFSARQGELQKVLLMLVDGIDPNFKMEHQNKRSPLHAAAEAGHVDICHMLVQFCRLGSPRSRGCLW

SEQ ID NO: 4640 - protein, 556 aa, Homo sapiens
MAAADAEAVPARGEPQQDCCVKTELLGEETPMAADEGSAEKQAGEAHMAADGETNGSCENSDASSHANAAKHTQDSARVNPQDGTNTLTRIAENGVSERDSEAAKQNHVTADDFVQTSVIGSNGYILNKPALQAQPLRTTSTLASSLPGHAAKTLPGGAGKGRTPSAFPQTPAAPPATLGEGSADTEDRKLPAPGADVKVHRARKTMPKSVVGLHAASKDPREVREARDHKEPKEEINKNISDFGRQQLLPPFPSLHQSLPQNQCYMATTKSQTACLPFVLAAAVSRKKKRRMGTYSLVPKKKTKVLKQRTVIEMFKSITHSTVGSKGEKDLGASSLHVNGESLEMDSDEDDSEELEEDDGHGAEQAAAFPTEDSRTSKESMSEADRAQKMDGESEEEQESVDTGEEEEGGDESDLSSESSIKKKFLKRKGKTDSPWIKPARKRRRRSRKKPSGALGSESYKSSAGSAEQTAPGDSTGYMEVSLDSLDLRVKGILSSQAEGLANGPDVLETDGLQEVPLCSCRMETPKSREITTLANNQCMATESVDHEVSTFVFI

SEQ ID NO: 4641 - protein, 66 aa, Homo sapiens
MAAADAERHLWLPMKAQQRNRQERPTWLRTVRPMGLVKTAMPAVMQMLQSTLRTAQGSTPRMAPTH

SEQ ID NO: 4642 - protein, 106 aa, Homo sapiens
MAADEGSAEKQAGEAHMAADGETNGSCENSDASSHANAAKHTQDSARVNPQDGTNTLTRIAENGVSERDSEAAKQNHVTADDFVQTSVIGSNGYILNKPALQAQPL

SEQ ID NO: 4643 - protein, 134 aa, Homo sapiens
MAADEGSAEKQAGEAHMAADGETNGSCENSDASSHANAAKHTQDSARVNPQDGTNTLTRIAENGVSERDSEAAKQNHVTADDFVQTSVIGSNGYILNKPALQAQPLRTTSTLASSLPGHAAKTLPGGAGKGRTP

SEQ ID NO: 4644 - protein, 137 aa, Homo sapiens
MAADEGSAEKQAGEAHMAADGETNGSCENSDASSHANAAKHTQDSARVNPQDGTNTLTRIAENGVSERDSEAAKQNHVTADDFVQTSVIGSNGYILNKPALQAQPLRTTSTLASSLPGHAAKTLPGGAGKGRTPSAF

SEQ ID NO: 4645 - protein, 139 aa, Homo sapiens
MAADEGSAEKQAGEAHMAADGETNGSCENSDASSHANAAKHTQDSARVNPQDGTNTLTRIAENGVSERDSEAAKQNHVTADDFVQTSVIGSNGYILNKPALQAQPLRTTSTLASSLPGHAAKTLPGGAGKGRTPSAFPQ

SEQ ID NO: 4646 - protein, 982 aa, Homo sapiens
MAADEGSAEKQAGEAHMAADGETNGSCENSDASSHANAAKHTQDSARVNPQDGTNTLTRIAENGVSERDSEAAKQNHVTADDFVQTSVIGSNGYILNKPALQAQPLRTTSTLASSLPGHAAKTLPGGAGKGRTPSAFPQTPAAPPATLGEGSADTEDRKLPAPGADVKVHRARKTMPKSVVGLHAASKDPREVREARDHKEPKEEINKNISDFGRQQLLPPFPSLHQSLPQNQCYMATTKSQTAAAVSRKKKRRMGTYSLVPKKKTKVLKQRTVIEMFKSITHSTVGSKGEKDLGASSLHVNGESLEMDSDEDDSEELEEDDGHGAEQAAAFPTEDSRTSKESMSEADRAQKMDGESEEEQESVDTGEEEEGGDESDLSSESSIKKKFLKRKGKTDSPWIKPARKRRRRSRKKPSGALGSESYKSSAGSAEQTAPGDSTGYMEVSLDSLDLRVKGILSSQAEGLANGPDVLETDGLQEVPLCSCRMETPKSREITTLANNQCMATESVDHELGRCTNSVVKYELMRPSNKAPLLVLCEDHRGRMVKHQCCPGCGYFCTAGNFMECQPESSISHRFHKDCASRVNNASYCPHCGEESSKAKEVTIAKADTTSTVTPVPGQEKGSALEGRADTTTGSAAGPPLSEDDKLQGAASHVPEGFDPTGPAGLGRPTPGLSQGPGKETLESALIALDSEKPKKLRFHPKQLYFSARQGELQKVLLMLVDGIDPNFKMEHQNKRSPLHAAAEAGHVDICHMLVQAGANIDTCSEDQRTPLMEAAENNHLEAVKYLIKAGALVDPKDAEGSTCLHLAAKKGHYEVVQYLLSNGQMDVNCQDDGGWTPMIWATEYKHVDLVKLLLSKGSDINIRDNEENICLHWAAFSGCVDIAEILLAAKCDLHAVNIHGDSPLHIAARENRYDCVVLFLSRDSDVTLKNKEGETPLQCASLNSQVWSALQMSKALQDSAPDRPSPVERIVSRDIARGYER

SEQ ID NO: 4647 - protein, 1267 aa, Homo sapiens
MAADEGSAEKQAGEAHMAADGETNGSCENSDASSHANAAKHTQDSARVNPQDGTNTLTRIAENGVSERDSEAAKQNHVTADDFVQTSVIGSNGYILNKPALQAQPLRTTSTLASSLPGHAAKTLPGGAGKGRTPSAFPQTPAAPPATLGEGSADTEDRKLPAPGADVKVHRARKTMPKSVVGLHAASKDPREVREARDHKEPKEEINKNISDFGRQQLLPPFPSLHQSLPQNQCYMATTKSQTACLPFVLAAAVSRKKKRRMGTYSLVPKKKTKVLKQRTVIEMFKSITHSTVGSKGEKDLGASSLHVNGESLEMDSDEDDSEELEEDDGHGAEQAAAFPTEDSRTSKESMSEADRAQKMDGESEEEQESVDTGEEEEGGDESDLSSESSIKKKFLKRKGKTDSPWIKPARKRRRRSRKKPSGALGSESYKSSAGSAEQTAPGDSTGYMEVSLDSLDLRVKGILSSQAEGLANGPDVLETDGLQEVPLCSCRMETPKSREITTLANNQCMATESVDHELGRCTNSVVKYELMRPSNKAPLLVLCEDHRGRMVKHQCCPGCGYFCTAGNFMECQPESSISHRFHKDCASRVNNASYCPHCGEESSKAKEVTIAKADTTSTVTPVPGQEKGSALEGRADTTTGSAAGPPLSEDDKLQGAASHVPEGFDPTGPAGLGRPTPGLSQGPGKETLESALIALDSEKPKKLRFHPKQLYFSARQGELQKVLLMLVDGIDPNFKMEHQNKRSPLHAAAEAGHVDICHMLVQAGANIDTCSEDQRTPLMEAAENNHLEAVKYLIKAGALVDPKDAEGSTCLHLAAKKGHYEVVQYLLSNGQMDVNCQDDGGWTPMIWATEYKHVDLVKLLLSKGSDINIRDNEENICLHWAAFSGCVDIAEILLAAKCDLHAVNIHGDSPLHIAARENRYDCVVLFLSRDSDVTLKNKEGETPLQCASLNSQVWSALQMSKALQDSAPDRPSPVERIVSRDIARGYERIPIPCVNAVDSEPCPSNYKYVSQNCVTSPMNIDRNITHLQYCVCIDDCSSSNCMCGQLSMRCWYDKDGRLLPEFNMAEPPLIFECNHACSCWRNCRNRVVQNGLRARLQLYRTRDMGWGVRSLQDIPPGTFVCEYVGELISDSEADVREEDSYLFDLDNKDGEVYCIDARFYGNVSRFINHHCEPNLVPVRVFMAHQDLRFPRIAFFSTRLIEAGEQLGFDYGERFWDIKGKLFSCRCGSPKCRHSSAALAQRQASAAQEAQEDGLPDTSSAAAADPL

SEQ ID NO: 4648 - protein, 117 aa, Homo sapiens
MEAAENNHLEAVKYLIKAGALVDPKDAEGSTCLHLAAKKGHYEVVQYLLSNGQMDVNCQDDGGWTPMIWATEYKHVDLVKLLLSKGSDINIRDNDDGTMKRGALSRQKEEKREAEEP

SEQ ID NO: 4649 - protein, 107 aa, Homo sapiens
MEAAENNHLEAVKYLIKAGALVDPKDAEGSTCLHLAAKKGHYEVVQYLLSNGQMDVNCQDDGGWTPMIWATEYKHVDLVKLLLSKGSDINIRDNRVPEARNGKSSHK

SEQ ID NO: 4650 - protein, 394 aa, Homo sapiens
MGFAAAAVSRKKKRRMGTYSLVPKKKTKVLKQRTVIEMFKSITHSTVGSKGEKDLGASSLHVNGESLEMDSDEDDSEELEEDDGHGAEQAAAFPTEDSRTSKESMSEADRAQKMDGESEEEQESVDTGEEEEGGDESDLSSESSIKKKFLKRKGKTDSPWIKPARKRRRRSRKKPSGALGSESYKSSAGSAEQTAPGDSTGYMEVSLDSLDLRVKGILSSQAEGLANGPDVLETDGLQEVPLCSCRMETPKSREITTLANNQCMATESVDHELGRCTNSVVKYELMRPSNKAPLLVLCEDHRGRMVKHQCCPGCGYFCTAGNFMECQPESSISHRFHKDCASRVNNASYCPHCGEESSKAKEVTIAKADTTSTVTPVPGQEKGSALEGRADTTT

SEQ ID NO: 4651 - protein, 126 aa, Homo sapiens
MGTYSLVPKKKTKVLKQRTVIEMFKSITHSTVGSKGEKDLGASSLHVNGESLEMDSDEDDSEELEEDDGHGAEQAAAFPTEDSRTSKESMSEADRAQKKHEEENTASSPHCPGGSGTLKQSLQELP

SEQ ID NO: 4652 - protein, 126 aa, Homo sapiens; identical to SEQ ID NO: 4651

SEQ ID NO: 4653 - protein, 268 aa, Homo sapiens
MLYFSRSHFPRPCGGQVSAGSGLTLLLLLLPALWRGWLEGDGQQAVPARGEPQQDCCVKTELLGEETPMAADEGSAEKQAGEAHMAADGETNGSCENSDASSHANAAKHTQDSARVNPQDGTNTLTRIAENGVSERDSEAAKQNHVTADDFVQTSVIGSNGYILNKPALQAQPLRTTSTLASSLPGHAAKTLPGGAGKGRTPSAFPQTPAAPPATLGEGSADTEDRKLPAPGADVKVHRARKTMPKSVVGLHAASKDPREVREARDHK

SEQ ID NO: 4654 - protein, 803 aa, Homo sapiens
MSEADRAQKMDGESEEEQESVDTGEEEEGGDESDLSSESSIKKKFLKRKGKTDSPWIKPARKRRRRSRKKPSGALGSESYKSSAGSAEQTAPGDSTGYMEVSLDSLDLRVKGILSSQAEGLANGPDVLETDGLQEVPLCSCRMETPKSREITTLANNQCMATESVDHELGRCTNSVVKYELMRPSNKAPLLVLCEDHRGRMVKHQCCPGCGYFCTAGNFMECQPESSISHRFHKDCASRVNNASYCPHCGEESSKAKEVTIAKADTTSTVTPVPGQEKGSALEGRADTTTGSAAGPPLSEDDKLQGAASHVPEGFDPTGPAGLGRPTPGLSQGPGKETLESALIALDSEKPKKLRFHPKQLYFSARQGELQKVLLMLVDGIDPNFKMEHQNKRSPLHAAAEAGHVDICHMLVQAGANIDTCSEDQRTPLMEAAENNHLEAVKYLIKAGALVDPKDAEGSTCLHLAAKKGHYEVVQYLLSNGQMDVNCQDDGGWTPMIWATEYKHVDLVKLLLSKGSDINIRDNEENICLHWAAFSGCVDIAEILLAAKCDLHAVNIHGDSPLHIAARENRYDCVVLFLSRDSDVTLKNKEGETPLQCASLNSQVWSALQMSKALQDSAPDRPSPVERIVSRDIARGYERIPIPCVNAVDSEPCPSNYKYVSQNCVTSPMNIDRNITHLQYCVCIDDCSSSNCMCGQLSMRCWYDKDGRLLPEFNMAEPPLIFECNHACSCWRNCRNRVVQNGLRARLQLYRTRDMGWGVRSLQDIPPGTFVCEYVGELISDSEADVREEDSYLFDLDNKISSA

SEQ ID NO: 4655 - protein, 153 aa, Homo sapiens
SPLHAAAEAGHVDICHMLVQAGANIDTCSEDQRTPLMEAAENNHLEAVKYLIKAGALVDPKDAEGSTCLHLAAKKGHYEVVQYLLSNGQMDVNCQDDGGWTPMIWATEYKHVDLVKLLLSKGSDINIRDNDDGTMKRGALSRQKEEKREAEEP

SEQ ID NO: 4656 - protein, 277 aa, Homo sapiens
VPARGEPQQDCCVKTELLGEETPMAADEGSAEKQAGEAHMAADGETNGSCENSDASSHANAAKHTQDSARVNPQDGTNTLTRIAENGVSERDSEAAKQNHVTADDFVQTSVIGSNGYILNKPALQAQPLRTTSTLASSLPGHAAKTLPGGAGKGRTPSAFPQTPAAPPATLGEGSADTEDRKLPAPGADVKVHRARKTMPKSVVGLHAASKDPREVREARDHKEPKEEINKNISDFGRQQLLPPFPSLHQSLPQNQCYMATTKSQTGKEDPATVSAL

SEQ ID NO: 4657 - protein, 168 aa, Homo sapiens
WIKPARKRRRRSRKKPSGALGSESYKSSAGSAEQTAPGDSTGYMEVSLDSLDLRVKGILSSQAEGLANGPDVLETDGLQEVPLCSCRMETPKSREITTLANNQCMATESVDHEGNFMECQPESSISHRFHKDCASRVNNASYCPHCGEESSKAKEVTIAKADTTSTVT

SEQ ID NO: 4658 - protein, 543 aa, Homo sapiens
  VARIANT 1: note = misc_feature - Xaa can be any naturally occurring amino acid
XCVKTELLGEETPMAADEGSAEKQAGEAHMAADGETNGSCENSDASSHANAAKHTQDSARVNPQDGTNTLTRIAENGVSERDSEAAKQNHVTADDFVQTSVIGSNGYILNKPALQAQPLRTTSTLASSLPGHAAKTLPGGAGKGRTPSAFPQTPAAPPATLGEGSADTEDRKLPAPGADVKVHRARKTMPKSVVGLHAASKDPREVREARDHKEPKEEINKNISDFGRQQLLPPFPSLHQSLPQNQCYMATTKSQTACLPFVLAAAVSRKKKRRMGTYSLVPKKKTKVLKQRTVIEMFKSITHSTVGSKGEKDLGASSLHVNGESLEMDSDEDDSEELEEDDGHGAEQAAAFPTEDSRTSKESMSEADRAQKMDGESEEEQESVDTGEEEEGGDESDLSSESSIKKKFLKRKGKTDSPWIKPARKRRRRSRKKPSGALGSESYKSSAGSAEQTAPGDSTGYMEVSLDSLDLRVKGILSSQAEGLANGPDVLETDGLQEVPLCSCRMETPKSREITTLANNQCMATESVDHEVLNRIQWSQIPV

SEQ ID NO: 4659 - protein, 433 aa, Homo sapiens
  VARIANT 1: note = misc_feature - Xaa can be any naturally occurring amino acid
XGEETPMAADEGSAEKQAGEAHMAADGETNGSCENSDASSHANAAKHTQDSARVNPQDGTNTLTRIAENGVSERDSEAAKQNHVTADDFVQTSVIGSNGYILNKPALQAQPLRTTSTLASSLPGHAAKTLPGGAGKGRTPSAFPQTPAAPPATLGEGSADTEDRKLPAPGADVKVHRARKTMPKSVVGLHAASKDPREVREARDHKEPKEEINKNISDFGRQQLLPPFPSLHQSLPQNQCYMATTKSQTAAAVSRKKKRRMGTYSLVPKKKTKVLKQRTVIEMFKSITHSTVGSKGEKDLGASSLHVNGESLEMDSDEDDSEELEEDDGHGAEQAAAFPTEDSRTSKESMSEADRAQKMDGESEEEQESVDTGEEEEGGDESDLSSESSIKKKFLKRKGKTDSPWIKPARKRRRRSRKKPSGALGSESYKSSA

SEQ ID NO: 4660 - protein, 112 aa, Homo sapiens
  VARIANT 1: note = misc_feature - Xaa can be any naturally occurring amino acid
XPALQAQPLRTTSTLASSLPGHAAKTLPGGAGKGRTPSAFPQTPAAPPATLGEGSADTEDRKLPAPGADVKVHRARKTMPKSVVGLVILCLLLLFPFSHLFCFNNGKWTLVH

SEQ ID NO: 4661 - protein, 230 aa, Homo sapiens
  VARIANT 1: note = misc_feature - Xaa can be any naturally occurring amino acid
XPFVLAAAVSRKKKRRMGTYSLVPKKKTKVLKQRTVIEMFKSITHSTVGSKGEKDLGASSLHVNGESLEMDSDEDDSEELEEDDGHGAEQAAAFPTEDSRTSKESMSEADRAQKSSESSIKKKFLKRKGKTDSPWIKPARKRRRRSRKKPSGALGSESYKSSAGSAEQTAPGDSTGYMEVSLDSLDLRVKGILSSQAEGLANGPDVLETDGLQEVPLCSCRMETPKSREI

SEQ ID NO: 4662 - protein, 108 aa, Homo sapiens
  VARIANT 1: note = misc_feature - Xaa can be any naturally occurring amino acid
XPLMEAAENNHLEAVKYLIKAGALVDPKDAEGSTCLHLAAKKGHYEVVQYLLSNGQMDVNCQDDGGWTPMIWATEYKHVDLVKLLLSKGSDINIRDNVGCIYSKYTLG

SEQ ID NO: 4663 - protein, 1176 aa, Homo sapiens
MAAAAGAAAAAAAEGEAPAEMGALLLEKETRGATERVHGSLGDTPRSEETLPKATPDSLEPAGPSSPASVTVTVGDEGADTPVGATPLIGDESENLEGDGDLRGGRILLGHATKSFPSSPSKGGSCPSRAKMSMTGAGKSPPSVQSLAMRLLSMPGAQGAAAAGSEPPPATTSPEGQPKVHRARKTMSKPGNGQPPVPEKRPPEIQHFRMSDDVHSLGKVTSDLAKRRKLNSGGGLSEELGSARRSGEVTLTKGDPGSLEEWETVVGDDFSLYYDSYSVDERVDSDSKSEVEALTEQLSEEEEEEEEEEEEEEEEEEEEEEEEDEESGNQSDRSGSSGRRKAKKKWRKDSPWVKPSRKRRKREPPRAKEPRGVSNDTSSLETERGFEELPLCSCRMEAPKIDRISERAGHKCMATESVDGELSGCNAAILKRETMRPSSRVALMVLCETHRARMVKHHCCPGCGYFCTAGTFLECHPDFRVAHRFHKACVSQLNGMVFCPHCGEDASEAQEVTIPRGDGVTPPAGTAAPAPPPLSQDVPGRADTSQPSARMRGHGEPRRPPCDPLADTIDSSGPSLTLPNGGCLSAVGLPLGPGREALEKALVIQESERRKKLRFHPRQLYLSVKQGELQKVILMLLDNLDPNFQSDQQSKRTPLHAAAQKGSVEICHVLLQAGANINAVDKQQRTPLMEAVVNNHLEVARYMVQRGGCVYSKEEDGSTCLHHAAKIGNLEMVSLLLSTGQVDVNAQDSGGWTPIIWAAEHKHIEVIRMLLTRGADVTLTDNEENICLHWASFTGSAAIAEVLLNARCDLHAVNYHGDTPLHIAARESYHDCVLLFLSRGANPELRNKEGDTAWDLTPERSDVWFALQLNRKLRLGVGNRAIRTEKIICRDVARGYENVPIPCVNGVDGEPCPEDYKYISENCETSTMNIDRNITHLQHCTCVDDCSSSNCLCGQLSIRCWYDKDGRLLQEFNKIEPPLIFECNQACSCWRNCKNRVVQSGIKVRLQLYRTAKMGWGVRALQTIPQGTFICEYVGELISDAEADVREDDSYLFDLDNKDGEVYCIDARYYGNISRFINHLCDPNIIPVRVFMLHQDLRFPRIAFFSSRDIRTGEELGFDYGDRFWDIKSKYFTCQCGSEKCKHSAEAIALEQSRLARLDPHPELLPELGSLPPVNT

SEQ ID NO: 4664 - protein, 1210 aa, Homo sapiens
MAAAAGAAAAAAAEGEAPAEMGALLLEKETRGATERVHGSLGDTPRSEETLPKATPDSLEPAGPSSPASVTVTVGDEGADTPVGATPLIGDESENLEGDGDLRGGRILLGHATKSFPSSPSKGGSCPSRAKMSMTGAGKSPPSVQSLAMRLLSMPGAQGAAAAGSEPPPATTSPEGQPKVHRARKTMSKPGNGQPPVPEKRPPEIQHFRMSDDVHSLGKVTSDLAKRRKLNSGGGLSEELGSARRSGEVTLTKGDPGSLEEWETVVGDDFSLYYDSYSVDERVDSDSKSEVEALTEQLSEEEEEEEEEEEEEEEEEEEEEEEEDEESGNQSDRSGSSGRRKAKKKWRKDSPWVKPSRKRRKREPPRAKEPRGVNGVGSSGPSEYMEVPLGSLELPSEGTLSPNHAGVSNDTSSLETERGFEELPLCSCRMEAPKIDRISERAGHKCMATESVDGELSGCNAAILKRETMRPSSRVALMVLCETHRARMVKHHCCPGCGYFCTAGTFLECHPDFRVAHRFHKACVSQLNGMVFCPHCGEDASEAQEVTIPRGDGVTPPAGTAAPAPPPLSQDVPGRADTSQPSARMRGHGEPRRPPCDPLADTIDSSGPSLTLPNGGCLSAVGLPLGPGREALEKALVIQESERRKKLRFHPRQLYLSVKQGELQKVILMLLDNLDPNFQSDQQSKRTPLHAAAQKGSVEICHVLLQAGANINAVDKQQRTPLMEAVVNNHLEVARYMVQRGGCVYSKEEDGSTCLHHAAKIGNLEMVSLLLSTGQVDVNAQDSGGWTPIIWAAEHKHIEVIRMLLTRGADVTLTDNEENICLHWASFTGSAAIAEVLLNARCDLHAVNYHGDTPLHIAARESYHDCVLLFLSRGANPELRNKEGDTAWDLTPERSDVWFALQLNRKLRLGVGNRAIRTEKIICRDVARGYENVPIPCVNGVDGEPCPEDYKYISENCETSTMNIDRNITHLQHCTCVDDCSSSNCLCGQLSIRCWYDKDGRLLQEFNKIEPPLIFECNQACSCWRNCKNRVVQSGIKVRLQLYRTAKMGWGVRALQTIPQGTFICEYVGELISDAEADVREDDSYLFDLDNKDGEVYCIDARYYGNISRFINHLCDPNIIPVRVFMLHQDLRFPRIAFFSSRDIRTGEELGFDYGDRFWDIKSKYFTCQCGSEKCKHSAEAIALEQSRLARLDPHPELLPELGSLPPVNT

SEQ ID NO: 4665 - protein, 1233 aa, Homo sapiens
MRGLPRGRGLMRARGRGRAAPPGSRGRGRGGPHRGRGRPRSLLSLPRAQASWTPQLSTGLTSPPVPCLPSQGEAPAEMGALLLEKETRGATERVHGSLGDTPRSEETLPKATPDSLEPAGPSSPASVTVTVGDEGADTPVGATPLIGDESENLEGDGDLRGGRILLGHATKSFPSSPSKGGSCPSRAKMSMTGAGKSPPSVQSLAMRLLSMPGAQGAAAAGSEPPPATTSPEGQPKVHRARKTMSKPGNGQPPVPEKRPPEIQHFRMSDDVHSLGKVTSDLAKRRKLNSGGGLSEELGSARRSGEVTLTKGDPGSLEEWETVVGDDFSLYYDSYSVDERVDSDSKSEVEALTEQLSEEEEEEEEEEEEEEEEEEEEEEEEDEESGNQSDRSGSSGRRKAKKKWRKDSPWVKPSRKRRKREPPRAKEPRGVSNDTSSLETERGFEELPLCSCRMEAPKIDRISERAGHKCMATESVDGELSGCNAAILKRETMRPSSRVALMVLCETHRARMVKHHCCPGCGYFCTAGTFLECHPDFRVAHRFHKACVSQLNGMVFCPHCGEDASEAQEVTIPRGDGVTPPAGTAAPAPPPLSQDVPGRADTSQPSARMRGHGEPRRPPCDPLADTIDSSGPSLTLPNGGCLSAVGLPLGPGREALEKALVIQESERRKKLRFHPRQLYLSVKQGELQKVILMLLDNLDPNFQSDQQSKRTPLHAAAQKGSVEICHVLLQAGANINAVDKQQRTPLMEAVVNNHLEVARYMVQRGGCVYSKEEDGSTCLHHAAKIGNLEMVSLLLSTGQVDVNAQDSGGWTPIIWAAEHKHIEVIRMLLTRGADVTLTDNEENICLHWASFTGSAAIAEVLLNARCDLHAVNYHGDTPLHIAARESYHDCVLLFLSRGANPELRNKEGDTAWDLTPERSDVWFALQLNRKLRLGVGNRAIRTEKIICRDVARGYENVPIPCVNGVDGEPCPEDYKYISENCETSTMNIDRNITHLQHCTCVDDCSSSNCLCGQLSIRCWYDKDGRLLQEFNKIEPPLIFECNQACSCWRNCKNRVVQSGIKVRLQLYRTAKMGWGVRALQTIPQGTFICEYVGELISDAEADVREDDSYLFDLDNKDGEVYCIDARYYGNISRFINHLCDPNIIPVRVFMLHQDLRFPRIAFFSSRDIRTGEELGFDYGDRFWDIKSKYFTCQCGSEKCKHSAEAIALEQSRLARLDPHPELLPELGSLPPVNT

SEQ ID NO: 4666 - protein, 1267 aa, Homo sapiens
MRGLPRGRGLMRARGRGRAAPPGSRGRGRGGPHRGRGRPRSLLSLPRAQASWTPQLSTGLTSPPVPCLPSQGEAPAEMGALLLEKETRGATERVHGSLGDTPRSEETLPKATPDSLEPAGPSSPASVTVTVGDEGADTPVGATPLIGDESENLEGDGDLRGGRILLGHATKSFPSSPSKGGSCPSRAKMSMTGAGKSPPSVQSLAMRLLSMPGAQGAAAAGSEPPPATTSPEGQPKVHRARKTMSKPGNGQPPVPEKRPPEIQHFRMSDDVHSLGKVTSDLAKRRKLNSGGGLSEELGSARRSGEVTLTKGDPGSLEEWETVVGDDFSLYYDSYSVDERVDSDSKSEVEALTEQLSEEEEEEEEEEEEEEEEEEEEEEEEDEESGNQSDRSGSSGRRKAKKKWRKDSPWVKPSRKRRKREPPRAKEPRGVNGVGSSGPSEYMEVPLGSLELPSEGTLSPNHAGVSNDTSSLETERGFEELPLCSCRMEAPKIDRISERAGHKCMATESVDGELSGCNAAILKRETMRPSSRVALMVLCETHRARMVKHHCCPGCGYFCTAGTFLECHPDFRVAHRFHKACVSQLNGMVFCPHCGEDASEAQEVTIPRGDGVTPPAGTAAPAPPPLSQDVPGRADTSQPSARMRGHGEPRRPPCDPLADTIDSSGPSLTLPNGGCLSAVGLPLGPGREALEKALVIQESERRKKLRFHPRQLYLSVKQGELQKVILMLLDNLDPNFQSDQQSKRTPLHAAAQKGSVEICHVLLQAGANINAVDKQQRTPLMEAVVNNHLEVARYMVQRGGCVYSKEEDGSTCLHHAAKIGNLEMVSLLLSTGQVDVNAQDSGGWTPIIWAAEHKHIEVIRMLLTRGADVTLTDNEENICLHWASFTGSAAIAEVLLNARCDLHAVNYHGDTPLHIAARESYHDCVLLFLSRGANPELRNKEGDTAWDLTPERSDVWFALQLNRKLRLGVGNRAIRTEKIICRDVARGYENVPIPCVNGVDGEPCPEDYKYISENCETSTMNIDRNITHLQHCTCVDDCSSSNCLCGQLSIRCWYDKDGRLLQEFNKIEPPLIFECNQACSCWRNCKNRVVQSGIKVRLQLYRTAKMGWGVRALQTIPQGTFICEYVGELISDAEADVREDDSYLFDLDNKDGEVYCIDARYYGNISRFINHLCDPNIIPVRVFMLHQDLRFPRIAFFSSRDIRTGEELGFDYGDRFWDIKSKYFTCQCGSEKCKHSAEAIALEQSRLARLDPHPELLPELGSLPPVNT

SEQ ID NO: 4667 - protein, 298 aa, Homo sapiens
  VARIANT 1: note = misc_feature - Xaa can be any naturally occurring amino acid
XSKRTPLHAAAQKGSVEICHVLLQAGANINAVDKQQRTPLMEAVVNNHLEVARYMVQRGGCVYSKEEDGSTCLHHAAKIGNLEMVSLLLSTGQVDVNAQGQLPPPSLPSHPQDSGGWTPIIWAAEHKHIEVIRMLLTRGADVTLTDNEENICLHWASFTGSAAIAEVLLNARCDLHAVNYHGDTPLHIAARESYHDCVLLFLSRGANPELRNKEGDTAWDLTPERSDVWFALQLNRKLRLGVGNRAIRTEKIICRDVARGYENVPIPCVNGVDGEPCPEDYKYISENCETSTMNIDRN

SEQ ID NO: 4668 - protein, 81 aa, Homo sapiens
MQGGNSGVRKREEEGDGAGAVAAPPAIDFPAEGPDPEYDEMWSCCVSQAGLERLASSDSPASAFQNAGIIDNLMFQQKSRC

SEQ ID NO: 4669 - protein, 164 aa, Homo sapiens
MQGGNSGVRKREEEGDGAGAVAAPPAIDFPAEGPDPEYDESDVPAEIQVLKEPLQQPTFPFAVANQLLLVSLLEHLSHVHEPNPLRSRQVFKLLCQTFIKMGLLSSFTCSDEFSSLRLHHNRAITHLMRSAKERVRQDPCEDISRIQKIRDEKFHFSPSFPNQH

SEQ ID NO: 4670 - protein, 630 aa, Homo sapiens
MQGGNSGVRKREEEGDGAGAVAAPPAIDFPAEGPDPEYDESDVPAEIQVLKEPLQQPTFPFAVANQLLLVSLLEHLSHVHEPNPLRSRQVFKLLCQTFIKMGLLSSFTCSDEFSSLRLHHNRAITHLMRSAKERVRQDPCEDISRIQKIRSREVALEAQTSRYLNEFEELAILGKGGYGRVYKVRNKLDGQYYAIKKILIKGATKTVCMKVLREVKVLAGLQHPNIVGYHTAWIEHVHVIQPRADRAAIELPSLEVLSDQEEDREQCGVKNDESSSSSIIFAEPTPEKEKRFGESDTENQNNKSVKYTTNLVIRESGELESTLELQENGLAGLSASSIVEQQLPLRRNSHLEESFTSTEESSEENVNFLGQTEAQYHLMLHIQMQLCELSLWDWIVERNKRGREYVDESACPYVMANVATKIFQELVEGVFYIHNMGIVHRDLKPRNIFLHGPDQQVKIGDFGLACTDILQKNTDWTNRNGKRTPTHTSRVGTCLYASPEQLEGSEYDAKSDMYSLGVVLLELFQPFGTEMERAEVLTGLRTGQLPESLRKRCPVQAKYIQHLTRRNSSQRPSAIQLLQSELFQNSGNVNLTLQMKIIEQEKEIAELKKQLNLLSQDKGVRDDGKDGGVG

SEQ ID NO: 4671 - protein, 72 aa, Homo sapiens
  VARIANT 1: note = misc_feature - Xaa can be any naturally occurring amino acid
XLAGLTPLGVAAVASAGTGGICWCSQRGAEGWGPTPQRRPVNLTLQMKIIEQEKEIAELKKQLNLLSQDKGA

SEQ ID NO: 4672 - protein, 267 aa, Homo sapiens
MTLGRRLACLFLACVLPALLLGGTALASEIVGGRRARPHAWPFMVSLQLRGGHFCGATLIAPNFVMSAAHCVANVNVRAVRVVLGAHNLSRREPTRQVFAVQRIFENGYDPVNLLNDIVILQLNGSATINANVQVAQLPAQGRRLGNGVQCLAMGWGLLGRNRGIASVLQELNVTVVTSLCRRSNVCTLVRGRQAGVCFGDSGSPLVCNGLIHGIASFVRGGCASGLYPDAFAPVAQFVNWIDSIIQRSEDNPCPHPRDPDPASRTH

SEQ ID NO: 4673 - protein, 267 aa, Homo sapiens; identical to SEQ ID NO: 4672

SEQ ID NO: 4674 - protein, 152 aa, Homo sapiens [sequence omitted]

SEQ ID NO: 4675 - protein, 700 aa, Homo sapiens
MAGLTAAAPRPGVLLLLLSILHPSRPGGVPGAIPGGVPGGVFYPALGPGGKPLKPVPGGLAGAGLGAGLGAFPAVTFPGALVPGGVADAAAAYKAAKAGAGLGGVPGVGGLGVSAAPSVPGAVVPQPGAGVKPGKVPGVGLPGVYPGGVLPGARFPGVGVLPGVPTGAGVKPKAPGVGGAFAGIPGVGPFGGPQPGVPLGYPIKAPKLPGGYGLPYTTGKLPYGYGPGGVAGAAGKAGYPTGTGVGPQAAAAAAAKAAAKFGAGAAGVLPGVGGAGVPGVPGAIPGIGGIAGVGTPAAAAAAAAAAKAAKYGAAAGLVPGGPGFGPGVVGVPGAGVPGVGVPGAGIPVVPGAGIPGAAVPGVVSPEAAAKAAAKAAKYGARPGVGVGGIPTYGVGAGGFPGFGVGVGGIPGVAGVPGVGGVPGVGGVPGVGISPEAQAAAAAKAAKYGLVPGVGVAPGVGVAPGVGVAPGVGLAPGVGVAPGVGVAPGVGVAPGIGPGGVAAAAKSAAKVAAKAQLRAAAGLGAGIPGLGVGVGVPGLGVGAGVPGLGVGAGVPGFGAVPGALAAAKAAKYGAAVPGVLGGLGALGGVGIPGGVVGAGPAAAAAAAKAAAKAAQFGLVGAAGLGGLGVGGLGVPGVGGLGGIPPAAAAKAAKYGAAGLGGVLGGAGQFPLGGVAARPGFGLSPIFPGGACLGKACGRKRK

SEQ ID NO: 4676 - protein, 677 aa, Homo sapiens
MAGLTAAAPRPGVLLLLLSILHPSRPGGVPGAIPGGVPGGVFYPALGPGGKPLKPVPGGLAGAGLGAGLGAFPAVTFPGALVPGGVADAAAAYKAAKAGAGLGGVPGVGGLGVSAGAVVPQPGAGVKPGKVPGVGLPGVYPGGVLPGARFPGVGVLPGVPTGAGVKPKAPGVGGAFAGIPGVGPFGGPQPGVPLGYPIKAPKLPGGYGLPYTTGKLPYGYGPGGVAGAAGKAGYPTGTGVGPQAAAAAAAKAAAKFGAGAAGVLPGVGGAGVPGVPGAIPGIGGIAGVGTPAAAAAAAAAAKAAKYGAAAGLVPGGPGFGPGVVGVPGAGVPGVGVPGAGIPVVPGAGIPGAAVPGVVSPEAAAKAAAKAAKYGARPGVGVGGIPTYGVGAGGFPGFGVGVGGIPGVAGVPGVGGVPGVGGVPGVGISPEAQAAAAAKAAKYGLVPGVGVAPGVGVAPGVGVAPGVGLAPGVGVAPGVGVAPGVGVAPGIGPGGVAAAAKSAAKVAAKAQLRAAAGLGAGIPGLGVGVGVPGLGVGAGVPGLGVGAGVPGFGAVPGALAAAKAAKYGAAVPGVLGGLGALGGVGIPGGVVGAGPAAAAAAAKAAAKAAQFGLVGAAGLGGLGVGGLGVPGVGGLGGIPPAAAAKAAKYGVAARPGFGLSPIFPGGACLGKACGRKRK

SEQ ID NO: 4677 - protein, 714 aa, Homo sapiens
MAGLTAAAPRPGVLLLLLSILHPSRPGGVPGAIPGGVPGGVFYPALGPGGKPLKPVPGGLAGAGLGAGLGAFPAVTFPGALVPGGVADAAAAYKAAKAGAGLGGVPGVGGLGVSAGAVVPQPGAGVKPGKVPGVGLPGVYPGGVLPGARFPGVGVLPGVPTGAGVKPKAPGVGGAFAGIPGVGPFGGPQPGVPLGYPIKAPKLPGGYGLPYTTGKLPYGYGPGGVAGAAGKAGYPTGTGVGPQAAAAAAAKAAAKFGAGAAGVLPGVGGAGVPGVPGAIPGIGGIAGVGTPAAAAAAAAAAKAAKYGAAAGLVPGGPGFGPGVVGVPGAGVPGVGVPGAGIPVVPGAGIPGAAVPGVVSPEAAAKAAAKAAKYGARPGVGVGGIPTYGVGAGGFPGFGVGVGGIPGVAGVPGVGGVPGVGGVPGVGISPEAQAAAAAKAAKYGVGTPAAAAAKAAAKAAQFGLVPGVGVAPGVGVAPGVGVAPGVGLAPGVGVAPGVGVAPGVGVAPGIGPGGVAAAAKSAAKVAAKAQLRAAAGLGAGIPGLGVGVGVPGLGVGAGVPGLGVGAGVPGFGAVPGALAAAKAAKYGAAVPGVLGGLGALGGVGIPGGVVGAGPAAAAAAAKAAAKAAQFGLVGAAGLGGLGVGGLGVPGVGGLGGIPPAAAAKAAKYGAAGLGGVLGGAGQFPLGGVAARPGFGLSPIFPGGACLGKACGRKRK

SEQ ID NO: 4678 - protein, 617 aa, Homo sapiens
MAGLTAAAPRPGVLLLLLSILHPSRPGGVPGAIPGGVPGGVFYPALGPGGKPLKPVPGGLAGAGLGAGLGAFPAVTFPGALVPGGVADAAAAYKAAKAGAGLGGVPGVGGLGVSAGAVVPQPGAGVKPGKVPGVGLPGVYPGGVLPGVGPFGGPQPGVPLGYPIKAPKLPGGYGLPYTTGKLPYGYGPGGVAGAAGKAGYPTGTGVGPQAAAAAAAKAAAKFGAGAAGVLPGVGGAGVPGVPGAIPGIGGIAGVGTPAAAAAAAAAAKAAKYGAAAGLVPGGPGFGPGVVGVPGAGVPGVGVPGAGIPVVPGAGIPGAAVPGVVSPEAAAKAAAKAAKYGARPGVGVGGIPTYGVGAGGFPGFGVGVGAEAQAAAAAKAAKYGLVPGVGVAPGVGVAPGVGVAPGVGLAPGVGVAPGVGVAPGVGVAPGIGPGGVAAAAKSAAKVAAKAQLRAAAGLGAGIPGLGVGVGVPGLGVGAGVPGLGVGAGVPGFGAVPGALAAAKAAKYGAAVPGVLGGLGALGGVGIPGGVVGAGPAAAAAAAKAAAKAAQFGLVGAAGLGGLGVGGLGVPGVGGLGGIPPAAAAKAAKYGVAARPGFGLSPIFPGGACLGKACGRKRK

SEQ ID NO: 4679 - protein, 294 aa, Homo sapiens
MAGLTAAAPRPGVLLLLLSILHPSRPGGVPGAIPGGVPGGVFYPGAGLGALGGGALGPGGKPLKPGLGAFPAVTFPGALVPGGVADAAAAYKAAKAGAGLGGVPGVGGLGVSAGAVVPQPGAGVKPGKVPGVGLPGVYPGGVLPGARFPGVGVLPGVPTGAGVKPKAPGVGPFGGPQPGVPLGYPIKAPKLPGGYGLPYTTGKLPYGYGPGGVAGAAGKAGYPTGTGVGPQAAAAAAAKAAAKFGAGAAGVLPGVGGAGVPGVPGAIPGIGGIAGVGTPAAAAAAAAAAKAAKY

SEQ ID NO: 4680 - protein, 643 aa, Homo sapiens
MAGLTAAAPRPGVLLLLLSILHPSRPGGVPGAIPGGVPGGVFYPGAGLGALGGGALGPGGKPLKPGLGAFPAVTFPGALVPGGVADAAAAYKAAKAGAGLGGVPGVGGLGVSAGAVVPQPGAGVKPGKVPGVGLPGVYPGGVLPGARFPGVGVLPGVPTGAGVKPKAPGVGPFGGPQPGVPLGYPIKAPKLPGYGPGGVAGAAGKAGYPTGTGVGPQAAAAAAAKAAAKFGAGAAGVLPGVGGAGVPGVPGAIPGIGGIAGVGTPAAAAAAAAAAKAAKYGAAAGLVPGGPGFGPGVVGVPGAGVPGVGVPGAGIPVVPGAGIPGAAVPGVVSPEAAAKAAAKAAKYGARPGVGVGGIPTYGVGAGGFPGFGVGVGAEAQAAAAAKAAKYGLVPGVGVAPGVGVAPGVGVAPGVGLAPGVGVAPGVGVAPGVGVAPGIGPGGVAAAAKSAAKVAAKAQLRAAAGLGAGIPGLGVGVGVPGLGVGAGVPGLGVGAGVPGFGAVPGALAAAKAAKYGAAVPGVLGGLGALGGVGIPGGVVGAGPAAAAAAAKAAAKAAQFGLVGAAGLGGLGVGGLGVPGVGGLGGIPPAAAAKAAKYGAAGLGGVLGGAGQFPLGGVAARPGFGLSPIFPGGACLGKACGRKRK

SEQ ID NO: 4681 - protein, 168 aa, Homo sapiens
MAGLTAAAPRPGVLLLLLSILHPSRPGGVPGAIPGGVPGGVFYPGAGLGALGGGALGPGGKPLKPGVGPFGGPQPGVPLGYPIKAPKLPGYGPGGVAGAAGKAGYPTGTGVGPQAAAAAAAKAAAKFGAGAAGVLPGVGGAGVPGVPGAIPGIGGIAGVGTPAAAAAA

SEQ ID NO: 4682 - protein, 711 aa, Homo sapiens
MAGLTAAAPRPGVLLLLLSILHPSRPGGVPGAIPGGVPGGVFYPGAGLGALGGGALGPGGKPLKPVPGGLAGAGLGAGLGAFPAVTFPGALVPGGVADAAAAYKAAKAGAGLGGVPGVGGLGVSAAPSVPGAVVPQPGAGVKPGKVPGVGLPGVYPGGVLPGARFPGVGVLPGVPTGAGVKPKAPGVGGAFAGIPGVGPFGGPQPGVPLGYPIKAPKLPGGYGLPYTTGKLPYGYGPGGVAGAAGKAGYPTGTGVGPQAAAAAAAKAAAKFGAGAAGVLPGVGGAGVPGVPGAIPGIGGIAGVGTPAAAAAAAAAAKAAKYGAAAGLVPGGPGFGPGVVGVPGAGVPGVGVPGAGIPVVPGAGIPGAAVPGVVSPEAAAKAAAKAAKYGARPGVGVGGIPTYGVGAGGFPGFGVGVGGIPGVAGVPGVGGVPGVGGVPGVGISPEAQAAAAAKAAKYGVGTPAAAAAKAAAKAAQFGLVPGVGVAPGVGVAPGVGVAPGVGLAPGVGVAPGVGVAPGVGVAPGIGPGGVAAAAKSAAKVAAKAQLRAAAGLGAGIPGLGVGVGVPGLGVGAGVPGLGVGAGVPGFGAVPGALAAAKAAKYGAAVPGVLGGLGALGGVGIPGGVVGAGPAAAAAAAKAAAKAAQFGLVGAAGLGGLGVGGLGVPGVGGLGGIPPAAAAKAAKYGVAARPGFGLSPIFPGGACLGKACGRKRK

SEQ ID NO: 4683 - protein, 692 aa, Homo sapiens
MAGLTAAAPRPGVLLLLLSILHPSRPGGVPGAIPGGVPGGVFYPGAGLGALGGGALGPGGKPLKPVPGGLAGAGLGAGLGAFPAVTFPGALVPGGVADAAAAYKAAKAGAGLGGVPGVGGLGVSAAPSVPGAVVPQPGAGVKPGKVPGVGLPGVYPGGVLPGARFPGVGVLPGVPTGAGVKPKAPGVGGAFAGIPGVGPFGGPQPGVPLGYPIKAPKLPGGYGLPYTTGKLPYGYGPGGVAGAAGKAGYPTGTGVGPQAAAAAAAKAAAKFGAGAAGVLPGVGGAGVPGVPGAIPGIGGIAGVGTPAAAAAAAAAAKAAKYGAAAGLVPGGPGFGPGVVGVPGAGVPGVGVPGAGIPVVPGAGIPGAAVPGVVSPEAAAKAAAKAAKYGARPGVGVGGIPTYGVGAGGFPGFGVGVGGIPGVAGVPGVGGVPGVGGVPGVGISPEAQAAAAAKAAKYGLVPGVGVAPGVGVAPGVGVAPGVGLAPGVGVAPGVGVAPGVGVAPGIGPGGVAAAAKSAAKVAAKAQLRAAAGLGAGIPGLGVGVGVPGLGVGAGVPGLGVGAGVPGFGAVPGALAAAKAAKYGAAVPGVLGGLGALGGVGIPGGVVGAGPAAAAAAAKAAAKAAQFGLVGAAGLGGLGVGGLGVPGVGGLGGIPPAAAAKAAKYGVAARPGFGLSPIFPGGACLGKACGRKRK

SEQ ID NO: 4684 - protein, 176 aa, Homo sapiens
MAGLTAAAPRPGVLLLLLSILHPSRPGGVPGAIPGGVPGGVFYPGAGLGALGGGALGPGGKPLKPVPGGLAGAGLGAGLGAFPAVTFPGALVPGGVADAAAAYKAAKAGAGLGGVPGVGGLGVSAGAVVPQPGAGVKPGKVPGVGGAFAGIPGVGPFGGPQPGVPLGYPIKAPKLP

SEQ ID NO: 4685 - protein, 724 aa, Homo sapiens
MAGLTAAAPRPGVLLLLLSILHPSRPGGVPGAIPGGVPGGVFYPGAGLGALGGGALGPGGKPLKPVPGGLAGAGLGAGLGAFPAVTFPGALVPGGVADAAAAYKAAKAGAGLGGVPGVGGLGVSAGAVVPQPGAGVKPGKVPGVGLPGVYPGGVLPGARFPGVGVLPGVPTGAGVKPKAPGVGGAFAGIPGVGPFGGPQPGVPLGYPIKAPKLPGGYGLPYTTGKLPYGYGPGGVAGAAGKAGYPTGTGVGPQAAAAAAAKAAAKFGAGAAGVLPGVGGAGVPGVPGAIPGIGGIAGVGTPAAAAAAAAAAKAAKYGAAAGLVPGGPGFGPGVVGVPGAGVPGVGVPGAGIPVVPGAGIPGAAVPGVVSPEAAAKAAAKAAKYGARPGVGVGGIPTYGVGAGGFPGFGVGVGGIPGVAGVPGVGGVPGVGGVPGVGISPEAQAAAAAKAAKYGVGTPAAAAAKAAAKAAQFGLVPGVGVAPGVGVAPGVGVAPGVGLAPGVGVAPGVGVAPGVGVAPGIGPGGVAAAAKSAAKVAAKAQLRAAAGLGAGIPGLGVGVGVPGLGVGAGVPGLGVGAGVPGFGAVPGALAAAKAAKYGAAVPGVLGGLGALGGVGIPGGVVGAGPAAAAAAAKAAAKAAQFGLVGAAGLGGLGVGGLGVPGVGGLGGIPPAAAAKAAKYGAAGLGGVLGGAGQFPLGGVAARPGFGLSPIFPGGACLGKACGRKRK

SEQ ID NO: 4686 - protein, 757 aa, Homo sapiens
MAGLTAAAPRPGVLLLLLSILHPSRPGGVPGAIPGGVPGGVFYPGAGLGALGGGALGPGGKPLKPVPGGLAGAGLGAGLGAFPAVTFPGALVPGGVADAAAAYKAAKAGAGLGGVPGVGGLGVSAGAVVPQPGAGVKPGKVPGVGLPGVYPGGVLPGARFPGVGVLPGVPTGAGVKPKAPGVGGAFAGIPGVGPFGGPQPGVPLGYPIKAPKLPGGYGLPYTTGKLPYGYGPGGVAGAAGKAGYPTGTGVGPQAAAAAAAKAAAKFGAGAAGVLPGVGGAGVPGVPGAIPGIGGIAGVGTPAAAAAAAAAAKAAKYGAAAGLVPGGPGFGPGVVGVPGAGVPGVGVPGAGIPVVPGAGIPGAAVPGVVSPEAAAKAAAKAAKYGARPGVGVGGIPTYGVGAGGFPGFGVGVGGIPGVAGVPGVGGVPGVGGVPGVGISPEAQAAAAAKAAKYGVGTPAAAAAKAAAKAAQFGLVPGVGVAPGVGVAPGVGVAPGVGLAPGVGVAPGVGVAPGVGVAPGIGPGGVAAAAKSAAKVAAKAQLRAAAGLGAGIPGLGVGVGVPGLGVGAGVPGLGVGAGVPGFGAGADEGVRRSLSPELREGDPSSSQHLPSTPSSPRVPGALAAAKAAKYGAAVPGVLGGLGALGGVGIPGGVVGAGPAAAAAAAKAAAKAAQFGLVGAAGLGGLGVGGLGVPGVGGLGGIPPAAAAKAAKYGAAGLGGVLGGAGQFPLGGVAARPGFGLSPIFPGGACLGKACGRKRK

SEQ ID NO: 4687 - protein, 786 aa, Homo sapiens
MAGLTAAAPRPGVLLLLLSILHPSRPGGVPGAIPGGVPGGVFYPGAGLGALGGGALGPGGKPLKPVPGGLAGAGLGAGLGAFPAVTFPGALVPGGVADAAAAYKAAKAGAGLGGVPGVGGLGVSAGAVVPQPGAGVKPGKVPGVGLPGVYPGGVLPGARFPGVGVLPGVPTGAGVKPKAPGVGGAFAGIPGVGPFGGPQPGVPLGYPIKAPKLPGGYGLPYTTGKLPYGYGPGGVAGAAGKAGYPTGTGVGPQAAAAAAAKAAAKFGAGAAGVLPGVGGAGVPGVPGAIPGIGGIAGVGTPAAAAAAAAAAKAAKYGAAAGLVPGGPGFGPGVVGVPGAGVPGVGVPGAGIPVVPGAGIPGAAVPGVVSPEAAAKAAAKAAKYGARPGVGVGGIPTYGVGAGGFPGFGVGVGGIPGVAGVPGVGGVPGVGGVPGVGISPEAQAAAAAKAAKYGAAGAGVLGGLVPGAPGAVPGVPGTGGVPGVGTPAAAAAKAAAKAAQFGLVPGVGVAPGVGVAPGVGVAPGVGLAPGVGVAPGVGVAPGVGVAPGIGPGGVAAAAKSAAKVAAKAQLRAAAGLGAGIPGLGVGVGVPGLGVGAGVPGLGVGAGVPGFGAGADEGVRRSLSPELREGDPSSSQHLPSTPSSPRVPGALAAAKAAKYGAAVPGVLGGLGALGGVGIPGGVVGAGPAAAAAAAKAAAKAAQFGLVGAAGLGGLGVGGLGVPGVGGLGGIPPAAAAKAAKYGAAGLGGVLGGAGQFPLGGVAARPGFGLSPIFPGGACLGKACGRKRK

SEQ ID NO: 4688 - protein, 706 aa, Homo sapiens
MAGLTAAAPRPGVLLLLLSILHPSRPGGVPGAIPGGVPGGVFYPGAGLGALGGGALGPGGKPLKPVPGGLAGAGLGAGLGAFPAVTFPGALVPGGVADAAAAYKAAKAGAGLGGVPGVGGLGVSAGAVVPQPGAGVKPGKVPGVGLPGVYPGGVLPGARFPGVGVLPGVPTGAGVKPKAPGVGGAFAGIPGVGPFGGPQPGVPLGYPIKAPKLPGGYGLPYTTGKLPYGYGPGGVAGAAGKAGYPTGTGVGPQAAAAAAAKAAAKFGAGAAGVLPGVGGAGVPGVPGAIPGIGGIAGVGTPAAAAAAAAAAKAAKYGAAAGLVPGGPGFGPGVVGVPGAGVPGVGVPGAGIPVVPGAGIPGAAVPGVVSPEAAAKAAAKAAKYGARPGVGVGGIPTYGVGAGGFPGFGVGVGGIPGVAGVPGVGGVPGVGGVPGVGISPEAQAAAAAKAAKYGVGTPAAAAAKAAAKAAQFGLVPGVGVAPGVGVAPGVGVAPGVGLAPGVGVAPGVGVAPGVGVAPGIGPGGVAAAAKSAAKVAAKAQLRAAAGLGAGIPGLGVGVGVPGLGVGAGVPGLGVGAGVPGFGAVPGALAAAKAAKYGAAVPGVLGGLGALGGVGIPGGVVGAGPAAAAAAAKAAAKAAQFGLVGAAGLGGLGVGGLGVPGVGGLGGIPPAAAAKAAKYGVAARPGFGLSPIFPGGACLGKACGRKRK

SEQ ID NO: 4689 - protein, 730 aa, Homo sapiens
MAGLTAAAPRPGVLLLLLSILHPSRPGGVPGAIPGGVPGGVFYPGAGLGALGGGALGPGGKPLKPVPGGLAGAGLGAGLGAFPAVTFPGALVPGGVADAAAAYKAAKAGAGLGGVPGVGGLGVSAGAVVPQPGAGVKPGKVPGVGLPGVYPGGVLPGARFPGVGVLPGVPTGAGVKPKAPGVGGAFAGIPGVGPFGGPQPGVPLGYPIKAPKLPGGYGLPYTTGKLPYGYGPGGVAGAAGKAGYPTGTGVGPQAAAAAAAKAAAKFGAGAAGVLPGVGGAGVPGVPGAIPGIGGIAGVGTPAAAAAAAAAAKAAKYGAAAGLVPGGPGFGPGVVGVPGAGVPGVGVPGAGIPVVPGAGIPGAAVPGVVSPEAAAKAAAKAAKYGARPGVGVGGIPTYGVGAGGFPGFGVGVGGIPGVAGVPGVGGVPGVGGVPGVGISPEAQAAAAAKAAKYGVGTPAAAAAKAAAKAAQFALLNLAGLVPGVGVAPGVGVAPGVGVAPGVGLAPGVGVAPGVGVAPGVGVAPGIGPGGVAAAAKSAAKVAAKAQLRAAAGLGAGIPGLGVGVGVPGLGVGAGVPGLGVGAGVPGFGAVPGALAAAKAAKYGAAVPGVLGGLGALGGVGIPGGVVGAGPAAAAAAAKAAAKAAQFGLVGAAGLGGLGVGGLGVPGVGGLGGIPPAAAAKAAKYGAAGLGGVLGGAGQFPLGGVAARPGFGLSPIFPGGACLGKACGRKRK

SEQ ID NO: 4690 - protein, 705 aa, Homo sapiens
MAGLTAAAPRPGVLLLLLSILHPSRPGGVPGAIPGGVPGGVFYPGAGLGALGGGALGPGGKPLKPVPGGLAGAGLGAGLGAFPAVTFPGALVPGGVADAAAAYKAAKAGAGLGGVPGVGGLGVSAGAVVPQPGAGVKPGKVPGVGLPGVYPGGVLPGARFPGVGVLPGVPTGAGVKPKAPGVGGAFAGIPGVGPFGGPQPGVPLGYPIKAPKLPGGYGLPYTTGKLPYGYGPGGVAGAAGKAGYPTGTGVGPQAAAAAAAKAAAKFGAGAAGVLPGVGGAGVPGVPGAIPGIGGIAGVGTPAAAAAAAAAAKAAKYGAAAGLVPGGPGFGPGVVGVPGAGVPGVGVPGAGIPVVPGAGIPGAAVPGVVSPEAAAKAAAKAAKYGARPGVGVGGIPTYGVGAGGFPGFGVGVGGIPGVAGVPGVGGVPGVGGVPGVGISPEAQAAAAAKAAKYGLVPGVGVAPGVGVAPGVGVAPGVGLAPGVGVAPGVGVAPGVGVAPGIGPGGVAAAAKSAAKVAAKAQLRAAAGLGAGIPGLGVGVGVPGLGVGAGVPGLGVGAGVPGFGAVPGALAAAKAAKYGAAVPGVLGGLGALGGVGIPGGVVGAGPAAAAAAAKAAAKAAQFGLVGAAGLGGLGVGGLGVPGVGGLGGIPPAAAAKAAKYGAAGLGGVLGGAGQFPLGGVAARPGFGLSPIFPGGACLGKACGRKRK

SEQ ID NO: 4691 - protein, 658 aa, Homo sapiens
MAGLTAAAPRPGVLLLLLSILHPSRPGGVPGAIPGGVPGGVFYPGAGLGALGGGALGPGGKPLKPVPGGLAGAGLGAGLGAFPAVTFPGALVPGGVADAAAAYKAAKAGAGLGGVPGVGGLGVSAGAVVPQPGAGVKPGKVPGVGLPGVYPGGVLPGARFPGVGVLPGVPTGAGVKPKAPGVGGAFAGIPGVGPFGGPQPGVPLGYPIKAPKLPGYGPGGVAGAAGKAGYPTGTGVGPQAAAAAAAKAAAKFGAGAAGVLPGVGGAGVPGVPGAIPGIGGIAGVGTPAAAAAAAAAAKAAKYGAAAGLVPGGPGFGPGVVGVPGAGVPGVGVPGAGIPVVPGAGIPGAAVPGVVSPEAAAKAAAKAAKYGARPGVGVGGIPTYGVGAGGFPGFGVGVGGIPGVAGVPGVGGVPGVGGVPGVGISPEAQAAAAAKAAKYGLVPGVGVAPGVGVAPGVGVAPGVGLAPGVGVAPGVGVAPGVGVAPGIGPGGVAGAAAGLGAGIPGLGVGVGVPGLGVGAGVPGLGVGAGVPGFGAVPGALAAAKAAKYGAAVPGVLGGLGALGGVGIPGGVVGAGPAAAAAAAKAAAKAAQFGLVGAAGLGGLGVGGLGVPGVGGLGGIPPAAAAKAAKYGVAARPGFGLSPIFPGGACLGKACGRKRK

SEQ ID NO: 4692 - protein, 214 aa, Homo sapiens
MAGLTAAAPRPGVLLLLLSILHPSRPGGVPGAIPGGVPGGVFYPGAGLGALGGGALGPGGKPLKPVPGGLAGAGLGAGLGAFPAVTFPGALVPGGVADAAAAYKAAKAGAGLGGVPGVGGLGVSAGAVVPQPGAGVKPGKVPGVGLPGVYPGGVLPGVGPFGGPQPGVPLGYPIKAPKLPGGYGLPYTTGKLPYGYGPGGVAGAAGKAGYPTGT

SEQ ID NO: 4693 - protein, 167 aa, Homo sapiens [sequence omitted]

SEQ ID NO: 4694 - protein, 570 aa, Homo sapiens
MAGLTAAAPRPGVLLLLLSILHPSRPGGVPGAIPGGVPGGVFYPGAGLGALGGGALGPGGKPLKPVPGGLAGAGLGAGVGGAFAGIPGVGPFGGPQPGVPLGYPIKAPKLPGYGPGGVAGAAGKAGYPTGTGVGPQAAAAAAAKAAAKFGAGAAGVLPGVGGAGVPGVPGAIPGIGGIAGVGTPAAAAAAAAAAKAAKYGAAAGLVPGGPGFGPGVVGVPGAGVPGVGVPGAGIPVVPGAGIPGAAVPGVVSPEAAAKAAAKAAKYGARPGVGVGGIPTYGVGAGGFPGFGVGVGGIPGVAGVPGVGGVPGVGGVPGVGISPEAQAAAAAKAAKYGLVPGVGVAPGVGVAPGVGVAPGVGLAPGVGVAPGVGVAPGVGVAPGIGPGGVAAAAKSAAKVAAKAQLRAAAGLGAGIPGLGVGVGVPGLGVGAGVPGLGVGAGVPGFGAVPGALAAAKAAKYGAAVPGVLGGLGALGGVGIPGGVVGAGPAAAAAAAKAAAKAAQFGLVGAAGLGGLGVGGLGVPGVGGLGGIPPAAAAKAAKYGVAARPGFGLSPIFPGGACLGKACGRKRK

SEQ ID NO: 4695 - protein, 68 aa, Homo sapiens
MAGLTAAAPRPGVLLLLLSILHPSRPGGVPGAIPGGVPGGVFYPGNVHETSTHPGHADDADVHNRCTF

SEQ ID NO: 4696 - protein, 60 aa, Homo sapiens
VTFPGALVPGGVADAAAAYKAAKAGAGLGGVPGVGGLGVSAGAVVPQPGAGVKPGKVPAL

SEQ ID NO: 4697 - protein, 47 aa, Homo sapiens
DEEELLTSTGFEYQQVAFQPSILTEPPTEDHLLQNTLWPEVQKLASF

SEQ ID NO: 4698 - protein, 57 aa, Homo sapiens
MCLQTLNFGNGFALALCLSFLPNTDVPILACGNDDCRIHIFAQQNDQFQKVLSLCGH

SEQ ID NO: 4699 - protein, 120 aa, Homo sapiens
MVAPVLETSHVFCCPNRVRGVLNWSSGPRGLLAFGTSCSVVLYDPLKRVVVTNLNGHTARVNCIQWICKQDGSPSTELVSGGSDNQVIHWEIEDNQAMKDLFMRCMLFTRGGHQILHYVH

SEQ ID NO: 4700 - protein, 101 aa, Homo sapiens
MVAPVLETSHVFCCPNRVRGVLNWSSGPRGLLAFGTSCSVVLYDPLKRVVVTNLNGHTARVNCIQWICKQDGSPSTELVSGGSDNQVIHWEIEDNQIWARL

SEQ ID NO: 4701 - protein, 756 aa, Homo sapiens
MVAPVLETSHVFCCPNRVRGVLNWSSGPRGLLAFGTSCSVVLYDPLKRVVVTNLNGHTARVNCIQWICKQDGSPSTELVSGGSDNQVIHWEIEDNQLLKAVHLQGHEGPVYAVHAVYQRRTSDPALCTLIVSAAADSAVRLWSKKGPEGRDLFLASCSQDCLIRIWKLYIKSTSLETQDDDNIRLKENTFTIENESVKIAFAVTLETVLAGHENWVNAVHWQPVFYKDGVLQQPVRLLSASMDKTMILWAPDEESGVWLEQVRVGEVGGNTLGFYDCQFNEDGSMIIAHAFHGALHLWKQNTVNPREWTPEIVISGHFDGVQDLVWDPEGEFIITVGTDQTTRLFAPWKRKDQSQVTWHEIARPQIHGYDLKCLAMINRFQFVSGADEKVLRVFSAPRNFVENFCAITGQSLNHVLCNQDSDLPEGATVPALGLSNKAVFQGDIASQPSDEEELLTSTGFEYQQVAFQPSILTEPPTEDHLLQNTLWPEVQKLYGHGYEIFCVTCNSSKTLLASACKAAKKEHAAIILWNTTSWKQVQNLVFHSLTVTQMAFSPNEKFLLAVSRDRTWSLWKKQDTISPEFEPVFSLFAFTNKITSVHSRIIWSCDWSPDSKYFFTGSRDKKVVVWGECDSTDDCIEHNIGPCSSVLDVGGAVTAVSVCPVLHPSQRYVVAVGLECGKICLYTWKKTDQVPEINDWTHCVETSQSQSHTLAIRKLCWKNCSGKTEQKEAEGAEWLHFASCGEDHTVKIHRVNKCAL

SEQ ID NO: 4702 - protein, 826 aa, Homo sapiens
MVAPVLETSHVFCCPNRVRGVLNWSSGPRGLLAFGTSCSVVLYDPLKRVVVTNLNGHTARVNCIQWICKQDGSPSTELVSGGSDNQVIHWEIEDNQLLKAVHLQGHEGPVYAVHAVYQRRTSDPALCTLIVSAAADSAVRLWSKKGPEVMCLQTLNFGNGFALALCLSFLPNTDVPILACGNDDCRIHIFAQQNDQFQKVLSLCGHEDWIRGVEWAAFGRDLFLASCSQDCLIRIWKLYIKSTSLETQDDDNIRLKENTFTIENESVKIAFAVTLETVLAGHENWVNAVHWQPVFYKDGVLQQPVRLLSASMDKTMILWAPDEESGVWLEQVRVGEVGGNTLGFYDCQFNEDGSMIIAHAFHGALHLWKQNTVNPREWTPEIVISGHFDGVQDLVWDPEGEFIITVGTDQTTRLFAPWKRKDQSQVTWHEIARPQIHGYDLKCLAMINRFQFVSGADEKVLRVFSAPRNFVENFCAITGQSLNHVLCNQDSDLPEGATVPALGLSNKAVFQGDIASQPSDEEELLTSTGFEYQQVAFQPSILTEPPTEDHLLQNTLWPEVQKLYGHGYEIFCVTCNSSKTLLASACKAAKKEHAAIILWNTTSWKQVQNLVFHSLTVTQMAFSPNEKFLLAVSRDRTWSLWKKQDTISPEFEPVFSLFAFTNKITSVHSRIIWSCDWSPDSKYFFTGSRDKKVVVWGECDSTDDCIEHNIGPCSSVLDVGGAVTAVSVCPVLHPSQRYVVAVGLECGKICLYTWKKTDQVPEINDWTHCVETSQSQSHTLAIRKLCWKNCSGKTEQKEAEGAEWLHFASCGEDHTVKIHRVNKCAL

SEQ ID NO: 4703 - protein, 705 aa, Homo sapiens
MVAPVLETSHVFCCPNRVRGVLNWSSGPRGLLAFGTSCSVVLYDPLKRVVVTNLNGHTARVNCIQWICKQDGSPSTELVSGGSDNQVIHWEIEDNQLLKAVHLQGHEGPVYAVHAVYQRRTSDPALCTLIVSAAADSAVRLWSKKGPEVMCLQTLNFGNGFALALCLSFLPNTDVPILACGNDDCRIHIFAQQNDQFQKVLSLCGHEDWIRGVEWAAFGRDLFLASCSQDCLIRIWKLYIKSTSLETQDDDNIRLKENTFTIENESVKIAFAVTLETVLAGHENWVNAVHWQPVFYKDGVLQQPVRLLSASMDKTMILWAPDEESGVWLEQVRVGEVGGNTLGFYDCQFNEDGSMIIAHAFHGALHLWKQNTVNPREWTPEIVISGHFDGVQDLVWDPEGEFIITVGTDQTTRLFAPWKRKDQSQVTWHEIARPQIHGYDLKCLAMINRFQFVSGADEKVLRVFSAPRNFVENFCAITGQSLNHVLCNQDSDLPEGATVPALGLSNKAVFQGDIASQPSDEEELLTSTGFEYQQVAFQPSILTEPPTEDHLLQNTLWPEVQKLYGHGYEIFCVTCNSSKTLLASACKAAKKEHAAIILWNTTSWKQVQNLVFHSLTVTQMAFSPNEKFLLAVSRDRTWSLWKKQDTISPEFVELFGLVIGVLTASISSLGVETKRWLSGVSATPLMTVLSTTLAPAPQSWTWVGL

SEQ ID NO: 4704 - protein, 891 aa, Homo sapiens
MVAPVLETSHVFCCPNRVRGVLNWSSGPRGLLAFGTSCSVVLYDPLKRVVVTNLNGHTARVNCIQWICKQDGSPSTELVSGGSDNQVIHWEIEDNQLLKAVHLQGHEGPVYAVHAVYQRRTSDPALCTLIVSAAADSAVRLWSKKGPEVMCLQTLNFGNGFALALCLSFLPNTDVTWKTGQVERGRAWKPPASLALCSRSCDSMVSCYASILCKALWKEKLHTFWHHNRISFLPSAFRPIPILACGNDDCRIHIFAQQNDQFQKVLSLCGHEDWIRGVEWAAFGRDLFLASCSQDCLIRIWKLYIKSTSLETQDDDNIRLKENTFTIENESVKIAFAVTLETVLAGHENWVNAVHWQPVFYKDGVLQQPVRLLSASMDKTMILWAPDEESGVWLEQVRVGEVGGNTLGFYDCQFNEDGSMIIAHAFHGALHLWKQNTVNPREWTPEIVISGHFDGVQDLVWDPEGEFIITVGTDQTTRLFAPWKRKDQSQVTWHEIARPQIHGYDLKCLAMINRFQFVSGADEKVLRVFSAPRNFVENFCAITGQSLNHVLCNQDSDLPEGATVPALGLSNKAVFQGDIASQPSDEEELLTSTGFEYQQVAFQPSILTEPPTEDHLLQNTLWPEVQKLYGHGYEIFCVTCNSSKTLLASACKAAKKEHAAIILWNTTSWKQVQNLVFHSLTVTQMAFSPNEKFLLAVSRDRTWSLWKKQDTISPEFEPVFSLFAFTNKITSVHSRIIWSCDWSPDSKYFFTGSRDKKVVVWGECDSTDDCIEHNIGPCSSVLDVGGAVTAVSVCPVLHPSQRYVVAVGLECGKICLYTWKKTDQVPEINDWTHCVETSQSQSHTLAIRKLCWKNCSGKTEQKEAEGAEWLHFASCGEDHTVKIHRVNKCAL

SEQ ID NO: 4705 - protein, 800 aa, Homo sapiens
MVAPVLETSHVFCCPNRVRGVLNWSSGPRGLLAFGTSCSVVLYDPLKRVVVTNLNGHTARVNCIQWICKQDGSPSTELVSGGSDNQVIHWEIEDNQLLKAVHLQGHEGPVYAVHAVYQRRTSDPALCTLIVSAAADSAVRLWSKKGPEVPILACGNDDCRIHIFAQQNDQFQKVLSLCGHEDWIRGVEWAAFGRDLFLASCSQDCLIRIWKLYIKSTSLETQDDDNIRLKENTFTIENESVKIAFAVTLETVLAGHENWVNAVHWQPVFYKDGVLQQPVRLLSASMDKTMILWAPDEESGVWLEQVRVGEVGGNTLGFYDCQFNEDGSMIIAHAFHGALHLWKQNTVNPREWTPEIVISGHFDGVQDLVWDPEGEFIITVGTDQTTRLFAPWKRKDQSQVTWHEIARPQIHGYDLKCLAMINRFQFVSGADEKVLRVFSAPRNFVENFCAITGQSLNHVLCNQDSDLPEGATVPALGLSNKAVFQGDIASQPSDEEELLTSTGFEYQQVAFQPSILTEPPTEDHLLQNTLWPEVQKLYGHGYEIFCVTCNSSKTLLASACKAAKKEHAAIILWNTTSWKQVQNLVFHSLTVTQMAFSPNEKFLLAVSRDRTWSLWKKQDTISPEFEPVFSLFAFTNKITSVHSRIIWSCDWSPDSKYFFTGSRDKKVVVWGECDSTDDCIEHNIGPCSSVLDVGGAVTAVSVCPVLHPSQRYVVAVGLECGKICLYTWKKTDQVPEINDWTHCVETSQSQSHTLAIRKLCWKNCSGKTEQKEAEGAEWLHFASCGEDHTVKIHRVNKCAL

SEQ ID NO: 4706 - protein, 756 aa, Homo sapiens
MVAPVLETSHVFCCPNRVRGVLNWSSGPRGLLAFGTSCSVVLYDPLKRVVVTNLNGHTARVNCIQWICKQDGSPSTELVSGGSDNQVIHWEIEDNQLLKAVHLQGHEGPVYAVHAVYQRRTSDPALCTLIVSAAADSAVRLWSKKGPEVPILACGNDDCRIHIFAQQNDQFQKVLSLCGHEDWIRGVEWAAFGRDLFLASCSQDCLIRIWKLYIKSTSLETQDDDNIRLKENTFTIENESVKIAFAVTLETVLAGHENWVNAVHWQPVFYKDGVLQQPVRLLSASMDKTMILWAPDEESGVWLEQREWTPEIVISGHFDGVQDLVWDPEGEFIITVGTDQTTRLFAPWKRKDQSQVTWHEIARPQIHGYDLKCLAMINRFQFVSGADEKVLRVFSAPRNFVENFCAITGQSLNHVLCNQDSDLPEGATVPALGLSNKAVFQGDIASQPSDEEELLTSTGFEYQQVAFQPSILTEPPTEDHLLQNTLWPEVQKLYGHGYEIFCVTCNSSKTLLASACKAAKKEHAAIILWNTTSWKQVQNLVFHSLTVTQMAFSPNEKFLLAVSRDRTWSLWKKQDTISPEFEPVFSLFAFTNKITSVHSRIIWSCDWSPDSKYFFTGSRDKKVVVWGECDSTDDCIEHNIGPCSSVLDVGGAVTAVSVCPVLHPSQRYVVAVGLECGKICLYTWKKTDQVPEINDWTHCVETSQSQSHTLAIRKLCWKNCSGKTEQKEAEGAEWLHFASCGEDHTVKIHRVNKCAL

SEQ ID NO: 4707 - protein, 821 aa, Homo sapiens
MVAPVLETSHVFCCPNRVRGVLNWSSGPRGLLAFGTSCSVVLYDPLKRVVVTNLNGHTARVNCIQWICKQDGSPSTELVSGGSDNQVIHWEIEDNQLLKAVHLQGHEGPVYAVHAVYQRRTSDPALCTLIVSAAADSAVRLWSKKGPEVTWKTGQVERGRAWKPPASLALCSRSCDSMVSCYASILCKALWKEKLHTFWHHNRISFLPSAFRPIPILACGNDDCRIHIFAQQNDQFQKVLSLCGHEDWIRGVEWAAFGRDLFLASCSQDCLIRIWKLYIKSTSLETQDDDNIRLKENTFTIENESVKIAFAVTLETVLAGHENWVNAVHWQPVFYKDGVLQQPVRLLSASMDKTMILWAPDEESGVWLEQREWTPEIVISGHFDGVQDLVWDPEGEFIITVGTDQTTRLFAPWKRKDQSQVTWHEIARPQIHGYDLKCLAMINRFQFVSGADEKVLRVFSAPRNFVENFCAITGQSLNHVLCNQDSDLPEGATVPALGLSNKAVFQGDIASQPSDEEELLTSTGFEYQQVAFQPSILTEPPTEDHLLQNTLWPEVQKLYGHGYEIFCVTCNSSKTLLASACKAAKKEHAAIILWNTTSWKQVQNLVFHSLTVTQMAFSPNEKFLLAVSRDRTWSLWKKQDTISPEFEPVFSLFAFTNKITSVHSRIIWSCDWSPDSKYFFTGSRDKKVVVWGECDSTDDCIEHNIGPCSSVLDVGGAVTAVSVCPVLHPSQRYVVAVGLECGKICLYTWKKTDQVPEINDWTHCVETSQSQSHTLAIRKLCWKNCSGKTEQKEAEGAEWLHFASCGEDHTVKIHRVNKCAL

SEQ ID NO: 4708 - protein, 51 aa, Homo sapiens
MVAPVLETSHVFCCPNRVRGVLNWSSGPRGLLAFGTSCSVVLYDPLPLLLN

SEQ ID NO: 4709 - protein, 51 aa, Homo sapiens; identical to SEQ ID NO: 4708

SEQ ID NO: 4710 - protein, 150 aa, Homo sapiens
MTRWSSYLLGWTTFLLYSYESSGDYPRCIFPFIYRGKAYNSCISQGSFLGSLWCSVTSVFDEKQQWKFCETNEYGGNSLRKPCIFPSIYRNNVVSDCMEDESNKLWCPTTENMDKDGKWSFCADTRISALVPGFPCHFPFNYKNKNYFNC

SEQ ID NO: 4711 - protein, 75 aa, Homo sapiens
MTRWSSYLLGWTTFLLYSYESSGGISALVPGFPCHFPFNYKNKNYFNCTNEGSKENLVWCATSYNYDQDHTWVYC

SEQ ID NO: 4712 - protein, 223 aa, Homo sapiens [sequence omitted]

SEQ ID NO: 4713 - protein, 220 aa, Homo sapiens
MVQLPVGWTTFLLYSYESSGGMHEECVFPFTYKGSVYFTCTHIHSLSPWCATRAVYNGQWKYCQSEDYPRCIFPFIYRGKAYNSCISQGSFLGSLWCSVTSVFDEKQQWKFCETNEYGGNSLRKPCIFPSIYRNNVVSDCMEDESNKLWCPTTENMDKDGKWSFCADTRISALVPGFPCHFPFNYKNKNYFNCTNEGSKENLVWCATSYNYDQDHTWVYC

SEQ ID NO: 4714 - protein, 76 aa, Homo sapiens
SNKLWCPTTENMDKDGKWSFCADTRISALVPGFPCHFPFNYKNKNYFNCTNEGSKENLVWCATSYNYDQDHTWVYC

SEQ ID NO: 4715 - protein, 154 aa, Homo sapiens
  VARIANT 1: note = misc_feature - Xaa can be any naturally occurring amino acid
XYPRCIFPFIYRGKAYNSCISQGSFLGSLWCSVTSVFDEKQQWKFCETNEYGGNSLRKPCIFPSIYRNNVVSDCMEDESNKLWCPTTENMDKDGKWSFCADTRISALVPGFPCHFPFNYKNKNYFNCTNEGSKENLVWCATSYNYDQDHTWVYC

SEQ ID NO: 4716 - protein, 178 aa, Homo sapiens
FIGIFLIDGVTGRIIHSSVQKKAKGPVHIVHSENWVVYQYWNTKARRNEFTVLELYEGTEQYNATAFSSLDRPQLPQVLQQSYIFPSSISAMEATITERGITSRHLLSFAGSPPPRDPNRTKQMYRYTQSDSSTITRQFLECEVSTQLPRVWSPLVWLWPMVWTFTKLESTHPSSLTF

SEQ ID NO: 4717 - protein, 75 aa, Homo sapiens
MAAEWASRFWLWATLLIPAAAVYEDQVGKFDWRQQYVGKVKFASLEFSPGSKKLVVATEKNVIAALNSRTGEICE

SEQ ID NO: 4718 - protein, 992 aa, Homo sapiens
MAAEWASRFWLWATLLIPAAAVYEDQVGKFDWRQQYVGKVKFASLEFSPGSKKLVVATEKNVIAALNSRTGEILWRHVDKGTAEGAVDAMLLHGQDVITVSNGGRIMRSWETNIGGLNWEITLDSGSFQALGLVGLQESVRYIAVLKKTTLALHHLSSGHLKWVEHLPESDSIHYQMVYSYGSGVVWALGVVPFSHVNIVKFNVEDGEIVQQVRVSTPWLQHLSGACGVVDEAVLVCPDPSSRSLQTLALETEWELRQIPLQSLDLEFGSGFQPRVLPTQPNPVDASRAQFFLHLSPSHYALLQYHYGTLSLLKNFPQTALVSFATTGEKTVAAVMACRNEVKSSSSEDGSMGSFSEKSSSKDSLACFNQTYTINLYLVETGRRLLDTTITFSLEQSGTRPERLYIQVFLKKDDSVGYRALVQTEDHLLLFLQQLAGKVVLWSREESLAEVVCLEMVDLPLTGAQAELEGEFGKKADGLLGMFLKRLSSQLILLQAWTSHLWKMFYDARKPRSQIKNEINIDTLARDEFNLQKMMVMVTASGKLFGIESSSGTILWKQYLPNVKPDSSFKLMVQRTTAHFPHPPQCTLLVKDKESGMSSLYVFNPIFGKWSQVAPPVLKRPILQSLLLPVMDQDYAKVLLLIDDEYKVTAFPATRNVLRQLHELAPSIFFYLVDAEQGRLCGYRLRKDLTTELSWELTIPPEVQRIVKVKGKRSSEHVHSQGRVMGDRSVLYKSLNPNLLAVVTESTDAHHERTFIGIFLIDGVTGRIIHSSVQKKAKGPVHIVHSENWVVYQYWNTKARRNEFTVLELYEGTEQYNATAFSSLDRPQLPQVLQQSYIFPSSISAMEATITERGITSRHLLIGLPSGAILSLPKALLDPRRPEIPTEQSREENLIPYSPDVQIHAERFINYNQTVSRMRGIYTAPSGLESTCLVVAYGLDIYQTRVYPSKQFDVLKDDYDYVLISSVLFGLVFATMITKRLAQVKLLNRAWR

SEQ ID NO: 4719 - protein, 993 aa, Homo sapiens
MAAEWASRFWLWATLLIPAAAVYEDQVGKFDWRQQYVGKVKFASLEFSPGSKKLVVATEKNVIAALNSRTGEILWRHVDKGTAEGAVDAMLLHGQDVITVSNGGRIMRSWETNIGGLNWEITLDSGSFQALGLVGLQESVRYIAVLKKTTLALHHLSSGHLKWVEHLPESDSIHYQMVYSYGSGVVWALGVVPFSHVNIVKFNVEDGEIVQQVRVSTPWLQHLSGACGVVDEAVLVCPDPSSRSLQTLALETEWELRQIPLQSLDLEFGSGFQPRVLPTQPNPVDASRAQFFLHLSPSHYALLQYHYGTLSLLKNFPQTALVSFATTGEKTVAAVMACRNEVQKSSSSEDGSMGSFSEKSSSKDSLACFNQTYTINLYLVETGRRLLDTTITFSLEQSGTRPERLYIQVFLKKDDSVGYRALVQTEDHLLLFLQQLAGKVVLWSREESLAEVVCLEMVDLPLTGAQAELEGEFGKKADGLLGMFLKRLSSQLILLQAWTSHLWKMFYDARKPRSQIKNEINIDTLARDEFNLQKMMVMVTASGKLFGIESSSGTILWKQYLPNVKPDSSFKLMVQRTTAHFPHPPQCTLLVKDKESGMSSLYVFNPIFGKWSQVAPPVLKRPILQSLLLPVMDQDYAKVLLLIDDEYKVTAFPATRNVLRQLHELAPSIFFYLVDAEQGRLCGYRLRKDLTTELSWELTIPPEVQRIVKVKGKRSSEHVHSQGRVMGDRSVLYKSLNPNLLAVVTESTDAHHERTFIGIFLIDGVTGRIIHSSVQKKAKGPVHIVHSENWVVYQYWNTKARRNEFTVLELYEGTEQYNATAFSSLDRPQLPQVLQQSYIFPSSISAMEATITERGITSRHLLIGLPSGAILSLPKALLDPRRPEIPTEQSREENLIPYSPDVQIHAERFINYNQTVSRMRGIYTAPSGLESTCLVVAYGLDIYQTRVYPSKQFDVLKDDYDYVLISSVLFGLVFATMITKRLAQVKLLNRAWR

SEQ ID NO: 4720 - protein, 971 aa, Homo sapiens
MAAEWASRFWLWATLLIPAAAVYEDQVGKFDWRQQYVGKVKFASLEFSPGSKKLVVATEKNVIAALNSRTGEIYVITVSNGGRIMRSWETNIGGLNWEITLDSGSFQALGLVGLQESVRYIAVLKKTTLALHHLSSGHLKWVEHLPESDSIHYQMVYSYGSGVVWALGVVPFSHVNIVKFNVEDGEIVQQVRVSTPWLQHLSGACGVVDEAVLVCPDPSSRSLQTLALETEWELRQIPLQSLDLEFGSGFQPRVLPTQPNPVDASRAQFFLHLSPSHYALLQYHYGTLSLLKNFPQTALVSFATTGEKTVAAVMACRNEVQKSSSSEDGSMGSFSEKSSSKDSLACFNQTYTINLYLVETGRRLLDTTITFSLEQSGTRPERLYIQVFLKKDDSVGYRALVQTEDHLLLFLQQLAGKVVLWSREESLAEVVCLEMVDLPLTGAQAELEGEFGKKADGLLGMFLKRLSSQLILLQAWTSHLWKMFYDARKPRSQIKNEINIDTLARDEFNLQKMMVMVTASGKLFGIESSSGTILWKQYLPNVKPDSSFKLMVQRTTAHFPHPPQCTLLVKDKESGMSSLYVFNPIFGKWSQVAPPVLKRPILQSLLLPVMDQDYAKVLLLIDDEYKVTAFPATRNVLRQLHELAPSIFFYLVDAEQGRLCGYRLRKDLTTELSWELTIPPEVQRIVKVKGKRSSEHVHSQGRVMGDRSVLYKSLNPNLLAVVTESTDAHHERTFIGIFLIDGVTGRIIHSSVQKKAKGPVHIVHSENWVVYQYWNTKARRNEFTVLELYEGTEQYNATAFSSLDRPQLPQVLQQSYIFPSSISAMEATITERGITSRHLLIGLPSGAILSLPKALLDPRRPEIPTEQSREENLIPYSPDVQIHAERFINYNQTVSRMRGIYTAPSGLESTCLVVAYGLDIYQTRVYPSKQFDVLKDDYDYVLISSVLFGLVFATMITKRLAQVKLLNRAWR

SEQ ID NO: 4721 - protein, 86 aa, Homo sapiens
  VARIANT 1: note = misc_feature - Xaa can be any naturally occurring amino acid
XNATAFSSLDRPQLPQVLQQSYIFPSSISAMEATITERGITSRHLLIGLPSGAILSLPKALLDPRRPEIPTEQSRCTDTRRAIHQL

SEQ ID NO: 4722 - protein, 191 aa, Homo sapiens
  VARIANT 1: note = misc_feature - Xaa can be any naturally occurring amino acid
XSSKDSLACFNQTYTINLYLVETGRRLLDTTITFSLEQSGTRPERLYIQVFLKKDDSVGYRALVQTEDHLLLFLQQLAGKVVLWSREESLAEVVCLEMVDLPLTGAQAELEGEFGKKAAIQDGLLGMFLKRLSSQLILLQAWTSHLWKMFYDARKPRSQIKNEINIDTLARDEFNLQKMMVMVTASGKVSG

SEQ ID NO: 4723 - protein, 43 aa, Homo sapiens
MAAASAGATRLLLLLLMAHSFEIDDSANFRKRGSLLWNQQDGT

SEQ ID NO: 4724 - protein, 254 aa, Homo sapiens
MAAASAGATRLLLLLLMAVAAPSRARGSGCRAGTGARGAGAEGREGEACGTVGLLLEHSFEIDDSANFRKRGSLLWNQQDGTLSLSQRQLSEEERGRLRDVAALNGLYRVRIPRRPGALDGLEAGGYVSSFVPACSLVESHLSDQLTLHVDVAGNVVGVSVVTHPGGCRGHEVEDVDLELFNTSVQLQPPTTAPGPETAAFIERLEMEQAQKAKNPQEQKSFFAKYWHIILGGAVLLTALRPAAPGPAPPPQEA

SEQ ID NO: 4725 - protein, 262 aa, Homo sapiens
MAAASAGATRLLLLLLMAVAAPSRARGSGCRAGTGARGAGAEGREGEACGTVGLLLEHSFEIDDSANFRKRGSLLWNQQDGTLSLSQRQLSEEERGRLRDVAALNGLYRVRIPRRPGALDGLEAGGYVSSFVPACSLVESHLSDQLTLHVDVAGNVVGVSVVTHPGGCRGHEVEDVDLELFNTSVQLQPPTTAPGPETAAFIERLEMEQAQKAKNPQEQKSFFAKYWMYIIPVVLFLMMSGAPDTGGQGGGGGGGGGGGSGR

SEQ ID NO: 4726 - protein, 371 aa, Homo sapiens
MAAASAGATRLLLLLLMAVAAPSRARGSGCRAGTGARGAGAEGREGEACGTVGLLLEHSFEIDDSANFRKRGSLLWNQQDGTLSLSQRQLSEEERGRLRDVAALNGLYRVRIPRRPGALDGLEAGGYVSSFVPACSLVESHLSDQLTLHVDVAGNVVGVSVVTHPGGCRGHEVEDVDLELFNTSVQLQPPTTAPGPETAAFIERLEMEQAQKAKNPQEQKSFFAKYWMYIIPVVLFLMMSGAPDTGGQGGGGGGGGGGGSGRPLSSAFCWQRSSWTGAFGTAAGVSCARLPHGPMQPQGLPPCPWSRARDPGHYASSDLASPYPEPMQSGNMPPSLQPLCLCSRWSHPPVPGWARWSCPGSCSAPLTLTLD

SEQ ID NO: 4727 - protein, 42 aa, Homo sapiens
MAAASAGATRLLLLLLMAVAAPSRARGSGCRAGTGARGVSAL

SEQ ID NO: 4728 - protein, 42 aa, Homo sapiens; identical to SEQ ID NO: 4727

SEQ ID NO: 4729 - protein, 89 aa, Homo sapiens [sequence omitted]

SEQ ID NO: 4730 - protein, 94 aa, Homo sapiens
MGEVEISALAYVKMCLHAARYPHAAVNGLFLAPAPRSGECLCLTDCVPLFHSHLALSVMLEVALNQVDVWGAQAGLVVAGYYHANAAVNDQSNI

SEQ ID NO: 4731 - protein, 208 aa, Homo sapiens
MGEVEISALAYVKMCLHAARYPHAAVNGLFLAPAPRSGECLCLTDCVPLFHSHLALSVMLEVALNQVDVWGAQAGLVVAGYYHANAAVNDQSPGPLALKIAGRIAEFFPDAVLIMLDNQKLVPQPRVPPVIVLENQGLRWVPKDKNLVMWRDWEESRQMVGALLEDRAHQHLVDFDCHLDDIRQDWTNQRLNTQITQWVGPTNGNGNA

SEQ ID NO: 4732 - protein, 208 aa, Homo sapiens; identical to SEQ ID NO: 4731

SEQ ID NO: 4733 - protein, 134 aa, Homo sapiens
MGFAHSWLLTPLIFPLHSPGPLALKIAGRIAEFFPDAVLIMLDNQKLVPQPRVPPVIVLENQGLRWVPKDKNLVMWRDWEESRQMVGALLEDRAHQHLVDFDCHLDDIRQDWTNQRLNTQITQWVGPTNGNGNA

SEQ ID NO: 4734 - protein, 76 aa, Homo sapiens
LMSTATFLTSKDEGLKATTTDVRKNDSIISNVTVTSVTLPNAVSTLQSSKPKTETQSSIKTTEIPGEHSAQGKTKN

SEQ ID NO: 4735 - protein, 248 aa, Homo sapiens
MELLQVTILFLLPSICSSNSTGVLEAANNSLVVTTTKPSITTPNTESLQKNVVTPTTGTTPKGTITNELLKMSLMSTATFLTSKDEGLKATTTDVRKNDSIISNVTVTSVTLPNAVSTLQSSKPKSSVLQPDASPSKTGTLTSIPVTIPENTSQSQVIGTEGGKNASTSATSRSYSSIILPVVIALIVITLSVFVLVGLYRMCWKADPGTPENGNDQPQSDKESVKLLTVKTISHESGEHSAQGKTKN

SEQ ID NO: 4736 - protein, 165 aa, Homo sapiens
MELLQVTILFLLPSICSSNSTGVLEAANNSLVVTTTKPSITTPNTESLQKNVVTPTTGTTPKGTITNELLKMSLMSTATFLTSKDEGLKATTTDVRKNDSIISNVTVTSVTLPNAVSTLQSSKPKTETQSSIKTTEIPGIILPVVIALIVITLSVFVLVGLYRMC

SEQ ID NO: 4737 - protein, 261 aa, Homo sapiens
MELLQVTILFLLPSICSSNSTGVLEAANNSLVVTTTKPSITTPNTESLQKNVVTPTTGTTPKGTITNELLKMSLMSTATFLTSKDEGLKATTTDVRKNDSIISNVTVTSVTLPNAVSTLQSSKPKTETQSSIKTTEIPGSVLQPDASPSKTGTLTSIPVTIPENTSQSQVIGTEGGKNASTSATSRSYSSIILPVVIALIVITLSVFVLVGLYRMCWKADPGTPENGNDQPQSDKESVKLLTVKTISHESGEHSAQGKTKN

SEQ ID NO: 4738 - protein, 178 aa, Homo sapiens
MELLQVTILFLLPSICSSNSTGVLEAANNSLVVTTTKPSITTPNTESLQKNVVTPTTGTTPKGTITNELLKMSLMSTATFLTSKDEGLKATTTDVRKNDSIISNVTVTSVTLPNAVSTLQSSKPKTETQSSIKTTEIPGTPENGNDQPQSDKESVKLLTVKTISHESGEHSAQGKTKN

SEQ ID NO: 4739 - protein, 34 aa, Homo sapiens
MGGPRAWALLCLGLLLPGGGAAWSIGAAPFSGRR

SEQ ID NO: 4740 - protein, 175 aa, Homo sapiens
MGGPRAWALLCLGLLLPGGGAAWSIGAAPFSGRRNWCSYVVTRTISCHVQNGTYLQRVLQNCPWPMSCPGSSYRTVVRPTYKVMYKIVTAREWRCCPGHSGVSCEEGCLNCSKVSELTERLKVLEAKMTMLTVIEQPVPPTPATPEDPAPLWGPPPAQGSPGDGGLQDQVGAWGL

SEQ ID NO: 4741 - protein, 443 aa, Homo sapiens
MGGPRAWALLCLGLLLPGGGAAWSIGAAPFSGRRNWCSYVVTRTISCHVQNGTYLQRVLQNCPWPMSCPGSSYRTVVRPTYKVMYKIVTAREWRCCPGHSGVSCEEVAASSASLEPMWSGSTMRRMALRPTAFSGCLNCSKVSELTERLKVLEAKMTMLTVIEQPVPPTPATPEDPAPLWGPPPAQGSPGDGGLQDQVGAWGLPGPTGPKGDAGSRGPMGMRGPPGPQGPPGSPGRAGAVGTPGERGPPGPPGPPGPPGPPAPVGPPHARISQHGDPLLSNTFTETNNHWPQGPTGPPGPPGPMGPPGPPGPTGVPGSPGHIGPPGPTGPKGISGHPGEKGERGLRGEPGPQGSAGQRGEPGPKGDPGEKSHWGEGLHQLREALKILAERVLILETMIGLYEPELGSGAGPAGTGTPSLLRGKRGGHATNYRIVAPRSRDERG

SEQ ID NO: 4742 - protein, 422 aa, Homo sapiens
MGGPRAWALLCLGLLLPGGGAAWSIGAAPFSGRRNWCSYVVTRTISCHVQNGTYLQRVLQNCPWPMSCPGSSYRTVVRPTYKVMYKIVTAREWRCCPGHSGVSCEEVAASSASLEPMWSGSTMRRMALRPTAFSGCLNCSKVSELTERLKVLEAKMTMLTVIEQPVPPTPATPEDPAPLWGPPPAQGSPGDGGLQDQVGAWGLPGPTGPKGDAGSRGPMGMRGPPGPQGPPGSPGRAGAVGTPGERGPPGPPGPPGPPGPPAPVGPPHARISQHGDPLLSNTFTETNNHWPQGPTGPPGPPGPMGPPGPPGPTGVPGSPGHIGLRGEPGPQGSAGQRGEPGPKGDPGEKSHWGEGLHQLREALKILAERVLILETMIGLYEPELGSGAGPAGTGTPSLLRGKRGGHATNYRIVAPRSRDERG

SEQ ID NO: 4743 - protein, 445 aa, Homo sapiens
MGGPRAWALLCLGLLLPGGGAAWSIGAAPFSGRRNWCSYVVTRTISCHVQNGTYLQRVLQNCPWPMSCPGSSYRTVVRPTYKVMYKIVTAREWRCCPGHSGVSCEEVAASSASLEPMWSGSTMRRMALRPTAFSGCLNCSKVSELTERLKVLEAKMTMLTVIEQPVPPTPATPEDPAPLWGPPPAQGSPGDGGLQDQVGAWGLPGPTGPKGDAGSRGPMGMRGPPGPQGPPGSPGRAGAVGTPGERGPPGPPGPPGPPGPPAPVGPPHARISQHGDPLLSNTFTETNNHWPQGPTGPPGPPGPMGPPGPPGPTGVPGSPGHIGPPGPTGPKGISGHPGEKGERGLRGEPGPQGSAGQRGEPGPKGDPGEKSHWAPSLQSFLQQQAQLELLARRVTLLEAIIWPEPELGSGAGPAGTGTPSLLRGKRGGHATNYRIVAPRSRDERG

SEQ ID NO: 4744 - protein, 212 aa, Homo sapiens
MGGPRAWALLCLGLLLPGGGAAWSIGAAPFSGRRNWCSYVVTRTISCHVQNGTYLQRVLQNCPWPMSCPGSSYRTVVRPTYKVMYKIVTAREWRCCPGHSGVSCEEVAASSASLEPMWSGSTMRRMALRPTAFSGCLNCSKVSELTERLKVLEAKMTMLTVIEQPVPPTPATPEDPAPLWGPPPAQGSPGDGGLQGDPLLSNTFTETNNHWP

SEQ ID NO: 4745 - protein, 236 aa, Homo sapiens
  VARIANT 1: note = misc_feature - Xaa can be any naturally occurring amino acid
XMTMLTVIEQPVPPTPATPEDPAPLWGPPPAQGSPGDGGLQGLPGAIESVRVPLLPRNDQVGAWGLPGPTGPKGDAGSRGPMGMRGPPGPQGPPGSPGRAGAVGTPGERGPPGPPGPPGPPGPPAPVGPPHARISQHGDPLLSNTFTETNNHWPQGPTGPPGPPGPMGPPGPPGPTGVPGSPGHIGPPGPTGPKGISGHPGEKGERGLRGEPGPQGSAGQRGEPGPKGDPGEKSHW

SEQ ID NO: 4746 - protein, 1016 aa, Homo sapiens
MAPRTLWSCYLCCLLTAAAGAASYPPRGFSLYTGSSGALSPGGPQAQIAPRPASRHRNWCAYVVTRTVSCVLEDGVETYVKYQPCAWGQPQCPQSIMYRRFLRPRYRVAYKTVTDMEWRCCQGYGGDDCAESPAPALGPASSTPRPLARPARPNLSGSSAGSPLSGLGGEGPGESEKVQQLEEQVQSLTKELQGLRGVLQGLSGRLAEDVQRAVETAFNGRQQPADAAARPGVHETLNEIQHQLQLLDTRVSTHDQELGHLNNHHGGSSSSGGSRAPAPASAPPGPSEELLRQLEQRLQESCSVCLAGLDGFRRQQQEDRERLRAMEKLLASVEERQRHLAGLAVGRRPPQECCSPELGRRLAELERRLDVVAGSVTVLSGRRGTELGGAAGQGGHPPGYTSLASRLSRLEDRFNSTLGPSEEQEESWPGAPGGLSHWLPAARGRLEQLGGLLANVSGELGGRLDLLEEQVAGAMQACGQLCSGAPGEQDSQVSEILSALERRVLDSEGQLRLVGSGLHTVEAAGEARQATLEGLQEVVGRLQDRVDAQDETAAEFTLRLNLTAARLGQLEGLLQAHGDEGCGACGGVQEELGRLRDGVERCSCPLLPPRGPGAGPGVGGPSRGPLDGFSVFGGSSGSALQALQGELSEVILSFSSLNDSLNELQTTVEGQGADLADLGATKDRIISEINRLQQEATEHATESEERFRGLEEGQAQAGQCPSLEGRLGRLEGVCERLDTVAGGLQGLREGLSRHVAGLWAGLRETNTTSQMQAALLEKLVGGQAGLGRRLGALNSSLQLLEDRLHQLSLKDLTGPAGEAGPPGPPGLQGPPGPAGPPGSPGKDGQEGPIGPPGPQGEQGVEGAPAAPVPQVAFSAALSLPRSEPGTVPFDRVLLNDGGYYDPETGVFTAPLAGRYLLSAVLTGHRHEKVEAVLSRSNQGVARVDSGGYEPEGLENKPVAESQPSPGTLGVFSLILPLQAGDTVCVDLVMGQLAHSEEPLTIFSGALLYGDPELEHA

SEQ ID NO: 4747 - protein, 347 aa, Homo sapiens
  VARIANT 1: note = misc_feature - Xaa can be any naturally occurring amino acid
XADLGATKDRIISEINRLQQEATEHATESEERFRGLEEGQAQAGQCPSLEGRLGRLEGVCERLDTVAGGLQGLREGLSRHVAGLWAGLRETNTTSQMQAALLEKLVGGQAGLGRRLGALNSSLQLLEDRLHQLSLKDLTGEGTKGPAGEAGPPGPPGLQGPPGPAGPPGSPGKDGQEGPIGPPGPQGEQGVEGAPAAPVPQVAFSAALSLPRSEPGTVPFDRVLLNDGGYYDPETGVFTAPLAGRYLLSAVLTGHRHEKVEAVLSRSNQGVARVDSGGYEPEGLENKPVAESQPSPGTLGVFSLILPLQAGDTVCVDLVMGQLAHSEEPLTIFSGALLYGDPELEHA

SEQ ID NO: 4748 - protein, 1053 aa, Homo sapiens
MWQPRRPWPRVPWRWALALLALVGAGLCHAGPQPGYPARPSARNKNWCAYIVNKNVSCSVLEGSESFIQAQYNCAWNQMPCPSALVYRVNFRPRYVTRYKTVTQLEWRCCPGFRGGDCQEGPKDPVKTLRPTPARPRNSLKKATDNEPSQFSEPRKTLSPTGTAQPSWGVDPKEGPQELQEKKIQVLEEKVLRLTRTVLDLQSSLAGVSENLKHATQDDASRTRAPGLSSQHPKPDTTVSGDTETGQSPGVFNTKESGMKDIKSELAEVKDTLKNKSDKLEELDGKVKGYEGQLRQLQEAAQGPTVTMTTNELYQAYVDSKIDALREELMEGMDRKLADLKNSCEYKLTGLQQQCDDYGSSYLGVIELIGEKETSLRKEINNLRARLQEPSAQANCCDSEKNGDIGQQIKTLDQKIERVAEATRMLNGRLDNEFDRLIVPEPDVDFDAKWNELDARINVTEKNAEEHCFYIEETLRGAINGEVGDLKQLVDQKIQSLEDRLGSVLLQMTNNTGAELSPPGAAALPGVSGSGDERVMMELNHLKDKVQVVEDICLLNIQGKPHGMEGALPNREDRAVRDSLHLLKSLNDTMHRKFQETEQTIQKLQQDFSFLYSQLNHTENDVTHLQKEMSNCRAGENAGMGRFTKVGEQERTVDTLPSPQHPVAHCCSQLEERWQRLQSQVISELDACKECTQGVQREVSMVEGRVSHMEKTCSKLDSISGNLQRIKEGLNKHVSSLWNCVRQMNGTLRSHSRDISGLKNSVQQFYSHVFQISTDLQDLVKFQPSAKAPSPPPPAEAPKEPLQPEPAPPRPSGPATAEDPGRRPVLPQRPPEERPPQPPGSTGVIAETGQAGPPAGAGVSGRGLPRGVDGQTGSGTVPGAEGFAGAPGYPKSPPVASPGAPVPSLVSFSAGLTQKPFPSDGGVVLFNKVLVNDGDVYNPSTGVFTAPYDGRYLITATLTPERDAYVEAVLSVSNASVAQLHTAGYRREFLEYHRPPGALHTCGGPGAFHLIVHLKAGDAVNVVVTGGKLAHTDFDEMYSTFSGVFLYPFLSHL

SEQ ID NO: 4749 - protein, 766 aa, Homo sapiens
MGRRRLLVWLCAVAALLSGAQARGTPLLARPAPPGASRYSLYTTGWRPRLRPGPHKALCAYVVHRNVTCILQEGAESYVKAEYRQCRWGPKCPGTVTYRTVLRPKYKVGYKTVTDLAWRCCPGFTGKRCPEHLTDHGAASPQLEPEPQIPSGQLDPGPRPPSYSRAAPSPHGRKGPGLFGERLERLEGDVQRLAQTYGTLSGLVASHEDPNRMTGGPRAPAVPVGFGVIPEGLVGPGDRARGPLTPPLDEILSKVTEVSNTLQTKVQLLDKVHGLALGHEAHLQRLREAPPSPLTSLALLEEYVDRRLHRLWGSLLDGFEQKLQGVQSECDLRVQEVRRQCEEGQAASRRLHQSLDGRELALRQELSQLGSQLQGLSVSGRGSCCGQLALINARMDGLERALQAVTETQRGPGAPAGDELTRLSAAMLEGGVDGLLEGLETLNGTEGGARGCCLRLDMGGWGVGGFGTMLEERVQSLEERLATLAGELSHDSASPGRSARPLVQTELAVLEQRLVSLETSCTPSTTSAILDSLVAEVKAWQSRSEALLRQVASHAALLQQLNGTVAEVQGQLAEGTGSSLQGEITLLKVNLNSVSKSLTGLSDSVSQYSDAFLAANTSLDERERKVEAEVQAIQEQVSSQGSRLQAGHRQVLNLRGELEQLKAGVAKVASGLSRCQDTAQKLQHTVGHFDQRVAQVEGACRRLGLLAAGLDSLPTEPLRPREGLWSHVDQLNRTLAQHTQDIARLRDDLLDCQAQLAEQVRPGQAN

SEQ ID NO: 4750 - protein, 1142 aa, Homo sapiens
MLVLRCRLGTSFPKLDNLVPKGKMKILLVFLGLLGNSVAMPMHMPRMPGFSSKSEEMMRYNQFNFMNGPHMAHLGPFFGNGLPQQFPQYQMPMWPQPPPNTWHPRKSSAPKRHNKTDQTQETQKPNQTQSKKPPQKRPLKQPSHNQPQPEEEAQPPQAFPPFGNGLFPYQQPPWQIPQRLPPPGYGRPPISNEEGGNPYFGYFGYHGFGGRPPYYSEEMFEQDFEKPKEEDPPKAESPGTEPTANSTVTETNSTQPNPKGSQGGNDTSPTGNSTPGLNTGNNPPAQNGIGPLPAVNASGQGGPGSQIPWRPSQPNIRENHPYPNIRNFPSGRQWYFTGTVMGHRQNRPFYRNQQVQRGPRWNFFAWERKQVARPGNPVYHKAYPPTSRGNYPNYAGNPANLRRKPQGPNKHPVGTTVAPLGPKPGPVVRNEKIQNPKEKPLGPKEQIIVPTKNPTSPWRNSQQYEVNKSNYKLPHSEGYMPVPNFNSVDQHENSYYPRGDSRKVPNSDGQTQSQNLPKGIVLGSRRMPYESETNQSELKHSSYQPAVYPEEIPSPAKEHFPAGRNTWDHQEISPPFKEDPGRQEEHLPHPSHGSRGSVFYPEYNPYDPRENSPYLRGNTWDERDDSPNTMGQKESPLYPINTPDQKEIVPYNEEDPVDPTGDEVFPGQNRWGEELSFKGGPTVRHYEGEQYTSNQPKEYLPYSLDNPSKPREDFYYSEFYPWSPDENFPSYNTASTMPPPIESRGYYVNNAAGPEESTLFPSRNSWDHRIQAQGQRERRPYFNRNIWDQATHLQKAPARPPDQKGNQPYYSNTPAGLQKNPIWHEGENLNYGMQITRMNSPEREHSSFPNFIPPSYPSGQKEAHLFHLSQRGSCCAGSSTGPKDNPLALQDYTPSYGLAPGENQDTSPLYTDGSHTKQTRDIISPTSILPGQRNSSEKRESQNPFRDDVSTLRRNTPCSIKNQLGQKEIMPFPEASSLQSKNTPCLKNDLGGDGNNILEQVFEDNQLNERTVDLTPEQLVIGTPDEGSNPEGIQSQVQENESERQQQRPSNILHLPCFGSKLAKHHSSTTGTPSSDGRQSPFDGDSITPTENPNTLVELATEEQFKSINVDPLDADEHSPFEFLQRGTNVQDQVQDCLLLQA

SEQ ID NO: 4751 - protein, 297 aa, Homo sapiens
MRALRAGLTLASGAGLGAVVEGWRRRREDARAAPGLLGRLPVLPVAAAAELPPVPGGPRGPGELAKYGLPGLAQLKSRESYVLCYDPRTRGALWVVEQLRPERLRGDGDRRECDFREDDSVHAYHRATNADYRGSGFDRGHLAAAANHRWSQKAMDDTFYLSNVAPQVPHLNQNAWNNLEKYSRSLTRSYQNVYVCTGPLFLPRTEADGKSYVKYQVIGKNHVAVPTHFFKVLILEAAGGQIELRTYVMPNAPVDEAIPLERFLVPIESIERASGLLFVPNILARAGSLKAITAGSK

SEQ ID NO: 4752 - protein, 347 aa, Homo sapiens
MRACISLVLAVLCGLAWADLYSAPTSCQGRCYEAFDKHHQCHCNARCQEFGNCCKDFESLCSDHEVSHSSDAITKEEIQSISEKIYRADTNKAQKEDIVLNSQNCISPSETRNQVDRCPKPLFTYVNEKLFSKPTYAAFINLLNNYQRATGHGEHFSAQELAEQDAFLREIMKTAVMKELYSFLHHQNRYGSEQEFVDDLKNMWFGLYSRGNEEGDSSGFEHVFSGEVKKGKVTGFHNWIRFYLEEKEGLVDYYSHIYDGPWDSYPDVLAMQFNWDGYYKEVGSAFIGSSPEFEFALYSLCFIARPGKVCQLSLGGYPLAVRTYTWDKSTYGNGKKYIATAYIVSST

SEQ ID NO: 4753 - protein, 369 aa, Homo sapiens
MRACISLVLAVLCGLAWAEDHKESEPLPQLEEETEEALASNLYSAPTSCQGRCYEAFDKHHQCHCNARCQEFGNCCKDFESLCSDHEVSHSSDAITKEEIQSISEKIYRADTNKAQKEDIVLNSQNCISPSETRNQVDRCPKPLFTYVNEKLFSKPTYAAFINLLNNYQRATGHGEHFSAQELAEQDAFLREIMKTAVMKELYSFLHHQNRYGSEQEFVDDLKNMWFGLYSRGNEEGDSSGFEHVFSGEVKKGKVTGFHNWIRFYLEEKEGLVDYYSHIYDGPWDSYPDVLAMQFNWDGYYKEVGSAFIGSSPEFEFALYSLCFIARPGKVCQLSLGGYPLAVRTYTWDKSTYGNGKKYIATAYIVSST

SEQ ID NO: 4754 - protein, 410 aa, Homo sapiens
MRACISLVLAVLCGLAWAGKIESCASRCNEKFNRDAACQCDRRCLWHGNCCEDYEHLCTEDHKESEPLPQLEEETEEALASNLYSAPTSCQGRCYEAFDKHHQCHCNARCQEFGNCCKDFESLCSDHEVSHSSDAITKEEIQSISEKIYRADTNKAQKEDIVLNSQNCISPSETRNQVDRCPKPLFTYVNEKLFSKPTYAAFINLLNNYQRATGHGEHFSAQELAEQDAFLREIMKTAVMKELYSFLHHQNRYGSEQEFVDDLKNMWFGLYSRGNEEGDSSGFEHVFSGEVKKGKVTGFHNWIRFYLEEKEGLVDYYSHIYDGPWDSYPDVLAMQFNWDGYYKEVGSAFIGSSPEFEFALYSLCFIARPGKVCQLSLGGYPLAVRTYTWDKSTYGNGKKYIATAYIVSST

SEQ ID NO: 4755 - protein, 76 aa, Homo sapiens
MGAAISQGALIAIVCNGLVGFLLLLLWVILCWACHSRSADVDSLSESSPNSSPGPCPEKAPPPQKPSHEGSYLLQP

SEQ ID NO: 4756 - protein, 363 aa, Homo sapiens
MAIGAVSLAVAKACAMLLNKPLYLNIALLKHNQEQPTTLSMPLLMVSLVSCGKSSSGKLNLMKEVICIPHPELTTKQGVEMLMEMQKHINKIIEMPSPPKAETKKGHDGSKRGQQQITGKMSHLGCLTINCDSIEQPLLLIQEICANLGLELGTNLHLAINCAGHELMDYNKGKYEVIMGTYKNAAEMVDLYVDLINKYPSIIALIDPFRKEDSEQWDSIYHALGSRCYIIAGTASKSISKLLEQGNISIPKSNGLIIKHTNQTTMSDLVEITNLIDSKKHITVFGSTEGESSDDSLVDLAVGLGVRFIKLGGLSRGERVTKYNRLLTIEEELVQNGTLATSSSSCDARIGGQEQETMTLVKV

SEQ ID NO: 4757 - protein, 625 aa, Homo sapiens
MEEEGGGRSCGTTRELQKLKQQAMEYYRENDVPRRLEELLNSTFYLQPADVYGHLANCFSKLAKPPTICKIVGKDVLDGLGLPTLQVDIFCTIQNFPKNVCSVVISTHFEVHENALPELAKAEEAERASAVSTAVQWVNSTITHELQGMAPSDQAEVDHLLRIFFASKVQEDKGRKELEKSLEYSTVPTPLPPVPPPPPPPPPTKKKGQKPGRKDTITEKPIAPAEPVEPVLSGSMAIGAVSLAVAKACAMLLNKPLYLNIALLKHNQEQPTTLSMPLLMVSLVSCGKSSSGKLNLMKEVICIPHPELTTKQGVEMLMEMQKHINKIIEMPSPPKAETKKGHDGSKRGQQQITGKMSHLGCLTINCDSIEQPLLLIQEICANLGLELGTNLHLAINCAGHELMDYNKGKYEVIMGTYKNAAEMVDLYVDLINKYPSIIALIDPFRKEDSEQWDSIYHALGSRCYIIAGTASKSISKLLEQGNISIPKSNGLIIKHTNQTTMSDLVEITNLIDSKKHITVFGSTEGESSDDSLVDLAVGLGVRFIKLGGLSRGERVTKYNRLLTIEEELVQNGTLGFKEEHTFFYFNEEAEKAAEALEAAAAREPLVPTFPTQGVEESAETGASSG

SEQ ID NO: 4758 - protein, 628 aa, Homo sapiens [sequence omitted]

SEQ ID NO: 4759 - protein, 308 aa, Homo sapiens
MEEEGGGRSCGTTRELQKLKQQAMEYYRENDVPRRLEELLNSTFYLQPADVYGHLPSPPKAETKKGHDGSKRGQQQITGKMSHLGCLTINCDSIEQPLLLIQEICANLGLELGTNLHLAINCAGHELMDYDSEQWDSIYHALGSRCYIIAGTASKSISKLLEQGNISIPKSNGLIIKHTNQTTMSDLVEITNLIDSKKHITVFGSTEGESSDDSLVDLAVGLGVRFIKLGGLSRGERVTKYNRLLTIEEELVQNGTLGFKEEHTFFYFNEEAEKAAEALEAAAAREPLVPTFPTQGVEESAETGASSG

SEQ ID NO: 4760 - protein, 138 aa, Homo sapiens
  VARIANT 1: note = misc_feature - Xaa can be any naturally occurring amino acid
XGRSCGTTRELQKLKQQAMEYYRENDVPRRLEELLNSTFYLQPADVYGHLANCFSKLAKPPTICKIVGKDVLDGLGLPTLQVDIFCTIQNFPKNVCSVVISTHFEVHENALPELAKAEEAERASAVSTAVQWVNSTIT

SEQ ID NO: 4761 - protein, 440 aa, Homo sapiens
MAVKLGTLLLALALGLAQPASARRKLLVFLLDGFRSDYISDEALESLPGFKEIVSRGVKVDYLTPDFPSLSYPNYYTLMTGRHCEVHQMIGNYMWDPTTNKSFDIGVNKDSLMPLWWNGSEPLWVTLTKAKRKVYMYYWPGCEVEILGVRPTYCLEYKNVPTDINFANAVSDALDSFKSGRADLAAIYHERIDVEGHHYGPASPQRKDALKAVDTVLKYMTKWIQERGLQDRLNVIIFSDHGMTDIFWMDKVIELNKYISLNDLQQVKDRGPVVSLWPAPGKHSEIYNKLSTVEHMTVYEKEAIPSRFYYKKGKFVSPLTLVADEGWFITENREMLPFWMNSTGRREGWQRGWHGYDNELMDMRGIFLAFGPDFKSNFRAAPIRSVDVYNVMCNVVGITPLPNNGSWSRVMCMLKGRASTAPPVWPSHCALALILLFLLA

SEQ ID NO: 4762 - protein, 194 aa, Homo sapiens
MIGNYMWDPTTNKSFDIGVNKDSLMPLWWNGSEPLWVTLTKAKRKVYMYYWPGCEVEILGVRPTYCLEYKNVPTDINFANAVSDALDSFKSGRADLAAIYHERIDVEGHHYGPASPQRKDALKAVDTVLKYMTKWIQERGLQDRLNVIIFSDHGMTDIFWMDKVIELNKYISLNDLQQVKDRGPVVSLWPAPGK

SEQ ID NO: 4763 - protein, 159 aa, Homo sapiens
LKDAHPKLHVYKKEAFPEAFHYANNPRVTPLLMYSDLGYVIHGRINVQFNNGEHGFDNKDMDMKTIFRAVGPSFRAGLEVEPFESVHVYELMCRLLGIVPEANDGHLATLLPMLHTESALPPDGRPTLLPKGRSALPPSSRPLLVMGLLGTVILLSEVA

SEQ ID NO: 4764 - protein, 458 aa, Homo sapiens
MRGPAVLLTVALATLLAPGAGAPVQSQGSQNKLLLVSFDGFRWNYDQDVDTPNLDAMARDGVKARYMTPAFVTMTSPCHFTLVTGKYIENHGVVHNMYYNTTSKVKLPYHATLGIQRWWDNGSVPIWITAQRQGLRAGSFFYPGGNVTYQGVAVTRSRKEGIAHNYKNETEWRANIDTVMAWFTEEDLDLVTLYFGEPDSTGHRYGPESPERREMVRQVDRTVGYLRESIARNHLTDRLNLIITSDHGMTTVDKRAGDLVEFHKFPNFTFRDIEFELLDYGPNGMLLPKEGRLEKVYDALKDAHPKLHVYKKEAFPEAFHYANNPRVTPLLMYSDLGYVIHGRINVQFNNGEHGFDNKDMDMKTIFRAVGPSFRAGLEVEPFESVHVYELMCRLLGIVPEANDGHLATLLPMLHTESALPPDGRPTLLPKGRSALPPSSRPLLVMGLLGTVILLSEVA

SEQ ID NO: 4765 - protein, 91 aa, Homo sapiens
MATSWGTVFFMLVVSCVCSAVSHRNQQTWFEGIFLSSMCPINVSASTLYGIMFDAGSTGTRIHVYTFVQKMPGHLWSLGKGGGVRCPPEKW

SEQ ID NO: 4766 - protein, 211 aa, Homo sapiens
MATSWGTVFFMLVVSCVCSAVSHRNQQTWFEGIFLSSMCPINVSASTLYGIMFDAGSTGTRIHVYTFVQKMPGQLPILEGEVFDSVKPGLSAFVDQPKQGAETVQGLLEVAKDSIPRSHWKKTPVVLKATAGLRLLPEHKAKALLFEVKEIFRKSPFLVPKGSVSIMDGSDEGILAWVTVNFLTGQLHGHRQETVGTLDLGGASTQITFLP

SEQ ID NO: 4767 - protein, 428 aa, Homo sapiens
MATSWGTVFFMLVVSCVCSAVSHRNQQTWFEGIFLSSMCPINVSASTLYGIMFDAGSTGTRIHVYTFVQKMPGQLPILEGEVFDSVKPGLSAFVDQPKQGAETVQGLLEVAKDSIPRSHWKKTPVVLKATAGLRLLPEHKAKALLFEVKEIFRKSPFLVPKGSVSIMDGSDEGILAWVTVNFLTGQLHGHRQETVGTLDLGGASTQITFLPQFEKTLEQTPRGYLTSFEMFNSTYKLYTHSYLGFGLKAARLATLGALETEGTDGHTFRSACLPRWLEAEWIFGGVKYQYGGNQEGEVGFEPCYAEVLRVVRGKLHQPEEVQRGSFYAFSYYYDRAVDTDMIDYEKGGILKVEDFERKAREVCDNLENFTSGSPFLCMDLSYITALLKDGFGFADSTVLQLTKKVNNIETGWALGATFHLLQSLGISH

SEQ ID NO: 4768 - protein, 407 aa, Homo sapiens
MATSWGTVFFMLVVSCVCSAVSHRNQQTWFEGIFLSSMCPINVSASTLYGIMFDAGSTGTRIHVYTFVQKMPGQLPILEGEVFDSVKPGLSAFVDQPKQGAETVQGLLEVAKDSIPRSHWKKTPVVLKATAGLRLLPEHKAKALLFEVKEIFRKSPFLVPKGSVSIMDGSDEGILAWVTVNFLTGQLHGHRQETVGTLDLGGASTQITFLPQFEKTLEQTPRGYLTSFEMFNSTYKLYTHSYLGFGLKAARLATLGALETEGTDGHTFRSACLPRWLEAEWIFGGVKYQYGGNQEGEVGFEPCYAEVLRVVRGKLHQPEEVQRGSFYAFSYYYDRAVDTDMIDYEKGGILKVEDFERKAREVCDNLENFTSGSPFLCMDLSYITALLKDGFGFADSTVLQHIISWVN

SEQ ID NO: 4769 - protein, 80 aa, Homo sapiens
  VARIANT 1: note = misc_feature - Xaa can be any naturally occurring amino acid
XYAFSYYYDRAVDTDMIDYEKGGILKVEDFERKAREVCDNLENFTSGSPFLCMDLSYITALLKDGFGFADSTVLQAAVLR

SEQ ID NO: 4770 - protein, 223 aa, Homo sapiens
LGASGVSGLTALILLLVEATSVLLPTDIKFGIVFDAGSSHTSLFLYQWLANKENGTGVVSQALACQVEGPGISSYTSNAAQAGESLQGCLEEALVLIPEAQHRKTPTFLGATAGMRLLSSHPGPGPVSRGLLGCRAPGRAGRRCLWLDHCQLRLGDAGQVLLHWRMDPASGGDAGGCPGHGRGLHPDHVRAWGPHLGQEHPGRFSPLRLRLQRLHSQLPVLWT

SEQ ID NO: 4771 - protein, 458 aa, Homo sapiens
MGLSRKEQVFLALLGASGVSGLTALILLLVEATSVLLPTDIKFGIVFDAGSSHTSLFLYQWLANKENGTGVVSQALACQVEGPGISSYTSNAAQAGESLQGCLEEALVLIPEAQHRKTPTFLGATAGMRLLSRKNSSQARDIFAAVTQVLGRSPVDFWGAELLAGQAEGAFGWITVNYGLGTLVKYSFTGEWIQPPEEMLVGALDMGGASTQITFVPGGPILDKSTQADFRLYGSDYSVYTHSYLCFGRDQMLSRLLVGLVQSRPAALLRHPCYLSGYQTTLALGPLYESPCVHATPPLSLPQNLTVEGTGNPGACVSAIRELFNFSSCQGQEDCAFDGVYQPPLRGQFYVEASYPGQDRWLRDYCASGLYILTLLHEGYGFSEETWPSLEFRKQAGGVDIGWTLGYMLNLTGMIPADAPAQWRAESYGVWVAKVVFMVLALVAVVGAALVQLFWLQD

SEQ ID NO: 4772 - protein, 495 aa, Homo sapiens
MGLSRKEQVFLALLGASGVSGLTALILLLVEATSVLLPTDIKFGIVFDAGSSHTSLFLYQWLANKENGTGVVSQALACQVEGPGISSYTSNAAQAGESLQGCLEEALVLIPEAQHRKTPTFLGATAGMRLLSRKNSSQARDIFAAVTQVLGRSPVDFWGAELLAGQAEGAFGWITVNYGLGTLVKYSFTGEWIQPPEEMLVGALDMGGASTQITFVPGGPILDKSTQADFRLYGSDYSVYTHSYLCFGRDQMLSRLLVGLVQSRPAALLRHPCYLSGYQTTLALGPLYESPCVHATPPLSLPQNLTVEGTGNPGACVSAIRELFNFSSCQGQEDCAFDGVYQPPLRGQFYAFSNFYYTFHFLNLTSRQPLSTVNATIWEFCQRPWKLVEASYPGQDRWLRDYCASGLYILTLLHEGYGFSEETWPSLEFRKQAGGVDIGWTLGYMLNLTGMIPADAPAQWRAESYGVWVAKVVFMVLALVAVVGAALVQLFWLQD

SEQ ID NO: 4773 - protein, 495 aa, Homo sapiens; identical to SEQ ID NO: 4772

SEQ ID NO: 4774 - protein, 135 aa, Homo sapiens
MISAHCNLCLLDSSDSCALASQVAGITGVHHHAQLIFVFLIETEFHHVGQAGLELWVQEILPPCLPKCWDYRCEPPRMALNFLFLGIPKFSTFSALEFVNIFVEYHMTVIPECSNLFMIYLGKFTTVLLFAIIWL

SEQ ID NO: 4775 - protein, 124 aa, Homo sapiens
MLMLFVFGVLLHEVSLSGQNEAPPNTHSIPGEPLYNYASIRLPEEHIPFFLHNNRHIATVCRKDSLCPYKKHLEKLKYCWGYEKSCKPEFRFGYPVCSYVDMGWTDTLESAEDIFWKQADFGYA

SEQ ID NO: 4776 - protein, 132 aa, Homo sapiens
MLMLFVFGVLLHEVSLSGQNEAPPNTHSIPGEPLYNYASIRLPEEHIPFFLHNNRHIATVCRKDSLCPYKKHLEKLKYCWGYEKSCKPEFRFGYPVCSYVDMGWTDTLESAEDIFWKQADFGYARERLEEMH

SEQ ID NO: 4777 - protein, 206 aa, Homo sapiens
MLMLFVFGVLLHEVSLSGQNEAPPNTHSIPGEPLYNYASIRLPEEHIPFFLHNNRHIATVCRKDSLCPYKKHLEKLKYCWGYEKSCKPEFRFGYPVCSYVDMGWTDTLESAEDIFWKQADFGYARERLEEMHVLCQPKETSDSSLVCSRYLQYCRATNLYLDLRNIKRNHDRFKEDFFQSGEIGGHCKLDIRTLTSEGQRKSPLQS

SEQ ID NO: 4778 - protein, 443 aa, Homo sapiens
MLMLFVFGVLLHEVSLSGQNEAPPNTHSIPGEPLYNYASIRLPEEHIPFFLHNNRHIATVCRKDSLCPYKKHLEKLKYCWGYEKSCKPEFRFGYPVCSYVDMGWTDTLESAEDIFWKQADFGYARERLEEMHVLCQPKETSDSSLVCSRYLQYCRATNLYLDLRNIKRNHDRFKEDFFQSGEIGGHCKLDIRTLTSEGQRKSPLQSWFAELQSYTQLNFRPIEDAKCDIVIEKPTYFMKLDAGVNMYHHFCDFINLYITQHVNNSFSTDVYIVMWDTDGKIRVTILARSTEYRKILNQNELVNALKTVSTFEVQIVDYKYRELGFLDQLRITHNTDIFIGMHGAGLTHLLFLPDWAAVFELYNCEDERCYLDLARLRGVHYITWRRQNKVFPQDKGHHPTLGEHPKFTNYSFDVEEFMYLVLQAADHVLQHPKWPFKKKHDEL

SEQ ID NO: 4779 - protein, 527 aa, Homo sapiens
MLMLFVFGVLLHEVSLSGQNEAPPNTHSIPGEPLYNYASIRLPEEHIPFFLHNNRHIATVCRKDSLCPYKKHLEKLKYCWGYEKSCKPEFRFGYPVCSYVDMGWTDTLESAEDIFWKQADFGYARERLEEMHVLCQPKETSDSSLVCSRYLQYCRATNLYLDLRNIKRNHDRFKEDFFQSGEIGGHCKLDIRTLTSEGQRKSPLQSWFAELQSYTQLNFRPIEDAKCDIVIEKPTYFMKLDAGVNMYHHFCDFINLYITQHVNNSFSTDVYIVMWDTSSYGYGDLFSDTWNAFTDYDVIHLKTYDSKRVCFKEAVFSLLPRMRYGLFYNTPLISGCQNTGLFRAFAQHVLHRLNITQEGPKDGKIRVTILARSTEYRKILNQNELVNALKTVSTFEVQIVDYKYRELGFLDQLRITHNTDIFIGMHGAGLTHLLFLPDWAAVFELYNCEDERCYLDLARLRGVHYITWRRQNKVFPQDKGHHPTLGEHPKFTNYSFDVEEFMYLVLQAADHVLQHPKWPFKKKHDEL

SEQ ID NO: 4780 - protein, 443 aa, Homo sapiens; identical to SEQ ID NO: 4778

SEQ ID NO: 4781 - protein, 527 aa, Homo sapiens; identical to SEQ ID NO: 4779

SEQ ID NO: 4782 - protein, 314 aa, Homo sapiens
MAPPQVLAFGLLLAAATATFAAAQEECVCENYKLAVNCFVNNNRQCQCTSVGAQNTVICSKLAAKCLVMKAEMNGSKLGRRAKPEGALQNNDGLYDPDCDESGLFKAKQCNGTSMCWCVNTAGVRRTDKDTEITCSERVRTYWIIIELKHKAREKPYDSKSLRTALQKEITTRYQLDPKFITSILYENNVITIDLVQNSSQKTQNDVDIADVAYYFEKDVKGESLFHSKKMDLTVNGEQLDLDPGQTLIYYVDEKAPEFSMQGLKAGVIAVIVVVVIAVVAGIVVLVISRKKRMAKYEKAEIKEMGEMHRELNA

SEQ ID NO: 4783 - protein, 199 aa, Homo sapiens
MAPPQVLAFGLLLAAATATFAAAQEGEARIGAELWSWAGLGGSGPRPSAPETGIIGRGPRGRAFQRGDRTVRPCSGSGPPRGRKRRGPSRGAASLRSFARLECVCENYKLAVNCFVNNNRQCQCTSVGAQNTVICSKLAAKCLVMKAEMNGSKLGRRAKPEGALQNNDGLYDPDCDESGLFKAKQCNGTSMCWCVNTAG

SEQ ID NO: 4784 - protein, 342 aa, Homo sapiens
METKHLGRGGAGRAGPHLWRGPRPNCSAGAGGGEPTHSPNSRAVTHQRAPAARECVCENYKLAVNCFVNNNRQCQCTSVGAQNTVICSKLAAKCLVMKAEMNGSKLGRRAKPEGALQNNDGLYDPDCDESGLFKAKQCNGTSMCWCVNTAGVRRTDKDTEITCSERVRTYWIIIELKHKAREKPYDSKSLRTALQKEITTRYQLDPKFITSILYENNVITIDLVQNSSQKTQNDVDIADVAYYFEKDVKGESLFHSKKMDLTVNGEQLDLDPGQTLIYYVDEKAPEFSMQGLKAGVIAVIVVVVIAVVAGIVVLVISRKKRMAKYEKAEIKEMGEMHRELNA

SEQ ID NO: 4785 - protein, 342 aa, Homo sapiens; identical to SEQ ID NO: 4784

SEQ ID NO: 4786 - protein, 122 aa, Homo sapiens
MFQIDQATKQCSKMTLTQPWDPLDIPQNSTFEDQYSIGGPQEQITVQEWSDRKSARSYETWIGIYTVKDCYPVQETFTINYSVILSTRFFDIQLGIKDPSVFTPPSTCQMAQLEKMSEDCSW

SEQ ID NO: 4787 - protein, 90 aa, Homo sapiens
MPGRAPLRTVPGALGAWLLGGLWAWTLCGLCSLGAVGAPRPCQAPQQWEGRQVMYQQSSGRNSRALLSYDGLNQRVRVLDERKALIPCKR

SEQ ID NO: 4788 - protein, 224 aa, Homo sapiens
MPGRAPLRTVPGALGAWLLGGLWAWTLCGLCSLGAVGAPRPCQAPQQWEGRQVMYQQSSGRNSRALLSYDGLNQRVRVLDERKALIPCKRLFEYILLYKDGVMFQIDQATKQCSKMTLTQPWDPLDIPQNSTFEDQYSIGGPQEQITVQEWSDRKSARSYETWIGIYTVKDCYPVQETFTINYSVILSTRFFDIQLGIKDPSVFTPPSTCQMAQLEKMSEDCSW

SEQ ID NO: 4789 - protein, 163 aa, Homo sapiens
MVRDWEGRCAHRGRPAGGGLSNTQRGGGRLFEYILLYKDGVMFQIDQATKQCSKMTLTQPWDPLDIPQNSTFEDQYSIGGPQEQITVQEWSDRKSARSYETWIGIYTVKDCYPVQETFTINYSVILSTRFFDIQLGIKDPSVFTPPSTCQMAQLEKMSEDCSW

SEQ ID NO: 4790 - protein, 73 aa, Homo sapiens
MALGVPISVYLLFNADNIEGPIALKFSHLCLEDHNSYCINGACAFHHELEKAICRCLKLKSPYNVCSGERRPL

SEQ ID NO: 4791 - protein, 133 aa, Homo sapiens
MALGVPISVYLLFNAMTALTEEAAVTVTPPITAQQADNIEGPIALKFSHLCLEDHNSYCINGACAFHHELEKAICRCFTGYTGERCEHLTLTSYAVDSYEKYIAIGIGVGLLLSGFLVIFYCYIRKRYEKDKI

SEQ ID NO: 4792 - protein, 103 aa, Homo sapiens
MALGVPISVYLLFNAMTALTEEAAVTVTPPITAQQADNIEGPIALKFSHLCLEDHNSYCINGACAFHHELEKAICRCFTGYTGERCLKLKSPYNVCSGERRPL

SEQ ID NO: 4793 - protein, 94 aa, Homo sapiens
MALGVPISVYLLFNAMTALTEEAAVTVTPPITAQQADNIEGPIALKFSHLCLEDHNSYCINGACAFHHELEKAICRCLKLKSPYNVCSGERRPL

SEQ ID NO: 4794 - protein, 94 aa, Homo sapiens
MALGVPISVYLLFNAMTALTEEAAVTVTPPITAQQGNWTVNKTEADNIEGPIALKFSHLCLEDHNSYCINGACAFHHELEKAICRCFTGYTGER

SEQ ID NO: 4795 - protein, 154 aa, Homo sapiens
MALGVPISVYLLFNAMTALTEEAAVTVTPPITAQQGNWTVNKTEADNIEGPIALKFSHLCLEDHNSYCINGACAFHHELEKAICRCFTGYTGERCEHLTLTSYAVDSYEKYIAIGIGVGLLLSGFLVIFYCYIRKRCLKLKSPYNVCSGERRPL

SEQ ID NO: 4796 - protein, 112 aa, Homo sapiens
MALGVPISVYLLFNAMTALTEEAAVTVTPPITAQQGNWTVNKTEADNIEGPIALKFSHLCLEDHNSYCINGACAFHHELEKAICRCFTGYTGERCLKLKSPYNVCSGERRPL

SEQ ID NO: 4797 - protein, 103 aa, Homo sapiens
MALGVPISVYLLFNAMTALTEEAAVTVTPPITAQQGNWTVNKTEADNIEGPIALKFSHLCLEDHNSYCINGACAFHHELEKAICRCLKLKSPYNVCSGERRPL

SEQ ID NO: 4798 - protein, 130 aa, Homo sapiens
  VARIANT 1: note = misc_feature - Xaa can be any naturally occurring amino acid
XTALTEEAAVTVTPPITAQQADNIEGPIALKFSHLCLEDHNSYCINGACAFHHELEKAICRCFTGYTGERCEHLTLTSYAVDSYEKYIAIGIGVGLLLSGFLVIFYCYIRKRCLKLKSPYNVCSGERRPL

SEQ ID NO: 4799 - protein, 218 aa, Homo sapiens
AQVTVSTGPGAPWEEDEIRRDRVEPQSVSLSWREPIPAGAPGANDTEYEIRYYEKGQSEQTYSMVKTGAPTVTVTNLKPATRYVFQIRAASPGPSWEAQSFNPSIEVQTLGEAASGSRDQSPAIVVTVVTISALLVLGSVMSVLAIWRRPCSYGKGGGDAHDEEELYFHFKVPTRRTFLDPQSCGDLLQAVHLFAKELDAKSVTLERSLGGGLETSPH

SEQ ID NO: 4800 - protein, 392 aa, Homo sapiens
EQTYSMVKTGAPTVTVTNLKPATRYVFQIRAASPGPSWEAQSFNPSIEVQTLGEAASGSRDQSPAIVVTVVTISALLVLGSVMSVLAIWRRPCSYGKGGGDAHDEEELYFHFKVPTRRTFLDPQSCGDLLQAVHLFAKELDAKSVTLERSLGGGRFGELCCGCLQLPGRQELLVAVHMLRDSASDSQRLGFLAEALTLGQFDHSHIVRLEGVVTRGSTLMIVTEYMSHGALDGFLRRHEGQLVAGQLMGLLPGLASAMKYLSEMGYVHRGLAARHVLVSSDLVCKISGFGRGPRDRSEAVYTTMSGRSPALWAAPETLQFGHFSSASDVWSFGIIMWEVMAFGERPYWDMSGQDVIKAVEDGFRLPPPRNCPNLLHRLMLDCWQKDPGLPPH

SEQ ID NO: 4801 - protein, 295 aa, Homo sapiens
METCAGPHPLRLFLCRMQLCLALLLGPWRPGTAEEVILLDSKASQAELGWTALPSNGWEEISGVDEHDRPIRTYQVCNVLEPNQDNWLQTGWISRGRGQRIFVELQFTLRDCSSIPGAAGTCKETFNVYYLETEADLGRGRPRLGGSRPRKIDTIAADESFTQGDLGERKMKLNTEVREIGPLSRRGFHLAFQDVGACVALVSVRVYYKQCRATVRGLATFPATAAESAFSTLVEVAGTCVAHSEGEPGSPPRMHCGADGEWLVPVGRCSCSAGFQERGDFCEGIQLAGGRGVGV

SEQ ID NO: 4802 - protein, 1008 aa, Homo sapiens
METCAGPHPLRLFLCRMQLCLALLLGPWRPGTAEEVILLDSKASQAELGWTALPSNGWEEISGVDEHDRPIRTYQVCNVLEPNQDNWLQTGWISRGRGQRIFVELQFTLRDCSSIPGAAGTCKETFNVYYLETEADLGRGRPRLGGSRPRKIDTIAADESFTQGDLGERKMKLNTEVREIGPLSRRGFHLAFQDVGACVALVSVRVYYKQCRATVRGLATFPATAAESAFSTLVEVAGTCVAHSEGEPGSPPRMHCGADGEWLVPVGRCSCSAGFQERGDFCEACPPGFYKVSPRRPLCSPCPEHSRALENASTFCVCQDSYARSPTDPPSASCTRPPSAPRDLQYSLSRSPLVLRLRWLPPADSGGRSDVTYSLLCLRCGREGPAGACEPCGPRVAFLPRQAGLRERAATLLHLRPGARYTVRVAALNGVSGPAAAAGTTYAQVTVSTGPGAPWEEDEIRRDRVEPQSVSLSWREPIPAGAPGANDTEYEIRYYEKGQSEQTYSMVKTGAPTVTVTNLKPATRYVFQIRAASPGPSWEAQSFNPSIEVQTLGEAASGSRDQSPAIVVTVVTISALLVLGSVMSVLAIWRRPCSYGKGGGDAHDEEELYFHFKVPTRRTFLDPQSCGDLLQAVHLFAKELDAKSVTLERSLGGGRFGELCCGCLQLPGRQELLVAVHMLRDSASDSQRLGFLAEALTLGQFDHSHIVRLEGVVTRGSTLMIVTEYMSHGALDGFLRRHEGQLVAGQLMGLLPGLASAMKYLSEMGYVHRGLAARHVLVSSDLVCKISGFGRGPRDRSEAVYTTMSGRSPALWAAPETLQFGHFSSASDVWSFGIIMWEVMAFGERPYWDMSGQDVIKAVEDGFRLPPPRNCPNLLHRLMLDCWQKDPGERPRFSQIHSILSKMVQDPEPPKCALTTCPRPPTPLADRAFSTFPSFGSVGAWLEALDLCRYKDSFAAAGYGSLEAVAEMTAQDLVSLGISLAEHREALLSGISALQARVLQLQGQGVQV

SEQ ID NO: 4803 - protein, 1014 aa, Homo sapiens
METCAGPHPLRLFLCRMQLCLALLLGPWRPGTAEEVILLDSKASQAELGWTALPSNGWEEISGVDEHDRPIRTYQVCNVLEPNQDNWLQTGWISRGRGQRIFVELQFTLRDCSSIPGAAGTCKETFNVYYLETEADLGRGRPRLGGSRPRKIDTIAADESFTQGDLGERKMKLNTEVREIGPLSRRGFHLAFQDVGACVALVSVRVYYKQCRATVRGLATFPATAAESAFSTLVEVAGTCVAHSEGEPGSPPRMHCGADGEWLVPVGRCSCSAGFQERGDFCEACPPGFYKVSPRRPLCSPCPEHSRALENASTFCVCQDSYARSPTDPPSASCTRPPSAPRDLQYSLSRSPLVLRLRWLPPADSGGRSDVTYSLLCLRCGREGPAGACEPCGPRVAFLPRQAGLRERAATLLHLRPGARYTVRVAALNGVSGPAAAAGTTYAQVTVSTGPGAPWEEDEIRRDRVEPQSVSLSWREPIPAGAPGANDTEYEIRYYEKGQSEQTYSMVKTGAPTVTVTNLKPATRYVFQIRAASPGPSWEAQSFNPSIEVQTLGEAASGSRDQSPAIVVTVVTISALLVLGSVMSVLAIWRRPCSYGKGGGDAHDEEELYFHFKVPTRRTFLDPQSCGDLLQAVHLFAKELDAKSVTLERSLGGGRFGELCCGCLQLPGRQELLVAVHMLRDSASDSQRLGFLAEALTLGQFDHSHIVRLEGVVTRGSTLMIVTEYMSHGALDGFLRRHEGQLVAGQLMGLLPGLASAMKYLSEMGYVHRGLAARHVLVSSDLVCKISGFGRGPRDRSEAVYTTMSGRSPALWAAPETLQFGHFSSASDVWSFGIIMWEVMAFGERPYWDMSGQDVIKAVEDGFRLPPPRNCPNLLHRLMLDCWQKDPGERPRFSQIHSILSKMVQDPEPPKCALTTCPRPPTPLADRAFSTFPSFGSVGAWLEALDLCRYKDSFAAAGYGSLEAVAEMTAQDLVSLGISLAEHREALLSGISALQARVLQLQGQGVQVIIKTCL

SEQ ID NO: 4804 - protein, 155 aa, Homo sapiens
MVKTGAPTVTVTNLKPATRYVFQIRAASPGPSWEAQSFNPSIEVQTLGEAASGSRDQSPAIVVTVVTISALLVLGSVMSVLAIWRRPCSYGKGGGDAHDEEELYFHFKVPTRRTFLDPQSCGDLLQAVHLFAKELDAKSVTLERSLGGGLETSPH

SEQ ID NO: 4805 - protein, 92 aa, Homo sapiens
  VARIANT 1: note = misc_feature - Xaa can be any naturally occurring amino acid
XHLRPGARYTVRVAALNGVSGPAAAAGTTYAQVTVSTGPGAPWEEDEIRRDRVEPQSVSLSWREPIPAGAPGANDTEYEIRYYEKDTCADFC

SEQ ID NO: 4806 - protein, 217 aa, Homo sapiens
  VARIANT 1: note = misc_feature - Xaa can be any naturally occurring amino acid
XQIRAASPGPSWEAQSFNPSIEVQTLGEAASGSRDQSPAIVVTVVTISALLVLGSVMSVLAIWRRPCSYGKGGGDAHDEEELYFHFKVPTRRTFLDPQSCGDLLQAVHLFAKELDAKSVTLERSLGGGLCSCLEALPPHQAHPPPRKSLACLIIGKRMAEGSVTLSWSSRAVWGAVLWLLAAPRSPGAARSRAYAEGQRLRLTEARLPGRGPHAGPV

SEQ ID NO: 4807 - protein, 983 aa, Homo sapiens
MDCQLSILLLLSCSVLDSFGELIPQPSNEVNLLDSKTIQGELGWISYPSHGWEEISGVDEHYTPIRTYQVCNVMDHSQNNWLRTNWVPRNSAQKIYVELKFTLRDCNSIPLVLGTCKETFNLYYMESDDDHGVKFREHQFTKIDTIAADESFTQMDLGDRILKLNTEIREVGPVNKKGFYLAFQDVGACVALVSVRVYFKKCPFTVKNLAMFPDTVPMDSQSLVEVRGSCVNNSKEEDPPRMYCSTEGEWLVPIGKCSCNAGYEERGFMCQACRPGFYKALDGNMKCAKCPPHSSTQEDGSMNCRCENNYFRADKDPPSMACTRPPSSPRNVISNINETSVILDWSWPLDTGGRKDVTFNIICKKCGWNIKQCEPCSPNVRFLPRQFGLTNTTVTVTDLLAHTNYTFEIDAVNGVSELSSPPRQFAAVSITTNQAAPSPVLTIKKDRTSRNSISLSWQEPEHPNGIILDYEVKYYEKQEQETSYTILRARGTNVTISSLKPDTIYVFQIRARTAAGYGTNSRKFEFETSPDSFSISGESSQVVMIAISAAVAIILLTVVIYVLIGRFCGYKSKHGADEKRLHFGNGHLKLPGLRTYVDPHTYEDPTQAVHEFAKELDATNISIDKVVGAGEFGEVCSGRLKLPSKKEISVAIKTLKVGYTEKQRRDFLGEASIMGQFDHPNIIRLEGVVTKSKPVMIVTEYMENGSLDSFLRKHDAQFTVIQLVGMLRGIASGMKYLSDMGYVHRDLAARNILINSNLVCKVSDFGLSRVLEDDPEAAYTTRGGKIPIRWTSPEAIAYRKFTSASDVWSYGIVLWEVMSYGERPYWEMSNQDVIKAVDEGYRLPPPMDCPAALYQLMLDCWQKDRNNRPKFEQIVSILDKLIRNPGSLKIITSAAARPSNLLLDQSNVDITTFRTTGDWLNGVWTAHCKEIFTGVEYSSCDTIAKISTDDMKKVGVTVVGPQKKIISSIKALETQSKNGPVPV

SEQ ID NO: 4808 - protein, 918 aa, Homo sapiens
MDCQLSILLLLSCSVLDSFGELIPQPSNEVNLLDSKTIQGELGWISYPSHGWEEISGVDEHYTPIRTYQVCNVMDHSQNNWLRTNWVPRNSAQKIYVELKFTLRDCNSIPLVLGTCKETFNLYYMESDDDHGVKFREHQFTKIDTIAADESFTQMDLGDRILKLNTEIREVGPVNKKGFYLAFQDVGACVALVSVRVYFKKCPFTVKNLAMFPDTVPMDSQSLVEVRGSCVNNSKEEDPPRMYCSTEGEWLVPIGKCSCNAGYEERGFMCQACRPGFYKALDGNMKCAKCPPHSSTQEDGSMNCRCENNYFRADKDPPSMACTRPPSSPRNVISNINETSVILDWSWPLDTGGRKDVTFNIICKKCGWNIKQCEPCSPNVRFLPRQFGLTNTTVTVTDLLAHTNYTFEIDAVNGVSELSSPPRQFAAVSITTNQAAPSPVLTIKKDRTSRNSISLSWQEPEHPNGIILDYEVKYYEKQEQETSYTILRARGTNVTISSLKPDTIYVFQIRARTAAGYGTNSRKFEFETSPDSFSISGESSQVVMIAISAAVAIILLTVVIYVLIGRFCGYKSKHGADEKRLHFGNGHLKLPGLRTYVDPHTYEDPTQAVHEFAKELDATNISIDKVVGAGEFGEVCSGRLKLPSKKEISVAIKTLKVGYTEKQRRDFLGEASIMGQFDHPNIIRLEGVVTKSKPVMIVTEYMENGSLDSFLRKHDAQFTVIQLVGMLRGIASGMKYLSDMGYVHRDLAARNILINSNLVCKVSDFGLSRVLEDDPEAAYTTRGGKIPIRWTSPEAIAYRKFTSASDVWSYGIVLWEVMSYGERPYWEMSNQDVIKAVDEGYRLPPPMDCPAALYQLMLDCWQKDRNNRPKFEQIVSILDKLIRNPGSLKIITSAAARPSNLLLDQSNVDITTFRTTVT

SEQ ID NO: 4809 - protein, 539 aa, Homo sapiens
MDCQLSILLLLSCSVLDSFGELIPQPSNEVNLLDSKTIQGELGWISYPSHGWEEISGVDEHYTPIRTYQVCNVMDHSQNNWLRTNWVPRNSAQKIYVELKFTLRDCNSIPLVLGTCKETFNLYYMESDDDHGVKFREHQFTKIDTIAADESFTQMDLGDRILKLNTEIREVGPVNKKGFYLAFQDVGACVALVSVRVYFKKCPFTVKNLAMFPDTVPMDSQSLVEVRGSCVNNSKEEDPPRMYCSTEGEWLVPIGKCSCNAGYEERGFMCQACRPGFYKALDGNMKCAKCPPHSSTQEDGSMNCRCENNYFRADKDPPSMACTRPPSSPRNVISNINETSVILDWSWPLDTGGRKDVTFNIICKKCGWNIKQCEPCSPNVRFLPRQFGLTNTTVTVTDLLAHTNYTFEIDAVNGVSELSSPPRQFAAVSITTNQAAPSPVLTIKKDRTSRNSISLSWQEPEHPNGIILDYEVKYYEKQEQETSYTILRARGTNVTISSLKPDTIYVFQIRARTAAGYGTNSRKFEFETSPDCMYYFNAV

SEQ ID NO: 4810 - protein, 37 aa, Homo sapiens
AYRKFTSASDVWSYGIVMWEVMSYGERPYWDMSNQDT

SEQ ID NO: 4811 - protein, 177 aa, Homo sapiens
MAGIFYFALFSCLFGICDAVTGSRVYPANEGPPSAPLNLISNVNETSVNLEWSSPQNTGGRQDISYNVVCKKCGAGDPSKCRPCGSGVHYTPQQNGLKTTKVSITDLLAHTNYTFEIWAVNGVSKYNPNPDQSVSVTVTTNQAAPSSIALVQAKEVTRYSVALAWLEPDRPNGVILE

SEQ ID NO: 4812 - protein, 38 aa, Homo sapiens
MAGIFYFALFSCLFGICDAVTGSRVYPANEVGGSEYHG

SEQ ID NO: 4813 - protein, 91 aa, Homo sapiens
MAGIFYFALFSCLFGICDAVTGSRVYPANEVTLLDSRSVQGELGWIASPLEGGWEEVSIMDEKNTPIRTYQVCNVMEPSQNNWLRTDWITR

SEQ ID NO: 4814 - protein, 149 aa, Homo sapiens
MAGIFYFALFSCLFGICDAVTGSRVYPANEVTLLDSRSVQGELGWIASPLEGGWEEVSIMDEKNTPIRTYQVCNVMEPSQNNWLRTDWITREGAQRVYIEIKFTLRDCNSLPGVMGTCKETFNLYYYESDNDKERFIRENQFVKIDTIA

SEQ ID NO: 4815 - protein, 986 aa, Homo sapiens
MAGIFYFALFSCLFGICDAVTGSRVYPANEVTLLDSRSVQGELGWIASPLEGGWEEVSIMDEKNTPIRTYQVCNVMEPSQNNWLRTDWITREGAQRVYIEIKFTLRDCNSLPGVMGTCKETFNLYYYESDNDKERFIRENQFVKIDTIAADESFTQVDIGDRIMKLNTEIRDVGPLSKKGFYLAFQDVGACIALVSVRVFYKKCPLTVRNLAQFPDTITGADTSSLVEVRGSCVNNSEEKDVPKMYCGADGEWLVPIGNCLCNAGHEERSGECQACKIGYYKALSTDATCAKCPPHSYSVWEGATSCTCDRGFFRADNDAASMPCTRPPSAPLNLISNVNETSVNLEWSSPQNTGGRQDISYNVVCKKCGAGDPSKCRPCGSGVHYTPQQNGLKTTKVSITDLLAHTNYTFEIWAVNGVSKYNPNPDQSVSVTVTTNQAAPSSIALVQAKEVTRYSVALAWLEPDRPNGVILEYEVKYYEKDQNERSYRIVRTAARNTDIKGLNPLTSYVFHVRARTAAGYGDFSEPLEVTTNTVPSRIIGDGANSTVLLVSVSGSVVLVVILIAAFVISRRRSKYSKAKQEADEEKHLNQGVRTYVDPFTYEDPNQAVREFAKEIDASCIKIEKVIGVGEFGEVCSGRLKVPGKREICVAIKTLKAGYTDKQRRDFLSEASIMGQFDHPNIIHLEGVVTKCKPVMIITEYMENGSLDAFLRKNDGRFTVIQLVGMLRGIGSGMKYLSDMSYVHRDLAARNILVNSNLVCKVSDFGMSRVLEDDPEAAYTTRGGKIPIRWTAPEAIAYRKFTSASDVWSYGIVMWEVMSYGERPYWDMSNQDVIKAIEEGYRLPPPMDCPIALHQLMLDCWQKERSDRPKFGQIVNMLDKLIRNPNSLKRTGTESSRPNTALLDPSSPEFSAVVSVGDWLQAIKMDRYKDNFTAAGYTTLEAVVHVNQEDLARIGITAITHQNKILSSVQAMRTQMQQMHGRMVPV

SEQ ID NO: 4816 - protein, 986 aa, Homo sapiens; identical to SEQ ID NO: 4815

SEQ ID NO: 4817 - protein, 949 aa, Homo sapiens
MAGIFYFALFSCLFGICDAVTGSRVYPANEVTLLDSRSVQGELGWIASPLEGGWEEVSIMDEKNTPIRTYQVCNVMEPSQNNWLRTDWITREGAQRVYIEIKFTLRDCNSLPGVMGTCKETFNLYYYESDNDKERFIRENQFVKIDTIAADESFTQVDIGDRIMKLNTEIRDVGPLSKKGFYLAFQDVGACIALVSVRVFYKKCPLTVRNLAQFPDTITGADTSSLVEVRGSCVNNSEEKDVPKMYCGADGEWLVPIGNCLCNAGHEERSGECQACKIGYYKALSTDATCAKCPPHSYSVWEGATSCTCDRGFFRADNDAASMPCTRPPSAPLNLISNVNETSVNLEWSSPQNTGGRQDISYNVVCKKCGAGDPSKCRPCGSGVHYTPQQNGLKTTKVSITDLLAHTNYTFEIWAVNGVSKYNPNPDQSVSVTVTTNQAAPSSIALVQAKEVTRYSVALAWLEPDRPNGVILEYEVKYYEKDQNERSYRIVRTAARNTDIKGLNPLTSYVFHVRARTAAGYGDFSEPLEVTTNTVPSRIIGDGANSTVLLVSVSGSVVLVVILIAAFVISRRRSKYSKAKQEADEEKHLNQGVRTYVDPFTYEDPNQAVREFAKEIDASCIKIEKVIGVGEFGEVCSGRLKVPGKREICVAIKTLKAGYTDKQRRDFLSEASIMGQFDHPNIIHLEGVVTKCKPVMIITEYMENGSLDAFLRKNDGRFTVIQLVGMLRGIGSGMKYLSDMSYVHRDLAARNILVNSNLVCKVSDFGMSRVLEDDPEAAYTTRGGKIPIRWTAPEAIAYRKFTSASDVWSYGIVMWEVMSYGERPYWDMSNQDVIKAIEEGYRLPPPMDCPIALHQLMLDCWQKERSDRPKFGQIVNMLDKLIRNPNSLKRTGTESSRPNTALLDPSSPEFSAVVSVGDWLQAIKMDRYKDNFTAAGYTTLEAVVHVNQE

SEQ ID NO: 4818 - protein, 126 aa, Homo sapiens
MDEKNTPIRTYQVCNVMEPSQNNWLRTDWITREGAQRVYIEIKFTLRDCNSLPGVMGTCKETFNLYYYESDNDKERFIRENQFVKIDTIAADESFTQVDIGDRIMKLNTEIRDVGPLSKKGFYLAF

SEQ ID NO: 4819 - protein, 189 aa, Homo sapiens
  VARIANT 1: note = misc_feature - Xaa can be any naturally occurring amino acid
XFHGSLSSTHFTCKIGYYKALSTDATCAKCPPHSYSVWEGATSCTCDRGFFRADNDAASMPCTRPPSAPLNLISNVNETSVNLEWSSPQNTGGRQDISYNVVCKKCGAGDPSKCRPCGSGVHYTPQQNGLKTTKVSITDLLAHTNYTFEIWAVNGVSKYNPNPDQSVSVTVTTNQAAPSSIALVQAKEV

SEQ ID NO: 4820 - protein, 279 aa, Homo sapiens
MVFQTRYPSWIILCYIWLLRFAHTGEAQAAKEVLLLDSKAQQTELEWISSPPNGWEEISGLDENYTPIRTYQVCQVMEPNQNNWLRTNWISKGNAQRIFVELKFTLRDCNSLPGVLGTCKETFNLYYYETDYDTGRNIRENLYVKIDTIAADESFTQGDLGERKMKLNTEVREIGPLSKKGFYLAFQDVGACIALVSVKVYYKKCWSIIENLAIFPDTVTGSEFSSLVEVRGTCVSSAEEEAENAPRMHCSAEGEWLVPIGKCICKAGYQQKGDTCERK

SEQ ID NO: 4821 - protein, 998 aa, Homo sapiens
MVFQTRYPSWIILCYIWLLRFAHTGEAQAAKEVLLLDSKAQQTELEWISSPPNGWEEISGLDENYTPIRTYQVCQVMEPNQNNWLRTNWISKGNAQRIFVELKFTLRDCNSLPGVLGTCKETFNLYYYETDYDTGRNIRENLYVKIDTIAADESFTQGDLGERKMKLNTEVREIGPLSKKGFYLAFQDVGACIALVSVKVYYKKCWSIIENLAIFPDTVTGSEFSSLVEVRGTCVSSAEEEAENAPRMHCSAEGEWLVPIGKCICKAGYQQKGDTCEPCGRGFYKSSSQDLQCSRCPTHSFSDKEGSSRCECEDGYYRAPSDPPYVACTRPPSAPQNLIFNINQTTVSLEWSPPADNGGRNDVTYRILCKRCSWEQGECVPCGSNIGYMPQQTGLEDNYVTVMDLLAHANYTFEVEAVNGVSDLSRSQRLFAAVSITTGQAAPSQVSGVMKERVLQRSVELSWQEPEHPNGVITEYEIKYYEKDQRERTYSTVKTKSTSASINNLKPGTVYVFQIRAFTAAGYGNYSPRLDVATLEEATGKMFEATAVSSEQNPVIIIAVVAVAGTIILVFMVFGFIIGRRHCGYSKADQEGDEELYFHFKFPGTKTYIDPETYEDPNRAVHQFAKELDASCIKIERVIGAGEFGEVCSGRLKLPGKRDVAVAIKTLKVGYTEKQRRDFLCEASIMGQFDHPNVVHLEGVVTRGKPVMIVIEFMENGALDAFLRKHDGQFTVIQLVGMLRGIAAGMRYLADMGYVHRDLAARNILVNSNLVCKVSDFGLSRVIEDDPEAVYTTTGGKIPVRWTAPEAIQYRKFTSASDVWSYGIVMWEVMSYGERPYWDMSNQDVIKAIEEGYRLPAPMDCPAGLHQLMLDCWQKERAERPKFEQIVGILDKMIRNPNSLKTPLGTCSRPISPLLDQNTPDFTTFCSVGEWLQAIKMERYKDNFTAAGYNSLESVARMTIEDVMSLGITLVGHQKKIMSSIQTMRAQMLHLHGTGIQV

SEQ ID NO: 4822 - protein, 1005 aa, Homo sapiens
MAPARGRLPPALWVVTAAAAAATCVSAARGEVNLLDTSTIHGDWGWLTYPAHGWDSINEVDESFQPIHTYQVCNVMSPNQNNWLRTSWVPRDGARRVYAEIKFTLRDCNSMPGVLGTCKETFNLYYLESDRDLGASTQESQFLKIDTIAADESFTGADLGVRRLKLNTEVRSVGPLSKRGFYLAFQDIGACLAILSLRIYYKKCPAMVRNLAAFSEAVTGADSSSLVEVRGQCVRHSEERDTPKMYCSAEGEWLVPIGKCVCSAGYEERRDACVACELGFYKSAPGDQLCARCPPHSHSAAPAAQACHCDLSYYRAALDPPSSACTRPPSAPVNLISSVNGTSVTLEWAPPLDPGGRSDITYNAVCRRCPWALSRCEACGSGTRFVPQQTSLVQASLLVANLLAHMNYSFWIEAVNGVSDLSPEPRRAAVVNITTNQAAPSQVVVIRQERAGQTSVSLLWQEPEQPNGIILEYEIKYYEKDKEMQSYSTLKAVTTRATVSGLKPGTRYVFQVRARTSAGCGRFSQAMEVETGKPRPRYDTRTIVWICLTLITGLVVLLLLLICKKRHCGYSKAFQDSDEEKMHYQNGQAPPPVFLPLHHPPGKLPEPQFYAEPHTYEEPGRAGRSFTREIEASRIHIEKIIGSGDSGEVCYGRLRVPGQRDVPVAIKALKAGYTERQRRDFLSEASIMGQFDHPNIIRLEGVVTRGRLAMIVTEYMENGSLDTFLRTHDGQFTIMQLVGMLRGVGAGMRYLSDLGYVHRDLAARNVLVDSNLVCKVSDFGLSRVLEDDPDAAYTTTGGKIPIRWTAPEAIAFRTFSSASDVWSFGVVMWEVLAYGERPYWNMTNRDVISSVEEGYRLPAPMGCPHALHQLMLDCWHKDRAQRPRFSQIVSVLDALIRSPESLRATATVSRCPPPAFVRSCFDLRGGSGGGGGLTVGDWLDSIRMGRYRDHFAAGGYSSLGMVLRMNAQDVRALGITLMGHQKKILGSIQTMRAQLTSTQGPRRHL

SEQ ID NO: 4823 - protein, 495 aa, Homo sapiens
MAPARGRLPPALWVVTAAAAAATCVSAARGEVNLLDTSTIHGDWGWLTYPAHGWDSINEVDESFQPIHTYQVCNVMSPNQNNWLRTSWVPRDGARRVYAEIKFTLRDCNSMPGVLGTCKETFNLYYLESDRDLGASTQESQFLKIDTIAADESFTGADLGVRRLKLNTEVRSVGPLSKRGFYLAFQDIGACLAILSLRIYYKKCPAMVRNLAAFSEAVTGADSSSLVEVRGQCVRHSEERDTPKMYCSAEGEWLVPIGKCVCSAGYEERRDACVACELGFYKSAPGDQLCARCPPHSHSAAPAAQACHCDLSYYRAALDPPSSACTRPPSAPVNLISSVNGTSVTLEWAPPLDPGGRSDITYNAVCRRCPWALSRCEACGSGTRFVPQQTSLVQASLLVANLLAHMNYSFWIEAVNGVSDLSPEPRRAAVVNITTNQAGRRRNSVPQRPGPPASPASDPSRDQSSAGDVLWAFRQVPLWPCAPHQDPELEALHCL

SEQ ID NO: 4824 - protein, 986 aa, Homo sapiens
MALRRLGAALLLLPLLAAVEETLMDSTTATAELGWMVHPPSGWEEVSGYDENMNTIRTYQVCNVFESSQNNWLRTKFIRRRGAHRIHVEMKFSVRDCSSIPSVPGSCKETFNLYYYEADFDSATKTFPNWMENPWVKVDTIAADESFSQVDLGGRVMKINTEVRSFGPVSRSGFYLAFQDYGGCMSLIAVRVFYRKCPRIIQNGAIFQETLSGAESTSLVAARGSCIANAEEVDVPIKLYCNGDGEWLVPIGRCMCKAGFEAVENGTVCRGCPSGTFKANQGDEACTHCPINSRTTSEGATNCVCRNGYYRADLDPLDMPCTTIPSAPQAVISSVNETSLMLEWTPPRDSGGREDLVYNIICKSCGSGRGACTRCGDNVQYAPRQLGLTEPRIYISDLLAHTQYTFEIQAVNGVTDQSPFSPQFASVNITTNQAAPSAVSIMHQVSRTVDSITLSWSQPDQPNGVILDYELQYYEKELSEYNATAIKSPTNTVTVQGLKAGAIYVFQVRARTVAGYGRYSGKMYFQTMTEAEYQTSIQEKLPLIIGSSAAGLVFLIAVVVIAIVCNRRGFERADSEYTDKLQHYTSGHMTPGMKIYIDPFTYEDPNEAVREFAKEIDISCVKIEQVIGAGEFGEVCSGHLKLPGKREIFVAIKTLKSGYTEKQRRDFLSEASIMGQFDHPNVIHLEGVVTKSTPVMIITEFMENGSLDSFLRQNDGQFTVIQLVGMLRGIAAGMKYLADMNYVHRDLAARNILVNSNLVCKVSDFGLSRFLEDDTSDPTYTSALGGKIPIRWTAPEAIQYRKFTSASDVWSYGIVMWEVMSYGERPYWDMTNQDVINAIEQDYRLPPPMDCPSALHQLMLDCWQKDRNHRPKFGQIVNTLDKMIRNPNSLKAMAPLSSGINLPLLDRTIPDYTSFNTVDEWLEAIKMGQYKESFANAGFTSFDVVSQMMMEDILRVGVTLAGHQKKILNSIQVMRAQMNQIQSVEV

SEQ ID NO: 4825 - protein, 1055 aa, Homo sapiens
MALRRLGAALLLLPLLAAVEETLMDSTTATAELGWMVHPPSGWEEVSGYDENMNTIRTYQVCNVFESSQNNWLRTKFIRRRGAHRIHVEMKFSVRDCSSIPSVPGSCKETFNLYYYEADFDSATKTFPNWMENPWVKVDTIAADESFSQVDLGGRVMKINTEVRSFGPVSRSGFYLAFQDYGGCMSLIAVRVFYRKCPRIIQNGAIFQETLSGAESTSLVAARGSCIANAEEVDVPIKLYCNGDGEWLVPIGRCMCKAGFEAVENGTVCRGCPSGTFKANQGDEACTHCPINSRTTSEGATNCVCRNGYYRADLDPLDMPCTTIPSAPQAVISSVNETSLMLEWTPPRDSGGREDLVYNIICKSCGSGRGACTRCGDNVQYAPRQLGLTEPRIYISDLLAHTQYTFEIQAVNGVTDQSPFSPQFASVNITTNQAAPSAVSIMHQVSRTVDSITLSWSQPDQPNGVILDYELQYYEKELSEYNATAIKSPTNTVTVQGLKAGAIYVFQVRARTVAGYGRYSGKMYFQTMTEAEYQTSIQEKLPLIIGSSAAGLVFLIAVVVIAIVCNRRGFERADSEYTDKLQHYTSGHMTPGMKIYIDPFTYEDPNEAVREFAKEIDISCVKIEQVIGAGEFGEVCSGHLKLPGKREIFVAIKTLKSGYTEKQRRDFLSEASIMGQFDHPNVIHLEGVVTKSTPVMIITEFMENGSLDSFLRQNDGQFTVIQLVGMLRGIAAGMKYLADMNYVHRDLAARNILVNSNLVCKVSDFGLSRFLEDDTSDPTYTSALGGKIPIRWTAPEAIQYRKFTSASDVWSYGIVMWEVMSYGERPYWDMTNQDVINAIEQDYRLPPPMDCPSALHQLMLDCWQKDRNHRPKFGQIVNTLDKMIRNPNSLKAMAPLSSGINLPLLDRTIPDYTSFNTVDEWLEAIKMGQYKESFANAGFTSFDVVSQMMMEDILRVGVTLAGHQKKILNSIQVMRAQMNQIQSVEGQPLARRPRATGRTKRCQPRDVTKKTCNSNDGKKKGMGKKKTDPGRGREIQGIFFKEDSHKESNDCSCGG

SEQ ID NO: 4826 - protein, 987 aa, Homo sapiens
MALRRLGAALLLLPLLAAVEETLMDSTTATAELGWMVHPPSGWEEVSGYDENMNTIRTYQVCNVFESSQNNWLRTKFIRRRGAHRIHVEMKFSVRDCSSIPSVPGSCKETFNLYYYEADFDSATKTFPNWMENPWVKVDTIAADESFSQVDLGGRVMKINTEVRSFGPVSRSGFYLAFQDYGGCMSLIAVRVFYRKCPRIIQNGAIFQETLSGAESTSLVAARGSCIANAEEVDVPIKLYCNGDGEWLVPIGRCMCKAGFEAVENGTVCRGCPSGTFKANQGDEACTHCPINSRTTSEGATNCVCRNGYYRADLDPLDMPCTTIPSAPQAVISSVNETSLMLEWTPPRDSGGREDLVYNIICKSCGSGRGACTRCGDNVQYAPRQLGLTEPRIYISDLLAHTQYTFEIQAVNGVTDQSPFSPQFASVNITTNQAAPSAVSIMHQVSRTVDSITLSWSQPDQPNGVILDYELQYYEKELSEYNATAIKSPTNTVTVQGLKAGAIYVFQVRARTVAGYGRYSGKMYFQTMTEAEYQTSIQEKLPLIIGSSAAGLVFLIAVVVIAIVCNRRRGFERADSEYTDKLQHYTSGHMTPGMKIYIDPFTYEDPNEAVREFAKEIDISCVKIEQVIGAGEFGEVCSGHLKLPGKREIFVAIKTLKSGYTEKQRRDFLSEASIMGQFDHPNVIHLEGVVTKSTPVMIITEFMENGSLDSFLRQNDGQFTVIQLVGMLRGIAAGMKYLADMNYVHRDLAARNILVNSNLVCKVSDFGLSRFLEDDTSDPTYTSALGGKIPIRWTAPEAIQYRKFTSASDVWSYGIVMWEVMSYGERPYWDMTNQDVINAIEQDYRLPPPMDCPSALHQLMLDCWQKDRNHRPKFGQIVNTLDKMIRNPNSLKAMAPLSSGINLPLLDRTIPDYTSFNTVDEWLEAIKMGQYKESFANAGFTSFDVVSQMMMEDILRVGVTLAGHQKKILNSIQVMRAQMNQIQSVEV

SEQ ID NO: 4827 - protein, 482 aa, Homo sapiens
MALRRLGAALLLLPLLAAVEETLMDSTTATAELGWMVHPPSGWEEVSGYDENMNTIRTYQVCNVFESSQNNWLRTKFIRRRGAHRIHVEMKFSVRDCSSIPSVPGSCKETFNLYYYEADFDSATKTFPNWMENPWVKVDTIAADESFSQVDLGGRVMKINTEVRSFGPVSRSGFYLAFQDYGGCMSLIAVRVFYRKCPRIIQNGAIFQETLSGAESTSLVAARGSCIANAEEVDVPIKLYCNGDGEWLVPIGRCMCKAGFEAVENGTVCRGCPSGTFKANQGDEACTHCPINSRTTSEGATNCVCRNGYYRADLDPLDMPCTTIPSAPQAVISSVNETSLMLEWTPPRDSGGREDLVYNIICKSCGSGRGACTRCGDNVQYAPRQLGLTEPRIYISDLLAHTQYTFEIQAVNGVTDQSPFSPQFASVNITTNQAAPSAVSIMHQVSRTVDSITLSWSQPDQPNGVILDYELQYYEKMKTQRS

SEQ ID NO: 4828 - protein, 946 aa, Homo sapiens
MWVPVLALPVCTYAETLMDSTTATAELGWMVHPPSGWEEVSGYDENMNTIRTYQVCNVFESSQNNWLRTKFIRRRGAHRIHVEMKFSVRDCSSIPSVPGSCKETFNLYYYEADFDSATKTFPNWMENPWVKVDTIAADESFSQVDLGGRVMKINTEVRSFGPVSRSGFYLAFQDYGGCMSLIAVRVFYRKCPRIIQNGAIFQETLSGAESTSLVAARGSCIANAEEVDVPIKLYCNGDGEWLVPIGRCMCKAGFEAVENGTVCRGCPSGTFKANQGDEACTHCPINSRTTSEGATNCVCRNGYYRADLDPLDMPCTTIPSAPQAVISSVNETSLMLEWTPPRDSGGREDLVYNIICKSCGSGRGACTRCGDNVQYAPRQLGLTEPRIYISDLLAHTQYTFEIQAVNGVTDQSPFSPQFASVNITTNQAAPSAVSIMHQVSRTVDSITLSWSQPDQPNGVILDYELQYYEKQELSEYNATAIKSPTNTVTVQGLKAGAIYVFQVRARTVAGYGRYSGKMYFQTMTEAEYQTSIQEKLPLIIGSSAAGLVFLIAVVVIAIVCNRRGFERADSEYTDKLQHYTSGHMTPGMKIYIDPFTYEDPNEAVREFAKEIDISCVKIEQVIGAGEFGEVCSGHLKLPGKREIFVAIKTLKSGYTEKQRRDFLSEASIMGQFDHPNVIHLEGVVTKSTPVMIITEFMENGSLDSFLRQNDGQFTVIQLVGMLRGIAAGMKYLADMNYVHRDLAARNILVNSNLVCKVSDFGLSRFLEDDTSDPTYTSALGGKIPIRWTAPEAIQYRKFTSASDVWSYGIVMWEVMSYGERPYWDMTNQDVINAIEQDYRLPPPMDCPSALHQLMLDCWQKDRNHRPKFGQIVNTLDKMIRNPNSLKAMAPLSSGINLPLLDRTIPDYTSFNTVDEWLEAIKMGQYKESFANAGFTSFDVVSQMMME

SEQ ID NO: 4829 - protein, 935 aa, Homo sapiens
MELRVLLCWASLAAALEETLLNTKLETADLKWVTFPQVDGQWEELSGLDEEQHSVRTYEVCDVQRAPGQAHWLRTGWVPRRGAVHVYATLRFTMLECLSLPRAGRSCKETFTVFYYESDADTATALTPAWMENPYIKVDTVAAEHLTRKRPGAEATGKVNVKTLRLGPLSKAGFYLAFQDQGACMALLSLHLFYKKCAQLTVNLTRFPETVPRELVVPVAGSCVVDAVPAPGPSPSLYCREDGQWAEQPVTGCSCAPGFEAAEGNTKCRACAQGTFKPLSGEGSCQPCPANSHSNTIGSAVCQCRVGYFRARTDPRGAPCTTPPSAPRSVVSRLNGSSLHLEWSAPLESGGREDLTYALRCRECRPGGSCAPCGGDLTFDPGPRDLVEPWVVVRGLRPDFTYTFEVTALNGVSSLATGPVPFEPVNVTTDREVPPAVSDIRVTRSSPSSLSLAWAVPRAPSGAVLDYEVKYHEKGAEGPSSVRFLKTSENRAELRGLKRGASYLVQVRARSEAGYGPFGQEHHSQTQLDESEGWREQLALIAGTAVVGVVLVLVVIVVAVLCLRKQSNGREAEYSDKHGQYLIGHGTKVYIDPFTYEDPNEAVREFAKEIDVSYVKIEEVIGAGEFGEVCRGRLKAPGKKESCVAIKTLKGGYTERQRREFLSEASIMGQFEHPNIIRLEGVVTNSMPVMILTEFMENGALDSFLRLNDGQFTVIQLVGMLRGIASGMRYLAEMSYVHRDLAARNILVNSNLVCKVSDFGLSRFLEENSSDPTYTSSLGGKIPIRWTAPEAIAFRKFTSASDAWSYGIVMWEVMSFGERPYWDMSNQDVINAIEQDYRLPPPPDCPTSLHQLMLDCWQKDRNARPRFPQVVSALDKMIRNPASLKIVARENGGDLLRIGVTLAGHQKKILASVQHMKSQAKPGTPGGTGGPAPQY

SEQ ID NO: 4830 - protein, 987 aa, Homo sapiens
MELRVLLCWASLAAALEETLLNTKLETADLKWVTFPQVDGQWEELSGLDEEQHSVRTYEVCDVQRAPGQAHWLRTGWVPRRGAVHVYATLRFTMLECLSLPRAGRSCKETFTVFYYESDADTATALTPAWMENPYIKVDTVAAEHLTRKRPGAEATGKVNVKTLRLGPLSKAGFYLAFQDQGACMALLSLHLFYKKCAQLTVNLTRFPETVPRELVVPVAGSCVVDAVPAPGPSPSLYCREDGQWAEQPVTGCSCAPGFEAAEGNTKCRACAQGTFKPLSGEGSCQPCPANSHSNTIGSAVCQCRVGYFRARTDPRGAPCTTPPSAPRSVVSRLNGSSLHLEWSAPLESGGREDLTYALRCRECRPGGSCAPCGGDLTFDPGPRDLVEPWVVVRGLRPDFTYTFEVTALNGVSSLATGPVPFEPVNVTTDREVPPAVSDIRVTRSSPSSLSLAWAVPRAPSGAVLDYEVKYHEKGAEGPSSVRFLKTSENRAELRGLKRGASYLVQVRARSEAGYGPFGQEHHSQTQLDESEGWREQLALIAGTAVVGVVLVLVVIVVAVLCLRKQSNGREAEYSDKHGQYLIGHGTKVYIDPFTYEDPNEAVREFAKEIDVSYVKIEEVIGAGEFGEVCRGRLKAPGKKESCVAIKTLKGGYTERQRREFLSEASIMGQFEHPNIIRLEGVVTNSMPVMILTEFMENGALDSFLRLNDGQFTVIQLVGMLRGIASGMRYLAEMSYVHRDLAARNILVNSNLVCKVSDFGLSRFLEENSSDPTYTSSLGGKIPIRWTAPEAIAFRKFTSASDAWSYGIVMWEVMSFGERPYWDMSNQDVINAIEQDYRLPPPPDCPTSLHQLMLDCWQKDRNARPRFPQVVSALDKMIRNPASLKIVARENGGASHPLLDQRQPHYSAFGSVGEWLRAIKMGRYEESFAAAGFGSFELVSQISAEDLLRIGVTLAGHQKKILASVQHMKSQAKPGTPGGTGGPAPQY

SEQ ID NO: 4831 - protein, 306 aa, Homo sapiens
MELRVLLCWASLAAALEETLLNTKLETADLKWVTFPQVDGQWEELSGLDEEQHSVRTYEVCDVQRAPGQAHWLRTGWVPRRGAVHVYATLRFTMLECLSLPRAGRSCKETFTVFYYESDADTATALTPAWMENPYIKVDTVAAEHLTRKRPGAEATGKVNVKTLRLGPLSKAGFYLAFQDQGACMALLSLHLFYKKCAQLTVNLTRFPETVPRELVVPVAGSCVVDAVPAPGPSPSLYCREDGQWAEQPVTGCSCAPGFEAAEGNTKCRGRRGSQQRAVPEDVRKPGRAAGAEAGSQLPGAGTGAL

SEQ ID NO: 4832 - protein, 126 aa, Homo sapiens
MPELVVTALLAPSRLSLKLLRAFMWSLVFSVALVAAAVYGCIALTHVLCRPRRGCCGRRRSASPACLSDPSLGEHGFLNLKSSGLRLHYVSAGRGNGPLMLFLHGFPENWFSWRYQLREFQSRFHV

SEQ ID NO: 4833 - protein, 360 aa, Homo sapiens
MPELVVTALLAPSRLSLKLLRAFMWSLVFSVALVAAAVYGCIALTHVLCRPRRGCCGRRRSASPACLSDPSLGEHGFLNLKSSGLRLHYVSAGRGNGPLMLFLHGFPENWFSWRYQLREFQSRFHVVAVDLRGYGPSDAPRDVDCYTIDLLLVDIKDVILGLGYSKCILVAHDWGALLAWHFSIYYPSLVERMVVVSGAPMSVYQDYSLHHISQFFRSHYMFLFQLPWLPEKLLSMSDFQILKTTLTHRKTGIPCLTPSELEAFLYNFSQPGGLTGPLNYYRNLFRNFPLEPQELTTPTLLLWGEKDTYLELGLVEAIGSRFVPGRLEAHILPGIGHWIPQSNPQEMHQYMWAFLQDLLD

SEQ ID NO: 4834 - protein, 360 aa, Homo sapiens; identical to SEQ ID NO: 4833

SEQ ID NO: 4835 - protein, 360 aa, Homo sapiens; identical to SEQ ID NO: 4833

SEQ ID NO: 4836 - protein, 193 aa, Homo sapiens
MGVHECPAWLWLLLSLLSLPLGLPVLGAPPRLICDSRVLERYLLEAKEAENITTGCAEHCSLNENITVPDTKVNFYAWKRMEVGQQAVEVWQGLALLSEAVLRGQALLVNSSQPWEPLQLHVDKAVSGLRSLTTLLRALGAQKEAISPPDAASAAPLRTITADTFRKLFRVYSNFLRGKLKLYTGEACRTGDR

SEQ ID NO: 4837 - protein, 133 aa, Homo sapiens
MGSSGLLSLLVLFVLLANVQGPGLTDWLFPRRCPKIREECEFQERDVCTKDRQCQDNKKCCVFSCGKKCLDLKQDVCEMPKETGPCLAYFLHWWYDKKDNTCSMFVYGGCQGNNNNFQSKANCLNTCKNKRFP

SEQ ID NO: 4838 - protein, 77 aa, Homo sapiens
MGSSGLLSLLVLFVLLANVQGPGLTDWLFPRRCPKIREECEFQERDVCTKDRQCQDNKKCCVFSCGKKCLDLKQGKQ

SEQ ID NO: 4839 - protein, 117 aa, Homo sapiens
MLSKAHGCKTALSLGRCPKIREECEFQERDVCTKDRQCQDNKKCCVFSCGKKCLDLKQDVCEMPKETGPCLAYFLHWWYDKKDNTCSMFVYGGCQGNNNNFQSKANCLNTCKNKRFP

SEQ ID NO: 4840 - protein, 179 aa, Homo sapiens
MGSSGLLSLLVLFVLLANVQGPGLTDWLFPRRCPKIREECEFQERDVCTKDRQCQDNKKCCVFSCGKKCLDLKQDVCEMPKETGPCLAYFLHWWYDKKDNTCSMFVYGGCQGNNNNFQSKANCLNTCKNKQPCPKIKVECEVEEIDQCTKPRDCPENMKCCPFSRGKKCLDFRKASLST

SEQ ID NO: 4841 - protein, 762 aa, Homo sapiens
MAAAAQLSLTQLSSGNPVYEKYYRQVDTGNTGRVLASDAAAFLKKSGLPDLILGKIWDLADTDGKGILNKQEFFVALRLVACAQNGLEVSLSSLNLAVPPPRFHDTSSPLLISGTSAAELPWAVKPEDKAKYDAIFDSLSPVNGFLSGDKVKPVLLNSKLPVDILGRVWELSDIDHDGMLDRDEFAVAMFLVYCALEKEPVPMSLPPALVPPSKRKTWVVSPAEKAKYDEIFLKTDKDMDGFVSGLEVREIFLKTGLPSTLLAHIWSLCDTKDCGKLSKDQFALAFHLISQKLIKGIDPPHVLTPEMIPPSDRASLQKNIIGSSPVADFSAIKELDTLNNEIVDLQREKNNVEQDLKEKEDTIKQRTSEVQDLQDEVQRENTNLQKLQAQKQQVQELLDELDEQKAQLEEQLKEVRKKCAEEAQLARSSPELLPSGVTDENEVTTAVTEKVCSELDNNRHSKEEDPFNVDSSSLTGPVADTNLDFFQSDPFVGSDPFKDDPFGKIDPFGGDPFKGSDPFASDCFFRQSTDPFATSSTDPFSAANNSSITSVETLKHNDPFAPGGTVVAASDSATDPFASVFGNESFGGGFADFSTLSKVNNEDPFRSATSSSVSNVVITKNVFEETSVKSEDEPPALPPKIGTPTRPCPLPPGKRSINKLDSPDPFKLNDPFQPFPGNDSPKEKDPEIFCDPFTSATTTTNKEADPSNFANFSAYPSEEDMIEWAKRESEREEEQRLARLNQQEQEDLELAIALSKSEISEA

SEQ ID NO: 4842 - protein, 896 aa, Homo sapiens
MAAAAQLSLTQLSSGNPVYEKYYRQVDTGNTGRVLASDAAAFLKKSGLPDLILGKIWDLADTDGKGILNKQEFFVALRLVACAQNGLEVSLSSLNLAVPPPRFHDTSSPLLISGTSAAELPWAVKPEDKAKYDAIFDSLSPVNGFLSGDKVKPVLLNSKLPVDILGRVWELSDIDHDGMLDRDEFAVAMFLVYCALEKEPVPMSLPPALVPPSKRKTWVVSPAEKAKYDEIFLKTDKDMDGFVSGLEVREIFLKTGLPSTLLAHIWSLCDTKDCGKLSKDQFALAFHLISQKLIKGIDPPHVLTPEMIPPSDRASLQKNIIGSSPVADFSAIKELDTLNNEIVDLQREKNNVEQDLKEKEDTIKQRTSEVQDLQDEVQRENTNLQKLQAQKQQVQELLDELDEQKAQLEEQLKEVRKKCAEEAQLISSLKAELTSQESQISTYEEELAKAREELSRLQQETAELEESVESGKAQLEPLQQHLQDSQQEISSMQMKLMEMKDLENHNSQLNWCSSPHSILVNGATDYCSLSTSSSETANLNEHVEGQSNLESEPIHQESPARSSPELLPSGVTDENEVTTAVTEKVCSELDNNRHSKEEDPFNVDSSSLTGPVADTNLDFFQSDPFVGSDPFKDDPFGKIDPFGGDPFKGSDPFASDCFFRQSTDPFATSSTDPFSAANNSSITSVETLKHNDPFAPGGTVVAASDSATDPFASVFGNESFGGGFADFSTLSKVNNEDPFRSATSSSVSNVVITKNVFEETSVKSEDEPPALPPKIGTPTRPCPLPPGKRSINKLDSPDPFKLNDPFQPFPGNDSPKEKDPEIFCDPFTSATTTTNKEADPSNFANFSAYPSEEDMIEWAKRESEREEEQRLARLNQQEQEDLELAIALSKSEISEA

SEQ ID NO: 4843 - protein, 90 aa, Homo sapiens
  VARIANT 1: note = misc_feature - Xaa can be any naturally occurring amino acid
XAAAQLSLTQLSSGNPVYEKYYRQVDTGNTGRVLASDAAAFLKKSGLPDLILGKIWDLADTDGKGILNKQHDTSSPLLISGTSAAELPWA

SEQ ID NO: 4844 - protein, 659 aa, Homo sapiens
MDSQGRVWAQEMLLRVSPDHVTLLDPASKEELESYPLGAIVRCDAVMPPGRSRSLLLLVCQEPERAQPDVHFFQGLRLGAELIREDIQGALHNYRSGRGERRAAALRATQEELQRDRSPAAETPPLQRRPSVRAVISTVERGAGRGRPQAKPIPEAEEAQRPEPVGTSSNADSASPDLGPRGPDLAVLQAEREVDILNHVFDDVESFVSRLQKSAEAARVLEHRERGRRSRRRAAGEGLLTLRAKPPSEAEYTDVLQKIKYAFSLLARLRGNIADPSSPELLHFLFGPLQMIVNTSGGPEFASSVRRPHLTSDAVALLRDNVTPRENELWTSLGDSWTRPGLELSPEEGPPYRPEFFSGWEPPVTDPQSRAWEDPVEKQLQHERRRRQQSAPQVAVNGHRDLEPESEPQLESETAGKWVLCNYDFQARNSSELSVKQRDVLEVLDDSRKWWKVRDPAGQEGYVPYNILTPYPGPRLHHSQSPARSLNSTPPPPPAPAPAPPPALARPRWDRPRWDSCDSLNGLDPSEKEKFSQMLIVNEELQARLAQGRSGPSRAVPGPRAPEPQLSPGSDASEVRAWLQAKGFSSGTVDALGVLTGAQLFSLQKEELRAVSPEEGARVYSQVTVQRSLLEDKEKVSELEAVMEKQKKKVEGEVEMEVI

SEQ ID NO: 4845 - protein, 548 aa, Homo sapiens
MGRKAIVLAIANTSLAFPLCQHLVTFCLGEDDGVHTVEDASRKLAVMDSQGRVWAQEMLLRVSPDHVTLLDPASKEELESYPLGAIVRCDAVMPPGRSRSLLLLVCQEPERAQPDVHFFQGLRLGAELIREDIQGALHNYRSGRGERRAAALRATQEELQRDRSPAAETPPLQRRPSVRAVISTVERGAGRGRPQAKPIPEAEEAQRPEPVGTSSNADSASPDLGPRGPDLAVLQAEREVDILNHVFDDVESFVSRLQKSAEAARVLEHRERGRRSRRRAAGEGLLTLRAKPPSEAEYTDVLQKIKYAFSLLARLRGNIADPSSPELLHFLFGPLQMIVNTSGGPEFASSVRRPHLTSDAVALLRDNVTPRENELWTSLGDSWTRPGLELSPEEGPPYRPEFFSGWEPPVTDPQSRAWEDPVEKQLQHERRRRQVTQATQQGRGWEVRGRGRSAWPRLTRLSYFLQQSAPQVAVNGHRDLEPESEPQLESETAGKWVLCNYDFQARNSSELSVKQRDVLEDKEKVSELEAVMEKQKKKVEGEVEMEVI

SEQ ID NO: 4846 - protein, 428 aa, Homo sapiens
MHLVTFCLGEDDGVHTVEDASRKLAVMDSQGRVWAQEMLLRVSPDHVTLLDPASKEELESYPLGAIVRCDAVMPPGRSRSLLLLVCQEPERAQPDVHFFQGLRLGAELIREDIQGALHNYRSGRGERRAAALRATQEELQRDRSPAAETPPLQRRPSVRAVISTVERGAGRGRPQAKPIPEAEEAQRPEPVGTSSNADSASPDLGPRGPDLAVLQAEREVDILNHVFDDVESFVSRLQKSAEAARVLEHRERGRRSRRRAAGEGLLTLRAKPPSEAEYTDVLQKIKYAFSLLARLRGNIADPSSPELLHFLFGPLQMIVNTSGGPEFASSVRRPHLTSDAVALLRDNVTPRENELWTSLGDSWTRPGLELSPEEGPPYRPEFFSGWEPPVTDPQSRAWEDPVEKQLQHERRRRQQSAPQVAVNGWVRW

SEQ ID NO: 4847 - protein, 596 aa, Homo sapiens
MNRTWPRRIWGSSQDEAELIREDIQGALHNYRSGRGERRAAALRATQEELQRDRSPAAETPPLQRRPSVRAVISTVERGAGRGRPQAKPIPEAEEAQRPEPVGTSSNADSASPDLGPRGPDLAVLQAEREVDILNHVFDDVESFVSRLQKSAEAARVLEHRERGRRSRRRAAGEGLLTLRAKPPSEAEYTDVLQKIKYAFSLLARLRGNIADPSSPELLHFLFGPLQMIVNTSGGPEFASSVRRPHLTSDAVALLRDNVTPRENELWTSLGDSWTRPGLELSPEEGPPYRPEFFSGWEPPVTDPQSRAWEDPVEKQLQHERRRRQQSAPQVAVNGHRDLEPESEPQLESETAGKWVLCNYDFQARNSSELSVKQRDVLEVLDDSRKWWKVRDPAGQEGYVPYNILTPYPGPRLHHSQSPARSLNSTPPPPPAPAPAPPPALARPRWDRPRWDSCDSLNGLDPSEKEKFSQMLIVNEELQARLAQGRSGPSRAVPGPRAPEPQLSPGSDASEVRAWLQAKGFSSGTVDALGVLTGAQLFSLQKEELRAVSPEEGARVYSQVTVQRSLLEDKEKVSELEAVMEKQKKKVEGEVEMEVI

SEQ ID NO: 4848 - protein, 409 aa, Homo sapiens
MNRTWPRRIWGSSQDEVGFASSVRRPHLTSDAVALLRDNVTPRENELWTSLGDSWTRPGLELSPEEGPPYRPEFFSGWEPPVTDPQSRAWEDPVEKQLQHERRRRQVTQATQQGRGWEVRGRGRSAWPRLTRLSYFLQQSAPQVAVNGHRDLEPESEPQLESETAGKWVLCNYDFQARNSSELSVKQRDVLEVLDDSRKWWKVRDPAGQEGYVPYNILTPYPGPRLHHSQSPARSLNSTPPPPPAPAPAPPPALARPRWDRPRWDSCDSLNGLDPSEKEKFSQMLIVNEELQARLAQGRSGPSRAVPGPRAPEPQLSPGSDASEVRAWLQAKGFSSGTVDALGVLTGAQLFSLQKEELRAVSPEEGARVYSQVTVQRSLLEDKEKVSELEAVMEKQKKKVEGEVEMEVI

SEQ ID NO: 4849 - protein, 723 aa, Homo sapiens
MSTATGPEAAPKPSAKSIYEQRKRYSTVVMADVSQYPVNHLVTFCLGEDDGVHTVEDASRKLAVMDSQGRVWAQEMLLRVSPDHVTLLDPASKEELESYPLGAIVRCDAVMPPGRSRSLLLLVCQEPERAQPDVHFFQGLRLGAELIREDIQGALHNYRSGRGERRAAALRATQEELQRDRSPAAETPPLQRRPSVRAVISTVERGAGRGRPQAKPIPEAEEAQRPEPVGTSSNADSASPDLGPRGPDLAVLQAEREVDILNHVFDDVESFVSRLQKSAEAARVLEHRERGRRSRRRAAGEGLLTLRAKPPSEAEYTDVLQKIKYAFSLLARLRGNIADPSSPELLHFLFGPLQMIVNTSGGPEFASSVRRPHLTSDAVALLRDNVTPRENELWTSLGDSWTRPGLELSPEEGPPYRPEFFSGWEPPVTDPQSRAWEDPVEKQLQHERRRRQQSAPQVAVNGHRDLEPESEPQLESETAGKWVLCNYDFQARNSSELSVKQRDVLEVLDDSRKWWKVRDPAGQEGYVPYNILTPYPGPRLHHSQSPARSLNSTPPPPPAPAPAPPPALARPRWDRPRWDSCDSLNGLDPSEKEKFSQMLIVNEELQARLAQGRSGPSRAVPGPRAPEPQLSPGSDASEVRAWLQAKGFSSGTVDALGVLTGAQLFSLQKEELRAVSPEEGARVYSQVTVQRSLLEDKEKVSELEAVMEKQKKKVEGEVEMEVI

SEQ ID NO: 4850 - protein, 715 aa, Homo sapiens
MHLLPALAGVLATLVLAQPCEGTDPASPGAVETSVLRDCIAEAKLLVDAAYNWTQKSIKQRLRSGSASPMDLLSYFKQPVAATRTVVRAADYMHVALGLLEEKLQPQRSGPFNVTDVLTEPQLRLLSQASGCALRDQAERCSDKYRTITGRCNNKRRPLLGASNQALARWLPAEYEDGLSLPFGWTPSRRRNGFLLPLVRAVSNQIVRFPNERLTSDRGRALMFMQWGQFIDHDLDFSPESPARVAFTAGVDCERTCAQLPPCFPIKIPPNDPRIKNQRDCIPFFRSAPSCPQNKNRVRNQINALTSFVDASMVYGSEVSLSLRLRNRTNYLGLLAINQRFQDNGRALLPFDNLHDDPCLLTNRSARIPCFLAGDTRSTETPKLAAMHTLFMREHNRLATELRRLNPRWNGDKLYNEARKIMGAMVQIITYRDFLPLVLGKARARRTLGHYRGYCSNVDPRVANVFTLAFRFGHTMLQPFMFRLDSQYRASAPNSHVPLSSAFFASWRIVYEGGIDPILRGLMATPAKLNRQDAMLVDELRDRLFRQVRRIGLDLAALNMQRSRDHGLPGYNAWRRFCGLSQPRNLAQLSRVLKNQDLARKFLNLYGTPDNIDIWIGAIAEPLLPGARVGPLLACLFENQFRRARDGDRFWWQKRGVFTKRQRKALSRISLSRIICDNTGITTVSRDIFRANIYPRGFVNCSRIPRLNLSAWRGT

SEQ ID NO: 4851 - protein, 234 aa, Homo sapiens
MKTLAGLVLGLVIFDAAVTAPTLESINYDSETYDATLEDLDNLYNYENIPVDKVEIEIATVMPSGNRELLTPPPQPEKAQEEEEEEESTPRLIDGSSPQEPEFTGVLGPHTNEDFPTCLLCTCISTTVYCDDHELDAIPPLPKNTAYFYSRFNRIKKINKNDFASLSDLKRIDLTSNLISEIDEDAFRKLPQLRELVLRDNKIRQLPELPTTLTFIDISNNRLGRKGIKQEAFK

SEQ ID NO: 4852 - protein, 322 aa, Homo sapiens
MKTLAGLVLGLVIFDAAVTAPTLESINYDSETYDATLEDLDNLYNYENIPVDKVEIEIATVMPSGNRELLTPPPQPEKAQEEEEEEESTPRLIDGSSPQEPEFTGVLGPHTNEDFPTCLLCTCISTTVYCDDHELDAIPPLPKNTAYFYSRFNRIKKINKNDFASLSDLKRIDLTSNLISEIDEDAFRKLPQLRELVLRDNKIRQLPELPTTLTFIDISNNRLGRKGIKQEAFKDMYDLHHLYLTDNNLDHIPLPLPENLRALHLQNNNILEMHEDTFCNVKNLTYIRKALEDIRLDGNPINLSKTPQAYMCLPRLPVGSLV

SEQ ID NO: 4853 - protein, 294 aa, Homo sapiens
MNFILFIFIPGVFSLKSSTLKPTIEALPNVLPLNEDVNKQEEKNEDHTPNYAPANEKNGNYYKDIKQYVFTTQNPNGTESEISVRATTDLNFALKNDKTVNATTYEKSTIEEETTTSEPSHKNIQRSTPNVPAFWTMLAKAINGTAVVMDDKDQLFHPIPESDVNATQGENQPDLEDLKIKIMLGISLMTLLLFVVLLAFCSATLYKLRHLSYKSCESQYSVNPELATMSYFHPSEGVSDTSFSKSAESSTFLGTTSSDMRRSGTRTSESKIMTDIISIGSDNEMHENDESVTR

SEQ ID NO: 4854 - protein, 127 aa, Homo sapiens
MNFILFIFIPGVFSLKSSTLKPTIEALPNVLPLNEDVNKQEEKNEDHTPNYAPANEKNGNYYKDIKQYVFTTQNPNGTESEISVRATTDLNFALKNDKTVNATTYEKSTIEEETTTSEPSHKNIQSI

SEQ ID NO: 4855 - protein, 265 aa, Homo sapiens
MNFILFIFIPGVFSLKSSTLKPTIEALPNVLPLNEDVNKQEEKNEDHTPNYAPANEKNGNYYKDIKQYVFTTQNPNGTESEISVRATTDLNFALKNGSTPNVPAFWTMLAKAINGTAVVMDDKDQLFHPIPESDVNATQGENQPDLEDLKIKIMLGISLMTLLLFVVLLAFCSATLYKLRHLSYKSCESQYSVNPELATMSYFHPSEGVSDTSFSKSAESSTFLGTTSSDMRRSGTRTSESKIMTDIISIGSDNEMHENDESVTR

SEQ ID NO: 4856 - skipped

SEQ ID NO: 4857 - protein, 9 aa, Homo sapiens
MAFPCFDEP

SEQ ID NO: 4858 - protein, 129 aa, Homo sapiens
MVFLPLKWSLATMSFLLSSLLALLTVSTPSWCQSTEASPKRSDGTPFPWNKIRLPEYVIPVHYDLLIHANLTTLTFWGTTKVEITASQPTSTIILHSHHLQISRATLRKGAGERLSEEPLQVLEHPRQE

SEQ ID NO: 4859 - protein, 948 aa, Homo sapiens
MVFLPLKWSLATMSFLLSSLLALLTVSTPSWCQSTEASPKRSDGTPFPWNKIRLPEYVIPVHYDLLIHANLTTLTFWGTTKVEITASQPTSTIILHSHHLQISRATLRKGAGERLSEEPLQVLEHPRQEQIALLAPEPLLVGLPYTVVIHYAGNLSETFHGFYKSTYRTKEGELRILASTQFEPTAARMAFPCFDEPAFKASFSIKIRREPRHLAISNMPLVKSVTVAEGLIEDHFDVTVKMSTYLVAFIISDFESVSKITKSGVKVSVYAVPDKINQADYALDAAVTLLEFYEDYFSIPYPLPKQDLAAIPDFQSGAMENWGLTTYRESALLFDAEKSSASSKLGITMTVAHELAHQWFGNLVTMEWWNDLWLNEGFAKFMEFVSVSVTHPELKVGDYFFGKCFDAMEVDALNSSHPVSTPVENPAQIREMFDDVSYDKGACILNMLREYLSADAFKSGIVQYLQKHSYKNTKNEDLWDSMASICPTDGVKGMDGFCSRSQHSSSSSHWHQEGVDVKTMMNTWTLQKGFPLITITVRGRNVHMKQEHYMKGSDGAPDTGYLWHVPLTFITSKSDMVHRFLLKTKTDVLILPEEVEWIKFNVGMNGYYIVHYEDDGWDSLTGLLKGTHTAVSSNDRASLINNAFQLVSIGKLSIEKALDLSLYLKHETEIMPVFQGLNELIPMYKLMEKRDMNEVETQFKAFLIRLLRDLIDKQTWTDEGSVSERMLRSQLLLLACVHNYQPCVQRAEGYFRKWKESNGNLSLPVDVTLAVFAVGAQSTEGWDFLYSKYQFSLSSTEKSQIEFALCRTQNKEKLQWLLDESFKGDKIKTQEFPQILTLIGRNPVGYPLAWQFLRKNWNKLVQKFELGSSSIAHMVMGTTNQFSTRTRLEEVKGFFSSLKENGSQLRCVQQTIETIEENIGWMDKNFDKIRVWLQSEKLEHDPEADATG

SEQ ID NO: 4860 - protein, 941 aa, Homo sapiens
MVFLPLKWSLATMSFLLSSLLALLTVSTPSWCQSTEASPKRSDGTPFPWNKIRLPEYVIPVHYDLLIHANLTTLTFWGTTKVEITASQPTSTIILHSHHLQISRATLRKGAGERLSEEPLQVLEHPRQEQIALLAPEPLLVGLPYTVVIHYAGNLSETFHGFYKSTYRTKEGELRILASTQFEPTAARMAFPCFDEPAFKASFSIKIRREPRHLAISNMPLVKSVTVAEGLIEDHFDVTVKMSTYLVAFIISDFESVSKITKSGVKVSVYAVPDKINQADYALDAAVTLLEFYEDYFSIPYPLPKQDLAAIPDFQSGAMENWGLTTYRESALLFDAEKSSASSKLGITMTVAHELAHQWFGNLVTMEWWNDLWLNEGFAKFMEFVSVSVTHPELKVGDYFFGKCFDAMEVDALNSSHPVSTPVENPAQIREMFDDVSYDKGACILNMLREYLSADAFKSGIVQYLQKHSYKNTKNEDLWDSMASICPTDGVKGMDGFCSRSQHSSSSSHWHQEGVDVKTMMNTWTLQKGFPLITITVRGRNVHMKQEHYMKGSDGAPDTGYLWHVPLTFITSKSDMVHRFLLKTKTDVLILPEEVEWIKFNVGMNGYYIVHYEDDGWDSLTGLLKGTHTAVSSNDRASLINNAFQLVSIGKLSIEKALDLSLYLKHETEIMPVFQGLNELIPMYKLMEKRDMNEVETQFKAFLIRLLRDLIDKQTWTDEGSVSERMLRSQLLLLACVHNYQPCVQRAEGYFRKWKESNGNLSLPVDVTLAVFAVGAQSTEGWDFLYSKYQFSLSSTEKSQIEFALCRTQNKEKLQWLLDESFKGDKIKTQEFPQILTLIGRNPVGYPLAWQFLRKNWNKLVQKFELGSSSIAHMVMGTTNQFSTRTRLEEVKGFFSSLKENGSQLRCVQQTIETIEENIGWMDKNFDKIRVWLQSEKLERM

SEQ ID NO: 4861 - protein, 144 aa, Homo sapiens
  VARIANT 1: note = misc_feature - Xaa can be any naturally occurring amino acid
XKGDKIKTQEFPQILTLIGRNPVGYPLAWQFLRKNWNKLVQKFELGSSSIAHMVMGTTNQFSTRTRLEEVKGFFSSLKENGSQLRCVQQTIETIEENIGWMDKNFDKIRVWLQSEKLERVALQRKPKCWVPCHRRIKYLILLIL

SEQ ID NO: 4862 - protein, 960 aa, Homo sapiens
MFHSSAMVNSHRKPMFNIHRGFYCLTAILPQICICSQFSVPSSYHFTEDPGAFPVATNGERFPWQELRLPSVVIPLHYDLFVHPNLTSLDFVASEKIEVLVSNATQFIILHSKDLEITNATLQSEEDSRYMKPGKELKVLSYPAHEQIALLVPEKLTPHLKYYVAMDFQAKLGDGFEGFYKSTYRTLGGETRILAVTDFEPTQARMAFPCFDEPLFKANFSIKIRRESRHIALSNMPKVKTIELEGGLLEDHFETTVKMSTYLVAYIVCDFHSLSGFTSSGVKVSIYASPDKRNQTHYALQASLKLLDFYEKYFDIYYPLSKLDLIAIPDFAPGAMENWGLITYRETSLLFDPKTSSASDKLWVTRVIAHELAHQWFGNLVTMEWWNDIWLKEGFAKYMELIAVNATYPELQFDDYFLNVCFEVITKDSLNSSRPISKPAETPTQIQEMFDEVSYNKGACILNMLKDFLGEEKFQKGIIQYLKKFSYRNAKNDDLWSSLSNSCLESDFTSGGVCHSDPKMTSNMLAFLGENAEVKEMMTTWTLQKGIPLLVVKQDGCSLRLQQERFLQGVFQEDPEWRALQERYLWHIPLTYSTSSSNVIHRHILKSKTDTLDLPEKTSWVKFNVDSNGYYIVHYEGHGWDQLITQLNQNHTLLRPKDRVGLIHDVFQLVGAGRLTLDKALDMTYYLQHETSSPALLEGLSYLESFYHMMDRRNISDISENLKRYLLQYFKPVIDRQSWSDKGSVWDRMLRSALLKLACDLNHAPCIQKAAELFSQWMESSGKLNIPTDVLKIVYSVGAQTTAGWNYLLEQYELSMSSAEQNKILYALSTSKHQEKLLKLIELGMEGKVIKTQNLAALLHAIARRPKGQQLAWDFVRENWTHLLKKFDLGSYDIRMIISGTTAHFSSKDKLQEVKLFFESLEAQGSHLDIFQTVLETITKNIKWLEKNLPTLRTWLMVNT

SEQ ID NO: 4863 - protein, 350 aa, Homo sapiens
MFHSSAMVNSHRKPMFNIHRGFYCLTAILPQICICSQFSVPSSYHFTEDPGAFPVATNGERFPWQELRLPSVVIPLHYDLFVHPNLTSLDFVASEKIEVLVSNATQFIILHSKDLEITNATLQSEEDSRYMKPGKELKVLSYPAHEQIALLVPEKLTPHLKYYVAMDFQAKLGDGFEGFYKSTYRTLGGETRILAVTDFEPTQARMAFPCFDEPLFKANFSIKIRRESRHIALSNMPKVKTIELEGGLLEDHFETTVKMSTYLVAYIVCDFHSLSGFTSSGVKVSIYASPDKRNQTHYALQASLKLLDFYEKYFDIYYPLSKLGMFKFHIIVFIFAHKTCFDLFPLSLSM

SEQ ID NO: 4864 - protein, 694 aa, Homo sapiens
MFHSSAMVNSHRKPMFNIHRGFYCLTAILPQICICSQFSVPSSYHFTEDPGAFPVATNGERFPWQELRLPSVVIPLHYDLFVHPNLTSLDFVASEKIEVLVSNATQFIILHSKDLEITNATLQSEEDSRYMKPGKELKVLSYPAHEQIALLVPEKLTPHLKYYVAMDFQAKLGDGFEGFYKSTYRTLGGETRILAVTDFEPTQARMAFPCFDEPLFKANFSIKIRRESRHIALSNMPKVKTIELEGGLLEDHFETTVKMSTYLVAYIVCDFHSLSGFTSSGVKVSIYASPDKRNQTHYALQASLKLLDFYEKYFDIYYPLSKLDLIAIPDFAPGAMENWGLITYRETSLLFDPKTSSASDKLWVTRVIAHELAHQWFGNLVTMEWWNDIWLKEGFAKYMELIAVNATYPELQFDDYFLNVCFEVITKDSLNSSRPISKPAETPTQIQEMFDEVSYNKGACILNMLKDFLGEEKFQKGIIQYLKKFSYRNAKNDDLWSSLSNSCLESDFTSGGVCHSDPKMTSNMLAFLGENAEVKEMMTTWTLQKGIPLLVVKQDGCSLRLQQERFLQGVFQEDPEWRALQERYLWHIPLTYSTSSSNVIHRHILKSKTDTLDLPEKTSWVKFNVDSNGYYIVHYEGHGWDQLITQLNQNHTLLRPKDRVGLIHDVFQLVGAGRLTLDKALDMTYYLQHETSSP

SEQ ID NO: 4865 - protein, 532 aa, Homo sapiens
MFHSSAMVNSHRKPMFNIHRGFYCLTAILPQICICSQFSVPSSYHFTEDPGAFPVATNGERFPWQELRLPSVVIPLHYDLFVHPNLTSLDFVASEKIEVLVSNATQFIILHSKDLEITNATLQSEEDSRYMKPGKELKVLSYPAHEQIALLVPEKLTPHLKYYVAMDFQAKLGDGFEGFYKSTYRTLGGETRILAVTDFEPTQARMAFPCFDEPLFKANFSIKIRRESRHIALSNMPKVKTIELEGGLLEDHFETTVKMSTYLVAYIVCDFHSLSGFTSSGVKVSIYASPDKRNQTHYALQASLKLLDFYEKYFDIYYPLSKLDLIAIPDFAPGAMENWGLITYRETSLLFDPKTSSASDKLWVTRVIAHELAHQWFGNLVTMEWWNDIWLKEGFAKYMELIAVNATYPELQFDDYFLNVCFEVITKDSLNSSRPISKPAETPTQIQEMFDEVSYNKGACILNMLKDFLGEEKFQKGIIQYLKKFSYRNAKNDDLWSSLSNSCLESDFTSGGVCHSDPKMTSNMVRIKRVTE

SEQ ID NO: 4866 - protein, 915 aa, Homo sapiens
MFHSSAMVNSHRKPMFNIHRGFYCLTAILPQICICSQFSVPSSYHFTEDPGAFPVATNGERFPWQELRLPSVVIPLHYDLFVHPNLTSLDFVASEKIEVLVSNATQFIILHSKDLEITNATLQSEEDSRYMKPGKELKVLSYPAHEQIALLVPEKLTPHLKYYVAMDFQAKLGDGFEGFYKSTYRTLGGETRILAVTDFEPTQARMAFPCFDEPLFKANFSIKIRRESRHIALSNMPKVSIYASPDKRNQTHYALQASLKLLDFYEKYFDIYYPLSKLDLIAIPDFAPGAMENWGLITYRETSLLFDPKTSSASDKLWVTRVIAHELAHQWFGNLVTMEWWNDIWLKEGFAKYMELIAVNATYPELQFDDYFLNVCFEVITKDSLNSSRPISKPAETPTQIQEMFDEVSYNKGACILNMLKDFLGEEKFQKGIIQYLKKFSYRNAKNDDLWSSLSNSCLESDFTSGGVCHSDPKMTSNMLAFLGENAEVKEMMTTWTLQKGIPLLVVKQDGCSLRLQQERFLQGVFQEDPEWRALQERYLWHIPLTYSTSSSNVIHRHILKSKTDTLDLPEKTSWVKFNVDSNGYYIVHYEGHGWDQLITQLNQNHTLLRPKDRVGLIHDVFQLVGAGRLTLDKALDMTYYLQHETSSPALLEGLSYLESFYHMMDRRNISDISENLKRYLLQYFKPVIDRQSWSDKGSVWDRMLRSALLKLACDLNHAPCIQKAAELFSQWMESSGKLNIPTDVLKIVYSVGAQTTAGWNYLLEQYELSMSSAEQNKILYALSTSKHQEKLLKLIELGMEGKVIKTQNLAALLHAIARRPKGQQLAWDFVRENWTHLLKKFDLGSYDIRMIISGTTAHFSSKDKLQEVKLFFESLEAQGSHLDIFQTVLETITKNIKWLEKNLPTLRTWLMVNT

SEQ ID NO: 4867 - protein, 29 aa, Homo sapiens
MLHRVDGLVSQGQDPSGRILAVTDFEPTQ

SEQ ID NO: 4868 - protein, 79 aa, Homo sapiens
  VARIANT 1: note = misc_feature - Xaa can be any naturally occurring amino acid
XGKVIKTQNLAALLHAIARRPKGQQLAWDFVRENWTHLLKKFDLGSYDIRMIISGTTAHFSSKDKLQEVCDFLFLTISK

SEQ ID NO: 4869 - protein, 163 aa, Homo sapiens
  VARIANT 1: note = misc_feature - Xaa can be any naturally occurring amino acid
XQTHYALQASLKLLDFYEKYFDIYYPLSKLDLIAIPDFAPGAMENWGLITYRETSLLFDPKTSSASDKLWVTRVIAHELAHQWFGNLVTMEWWNDIWLKEGFAKYMELIAVNATYPELQFGACILNMLKDFLGEEKFQKGIIQYLKKFSYRNAKNDDLWSSLS

SEQ ID NO: 4870 - protein, 649 aa, Homo sapiens
CLSCRNYSRGGVCVTHCNFLNGEPREFAHEAECFSCHPECQPMEGTATCNGSGSDTCAQCAHFRDGPHCVSSCPHGVLGAKGPIYKYPDVQNECRPCHENCTQGCKGPELQDCLGQTLVLIGKTHLTMALTVIAGLVVIFMMLGGTFLYWRGRRIQNKRAMRRYLERGESIEPLDPSEKTPIKWMALESIHFGKYTHQSDVWSYGVTVWELMTFGAEPYAGLRLAEVPDLLEKGERLAQPQICTIDVYMVMVKCWMIDENIRPTFKELANEFTRMARDPPRYLVIKRESGPGIAPGPEPHGLTNKKLEEVELEPELDLDLDLEAEEDNLATTTLGSALSLPVGTLNRPRGSQSLLSPSSGYMPMNQGNLGESCQESAVSGSSERCPRPVSLHPMPRGCLASESSEGHVTGSEAELQEKVSMCRSRSRSRSPRPRGDSAYHSQRHSLLTPVTPLSPPGLEEEDVNGYVMPDTHLKGTPSSREGTLSSVGLSSVLGTEEEDEDEEYEYMNRRRRHSPPHPPRPSSLEELGYEYMDVGSDLSASLGSTQSCPLHPVPIMPTAGTTPDEDYEYMNRQRDGGGPGGDYAAMGACPASEQGYEEMRAFQGPGHQAPHVHYARLKTLRSLEATDSAFDNPDYWHSRLFPKANAQRT

SEQ ID NO: 4871 - protein, 81 aa, Homo sapiens
LDIKHNRPRRDCVAEGKVCDPLCSSGGCWGPGPGQCLSCRNYSRGGVCVTHCNFLNGYSKGSQSRMGGGGALQWNCSGGIQ

SEQ ID NO: 4872 - protein, 19 aa, Homo sapiens
MGNLEIVLTGHNADLSFLQ

SEQ ID NO: 4873 - protein, 115 aa, Homo sapiens
MGNLEIVLTGHNADLSFLQWIREVTGYVLVAMNEFSTLPLPNLRVVRGTQVYDGKFAIFVMLNYNTNSSHALRQLRLTQLTEILSGGVYIEKNDKLCHMDTIDWRDIVRDRDAEI

SEQ ID NO: 4874 - protein, 116 aa, Homo sapiens
MGNLEIVLTGHNADLSFLQWIREVTGYVLVAMNEFSTLPLPNLRVVRGTQVYDGKFAIFVMLNYNTNSSHALRQLRLTQLTEILSGGVYIEKNDKLCHMDTIDWRDIVRDRDAEIV

SEQ ID NO: 4875 - protein, 1283 aa, Homo sapiens
MGNLEIVLTGHNADLSFLQWIREVTGYVLVAMNEFSTLPLPNLRVVRGTQVYDGKFAIFVMLNYNTNSSHALRQLRLTQLTEILSGGVYIEKNDKLCHMDTIDWRDIVRDRDAEIVVKDNGRSCPPCHEVCKGRCWGPGSEDCQTLTKTICAPQCNGHCFGPNPNQCCHDECAGGCSGPQDTDCFACRHFNDSGACVPRCPQPLVYNKLTFQLEPNPHTKYQYGGVCVASCPHNFVVDQTSCVRACPPDKMEVDKNGLKMCEPCGGLCPKACEGTGSGSRFQTVDSSNIDGFVNCTKILGNLDFLITGLNGDPWHKIPALDPEKLNVFRTVREITGYLNIQSWPPHMHNFSVFSNLTTIGGRSLYNRGFSLLIMKNLNVTSLGFRSLKEISAGRIYISANRQLCYHHSLNWTKVLRGPTEERLDIKHNRPRRDCVAEGKVCDPLCSSGGCWGPGPGQCLSCRNYSRGGVCVTHCNFLNGEPREFAHEAECFSCHPECQPMEGTATCNGSGSDTCAQCAHFRDGPHCVSSCPHGVLGAKGPIYKYPDVQNECRPCHENCTQGCKGPELQDCLGQTLVLIGKTHLTMALTVIAGLVVIFMMLGGTFLYWRGRRIQNKRAMRRYLERGESIEPLDPSEKANKVLARIFKETELRKLKVLGSGVFGTVHKGVWIPEGESIKIPVCIKVIEDKSGRQSFQAVTDHMLAIGSLDHAHIVRLLGLCPGSSLQLVTQYLPLGSLLDHVRQHRGALGPQLLLNWGVQIAKGMYYLEEHGMVHRNLAARNVLLKSPSQVQVADFGVADLLPPDDKQLLYSEAKTPIKWMALESIHFGKYTHQSDVWSYGVTVWELMTFGAEPYAGLRLAEVPDLLEKGERLAQPQICTIDVYMVMVKCWMIDENIRPTFKELANEFTRMARDPPRYLVIKRESGPGIAPGPEPHGLTNKKLEEVELEPELDLDLDLEAEEDNLATTTLGSALSLPVGTLNRPRGSQSLLSPSSGYMPMNQGNLGESCQESAVSGSSERCPRPVSLHPMPRGCLASESSEGHVTGSEAELQEKVSMCRSRSRSRSPRPRGDSAYHSQRHSLLTPVTPLSPPGLEEEDVNGYVMPDTHLKGTPSSREGTLSSVGLSSVLGTEEEDEDEEYEYMNRRRRHSPPHPPRPSSLEELGYEYMDVGSDLSASLGSTQSCPLHPVPIMPTAGTTPDEDYEYMNRQRDGGGPGGDYAAMGACPASEQGYEEMRAFQGPGHQAPHVHYARLKTLRSLEATDSAFDNPDYWHSRLFPKANAQRT

SEQ ID NO: 4876 - protein, 583 aa, Homo sapiens
MLAIGSLDHAHIVRLLGLCPGSSLQLVTQYLPLGSLLDHVRQHRGALGPQLLLNWGVQIAKGMYYLEEHGMVHRNLAARNVLLKSPSQVQVADFGVADLLPPDDKQLLYSEAKTPIKWMALESIHFGKYTHQSDVWSYGVTVWELMTFGAEPYAGLRLAEVPDLLEKGERLAQPQICTIDVYMVMVKCWMIDENIRPTFKELANEFTRMARDPPRYLVIKRESGPGIAPGPEPHGLTNKKLEEVELEPELDLDLDLEAEEDNLATTTLGSALSLPVGTLNRPRGSQSLLSPSSGYMPMNQGNLGESCQESAVSGSSERCPRPVSLHPMPRGCLASESSEGHVTGSEAELQEKVSMCRSRSRSRSPRPRGDSAYHSQRHSLLTPVTPLSPPGLEEEDVNGYVMPDTHLKGTPSSREGTLSSVGLSSVLGTEEEDEDEEYEYMNRRRRHSPPHPPRPSSLEELGYEYMDVGSDLSASLGSTQSCPLHPVPIMPTAGTTPDEDYEYMNRQRDGGGPGGDYAAMGACPASEQGYEEMRAFQGPGHQAPHVHYARLKTLRSLEATDSAFDNPDYWHSRLFPKANAQRT

SEQ ID NO: 4877 - protein, 462 aa, Homo sapiens
MPMSTILPVTSPCLPATGVTVWELMTFGAEPYAGLRLAEVPDLLEKGERLAQPQICTIDVYMVMVKCWMIDENIRPTFKELANEFTRMARDPPRYLVIKRESGPGIAPGPEPHGLTNKKLEEVELEPELDLDLDLEAEEDNLATTTLGSALSLPVGTLNRPRGSQSLLSPSSGYMPMNQGNLGESCQESAVSGSSERCPRPVSLHPMPRGCLASESSEGHVTGSEAELQEKVSMCRSRSRSRSPRPRGDSAYHSQRHSLLTPVTPLSPPGLEEEDVNGYVMPDTHLKGTPSSREGTLSSVGLSSVLGTEEEDEDEEYEYMNRRRRHSPPHPPRPSSLEELGYEYMDVGSDLSASLGSTQSCPLHPVPIMPTAGTTPDEDYEYMNRQRDGGGPGGDYAAMGACPASEQGYEEMRAFQGPGHQAPHVHYARLKTLRSLEATDSAFDNPDYWHSRLFPKANAQRT

SEQ ID NO: 4878 - protein, 126 aa, Homo sapiens
MRANDALQVLGLLFSLARGSEVGNSQAVCPGTLNGLSVTGDAENQYQTLYKLYERCEVVMGNLEIVLTGHNADLSFLQWIREVTGYVLVAMNEFSTLPLPNLRVVRGTQVYDGKFAIFVMLNYNTN

SEQ ID NO: 4879 - protein, 1342 aa, Homo sapiens
MRANDALQVLGLLFSLARGSEVGNSQAVCPGTLNGLSVTGDAENQYQTLYKLYERCEVVMGNLEIVLTGHNADLSFLQWIREVTGYVLVAMNEFSTLPLPNLRVVRGTQVYDGKFAIFVMLNYNTNSSHALRQLRLTQLTEILSGGVYIEKNDKLCHMDTIDWRDIVRDRDAEIVVKDNGRSCPPCHEVCKGRCWGPGSEDCQTLTKTICAPQCNGHCFGPNPNQCCHDECAGGCSGPQDTDCFACRHFNDSGACVPRCPQPLVYNKLTFQLEPNPHTKYQYGGVCVASCPHNFVVDQTSCVRACPPDKMEVDKNGLKMCEPCGGLCPKACEGTGSGSRFQTVDSSNIDGFVNCTKILGNLDFLITGLNGDPWHKIPALDPEKLNVFRTVREITGYLNIQSWPPHMHNFSVFSNLTTIGGRSLYNRGFSLLIMKNLNVTSLGFRSLKEISAGRIYISANRQLCYHHSLNWTKVLRGPTEERLDIKHNRPRRDCVAEGKVCDPLCSSGGCWGPGPGQCLSCRNYSRGGVCVTHCNFLNGEPREFAHEAECFSCHPECQPMEGTATCNGSGSDTCAQCAHFRDGPHCVSSCPHGVLGAKGPIYKYPDVQNECRPCHENCTQGCKGPELQDCLGQTLVLIGKTHLTMALTVIAGLVVIFMMLGGTFLYWRGRRIQNKRAMRRYLERGESIEPLDPSEKANKVLARIFKETELRKLKVLGSGVFGTVHKGVWIPEGESIKIPVCIKVIEDKSGRQSFQAVTDHMLAIGSLDHAHIVRLLGLCPGSSLQLVTQYLPLGSLLDHVRQHRGALGPQLLLNWGVQIAKGMYYLEEHGMVHRNLAARNVLLKSPSQVQVADFGVADLLPPDDKQLLYSEAKTPIKWMALESIHFGKYTHQSDVWSYGVTVWELMTFGAEPYAGLRLAEVPDLLEKGERLAQPQICTIDVYMVMVKCWMIDENIRPTFKELANEFTRMARDPPRYLVIKRESGPGIAPGPEPHGLTNKKLEEVELEPELDLDLDLEAEEDNLATTTLGSALSLPVGTLNRPRGSQSLLSPSSGYMPMNQGNLGESCQESAVSGSSERCPRPVSLHPMPRGCLASESSEGHVTGSEAELQEKVSMCRSRSRSRSPRPRGDSAYHSQRHSLLTPVTPLSPPGLEEEDVNGYVMPDTHLKGTPSSREGTLSSVGLSSVLGTEEEDEDEEYEYMNRRRRHSPPHPPRPSSLEELGYEYMDVGSDLSASLGSTQSCPLHPVPIMPTAGTTPDEDYEYMNRQRDGGGPGGDYAAMGACPASEQGYEEMRAFQGPGHQAPHVHYARLKTLRSLEATDSAFDNPDYWHSRLFPKANAQRT

SEQ ID NO: 4880 - protein, 921 aa, Homo sapiens
MRANDALQVLGLLFSLARGSEVGNSQAVCPGTLNGLSVTGDAENQYQTLYKLYERCEVVMGNLEIVLTGHNADLSFLQWIREVTGYVLVAMNEFSTLPLPNLRVVRGTQVYDGKFAIFVMLNYNTNSSHALRQLRLTQLTEILSGGVYIEKNDKLCHMDTIDWRDIVRDRDAEIVVKDNGRSCPPCHEVCKGRCWGPGSEDCQTLTKTICAPQCNGHCFGPNPNQCCHDECAGGCSGPQDTDCFACRHFNDSGACVPRCPQPLVYNKLTFQLEPNPHTKYQYGGVCVASCPHNFVVDQTSCVRACPPDKMEVDKNGLKMCEPCGGLCPKACEGTGSGSRFQTVDSSNIDGFVNCTKILGNLDFLITGLNGDPWHKIPALDPEKLNVFRTVREITGYLNIQSWPPHMHNFSVFSNLTTIGGRSLYNRGFSLLIMKNLNVTSLGFRSLKEISAGRIYISANRQLCYHHSLNWTKVLRGPTEERLDIKHNRPRRDCVAEGKVCDPLCSSGGCWGPGPGQCLSCRNYSRGGVCVTHCNFLNGEPREFAHEAECFSCHPECQPMEGTATCNGSGSDTCAQCAHFRDGPHCVSSCPHGVLGAKGPIYKYPDVQNECRPCHENCTQGCKGPELQDCLGQTLVLIGKTHLTMALTVIAGLVVIFMMLGGTFLYWRGRRIQNKRAMRRYLERGESIEPLDPSEKANKVLARIFKETELRKLKVLGSGVFGTVHKGVWIPEGESIKIPVCIKVIEDKSGRQSFQAVTDHMLAIGSLDHAHIVRLLGLCPGSSLQLVTQYLPLGSLLDHVRQHRGALGPQLLLNWGVQIAKGMYYLEEHGMVHRNLAARNVLLKSPSQVQVADFGVADLLPPDDKQLLYSEAKTPIKWMALESIHFGKYTHQSDVWSYGQCIWMPSLPSLAPVSNLPFETPS

SEQ ID NO: 4881 - protein, 331 aa, Homo sapiens
MRANDALQVLGLLFSLARGSEVGNSQAVCPGTLNGLSVTGDAENQYQTLYKLYERCEVVMGNLEIVLTGHNADLSFLQWIREVTGYVLVAMNEFSTLPLPNLRVVRGTQVYDGKFAIFVMLNYNTNSSHALRQLRLTQLTEILSGGVYIEKNDKLCHMDTIDWRDIVRDRDAEIVVKDNGRSCPPCHEVCKGRCWGPGSEDCQTLTKTICAPQCNGHCFGPNPNQCCHDECAGGCSGPQDTDCFACRHFNDSGACVPRCPQPLVYNKLTFQLEPNPHTKYQYGGVCVASCPHNFVVDQTSCVRACPPDKMEVDKNGLKMCEPCGGLCPKAF

SEQ ID NO: 4882 - protein, 183 aa, Homo sapiens
MRANDALQVLGLLFSLARGSEVGNSQAVCPGTLNGLSVTGDAENQYQTLYKLYERCEVVMGNLEIVLTGHNADLSFLQWIREVTGYVLVAMNEFSTLPLPNLRVVRGTQVYDGKFAIFVMLNYNTNSSHALRQLRLTQLTGQFPMVPSGLTPQPAQDWYLLDDDPRLLTLSASSKVPVTLAAV

SEQ ID NO: 4883 - protein, 43 aa, Homo sapiens
MRANDALQVPRAQSTSTQMFRMNVGPAMRTAPRGVKDQSFKTV

SEQ ID NO: 4884 - protein, 354 aa, Homo sapiens
MAPARRPAGARLLLVYAGLLAAAAAGLGSPEPGAPSRSRARREPPPGNELPRGPGESRAGPAARPPEPTAERAHSVDPRDAWMLFVRQSDKGVNGKKRSRGKAKKLKFGLPGPPGPPGPQGPPGPIIPPEALLKEFQLLLKGAVRQRERAEPEPCTCGPAGPVAASLAPVSATAGEDDDDVVGDVLALLAAPLAPGPRAPRVEAAFLCRLRRDALVERRALHELGVYYLPDAEGAFRRGPGLNLTSGQYRAPVAGFYALAATLHVALGEPPRRGPPRPRDHLRLLICIQSRCQRNASLEAIMGLESSSELFTISVNGVLYLQMGQWTSVFLDNASGCSLTVRSGSHFSAVLLGV

SEQ ID NO: 4885 - protein, 63 aa, Homo sapiens
  VARIANT 1: note = misc_feature - Xaa can be any naturally occurring amino acid
XFGYSSLEAIMGLESSSELFTISVNGVLYLQMGQWTSVFLDNASGCSLTVRSGSHFSAVLLGV

SEQ ID NO: 4886 - protein, 74 aa, Homo sapiens
  VARIANT 1: note = misc_feature - Xaa can be any naturally occurring amino acid
XIQSRCQRNASLEAIMGLESSSELFTISVNGVLYLQATKNLVPQDLLGAKLVWQGRSGLGEKGAMASHLHLLTN

SEQ ID NO: 4887 - protein, 275 aa, Homo sapiens
MNMTQARVLVAAVVGLVAVLLYASIHKIEEGHLAVYYRGGALLTSPSGPGYHIMLPFITTFRSVQTTLQTDEVKNVPCGTSGGVMIYIDRIEVVNMLAPYAVFDIVRNYTADYDKTLIFNKIHHELNQFCSAHTLQEVYIELFDQIDENLKQALQKDLNLMAPGLTIQAVRVTKPKIPEAIRRNFELMEAEKTKLLIAAQKQKVVEKEAETERKKAVIEAEKIAQVAKIRFQQKVMEKETEKRISEIEDAAFLAREKAKADAEYYAAHKYATSNK

SEQ ID NO: 4888 - protein, 348 aa, Homo sapiens
MNMTQARVLVAAVVGLVAVLLYASIHKIEEGHLAVYYRGGALLTSPSGPGYHIMLPFITTFRSVQTTLQTDEVKNVPCGTSGGVMIYIDRIEVVNMLAPYAVFDIVRNYTADYDKTLIFNKIHHELNQFCSAHTLQEVYIELFDQIDENLKQALQKDLNLMAPGLTIQAVRVTKPKIPEAIRRNFELMEAEKTKLLIAAQKQKVVEKEAETERKKAVIEAEKIAQVAKIRFQQKVMEKETEKRISEIEDAAFLAREKAKADAEYYAAHKYATSNKHKLTPEYLELKKYQAIASNSKIYFGSNIPNMFVDSSCALKYSDIRTGRESSLPSKEALEPSGENVIQNKESTG

SEQ ID NO: 4889 - protein, 348 aa, Homo sapiens; identical to SEQ ID NO: 4888

SEQ ID NO: 4890 - protein, 339 aa, Homo sapiens
MAQLGAVVAVASSFFCASLFSAVHKIEEGHIGVYYRGGALLTSTSGPGFHLMLPFITSYKSVQTTLQTDEVKNVPCGTSGGVMIYFDRIEVVNFLVPNAVYDIVKNYTADYDKALIFNKIHHELNQFCSVHTLQEVYIELFDQIDENLKLALQQDLTSMAPGLVIQAVRVTKPNIPEAIRRNYELMESEKTKLLIAAQKQKVVEKEAETERKKALIEAEKVAQVAEITYGQKVMEKETEKKISEIEDAAFLAREKAKADAECYTAMKIAEANKLKLTPEYLQLMKYKAIASNSKIYFGKDIPNMFMDSAGSVSKQFEGLADKLSFGLEDEPLETATKEN

SEQ ID NO: 4891 - protein, 339 aa, Homo sapiens; identical to SEQ ID NO: 4890

SEQ ID NO: 4892 - protein, 338 aa, Homo sapiens
MAQLGAVVAVASSFFCASLFSAVHKIEEGHIGVYYRGGALLTSTSGPGFHLMLPFITSYKSVQTTLQTDEVKNVPCGTSGGVMIYFDRIEVVNFLVPNAVYDIVKNYTADYDKALIFNKIHHELNQFCSVHTLQEVYIELFDQIDENLKLALQQDLTSMAPGLVIQAVRVTKPNIPEAIRRNYELMESEKTKLLIAAQKQKVVEKEAETERKKALIEAEKVAQVAEITYGQKVMEKETEKKISEIEDAAFLAREKAKADAECYTAMKIAEANKLKLTPEYLQLMKYKAIASNSKIYFGKDIPNMFMDSAGSVSKQFEGLADKLSFGLEDEPLETATKE

SEQ ID NO: 4893 - protein, 206 aa, Homo sapiens
MAQLGAVVAVASSFFCASLFSAVHKIEEGHIGVYYRGGALLTSTSGPGFHLMLPFITSYKSVQTTLQTDEVKNVPCGTSGGVMIYFDRIEVVNFLVPNAVYDIVKNYTADYDKALIFNKIHHELNQFCSVHTLQEVYIELFGKKVSPEHAVLKQGSWNPASLHCLKPGCLQGVMVTYGQEMLKNLVLRSWSQRSSWRMLIAMQQDP

SEQ ID NO: 4894 - protein, 206 aa, Homo sapiens; identical to SEQ ID NO: 4893

SEQ ID NO: 4895 - protein, 206 aa, Homo sapiens; identical to SEQ ID NO: 4893

SEQ ID NO: 4896 - protein, 152 aa, Homo sapiens
MAQLGAVVAVASSFFCASLFSAVHKIEEGHIGVYYRGGALLTSTSGPGFHLMLPFITSYKSVQTTLQTDEVKNVPCGTSGGVMIYFDRIEVVNFLVPNAVYDIVKNYTADYDKALIFNKIHHELNQFCSVHTLQEVYIELFGLENDFSQESS

SEQ ID NO: 4897 - protein, 152 aa, Homo sapiens; identical to SEQ ID NO: 4896

SEQ ID NO: 4898 - protein, 197 aa, Homo sapiens
MAQLGAVVAVASSFFCASLFSAVHKIEEGHIGVYYSGGVMIYFDRIEVVNFLVPNAVYDIVKNYTADYDKALIFNKIHHELNQFCSVHTLQEVYIELFDQIDENLKLALQQDLTSMAPGLVIQAVRVTKPNIPEAIRRNYELMESEKTKLLIAAQKQKVVEKEAETERKKALIEAEKVAQVAEITYGQKVMEKETEK

SEQ ID NO: 4899 - protein, 977 aa, Homo sapiens
MPARRLLLLLTLLLPGLGIFGSTSTVTLPETLLFVSTLDGSLHAVSKRTGSIKWTLKEDPVLQVPTHVEEPAFLPDPNDGSLYTLGSKNNEGLTKLPFTIPELVQASPCRSSDGILYMGKKQDIWYVIDLLTGEKQQTLSSAFADSLCPSTSLLYLGRTEYTITMYDTKTRELRWNATYFDYAASLPEDDVDYKMSHFVSNGDGLVVTVDSESGDVLWIQNYASPVVAFYVWQREGLRKVMHINVAVETLRYLTFMSGEVGRITKWKYPFPKETEAKSKLTPTLYVGKYSTSLYASPSMVHEGVAVVPRGSTLPLLEGPQTDGVTIGDKGECVITPSTDVKFDPGLKSKNKLNYLRNYWLLIGHHETPLSASTKMLERFPNNLPKHRENVIPADSEKKSFEEVINLVDQTSENAPTTVSRDVEEKPAHAPARPEAPVDSMLKDMATIILSTFLLIGWVAFIITYPLSMHQQQQLQHQQFQKELEKIQLLQQQQQQLPFHPPGDTAQDGELLDTSGPYSESSGTSSPSTSPRASNHSLCSGSSASKAGSSPSLEQDDGDEETSVVIVGKISFCPKDVLGHGAEGTIVYRGMFDNRDVAVKRILPECFSFADREVQLLRESDEHPNVIRYFCTEKDRQFQYIAIELCAATLQEYVEQKDFAHLGLEPITLLQQTTSGLAHLHSLNIVHRDLKPHNILISMPNAHGKIKAMISDFGLCKKLAVGRHSFSRRSGVPGTEGWIAPEMLSEDCKENPTYTVDIFSAGCVFYYVISEGSHPFGKSLQRQANILLGACSLDCLHPEKHEDVIARELIEKMIAMDPQKRPSAKHVLKHPFFWSLEKQLQFFQDVSDRIEKESLDGPIVKQLERGGRAVVKMDWRENITVPLQTDLRKFRTYKGGSVRDLLRAMRNKKHHYRELPAEVRETLGSLPDDFVCYFTSRFPHLLAHTYRAMELCSHERLFQPYYFHEPPEPQPPVTPDAL

SEQ ID NO: 4900 - protein, 70 aa, Homo sapiens
MPARRLLLLLTLLLPGLGVSDRGAWGGGQLATAGSGPGQRRGAGAGVRAGSATAAARCPVSPAVGGSGRA

SEQ ID NO: 4901 - protein, 23 aa, Homo sapiens
ELLQLLPPDSPTRWLPGTWLEPC

SEQ ID NO: 4902 - protein, 80 aa, Homo sapiens
MASAVRGSRPWPRLGLQLQFAALLLGTLSPQGCGWATRMLGLLLGAQPHPVCSRRDWSRFILSGQRTSCWCPPWMEVSTH

SEQ ID NO: 4903 - protein, 129 aa, Homo sapiens
MASAVRGSRPWPRLGLQLQFAALLLGTLSPQVHTLRPENLLLVSTLDGSLHALSKQTGDLKWTLRDDPVIEGPMYVTEMAFLSDPADGSLYILGTQKQQGLMAGVQWYDHKAHCSLELLASSNPRTSVS

SEQ ID NO: 4904 - protein, 926 aa, Homo sapiens
MASAVRGSRPWPRLGLQLQFAALLLGTLSPQVHTLRPENLLLVSTLDGSLHALSKQTGDLKWTLRDDPVIEGPMYVTEMAFLSDPADGSLYILGTQKQQGLMKLPFTIPELVHASPCRSSDGVFYTGRKQDAWFVVDPESGETQMTLTTEGPSTPRLYIGRTQYTVTMHDPRAPALRWNTTYRRYSAPPMDGSPGKYMSHLASCGMGLLLTVDPGSGTVLWTQDLGVPVMGVYTWHQDGLRQLPHLTLARDTLHFLALRWGHIRLPASGPRDTATLFSTLDTQLLMTLYVGKDETGFYVSKALVHTGVALVPRGLTLAPADGPTTDEVTLQVSGEREGSPSTAVRYPSGSVALPSQWLLIGHHELPPVLHTTMLRVHPTLGSGTAETRPPENTQAPAFFLELLSLSREKLWDSELHPEEKTPDSYLGLGPQDLLAASLTAVLLGGWILFVMRQQQPQVVEKQQETPLAPADFAHISQDAQSLHSGASRRSQKRLQSPSKQAQPLDDPEAEQLTVVGKISFNPKDVLGRGAGGTFVFRGQFEGRAVAVKRLLRECFGLVRREVQLLQESDRHPNVLRYFCTERGPQFHYIALELCRASLQEYVENPDLDRGGLEPEVVLQQLMSGLAHLHSLHIVHRDLKPGNILITGPDSQGLGRVVLSDFGLCKKLPAGRCSFSLHSGIPGTEGWMAPELLQLLPPDSPTSAVDIFSAGCVFYYVLSGGSHPFGDSLYRQANILTGAPCLAHLEEEVHDKVVARDLVGAMLSPLPQPRPSAPQVLAHPFFWSRAKQLQFFQDVSDWLEKESEQEPLVRALEAGGCAVVRDNWHEHISMPLQTDLRKFRSYKGTSVRDLLRAVRNKKHHYRELPVEVRQALGQVPDGFVQYFTNRFPRLLLHTHRAMRSCASESLFLPYYPPDSEARRPCPGATGR

SEQ ID NO: 4905 - protein, 874 aa, Homo sapiens
MASAVRGSRPWPRLGLQLQFAALLLGTLSPQVHTLRPENLLLVSTLDGSLHALSKQTGDLKWTLRDDPVIEGPMYVTEMAFLSDPADGSLYILGTQKQQGLMKLPFTIPELVHASPCRSSDGVFYTGRKQDAWFVVDPESGETQMTLTTEGPSTPRLYIGRTQYTVTMHDPRAPALRWNTTYRRYSAPPMDGSPGKYMSHLASCGMGLLLTVDPGSGTVLWTQDLGVPVMGVYTWHQDGLRQLPHLTLARDTLHFLALRWGHIRLPASGPRDTATLFSTLDTQLLMTLYVGKDETGFYVSKALVHTGVALVPRGLTLAPADGPTTDEVTLQVSGEREGSPSTAVRYPSGSVALPSQWLLIGHHELPPVLHTTMLRVHPTLGSGTAETRPPENTQAPAFFLEQQPQVVEKQQETPLAPADFAHISQDAQSLHSGASRRSQKRLQSPSKQAQPLDDPEAEQLTVVGKISFNPKDVLGRGAGGTFVFRGQFEGRAVAVKRLLRECFGLVRREVQLLQESDRHPNVLRYFCTERGPQFHYIALELCRASLQEYVENPDLDRGGLEPEVVLQQLMSGLAHLHSLHIVHRDLKPGNILITGPDSQGLGRVVLSDFGLCKKLPAGRCSFSLHSGIPGTEGWMAPELLQLLPPDSPTSAVDIFSAGCVFYYVLSGGSHPFGDSLYRQANILTGAPCLAHLEEEVHDKVVARDLVGAMLSPLPQPRPSAPQVLAHPFFWSRAKQLQFFQDVSDWLEKESEQEPLVRALEAGGCAVVRDNWHEHISMPLQTDLRKFRSYKGTSVRDLLRAVRNKKHHYRELPVEVRQALGQVPDGFVQYFTNRFPRLLLHTHRAMRSCASESLFLPYYPPDSEARRPCPGATGR

SEQ ID NO: 4906 - protein, 169 aa, Homo sapiens
MGRGWGFLFGLLGAVWLLSSGHGEEQPPETAAQRCFCQVNLKRPCPFWNDISQCGRRDCAVKPCQSDEVPDGIKSASYKYSEEANNLIEECEQAERLGAVDESLSEETQKAVLQWTKHDDSSDNFCEADDIQSPEAEYVDLLLNPERYTGYKGPDAWKIWNVIYEENCF

SEQ ID NO: 4907 - protein, 125 aa, Homo sapiens
MGRGWGFLFGLLGAVWLLSSGHGEEQPPETAAQRCFCQVSGYLDDCTCDVETIDRFNNYRLFPRLQKLLESDYFRYYKVNLKRPCPFWNDISQCGRRDCAVKPCQSDEVPDGIKSASYKVCTYTY

SEQ ID NO: 4908 - protein, 257 aa, Homo sapiens
MGRGWGFLFGLLGAVWLLSSGHGEEQPPETAAQRCFCQVSGYLDDCTCDVETIDRFNNYRLFPRLQKLLESDYFRYYKVNLKRPCPFWNDISQCGRRDCAVKPCQSDEVPDGIKSASYKYSEEANNLIEECEQAERLGAVDESLSEETQKAVLQWTKHDDSSDNFCEADDIQSPEAEYVDLLLNPERYTGYKGPDAWKIWNVIYEENCFKPQTIKRPLNPLASGQGKLLICVSLLFLRSLCRKKSILQTYIWPTCKH

SEQ ID NO: 4909 - protein, 257 aa, Homo sapiens; identical to SEQ ID NO: 4908

SEQ ID NO: 4910 - protein, 257 aa, Homo sapiens; identical to SEQ ID NO: 4908

SEQ ID NO: 4911 - protein, 468 aa, Homo sapiens
MGRGWGFLFGLLGAVWLLSSGHGEEQPPETAAQRCFCQVSGYLDDCTCDVETIDRFNNYRLFPRLQKLLESDYFRYYKVNLKRPCPFWNDISQCGRRDCAVKPCQSDEVPDGIKSASYKYSEEANNLIEECEQAERLGAVDESLSEETQKAVLQWTKHDDSSDNFCEADDIQSPEAEYVDLLLNPERYTGYKGPDAWKIWNVIYEENCFKPQTIKRPLNPLASGQGTSEENTFYSWLEGLCVEKRAFYRLISGLHASINVHLSARYLLQETWLEKKWGHNITEFQQRFDGILTEGEGPRRLKNLYFLYLIELRALSKVLPFFERPDFQLFTGNKIQDEENKMLLLEILHEIKSFPLHFDENSFFAGDKKEAHKLKEDFRLHFRNISRIMDCVGCFKCRLWGKLQTQGLGTALKILFSEKLIANMPESGPSYEFHLTRQEIVSLFNAFGRISTSVKELENFRNLLQNIH

SEQ ID NO: 4912 - protein, 75 aa, Homo sapiens
MLLLEILHEIKSFPLHFDENSFFAGDKKEAHKLKEDFRLHFRNISRIMDCVGCFKCRLWGKLQTQGLGTALKILF

SEQ ID NO: 4913 - protein, 71 aa, Homo sapiens
MANNTKELEDCEQANKLGAINSTLSNQSKEAFIDWARYDDSRDHFCELDDERSPAAQYVDLLLNPERYTGY

SEQ ID NO: 4914 - protein, 467 aa, Homo sapiens
MSQGVRRAGAGQGVAAAVQLLVTLSFLRSVVEAQVTGVLDDCLCDIDSIDNFNTYKIFPKIKKLQERDYFRYYKVNLKRPCPFWAEDGHCSIKDCHVEPCPESKIPVGIKAGHSNKYLKMANNTKELEDCEQANKLGAINSTLSNQSKEAFIDWARYDDSRDHFCELDDERSPAAQYVDLLLNPERYTGYKGTSAWRVWNSIYEENCFKPRSVYRPLNPLAPSRGEDDGESFYTWLEGLCLEKRVFYKLISGLHASINLHLCANYLLEETWGKPSWGPNIKEFKHRFDPVETKGEGPRRLKNLYFLYLIELRALSKVAPYFERSIVDLYTGNAEEDADTKTLLLNIFQDTKSFPMHFDEKSMFAGDKKGAKSLKEEFRLHFKNISRIMDCVGCDKCRLWGKLQTQGLGTALKILFSEKEIQKLPENSPSKGFQLTRQEIVALLNAFGRLSTSIRDLQNFKVLLQHSR

SEQ ID NO: 4915 - protein, 173 aa, Homo sapiens
WGPNIKEFKHRFDPVETKGEGPRRLKNLYFLYLIELRALSKVAPYFERSIVDLYTGNAEEDADTKTLLLNIFQDTKSFPMHFDEKSMFAGDKKGAKSLKEEFRLHFKNISRIMDCVGCDKCRLWGKLQTQGLGTALKILFSEKEIQKLPENSPSKGFQLTRQEIVALLNAFGR

SEQ ID NO: 4916 - protein, 273 aa, Homo sapiens
MEAAPSRFMFLLFLLTCELAAEVAAEVEKSSDGPGAAQEPTWLTDVPAAMEFIAATEVAVIGFFQDLEIPAVPILHSMVQKFPGVSFGISTDSEVLTHYNITGNTICLFRLVDNEQLNLEDEDIESIDATKLSRFIEINSLHMVTEYNPVTVIGLFNSVIQIHLLLIMNKASPEYEENMHRYQKAAKLFQGKILFILVDSGMKENGKVISFFKLKESQLPALAIYQTLDDEWDTLPTAEVSVEHVQNFCDGFLSGKLLKENRESEGKTPKVEL

SEQ ID NO: 4917 - protein, 172 aa, Homo sapiens
MKETCQLEIQVDNEQLNLEDEDIESIDATKLSRFIEINSLHMVTEYNPVTVIGLFNSVIQIHLLLIMNKASPEYEENMHRYQKAAKLFQGKILFILVDSGMKENGKVISFFKLKESQLPALAIYQTLDDEWDTLPTAEVSVEHVQNFCDGFLSGKLLKENRESEGKTPKVEL

SEQ ID NO: 4918 - protein, 53 aa, Homo sapiens
MAAAVPRAAFLSPLLPLLLGFLLLSAPHGGSGLHTKGALPLDTVTFYKIMVTS

SEQ ID NO: 4919 - protein, 261 aa, Homo sapiens
MAAAVPRAAFLSPLLPLLLGFLLLSAPHGGSGLHTKGALPLDTVTFYKVIPKSKFVLVKFDTQYPYGEKQDEFKRLAENSASSDDLLVAEVGISDYGDKLNMELSEKYKLDKESYPVFYLFRDGDFENPVPYTGAVKVGAIQRWLKGQGVYLGMPGCLPVYDALAGEFIRASGVEARQALLKQGQDNLSSVKETQKKWAEQYLKIMGKILDQGEDFPASEMTRIARLIEKNKMSDGKKEELQKSLNILTAFQKKGAEKEEL

SEQ ID NO: 4920 - protein, 160 aa, Homo sapiens
MELSEKYKLDKESYPVFYLFRDGDFENPVPYTGAVKVGAIQRWLKGQGVYLGMPGCLPVYDALAGEFIRASGVEARQALLKQGQDNLSSVKETQKKWAEQYLKIMGKILDQGEDFPASEMTRIARLIEKNKMSDGKKEELQKSLNILTAFQKKGAEKEEL

SEQ ID NO: 4921 - protein, 95 aa, Homo sapiens
  VARIANT 1: note = misc_feature - Xaa can be any naturally occurring amino acid
XPAPHFSPRCFPFSWASCSSPLRMAAAACTPRAPFPWIRSLSTRGPLGRGISPKSPWNTHLLSSIRPQVIPKSKFVLVKFDTQYPYGEKQDEFKR

SEQ ID NO: 4922 - protein, 406 aa, Homo sapiens
MHPAVFLSLPDLRCSLLLLVTWVFTPVTTEITSLDTENIDEILNNADVALVNFYADWCRFSQMLHPIFEEASDVIKEEFPNENQVVFARVDCDQHSDIAQRYRISKYPTLKLFRNGMMMKREYRGQRSVKALADYIRQQKSDPIQEIRDLAEITTLDRSKRNIIGYFEQKDSDNYRVFERVANILHDDCAFLSAFGDVSKPERYSGDNIIYKPPGHSAPDMVYLGAMTNFDVTYNWIQDKCVPLVREITFENGEELTEEGLPFLILFHMKEDTESLEIFQNEVARQLISEKGTINFLHADCDKFRHPLLHIQKTPADCPVIAIDSFRHMYVFGDFKDVLIPGKLKQFVFDLHSGKLHREFHHGPDPTDTAPGEQAQDVASSPPESSFQKLAPSEYRYTLLRDRDEL

SEQ ID NO: 4923 - protein, 604 aa, Homo sapiens
MLGMNMLLITLFLLLPLSMLKGEPWEGCLHCTHTTWSGNIMTKTLLYHTYYECAGTCLGTCTHNQTTYSVCDPGRGQPYVCYDPKSSPGTWFEIHVGSKEGDLLNQTKVFPSGKDVVSLYFDVCQIVSMGSLFPVIFSSMEYYSSCHKNRYAHPACSTDSPVTTCWDCTTWSTNQQSLGPIMLTKIPLEPDCKTSTCNSVNLTILEPDQPIWTTGLKAPLGARVSGEEIGPGAYVYLYIIKKTRTRSTQQFRVFESFYEHVNQKLPEPPPLASNLFAQLAENIASSLHVASCYVCGGMNMGDQWPWEARELMPQDNFTLTASSLEPAPSSQSIWFLKTSIIGKFCIARWGKAFTDPVGELTCLGQQYYNETLGKTLWRGKSNNSESPHPSPFSRFPSLNHSWYQLEAPNTWQAPSGLYWICGPQAYRQLPAKWSGACVLGTIRPSFFLMPLKQGEALGYPIYDETKRKSKRGITIGDWKDNEWPPERIIQYYGPATWAEDGMWGYRTPVYMLNRIIRLQAVLEIITNETAGALNLLAQQATKMRNVIYQNRLALDYLLAQEEGVCGKFNLTNCCLELDDEGKVIKEITAKIQKLAHIPVQTWKG

SEQ ID NO: 4924 - protein, 89 aa, Homo sapiens
MKSVLLLTTLLVPAHLVAAWSNNYAVDCPQHCDSSECKSSPRCKRTVLDDCGCCRVCAAGRGETCYRTVSGMDGMKCGPGLRCQPSNGE

SEQ ID NO: 4925 - protein, 184 aa, Homo sapiens
MKSVLLLTTLLVPAHLVAAWSNNYAVDCPQHCDSSECKSSPRCKRTVLDDCGCCRVCAAGRGETCYRTVSGMDGMKCGPGLRCQPSNGEDPFGEEFGICKDCPYGTFGMDCRETCNCQSGICDRGTGKCLKFPFFQYSVTKSSNRFVSLTEHDMASGDGNIVREEVVKENAAGSPVMRKWLNPR

SEQ ID NO: 4926 - protein, 134 aa, Homo sapiens
MKSVLLLTTLLVPAHLVAAWSNNYAVDCPQHCDSSECKSSPRCKRTVLDDCGCCRVCAAGRGETCYRTVSGMDGMKCGPGLRCQPSNGEDPFGEEFGICKEHDMASGDGNIVREEVVKENAAGSPVMRKWLNPR

SEQ ID NO: 4927 - protein, 522 aa, Homo sapiens
EFKKCCPGSPDIDKLDVATMTEYLNFEKSSSVSRYGASQVEDMGNIILAMISEPYNHRFSDPERVNYKFESGTCSKMELIDDNTVVRARGLPWQSSDQDIARFFKGLNIAKGGAALCLNAQGRRNGEALVRFVSEEHRDLALQRHKHHMGTRYIEVYKATGEDFLKIAGGTSNEVAQFLSKENQVIVRMRGLPFTATAEEVVAFFGQHCPITGGKEGILFVTYPDGRPTGDAFVLFACEEYAQNALRKHKDLLGKRYIELFRSTAAEVQQVLNRFSSAPLIPLPTPPIIPVLPQQFVPPTNVRDCIRLRGLPYAATIEDILDFLGEFATDIRTHGVHMVLNHQGRPSGDAFIQMKSADRAFMAAQKCHKKNMKDRYVEVFQCSAEEMNFVLMGGTLNRNGLSPPPCKLPCLSPPSYTFPAPAAVIPTEAAIYQPSVILNPRALQPSTAYYPAGTQLFMNYTAYYPSPPGSPNSLGYFPTAANLSGVPPQPGTVVRMQGLAYNTGVKEILNFFQGYQCLKDVW

SEQ ID NO: 4928 - protein, 677 aa, Homo sapiens
MTASPDYLVVLFGITAGATGAKLGSDEKELILLFWKVVDLANKKVGQLHEVLVRPDQLELTEDCKEETKIDVESLSSASQLDQALRQFNQSVSNELNIGVGTSFCLCTDGQLHVRQILHPEASKKNVLLPECFYSFFDLRKEFKKCCPGSPDIDKLDVATMTEYLNFEKSSSVSRYGASQVEDMGNIILAMISEPYNHRFSDPERVNYKFESGTCSKMELIDDNTVVRARGLPWQSSDQDIARFFKGLNIAKGGAALCLNAQGRRNGEALVRFVSEEHRDLALQRHKHHMGTRYIEVYKATGEDFLKIAGGTSNEVAQFLSKENQVIVRMRGLPFTATAEEVVAFFGQHCPITGGKEGILFVTYPDGRPTGDAFVLFACEEYAQNALRKHKDLLGKRYIELFRSTAAEVQQVLNRFSSAPLIPLPTPPIIPVLPQQFVPPTNVRDCIRLRGLPYAATIEDILDFLGEFATDIRTHGVHMVLNHQGRPSGDAFIQMKSADRAFMAAQKCHKKNMKDRYVEVFQCSAEEMNFVLMGGTLNRNGLSPPPCLSPPSYTFPAPAAVIPTEAAIYQPSVILNPRALQPSTAYYPAGTQLFMNYTAYYPSPPGSPNSLGYFPTAANLSGVPPQPGTVVRMQGLAYNTGVKEILNFFQGYQYATEDGLIHTNDQARTLPKEWVCI

SEQ ID NO: 4929 - protein, 681 aa, Homo sapiens
MTASPDYLVVLFGITAGATGAKLGSDEKELILLFWKVVDLANKKVGQLHEVLVRPDQLELTEDCKEETKIDVESLSSASQLDQALRQFNQSVSNELNIGVGTSFCLCTDGQLHVRQILHPEASKKNVLLPECFYSFFDLRKEFKKCCPGSPDIDKLDVATMTEYLNFEKSSSVSRYGASQVEDMGNIILAMISEPYNHRFSDPERVNYKFESGTCSKMELIDDNTVVRARGLPWQSSDQDIARFFKGLNIAKGGAALCLNAQGRRNGEALVRFVSEEHRDLALQRHKHHMGTRYIEVYKATGEDFLKIAGGTSNEVAQFLSKENQVIVRMRGLPFTATAEEVVAFFGQHCPITGGKEGILFVTYPDGRPTGDAFVLFACEEYAQNALRKHKDLLGKRYIELFRSTAAEVQQVLNRFSSAPLIPLPTPPIIPVLPQQFVPPTNVRDCIRLRGLPYAATIEDILDFLGEFATDIRTHGVHMVLNHQGRPSGDAFIQMKSADRAFMAAQKCHKKNMKDRYVEVFQCSAEEMNFVLMGGTLNRNGLSPPPCKLPCLSPPSYTFPAPAAVIPTEAAIYQPSVILNPRALQPSTAYYPAGTQLFMNYTAYYPSPPGSPNSLGYFPTAANLSGVPPQPGTVVRMQGLAYNTGVKEILNFFQGYQYATEDGLIHTNDQARTLPKEWVCI

SEQ ID NO: 4930 - protein, 659 aa, Homo sapiens
MTASPDYLVVLFGITAGATGAKLGSDEKELILLFWKVVDLANKKVGQLHEVLVRPDQLELTEDCKEETKIDVESLSSASQLDQALRQFNQSVSNELNIGVGTSFCLCTDGQLHVRQILHPEASKKNVLLPECFYSFFDLRKEFKKCCPGSPDIDKLDVATMTEYLNFEKSSSVSRYGASQVEDMGNIILAMISEPYNHRFSDPERVNYKFESGTCSKMELIDDNTVVRARGLPWQSSDQDIARFFKGLNIAKGGAALCLNAQGRRNGEALVRFVSEEHRDLALQRHKHHMGTRYIEVYKATGEDFLKIAGGTSNEVAQFLSKENQVIVRMRGLPFTATAEEVVAFFGQHCPITGGKEGILFVTYPDGRPTGDAFVLFACEEYAQNALRKHKDLLGKRYIELFRSTAAEVQQVLNRFSSAPLIPLPTPPIIPVLPQQFVPPTNVRDCIRLRGLPYAATIEDILDFLGEFATDIRTHGVHMVLNHQGRPSGDAFIQMKSADRAFMAAQKCHKKNMKDRYVEVFQCSAEEMNFVLMGGTLNRNGLSPPPCLSPPSYTFPAPAAVIPTEAAIYQPSVILNPRALQPSTAYYPAGTQLFMNYTAYYPSPPGSPNSLGYFPTAANLSGVPPQPGTVVRMQGLAYNTGVKEILNFFQGYQCLKDVW

SEQ ID NO: 4931 - protein, 604 aa, Homo sapiens
MTASPDYLVVLFGITAGATGAKLGSDEKELILLFWKVVDLANKKVGQLHEVLVRPDQLELTEDCKEETKIDVESLSSASQLDQALRQFNQSVSNELNIGVGTSFCLCTDGQLHVRQILHPEASKKNVLLPECFYSFFDLRKEFKKCCPGSPDIDKLDVATMTEYLNFEKSSSVSRYGASQVEDMGNIILAMISEPYNHRFSDPERVNYKFESGTCSKMELIDDNTVVRARGLPWQSSDQDIARFFKGLNIAKGGAALCLNAQGRRNGEALVRFVSEEHRDLALQRHKHHMGTRYIEVYKATGEDFLKIAGGTSNEVAQFLSKENQVIVRMRGLPFTATAEEVVAFFGQHCPITGGKEGILFVTYPDGRPTGDAFVLFACEEYAQNALRKHKDLLGKRYIELFRSTAAEVQQVLNRFSSAPLIPLPTPPIIPVLPQQFVPPTNVRDCIRLRGLPYAATIEDILDFLGEFATDIRTHGVHMVLNHQGRPSGDAFIQMKSADRAFMAAQKCHKKNMKDRYVEVFQCSAEEMNFVLMGGTLNRNGLSPPPCLSPPSYTFPAPAAVIPTEAAIYQPSVILNPRALQPSTAYYPAGTQLFMNYTAYYPSV

SEQ ID NO: 4932 - protein, 681 aa, Homo sapiens; identical to SEQ ID NO: 4929

SEQ ID NO: 4933 - protein, 608 aa, Homo sapiens
MTASPDYLVVLFGITAGATGAKLGSDEKELILLFWKVVDLANKKVGQLHEVLVRPDQLELTEDCKEETKIDVESLSSASQLDQALRQFNQSVSNELNIGVGTSFCLCTDGQLHVRQILHPEASKKNVLLPECFYSFFDLRKEFKKCCPGSPDIDKLDVATMTEYLNFEKSSSVSRYGASQVEDMGNIILAMISEPYNHRFSDPERVNYKFESGTCSKMELIDDNTVVRARGLPWQSSDQDIARFFKGLNIAKGGAALCLNAQGRRNGEALVRFVSEEHRDLALQRHKHHMGTRYIEVYKATGEDFLKIAGGTSNEVAQFLSKENQVIVRMRGLPFTATAEEVVAFFGQHCPITGGKEGILFVTYPDGRPTGDAFVLFACEEYAQNALRKHKDLLGKRYIELFRSTAAEVQQVLNRFSSAPLIPLPTPPIIPVLPQQFVPPTNVRDCIRLRGLPYAATIEDILDFLGEFATDIRTHGVHMVLNHQGRPSGDAFIQMKSADRAFMAAQKCHKKNMKDRYVEVFQCSAEEMNFVLMGGTLNRNGLSPPPCKLPCLSPPSYTFPAPAAVIPTEAAIYQPSVILNPRALQPSTAYYPAGTQLFMNYTAYYPSV

SEQ ID NO: 4934 - protein, 502 aa, Homo sapiens
  VARIANT 1: note = misc_feature - Xaa can be any naturally occurring amino acid
XFFDLRKEFKKCCPGSPDIDKLDVATMTEYLNFEKSSSVSRYGASQVEDMGNIILAMISEPYNHRFSDPERVNYKFESGTCSKMELIDDNTVVRARGLPWQSSDQDIARFFKGLNIAKGGAALCLNAQGRRNGEALVRFVSEEHRDLALQRHKHHMGTRYIEVYKATGEDFLKIAGGTSNEVAQFLSKENQVIVRMRGLPFTATAEEVVAFFGQHCPITGGKEGILFVTYPDGRPTGDAFVLFACEEYAQNALRKHKDLLGKRYIELFRSTAAEVQQVLNRFSSAPLIPLPTPPIIPVLPQQFVPPTNVRDCIRLRGLPYAATIEDILDFLGEFATDIRTHGVHMVLNHQGRPSGDAFIQMKSADRAFMAAQKCHKKNMKDRYVEVFQCSAEEMNFVLMGGTLNRNGLSPPPCKLPCLSPPSYTFPAPAAVIPTEAAIYQPSVILNPRALQPSTAYYPAGTQLFMNYTAYYPSMQPRMDLYTQMTRPGLYPKNGFVFKGPSS

SEQ ID NO: 4935 - protein, 40 aa, Homo sapiens
  VARIANT 1: note = misc_feature - Xaa can be any naturally occurring amino acid
XLLPECFYSFFDLRKEFKKCCPGSPDIDKLDVATMTECIL

SEQ ID NO: 4936 - protein, 56 aa, Homo sapiens
MAIKSIASRLRGSRRFLSGFVAGAVVGAAGAGLAALQFFRSQGAEGALTGKQPDDC

SEQ ID NO: 4937 - protein, 56 aa, Homo sapiens; identical to SEQ ID NO: 4936

SEQ ID NO: 4938 - protein, 56 aa, Homo sapiens; identical to SEQ ID NO: 4936

SEQ ID NO: 4939 - protein, 56 aa, Homo sapiens; identical to SEQ ID NO: 4936

SEQ ID NO: 4940 - protein, 56 aa, Homo sapiens; identical to SEQ ID NO: 4936

SEQ ID NO: 4941 - protein, 318 aa, Homo sapiens
MAIKSIASRLRGSRRFLSGFVAGAVVGAAGAGLAALQFFRSQGAEGALTGKQPDGDADRKHCKFKPDPNIPPTFSAFNEDYVGSGWSRGHMAPAGNNKFSSKAMAETFYLSNIVPQDFDNNSGYWNRIEMYCRELTERFEDVWVVSGPLTLPQTRGDGKKIVSYQVIGEDNVAVPSHLYKVILARRSSVSTEPLALGAFVVPNEAIGFQPQLTEFQVSLQDLEKLSGLVFFPHLDRTSDIRNICSVDTCKLLDFQEFTLYLSTRKIEGARSVLRLEKIMENLKNAEIEPDDYFMSRYEKKLEELKAKEQSGTQIRKPS

SEQ ID NO: 4942 - protein, 368 aa, Homo sapiens
MAIKSIASRLRGSRRFLSGFVAGAVVGAAGAGLAALQFFRSQGAEGALTGKQPDGSAEKAVLEQFGFPLTGTEARCYTNHALSYDQAKRVPRWVLEHISKSKIMGDADRKHCKFKPDPNIPPTFSAFNEDYVGSGWSRGHMAPAGNNKFSSKAMAETFYLSNIVPQDFDNNSGYWNRIEMYCRELTERFEDVWVVSGPLTLPQTRGDGKKIVSYQVIGEDNVAVPSHLYKVILARRSSVSTEPLALGAFVVPNEAIGFQPQLTEFQVSLQDLEKLSGLVFFPHLDRTSDIRNICSVDTCKLLDFQEFTLYLSTRKIEGARSVLRLEKIMENLKNAEIEPDDYFMSRYEKKLEELKAKEQSGTQIRKPS

SEQ ID NO: 4943 - protein, 143 aa, Homo sapiens
MAIKSIASRLRGSRRFLSGFVAGAVVGAAGAGLAALQFFRSQGAEGALTGKQPDGSAEKAVLEQFGFPLTGTEARCYTNHALSYDQAKRVPRWVLEHISKSKIMGRFFKFTLLASLFLLSLNLHLWLVLNFWVQVTLLPQPPE

SEQ ID NO: 4944 - protein, 107 aa, Homo sapiens
MAIKSIASRLRGSRRFLSGFVAGAVVGAAGAGLAALQFFRSQGAEGALTGKQPDGSAEKAVLEQFGFPLTGTEARCYTNHALSYDQAKRVPRWVLEHISKSKIMGWS

SEQ ID NO: 4945 - protein, 81 aa, Homo sapiens
MAIKSIASRLRGSRRFLSGFVAGAVVGAAGAGLAALQFFRSQGAEGALTGKQPDGSAEKAVLEQFGFPLTGTEVDSSSLHS

SEQ ID NO: 4946 - protein, 146 aa, Homo sapiens
MAIKSIASRLRGSRRFLSGFVAGAVVGAAGAGLAALQFFRSQGAEGALTGKQPDGSAEKAVLEQFGFPLTGTEVMQTESIVNLSLIPISLQPSVPSMKIMLEVGGHEDTWLQQEITNFQVKPWLKPFTFLTLCLRILIIILDIGTE

SEQ ID NO: 4947 - protein, 107 aa, Homo sapiens
RSQGAEGALTGKQPDGSAEKAVLEQFGFPLTGTEVMQTESIVNLSLIPISLQPSVPSMKIMLEVGGHEDTWLQQEITNFQVKPWLKPFTFLTLCLRILIIILDIGTE

SEQ ID NO: 4948 - protein, 187 aa, Homo sapiens
  VARIANT 1: note = misc_feature - Xaa can be any naturally occurring amino acid
XFRSQGAEGALTGKQPDGSAEKAVLEQFGFPLTGTEARCYTNHALSYDQAKRVPRWVLEHISKSKIMGDADRKHCKFKPDPNIPPTFSAFNEDYVGSGWSRGHMAPAGNNKFSSKAMAETFYLSNIVPQDFDNNSGYWNRIEMYCRELTERFEDVWVVSGPLTLPQTRGDGKKIVSYQSWEYPSLQF

SEQ ID NO: 4949 - protein, 15 aa, Homo sapiens
  VARIANT 1: note = misc_feature - Xaa can be any naturally occurring amino acid
XGAEGALTGKQPDDC

SEQ ID NO: 4950 - protein, 676 aa, Homo sapiens
MQSWRRRKSLWLALSASWLLLVLLGGFSLLRLALPPRPRPGASQGWPRWLDAELLQSFSQPGELPEDAVSPPQAPHGGSCNWESCFDTSKCRGDGLKVFVYPAVGTISETHRRILASIEGSRFYTFSPAGACLLLLLSLDAQTGECSSMPLQWNRGRNHLVLRLHPAPCPRTFQLGQAMVAEASPTVDSFRPGFDVALPFLPEAHPLRGGAPGQLRQHSPQPGVALLALEEERGGWRTADTGSSACPWDGRCEQDPGPGQTQRQETLPNATFCLISGHRPEAASRFLQALQAGCIPVLLSPRWELPFSEVIDWTKAAIVADERLPLQVLAALQEMSPARVLALRQQTQFLWDAYFSSVEKVIHTTLEVIQDRIFGTSAHPSLLWNSPPGALLALSTFSTSPQDFPFYYLQQGSRPEGRFSALIWVGPPGQPPLKLIQAVAGSQHCAQILVLWSNERPLPSRWPETAVPLTVIDGHRKVSDRFYPYSTIRTDAILSLDARSSLSTSEVDFAFLVWQSFPERMVGFLTSSHFWDEAHGGWGYTAERTNEFSMVLTTAAFYHRYYHTLFTHSLPKALRTLADEAPTCVDVLMNFIVAAVTKLPPIKVPYGKQRQEAAPLAPGGPGPRPKPPAPAPDCINQIAAAFGHMPLLSSRLRLDPVLFKDPVSVQRKKYRSLEKP

SEQ ID NO: 4951 - protein, 117 aa, Homo sapiens
MGIRVLRLSLVVILVLLLVAGALTALLPSVKEDKMLMLRREIKSQGKSTMDSFTLIMQTYNRTDLLLKLLNHYQAVPNLHKVIVVWNNIGEKAPDELWNSLGPHPIPVIFKQQTANR

SEQ ID NO: 4952 - protein, 147 aa, Homo sapiens
MRCCHICKLPGRVMGIRVLRLSLVVILVLLLVAGALTALLPSVKEDKMLMLRREIKSQGKSTMDSFTLIMQTYNRTDLLLKLLNHYQAVPNLHKVIVVWNNIGEKAPDELWNSLGPHPIPVIFKQQTANRMRNRLQVFPELETNAIS

SEQ ID NO: 4953 - protein, 330 aa, Homo sapiens
MRCCHICKLPGRVMGIRVLRLSLVVILVLLLVAGALTALLPSVKEDKMLMLRREIKSQGKSTMDSFTLIMQTYNRTDLLLKLLNHYQAVPNLHKVIVVWNNIGEKAPDELWNSLGPHPIPVIFKQQTANRMRNRLQVFPELETNAVLMVDDDTLISTPDLVFAFSVWQQFPDQIVGFVPRKHVSTSSGIYSYGSFEMQAPGSGNGDQYSMVLIGASFFNSKYLELFQRQPAAVHALIDDTQNCDDIAMNFIIAKHIGKTSGIFVKPVNMDNLEKETNSGYSGMWHRAEHALQRSYCINKLVNIYDSMPLRYSNIMISQFGFPYANYKRKI

SEQ ID NO: 4954 - protein, 330 aa, Homo sapiens; identical to SEQ ID NO: 4953

SEQ ID NO: 4955 - protein, 266 aa, Homo sapiens
MRTWNSGGTKCCHICKLPGRVMGIRVLRLSLVVILVLLLVAGALTALLPSVKEDKMLMLRREIKSQGKSTMDSFTLIMQTYNRTDLLLKLLNHYQAVPNLHKVIVVWNNIGEKAPDELWNSLGPHPIPVIFKQQTANRMRNRLQVFPELETNAVLMVDDDTLISTPDLVFAFSVWQQFPDQIVGFVPRKHVSTSSGIYSYGSFEMQAPGSGNGDQYSMVLIGASFFNSKYLELFQRQPAAVHALIDDTQNCDDIAMNFIIAKHIGK

SEQ ID NO: 4956 - protein, 130 aa, Homo sapiens
MGRPLHLVLLSASLAGLLLLGESLFIRREQANNILARVTRANSFLEEMKKGHLERECMEETCSYEEAREVFEDSDKTNEFWNKYKDGDQCETSPCQNQGKCKDGLGEYTCTCLEGFEGKNCELCMLIFAL

SEQ ID NO: 4957 - protein, 334 aa, Homo sapiens
MGRPLHLVLLSASLAGLLLLGESLFIRREQANNILARVTRANSFLEEMKKGHLERECMEETCSYEEAREVFEDSDKTNEFWNKYKDGDQCETSPCQNQGKCKDGLGEYTCTCLEGFEGKNCELFTRKLCSLDNGDCDQFCHEEQNSVVCSCARGYTLADNGKACIPTGPYPCGKQTLERRKRSVAQATSSSGEAPDSITWKPYDAADLDPTENPFDLLDFNQTQPERGDNNLTRIVGGQECKDGECPWQALLINEENEGFCGGTILSEFYILTAAHCLYQAKRFKVRGTGTRSRRRAVRRCTRWRWSSSTTGSQRRPMTSTSPCSGSRPPSPSA

SEQ ID NO: 4958 - protein, 332 aa, Homo sapiens
MGRPLHLVLLSASLAGLLLLGESLFIRREQANNILARVTRANSFLEEMKKGHLERECMEETCSYEEAREVFEDSDKTNEFWNKYKDGDQCETSPCQNQGKCKDGLGEYTCTCLEGFEGKNCELFTRKLCSLDNGDCDQFCHEEQNSVVCSCARGYTLADNGKACIPTGPYPCGKQTLERRKRSVAQATSSSGEAPDSITWKPYDAADLDPTENPFDLLDFNQTQPERGDNNLTRIVGGQECKDGECPWQALLINEENEGFCGGTILSEFYILTAAHCLYQAKRFKGTGTRSRRRAVRRCTRWRWSSSTTGSQRRPMTSTSPCSGSRPPSPSA

SEQ ID NO: 4959 - protein, 488 aa, Homo sapiens
MGRPLHLVLLSASLAGLLLLGESLFIRREQANNILARVTRANSFLEEMKKGHLERECMEETCSYEEAREVFEDSDKTNEFWNKYKDGDQCETSPCQNQGKCKDGLGEYTCTCLEGFEGKNCELFTRKLCSLDNGDCDQFCHEEQNSVVCSCARGYTLADNGKACIPTGPYPCGKQTLERRKRSVAQATSSSGEAPDSITWKPYDAADLDPTENPFDLLDFNQTQPERGDNNLTRIVGGQECKDGECPWQALLINEENEGFCGGTILSEFYILTAAHCLYQAKRFKVRVGDRNTEQEEGGEAVHEVEVVIKHNRFTKETYDFDIAVLRLKTPITFRMNVAPACLPERDWAESTLMTQKTGIVSGFGRTHEKGRQSTRLKMLEVPYVDRNSCKLSSSFIITQNMFCAGYDTKQEDACQGDSGGPHVTRFKDTYFVTGIVSWGEGCARKGKYGIYTKVTAFLKWIDRSMKTRGLPKAKSHAPEVITSSPLK

SEQ ID NO: 4960 - protein, 162 aa, Homo sapiens
MIFLYQVVHFILFTSVSGECVTQLLKDTCFEGGDITTVFTPSAKYCQVVCTYHPRCLLFTFTAESPSEDPTRWFTCVLKDSVTETLPRVNRTAAISGYSFKQCSHQISACNKDIYVDLDMKGINYNSSVAKSAQECQERCTDDVHCHFFTYATRQFPSLEHR

SEQ ID NO: 4961 - protein, 625 aa, Homo sapiens
MIFLYQVVHFILFTSVSGECVTQLLKDTCFEGGDITTVFTPSAKYCQVVCTYHPRCLLFTFTAESPSEDPTRWFTCVLKDSVTETLPRVNRTAAISGYSFKQCSHQISACNKDIYVDLDMKGINYNSSVAKSAQECQERCTDDVHCHFFTYATRQFPSLEHRNICLLKHTQTGTPTRITKLDKVVSGFSLKSCALSNLACIRDIFPNTVFADSNIDSVMAPDAFVCGRICTHHPGCLFFTFFSQEWPKESQRNLCLLKTSESGLPSTRIKKSKALSGFSLQSCRHSIPVFCHSSFYHDTDFLGEELDIVAAKSHEACQKLCTNAVRCQFFTYTPAQASCNEGKGKCYLKLSSNGSPTKILHGRGGISGYTLRLCKMDNECTTKIKPRIVGGTASVRGEWPWQVTLHTTSPTQRHLCGGSIIGNQWILTAAHCFYGVESPKILRVYSGILNQSEIKEDTSFFGVQEIIIHDQYKMAESGYDIALLKLETTVNYTDSQRPICLPSKGDRNVIYTDCWVTGWGYRKLRDKIQNTLQKAKIPLVTNEECQKRYRGHKITHKMICAGYREGGKDACKGDSGGPLSCKHNEVWHLVGITSWGEGCAQRERPGVYTNVVEYVDWILEKTQAV

SEQ ID NO: 4962 - protein, 571 aa, Homo sapiens
MIFLYQVVHFILFTSVSGECVTQLLKDTCFEGGDITTVFTPSAKYCQVVCTYHPRCLLFTFTAESPSEDPTRWFTCVLKDSVTETLPRVNRTAAISGYSFKQCSHQISNICLLKHTQTGTPTRITKLDKVVSGFSLKSCALSNLACIRDIFPNTVFADSNIDSVMAPDAFVCGRICTHHPGCLFFTFFSQEWPKESQRNLCLLKTSESGLPSTRIKKSKALSGFSLQSCRHSIPVFCHSSFYHDTDFLGEELDIVAAKSHEACQKLCTNAVRCQFFTYTPAQASCNEGKGKCYLKLSSNGSPTKILHGRGGISGYTLRLCKMDNECTTKIKPRIVGGTASVRGEWPWQVTLHTTSPTQRHLCGGSIIGNQWILTAAHCFYGVESPKILRVYSGILNQSEIKEDTSFFGVQEIIIHDQYKMAESGYDIALLKLETTVNYTDSQRPICLPSKGDRNVIYTDCWVTGWGYRKLRDKIQNTLQKAKIPLVTNEECQKRYRGHKITHKMICAGYREGGKDACKGDSGGPLSCKHNEVWHLVGITSWGEGCAQRERPGVYTNVVEYVDWILEKTQAV

SEQ ID NO: 4963 - protein, 210 aa, Homo sapiens
  VARIANT 1: note = misc_feature - Xaa can be any naturally occurring amino acid
XSGFSLKSCALSNLACIRDIFPNTVFADSNIDSVMAPDAFVCGRICTHHPGCLFFTFFSQEWPKESQRNLCLLKTSESGLPSTRIKKSKALSGFSLQSCRHSIPVFCHSSFYHDTDFLGEELDIVAAKSHEACQKLCTNAVRCQFFTYTPAQASCNEGKGKCYLKLSSNGSPTKILHGRGGISGYTLRLCKMDNELRGAPMKISGWLKTS

SEQ ID NO: 4964 - protein, 159 aa, Homo sapiens
  VARIANT 1: note = misc_feature - Xaa can be any naturally occurring amino acid
XVESPKILRVYSGILNQSEIKEDTSFFGVQEIIIHDQYKMAESGYDIALLKLETTVNYTDKIQNTLQKAKIPLVTNEECQKRYRGHKITHKMICAGYREGGKDACKGDSGGPLSCKHNEVWHLVGITSWGEGCAQRERPGVYTNVVEYVDWILEKTQAV

SEQ ID NO: 4965 - protein, 615 aa, Homo sapiens
MRALLLLGFLLVSLESTLSIPPWEAPKEHKYKAEEHTVVLTVTGEPCHFPFQYHRQLYHKCTHKGRPGPQPWCATTPNFDQDQRWGYCLEPKKVKDHCSKHSPCQKGGTCVNMPSGPHCLCPQHLTGNHCQKEKCFEPQLLRFFHKNEIWYRTEQAAVARCQCKGPDAHCQRLASQACRTNPCLHGGRCLEVEGHRLCHCPVGYTGAFCDVDTKASCYDGRGLSYRGLARTTLSGAPCQPWASEATYRNVTAEQARNWGLGGHAFCRNPDNDIRPWCFVLNRDRLSWEYCDLAQCQTPTQAAPPTPVSPRLHVPLMPAQPAPPKPQPTTRTPPQSQTPGALPAKREQPPSLTRNGPLSCGQRLRKSLSSMTRVVGGLVALRGAHPYIAALYWGHSFCAGSLIAPCWVLTAAHCLQDRPAPEDLTVVLGQERRNHSCEPCQTLAVRSYRLHEAFSPVSYQHDLALLRLQEDADGSCALLSPYVQPVCLPSGAARPSETTLCQVAGWGHQFEGAEEYASFLQEAQVPFLSLERCSAPDVHGSSILPGMLCAGFLEGGTDACQGDSGGPLVCEDQAAERRLTLQGIISWGSGCGDRNKPGVYTDVAYYLAWIREHTVS

SEQ ID NO: 4966 - protein, 661 aa, Homo sapiens
MRLKNLTFIIILIISGELYAEEKPCGFPHVENGRIAQYYYTFKSFYFPMSIDKKLSFFCLAGYTTESGRQEEQTTCTTEGWSPEPRCFKKCTKPDLSNGYISDVKLLYKIQENMRYGCASGYKTTGGKDEEVVQCLSDGWSSQPTCRKEHETCLAPELYNGNYSTTQKTFKVKDKVQYECATGYYTAGGKKTEEVECLTYGWSLTPKCTKLKCSSLRLIENGYFHPVKQTYEEGDVVQFFCHENYYLSGSDLIQCYNFGWYPESPVCEGRRNRCPPPPLPINSKIQTHSTTYRHGEIVHIECELNFEIHGSAEIRCEDGKWTEPPKCIEGQEKVACEEPPFIENGAANLHSKIYYNGDKVTYACKSGYLLHGSNEITCNRGKWTLPPECVENNENCKHPPVVMNGAVADGILASYATGSSVEYRCNEYYLLRGSKISRCEQGKWSSPPVCLEPCTVNVDYMNRNNIEMKWKYEGKVLHGDLIDFVCKQGYDLSPLTPLSELSVQCNRGEVKYPLCTRKESKGMCTSPPLIKHGVIISSTVDTYENGSSVEYRCFDHHFLEGSREAYCLDGMWTTPPLCLEPCTLSFTEMEKNNLLLKWDFDNRPHILHGEYIEFICRGDTYPAELYITGSILRMQCDRGQLKYPRCIPRQSTLSYQEPLRT

SEQ ID NO: 4967 - protein, 622 aa, Homo sapiens
MAHVRGLQLPGCLALAALCSLVHSQHVFLAPQQARSLLQRVRRANTFLEEVRKGNLERECVEETCSYEEAFEALESSTATDVFWAKYTACETARTPRDKLAACLEGNCAEGLGTNYRGHVNITRSGIECQLWRSRYPHKPEINSTTHPGADLQENFCRNPDSSTTGPWCYTTDPTVRRQECSIPVCGQDQVTVAMTPRSEGSSVNLSPPLEQCVPDRGQQYQGRLAVTTHGLPCLAWASAQAKALSKHQDFNSAVQLVENFCRNPDGDEEGVWCYVAGKPGDFGYCDLNYCEEAVEEETGDGLDEDSDRAIEGRTATSEYQTFFNPRTFGSGEADCGLRPLFEKKSLEDKTERELLESYIDGRIVEGSDAEIGMSPWQVMLFRKSPQELLCGASLISDRWVLTAAHCLLYPPWDKNFTENDLLVRIGKHSRTRYERNIEKISMLEKIYIHPRYNWRENLDRDIALMKLKKPVAFSDYIHPVCLPDRETAASLLQAGYKGRVTGWGNLKETWTANVGKGQPSVLQVVNLPIVERPVCKDSTRIRITDNMFCAGYKPDEGKRGDACEGDSGGPFVMKSPFNNRWYQMGIVSWGEGCDRDGKYGFYTHVFRLKKWIQKVIDQFGE

SEQ ID NO: 4968 - protein, 583 aa, Homo sapiens
MAHVRGLQLPGCLALAALCSLVHSQHVFLAPQQARSLLQRVRRANTFLEEVRKGNLERECVEETCSYEEAFEALESSTATDVFWAKYTACETARTPRDKLAACLEGNCAEGLGTNYRGHVNITRSGIECQLWRSRYPHKPEINSTTHPGADLQENFCRNPDSSTTGPWCYTTDPTVRRQECSIPVCGQDQVTVAMTPRSEGSSVNLSPPLEQCVPDRGQQYQGRLAVTTHGLPCLAWASAQAKALSKHQDFNSAVQLVENFCRNPDGDEEGVWCYVAGKPGDFGYCDLNYCEEAVEEETGDGLDEDSDRAIEGRTATSEYQTFFNPRTFGSGEADCGLRPLFEKKSLEDKTERELLESYIDGRIVEGSDAEIGMSPWQVMLFRKSPQELLCGASLISDRWVLTAAHCLLYPPWDKNFTENDLLVRIGKHSRTRYERNIEKISMLEKIYIHPSLLQAGYKGRVTGWGNLKETWTANVGKGQPSVLQVVNLPIVERPVCKDSTRIRITDNMFCAGYKPDEGKRGDACEGDSGGPFVMKSPFNNRWYQMGIVSWGEGCDRDGKYGFYTHVFRLKKWIQKVIDQFGE

SEQ ID NO: 4969 - protein, 324 aa, Homo sapiens
MGWGLLAGQSTQSWPLMFLAPQQARSLLQRVRRANTFLEEVRKGNLERECVEETCSYEEAFEALESSTATDVFWAKYTACETARTPRDKLAACLEGNCAEGLGTNYRGHVNITRSGIECQLWRSRYPHKPEINSTTHPGADLQENFCRNPDSSTTGPWCYTTDPTVRRQECSIPVCGQDQVTVAMTPRSEGSSVNLSPPLEQCVPDRGQQYQGRLAVTTHGLPCLAWASAQAKALSKHQDFNSAVQLVENFCRNPDGDEEGVWCYVAGKPGDFGYCDLNYCEEAVEEETGDGLDEDSDRAIEGRTATSEYQTFFNPRTFGSGEA

SEQ ID NO: 4970 - protein, 425 aa, Homo sapiens
MGPRRLLLVAACFSLCGPLLSARTRARRPESKATNATLDPRSFLLRNPNDKYEPFWEDEEKNESGLTEYRLVSINKSSPLQKQLPAFISEDASGYLTSSWLTLFVPSVYTGVFVVSLPLNIMAIVVFILKMKVKKPAVVYMLHLATADVLFVSVLPFKISYYFSGSDWQFGSELCRFVTAAFYCNMYASILLMTVISIDRFLAVVYPMQSLSWRTLGRASFTCLAIWALAIAGVVPLLLKEQTIQVPGLNITTCHDVLNETLLEGYYAYYFSAFSAVFFFVPLIISTVCYVSIIRCLSSSAVANRSKKSRALFLSAAVFCIFIICFGPTNVLLIAHYSFLSHTSTTEAAYFAYLLCVCVSSISCCIDPLIYYYASSECQRYVYSILCCKESSDPSSYNSSGQLMASKMDTCSSNLNNSIYKKLLT

SEQ ID NO: 4971 - protein, 102 aa, Homo sapiens
MGPRRLLLVAACFSLCGPLLSARTRARRPVTFRWGVPPPSRAQPMPLWTRSWRVQPACHGVLDMEEDGAEAPWGSLQSCVALVIVFLPGPPPKRKALTLLHQ

SEQ ID NO: 4972 - protein, 113 aa, Homo sapiens
MWGRLLLWPLVLGFSLSGGTQTPSVYDESGSTGGGDARPQSCLPPAATQAKSVPMTVTPWSSRTAHGHCFWAGCPPGWCPPSMGWSWWWGCRPMGWRCGCWPRRHLGCPPPCC

SEQ ID NO: 4973 - protein, 385 aa, Homo sapiens
MWGRLLLWPLVLGFSLSGGTQTPSVYDESGSTGGGDDSTPSILPAPRGYPGQVCANDSDTLELPDSSRALLLGWVPTRLVPALYGLVLVVGLPANGLALWVLATQAPRLPSTMLLMNLAAADLLLALALPPRIAYHLRGQRWPFGEAACRLATAALYGHMYGSVLLLAAVSLDRYLALVHPLRARALRGRRLALGLCMAAWLMAAALALPLTLQRQTFRLARSDRVLCHDALPLDAQASHWQPAFTCLALLGCFLPLLAMLLCYGATLHTLAASGRRYGHALRLTAVVLASAVAFFVPSNLLLLLHYSDPSPSAWGNLYGAYVPSLALSTLNSCVDPFIYYYVSAEFRDKVRAGLFQRSPGDTVASKASAEGGSRGMGTHSSLLQ

SEQ ID NO: 4974 - protein, 2224 aa, Homo sapiens
MFPGCPRLWVLVVLGTSWVGWGSQGTEAAQLRQFYVAAQGISWSYRPEPTNSSLNLSVTSFKKIVYREYEPYFKKEKPQSTISGLLGPTLYAEVGDIIKVHFKNKADKPLSIHPQGIRYSKLSEGASYLDHTFPAEKMDDAVAPGREYTYEWSISEDSGPTHDDPPCLTHIYYSHENLIEDFNSGLIGPLLICKKGTLTEGGTQKTFDKQIVLLFAVFDESKSWSQSSSLMYTVNGYVNGTMPDITVCAHDHISWHLLGMSSGPELFSIHFNGQVLEQNHHKVSAITLVSATSTTANMTVGPEGKWIISSLTPKHLQAGMQAYIDIKNCPKKTRNLKKITREQRRHMKRWEYFIAAEEVIWDYAPVIPANMDKKYRSQHLDNFSNQIGKHYKKVMYTQYEDESFTKHTVNPNMKEDGILGPIIRAQVRDTLKIVFKNMASRPYSIYPHGVTFSPYEDEVNSSFTSGRNNTMIRAVQPGETYTYKWNILEFDEPTENDAQCLTRPYYSDVDIMRDIASGLIGLLLICKSRSLDRRGIQRAADIEQQAVFAVFDENKSWYLEDNINKFCENPDEVKRDDPKFYESNIMSTINGYVPESITTLGFCFDDTVQWHFCSVGTQNEILTIHFTGHSFIYGKRHEDTLTLFPMRGESVTVTMDNVGTWMLTSMNSSPRSKKLRLKFRDVKCIPDDDEDSYEIFEPPESTVMATRKMHDRLEPEDEESDADYDYQNRLAAALGIRSFRNSSLNQEEEEFNLTALALENGTEFVSSNTDIIVGSNYSSPSNISKFTVNNLAEPQKAPSHQQATTAGSPLRHLIGKNSVLNSSTAEHSSPYSEDPIEDPLQPDVTGIRLLSLGAGEFKSQEHAKHKGPKVERDQAAKHRFSWMKLLAHKVGRHLSQDTGSPSGMRPWEDLPSQDTGSPSRMRPWKDPPSDLLLLKQSNSSKILVGRWHLASEKGSYEIIQDTDEDTAVNNWLISPQNASRAWGESTPLANKPGKQSGHPKFPRVRHKSLQVRQDGGKSRLKKSQFLIKTRKKKKEKHTHHAPLSPRTFHPLRSEAYNTFSERRLKHSLVLHKSNETSLPTDLNQTLPSMDFGWIASLPDHNQNSSNDTGQASCPPGLYQTVPPEEHYQTFPIQDPDQMHSTSDPSHRSSSPELSEMLEYDRSHKSFPTDISQMSPSSEHEVWQTVISPDLSQVTLSPELSQTNLSPDLSHTTLSPELIQRNLSPALGQMPISPDLSHTTLSPDLSHTTLSLDLSQTNLSPELSQTNLSPALGQMPLSPDLSHTTLSLDFSQTNLSPELSHMTLSPELSQTNLSPALGQMPISPDLSHTTLSLDFSQTNLSPELSQTNLSPALGQMPLSPDPSHTTLSLDLSQTNLSPELSQTNLSPDLSEMPLFADLSQIPLTPDLDQMTLSPDLGETDLSPNFGQMSLSPDLSQVTLSPDISDTTLLPDLSQISPPPDLDQIFYPSESSQSLLLQEFNESFPYPDLGQMPSPSSPTLNDTFLSKEFNPLVIVGLSKDGTDYIEIIPKEEVQSSEDDYAEIDYVPYDDPYKTDVRTNINSSRDPDNIAAWYLRSNNGNRRNYYIAAEEISWDYSEFVQRETDIEDSDDIPEDTTYKKVVFRKYLDSTFTKRDPRGEYEEHLGILGPIIRAEVDDVIQVRFKNLASRPYSLHAHGLSYEKSSEGKTYEDDSPEWFKEDNAVQPNSSYTYVWHATERSGPESPGSACRAWAYYSAVNPEKDIHSGLIGPLLICQKGILHKDSNMPMDMREFVLLFMTFDEKKSWYYEKKSRSSWRLTSSEMKKSHEFHAINGMIYSLPGLKMYEQEWVRLHLLNIGGSQDIHVVHFHGQTLLENGNKQHQLGVWPLLPGSFKTLEMKASKPGWWLLNTEVGENQRAGMQTPFLIMDRDCRMPMGLSTGIISDSQIKASEFLGYWEPRLARLNNGGSYNAWSVEKLAAEFASKPWIQVDMQKEVIITGIQTQGAKHYLKSCYTTEFYVAYSSNQINWQIFKGNSTRNVMYFNGNSDASTIKENQFDPPIVARYIRISPTRAYNRPTLRLELQGCEVNGCSTPLGMENGKIENKQITASSFKKSWWGDYWEPFRARLNAQGRVNAWQAKANNNKQWLEIDLLKIKKITAIITQGCKSLSSEMYVKSYTIHYSEQGVEWKPYRLKSSMVDKIFEGNTNTKGHVKNFFNPPIISRFIRVIPKTWNQSIALRLELFGCDIY

SEQ ID NO: 4975 - protein, 2229 aa, Homo sapiens
MFPGCPRLWVLVVLGTSWVGWGSQGTEAAQLRQFYVAAQGISWSYRPEPTNSSLNLSVTSFKKIVYREYEPYFKKEKPQSTISGLLGPTLYAEVGDIIKVHFKNKADKPLSIHPQGIRYSKLSEGASYLDHTFPAEKMDDAVAPGREYTYEWSISEDSGPTHDDPPCLTHIYYSHENLIEDFNSGLIGPLLICKKGTLTEGGTQKTFDKQIVLLFAVFDESKSWSQSSSLMYTVNGYVNGTMPDITVCAHDHISWHLLGMSSGPELFSIHFNGQVLEQNHHKVSAITLVSATSTTANMTVGPEGKWIISSLTPKHLQAGMQAYIDIKNCPKKTRNLKKITREQRRHMKRWEYFIAAEEVIWDYAPVIPANMDKKYRSQHLDNFSNQIGKHYKKVMYTQYEDESFTKHTVNPNMKEDGILGPIIRAQVRDTLKIVFKNMASRPYSIYPHGVTFSPYEDEVNSSFTSGRNNTMIRAVQPGETYTYKWNILEFDEPTENDAQCLTRPYYSDVDIMRDIASGLIGLLLICKSRSLDRRGIQRAADIEQQAVFAVFDENKSWYLEDNINKFCENPDEVKRDDPKFYESNIMSNFTLSAINGYVPESITTLGFCFDDTVQWHFCSVGTQNEILTIHFTGHSFIYGKRHEDTLTLFPMRGESVTVTMDNVGTWMLTSMNSSPRSKKLRLKFRDVKCIPDDDEDSYEIFEPPESTVMATRKMHDRLEPEDEESDADYDYQNRLAAALGIRSFRNSSLNQEEEEFNLTALALENGTEFVSSNTDIIVGSNYSSPSNISKFTVNNLAEPQKAPSHQQATTAGSPLRHLIGKNSVLNSSTAEHSSPYSEDPIEDPLQPDVTGIRLLSLGAGEFKSQEHAKHKGPKVERDQAAKHRFSWMKLLAHKVGRHLSQDTGSPSGMRPWEDLPSQDTGSPSRMRPWKDPPSDLLLLKQSNSSKILVGRWHLASEKGSYEIIQDTDEDTAVNNWLISPQNASRAWGESTPLANKPGKQSGHPKFPRVRHKSLQVRQDGGKSRLKKSQFLIKTRKKKKEKHTHHAPLSPRTFHPLRSEAYNTFSERRLKHSLVLHKSNETSLPTDLNQTLPSMDFGWIASLPDHNQNSSNDTGQASCPPGLYQTVPPEEHYQTFPIQDPDQMHSTSDPSHRSSSPELSEMLEYDRSHKSFPTDISQMSPSSEHEVWQTVISPDLSQVTLSPELSQTNLSPDLSHTTLSPELIQRNLSPALGQMPISPDLSHTTLSPDLSHTTLSLDLSQTNLSPELSQTNLSPALGQMPLSPDLSHTTLSLDFSQTNLSPELSHMTLSPELSQTNLSPALGQMPISPDLSHTTLSLDFSQTNLSPELSQTNLSPALGQMPLSPDPSHTTLSLDLSQTNLSPELSQTNLSPDLSEMPLFADLSQIPLTPDLDQMTLSPDLGETDLSPNFGQMSLSPDLSQVTLSPDISDTTLLPDLSQISPPPDLDQIFYPSESSQSLLLQEFNESFPYPDLGQMPSPSSPTLNDTFLSKEFNPLVIVGLSKDGTDYIEIIPKEEVQSSEDDYAEIDYVPYDDPYKTDVRTNINSSRDPDNIAAWYLRSNNGNRRNYYIAAEEISWDYSEFVQRETDIEDSDDIPEDTTYKKVVFRKYLDSTFTKRDPRGEYEEHLGILGPIIRAEVDDVIQVRFKNLASRPYSLHAHGLSYEKSSEGKTYEDDSPEWFKEDNAVQPNSSYTYVWHATERSGPESPGSACRAWAYYSAVNPEKDIHSGLIGPLLICQKGILHKDSNMPMDMREFVLLFMTFDEKKSWYYEKKSRSSWRLTSSEMKKSHEFHAINGMIYSLPGLKMYEQEWVRLHLLNIGGSQDIHVVHFHGQTLLENGNKQHQLGVWPLLPGSFKTLEMKASKPGWWLLNTEVGENQRAGMQTPFLIMDRDCRMPMGLSTGIISDSQIKASEFLGYWEPRLARLNNGGSYNAWSVEKLAAEFASKPWIQVDMQKEVIITGIQTQGAKHYLKSCYTTEFYVAYSSNQINWQIFKGNSTRNVMYFNGNSDASTIKENQFDPPIVARYIRISPTRAYNRPTLRLELQGCEVNGCSTPLGMENGKIENKQITASSFKKSWWGDYWEPFRARLNAQGRVNAWQAKANNNKQWLEIDLLKIKKITAIITQGCKSLSSEMYVKSYTIHYSEQGVEWKPYRLKSSMVDKIFEGNTNTKGHVKNFFNPPIISRFIRVIPKTWNQSIALRLELFGCDIY

SEQ ID NO: 4976 - protein, 382 aa, Homo sapiens
MVSQALRLLCLLLGLQGCLAADGDQCASSPCQNGGSCKDQLQSYICFCLPAFEGRNCETHKDDQLICVNENGGCEQYCSDHTGTKRSCRCHEGYSLLADGVSCTPTVEYPCGKIPILEKRNASKPQGRIVGGKVCPKGECPWQVLLLVNGAQLCGGTLINTIWVVSAAHCFDKIKNWRNLIAVLGEHDLSEHDGDEQSRRVAQVIIPSTYVPGTTNHDIALLRLHQPVVLTDHVVPLCLPERTFSERTLAFVRFSLVSGWGQLLDRGATALELMVLNVPRLMTQDCLQQSRKVGDSPNITEYMFCAGYSDGSKDSCKGDSGGPHATHYRGTWYLTGIVSWGQGCATVGHFGVYTRVSQYIEWLQKLMRSEPRPGVLLRAPFP

SEQ ID NO: 4977 - protein, 74 aa, Homo sapiens
MVSQALRLLCLLLGLQGCLAAGGSPRRPAPAPARQRVPGGAAAGLPGEGVQGGAVLLRGGPGDLQGRGEDVVSG

SEQ ID NO: 4978 - protein, 466 aa, Homo sapiens
MVSQALRLLCLLLGLQGCLAAGGVAKASGGETRDMPWKPGPHRVFVTQEEAHGVLHRRRRANAFLEELRPGSLERECKEEQCSFEEAREIFKDAERTKLFWISYSDGDQCASSPCQNGGSCKDQLQSYICFCLPAFEGRNCETHKDDQLICVNENGGCEQYCSDHTGTKRSCRCHEGYSLLADGVSCTPTVEYPCGKIPILEKRNASKPQGRIVGGKVCPKGECPWQVLLLVNGAQLCGGTLINTIWVVSAAHCFDKIKNWRNLIAVLGEHDLSEHDGDEQSRRVAQVIIPSTYVPGTTNHDIALLRLHQPVVLTDHVVPLCLPERTFSERTLAFVRFSLVSGWGQLLDRGATALELMVLNVPRLMTQDCLQQSRKVGDSPNITEYMFCAGYSDGSKDSCKGDSGGPHATHYRGTWYLTGIVSWGQGCATVGHFGVYTRVSQYIEWLQKLMRSEPRPGVLLRAPFP

SEQ ID NO: 4979 - protein, 444 aa, Homo sapiens
MVSQALRLLCLLLGLQGCLAAVFVTQEEAHGVLHRRRRANAFLEELRPGSLERECKEEQCSFEEAREIFKDAERTKLFWISYSDGDQCASSPCQNGGSCKDQLQSYICFCLPAFEGRNCETHKDDQLICVNENGGCEQYCSDHTGTKRSCRCHEGYSLLADGVSCTPTVEYPCGKIPILEKRNASKPQGRIVGGKVCPKGECPWQVLLLVNGAQLCGGTLINTIWVVSAAHCFDKIKNWRNLIAVLGEHDLSEHDGDEQSRRVAQVIIPSTYVPGTTNHDIALLRLHQPVVLTDHVVPLCLPERTFSERTLAFVRFSLVSGWGQLLDRGATALELMVLNVPRLMTQDCLQQSRKVGDSPNITEYMFCAGYSDGSKDSCKGDSGGPHATHYRGTWYLTGIVSWGQGCATVGHFGVYTRVSQYIEWLQKLMRSEPRPGVLLRAPFP

SEQ ID NO: 4980 - protein, 165 aa, Homo sapiens [sequence omitted]

SEQ ID NO: 4981 - protein, 222 aa, Homo sapiens
MHRDARAQKASRGFPPRVPKSFPFNTSVVYKKTLFVEFTDHLFNIAKPRPPWMGLLGPTIQAEVYDTVVITLKNMASHPVSLHAVGVSYWKASEGAEYDDQTSQREKEDDKVFPGGSHTYVWQVLKENGPMASDPLCLTYSYLSHVDLVKDLNSGLIGALLVCREGSLAKEKTQTLHKFILLFAVFDEGKSWHSETKNSLMQDRDAASARAWPKMHTVNGYV

SEQ ID NO: 4982 - protein, 262 aa, Homo sapiens
MLEQEEERENARKGGSAAHFQTIIRSCERSIRRIARGKSAPMIQSPPTRPFLQQVFFGNVDSSGIKHNIFNPPIIARYIRLHPTHYSIRSTLRMELMGCDLNSCSMPLGMESKAISDAQITASSYFTNMFATWSPSKARLHLQGRSNAWRPQVNNPKEWLQVDFQKTMKVTGVTTQGVKSLLTSMYVKEFLISSSQDGHQWTLFFQNGKVKVFQGNQDSFTPVVNSLDPPLLTRYLRIHPQSWVHQIALRMEVLGCEAQDLY

SEQ ID NO: 4983 - protein, 63 aa, Homo sapiens
MQIELSTCFFLCLLRFCFSATRRYYLGAVELSWDYMQSDLDFLLECQNLFHSTPQSCTKRLCL

SEQ ID NO: 4984 - protein, 2351 aa, Homo sapiens
MQIELSTCFFLCLLRFCFSATRRYYLGAVELSWDYMQSDLGELPVDARFPPRVPKSFPFNTSVVYKKTLFVEFTDHLFNIAKPRPPWMGLLGPTIQAEVYDTVVITLKNMASHPVSLHAVGVSYWKASEGAEYDDQTSQREKEDDKVFPGGSHTYVWQVLKENGPMASDPLCLTYSYLSHVDLVKDLNSGLIGALLVCREGSLAKEKTQTLHKFILLFAVFDEGKSWHSETKNSLMQDRDAASARAWPKMHTVNGYVNRSLPGLIGCHRKSVYWHVIGMGTTPEVHSIFLEGHTFLVRNHRQASLEISPITFLTAQTLLMDLGQFLLFCHISSHQHDGMEAYVKVDSCPEEPQLRMKNNEEAEDYDDDLTDSEMDVVRFDDDNSPSFIQIRSVAKKHPKTWVHYIAAEEEDWDYAPLVLAPDDRSYKSQYLNNGPQRIGRKYKKVRFMAYTDETFKTREAIQHESGILGPLLYGEVGDTLLIIFKNQASRPYNIYPHGITDVRPLYSRRLPKGVKHLKDFPILPGEIFKYKWTVTVEDGPTKSDPRCLTRYYSSFVNMERDLASGLIGPLLICYKESVDQRGNQIMSDKRNVILFSVFDENRSWYLTENIQRFLPNPAGVQLEDPEFQASNIMHSINGYVFDSLQLSVCLHEVAYWYILSIGAQTDFLSVFFSGYTFKHKMVYEDTLTLFPFSGETVFMSMENPGLWILGCHNSDFRNRGMTALLKVSSCDKNTGDYYEDSYEDISAYLLSKNNAIEPRSFSQNSRHPSTRQKQFNATTIPENDIEKTDPWFAHRTPMPKIQNVSSSDLLMLLRQSPTPHGLSLSDLQEAKYETFSDDPSPGAIDSNNSLSEMTHFRPQLHHSGDMVFTPESGLQLRLNEKLGTTAATELKKLDFKVSSTSNNLISTIPSDNLAAGTDNTSSLGPPSMPVHYDSQLDTTLFGKKSSPLTESGGPLSLSEENNDSKLLESGLMNSQESSWGKNVSSTESGRLFKGKRAHGPALLTKDNALFKVSISLLKTNKTSNNSATNRKTHIDGPSLLIENSPSVWQNILESDTEFKKVTPLIHDRMLMDKNATALRLNHMSNKTTSSKNMEMVQQKKEGPIPPDAQNPDMSFFKMLFLPESARWIQRTHGKNSLNSGQGPSPKQLVSLGPEKSVEGQNFLSEKNKVVVGKGEFTKDVGLKEMVFPSSRNLFLTNLDNLHENNTHNQEKKIQEEIEKKETLIQENVVLPQIHTVTGTKNFMKNLFLLSTRQNVEGSYDGAYAPVLQDFRSLNDSTNRTKKHTAHFSKKGEEENLEGLGNQTKQIVEKYACTTRISPNTSQQNFVTQRSKRALKQFRLPLEETELEKRIIVDDTSTQWSKNMKHLTPSTLTQIDYNEKEKGAITQSPLSDCLTRSHSIPQANRSPLPIAKVSSFPSIRPIYLTRVLFQDNSSHLPAASYRKKDSGVQESSHFLQGAKKNNLSLAILTLEMTGDQREVGSLGTSATNSVTYKKVENTVLPKPDLPKTSGKVELLPKVHIYQKDLFPTETSNGSPGHLDLVEGSLLQGTEGAIKWNEANRPGKVPFLRVATESSAKTPSKLLDPLAWDNHYGTQIPKEEWKSQEKSPEKTAFKKKDTILSLNACESNHAIAAINEGQNKPEIEVTWAKQGRTERLCSQNPPVLKRHQREITRTTLQSDQEEIDYDDTISVEMKKEDFDIYDEDENQSPRSFQKKTRHYFIAAVERLWDYGMSSSPHVLRNRAQSGSVPQFKKVVFQEFTDGSFTQPLYRGELNEHLGLLGPYIRAEVEDNIMVTFRNQASRPYSFYSSLISYEEDQRQGAEPRKNFVKPNETKTYFWKVQHHMAPTKDEFDCKAWAYFSDVDLEKDVHSGLIGPLLVCHTNTLNPAHGRQVTVQEFALFFTIFDETKSWYFTENMERNCRAPCNIQMEDPTFKENYRFHAINGYIMDTLPGLVMAQDQRIRWYLLSMGSNENIHSIHFSGHVFTVRKKEEYKMALYNLYPGVFETVEMLPSKAGIWRVECLIGEHLHAGMSTLFLVYSNKCQTPLGMASGHIRDFQITASGQYGQWAPKLARLHYSGSINAWSTKEPFSWIKVDLLAPMIIHGIKTQGARQKFSSLYISQFIIMYSLDGKKWQTYRGNSTGTLMVFFGNVDSSGIKHNIFNPPIIARYIRLHPTHYSIRSTLRMELMGCDLNSCSMPLGMESKAISDAQITASSYFTNMFATWSPSKARLHLQGRSNAWRPQVNNPKEWLQVDFQKTMKVTGVTTQGVKSLLTSMYVKEFLISSSQDGHQWTLFFQNGKVKVFQGNQDSFTPVVNSLDPPLLTRYLRIHPQSWVHQIALRMEVLGCEAQDLY

SEQ ID NO: 4985 - protein, 216 aa, Homo sapiens
MRIQDPGKVFFGNVDSSGIKHNIFNPPIIARYIRLHPTHYSIRSTLRMELMGCDLNSCSMPLGMESKAISDAQITASSYFTNMFATWSPSKARLHLQGRSNAWRPQVNNPKEWLQVDFQKTMKVTGVTTQGVKSLLTSMYVKEFLISSSQDGHQWTLFFQNGKVKVFQGNQDSFTPVVNSLDPPLLTRYLRIHPQSWVHQIALRMEVLGCEAQDLY

SEQ ID NO: 4986 - protein, 461 aa, Homo sapiens
MQRVNMIMAESPGLITICLLGYLLSAECTVFLDHENANKILNRPKRYNSGKLEEFVQGNLERECMEEKCSFEEAREVFENTERTTEFWKQYVDGDQCESNPCLNGGSCKDDINSYECWCPFGFEGKNCELDVTCNIKNGRCEQFCKNSADNKVVCSCTEGYRLAENQKSCEPAVPFPCGRVSVSQTSKLTRAETVFPDVDYVNSTEAETILDNITQSTQSFNDFTRVVGGEDAKPGQFPWQVVLNGKVDAFCGGSIVNEKWIVTAAHCVETGVKITVVAGEHNIEETEHTEQKRNVIRIIPHHNYNAAINKYNHDIALLELDEPLVLNSYVTPICIADKEYTNIFLKFGSGYVSGWGRVFHKGRSALVLQYLRVPLVDRATCLRSTKFTIYNNMFCAGFHEGGRDSCQGDSGGPHVTEVEGTSFLTGIISWGEECAMKGKYGIYTKVSRYVNWIKEKTKLT

SEQ ID NO: 4987 - protein, 423 aa, Homo sapiens
MQRVNMIMAESPGLITICLLGYLLSAECTVFLDHENANKILNRPKRYNSGKLEEFVQGNLERECMEEKCSFEEAREVFENTERTTEFWKQYVDVTCNIKNGRCEQFCKNSADNKVVCSCTEGYRLAENQKSCEPAVPFPCGRVSVSQTSKLTRAETVFPDVDYVNSTEAETILDNITQSTQSFNDFTRVVGGEDAKPGQFPWQVVLNGKVDAFCGGSIVNEKWIVTAAHCVETGVKITVVAGEHNIEETEHTEQKRNVIRIIPHHNYNAAINKYNHDIALLELDEPLVLNSYVTPICIADKEYTNIFLKFGSGYVSGWGRVFHKGRSALVLQYLRVPLVDRATCLRSTKFTIYNNMFCAGFHEGGRDSCQGDSGGPHVTEVEGTSFLTGIISWGEECAMKGKYGIYTKVSRYVNWIKEKTKLT

SEQ ID NO: 4988 - protein, 38 aa, Homo sapiens
LTQVLRAVLSACTWVSRKGDLQRMKQTHKGKRTFSQDG

SEQ ID NO: 4989 - protein, 128 aa, Homo sapiens
MAFTGKFEMESEKNYDEFMKLLGISSDVIEKARNFKIVTEVQQDGQDFTWSQHYSGGHTMTNKFTVGKESNIQTMGGKTFKATVQMEGGKLVVNFPNYHQTSEIVGDKLVEVSTIGGVTYERVSKRLA

SEQ ID NO: 4990 - protein, 177 aa, Homo sapiens
MKTVTMMMVVEMQALTQVLRAVLSACTWVSRKGDLQRMKQTHKGKPPSSMAFTGKFEMESEKNYDEFMKLLGISSDVIEKARNFKIVTEVQQDGQDFTWSQHYSGGHTMTNKFTVGKESNIQTMGGKTFKATVQMEGGKLVVNFPNYHQTSEIVGDKLVEVSTIGGVTYERVSKRLA

SEQ ID NO: 4991 - protein, 67 aa, Homo sapiens
MAEPDYIEDDNPELIRPQKLINPVKTSRNHQDLHRELLMNQKRGLAPQNKPELQKVMEKRKRDQVIK

SEQ ID NO: 4992 - protein, 84 aa, Homo sapiens
MAEPDYIEDDNPELIRPQKLINPVKTSRNHQDLHRELLMNQKRGLAPQNKPELQKVMEKRKRDQVIKQKEEEAQKKKSDLEIEL

SEQ ID NO: 4993 - protein, 90 aa, Homo sapiens
MAEPDYIEDDNPELIRPQKLINPVKTSRNHQDLHRELLMNQKRGLAPQNKPELQKVMEKRKRDQVIKQKEEEAQKKKSDLEIELLKRQQK

SEQ ID NO: 4994 - protein, 93 aa, Homo sapiens
MAEPDYIEDDNPELIRPQKLINPVKTSRNHQDLHRELLMNQKRGLAPQNKPELQKVMEKRKRDQVIKQKEEEAQKKKSDLEIELLKRQQKLEQ

SEQ ID NO: 4995 - protein, 101 aa, Homo sapiens
MAEPDYIEDDNPELIRPQKLINPVKTSRNHQDLHRELLMNQKRGLAPQNKPELQKVMEKRKRDQVIKQKEEEAQKKKSDLEIELLKRQQKLEQLELEKQKL

SEQ ID NO: 4996 - protein, 125 aa, Homo sapiens
MAEPDYIEDDNPELIRPQKLINPVKTSRNHQDLHRELLMNQKRGLAPQNKPELQKVMEKRKRDQVIKQKEEEAQKKKSDLEIELLKRQQKLEQLELEKQKLQEEQENAPEFVKVKGNLRRTGQEV

SEQ ID NO: 4997 - protein, 126 aa, Homo sapiens
MAEPDYIEDDNPELIRPQKLINPVKTSRNHQDLHRELLMNQKRGLAPQNKPELQKVMEKRKRDQVIKQKEEEAQKKKSDLEIELLKRQQKLEQLELEKQKLQEEQENAPEFVKVKGNLRRTGQEVA

SEQ ID NO: 4998 - protein, 128 aa, Homo sapiens
MAEPDYIEDDNPELIRPQKLINPVKTSRNHQDLHRELLMNQKRGLAPQNKPELQKVMEKRKRDQVIKQKEEEAQKKKSDLEIELLKRQQKLEQLELEKQKLQEEQENAPEFVKVKGNLRRTGQEVAQA

SEQ ID NO: 4999 - protein, 131 aa, Homo sapiens
MAEPDYIEDDNPELIRPQKLINPVKTSRNHQDLHRELLMNQKRGLAPQNKPELQKVMEKRKRDQVIKQKEEEAQKKKSDLEIELLKRQQKLEQLELEKQKLQEEQENAPEFVKVKGNLRRTGQEVAQAQES

SEQ ID NO: 5000 - protein, 131 aa, Homo sapiens; identical to SEQ ID NO: 4999

SEQ ID NO: 5001 - protein, 131 aa, Homo sapiens; identical to SEQ ID NO: 4999

SEQ ID NO: 5002 - protein, 131 aa, Homo sapiens; identical to SEQ ID NO: 4999

SEQ ID NO: 5003 - protein, 131 aa, Homo sapiens; identical to SEQ ID NO: 4999

SEQ ID NO: 5004 - protein, 131 aa, Homo sapiens; identical to SEQ ID NO: 4999

SEQ ID NO: 5005 - protein, 131 aa, Homo sapiens; identical to SEQ ID NO: 4999

SEQ ID NO: 5006 - protein, 131 aa, Homo sapiens; identical to SEQ ID NO: 4999

SEQ ID NO: 5007 - protein, 131 aa, Homo sapiens; identical to SEQ ID NO: 4999

SEQ ID NO: 5008 - protein, 131 aa, Homo sapiens; identical to SEQ ID NO: 4999

SEQ ID NO: 5009 - protein, 131 aa, Homo sapiens; identical to SEQ ID NO: 4999

SEQ ID NO: 5010 - protein, 51 aa, Homo sapiens
MAEPDYIEDDNPELIRPQKLINPVKTSRNHQDLHRELLMNQKRILVWLEIH

SEQ ID NO: 5011 - protein, 306 aa, Homo sapiens
MSTWKARLTKRLKSPSRSMHPFPCSALLACFGNTRESASFNQSGVADTHSTVRVQPVAKAGRQPRHPSAEGAPEKRQDSSTHAERNGSANRNSSHRTAAQPAETPEDVPGSLDDGADCEAVVFHASIPRPSIIDTPKEEEFREEPKCLELEQKMTSDSPPEDIDHKDSYLITRSIMAEPDYIEDDNPELIRPQKLINPVKTSRNHQDLHRELLMNQKRGLAPQNKPELQKVMEKRKRDQVIKQKEEEAQKKKSDLEIELLKRQQKLEQLELEKQKLQEEQENAPEFVKVKGNLRRTGQEVAQAQES

SEQ ID NO: 5012 - protein, 160 aa, Homo sapiens
MSTWKARLTKRLKSPSRSMHPFPCSALLACFGNTRESASFNQSGVADTHSTVRVQPVAKAGRQPRHPSAEGAPEKRQDSSTHAERNGSANRNSSHRTAAQPAETPEDVPGSLDDGADCEAVVFHASIPRPSIIDTPKEEEFREEPKCLELEQKMTSGECS

SEQ ID NO: 5013 - protein, 251 aa, Homo sapiens
MAQGRVAHLIEWKGWSKPSDSPAALESAFSSYSDLSEGEQEARFAAGVAEQFAIAEAKLRAWSSVDGEDSTDDSYDEDFAGGMDTDMAGQLPLGPHLQDLFTGHRFSRPVRQGSVEPESDCSQTVSPDTLCSSLCSLEDGLLGSPARLASQLLGDELLLAKLPPSRESAFRSLGPLEAQDSLYNSPLTEGWLLPSRSLWVEPSLKGPCPAGLVLCFIHLSIVSKSSSFFLKTEGFWSVFSVGSSLLWEALE

SEQ ID NO: 5014 - protein, 335 aa, Homo sapiens
MFLATLSFLLPFAHPFGTVSCEYMLGSPLSSLAQVNLSPFSHPKVHMDPNYCHPSTSLHLCSLAWSFTRLLHPPLSPGISQVVKDHVTKPTAMAQGRVAHLIEWKGWSKPSDSPAALESAFSSYSDLSEGEQEARFAAGVAEQFAIAEAKLRAWSSVDGEDSTDDSYDEDFAGGMDTDMAGQLPLGPHLQDLFTGHRFSRPVRQGSVEPESDCSQTVSPDTLCSSLCSLEDGLLGSPARLASQLLGDELLLAKLPPSRESAFRSLGPLEAQDSLYNSPLTESCLSPAEEEPAPCKDCQPLCPPLTGSWERQRQASDLASSGVVSLDEDEAEPEEQ

SEQ ID NO: 5015 - protein, 123 aa, Homo sapiens
MLPKSRRALTIQEIAALARSSLHGISQVVKDHVTKPTAMAQGRVAHLIEWKGWSKPSDSPAALESAFSSYSDLSEGEQEARFAAGVAEQFAIAEAKLRAWSSVDGEDSTDDSYDEDFAGGMDT

SEQ ID NO: 5016 - protein, 232 aa, Homo sapiens
MLPKSRRALTIQEIAALARSSLHGISQVVKDHVTKPTAMAQGRVAHLIEWKGWSKPSDSPAALESAFSSYSDLSEGEQEARFAAGVAEQFAIAEAKLRAWSSVDGEDSTDDSYDEDFAGGMDTDMAGQLPLGPHLQDLFTGHRFSRPVRQGSVEPESDCSQTVSPDTLCSSLCSLEDGLLGSPARLASQLLGDELLLAKLPPSRESAFRSLGPLEAQDSLYNSPLTESCLSP

SEQ ID NO: 5017 - protein, 281 aa, Homo sapiens
MLPKSRRALTIQEIAALARSSLHGISQVVKDHVTKPTAMAQGRVAHLIEWKGWSKPSDSPAALESAFSSYSDLSEGEQEARFAAGVAEQFAIAEAKLRAWSSVDGEDSTDDSYDEDFAGGMDTDMAGQLPLGPHLQDLFTGHRFSRPVRQGSVEPESDCSQTVSPDTLCSSLCSLEDGLLGSPARLASQLLGDELLLAKLPPSRESAFRSLGPLEAQDSLYNSPLTESCLSPAEEEPAPCKDCQPLCPPLTGSWERQRQASDLASSGVVSLDEDEAEPEEQ

SEQ ID NO: 5018 - protein, 281 aa, Homo sapiens; identical to SEQ ID NO: 5017

SEQ ID NO: 5019 - protein, 281 aa, Homo sapiens; identical to SEQ ID NO: 5017

SEQ ID NO: 5020 - protein, 366 aa, Homo sapiens
MPMISVLGKMFLWQREGPGGRWTCQTSRRVSSDPAWAVEWIELPRGLSLSSLGSARTLRGWSRSSRPSSVDSQDLPEVNVGDTVAMLPKSRRALTIQEIAALARSSLHGISQVVKDHVTKPTAMAQGRVAHLIEWKGWSKPSDSPAALESAFSSYSDLSEGEQEARFAAGVAEQFAIAEAKLRAWSSVDGEDSTDDSYDEDFAGGMDTDMAGQLPLGPHLQDLFTGHRFSRPVRQGSVEPESDCSQTVSPDTLCSSLCSLEDGLLGSPARLASQLLGDELLLAKLPPSRESAFRSLGPLEAQDSLYNSPLTESCLSPAEEEPAPCKDCQPLCPPLTGSWERQRQASDLASSGVVSLDEDEAEPEEQ

SEQ ID NO: 5021 - protein, 359 aa, Homo sapiens
MPMISVLGKMFLWQREGPGGRWTCQTSRRVSSDPAWAVEWIELPRGLSLSSLGSARTLRGWSRSSRPSSVDSQDLPEVNVGDTVAMLPKSRRALTIQEIAALARSSLHGISQVVKDHVTKPTAMAQGRVAHLIEWKGWSKPSDSPAALESAFSSYSDLSEGEQEARFAAGVAEQFAIAEAKLRAWSSVDGEDSTDDSYDEDFAGGMDTDMAGQLPLGPHLQDLFTGHRFSRPVRQGSVEPESDCSQTVSPDTLCSSLCSLEDGLLGSPARLASQLLGDELLLAKLPPSRESAFRSLGPLEAQDSLYNSPLTESCLSPAEEEPAPCKDCQPLCPPLTGSWERQRQASDLGLAPALPEPMG

SEQ ID NO: 5022 - protein, 890 aa, Homo sapiens
MSRSATLLLCLLGCHVWKAVTKTLREPGAGAQEVTLKVHISDASTHQPVADALIEIFTNQASIASGTSGTDGVAFIKFQYKLGSQLIVTASKHAYVPNSAPWKPIRLPVFSSLSLGLLPERSATLMVYEDVVQIVSGFQGARPQPRVHFQRRALRLPENTSYSDLTAFLTAASSPSEVDSFPYLRGLDGNGTGNSTRHDLTPVTAVSVHLLSSNGTPVLVDGPIYVTVPLATQSSLRHNAYVAAWRFDQKLGTWLKSGLGLVHQEGSQLTWTYIAPQLGYWVAAMSPPIPGPVVTQDITTYHTVFLLAILGGMAFILLVLLCLLLYYCRRKCLKPRQHHRKLQLPAGLESSKRDQSTSMSHINLLFSRRASEFPGPLSVTSHGRPEAPGTKELMSGVHLEMMSPGGEGDLHTPMLKLSYSTSQEFSSREELLSCKEEDKSQISFDNLTPSGTLGKDYHKSVEVFPLKARKSMEREGYESSGNDDYRGSYNTVLSQPLFEKQDREGPASTGSKLTIQEHLYPAPSSPEKEQLLDRRPTECMMSRSVDHLERPTSFPRPGQLICCSSVDQVNDSVYRKVLPALVIPAHYMKLPGDHSYVSQPLVVPADQQLEIERLQAELSNPHAGIFPHPSSQIQPQPLSSQAISQQHLQDAGTREWSPQNASMSESLSIPASLNDAALAQMNSEVQLLTEKALMELGGGKPLPHPRAWFVSLDGRSNAHVRHSYIDLQRAGRNGSNDASLDSGVDMNEPKSARKGRGDALSLQQNYPPVQEHQQKEPRAPDSTAYTQLVYLDDVEQSGSECGTTVCTPEDSALRCLLEGSSRRSGGQLPSLQEETTRRTADAPSEPAASPHQRRSAHEEEEDDDDDDQGEDKKSPWQKREERPLMAFNIK

SEQ ID NO: 5023 - protein, 198 aa, Homo sapiens
MSRSATLLLCLLGCHVWKAVTKTLREPGAGAQEVTLKVHISDASTHQPVADALIEIFTNQASIASGTSGTDGVAFIKFQYKLGSQLIVTASKHAYVPNSAPWKPIRLPVFSSLSLGLLPERSATLMVYEDVVQIVSGFQGNSTRHDLTPVTAVSVHLLSSNGTPVLVDGPIYVTVPLATQSSLRHNAYVAAWRFDQKL

SEQ ID NO: 5024 - protein, 826 aa, Homo sapiens
MARLCRRVPCTLLLGLAVVLLKARLVPAAARAELSRSDLSLIQQQQQQQQQQQQQQKQLEEAEEERTEVPGATSTLTVPVSVFMLKVQVNDIISRQYLSQAVVEVFVNYTKTNSTVTKSNGAVLIKVPYKLGLSLTIIAYKDGYVLTPLPWKTRRMPIYSSVTLSLFPQSQANIWLFEDTVLITGKLADAKSQPSVQFSKALIKLPDNHHISNVTGYLTVLQQFLKVDNFLHTTGITLNKPGFENIELTPLAAICVKIYSGGKELKVNGSIQVSLPLLRLNDISAGDRIPAWTFDMNTGAWVNHGRGMVKEHNNHLIWTYDAPHLGYWIAAPLPGTRGSGINEDSKDITAYHTVFLTAILGGTIVIVIGFFAVLLCYCRDKCGTPQKRERNITKLEVLKRDQTTSTTHINHISTVKVALKAEDKSQLFNAKNSSYSPQKKEPSKAETEERVSMVKTRDDFKIYNEDVSFLSVNQNNYSRNPTQSLEPNVGSKQPKHINNNLSSSLGDAQDEKRYLTGNEEAYGRSHIPEQLMHIYSQPIAILQTSDLFSTPEQLHTAKSATLPRKGQLVYGQLMEPVNRENFTQTLPKMPIHSHAQPPDAREEDIILEGQQSLPSQASDWSRYSSSLLESVSVPGTLNEAVVMTPFSSELQGISEQTLLELSKGKPSPHPRAWFVSLDGKPVAQVRHSFIDLKKGKRTQSNDTSLDSGVDMNELHSSRKLEREKTFIKSMHQPKILYLEDLDLSSSESGTTVCSPEDPALRHILDGGSGVIMEHPGEESPGRKSTVEDFEANTSPTKRRGRPPLAKRDSKTNIWKKREERPLIPIN

SEQ ID NO: 5025 - protein, 238 aa, Homo sapiens
MARLCRRVPCTLLLGLAVVLLKARLVPAAARAELSRSDLSLIQQQQQQQQQQQQQQKQLEEAEEERTEVPGATSTLTVPVSVFMLKVQVNDIISRQYLSQAVVEVFVNYTKTNSTVTKSNGAVLIKVPYKLGLSLTIIAYKDGYVLTPLPWKTRRMPIYSSVTLSLFPQSQANIWLFEDTVLITGKLADAKSQPSVQFSKALIKLPDNHHISNVTGYLTVLQQFLKVDNFLHTTGITQ

SEQ ID NO: 5026 - protein, 306 aa, Homo sapiens
MKKDEPPLDFPDTLEGFEYAFNEKGQLRHIKTGEPFVFNYREDLHRWNQKRYEALGEIITKYVYELLEKDCNLKKVSIPEGYGVIVLNPNENYIEVEKPKIHVQSSSDSSDEPAEKRERKDKVSKETKKRRDFYEKYRNPQREKEMMQLYIRENGSPEEHAIYVWDHFIAQAAAENVFFVAHSYGGLAFVELMIQREADVKNKVTAVALTDSVHNVWHQEAGKTIREWMRENCCNWVSSSEPLDTSVESMLPDCPRVSAGTDRHELTSWKSFPSIFKFFTEASEAKTSSLKPAVTRRSHRIKHEEL

SEQ ID NO: 5027 - protein, 370 aa, Homo sapiens
MKKDEPPLDFPDTLEGFEYAFNEKGQLRHIKTGEPFVFNYREDLHRWNQKRYEALGEIITKYVYELLEKDCNLKKVSIPVDATESEPKSFIFMSEDALTNPQKLMVLIHGSGVVRAGQWARRLIINEDLDSGTQIPFIKRAVAEGYGVIVLNPNENYIEVEKPKIHVQSSSDSSDEPAEKRERKDKVSKETKKRRDFYEKYRNPQREKEMMQLYIRENGSPEEHAIYVWDHFIAQAAAENVFFVAHSYGGLAFVELMIQREADVKNKVTAVALTDSVHNVWHQEAGKTIREWMRENCCNWVSSSEPLDTSVESMLPDCPRVSAGTDRHELTSWKSFPSIFKFFTEASEAKTSSLKPAVTRRSHRIKHEEL

SEQ ID NO: 5028 - protein, 269 aa, Homo sapiens
MNRLLIFLIPWKDLNMLLMKIITKYVYELLEKDCNLKKVSIPEGYGVIVLNPNENYIEVEKPKIHVQSSSDSSDEPAEKRERKDKVSKETKKRRDFYEKYRNPQREKEMMQLYIRENGSPEEHAIYVWDHFIAQAAAENVFFVAHSYGGLAFVELMIQREADVKNKVTAVALTDSVHNVWHQEAGKTIREWMRENCCNWVSSSEPLDTSVESMLPDCPRVSAGTDRHELTSWKSFPSIFKFFTEASEAKTSSLKPAVTRRSHRIKHEEL

SEQ ID NO: 5029 - protein, 305 aa, Homo sapiens
MNRLLIFLIPWKDLNMLLMKIITKYVYELLEKDCNLKKVSIPVDATESEPKSFIFMSEDALTNPQKLMVLIHGSGVVRAGQWARRLIINEDLDSGTQIPFIKRAVAEGYGVIVLNPNENYIEVEKPKIHVQSSSDSSDEPAEKRERKDKVSKETKKRRDFYEKYRNPQREKEMMQLYIRENGSPEEHAIYVWDHFIAQAAAENVFFVAHSYGGLAFVELMIQREADVKNKVTAVALTDSVHNVWHQEAGKTIREWMRENCCNWVSSSEPLDTSVESMLPDCPRVSAGFSCCQMQSHEDLLLCFLL

SEQ ID NO: 5030 - protein, 416 aa, Homo sapiens
MSISLSSLILLPIWINMAQIQQGGPDEKEKTTALKDLLSRIDLDELMKKDEPPLDFPDTLEGFEYAFNEKGQLRHIKTGEPFVFNYREDLHRWNQKRYEALGEIITKYVYELLEKDCNLKKVSIPVDATESEPKSFIFMSEDALTNPQKLMVLIHGSGVVRAGQWARRLIINEDLDSGTQIPFIKRAVAEGYGVIVLNPNENYIEVEKPKIHVQSSSDSSDEPAEKRERKDKVSKETKKRRDFYEKYRNPQREKEMMQLYIRENGSPEEHAIYVWDHFIAQAAAENVFFVAHSYGGLAFVELMIQREADVKNKVTAVALTDSVHNVWHQEAGKTIREWMRENCCNWVSSSEPLDTSVESMLPDCPRVSAGTDRHELTSWKSFPSIFKFFTEASEAKTSSLKPAVTRRSHRIKHEEL

SEQ ID NO: 5031 - protein, 36 aa, Homo sapiens
AAAAAFGESAGQVGGAAEADVRGAEPPPCLLRGPLF

SEQ ID NO: 5032 - protein, 76 aa, Homo sapiens
MDQEPVGGVERGEAVAASGAAAAAAFGESAGQMSNERGFENVELGVIGKKKKVPRRVIHFVSGETMEEYSTDEDEV

SEQ ID NO: 5033 - protein, 213 aa, Homo sapiens
MDQEPVGGVERGEAVAASGAAAAAAFGESAGQMSNERGFENVELGVIGKKKKVPRRVIHFVSGETMEEYSTDEDEVDGLEKKDVLPTVDPTKLTWGPYLWFYMLRAATSTLSVCDFLGEKIASVLGISTPKYQYAIDEYYRMKKEEEEEEEENRMSEEAEKQYQQNKLQTDSIVQTDQPETVISSSFVNVNFEMEGDSEVIMESKQNPVSVPP

SEQ ID NO: 5034 - protein, 213 aa, Homo sapiens; identical to SEQ ID NO: 5033

SEQ ID NO: 5035 - protein, 236 aa, Homo sapiens
MEVGLPAITLFLTSASSPVVATTMDQEPVGGVERGEAVAASGAAAAAAFGESAGQMSNERGFENVELGVIGKKKKVPRRVIHFVSGETMEEYSTDEDEVDGLEKKDVLPTVDPTKLTWGPYLWFYMLRAATSTLSVCDFLGEKIASVLGISTPKYQYAIDEYYRMKKEEEEEEEENRMSEEAEKQYQQNKLQTDSIVQTDQPETVISSSFVNVNFEMEGDSEVIMESKQNPVSVPP

SEQ ID NO: 5036 - protein, 89 aa, Homo sapiens
MEVGLPAITLFLTSASSPVVATTMDQEPVGGVERGEAVAASGAAAAAAFGESAGQNLTLLPRLKFMARSRLAATSTSRVQAILLPQPPV

SEQ ID NO: 5037 - protein, 140 aa, Homo sapiens
MSNERGFENVELGVIGKKKKVPRRVIHFVSGETMEEYSTDEDEVDGLEKKDVLPTVDPTKLTWGPYLWFYMLRAATSTLSVCDFLGEKIASVLGISTPKYQYAIDEYYRMKKEEEEEEEENRMSEEAEKQYQQNKLQTDS

SEQ ID NO: 5038 - protein, 39 aa, Homo sapiens
  VARIANT 1: note = misc_feature - Xaa can be any naturally occurring amino acid
XAFGESAGQEIKGSKKLSHGPKGNVDVRTAIAKFYLKDE

SEQ ID NO: 5039 - protein, 7 aa, Homo sapiens
  VARIANT 1: note = misc_feature - Xaa can be any naturally occurring amino acid
XLRGPLF

SEQ ID NO: 5040 - protein, 49 aa, Homo sapiens
  VARIANT 1: note = misc_feature - Xaa can be any naturally occurring amino acid
XNKLQTDSIVQTDQPETVISSSFVNVNFEMEGDSEVIMESKQNPVSVPP

SEQ ID NO: 5041 - protein, 173 aa, Homo sapiens
MHWKMLLLLLLYYNAEASMCHRWSRAVLFPAAHRPKRSSSLPLNPVLQTSLEEVELLYEFLLAELEISPDLQISIKDEELASLRKASDFRTVCNNVIPKSIPDIRRLSASLSSHPGILKKEDFERTVLTLAYTAYRTALSHGHQKDIWAQSLVSLFQALRHDLMRSSQPGVPP

SEQ ID NO: 5042 - protein, 173 aa, Homo sapiens; identical to SEQ ID NO: 5041

SEQ ID NO: 5043 - protein, 173 aa, Homo sapiens; identical to SEQ ID NO: 5041

SEQ ID NO: 5044 - protein, 78 aa, Homo sapiens
MLLSAVCVMLNLAGSILSCQNAQLVNSLEGCQLIKFDSVEVCVCCELQHQSSGCSNLGETLKLNPLQENCNAVRLTLK

SEQ ID NO: 5045 - protein, 539 aa, Homo sapiens
MPPAGGPRAPRPAALPRSLSRLRECPGRSRIVLALGATQMALGCLIVAVSFAALALTTSARVRHSCPFWAGFSVLLSGLIGVVSWKRPLSLVITFFMLLSAVCVMLNLAGSILSCQNAQLVNSLEGCQLIKFDSVEVCVCCELQHQSSGCSNLGETLKLNPLQENCNAVRLTLKDLLFSVCALNVLSTIVCALATAMCCMQMVSSDVLQMFLPQRSHPANPTCVTPHGTVLHQTLDFDEFIPPLPPPPYYPPEYTCTPSTEAQRGLHLDFAPSPFGTLYDVAINSPGLLYPAELPPPYEAVVGQPPASQVTSIGQQVAESSSGDPNTSAGFSTPVPADSTSLLVSEGTATPGSSPSPDGPVGAPAPSEPALPPGHVSPEDPGMGSQVQPGPGRVSRSTSDPTLCTSSMAGDASSHRPSCSQDLEAGLSEAVPGSASMSRSATAACRAQLSPAGDPDTWKTDQRPTPEPFPATSKERPRSLVDSKAYADARVLVAKFLEHSHCALPTEAQHMVGAMRLAVTNEERLEEEAVFGADVLDQV

SEQ ID NO: 5046 - protein, 575 aa, Homo sapiens
MASWLRRKLRGKRRPVIAFCLLMILSAMAVTRFPPQRPSAGPDPGPMEPQGVTGAPATHIRQALSSSRRQRARNMGFWRSRALPRNSILVCAEEQGHRARVDRSRESPGGDLRHPGRVRRDITLSGHPRLSTQHVVLLREDEVGDPGTKDLGHPQHGSPIQETQSEVVTLVSPLPGSDMAALPAWRATSGLTLWPHTAEGRDLLGAENRALTGGQQAEDPTLASGAHQWPGSVEKLQGSVWCDAETLLSSSRTGGQAPPWLTDHDVQMLRLLAQGEVVDKARVPAHGQVLQVGFSTEAALQDLSSPRLSQLCSQGLCGLIKRPGDLPEVLSFHVDRVLGLRRSLPAVARRFHSPLLPYRYTDGGARPVIWWAPDVQHLSDPDEDQNSLALGWLQYQALLAHSCNWPGQAPCPGIHHTEWARLALFDFLLQVHDRLDRYCCGFEPEPSDPCVEERLREKCQNPAELRLVHILVRSSDPSHLVYIDNAGNLQHPEDKLNFRLLEGIDGFPESAVKVLASGCLQNMLLKSLQMDPVFWESQGGAQGLKQVLQTLEQRGQVLLGHIQKHNLTLFRDEDP

SEQ ID NO: 5047 - protein, 575 aa, Homo sapiens; identical to SEQ ID NO: 5046

SEQ ID NO: 5048 - protein, 140 aa, Homo sapiens
MVHDRLDRYCCGFEPEPSDPCVEERLREKCQNPAELRLVHILVRSSDPSHLVYIDNAGNLQHPEDKLNFRLLEGIDGFPESAVKVLASGCLQNMLLKSLQMDPVFWESQGGAQGLKQVLQTLEQRGQVLLGHIQKHNLTL

SEQ ID NO: 5049 - protein, 133 aa, Homo sapiens [sequence omitted]

SEQ ID NO: 5050 - protein, 133 aa, Homo sapiens [sequence omitted]

SEQ ID NO: 5051 - protein, 52 aa, Homo sapiens [sequence omitted]

SEQ ID NO: 5052 - protein, 87 aa, Homo sapiens
MMSKRYLQKATKGKLLIIIFIVTLWGKVVSSANHHKAHHVKTGTCEVVALHRCCNKNKIEERSQTVKCSCFPGQVAGTTRAAPSCVD

SEQ ID NO: 5053 - protein, 110 aa, Homo sapiens
MMSKRYLQKATKGKLLIIIFIVTLWGKVVSSANHHKAHHVKTGTCEVVALHRCCNKNKIEERSQTVKCSCFPGQVAGTTRAAPSCVDASIVEQKWWCHMQPCLEGEECKV

SEQ ID NO: 5054 - protein, 34 aa, Homo sapiens
MQPCLEGEECKVLPDRKGWSCSSGNKVKTTRVTH

SEQ ID NO: 5055 - protein, 131 aa, Homo sapiens
MSKRYLQKATKGKLLIIIFIVTLWGKVVSSANHHKAHHVKTGTCEVVALHRCCNKNKIEERSQTVKCSCFPGQVAGTTRAAPSCVDASIVEQKWWCHMQPCLEGEECKVLPDRKGWSCSSGNKVKTTRANV

SEQ ID NO: 5056 - protein, 131 aa, Homo sapiens
MSKRYLQKATKGKLLIIIFIVTLWGKVVSSANHHKAHHVKTGTCEVVALHRCCNKNKIEERSQTVKCSCFPGQVAGTTRAAPSCVDASIVEQKWWCHMQPCLEGEECKVLPDRKGWSCSSGNKVKTTRVTH

SEQ ID NO: 5057 - protein, 131 aa, Homo sapiens; identical to SEQ ID NO: 5056

SEQ ID NO: 5058 - protein, 49 aa, Homo sapiens
MSKRYLQKATKGKLLIIIFIVTLWGKVVSSANHHKGNPLTQEKSSDPQG

SEQ ID NO: 5059 - protein, 101 aa, Homo sapiens
MVTPITRMSKRYLQKATKGKLLIIIFIVTLWGKVVSSANHHKAHHVKTGTCEVVALHRCCNKNKIEERSQTVKCSCFPGQVAGTTRAAPSCVDASIVEQKW

SEQ ID NO: 5060 - protein, 133 aa, Homo sapiens
MSERVERNWSTGGWLLALCLAWLWTHLTLAALQPPTATVLVQQGTCEVIAAHRCCNRNRIEERSQTVKCSCFSGQVAGTTRAKPSCVDASIVLQRWWCQMEPCLPGEECKVLPDLSGWSCSSGHKVKTTKVTR

SEQ ID NO: 5061 - protein, 169 aa, Homo sapiens
MSERVERNWSTGGWLLALCLAWLWTHLTLAALQPPTATVLVQQGTCEVIAAHRCCNRNRIEERSQTVKCSCFSGQVAGTTRAKPSCVDDLLLAAHCARRDPRAALRLLLPQPPSSCRDGGVRWSPACRGRSVRCSRTCRDGAAAVDTKSKPPRSHDSSWGSRPGQERLD

SEQ ID NO: 5062 - protein, 58 aa, Homo sapiens
MRSPRMRVCAKSVLLSHWLFLAYVLMVCCKLMSASSQHLRGHAGHHQIKQGTCEVVAV

SEQ ID NO: 5063 - protein, 77 aa, Homo sapiens
MRSPRMRVCAKSVLLSHWLFLAYVLMVCCKLMSASSQHLRGHAGHHQIKQGTCEVVAVHRCCNKNRIEERSQTVKCS

SEQ ID NO: 5064 - protein, 140 aa, Homo sapiens
MRSPRMRVCAKSVLLSHWLFLAYVLMVCCKLMSASSQHLRGHAGHHQIKQGTCEVVAVHRCCNKNRIEERSQTVKCSCFPGQVAGTTRAQPSCVEASIVIQKWWCHMNPCLEGEDCKVLPDYSGWSCSSGNKVKTTKVTR

SEQ ID NO: 5065 - protein, 181 aa, Homo sapiens
MAPSPRTGSRQDATALPSMSSTFWAFMILASLLIAYCSQLAAGTCEIVTLDRDSSQPRRTIARQTARCACRKGQIAGTTRARPACVDARIIKTKQWCDMLPCLEGEGCDLLINRSGWTCTQPGGRIKTTTSPSKPPKRAPPGIPSCRQRAGGSLGSRDLRTSLLCQGSHLADRRRWLRPSQ

SEQ ID NO: 5066 - protein, 132 aa, Homo sapiens
MAPSPRTGSRQDATALPSMSSTFWAFMILASLLIAYCSQLAAGTCEIVTLDRDSSQPRRTIARQTARCACRKGQIAGTTRARPACVDARIIKTKQWCDMLPCLEGEGCDLLINRSGWTCTQPGGRIKTTTVS

SEQ ID NO: 5067 - protein, 125 aa, Homo sapiens
MQLLKALWALAGAALCCFLVLVIHAQFLKEGQLAAGTCEIVTLDRDSSQPRRTIARQTARCACRKGQIAGTTRARPACVDARIIKTKQWCDMLPCLEGEGCDLLINRSGWTCTQPGGRIKTTTVS

SEQ ID NO: 5068 - protein, 53 aa, Homo sapiens
MYHHREWPARIIKTKQWCDMLPCLEGEGCDLLINRSGWTCTQPGGRIKTTTVS

SEQ ID NO: 5069 - protein, 145 aa, Homo sapiens
MFTSPSEGKPGNMDRHHYEMFTKFGDDGFLIHLDNARGFGRHSHDEISILSPLSQCCMIKKKTLLHLQLLAQADYRLSDVMRESLLEDQLSPVLTEPHLLALDRRLQTILRTVEGCIVAHGQQSVIVDGPVEQLAPDSGQANLTS

SEQ ID NO: 5070 - protein, 541 aa, Homo sapiens
MPGLRRDRLLTLLLLGALLSADLYFHLWPQVQRQLRPRERPRGCPCTGRASSLARDSAAAASDPGTIVHNFSRTEPRTEPAGGSHSGSSSKLQALFAHPLYNVPEEPPLLGAEDSLLASQEALRYYRRKVARWNRRHKMYREQMNLTSLDPPLQLRLEASWVQFHLGINRHGLYSRSSPVVSKLLQDMRHFPTISADYSQDEKALLGACDCTQIVKPSGVHLKLVLRFSDFGKAMFKPMRQQRDEETPVDFFYFIDFQRHNAEIAAFHLDRILDFRRVPPTVGRIVNVTKEILEVTKNEILQSVFFVSPASNVCFFAKCPYMCKTEYAVCGNPHLLEGSLSAFLPSLNLAPRLSVPNPWIRSYTLAGKEEWEVNPLYCDTVKQIYPYNNSQRLLNVIDMAIFDFLIGNMDRHHYEMFTKFGDDGFLIHLDNARGFGRHSHDEISILSPLSQCCMIKKKTLLHLQLLAQADYRLSDVMRESLLEDQLSPVLTEPHLLALDRRLQTILRTVEGCIVAHGQQSVIVDGPVEQLAPDSGQANLTS

SEQ ID NO: 5071 - protein, 21 aa, Homo sapiens
QRHNAEIAAFHLDREYGPAPL

SEQ ID NO: 5072 - protein, 127 aa, Homo sapiens
  VARIANT 1: note = misc_feature - Xaa can be any naturally occurring amino acid
XFHLWPQVQRQLRPRERPRGCPCTGRASSLARDSAAAASDPGTIVHNFSRTEPRTEPAGGSHSGSSSKLQALFAHPLYNVPEEPPLLGAEDSLLASQEALRYYRRKVARWNRPQFLLLKGRGGVCDP

SEQ ID NO: 5073 - protein, 584 aa, Homo sapiens
MKMMLVRRFRVLILMVFLVACALHIALDLLPRLERRGARPSGEPGCSCAQPAAEVAAPGWAQVRGRPGEPPAASSAAGDAGWPNKHTLRILQDFSSDPSSNLSSHSLEKLPPAAEPAERALRGRDPGALRPHDPAHRPLLRDPGPRRSESPPGPGGDASLLARLFEHPLYRVAVPPLTEEDVLFNVNSDTRLSPKAAENPDWPHAGAEGAEFLSPGEAAVDSYPNWLKFHIGINRYELYSRHNPAIEALLHDLSSQRITSVAMKSGGTQLKLIMTFQNYGQALFKPMKQTREQETPPDFFYFSDYERHNAEIAAFHLDRILDFRRVPPVAGRMVNMTKEIRDVTRDKKLWRTFFISPANNICFYGECSYYCSTEHALCGKPDQIEGSLAAFLPDLSLAKRKTWRNPWRRSYHKRKKAEWEVDPDYCEEVKQTPPYDSSHRILDVMDMTIFDFLMGNMDRHHYETFEKFGNETFIIHLDNGRGFGKYSHDELSILVPLQQCCRIRKSTYLRLQLLAKEEYKLSLLMAESLRGDQVAPVLYQPHLEALDRRLRVVLKAVRDCVERNGLHSVVDDDLDTEHRAASAR

SEQ ID NO: 5074 - protein, 218 aa, Homo sapiens
MGMWSIGAGALGAAALALLLANTDVFLSKPQKAALEYLEDIDLKTLEKEPRTFKAKELWEKNGAVIMAVRRPGCFLCREEAADLSSLKSMLDQLGVPLYAVVKEHIRTEVKDFQPYFKGEIFLDEKKKFYGPQRRKMMFMGFIRLGVWYNFFRAWNGGFSGNLEGEGFILGGVFVVGSGKQGILLEHREKEFGDKVNLLSVLEAAKMIKPQTLASEKK

SEQ ID NO: 5075 - protein, 229 aa, Homo sapiens
MSFLQDPSFFTMGMWSIGAGALGAAALALLLANTDVFLSKPQKAALEYLEDIDLKTLEKEPRTFKAKELWEKNGAVIMAVRRPGCFLCREEAADLSSLKSMLDQLGVPLYAVVKEHIRTEVKDFQPYFKGEIFLDEKKKFYGPQRRKMMFMGFIRLGVWYNFFRAWNGGFSGNLEGEGFILGGVFVVGSGKQGILLEHREKEFGDKVNLLSVLEAAKMIKPQTLASEKK

SEQ ID NO: 5076 - protein, 229 aa, Homo sapiens; identical to SEQ ID NO: 5075

SEQ ID NO: 5077 - protein, 229 aa, Homo sapiens; identical to SEQ ID NO: 5075

SEQ ID NO: 5078 - protein, 229 aa, Homo sapiens; identical to SEQ ID NO: 5075

SEQ ID NO: 5079 - protein, 229 aa, Homo sapiens; identical to SEQ ID NO: 5075

SEQ ID NO: 5080 - protein, 425 aa, Homo sapiens
MMPSESGAERRDRAAAQVGTAAATAVATAAPAGGGPDPEALSAFPGRHLSGLSWPQVKRLDALLSEPIPIHGRGNFPTLSVQPRQIVQVVRSTLEEQGLHVHSVRLHGSAASHVLHPESGLGYKDLDLVFRVDLRSEASFQLTKAVVLACLLDFLPAGVSRAKITPLTLKEAYVQKLVKVCTDSDRWSLISLSNKSGKNVELKFVDSVRRQFEFSIDSFQIILDSLLLFGQCSSTPMSEAFHPTVTGESLYGDFTEALEHLRHRVIATRSPEEIRGGGLLKYCHLLVRGFRPRPSTDVRALQRYMCSRFFIDFPDLVEQRRTLERYLEAHFGGADAARRYACLVTLHRVVNESTVCLMNHERRQTLDLIAALALQALAEQGPAATAALAWRPPGTDGVVPATVNYYVTPVQPLLAHAYPTWLPCN

SEQ ID NO: 5081 - protein, 113 aa, Homo sapiens
MISTRYRRRRDAPRGPGRCPPHPTRPRGPGRKRGAAGSPGAAPSASRRPEFPKPLRVLPWRERGRGGREWPMSLRSPLPTSACGWGESGRRAGPGSLRSSDRTERARCSLRPR

SEQ ID NO: 5082 - protein, 225 aa, Homo sapiens
MLLTLAGGALFFPGLFALCTWALRRSQPGWSRTDCVMISTRLVSSVHAVLATGSGIVIIRSCDDVITGRHWLAREYVWFLIPYMIYDSYAMYLCEWCRTRDQNRAPSLTLRNFLSRNRLMITHHAVILFVLVPVAQLKQQHTLLYKVNGILTLATFLSCRILLFPFMYWSYGRQQGLSLLQVPFSIPFYCNVANAFLVAPQIYWFCLLCRKAVRLFDTPQAKKDG

SEQ ID NO: 5083 - protein, 257 aa, Homo sapiens
MLLTLAGGALFFPGLFALCTWALRRSQPGWSRTDCVMISTRLVSSVHAVLATGSGIVIIRSCDDVITGRHWLAREYVWFLIPYMIYDSYAMYLCEWCRTRDQNRAPSLTLRNFLSRNRLMITHHAVILFVLVPVAQRLRGDLGDFFVGCIFTAELSTPFVSLGRVLIQLKQQHTLLYKVNGILTLATFLSCRILLFPFMYWSYGRQQGLSLLQVPFSIPFYCNVANAFLVAPQIYWFCLLCRKAVRLFDTPQAKKDG

SEQ ID NO: 5084 - protein, 69 aa, Homo sapiens
MLLTLAGGALFFPGLFALCTWALRRSQPGWSRTDCVMISTRLVSSVHAVLATGSGIVIIRSCDDVITGS

SEQ ID NO: 5085 - protein, 149 aa, Homo sapiens
MLLTLAGGALFFPGLFALCTWALRRSQPGWSRTDCVMISTRYRRRRDAPRGPGRCPPHPTRPRGPGRKRGAAGSPGAAPSASRRPEFPKPLRVLPWRERGRGGREWPMSLRSPLPTSACGWGESGRRAGPGSLRSSDRTERARCSLRPR

SEQ ID NO: 5086 - protein, 38 aa, Homo sapiens
  VARIANT 1: note = misc_feature - Xaa can be any naturally occurring amino acid
XATGSGIVIIRSCDDVITGRGSGETLGTSLSAASSRQN

SEQ ID NO: 5087 - protein, 252 aa, Homo sapiens
GQGIAAALIHLPSTGNKHWRPRSPEASTDCCWLHQATGSGSVTQAGVQWYDLGSLQPLPPRFKRFSCLSLPSSWDYRSSWELPDLQEGKIQAISDSDGVNYPWYGNTTETCTIVGPTKRDSKFIISMNDNFYPSVTWAVPVSESNVAKLTNIYRDQSFTTWLVATNTSTNDMIILQTLHWRMQLSIEVNPNRPLGQRARLREPIAQDQPKILSKNEPIPPSALVKPNANDAQVLMWRPKYGQPLVVIPPKHR

SEQ ID NO: 5088 - protein, 283 aa, Homo sapiens
MPGFFCDCWPSLEIRALLYAMGCIQSIGGKARVFREGITVIDVKASIDPVPTSIDESSSVVLRYRTPHFRASAQVVMPPIPKKETWVVGWIQACSHMEFYNQYGEQGMSSWELPDLQEGKIQAISDSDGVNYPWYGNTTETCTIVGPTKRDSKFIISMNDNFYPSVTWAVPVSESNVAKLTNIYRDQSFTTWLVATNTSTNDMIILQTLHWRMQLSIEVNPNRPLGQRARLREPIAQDQPKILSKNEPIPPSALVKPNANDAQVLMWRPKYGQPLVVIPPKHR

SEQ ID NO: 5089 - protein, 280 aa, Homo sapiens
MTSYILISFVLLIGVGCIEKDQSCPVFGGRKRLHLLFVGGQLRQVRMLRGSPEASTDCCWLHQATGSGSVTQAGVQWYDLGSLQPLPPRFKRFSCLSLPSSWDYRSSWELPDLQEGKIQAISDSDGVNYPWYGNTTETCTIVGPTKRDSKFIISMNDNFYPSVTWAVPVSESNVAKLTNIYRDQSFTTWLVATNTSTNDMIILQTLHWRMQLSIEVNPNRPLGQRARLREPIAQDQPKILSKNEPIPPSALVKPNANDAQVLMWRPKYGQPLVVIPPKHR

SEQ ID NO: 5090 - protein, 160 aa, Homo sapiens
MQRVSGLLSWTLSRVLWLSGLSEPGAARQPRIMEEKALEVYDLIRTIRDPEKPNTLEELEVVSESCVEVQEINEEEYLVIIRFTPTVPHCSLATLIGLCLRVKLQRCLPFKHKLEIYISEGTHSTEEDINKQINDKERVAAAMENPNLREIVEQCVLEPD

SEQ ID NO: 5091 - protein, 130 aa, Homo sapiens
MQRVSGLLSWTLSRVLWLSGLSEPGAARQPRIMEEKALEVYDLIRTIRDPEKPNTLEELEVVSESCVEVQEINEEEYLVIIRFTPTVPHCSLATLIGLCLRVKLQRCLPFKHKLEIYISEGTHSTEEDSK

SEQ ID NO: 5092 - protein, 102 aa, Homo sapiens
MQRVSGLLSWTLSRVLWLSGLSEPGAARQPRIMEEKALEVYDLIRTIRDPEKPNTLEELEVVSESCVEVQEINEEEYLVIIRFTPTVPHCSLATLIVGNLHF

SEQ ID NO: 5093 - protein, 102 aa, Homo sapiens; identical to SEQ ID NO: 5092

SEQ ID NO: 5094 - protein, 69 aa, Homo sapiens
MQRVSGLLSWTLSRVLWLSGLSEPGAARQPRIMEEKALEVYGWNAMAGSRLTATSAFWFQVILLPQSPK

SEQ ID NO: 5095 - protein, 186 aa, Homo sapiens
MAAWGKKHAGKDPVRDECEERNRFTETREEDVTDEHGEREPFAETDEHTGANTKKPEDTAEDLTAKRKRMKMDKTCSKTKNKSKHALRKKQLKRQKRDYIHSLKLLNVLEEYITDEQKEEEEEEGEEEELIRIFQEQQKKWQQYRSVRRERLKEMKLLRDQFVKALEDFEDLCDRVFSDEDSELDN

SEQ ID NO: 5096 - protein, 186 aa, Homo sapiens; identical to SEQ ID NO: 5095

SEQ ID NO: 5097 - protein, 90 aa, Homo sapiens
MKAKKAHPRVEYNKTSGNAFEEQFSLPTKVRGSPLASQDNQPRILWAGGLPRPSWRLNLWRPGGRSMQERIQSVMNVRKETVLQKQGRKM

SEQ ID NO: 5098 - protein, 226 aa, Homo sapiens
MPGFLSFLSVSLRSPGSGIASSFPGQPATDPVGRRAAKAQLEAQFMAAWGKKHAGKDPVRDECEERNRFTETREEDVTDEHGEREPFAETDEHTGANTKKPEDTAVGANNFKNYPVHIGVSSEQHILLDCSLSRQKRDYIHSLKLLNVLEEYITDEQKEEEEEEGEEEELIRIFQEQQKKWQQYRSVRRERLKEMKLLRDQFVKALEDFEDLCDRVFSDEDSELDN

SEQ ID NO: 5099 - protein, 25 aa, Homo sapiens
KERCQYYTASFSDYAKYYALVCYGE

SEQ ID NO: 5100 - protein, 155 aa, Homo sapiens
MCIVLRPSRVHNSEENTMRALTLKDILNGTFSYKTFFPNWISGQEYLHQSADNNIVLYNIETGQSYTILSNRTMKSVNASNYGLSPDRQFVYLESDYSKLWRYSYTATYYIYDLSNGEFVRGNELPRPIQYLCWSPVGSKLAYVYQNNIYLKQRP

SEQ ID NO: 5101 - protein, 121 aa, Homo sapiens
MCIVLRPSRVHNSEENTMRALTLKDILNGTFSYKTFFPNWISGQEYLHQSADNNIVLYNIETGQSYTILSNRTMKSVNASNYGLSPDRQFVYLESDYSKLWRYSYTATYYIYDLSNGKWQL

SEQ ID NO: 5102 - protein, 760 aa, Homo sapiens
MKTWVKIVFGVATSAVLALLVMCIVLRPSRVHNSEENTMRALTLKDILNGTFSYKTFFPNWISGQEYLHQSADNNIVLYNIETGQSYTILSNRTMKSVNASNYGLSPDRQFVYLESDYSKLWRYSYTATYYIYDLSNGEFVRGNELPRPIQYLCWSPVGSKLAYVYQNNIYLKQRPGDPPFQITFNGRENKIFNGIPDWVYEEEMLATKYALWWSPNGKFLAYAEFNDTDIPVIAYSYYGDEQYPRTINIPYPKAGAKNPVVRIFIIDTTYPAYVGPQEVPVPAMIASSDYYFSWLTWVTDERVCLQWLKRVQNVSVLSICDFREDWQTWDCPKTQEHIEESRTGWAGGFFVSTPVFSYDAISYYKIFSDKDGYKHIHYIKDTVENAIQITSGKWEAINIFRVTQDSLFYSSNEFEEYPGRRNIYRISIGSYPPSKKCVTCHLRKERCQYYTASFSDYAKYYALVCYGPGIPISTLHDGRTDQEIKILEENKELENALKNIQLPKEEIKKLEVDEITLWYKMILPPQFDRSKKYPLLIQVYGGPCSQSVRSVFAVNWISYLASKEGMVIALVDGRGTAFQGDKLLYAVYRKLGVYEVEDQITAVRKFIEMGFIDEKRIAIWGWSYGGYVSSLALASGTGLFKCGIAVAPVSSWEYYASVYTERFMGLPTKDDNLEHYKNSTVMARAEYFRNVDYLLIHGTADDNVHFQNSAQIAKALVNAQVDFQAMWYSDQNHGLSGLSTNHLYTHMTHFLKQCFSLSD

SEQ ID NO: 5103 - protein, 735 aa, Homo sapiens
MKTWVKIVFGVATSAVLALLVMCIVLRPSRVHNSEENTMRALTLKDILNGTFSYKTFFPNWISGQEYLHQSADNNIVLYNIETGQSYTILSNRTMLWRYSYTATYYIYDLSNGEFVRGNELPRPIQYLCWSPVGSKLAYVYQNNIYLKQRPGDPPFQITFNGRENKIFNGIPDWVYEEEMLATKYALWWSPNGKFLAYAEFNDTDIPVIAYSYYGDEQYPRTINIPYPKAGAKNPVVRIFIIDTTYPAYVGPQEVPVPAMIASSDYYFSWLTWVTDERVCLQWLKRVQNVSVLSICDFREDWQTWDCPKTQEHIEESRTGWAGGFFVSTPVFSYDAISYYKIFSDKDGYKHIHYIKDTVENAIQITSGKWEAINIFRVTQDSLFYSSNEFEEYPGRRNIYRISIGSYPPSKKCVTCHLRKERCQYYTASFSDYAKYYALVCYGPGIPISTLHDGRTDQEIKILEENKELENALKNIQLPKEEIKKLEVDEITLWYKMILPPQFDRSKKYPLLIQVYGGPCSQSVRSVFAVNWISYLASKEGMVIALVDGRGTAFQGDKLLYAVYRKLGVYEVEDQITAVRKFIEMGFIDEKRIAIWGWSYGGYVSSLALASGTGLFKCGIAVAPVSSWEYYASVYTERFMGLPTKDDNLEHYKNSTVMARAEYFRNVDYLLIHGTADDNVHFQNSAQIAKALVNAQVDFQAMWYSDQNHGLSGLSTNHLYTHMTHFLKQCFSLSD

SEQ ID NO: 5104 - protein, 759 aa, Homo sapiens
MTWVKIVFGVATSAVLALLVMCIVLRPSRVHNSEENTMRALTLKDILNGTFSYKTFFPNWISGQEYLHQSADNNIVLYNIETGQSYTILSNRTMKSVNASNYGLSPDRQFVYLESDYSKLWRYSYTATYYIYDLSNGEFVRGNELPRPIQYLCWSPVGSKLAYVYQNNIYLKQRPGDPPFQITFNGRENKIFNGIPDWVYEEEMLATKYALWWSPNGKFLAYAEFNDTDIPVIAYSYYGDEQYPRTINIPYPKAGAKNPVVRIFIIDTTYPAYVGPQEVPVPAMIASSDYYFSWLTWVTDERVCLQWLKRVQNVSVLSICDFREDWQTWDCPKTQEHIEESRTGWAGGFFVSTPVFSYDAISYYKIFSDKDGYKHIHYIKDTVENAIQITSGKWEAINIFRVTQDSLFYSSNEFEEYPGRRNIYRISIGSYPPSKKCVTCHLRKERCQYYTASFSDYAKYYALVCYGPGIPISTLHDGRTDQEIKILEENKELENALKNIQLPKEEIKKLEVDEITLWYKMILPPQFDRSKKYPLLIQVYGGPCSQSVRSVFAVNWISYLASKEGMVIALVDGRGTAFQGDKLLYAVYRKLGVYEVEDQITAVRKFIEMGFIDEKRIAIWGWSYGGYVSSLALASGTGLFKCGIAVAPVSSWEYYASVYTERFMGLPTKDDNLEHYKNSTVMARAEYFRNVDYLLIHGTADDNVHFQNSAQIAKALVNAQVDFQAMWYSDQNHGLSGLSTNHLYTHMTHFLKQCFSLSD

SEQ ID NO: 5105 - protein, 47 aa, Homo sapiens
  VARIANT 1: note = misc_feature - Xaa can be any naturally occurring amino acid
XYTERFMGLPTKDDNLEHYKNSTVMARAEYFRNVDYLLIHGTADGEV

SEQ ID NO: 5106 - protein, 86 aa, Homo sapiens
MLGIWTLLPLVLTSVARLSSKSVNAQVTDINSKGLELRKTVTTVETQNLEGLHHDGQFCHKPCPPDVNMESSRNAHSPATPSAKRK

SEQ ID NO: 5107 - protein, 103 aa, Homo sapiens
MLGIWTLLPLVLTSVARLSSKSVNAQVTDINSKGLELRKTVTTVETQNLEGLHHDGQFCHKPCPPDVNMESSRNAHSPATPSAKRKDPDLTWGGFVFFFCQFH

SEQ ID NO: 5108 - protein, 132 aa, Homo sapiens
MLGIWTLLPLVLTSVARLSSKSVNAQVTDINSKGLELRKTVTTVETQNLEGLHHDGQFCHKPCPPGERKARDCTVNGDEPDCVPCQEGKEYTDKAHFSSKCRRCRLCDEGHDVNMESSRNAHSPATPSAKRK

SEQ ID NO: 5109 - protein, 149 aa, Homo sapiens
MLGIWTLLPLVLTSVARLSSKSVNAQVTDINSKGLELRKTVTTVETQNLEGLHHDGQFCHKPCPPGERKARDCTVNGDEPDCVPCQEGKEYTDKAHFSSKCRRCRLCDEGHDVNMESSRNAHSPATPSAKRKDPDLTWGGFVFFFCQFH

SEQ ID NO: 5110 - protein, 149 aa, Homo sapiens; identical to SEQ ID NO: 5109

SEQ ID NO: 5111 - protein, 335 aa, Homo sapiens
MLGIWTLLPLVLTSVARLSSKSVNAQVTDINSKGLELRKTVTTVETQNLEGLHHDGQFCHKPCPPGERKARDCTVNGDEPDCVPCQEGKEYTDKAHFSSKCRRCRLCDEGHGLEVEINCTRTQNTKCRCKPNFFCNSTVCEHCDPCTKCEHGIIKECTLTSNTKCKEEGSRSNLGWLCLLLLPIPLIVWVKRKEVQKTCRKHRKENQGSHESPTLNPETVAINLSDVDLSKYITTIAGVMTLSQVKGFVRKNGVNEAKIDEIKNDNVQDTAEQKVQLLRNWHQLHGKKEAYDTLIKDLKKANLCTLAEKIQTIILKDITSDSENSNFRNEIQSLV

SEQ ID NO: 5112 - protein, 233 aa, Homo sapiens [sequence omitted]

SEQ ID NO: 5113 - protein, 244 aa, Homo sapiens
MLGIWTLLPLVLTSVARLSSKSVNAQVTDINSKGLELRKTVTTVETQNLEGLHHDGQFCHKPCPPGERKARDCTVNGDEPDCVPCQEGKEYTDKAHFSSKCRRCRLCDEGHGLEVEINCTRTQNTKCRCKPNFFCNSTVCEHCDPCTKCEHGIIKECTLTSNTKCKEEGSRSNLGWLCLLLLPIPLIVWVKRKEVQKTCRKHRKENQGSHESPTLNPMESCSIAQAGVQGCNHGSLQPQSPGLK

SEQ ID NO: 5114 - protein, 220 aa, Homo sapiens
MLGIWTLLPLVLTSVARLSSKSVNAQVTDINSKGLELRKTVTTVETQNLEGLHHDGQFCHKPCPPGERKARDCTVNGDEPDCVPCQEGKEYTDKAHFSSKCRRCRLCDEGHGLEVEINCTRTQNTKCRCKPNFFCNSTVCEHCDPCTKCEHGIIKECTLTSNTKCKEEGSRSNLGWLCLLLLPIPLIVWVKRKEVQKTCRKHRKENQGSHESPTLNPMLT

SEQ ID NO: 5115 - protein, 314 aa, Homo sapiens
MLGIWTLLPLVLTSVARLSSKSVNAQVTDINSKGLELRKTVTTVETQNLEGLHHDGQFCHKPCPPGERKARDCTVNGDEPDCVPCQEGKEYTDKAHFSSKCRRCRLCDEGHGLEVEINCTRTQNTKCRCKPNFFCNSTVCEHCDPCTKCEHGIIKECTLTSNTKCKEEVKRKEVQKTCRKHRKENQGSHESPTLNPETVAINLSDVDLSKYITTIAGVMTLSQVKGFVRKNGVNEAKIDEIKNDNVQDTAEQKVQLLRNWHQLHGKKEAYDTLIKDLKKANLCTLAEKIQTIILKDITSDSENSNFRNEIQSLV

SEQ ID NO: 5116 - protein, 119 aa, Homo sapiens
LSKKPLEEKPSQPYSARESLSEVQSLSSFQSESCDDNASIVTVMHLVNAVVDTVSTEESLAAPDLSKPRGYHWDTSDWMPSVPLPDIQEFPNYEVIDEQTPLYSADPNAIDTDYYPGGY

SEQ ID NO: 5117 - protein, 4588 aa, Homo sapiens
MGRHLALLLLLLLLFQHFGDSDGSQRLEQTPLQFTHLEYNVTVQENSAAKTYVGHPVKMGVYITHPAWEVRYKIVSGDSENLFKAEEYILGDFCFLRIRTKGGNTAILNREVKDHYTLIVKALEKNTNVEARTKVRVQVLDTNDLRPLFSPTSYSVSLPENTAIRTSIARVSATDADIGTNGEFYYSFKDRTDMFAIHPTSGVIVLTGRLDYLETKLYEMEILAADRGMKLYGSSGISSMAKLTVHIEQANECAPVITAVTLSPSELDRDPAYAIVTVDDCDQGANGDIASLSIVAGDLLQQFRTVRSFPGSKEYKVKAIGGIDWDSHPFGYNLTLQAKDKGTPPQFSSVKVIHVTSPQFKAGPVKFEKDVYRAEISEFAPPNTPVVMVKAIPAYSHLRYVFKSTPGKAKFSLNYNTGLISILEPVKRQQAAHFELEVTTSDRKASTKVLVKVLGANSNPPEFTQTAYKAAFDENVPIGTTVMSLSAVDPDEGENGYVTYSIANLNHVPFAIDHFTGAVSTSENLDYELMPRVYTLRIRASDWGLPYRREVEVLATITLNNLNDNTPLFEKINCEGTIPRDLGVGEQITTVSAIDADELQLVQYQIEAGNELDFFSLNPNSGVLSLKRSLMDGLGAKVSFHSLRITATDGENFATPLYINITVAASHKLVNLQCEETGVAKMLAEKLLQANKLHNQGEVEDIFFDSHSVNAHIPQFRSTLPTGIQVKENQPVGSSVIFMNSTDLDTGFNGKLVYAVSGGNEDSCFMIDMETGMLKILSPLDRETTDKYTLNITVYDLGIPQKAAWRLLHVVVVDANDNPPEFLQESYFVEVSEDKEVHSEIIQVEATDKDLGPNGHVTYSIVTDTDTFSIDSVTGVVNIARPLDRELQHEHSLKIEARDQAREEPQLFSTVVVKVSLEDVNDNPPTFIPPNYRVKVREDLPEGTVIMWLEAHDPDLGQSGQVRYSLLDHGEGNFDVDKLSGAVRIVQQLDFEKKQVYNLTVRAKDKGKPVSLSSTCYVEVEVVDVNENLHPPVFSSFVEKGTVKEDAPVGSLVMTVSAHDEDARRDGEIRYSIRDGSGVGVFKIGEETGVIETSDRLDRESTSHYWLTVFATDQGVVPLSSFIEIYIEVEDVNDNAPQTSEPVYYPEIMENSPKDVSVVQIEAFDPDSSSNDKLMYKITSGNPQGFFSIHPKTGLITTTSRKLDREQQDEHILEVTVTDNGSPPKSTIARVIVKILDENDNKPQFLQKFYKIRLPEREKPDRERNARREPLYHVIATDKDEGPNAEISYSIEDGNEHGKFFIEPKTGVVSSKRFSAAGEYDILSIKAVDNGRPQKSSTTRLHIEWISKPKPSLEPISFEESFFTFTVMESDPVAHMIGVISVEPPGIPLWFDITGGNYDSHFDVDKGTGTIIVAKPLDAEQKSNYNLTVEATDGTTTILTQVFIKVIDTNDHRPQFSTSKYEVVIPEDTAPETEILQISAVDQDEKNKLIYTLQSSRDPLSLKKFRLDPATGSLYTSEKLDHEAVHQHTLTVMVRDQDVPVKRNFARIVVNVSDTNDHAPWFTASSYKGRVYESAAVGSVVLQVTALDKDKGKNAEVLYSIESGNIGNSFMIDPVLGSIKTAKELDRSNQAEYDLMVKATDKGSPPMSEITSVRIFVTIADNASPKFTSKEYSVELSETVSIGSFVGMVTAHSQSSVVYEIKDGNTGDAFDINPHSGTIITQKALDFETLPIYTLIIQGTNMAGLSTNTTVLVHLQDENDNAPVFMQAEYTGLISESASINSVVLTDRNVPLVIRAADADKDSNALLVYHIVEPSVHTYFAIDSSTGAIHTVLSLDYEETSIFHFTVQVHDMGTPRLFAEYAANVTVHVIDINDCPPVFAKPLYEASLLLPTYKGVKVITVNATDADSSAFSQLIYSITEGNIGEKFSMDYKTGALTVQNTTQLRSRYELTVRASDGRFAGLTSVKINVKESKESHLKFTQDVYSAVVKENSTEAETLAVITAIGNPINEPLFYHILNPDRRFKISRTSGVLSTTGTPFDREQQEAFDVVVEVTEEHKPSAVAHVVVKVIVEDQNDNAPVFVNLPYYAVVKVDTEVGHVIRYVTAVDRDSGRNGEVHYYLKEHHEHFQIGPLGEISLKKQFELDTLNKEYLVTVVAKDGGNPAFSAEVIVPITVMNKAMPVFEKPFYSAEIAESIQVHSPVVHVQANSPEGLKVFYSITDGDPFSQFTINFNTGVINVIAPLDFEAHPAYKLSIRATDSLTGAHAEVFVDIIVDDINDNPPVFAQQSYAVTLSEASVIGTSVVQVRATDSDSEPNRGISYQMFGNHSKSHDHFHVDSSTGLISLLRTLDYEQSRQHTIFVRAVDGGMPTLSSDVIVTVDVTDLNDNPPLFEQQIYEARISEHAPHGHFVTCVKAYDADSSDIDKLQYSILSGNDHKHFVIDSATGIITLSNLHRHALKPFYSLNLSVSDGVFRSSTQVHVTVIGGNLHSPAFLQNEYEVELAENAPLHTLVMEVKTTDGDSGIYGHVTYHIVNDFAKDRFYINERGQIFTLEKLDRETPAEKVISVRLMAKDAGGKVAFCTVNVILTDDNDNAPQFRATKYEVNIGSSAAKGTSVVKVLASDADEGSNADITYAIEADSESVKENLEINKLSGVITTKESLIGLENEFFTFFVRAVDNGSPSKESVVLVYVKILPPEMQLPKFSEPFYTFTVSEDVPIGTEIDLIRAEHSGTVLYSLVKGNTPESNRDESFVIDRQSGRLKLEKSLDHETTKWYQFSILARCTQDDHEMVASVDVSIQVKDANDNSPVFESSPYEAFIVENLPGGSRVIQIRASDADSGTNGQVMYSLDQSQSVEVIESFAINMETGWITTLKELDHEKRDNYQIKVVASDHGEKIQLSSTAIVDVTVTDVNDSPPRFTAEIYKGTVSEDDPQGGVIAILSTTDADSEEINRQVTYFITGGDPLGQFAVETIQNEWKVYVKKPLDREKRDNYLLTITATDGTFSSKAIVEVKVLDANDNSPVCEKTLYSDTIPEDVLPGKLIMQISATDADIRSNAEITYTLLGSGAEKFKLNPDTGELKTSTPLDREEQAVYHLLVRATDGGGRFCQASIVLTLEDVNDNAPEFSADPYAITVFENTEPGTLLTRVQATDADAGLNRKILYSLIDSADGQFSINELSGIIQLEKPLDRELQAVYTLSLKAVDQGLPRRLTATGTVIVSVLDINDNPPVFEYREYGATVSEDILVGTEVLQVYAASRDIEANAEITYSIISGNEHGKFSIDSKTGAVFIIENLDYESSHEYYLTVEATDGGTPSLSDVATVNVNVTDINDNTPVFSQDTYTTVISEDAVLEQSVITVMADDADGPSNSHIHYSIIDGNQGSSFTIDPVRGEVKVTKLLDRETISGYTLTVQASDNGSPPRVNTTTVNIDVSDVNDNAPVFSRGNYSVIIQENKPVGFSVLQLVVTDEDSSHNGPPFFFTIVTGNDEKAFEVNPQGVLLTSSAIKRKEKDHYLLQVKVADNGKPQLSSLTYIDIRVIEESIYPPAILPLEIFITSSGEEYSGGVIGKIHATDQDVYDTLTYSLDPQMDNLFSVSSTGGKLIAHKKLDIGQYLLNVSVTDGKFTTVADITVHIRQVTQEMLNHTIAIRFANLTPEEFVGDYWRNFQRALRNILGVRRNDIQIVSLQSSEPHPHLDVLLFVEKPGSAQISTKQLLHKINSSVTDIEEIIGVRILNVFQKLCAGLDCPWKFCDEKVSVDESVMSTHSTARLSFVTPRHHRAAVCLCKEGRCPPVHHGCEDDPCPEGSECVSDPWEEKHTCVCPSGRFGQCPGSSSMTLTGNSYVKYRLTENENKLEMKLTMRLRTYSTHAVVMYARGTDYSILEIHHGRLQYKFDCGSGPGIVSVQSIQVNDGQWHAVALEVNGNYARLVLDQVHTASGTAPGTLKTLNLDNYVFFGGHIRQQGTRHGRSPQVGNGFRGCMDSIYLNGQELPLNSKPRSYAHIEESVDVSPGCFLTATEDCASNPCQNGGVCNPSPAGGYYCKCSALYIGTHCEISVNPCSSKPCLYGGTCVVDNGGFVCQCRGLYTGQRCQLSPYCKDEPCKNGGTCFDSLDGAVCQCDSGFRGERCQSDIDECSGNPCLHGALCENTHGSYHCNCSHEYRGRHCEDAAPNQYVSTPWNIGLAEGIGIVVFVAGIFLLVVVFVLCRKMISRKKKHQAEPKDKHLGPATAFLQRPYFDSKLNKNIYSDIPPQVPVRPISYTPSIPSDSRNNLDRNSFEGSAIPEHPEFSTFNPESVHGHRKAVAVCSVAPNLPPPPPSNSPSDSDSIQKPSWDFDYDTKVVDLDPCLSKKPLEEKPSQPYSARESLSEVQSLSSFQSESCDDNGYHWDTSDWMPSVPLPDIQEFPNYEVIDEQTPLYSADPNAIDTDYYPGGYDIESDFPPPPEDFPAADELPPLPPEFSNQFESIHPPRDMPAAGSLGSSSRNRQRFNLNQYLPNFYPLDMSEPQTKGTGENSTCREPHAPYPPGYQRHFEAPAVESMPMSVYASTASCSDVSACCEVESEVMMSDYESGDDGHFEEVTIPPLDSQQHTEV

SEQ ID NO: 5118 - protein, 488 aa, Homo sapiens
MGRHLALLLLLLLLFQHFGDSDGSQRLEQTPLQFTHLEYNVTVQENSAAKTYVGHPVKMGVYITHPAWEVRYKIVSGDSENLFKAEEYILGDFCFLRIRTKGGNTAILNREVKDHYTLIVKALEKNTNVEARTKVRVQVLDTNDLRPLFSPTSYSVSLPENTAIRTSIARVSATDADIGTNGEFYYSFKDRTDMFAIHPTSGVIVLTGRLDYLETKLYEMEILAADRGMKLYGSSGISSMAKLTVHIEQANECAPVITAVTLSPSELDRDPAYAIVTVDDCDQGANGDIASLSIVAGDLLQQFRTVRSFPGSKEYKVKAIGGIDWDSHPFGYNLTLQAKDKGTPPQFSSVKVIHVTSPQFKAGPVKFEKDVYRAEISEFAPPNTPVVMVKAIPAYSHLRYVFKSTPGKAKFSLNYNTGLISILEPVKRQQAAHFELEVTTSDRKASTKVLVKVLGANSNPPEFTQTAYKAAFDENVPIGTTVMSLSAV

SEQ ID NO: 5119 - protein, 4590 aa, Homo sapiens
MGRHLALLLLLLLLFQHFGDSDGSQRLEQTPLQFTHLEYNVTVQENSAAKTYVGHPVKMGVYITHPAWEVRYKIVSGDSENLFKAEEYILGDFCFLRIRTKGGNTAILNREVKDHYTLIVKALEKNTNVEARTKVRVQVLDTNDLRPLFSPTSYSVSLPENTAIRTSIARVSATDADIGTNGEFYYSFKDRTDMFAIHPTSGVIVLTGRLDYLETKLYEMEILAADRGMKLYGSSGISSMAKLTVHIEQANECAPVITAVTLSPSELDRDPAYAIVTVDDCDQGANGDIASLSIVAGDLLQQFRTVRSFPGSKEYKVKAIGGIDWDSHPFGYNLTLQAKDKGTPPQFSSVKVIHVTSPQFKAGPVKFEKDVYRAEISEFAPPNTPVVMVKAIPAYSHLRYVFKSTPGKAKFSLNYNTGLISILEPVKRQQAAHFELEVTTSDRKASTKVLVKVLGANSNPPEFTQTAYKAAFDENVPIGTTVMSLSAVDPDEGENGYVTYSIANLNHVPFAIDHFTGAVSTSENLDYELMPRVYTLRIRASDWGLPYRREVEVLATITLNNLNDNTPLFEKINCEGTIPRDLGVGEQITTVSAIDADELQLVQYQIEAGNELDFFSLNPNSGVLSLKRSLMDGLGAKVSFHSLRITATDGENFATPLYINITVAASHKLVNLQCEETGVAKMLAEKLLQANKLHNQGEVEDIFFDSHSVNAHIPQFRSTLPTGIQVKENQPVGSSVIFMNSTDLDTGFNGKLVYAVSGGNEDSCFMIDMETGMLKILSPLDRETTDKYTLNITVYDLGIPQKAAWRLLHVVVVDANDNPPEFLQESYFVEVSEDKEVHSEIIQVEATDKDLGPNGHVTYSIVTDTDTFSIDSVTGVVNIARPLDRELQHEHSLKIEARDQAREEPQLFSTVVVKVSLEDVNDNPPTFIPPNYRVKVREDLPEGTVIMWLEAHDPDLGQSGQVRYSLLDHGEGNFDVDKLSGAVRIVQQLDFEKKQVYNLTVRAKDKGKPVSLSSTCYVEVEVVDVNENLHPPVFSSFVEKGTVKEDAPVGSLVMTVSAHDEDARRDGEIRYSIRDGSGVGVFKIGEETGVIETSDRLDRESTSHYWLTVFATDQGVVPLSSFIEIYIEVEDVNDNAPQTSEPVYYPEIMENSPKDVSVVQIEAFDPDSSSNDKLMYKITSGNPQGFFSIHPKTGLITTTSRKLDREQQDEHILEVTVTDNGSPPKSTIARVIVKILDENDNKPQFLQKFYKIRLPEREKPDRERNARREPLYHVIATDKDEGPNAEISYSIEDGNEHGKFFIEPKTGVVSSKRFSAAGEYDILSIKAVDNGRPQKSSTTRLHIEWISKPKPSLEPISFEESFFTFTVMESDPVAHMIGVISVEPPGIPLWFDITGGNYDSHFDVDKGTGTIIVAKPLDAEQKSNYNLTVEATDGTTTILTQVFIKVIDTNDHRPQFSTSKYEVVIPEDTAPETEILQISAVDQDEKNKLIYTLQSSRDPLSLKKFRLDPATGSLYTSEKLDHEAVPAHLTVMVRDQDVPVKRNFARIVVNVSDTNDHAPWFTASSYKGRVYESAAVGSVVLQVTALDKDKGKNAEVLYSIESGTFGNIGNSFMIDPVLGSIKTAKELDRSNQAEYDLMVKATDKGSPPMSEITSVRIFVTIADNASPKFTSKEYSVELSETVSIGSFVGMVTAHSQSSVVYEIKDGNTGDAFDINPHSGTIITQKALDFETLPIYTLIIQGTNMAGLSTNTTVLVHLQDENDNAPVFMQAEYTGLISESASINSVVLTDRNVPLVIRAADADKDSNALLVYHIVEPSVHTYFAIDSSTGAIHTVLSLDYEETSIFHFTVQVHDMGTPRLFAEYAANVTVHVIDINDCPPVFAKPLYEASLLLPTYKGVKVITVNATDADSSAFSQLIYSITEGNIGEKFSMDYKTGALTVQNTTQLRSRYELTVRASDGRFAGLTSVKINVKESKESHLKFTQDVYSAVVKENSTEAETLAVITAIGNPINEPLFYHILNPDRRFKISRTSGVLSTTGTPFDREQQEAFDVVVEVTEEHKPSAVAHVVVKVIVEDQNDNAPVFVNLPYYAVVKVDTEVGHVIRYVTAVDRDSGRNGEVHYYLKEHHEHFQIGPLGEISLKKQFELDTLNKEYLVTVVAKDGGNPAFSAEVIVPITVMNKAMPVFEKPFYSAEIAESIQVHSPVVHVQANSPEGLKVFYSITDGDPFSQFTINFNTGVINVIAPLDFEAHPAYKLSIRATDSLTGAHAEVFVDIIVDDINDNPPVFAQQSYAVTLSEASVIGTSVVQVRATDSDSEPNRGISYQMFGNHSKSHDHFHVDSSTGLISLLRTLDYEQSRQHTIFVRAVDGGMPTLSSDVIVTVDVTDLNDNPPLFEQQIYEARISEHAPHGHFVTCVKAYDADSSDIDKLQYSILSGNDHKHFVIDSATGIITLSNLHRHALKPFYSLNLSVSDGVFRSSTQVHVTVIGGNLHSPAFLQNEYEVELAENAPLHTLVMEVKTTDGDSGIYGHVTYHIVNDFAKDRFYINERGQIFTLEKLDRETPAEKVISVRLMAKDAGGKVAFCTVNVILTDDNDNAPQFRATKYEVNIGSSAAKGTSVVKVLASDADEGSNADITYAIEADSESVKENLEINKLSGVITTKESLIGLENEFFTFFVRAVDNGSPSKESVVLVYVKILPPEMQLPKFSEPFYTFTVSEDVPIGTEIDLIRAEHSGTVLYSLVKGNTPESNRDESFVIDRQSGRLKLEKSLDHETTKWYQFSILARCTQDDHEMVASVDVSIQVKDANDNSPVFESSPYEAFIVENLPGGSRVIQIRASDADSGTNGQVMYSLDQSQSVEVIESFAINMETGWITTLKELDHEKRDNYQIKVVASDHGEKIQLSSTAIVDVTVTDVNDSPPRFTAEIYKGTVSEDDPQGGVIAILSTTDADSEEINRQVTYFITGGDPLGQFAVETIQNEWKVYVKKPLDREKRDNYLLTITATDGTFSSKAIVEVKVLDANDNSPVCEKTLYSDTIPEDVLPGKLIMQISATDADIRSNAEITYTLLGSGAEKFKLNPDTGELKTSTPLDREEQAVYHLLVRATDGGGRFCQASIVLTLEDVNDNAPEFSADPYAITVFENTEPGTLLTRVQATDADAGLNRKILYSLIDSADGQFSINELSGIIQLEKPLDRELQAVYTLSLKAVDQGLPRRLTATGTVIVSVLDINDNPPVFEYREYGATVSEDILVGTEVLQVYAASRDIEANAEITYSIISGNEHGKFSIDSKTGAVFIIENLDYESSHEYYLTVEATDGGTPSLSDVATVNVNVTDINDNTPVFSQDTYTTVISEDAVLEQSVITVMADDADGPSNSHIHYSIIDGNQGSSFTIDPVRGEVKVTKLLDRETISGYTLTVQASDNGSPPRVNTTTVNIDVSDVNDNAPVFSRGNYSVIIQENKPVGFSVLQLVVTDEDSSHNGPPFFFTIVTGNDEKAFEVNPQGVLLTSSAIKRKEKDHYLLQVKVADNGKPQLSSLTYIDIRVIEESIYPPAILPLEIFITSSGEEYSGGVIGKIHATDQDVYDTLTYSLDPQMDNLFSVSSTGGKLIAHKKLDIGQYLLNVSVTDGKFTTVADITVHIRQVTQEMLNHTIAIRFANLTPEEFVGDYWRNFQRALRNILGVRRNDIQIVSLQSSEPHPHLDVLLFVEKPGSAQISTKQLLHKINSSVTDIEEIIGVRILNVFQKLCAGLDCPWKFCDEKVSVDESVMSTHSTARLSFVTPRHHRAAVCLCKEGRCPPVHHGCEDDPCPEGSECVSDPWEEKHTCVCPSGRFGQCPGSSSMTLTGNSYVKYRLTENENKLEMKLTMRLRTYSTHAVVMYARGTDYSILEIHHGRLQYKFDCGSGPGIVSVQSIQVNDGQWHAVALEVNGNYARLVLDQVHTASGTAPGTLKTLNLDNYVFFGGHIRQQGTRHGRSPQVGNGFRGCMDSIYLNGQELPLNSKPRSYAHIEESVDVSPGCFLTATEDCASNPCQNGGVCNPSPAGGYYCKCSALYIGTHCEISVNPCSSKPCLYGGTCVVDNGGFVCQCRGLYTGQRCQLSPYCKDEPCKNGGTCFDSLDGAVCQCDSGFRGERCQSDIDECSGNPCLHGALCENTHGSYHCNCSHEYRGRHCEDAAPNQYVSTPWNIGLAEGIGIVVFVAGIFLLVVVFVLCRKMISRKKKHQAEPKDKHLGPATAFLQRPYFDSKLNKNIYSDIPPQVPVRPISYTPSIPSDSRNNLDRNSFEGSAIPEHPEFSTFNPESVHGHRKAVAVCSVAPNLPPPPPSNSPSDSDSIQKPSWDFDYDTKVVDLDPCLSKKPLEEKPSQPYSARESLSEVQSLSSFQSESCDDNGYHWDTSDWMPSVPLPDIQEFPNYEVIDEQTPLYSADPNAIDTDYYPGGYDIESDFPPPPEDFPAADELPPLPPEFSNQFESIHPPRDMPAAGSLGSSSRNRQRFNLNQYLPNFYPLDMSEPQTKGTGENSTCREPHAPYPPGYQRHFEAPAVESMPMSVYASTASCSDVSACCEVESEVMMSDYESGDDGHFEEVTIPPLDSQQHTEV

SEQ ID NO: 5120 - protein, 52 aa, Homo sapiens
MTMAVIVRNKEKKVIFEFSGQISGSSFRSHFPPLPYSILFVVHTFLSHLELS

SEQ ID NO: 5121 - protein, 368 aa, Homo sapiens
  VARIANT 1: note = misc_feature - Xaa can be any naturally occurring amino acid
XDSKLNKNIYSDIPPQVPVRPISYTPSIPSDSRNNLDRNSFEGSAIPEHPEFSTFNPESVHGHRKAVAVCSVAPNLPPPPPSNSPSDSDSIQKPSWDFDYDTKVVDLDPCLSKKPLEEKPSQPYSARESLSEVQSLSSFQSESCDDNESLAAPDLSKPRGYHWDTSDWMPSVPLPDIQEFPNYEVIDEQTPLYSADPNAIDTDYYPGGYDIESDFPPPPEDFPAADELPPLPPEFSNQFESIHPPRDMPAAGSLGSSSRNRQRFNLNQYLPNFYPLDMSEPQTKGTGENSTCREPHAPYPPGYQRHFEAPAVESMPMSVYASTASCSDVSACCEVESEVMMSDYESGDDGHFEEVTIPPLDSQQHTEV

SEQ ID NO: 5122 - protein, 285 aa, Homo sapiens
  VARIANT 1: note = misc_feature - Xaa can be any naturally occurring amino acid
XSTTEALFASVEDYILVRGVSLVHTAKMNPVRMAEHALTVWMAPFVSVIRVLGEKGVRVISTSALETLACTGPSVRTRTAPITATAATSTGDVTARMLRPTTKVVDLDPCLSKKPLEEKPSQPYSARESLSEVQSLSSFQSESCDDNGYHWDTSDWMPSVPLPDIQEFPNYEVIDEQTPLYSADPNAIDTDYYPGGYDIESDFPPPPEDFPAADELPPLPPEFSNQFESIHPPRDMPAAGSLGSSSRNRQRFNLNQYLPNFYPLDMSEPQTKGTGENSTCREPHA

SEQ ID NO: 5123 - protein, 92 aa, Homo sapiens
ALLAAGGRGVPGPPPQLRVPTPSASRSLRVSEPRGLGVRALPCAAPPDCQRRGLGDAPLPHGQLRSSSPPRPGDLFQNRIPPPLKHTVLPQS

SEQ ID NO: 5124 - protein, 181 aa, Homo sapiens
CRMVQEQCCHSQLEELHCATGISLANEQDRCATPHGDNASLEATFVKRCCHCCLLGRAAQAQGQSCEYSLMVGYQCGQVFQACCVKSQETGDLDVGGLQETGGGPCKQQCRDTGDEVVCSCFVGYQLLSDGVSCEDVNECITGSHSCRLGESCINTVGSFRCQRDSSCGTGYELTEDNSCK

SEQ ID NO: 5125 - protein, 60 aa, Homo sapiens
DITEGNLRDSFDIIKRYMDGMTVAPLLNCHILKDLQSWEMKTVASAILDSDLYSEHFQSS

SEQ ID NO: 5126 - protein, 65 aa, Homo sapiens
MATHQKDCSLPYATESKECRMVQEQCCHSQLEELHCATGISLANEQDRCATPHGDNASLEATFVK

SEQ ID NO: 5127 - protein, 139 aa, Homo sapiens
MATHQKDCSLPYATESKECRMVQEQCCHSQLEELHCATGISLANEQDRCATPHGDNASLEATFVKRCCHCCLLGRAAQAQGQSCEYSLMVGYQCGQVFQACCVKSQETGDLDVGGLQETDKIIEVEEEQEDPYLNDRCR

SEQ ID NO: 5128 - protein, 721 aa, Homo sapiens
MERAAPSRRVPLPLLLLGGLALLAAGVDADVLLEACCADGHRMATHQKDCSLPYATESKECRAVGLASLCQDLNGAWAVWKVGRASQAEGTASARAQRRGMVQEQCCHSQLEELHCATGISLANEQDRCATPHGDNASLEATFVKRCCHCCLLGRAAQAQGQSCEYSLMVGYQCGQVFQACCVKSQETGDLDVGGLQETDKIIEVEEEQEDPYLNDRCRGGGPCKQQCRDTGDEVVCSCFVGYQLLSDGVSCEDVNECITGSHSCRLGESCINTVGSFRCQRDSSCGTGYELTEDNSCKDIDECESGIHNCLPDFICQNTLGSFRCRPKLQCKSGFIQDALGNCIDINECLSISAPCPIGHTCINTEGSYTCQKNVPNCGRGYHLNEEGTRCVDVDECAPPAEPCGKGHRCVNSPGSFRCECKTGYYFDGISRMCVDVNECQRYPGRLCGHKCENTLGSYLCSCSVGFRLSVDGRSCEDINECSSSPCSQECANVYGSYQCYCRRGYQLSDVDGVTCEDIDECALPTGGHICSYRCINIPGSFQCSCPSSGYRLAPNGRNCQDIDECVTGIHNCSINETCFNIQGGFRCLAFECPENYRRSAATRCERLPCHENRECSKLPLRITYYHLSFPTNIQAPAVVFRMGPSSAVPGDSMQLAITGGNEEGFFTTRKVSPHSGVVALTKPVPEPRDLLLTVKMDLSRHGTVSSFVAKLFIFVSAEL

SEQ ID NO: 5129 - protein, 683 aa, Homo sapiens
MERAAPSRRVPLPLLLLGGLALLAAGVDADVLLEACCADGHRMATHQKDCSLPYATESKECRMVQEQCCHSQLEELHCATGISLANEQDRCATPHGDNASLEATFVKRCCHCCLLGRAAQAQGQSCEYSLMVGYQCGQVFQACCVKSQETGDLDVGGLQETDKIIEVEEEQEDPYLNDRCRGGGPCKQQCRDTGDEVVCSCFVGYQLLSDGVSCEDVNECITGSHSCRLGESCINTVGSFRCQRDSSCGTGYELTEDNSCKDIDECESGIHNCLPDFICQNTLGSFRCRPKLQCKSGFIQDALGNCIDINECLSISAPCPIGHTCINTEGSYTCQKNVPNCGRGYHLNEEGTRCVDVDECAPPAEPCGKGHRCVNSPGSFRCECKTGYYFDGISRMCVDVNECQRYPGRLCGHKCENTLGSYLCSCSVGFRLSVDGRSCEDINECSSSPCSQECANVYGSYQCYCRRGYQLSDVDGVTCEDIDECALPTGGHICSYRCINIPGSFQCSCPSSGYRLAPNGRNCQDIDECVTGIHNCSINETCFNIQGGFRCLAFECPENYRRSAATRCERLPCHENRECSKLPLRITYYHLSFPTNIQAPAVVFRMGPSSAVPGDSMQLAITGGNEEGFFTTRKVSPHSGVVALTKPVPEPRDLLLTVKMDLSRHGTVSSFVAKLFIFVSAEL

SEQ ID NO: 5130 - protein, 703 aa, Homo sapiens
MERAAPSRRVPLPLLLLGGLALLAAGVDADVLLEACCADGHRMATHQKDCSLPYATESKECRMVQEQCCHSQLEELHCATGISLANEQDRCATPHGDNASLEATFVKRCCHCCLLGRAAQAQGQSCEYSLMVGYQCGQVFQACCVKSQETGDLDVGGLQETDKIIEVEEEQEDPYLNDRCRGGGPCKQQCRDTGDEVVCSCFVGYQLLSDGVSCEDVNECITGSHSCRLGESCINTVGSFRCQRDSSCGTGYELTEDNSCKDIDECESGIHNCLPDFICQNTLGSFRCRPKLQCKSGFIQDALGNCIDINECLSISAPCPIGHTCINTEGSYTCQKNVPNCGRGYHLNEEGTRCVDVDECAPPAEPCGKGHRCVNSPGSFRCECKTGYYFDGISRMCVDVNECQRYPGRLCGHKCENTLGSYLCSCSVGFRLSVDGRSCEDINECSSSPCSQECANVYGSYQCYCRRGYQLSDVDGVTCEDIDECALPTGGHICSYRCINIPGSFQCSCPSSGYRLAPNGRNCQDIDECVTGIHNCSINETCFNIQGGFRCLAFECPENYRRSAATLQQEKTDTVRCIKSCRPNDVTCVFDPVHTISHTVISLPTFREFTRPEEIIFLRAITPPHPASQANIIFDITEGNLRDSFDIIKRYMDGMTVGVVRQVRPIVGPFHAVLKLEMNYVVGGVVSHRNVVNVHIFVSEYWF

SEQ ID NO: 5131 - protein, 566 aa, Homo sapiens
MERAAPSRRVPLPLLLLGGLALLAAGVDADVLLEACCADGHRMATHQKDCSLPYATESKECRMVQEQCCHSQLEELHCATGISLANEQDRCATPHGDNASLEATFVKRCCHCCLLGRAAQAQGQSCEYSLMVGYQCGQVFQACCVKSQETGDLDVGGLQETDKIIEVEEEQEDPYLNDRCRGGGPCKQQCRDTGDEVVCSCFVGYQLLSDGVSCEDVNECITGSHSCRLGESCINTVGSFRCQRDSSCGTGYELTEDNSCKDIDECESGIHNCLPDFICQNTLGSFRCRPKLQCKSGFIQDALGNCIDINECLSISAPCPIGHTCINTEGSYTCQKNVPNCGRGYHLNEEGTRCVDVDECAPPAEPCGKGHRCVNSPGSFRCECKTGYYFDGISRMCVDVNECQRYPGRLCGHKCENTLGSYLCSCSVGFRLSVDGRSCEDINECSSSPCSQECANVYGSYQCYCRRGYQLSDVDGVTCEDIDECALPTGGHICSYRCINIPGSFQCSCPSSGYRLAPNGRNCQDIDECVTGIHNCSINETCFNIQGGFRCLAFECPENYRRSAAT

SEQ ID NO: 5132 - protein, 601 aa, Homo sapiens
MERAAPSRRVPLPLLLLGGLALLAAGVDADVLLEACCADGHRMATHQKDCSLPYATESKECRMVQEQCCHSQLEELHCATGISLANEQDRCATPHGDNASLEATFVKRCCHCCLLGRAAQAQGQSCEYSLMVGYQCGQVFQACCVKSQETGDLDVGGLQETDKIIEVEEEQEDPYLNDRCRGGGPCKQQCRDTGDEVVCSCFVGYQLLSDGVSCEDVNECITGSHSCRLGESCINTVGSFRCQRDSSCGTGYELTEDNSCKDIDECESGIHNCLPDFICQNTLGSFRCRPKLQCKSGFIQDALGNCIDINECLSISAPCPIGHTCINTEGSYTCQKNVPNCGRGYHLNEEGTRCVDVDECAPPAEPCGKGHRCVNSPGSFRCECKTGYYFDGISRMCVDVNECQRYPGRLCGHKCENTLGSYLCSCSVGFRLSVDGRSCEDINECSSSPCSQECANVYGSYQCYCRRGYQLSDVDGVTCEDIDECALPTGGHICSYRCINIPGSFQCSCPSSGYRLAPNGRNCQDIDECVTGIHNCSINETCFNIQGGFRCLAFECPENYRRSAATQKSKKGRQNTPAGSSKEDCRVLPWKQGLEDTHLDA

SEQ ID NO: 5133 - protein, 172 aa, Homo sapiens
MERAAPSRRVPLPLLLLGGLALLAAGVDADVLLEACCADGHRMATHQKDCSLPYATESKECRMVQEQCCHSQLEELHCATGISLANEQDRCATPHGDNASLEATFVKRCCHCCLLGRAAQAQGQSCEYSLMVGYQCGQVFQACCVKSQETGDLDVGGLQETGGGPCKQQCRD

SEQ ID NO: 5134 - protein, 189 aa, Homo sapiens
MNSYTRGSRRPSAKAASPAASVTSRVSPSGPGVPVDADVLLEACCADGHRMATHQKDCSLPYATESKECRMVQEQCCHSQLEELHCATGISLANEQDRCATPHGDNASLEATFVKRCCHCCLLGRAAQAQGQSCEYSLMVGYQCGQVFQACCVKSQETGDLDVGGLQETDKIIEVEEEQEDPYLNDRCR

SEQ ID NO: 5135 - protein, 183 aa, Homo sapiens
  VARIANT 1: note = misc_feature - Xaa can be any naturally occurring amino acid
XKRCCHCCLLGRAAQAQGQSCEYSLMVGYQCGQVFQACCVKSQETGDLDVGGLQETDKIIEVEEEQEDPYLNDRCRGGGPCKQQCRDTGDEVVCSCFVGYQLLSDGVSCEDVNECITGSHSCRLGESCINTVGSFRCQRDSSCGTGYELTEDNSCKEYSGILPLPTQATVQEWLYTRCSRQLY

SEQ ID NO: 5136 - protein, 159 aa, Homo sapiens
MVLLWEPAGAWLALGLALALGPSVAAAAPRQDCTGVECPPLENCIEEALEPGACCATCVQQGCACEGYQYYDCLQGGFVRGRVPAGQSYFVDFGSTECSCPPGGGKISCQFMLCPELPPNCIEAVVVADSCPQCGQVGCVHAGHKYAAGHTVHLPPCRA

SEQ ID NO: 5137 - protein, 1184 aa, Homo sapiens
MVLLWEPAGAWLALGLALALGPSVAAAAPRQDCTGVECPPLENCIEEALEPGACCATCVQQGCACEGYQYYDCLQGGFVRGRVPAGQSYFVDFGSTECSCPPGGGKISCQFMLCPELPPNCIEAVVVADSCPQCGQVGCVHAGHKYAAGHTVHLPPCRACHCPDAGGELICYQLPGCHGNFSDAEEGDPERHYEDPYSYDQEVAEVEAATALGGEVQAGAVQAGAGGPPAALGGGSQPLSTIQAPPWPAVLPRPTAAAALGPPAPVQAKARRVTEDSEEEEEEEEEREEMAVTEQLAAGGHRGLDGLPTTAPAGPSLPIQEERAEAGARAEAGARPEENLILDAQATSRSTGPEGVTHAPSLGKAALVPTQAVPGSPRDPVKPSPHNILSTSLPDAAWIPPTREVPRKPQVLPHSHVEEDTDPNSVHSIPRSSPEGSTKDLIETCCAAGQQWAIDNDECLEIPESGTEDNVCRTAQRHCCVSYLQEKSCMAGVLGAKEGETCGAEDNDSCGISLYKQCCDCCGLGLRVRAEGQSCESNPNLGYPCNHVMLSCCEGEEPLIVPEVRRPPEPAAAPRRVSEAEMAGREALSLGTEAELPNSLPGDDQDECLLLPGELCQHLCINTVGSYHCACFPGFSLQDDGRTCRPEGHPPQPEAPQEPALKSEFSQVASNTIPLPLPQPNTCKDNGPCKQVCSTVGGSAICSCFPGYAIMADGVSCEDINECVTDLHTCSRGEHCVNTLGSFHCYKALTCEPGYALKDGECEDVDECAMGTHTCQPGFLCQNTKGSFYCQARQRCMDGFLQDPEGNCVDINECTSLSEPCRPGFSCINTVGSYTCQRNPLICARGYHASDDGTKCVDVNECETGVHRCGEGQVCHNLPGSYRCDCKAGFQRDAFGRGCIDVNECWASPGRLCQHTCENTLGSYRCSCASGFLLAADGKRCEDVNECEAQRCSQECANIYGSYQCYCRQGYQLAEDGHTCTDIDECAQGAGILCTFRCLNVPGSYQCACPEQGYTMTANGRSCKDVDECALGTHNCSEAETCHNIQGSFRCLRFECPPNYVQVSKTKCERTTCHDFLECQNSPARITHYQLNFQTGLLVPAHIFRIGPAPAFTGDTIALNIIKGNEEGYFGTRRLNAYTGVVYLQRAVLEPRDFALDVEMKLWRQGSVTTFLAKMHIFFTTFAL

SEQ ID NO: 5138 - protein, 1231 aa, Homo sapiens
MVLLWEPAGAWLALGLALALGPSVAAAAPRQDCTGVECPPLENCIEEALEPGACCATCVQQGCACEGYQYYDCLQGGFVRGRVPAGQSYFVDFGSTECSCPPGGGKISCQFMLCPELPPNCIEAVVVADSCPQCGQVGCVHAGHKYAAGHTVHLPPCRACHCPDAGGELICYQLPGCHGNFSDAEEGDPERHYEDPYSYDQEVAEVEAATALGGEVQAGAVQAGAGGPPAALGGGSQPLSTIQAPPWPAVLPRPTAAAALGPPAPVQAKARRVTEDSEEEEEEEEEREEMAVTEQLAAGGHRGLDGLPTTAPAGPSLPIQEERAEAGARAEAGARPEENLILDAQATSRSTGPEGVTHAPSLGKAALVPTQAVPGSPRDPVKPSPHNILSTSLPDAAWIPPTREVPRKPQVLPHSHVEEDTDPNSVHSIPRSSPEGSTKDLIETCCAAGQQWAIDNDECLEIPESGTEDNVCRTAQRHCCVSYLQEKSCMAGVLGAKEGETCGAEDNDSCGISLYKQCCDCCGLGLRVRAEGQSCESNPNLGYPCNHVMLSCCEGEEPLIVPEVRRPPEPAAAPRRVSEAEMAGREALSLGTEAELPNSLPGDDQDECLLLPGELCQHLCINTVGSYHCACFPGFSLQDDGRTCRPEGHPPQPEAPQEPALKSEFSQVASNTIPLPLPQPNTCKDNGPCKQVCSTVGGSAICSCFPGYAIMADGVSCEDQDECLMGAHDCSRRQFCVNTLGSFYCVNHTVLCADGYILNAHRKCVDINECVTDLHTCSRGEHCVNTLGSFHCYKALTCEPGYALKDGECEDVDECAMGTHTCQPGFLCQNTKGSFYCQARQRCMDGFLQDPEGNCVDINECTSLSEPCRPGFSCINTVGSYTCQRNPLICARGYHASDDGTKCVDVNECETGVHRCGEGQVCHNLPGSYRCDCKAGFQRDAFGRGCIDVNECWASPGRLCQHTCENTLGSYRCSCASGFLLAADGKRCEDVNECEAQRCSQECANIYGSYQCYCRQGYQLAEDGHTCTDIDECAQGAGILCTFRCLNVPGSYQCACPEQGYTMTANGRSCKDVDECALGTHNCSEAETCHNIQGSFRCLRFECPPNYVQVSKTKCERTTCHDFLECQNSPARITHYQLNFQTGLLVPAHIFRIGPAPAFTGDTIALNIIKGNEEGYFGTRRLNAYTGVVYLQRAVLEPRDFALDVEMKLWRQGSVTTFLAKMHIFFTTFAL

SEQ ID NO: 5139 - protein, 1231 aa, Homo sapiens; identical to SEQ ID NO: 5138

SEQ ID NO: 5140 - protein, 109 aa, Homo sapiens
  VARIANT 1: note = misc_feature - Xaa can be any naturally occurring amino acid
XIDECAQGAGILCTFRCLNVPGSYQCACPEQGYTMTANGRSCKDVDECALGTHNCSEAETCHNIQGSFRCLRFECPPNYVQVSKTWCVPTQAPSGSLHGGPRPWRVPCG

SEQ ID NO: 5141 - protein, 101 aa, Homo sapiens
  VARIANT 1: note = misc_feature - Xaa can be any naturally occurring amino acid
XVDECALGTHNCSEAETCHNIQGSFRCLRFECPPNYVQVSKTKCERTKWKLARWATAVAGALWVRLGDDLRTRDTRPCWGSWTPLDDPSPKLTFHFMFHCD

SEQ ID NO: 5142 - protein, 44 aa, Homo sapiens
MPGIKRILTVTILALCLPSPGNAQAQCTNGFDLDRQSGQCLASL

SEQ ID NO: 5143 - protein, 489 aa, Homo sapiens
MPGIKRILTVTILALCLPSPGNAQAQCTNGFDLDRQSGQCLDGVSLSSPRLECNGAISAHCNLCLPGSSDSSASASQVAGITDIDECRTIPEACRGDMMCVNQNGGYLCIPRTNPVYRGPYSNPYSTPYSGPYPAAAPPLSAPNYPTISRPLICRFGYQMDESNQCVDVDECATDSHQCNPTQICINTEGGYTCSCTDGYWLLEGQCLDIDECRYGYCQQLCANVPGSYSCTCNPGFTLNEDGRSCQDVNECATENPCVQTCVNTYGSFICRCDPGYELEEDGVHCSDMDECSFSEFLCQHECVNQPGTYFCSCPPGYILLDDNRSCQDINECEHRNHTCNLQQTCYNLQGGFKCIDPIRCEEPYLRISDNRCMCPAENPGCRDQPFTILYRDMDVVSGRSVPADIFQMQATTRYPGAYYIFQIKSGNEGREFYMRQTGPISATLVMTRPIKGPREIQLDLEMITVNTVINFRGSSVIRLRIYVSQYPF

SEQ ID NO: 5144 - protein, 91 aa, Homo sapiens
MPGIKRILTVTILALCLPSPGNAQAQCTNGFDLDRQSGQCLDIDECRTIPEACRGDMMCVNQNGGYLCIPRTNPVYRGPYSNPYSTPYSGP

SEQ ID NO: 5145 - protein, 448 aa, Homo sapiens
MPGIKRILTVTILALCLPSPGNAQAQCTNGFDLDRQSGQCLDIDECRTIPEACRGDMMCVNQNGGYLCIPRTNPVYRGPYSNPYSTPYSGPYPAAAPPLSAPNYPTISRPLICRFGYQMDESNQCVDVDECATDSHQCNPTQICINTEGGYTCSCTDGYWLLEGQCLDIDECRYGYCQQLCANVPGSYSCTCNPGFTLNEDGRSCQDVNECATENPCVQTCVNTYGSFICRCDPGYELEEDGVHCSDMDECSFSEFLCQHECVNQPGTYFCSCPPGYILLDDNRSCQDINECEHRNHTCNLQQTCYNLQGGFKCIDPIRCEEPYLRISDNRCMCPAENPGCRDQPFTILYRDMDVVSGRSVPADIFQMQATTRYPGAYYIFQIKSGNEGREFYMRQTGPISATLVMTRPIKGPREIQLDLEMITVNTVINFRGSSVIRLRIYVSQYPF

SEQ ID NO: 5146 - protein, 35 aa, Homo sapiens
MPGIKRILTVTILALCLPSPGNAQQQERWTPVCQP

SEQ ID NO: 5147 - protein, 453 aa, Homo sapiens
MRSGNCRQRYMILTVTILALCLPSPGNAQAQCTNGFDLDRQSGQCLDIDECRTIPEACRGDMMCVNQNGGYLCIPRTNPVYRGPYSNPYSTPYSGPYPAAAPPLSAPNYPTISRPLICRFGYQMDESNQCVDVDECATDSHQCNPTQICINTEGGYTCSCTDGYWLLEGQCLDIDECRYGYCQQLCANVPGSYSCTCNPGFTLNEDGRSCQDVNECATENPCVQTCVNTYGSFICRCDPGYELEEDGVHCSDMDECSFSEFLCQHECVNQPGTYFCSCPPGYILLDDNRSCQDINECEHRNHTCNLQQTCYNLQGGFKCIDPIRCEEPYLRISDNRCMCPAENPGCRDQPFTILYRDMDVVSGRSVPADIFQMQATTRYPGAYYIFQIKSGNEGREFYMRQTGPISATLVMTRPIKGPREIQLDLEMITVNTVINFRGSSVIRLRIYVSQYPF

SEQ ID NO: 5148 - protein, 261 aa, Homo sapiens
AGSARTLGTARGGHGAGKGLSPTALLPARVASCARSQKAWPLCIIDVNECELYGQEGRPRLCMHACVNTPGSYRCTCPGGYRTLADGKSCEDVDECVGLQPVCPQGTTCINTGGSFQCVSPECPEGSGNVSYVKTSPFQCERNPCPMDSRPCRHLPKTISFHYLSLPSNLKTPITLFRMATASAPGRAGPNSLRFGIVGGNSRGHFVMQRSDRQTGDLILVQNLEGPQTLEVDVDMSEYLDRSFQANHVSKVTIFVSPYDF

SEQ ID NO: 5149 - protein, 305 aa, Homo sapiens
MVPSSPRALFLLLLILACPEPRASQNCLSKQQLLSAIRQLQQLLKGQETRFAEGIRHMKSRLAALQNSVGRVGPDALPVSCPALNTPADGRKFGSKYLVDHEVHFTCNPGFRLVGPSSVVCLPNGTWTGEQPHCRDVDECVGLQPVCPQGTTCINTGGSFQCVSPECPEGSGNVSYVKTSPFQCERNPCPMDSRPCRHLPKTISFHYLSLPSNLKTPITLFRMATASAPGRAGPNSLRFGIVGGNSRGHFVMQRSDRQTGDLILVQNLEGPQTLEVDVDMSEYLDRSFQANHVSKVTIFVSPYDF

SEQ ID NO: 5150 - protein, 439 aa, Homo sapiens
MVPSSPRALFLLLLILACPEPRASQNCLSKQQLLSAIRQLQQLLKGQETRFAEGIRHMKSRLAALQNSVGRVGPDALPVSCPALNTPADGRKFGSKYLVDHEVHFTCNPGFRLVGPSSVVCLPNGTWTGEQPHCRGISECSSQPCQNGGTCVEGVNQYRCICPPGRTGNRCQHQAQTAAPEGSVAGDSAFSRAPRCAQVERAQHCSCEAGFHLSGAAGDSVCQDVNECELYGQEGRPRLCMHACVNTPGSYRCTCPGGYRTLADGKSCEDVDECVGLQPVCPQGTTCINTGGSFQCVSPECPEGSGNVSYVKTSPFQCERNPCPMDSRPCRHLPKTISFHYLSLPSNLKTPITLFRMATASAPGRAGPNSLRFGIVGGNSRGHFVMQRSDRQTGDLILVQNLEGPQTLEVDVDMSEYLDRSFQANHVSKVTIFVSPYDF

SEQ ID NO: 5151 - protein, 366 aa, Homo sapiens
MVPSSPRALFLLLLILACPEPRASQNCLSKQQLLSAIRQLQQLLKGQETRFAEGIRHMKSRLAALQNSVGRVGPDALPVSCPALNTPADGRKFGSKYLVDHEVHFTCNPGFRLVGPSSVVCLPNGTWTGEQPHCRGISECSSQPCQNGGTCVEGVNQYRCICPPGRTGNRCQHQAQTAAPEGSVAGDSAFSRAPRCAQVERAQHCSCEAGFHLSGAAGDSVCQDVNECELYGQEGRPRLCMHACVNTPGSYRCTCPGGYRTLADGKSCEDVDECVGLQPVCPQGTTCINTGGSFQCVSPECPEGSGNVSYVKTSPLTWRGLRRWRWTSTCRNTWTAPSRPTTCPRSPSLYPPMTSEGTQGHWGVES

SEQ ID NO: 5152 - protein, 393 aa, Homo sapiens
MVPSSPRALFLLLLILACPEPRASQNCLSKQQLLSAIRQLQQLLKGQETRFAEGIRHMKSRLAALQNSVGRVGPDALPVSCPALNTPADGRKFGSKYLVDHEVHFTCNPGFRLVGPSSVVCLPNGTWTGEQPHCRGISECSSQPCQNGGTCVEGVNQYRCICPPGRTGNRCQHQAQTDVNECELYGQEGRPRLCMHACVNTPGSYRCTCPGGYRTLADGKSCEDVDECVGLQPVCPQGTTCINTGGSFQCVSPECPEGSGNVSYVKTSPFQCERNPCPMDSRPCRHLPKTISFHYLSLPSNLKTPITLFRMATASAPGRAGPNSLRFGIVGGNSRGHFVMQRSDRQTGDLILVQNLEGPQTLEVDVDMSEYLDRSFQANHVSKVTIFVSPYDF

SEQ ID NO: 5153 - protein, 273 aa, Homo sapiens
RFAEGIRHMKSRLAALQNSVGRVGPDALPGISECSSQPCQNGGTCVEGVNQYRCICPPGRTGNRCQHQAQTAAPEGSVAGDSAFSRAPRCAQVERAQHCSCEAGFHLSGAAGDSVCQDVNECELYGQEGRPRLCMHACVNTPGSYRCTCPGGYRTLADGKSCEDVDECVGLQPVCPQGTTCINTGGSFQCVSPECPEGSGNVSYVKTSPFQCERNPCPMDSRPCRHLPKTISFHYLSLPSNLKTPITLFRMATASAPGRAGPNSLRFGIVGGN

SEQ ID NO: 5154 - protein, 55 aa, Homo sapiens
MRRGRLLEIALGFTVLLASYTSHGADANLEAGNVKETRASRAKRRGGGGHDALKG

SEQ ID NO: 5155 - protein, 302 aa, Homo sapiens
MRRGRLLEIALGFTVLLASYTSHGADANLEAGNVKETRASRAKRRGGGGHDALKGPNVCGSRYNAYCCPGWKTLPGGNQCIVPICRHSCGDGFCSRPNMCTCPSGQIAPSCGSRSIQHCNIRCMNGGSCSDDHCLCQKGYIGTHCGQPVCESGCLNGGRCVAPNRCACTYGFTGPQCERDYRTGPCFTVISNQMCQGQLSGIVCTKTLCCATTSMNVKLEHTTVANMLYVPIQQEASNVAAVPGGLEMALSALIWTNVPMEPICAASMQTARIPWDLTAVCARKDTQVMASLVQTLMSALRT

SEQ ID NO: 5156 - protein, 2871 aa, Homo sapiens
MRRGRLLEIALGFTVLLASYTSHGADANLEAGNVKETRASRAKRRGGGGHDALKGPNVCGSRYNAYCCPGWKTLPGGNQCIVPICRHSCGDGFCSRPNMCTCPSGQIAPSCGSRSIQHCNIRCMNGGSCSDDHCLCQKGYIGTHCGQPVCESGCLNGGRCVAPNRCACTYGFTGPQCERDYRTGPCFTVISNQMCQGQLSGIVCTKTLCCATVGRAWGHPCEMCPAQPHPCRRGFIPNIRTGACQDVDECQAIPGLCQGGNCINTVGSFECKCPAGHKLNEVSQKCEDIDECSTIPGICEGGECTNTVSSYFCKCPPGFYTSPDGTRCIDVRPGYCYTALTNGRCSNQLPQSITKMQCCCDAGRCWSPGVTVAPEMCPIRATEDFNKLCSVPMVIPGRPEYPPPPLGPIPPVLPVPPGFPPGPQIPVPRPPVEYLYPSREPPRVLPVNVTDYCQLVRYLCQNGRCIPTPGSYRCECNKGFQLDLRGECIDVDECEKNPCAGGECINNQGSYTCQCRAGYQSTLTRTECRDIDECLQNGRICNNGRCINTDGSFHCVCNAGFHVTRDGKNCEDMDECSIRNMCLNGMCINEDGSFKCICKPGFQLASDGRYCKDINECETPGICMNGRCVNTDGSYRCECFPGLAVGLDGRVCVDTHMRSTCYGGYKRGQCIKPLFGAVTKSECCCASTEYAFGEPCQPCPAQNSAEYQALCSSGPGMTSAGSDINECALDPDICPNGICENLRGTYKCICNSGYEVDSTGKNCVDINECVLNSLLCDNGQCRNTPGSFVCTCPKGFIYKPDLKTCEDIDECESSPCINGVCKNSPGSFICECSSESTLDPTKTICIETIKGTCWQTVIDGRCEININGATLKSQCCSSLGAAWGSPCTLCQVDPICGKGYSRIKGTQCEDIDECEVFPGVCKNGLCVNTRGSFKCQCPSGMTLDATGRICLDIRLETCFLRYEDEECTLPIAGRHRMDACCCSVGAAWGTEECEECPMRNTPEYEELCPRGPGFATKEITNGKPFFKDINECKMIPSLCTHGKCRNTIGSFKCRCDSGFALDSEERNCTDIDECRISPDLCGRGQCVNTPGDFECKCDEGYESGFMMMKNCMDIDECQRDPLLCRGGVCHNTEGSYRCECPPGHQLSPNISACIDINECELSAHLCPNGRCVNLIGKYQCACNPGYHSTPDRLFCVDIDECSIMNGGCETFCTNSEGSYECSCQPGFALMPDQRSCTDIDECEDNPNICDGGQCTNIPGEYRCLCYDGFMASEDMKTCVDVNECDLNPNICLSGTCENTKGSFICHCDMGYSGKKGKTGCTDINECEIGAHNCGKHAVCTNTAGSFKCSCSPGWIGDGIKCTDLDECSNGTHMCSQHADCKNTMGSYRCLCKEGYTGDGFTCTDLDECSENLNLCGNGQCLNAPGGYRCECDMGFVPSADGKACEDIDECSLPNICVFGTCHNLPGLFRCECEIGYELDRSGGNCTDVNECLDPTTCISGNCVNTPGSYICDCPPDFELNPTRVGCVDTRSGNCYLDIRPRGDNGDTACSNEIGVGVSKASCCCSLGKAWGTPCEMCPAVNTSEYKILCPGGEGFRPNPITVILEDIDECQELPGLCQGGKCINTFGSFQCRCPTGYYLNEDTRVCDDVNECETPGICGPGTCYNTVGNYTCICPPDYMQVNGGNNCMDMRRSLCYRNYYADNQTCDGELLFNMTKKMCCCSYNIGRAWNKPCEQCPIPSTDEFATLCGSQRPGFVIDIYTGLPVDIDECREIPGVCENGVCINMVGSFRCECPVGFFYNDKLLVCEDIDECQNGPVCQRNAECINTAGSYRCDCKPGYRFTSTGQCNDRNECQEIPNICSHGQCIDTVGSFYCLCHTGFKTNDDQTMCLDINECERDACGNGTCRNTIGSFNCRCNHGFILSHNNDCIDVDECASGNGNLCRNGQCINTVGSFQCQCNEGYEVAPDGRTCVDINECLLEPRKCAPGTCQNLDGSYRCICPPGYSLQNEKCEDIDECVEEPEICALGTCSNTEGSFKCLCPEGFSLSSSGRRCQDLRMSYCYAKFEGGKCSSPKSRNHSKQECCCALKGEGWGDPCELCPTEPDEAFRQICPYGSGIIVGPDDSAVDMDECKEPDVCKHGQCINTDGSYRCECPFGYILAGNECVDTDECSVGNPCGNGTCKNVIGGFECTCEEGFEPGPMMTCEDINECAQNPLLCAFRCVNTYGSYECKCPVGYVLREDRRMCKDEDECEEGKHDCTEKQMECKNLIGTYMCICGPGYQRRPDGEGCVDENECQTKPGICENGRCLNTRGSYTCECNDGFTASPNQDECLDNREGYCFTEVLQNMCQIGSSNRNPVTKSECCCDGGRGWGPHCEICPFQGTVAFKKLCPHGRGFMTNGADIDECKVIHDVCRNGECVNDRGSYHCICKTGYTPDITGTSCVDLNECNQAPKPCNFICKNTEGSYQCSCPKGYILQEDGRSCKDLDECATKQHNCQFLCVNTIGGFTCKCPPGFTQHHTSCIDNNECTSDINLCGSKGICQNTPGSFTCECQRGFSLDQTGSSCEDVDECEGNHRCQHGCQNIIGGYRCSCPQGYLQHYQWNQCVDENECLSAHICGGASCHNTLGSYKCMCPAGFQYEQFSGGCQDINECGSAQAPCSYGCSNTEGGYLCGCPPGYFRIGQGHCVSGMGMGRGNPEPPVSGEMDDNSLSPEACYECKINGYPKRGRKRRSTNETDASNIEDQSETEANVSLASWDVEKTAIFAFNISHVSNKVRILELLPALTTLTNHNRYLIESGNEDGFFKINQKEGISYLHFTKKKPVAGTYSLQISSTPLYKKKELNQLEDKYDKDYLSGELGDNLKMKIQVLLH

SEQ ID NO: 5157 - protein, 853 aa, Homo sapiens
  VARIANT 1: note = misc_feature - Xaa can be any naturally occurring amino acid
XLGKAWGTPCEMCPAVNTSEYKILCPGGEGFRPNPITVILEDIDECQELPGLCQGGKCINTFGSFQCRCPTGYYLNEDTRVCDDVNECETPGICGPGTCYNTVGNYTCICPPDYMQVNGGNNCMDMRRSLCYRNYYADNQTCDGELLFNMTKKMCCCSYNIGRAWNKPCEQCPIPSTDEFATLCGSQRPGFVIDIYTGLPVDIDECREIPGVCENGVCINMVGSFRCECPVGFFYNDKLLVCEDIDECQNGPVCQRNAECINTAGSYRCDCKPGYRFTSTGQCNDRNECQEIPNICSHGQCIDTVGSFYCLCHTGFKTNDDQTMCLDINECERDACGNGTCRNTIGSFNCRCNHGFILSHNNDCIDVDECASGNGNLCRNGQCINTVGSFQCQCNEGYEVAPDGRTCVDINECLLEPRKCAPGTCQNLDGSYRCICPPGYSLQNEKCEDIDECVEEPEICALGTCSNTEGSFKCLCPEGFSLSSSGRRCQDLRMSYCYAKFEGGKCSSPKSRNHSKQECCCALKGEGWGDPCELCPTEPDEAFRQICPYGSGIIVGPDDSAVDMDECKEPDVCKHGQCINTDGSYRCECPFGYILAGNECVDTDECSVGNPCGNGTCKNVIGGFECTCEEGFEPGPMMTCEDINECAQNPLLCAFRCVNTYGSYECKCPVGYVLREDRRMCKDEDECEEGKHDCTEKQMECKNLIGTYMCICGPGYQRRPDGEGCVDENECQTKPGICENGRCLNTRGSYTCECNDGFTASPNQDECLDVILSLLLLSPAFPSCFFSPRTIGKGTASQRCYKTCVRSAPATGTPSPNRNAAVTEGEAGVPTVRSALSRGLWLSRNSVPMAEDS

SEQ ID NO: 5158 - protein, 1473 aa, Homo sapiens
MGRRRRLCLQLYFLWLGCVVLWAQGTAGQPQPPPPKPPRPQPPPQQVRSATAGSEGGFLAPEYREEGAAVASRVRRRGQQDVLRGPNVCGSRFHSYCCPGWKTLPGGNQCIVLQQCSVRCMNGGTCADDHCQCQKGYIGTYCGQPVCENGCQNGGRCIGPNRCACVYGFTGPQCERDYRTGPCFTQVNNQMCQGQLTGIVCTKTLCCATIGRAWGHPCEMCPAQPQPCRRGFIPNIRTGACQDVDECQAIPGICQGGNCINTVGSFECRCPAGHKQSETTQKCEDIDECSIIPGICETGECSNTVGSYFCVCPRGYVTSTDGSRCIDQRTGMCFSGLVNGRCAQELPGRMTKMQCCCEPGRCWGIGTIPEACPVRGSEEYRRLCMDGLPMGGIPGSAGSRPGGTGGNGFAPSGNGNGYGPGGTGFIPIPGGNGFSPGVGGAGVGAGGQGPIITGLTILNQTIDICKHHANLCLNGRCIPTVSSYRCECNMGYKQDANGDCIDVDECTSNPCTNGDCVNTPGSYYCKCHAGFQRTPTKQACIDIDECIQNGVLCKNGRCVNTDGSFQCICNAGFELTTDGKNCVDHDECTTTNMCLNGMCINEDGSFKCICKPGFVLAPNGRYCTDVDECQTPGICMNGHCINSEGSFRCDCPPGLAVGMDGRVCVDTHMRSTCYGGIKKGVCVRPFPGAVTKSECCCANPDYGFGEPCQPCPAKNSAEFHGLCSSGVGITVDGRDINECALDPDICANGICENLRGSYRCNCNSGYEPDASGRNCIDIDECLVNRLLCDNGLCRNTPGSYSCTCPPGYVFRTETETCEDINECESNPCVNGACRNNLGSFNCECSPGSKLSSTGLICIDSLKGTCWLNIQDSRCEVNINGATLKSECCATLGAAWGSPCERCELDTACPRGLARIKGVTCEDVNECEVFPGVCPNGRCVNSKGSFHCECPEGLTLDGTGRVCLDIRMEQCYLKWDEDECIHPVPGKFRMDACCCAVGAAWGTECEECPKPGTKEYETLCPRGAGFANRGDVLTGRPFYKDINECKAFPGMCTYGKCRNTIGSFKCRCNSGFALDMEERNCTDIDECRISPDLCGSGICVNTPGSFECECFEGYESGFMMMKNCMDIDECERNPLLCRGGTCVNTEGSFQCDCPLGHELSPSREDCVDINECSLSDNLCRNGKCVNMIGTYQCSCNPGYQATPDRQGCTDIDECMIMNGGCDTQCTNSEGSYECSCSEGYALMPDGRSCADIDECENNPDICDGGQCTNIPGEYRCLCYDGFMASMDMKTCIDVNECDLNSNICMFGECENTKGSFICHCQLGYSVKKGTTGCTDVDECEIGAHNCDMHASCLNIPGSFKCSCREGWIGNGIKCIDLDECSNGTHQCSINAQCVNTPGSYRCACSEGFTGDGFTCSDVDECAENINLCENGQCLNVPGAYRCECEMGFTPASDSRSCQGGSPGFQLIFKLDQPQ

SEQ ID NO: 5159 - protein, 2912 aa, Homo sapiens
MGRRRRLCLQLYFLWLGCVVLWAQGTAGQPQPPPPKPPRPQPPPQQVRSATAGSEGGFLAPEYREEGAAVASRVRRRGQQDVLRGPNVCGSRFHSYCCPGWKTLPGGNQCIVPICRNSCGDGFCSRPNMCTCSSGQISSTCGSKSIQQCSVRCMNGGTCADDHCQCQKGYIGTYCGQPVCENGCQNGGRCIGPNRCACVYGFTGPQCERDYRTGPCFTQVNNQMCQGQLTGIVCTKTLCCATIGRAWGHPCEMCPAQPQPCRRGFIPNIRTGACQDVDECQAIPGICQGGNCINTVGSFECRCPAGHKQSETTQKCEDIDECSIIPGICETGECSNTVGSYFCVCPRGYVTSTDGSRCIDQRTGMCFSGLVNGRCAQELPGRMTKMQCCCEPGRCWGIGTIPEACPVRGSEEYRRLCMDGLPMGGIPGSAGSRPGGTGGNGFAPSGNGNGYGPGGTGFIPIPGGNGFSPGVGGAGVGAGGQGPIITGLTILNQTIDICKHHANLCLNGRCIPTVSSYRCECNMGYKQDANGDCIDVDECTSNPCTNGDCVNTPGSYYCKCHAGFQRTPTKQACIDIDECIQNGVLCKNGRCVNTDGSFQCICNAGFELTTDGKNCVDHDECTTTNMCLNGMCINEDGSFKCICKPGFVLAPNGRYCTDVDECQTPGICMNGHCINSEGSFRCDCPPGLAVGMDGRVCVDTHMRSTCYGGIKKGVCVRPFPGAVTKSECCCANPDYGFGEPCQPCPAKNSAEFHGLCSSGVGITVDGRDINECALDPDICANGICENLRGSYRCNCNSGYEPDASGRNCIDIDECLVNRLLCDNGLCRNTPGSYSCTCPPGYVFRTETETCEDINECESNPCVNGACRNNLGSFNCECSPGSKLSSTGLICIDSLKGTCWLNIQDSRCEVNINGATLKSECCATLGAAWGSPCERCELDTACPRGLARIKGVTCEDVNECEVFPGVCPNGRCVNSKGSFHCECPEGLTLDGTGRVCLDIRMEQCYLKWDEDECIHPVPGKFRMDACCCAVGAAWGTECEECPKPGTKEYETLCPRGAGFANRGDVLTGRPFYKDINECKAFPGMCTYGKCRNTIGSFKCRCNSGFALDMEERNCTDIDECRISPDLCGSGICVNTPGSFECECFEGYESGFMMMKNCMDIDECERNPLLCRGGTCVNTEGSFQCDCPLGHELSPSREDCVDINECSLSDNLCRNGKCVNMIGTYQCSCNPGYQATPDRQGCTDIDECMIMNGGCDTQCTNSEGSYECSCSEGYALMPDGRSCADIDECENNPDICDGGQCTNIPGEYRCLCYDGFMASMDMKTCIDVNECDLNSNICMFGECENTKGSFICHCQLGYSVKKGTTGCTDVDECEIGAHNCDMHASCLNIPGSFKCSCREGWIGNGIKCIDLDECSNGTHQCSINAQCVNTPGSYRCACSEGFTGDGFTCSDVDECAENINLCENGQCLNVPGAYRCECEMGFTPASDSRSCQDIDECSFQNICVFGTCNNLPGMFHCICDDGYELDRTGGNCTDIDECADPINCVNGLCVNTPGRYECNCPPDFQLNPTGVGCVDNRVGNCYLKFGPRGDGSLSCNTEIGVGVSRSSCCCSLGKAWGNPCETCPPVNSTEYYTLCPGGEGFRPNPITIILEDIDECQELPGLCQGGNCINTFGSFQCECPQGYYLSEDTRICEDIDECFAHPGVCGPGTCYNTLGNYTCICPPEYMQVNGGHNCMDMRKSFCYRSYNGTTCENELPFNVTKRMCCCTYNVGKAWNKPCEPCPTPGTADFKTICGNIPGFTFDIHTGKAVDIDECKEIPGICANGVCINQIGSFRCECPTGFSYNDLLLVCEDIDECSNGDNLCQRNADCINSPGSYRCECAAGFKLSPNGACVDRNECLEIPNVCSHGLCVDLQGSYQCICHNGFKASQDQTMCMDVDECERHPCGNGTCKNTVGSYNCLCYPGFELTHNNDCLDIDECSSFFGQVCRNGRCFNEIGSFKCLCNEGYELTPDGKNCIDTNECVALPGSCSPGTCQNLEGSFRCICPPGYEVKSENCIDINECDEDPNICLFGSCTNTPGGFQCLCPPGFVLSDNGRRCFDTRQSFCFTNFENGKCSVPKAFNTTKAKCCCSKMPGEGWGDPCELCPKDDEVAFQDLCPYGHGTVPSLHDTREDVNECLESPGICSNGQCINTDGSFRCECPMGYNLDYTGVRCVDTDECSIGNPCGNGTCTNVIGSFECNCNEGFEPGPMMNCEDINECAQNPLLCAFRCMNTFGSYECTCPIGYALREDQKMCKDLDECAEGLHDCESRGMMCKNLIGTFMCICPPGMARRPDGEGCVDENECRTKPGICENGRCVNIIGSYRCECNEGFQSSSSGTECLDNRQGLCFAEVLQTICQMASSSRNLVTKSECCCDGGRGWGHQCELCPLPGTAQYKKICPHGPGYTTDGRDIDECKVMPNLCTNGQCINTMGSFRCFCKVGYTTDISGTSCIDLDECSQSPKPCNYICKNTEGSYQCSCPRGYVLQEDGKTCKDLDECQTKQHNCQFLCVNTLGGFTCKCPPGFTQHHTACIDNNECGSQPSLCGAKGICQNTPGSFSCECQRGFSLDATGLNCEDVDECDGNHRCQHGCQNILGGYRCGCPQGYIQHYQWNQCVDENECSNPNACGSASCYNTLGSYKCACPSGFSFDQFSSACHDVNECSSSKNPCNYGCSNTEGGYLCGCPPGYYRVGQGHCVSGMGFNKGQYLSLDTEVDEENALSPEACYECKINGYSKKDSRQKRSIHEPDPTAVEQISLESVDMDSPVNMKFNLSHLGSKEHILELRPAIQPLNNHIRYVISQGNDDSVFRIHQRNGLSYLHTAKKKLMPGTYTLEITSIPLYKKKELKKLEESNEDDYLLGELGEALRMRLQIQLY

SEQ ID NO: 5160 - protein, 341 aa, Homo sapiens
MGRRRRLCLQLYFLWLGCVVLWAQGTAGQPQPPPPKPPRPQPPPQQVRSATAGSEGGFLAPEYREEGAAVASRVRRRGQQDVLRGPNVCGSRFHSYCCPGWKTLPGGNQCIVPICRNSCGDGFCSRPNMCTCSSGQISSTCGSKSIQQCSVRCMNGGTCADDHCQCQKGYIGTYCGQPVCENGCQNGGRCIGPNRCACVYGFTGPQCERDYRTGPCFTQVNNQMCQGQLTGIVCTKTLCCATIGRAWGHPCEMCPAQPQPCRRGFIPNIRTGACQDVDECQAIPGICQGGNCINTVGSFECRCPAGHKQSETTQKCEVHVDKAQAGARCPCVILPSRLYLR

SEQ ID NO: 5161 - protein, 2912 aa, Homo sapiens; identical to SEQ ID NO: 5159

SEQ ID NO: 5162 - protein, 2911 aa, Homo sapiens
MGRRRRLCLQLYFLWLGCVVLWAQGTAGQPQPPPPKPPRPQPPPQQVRSATAGSEGGFLAPEYREEGAAVASRVRRRGQQDVLRGPNVCGSRFHSYCCPGWKTLPGGNQCIVPICRNSCGDGFCSRPNMCTCSSGQISSTCGSKSIQQCSVRCMNGGTCADDHCQCQKGYIGTYCGQPVCENGCQNGGRCITQPCACVYGFTGPQCERDYRTGPCFTQVNNQMCQGQLTGIVCTKTLCCATIGRAWGHPCEMCPAQPQPCRRGFIPNIRTGACQDVDECQAIPGICQGGNCINTVGSFECRCPAGHKQSETTQKCEDIDECSIIPGICETGECSNTVGSYFCVCPRGYVTSTDGSRCIDQRTGMCFSGLVNGRCAQELPGRMTKMQCCCEPGRCWGIGTIPEACPVRGSEEYRRLCMDGLPMGGIPGSAGSRPGGTGGNGFAPSGNGNGYGPGGTGFIPIPGGNGFSPGVGGAGVGAGGQGPIITGLTILNQTIDICKHHANLCLNGRCIPTVSSYRCECNMGYKQDANGDCIDVDECTSNPCTNGDCVNTPGSYYCKCHAGFQRTPTKQACIDIDECIQNGVLCKNGRCVNTDGSFQCICNAGFELTTDGKNCVDHDECTTTNMCLNGMCINEDGSFKCICKPGFVLAPNGRYCTDVDECQTPGICMNGHCINSEGSFRCDCPPGLAVGMDGRVCVDTHMRSTCYGGIKKGVCVRPFPGAVTKSECCCANPDYGFGEPCQPCPAKNSAEFHGLCSSGVGITVDGRDINECALDPDICANGICENLRGSYRCNCNSGYEPDASGRNCIDIDECLVNRLLCDNGLCRNTPGSYSCTCPPGYVFRTETETCEDINECESNPCVNGACRNNLGSFNCECSPGSKLSSTGLICIDSLKGTCWLNIQDSRCEVNINGATLKSECCATLGAAWGSPCERCELDTACPRGLARIKGVTCEDVNECEVFPGVCPNGRCVNSKGSFHCECPEGLTLDGTGRVCLDIRMEQCYLKWDEDECIHPVPGKFRMDACCCAVGAAWGTECEECPKPGTKEYETLCPRGAGFANRGDVLTGRPFYKDINECKAFPGMCTYGKCRNTIGSFKCRCNSGFALDMEERNCTDIDECRISPDLCGSGICVNTPGSFECECFEGYESGFMMMKNCMDIDECERNPLLCRGGTCVNTEGSFQCDCPLGHELSPSREDCVDINECSLSDNLCRNGKCVNMIGTYQCSCNPGYQATPDRQGCTDIDECMIMNGGCDTQCTNSEGSYECSCSEGYALMPDGRSCADIDECENNPDICDGGQCTNIPGEYRCLCYDGFMASMDMKTCIDVNECDLNSNICMFGECENTKGSFICHCQLGYSVKKGTTGCTDVDECEIGAHNCDMHASCLNIPGSFKCSCREGWIGNGIKCIDLDECSNGTHQCSINAQCVNTPGSYRCACSEGFTGDGFTCSDVDECAENINLCENGQCLNVPGAYRCECEMGFTPASDSRSCQDIDECSFQNICVFGTCNNLPGMFHCICDDGYELDRTGGNCTDIDECADPINCVNGLCVNTPGRYECNCPPDFQLNPTGVGCVDNRVGNCYLKFGPRGDGSLSCNTEIGVGVSRSSCCCSLGKAWGNPCETCPPVNSTEYYTLCPGGEGFRPNPITIILEDIDECQELPGLCQGGNCINTFGSFQCECPQGYYLSEDTRICEDIDECFAHPGVCGPGTCYNTLGNYTCICPPEYMQVNGGHNCMDMRKSFCYRSYNGTTCENELPFNVTKRMCCCTYNVGKAWNKPCEPCPTPGTADFKTICGNIPGFTFDIHTGKAVDIDECKEIPGICANGVCINQIGSFRCECPTGFSYNDLLLVCEDIDECSNGDNLCQRNADCINSPGSYRCECAAGFKLSPNGACVDRNECLEIPNVCSHGLCVDLQGSYQCICHNGFKASQDQTMCMDVDECERHPCGNGTCKNTVGSYNCLCYPGFELTHNNDCLDIDECSSFFGQVCRNGRCFNEIGSFKCLCNEGYELTPDGKNCIDTNECVALPGSCSPGTCQNLEGSFRCICPPGYEVKSENCIDINECDEDPNICLFGSCTNTPGGFQCLCPPGFVLSDNGRRCFDTRQSFCFTNFENGKCSVPKAFNTTKAKCCCSKMPGEGWGDPCELCPKDDEVAFQDLCPYGHGTVPSLHDTREDVNECLESPGICSNGQCINTDGSFRCECPMGYNLDYTGVRCVDTDECSIGNPCGNGTCTNVIGSFECNCNEGFEPGPMMNCEDINECAQNPLLCAFRCMNTFGSYECTCPIGYALREDQKMCKDLDECAEGLHDCESRGMMCKNLIGTFMCICPPGMARRPDGEGCVDENECRTKPGICENGRCVNIIGSYRCECNEGFQSSSSGTECLDNRQGLCFAEVLQTICQMASSSRNLVTKSECCCDGGRGWGHQCELCPLPGTAQYKKICPHGPGYTTDGRDIDECKVMPNLCTNGQCINTMGSFRCFCKVGYTTDISGTSCIDLDECSQSPKPCNYICKNTEGSYQCSCPRGYVLQEDGKTCKDLDECQTKQHNCQFLCVNTLGGFTCKCPPGFTQHHTACIDNNECGSQPSLCGAKGICQNTPGSFSCECQRGFSLDATGLNCEDVDECDGNHRCQHGCQNILGGYRCGCPQGYIQHYQWNQCVDENECSNPNACGSASCYNTLGSYKCACPSGFSFDQFSSACHDVNECSSSKNPCNYGCSNTEGGYLCGCPPGYYRVGQGHCVSGMGFNKGQYLSLDTEVDEENALSPEACYECKINGYSKKDSRQKRSIHEPDPTAVEQISLESVDMDSPVNMKFNLSHLGSKEHILELRPAIQPLNNHIRYVISQGNDDSVFRIHQRNGLSYLHTAKKKLMPGTYTLEITSIPLYKKKELKKLEESNEDDYLLGELGEALRMRLQIQLY

SEQ ID NO: 5163 - protein, 356 aa, Homo sapiens
MMMKNCMDIDECERNPLLCRGGTCVNTEGSFQCDCPLGHELSPSREDCVDINECSLSDNLCRNGKCVNMIGTYQCSCNPGYQATPDRQGCTDIDECMIMNGGCDTQCTNSEGSYECSCSEGYALMPDGRSCADIDECENNPDICDGGQCTNIPGEYRCLCYDGFMASMDMKTCIDVNECDLNSNICMFGECENTKGSFICHCQLGYSVKKGTTGCTDVDECEIGAHNCDMHASCLNIPGSFKCSCREGWIGNGIKCIDLDECSNGTHQCSINAQCVNTPGSYRCACSEGFTGDGFTCSDVDECAENINLCENGQCLNVPGAYRCECEMGFTPASDSRSCQGGSPGFQLIFKLDQPQ

SEQ ID NO: 5164 - protein, 2809 aa, Homo sapiens
MTLEGLYLARGPLARLLLAWSALLCMAGGQGRWDGALEAAGPGRVRRRGSPGILQGPNVCGSRFHAYCCPGWRTFPGRSQCVVPICRRACGEGFCSQPNLCTCADGTLAPSCGVSRGSGCSVSCMNGGTCRGASCLCQKGYTGTVCGQPICDRGCHNGGRCIGPNRCACVYGFMGPQCERDYRTGPCFGQVGPEGCQHQLTGLVCTKALCCATVGRAWGLPCELCPAQPHPCRRGFIPNIHTGACQDVDECQAVPGLCQGGSCVNMVGSFHCRCPVGHRLSDSSAACEDYRAGACFSVLFGGRCAGDLAGHYTRRQCCCDRGRCWAAGPVPELCPPRGSNEFQQLCAQRLPLLPGHPGLFPGLLGFGSNGMGPPLGPARLNPHGSDARGIPSLGPGNSNIGTATLNQTIDICRHFTNLCLNGRCLPTPSSYRCECNVGYTQDVRGECIDVDECTSSPCHHGDCVNIPGTYHCRCYPGFQATPTRQACVDVDECIVSGGLCHLGRCVNTEGSFQCVCNAGFELSPDGKNCVDHNECATSTMCVNGVCLNEDGSFSCLCKPGFLLAPGGHYCMDIDECQTPGICVNGHCTNTEGSFRCQCLGGLAVGTDGRVCVDTHVRSTCYGAIEKGSCARPFPGTVTKSECCCANPDHGFGEPCQLCPAKDSAEFQALCSSGLGITTDGRDINECALDPEVCANGVCENLRGSYRCVCNLGYEAGASGKDCTDVDECALNSLLCDNGWCQNSPGSYSCSCPPGFHFWQDTEICKDVDECLSSPCVSGVCRNLAGSYTCKCGPGSRLDPSGTFCLDSTKGTCWLKIQESRCEVNLQGASLRSECCATLGAAWGSPCERCEIDPACARGFARMTGVTCDDVNECESFPGVCPNGRCVNTAGSFRCECPEGLMLDASGRLCVDVRLEPCFLRWDEDECGVTLPGKYRMDVCCCSIGAVWGVECEACPDPESLEFASLCPRGLGFASRDFLSGRPFYKDVNECKVFPGLCTHGTCRNTVGSFHCACAGGFALDAQERNCTDIDECRISPDLCGQGTCVNTPGSFECECFPGYESGFMLMKNCMDVDECARDPLLCRGGTCTNTDGSYKCQCPPGHELTAKGTACEDIDECSLSDGLCPHGQCVNVIGAFQCSCHAGFQSTPDRQGCVDINECRVQNGGCDVHCINTEGSYRCSCGQGYSLMPDGRACADVDECEENPRVCDQGHCTNMPGGHRCLCYDGFMATPDMRTCVDVDECDLNPHICLHGDCENTKGSFVCHCQLGYMVRKGATGCSDVDECEVGGHNCDSHASCLNIPGSFSCRCLPGWVGDGFECHDLDECVSQEHRCSPRGDCLNVPGSYRCTCRQGFAGDGFFCEDRDECAENVDLCDNGQCLNAPGGYRCECEMGFDPTEDHRACQDVDECAQGNLCAFGSCENLPGMFRCICNGGYELDRGGGNCTDINECADPVNCINGVCINTPGSYLCSCPQDFELNPSGVGCVDTRAGNCFLETHDRGDSGISCSAEIGVGVTRASCCCSLGRAWGNPCELCPMANTTEYRTLCPGGEGFQPNRITVILEDIDECQELPGLCQGGDCVNTFGSFQCECPPGYHLSEHTRICEDIDECSTHSGICGPGTCYNTLGNYTCVCPAEYLQVNGGNNCMDMRKSVCFRHYNGTCQNELAFNVTRKMCCCSYNIGQAWNRPCEACPTPISPDYQILCGNQAPGFLTDIHTGKPLDIDECGEIPAICANGICINQIGSFRCECPAGFNYNSILLACEDVDECGSRESPCQQNADCINIPGSYRCKCTRGYKLSPGGACVGRNECREIPNVCSHGDCMDTEGSYMCLCHRGFQASADQTLCMDIDECDRQPCGNGTCKNIIGSYNCLCFPGFVVTHNGDCVDFDECTTLVGQVCRFGHCLNTAGSFHCLCQDGFELTADGKNCVDTNECLSLAGTCLPGTCQNLEGSFRCICPPGFQVQSDHCIDIDECSEEPNLCLFGTCTNSPGSFQCLCPPGFVLSDNGHRCFDTRQSFCFTRFEAGKCSVPKAFNTTKTRCCCSKRPGEGWGDPCELCPQEGSAAFQELCPFGHGAVPGPDDSREDVNECAENPGVCTNGVCVNTDGSFRCECPFGYSLDFTGINCVDTDECSVGHPCGQGTCTNVIGGFECACADGFEPGLMMTCEDIDECSLNPLLCAFRCHNTEGSYLCTCPAGYTLREDGAMCRDVDECADGQQDCHARGMECKNLIGTFACVCPPGMRPLPGSGEGCTDDNECHAQPDLCVNGRCVNTAGSFRCDCDEGFQPSPTLTECHDIRQGPCFAEVLQTMCRSLSSSSEAVTRAECCCGGGRGWGPRCELCPLPGTSAYRKLCPHGSGYTAEGRDVDECRMLAHLCAHGECINSLGSFRCHCQAGYTPDATATTCLDMDECSQVPKPCTFLCKNTKGSFLCSCPRGYLLEEDGRTCKDLDECTSRQHNCQFLCVNTVGAFTCRCPPGFTQHHQACFDNDECSAQPGPCGAHGHCHNTPGSFRCECHQGFTLVSSGHGCEDVNECDGPHRCQHGCQNQLGGYRCSCPQGFTQHSQWAQCVDENECALSPPTCGSASCRNTLGGFRCVCPSGFDFDQALGGCQEVDECAGRRGPCSYSCANTPGGFLCGCPQGYFRAGQGHCVSGLGFSPGPQDTPDKEELLSSEACYECKINGLSPRDRPRRSAHRDHQVNLATLDSEALLTLGLNLSHLGRAERILELRPALEGLEGRIRYVIVRGNEQGFFRMHHLRGVSSLQLGRRRPGPGTYRLEVVSHMAGPWGVQPEGQPGPWGQALRLKVQLQLL

SEQ ID NO: 5165 - protein, 2809 aa, Homo sapiens; identical to SEQ ID NO: 5164

SEQ ID NO: 5166 - protein, 2809 aa, Homo sapiens; identical to SEQ ID NO: 5164

SEQ ID NO: 5167 - protein, 171 aa, Homo sapiens
  VARIANT 1: note = misc_feature - Xaa can be any naturally occurring amino acid
XFTRFEAGKCSVPKAFNTTKTRCCCSKRPGEGWGDPCELCPQEGSDVNECAENPGVCTNGVCVNTDGSFRCECPFGYSLDFTGINCVDTDECSVGHPCGQGTCTNVIGGFECACADGFEPGLMMTCEDIDECSLNPLLCAFRCHNTEGSYLCTCPAGYTLREDGAMCRDVD

SEQ ID NO: 5168 - protein, 188 aa, Homo sapiens
  VARIANT 1: note = misc_feature - Xaa can be any naturally occurring amino acid
XYQILCGNQAPGFLTDIHTGKPLDVDECGSRESPCQQNADCINIPGSYRCKCTRGYKLSPGGACVGRNECREIPNVCSHGDCMDTEGSYMCLCHRGFQASADQTLCMDIDECDRQPCGNGTCKNIIGSYNCLCFPGFVVTHNGDCVDFDECTTLVGQVCRFGHCLNTAGSFHCLCQDGFELTADGKNC

SEQ ID NO: 5169 - protein, 627 aa, Homo sapiens
MCVPRSGLILSCICLYCGVLLPVLLPNLPFLTCLSMSTLESVTYLPEKGLYCQRLPSSRTHGGTESLKGKNTENMGFYGTLKMIFYKMKRKLDHGSEVRSFSLGKKPCKVSEYTSTTGLVPCSATPTTFGDLRAANGQGQQRRRITSVQPPTGLQEWLKMFQSWSGPEKLLALDELIDSCEPTQVKHMMQVIEPQFQRDFISLLPKELALYVLSFLEPKDLLQAAQTCRYWRILAEDNLLWREKCKEEGIDEPLHIKRRKVIKPGFIHSPWKSAYIRQHRIDTNWRRGELKSPKVLKGHDDHVITCLQFCGNRIVSGSDDNTLKVWSAVTGKCLRTLVGHTGGVWSSQMRDNIIISGSTDRTLKVWNAETGECIHTLYGHTSTVRCMHLHEKRVVSGSRDATLRVWDIETGQCLHVLMGHVAAVRCVQYDGRRVVSGAYDFMVKVWDPETETCLHTLQGHTNRVYSLQFDGIHVVSGSLDTSIRVWDVETGNCIHTLTGHQSLTSGMELKDNILVSGNADSTVKIWDIKTGQCLQTLQGPNKHQSAVTCLQFNKNFVITSSDDGTVKLWDLKTGEFIRNLVTLESGGSGGVVWRIRASNTKLVCAVGSRNGTEETKLLVLDFDVDMK

SEQ ID NO: 5170 - protein, 627 aa, Homo sapiens; identical to SEQ ID NO: 5169

SEQ ID NO: 5171 - protein, 70 aa, Homo sapiens
MNQELLSVGSKRRRTGGSLRGNPSSSQVDEEQMNRVVEEEQQQQLRQQEEEHTARNGEVVGVEPRPGGQN

SEQ ID NO: 5172 - protein, 70 aa, Homo sapiens; identical to SEQ ID NO: 5171

SEQ ID NO: 5173 - protein, 70 aa, Homo sapiens; identical to SEQ ID NO: 5171

SEQ ID NO: 5174 - protein, 158 aa, Homo sapiens
MNQELLSVGSKRRRTGGSLRGNPSSSQVDEEQMNRVVEEEQQQQLRQQEEEHTARNGEVVGVEPRPGGQNDSQQGQLEENNNRFISVDEDSSGNQEEQEEDEEHAGEQDEEDEEEEEMDQESDDFDQSDDSSREDEHTHTNSVTNSSSIVDLPVHQLS

SEQ ID NO: 5175 - protein, 707 aa, Homo sapiens
MNQELLSVGSKRRRTGGSLRGNPSSSQVDEEQMNRVVEEEQQQQLRQQEEEHTARNGEVVGVEPRPGGQNDSQQGQLEENNNRFISVDEDSSGNQEEQEEDEEHAGEQDEEDEEEEEMDQESDDFDQSDDSSREDEHTHTNSVTNSSSIVDLPVHQLSSPFYTKTTKMKRKLDHGSEVRSFSLGKKPCKVSEYTSTTGLVPCSATPTTFGDLRAANGQGQQRRRITSVQPPTGLQEWLKMFQSWSGPEKLLALDELIDSCEPTQVKHMMQVIEPQFQRDFISLLPKELALYVLSFLEPKDLLQAAQTCRYWRILAEDNLLWREKCKEEGIDEPLHIKRRKVIKPGFIHSPWKSAYIRQHRIDTNWRRGELKSPKVLKGHDDHVITCLQFCGNRIVSGSDDNTLKVWSAVTGKCLRTLVGHTGGVWSSQMRDNIIISGSTDRTLKVWNAETGECIHTLYGHTSTVRCMHLHEKRVVSGSRDATLRVWDIETGQCLHVLMGHVAAVRCVQYDGRRVVSGAYDFMVKVWDPETETCLHTLQGHTNRVYSLQFDGIHVVSGSLDTSIRVWDVETGNCIHTLTGHQSLTSGMELKDNILVSGNADSTVKIWDIKTGQCLQTLQGPNKHQSAVTCLQFNKNFVITSSDDGTVKLWDLKTGEFIRNLVTLESGGSGGVVWRIRASNTKLVCAVGSRNGTEETKLLVLDFDVDMK

SEQ ID NO: 5176 - protein, 707 aa, Homo sapiens; identical to SEQ ID NO: 5175

SEQ ID NO: 5177 - protein, 707 aa, Homo sapiens; identical to SEQ ID NO: 5175

SEQ ID NO: 5178 - protein, 176 aa, Homo sapiens
MNQELLSVGSKRRRTGGSLRGNPSSSQVDEEQMNRVVEEEQQQQLRQQEEEHTARNGEVVGVEPRPGGQNDSQQGQLEENNNRFISVDEDSSGNQEEQEEDEEHAGEQDEEDEEEEEMDQESDDFDQSDDSSREDEHTHTNSVTNSSSIVDLPVHQLSSPFYTKTTKVSIFNILLT

SEQ ID NO: 5179 - protein, 589 aa, Homo sapiens
MSKPGKPTLNHGLVPVDLKSAKEPLPHQTVMKIFSISIIAQGLPFCRRRMKRKLDHGSEVRSFSLGKKPCKVSEYTSTTGLVPCSATPTTFGDLRAANGQGQQRRRITSVQPPTGLQEWLKMFQSWSGPEKLLALDELIDSCEPTQVKHMMQVIEPQFQRDFISLLPKELALYVLSFLEPKDLLQAAQTCRYWRILAEDNLLWREKCKEEGIDEPLHIKRRKVIKPGFIHSPWKSAYIRQHRIDTNWRRGELKSPKVLKGHDDHVITCLQFCGNRIVSGSDDNTLKVWSAVTGKCLRTLVGHTGGVWSSQMRDNIIISGSTDRTLKVWNAETGECIHTLYGHTSTVRCMHLHEKRVVSGSRDATLRVWDIETGQCLHVLMGHVAAVRCVQYDGRRVVSGAYDFMVKVWDPETETCLHTLQGHTNRVYSLQFDGIHVVSGSLDTSIRVWDVETGNCIHTLTGHQSLTSGMELKDNILVSGNADSTVKIWDIKTGQCLQTLQGPNKHQSAVTCLQFNKNFVITSSDDGTVKLWDLKTGEFIRNLVTLESGGSGGVVWRIRASNTKLVCAVGSRNGTEETKLLVLDFDVDMK

SEQ ID NO: 5180 - protein, 179 aa, Homo sapiens
MDPKQTTLLCLGDFPMPFISAKSSPVIPLDGSVKIQCQAIREAYLTQLMIIKNSTYREIGRRLKFWNETDPEFVIDHMDANKAGRYQCQYRIGHYRFRYSDTLELVVTDSIHQDYTTQNLIRMAVAGLVLVALLAILVENWHSHTALNKEASADVAEPSWSQQMCQPGLTFARTPSVCK

SEQ ID NO: 5181 - protein, 253 aa, Homo sapiens
MDPKQTTLLCLGDFPMPFISAKSSPVIPLDGSVKIQCQAIREAYLTQLMIIKNSTYREIGRRLKFWNETDPEFVIDHMDANKAGRYQCQYRIGHYRFRYSDTLELVVTGLYGKPFLSADRGLVLMPGENISLTCSSAHIPFDRFSLAKEGELSLPQHQSGEHPANFSLGPVDLNVSGIYRCYDSIHQDYTTQNLIRMAVAGLVLVALLAILVENWHSHTALNKEASADVAEPSWSQQMCQPGLTFARTPSVCK

SEQ ID NO: 5182 - protein, 275 aa, Homo sapiens
MDPKQTTLLCLGDFPMPFISAKSSPVIPLDGSVKIQCQAIREAYLTQLMIIKNSTYREIGRRLKFWNETDPEFVIDHMDANKAGRYQCQYRIGHYRFRYSDTLELVVTGLYGKPFLSADRGLVLMPGENISLTCSSAHIPFDRFSLAKEGELSLPQHQSGEHPANFSLGPVDLNVSGIYRCYGWYNRSPYLWSFPSNALELVVTDSIHQDYTTQNLIRMAVAGLVLVALLAILVENWHSHTALNKEASADVAEPSWSQQMCQPGLTFARTPSVCK

SEQ ID NO: 5183 - protein, 227 aa, Homo sapiens
MDPKQTTLLCLGDFPMPFISAKSSPVIPLDGSVKIQCQAIREAYLTQLMIIKNSTYREIGRRLKFWNETDPEFVIDHMDANKAGRYQCQYRIGHYRFRYSDTLELVVTGLYGKPFLSADRGLVLMPGENISLTCSSAHIPFDRFSLAKEGELSLPQHQSGEHPANFSLGPVDLNVSGIYRCYGWYNRSPYLWSFPSNALELVVTGRYRPVQPCVWVGCPGPCHRAGI

SEQ ID NO: 5184 - protein, 209 aa, Homo sapiens
MDPKQTTLLCLGDFPMPFISAKSSPVIPLDGSVKIQCQAIREAYLTQLMIIKNSTYREIGRRLKFWNETDPEFVIDHMDANKAGRYQCQYRIGHYRFRYSDTLELVVTGLYGKPFLSADRGLVLMPGENISLTCSSAHIPFDRFSLAKEGELSLPQHQSGEHPANFSLGPVDLNVSGIYRLHPPRLHDAELDPHGRGRTGPRGSLGHTG

SEQ ID NO: 5185 - protein, 178 aa, Homo sapiens
MDPKQTTLLCLGLYGKPFLSADRGLVLMPGENISLTCSSAHIPFDRFSLAKEGELSLPQHQSGEHPANFSLGPVDLNVSGIYRCYGWYNRSPYLWSFPSNALELVVTDSIHQDYTTQNLIRMAVAGLVLVALLAILVENWHSHTALNKEASADVAEPSWSQQMCQPGLTFARTPSVCK

SEQ ID NO: 5186 - protein, 191 aa, Homo sapiens
MDPKQTTLLCLVLCLGQRIQAQEGDFPMPFISAKSSPVIPLDGSVKIQCQAIREAYLTQLMIIKNSTYREIGRRLKFWNETDPEFVIDHMDANKAGRYQCQYRIGHYRFRYSDTLELVVTDSIHQDYTTQNLIRMAVAGLVLVALLAILVENWHSHTALNKEASADVAEPSWSQQMCQPGLTFARTPSVCK

SEQ ID NO: 5187 - protein, 265 aa, Homo sapiens
MDPKQTTLLCLVLCLGQRIQAQEGDFPMPFISAKSSPVIPLDGSVKIQCQAIREAYLTQLMIIKNSTYREIGRRLKFWNETDPEFVIDHMDANKAGRYQCQYRIGHYRFRYSDTLELVVTGLYGKPFLSADRGLVLMPGENISLTCSSAHIPFDRFSLAKEGELSLPQHQSGEHPANFSLGPVDLNVSGIYRCYDSIHQDYTTQNLIRMAVAGLVLVALLAILVENWHSHTALNKEASADVAEPSWSQQMCQPGLTFARTPSVCK

SEQ ID NO: 5188 - protein, 287 aa, Homo sapiens
MDPKQTTLLCLVLCLGQRIQAQEGDFPMPFISAKSSPVIPLDGSVKIQCQAIREAYLTQLMIIKNSTYREIGRRLKFWNETDPEFVIDHMDANKAGRYQCQYRIGHYRFRYSDTLELVVTGLYGKPFLSADRGLVLMPGENISLTCSSAHIPFDRFSLAKEGELSLPQHQSGEHPANFSLGPVDLNVSGIYRCYGWYNRSPYLWSFPSNALELVVTDSIHQDYTTQNLIRMAVAGLVLVALLAILVENWHSHTALNKEASADVAEPSWSQQMCQPGLTFARTPSVCK

SEQ ID NO: 5189 - protein, 239 aa, Homo sapiens
MDPKQTTLLCLVLCLGQRIQAQEGDFPMPFISAKSSPVIPLDGSVKIQCQAIREAYLTQLMIIKNSTYREIGRRLKFWNETDPEFVIDHMDANKAGRYQCQYRIGHYRFRYSDTLELVVTGLYGKPFLSADRGLVLMPGENISLTCSSAHIPFDRFSLAKEGELSLPQHQSGEHPANFSLGPVDLNVSGIYRCYGWYNRSPYLWSFPSNALELVVTGRYRPVQPCVWVGCPGPCHRAGI

SEQ ID NO: 5190 - protein, 1642 aa, Homo sapiens
CPPHSHYEACSYGCPLSCGDLPVPEGCESACREGCVCDAGFVLSGDTCVPVGQCGCLHDDRYYPLGQTFYPGPGCDSLCRCREGGEVSCEPSSCGPHETCRPSGGSLGCVAVGSTTCQASGDPHYTTFDGHRFDFMGTCVYVLAQTCGTRPGLHRFAVLQENVAWGNGRVSVTRVITVQVANFTLRLEQRQWKVTVNGVDMKLPVVLANGQIRASQHGSDVVIETDFGLRVAYDLVYYVRVTVPGNYYQLMCGLCGNYNGDPKDDFQKPNGSQAGNANEFGNSWEEVVSDSPCLPPPTCPPGSEGCIPSEECPPELEKKYQKEEFCGLLSSPTGPLSSCHKLVDPQGPLKDCIFDLCLGGGNLSILCSNIHAYVSACQVAGGHVEPWRNETFCPMECPQNSHYELCADTCSLGCSALSAPLQCPDGCAEGCQCDSGFLYNGQACVPIQQCGCYHNGAYYEPEQTVLIDNCRQQCTCHAGKVVVCQEHSCKPGQVCQPSGGILSCVTKDPCHGVTCRPQETCKEQGGQGVCLPNYEATCWLWGDPHYHSFDGRKFDFQGTCNYVLATTGCPGVSTQGLTPFTVTTKNQNRGNPAVSYVRVVTVAALGTNISIHKDEIGKVRVNGVLTALPVSVADGRISVTQGASKALLVADFGLQVSYDWNWRVDVTLPSSYHGAVCGLCGNMDRNPNNDQVFPNGTLAPSIPIWGGSWRAPGWDPLCWDECRGSCPTCPEDRLEQYEGPGFCGPLAPGTGGPFTTCHAHVPPESFFKGCVLDVCMGGGDRDILCKALASYVAACQAAGVVIEDWRAQVGCEITCPENSHYEVCGPPCPASCPSPAPLTTPAVCEGPCVEGCQCDAGFVLSADRCVPLNNGCGCWANGTYHEAGSEFWADGTCSQWCRCGPGGGSLVCTPASCGLGEVCGLLPSGQHGCQPVSTAECQAWGDPHYVTLDGHRFDFQGTCEYLLSAPCHGPPLGAENFTVTVANEHRGSQAVSYTRSVTLQIYNHSLTLSARWPRKLQVDGVFVTLPFQLDSLLHAHLSGADVVVTTTSGLSLAFDGDSFVRLRVPAAYAGSLCGLCGNYNQDPADDLKAVGGKPAGWQVGGAQGCGECVSKPCPSPCTPEQQESFGGPDACGVISATDGPLAPCHGLVPPAQYFQGCLLDACQVQGHPGGLCPAVATYVAACQAAGAQLREWRRPDFCPFQCPAHSHYELCGDSCPGSCPSLSAPEGCESACREGCVCDAGFVLSGDTCVPVGQCGCLHDDRYYPLGQTFYPGPGCDSLCRCREGGEVSCEPSSCGPHETCRPSGGSLGCVAVGSTTCQASGDPHYTTFDGHRFDFMGTCVYVLAQTCGTRPGLHRFAVLQENVAWGNGRVSVTRVITVQVANFTLRLEQRQWKVTVNGVDMKLPVVLANGQIRASQHGSDVVIETDFGLRVAYDLVYYVRVTVPGNYYQLMCGLCGNYNGDPKDDFQKPNGSQAGNANEFGNSWEEVVPDSPCLPPPTCPPGSAGCIPSDKCPPELEKKYQKEEFCGLLSSPTGPLSSCHKLVDPQGPLKDCIFDLCLGGGNLSILCSNIHAYVSACQAAGGHVEPWRNETFCPMECPQNSHYELCADTCSLGCSALSAPLQCPDGCAEGCQCDSGFLYNG

SEQ ID NO: 5191 - protein, 1132 aa, Homo sapiens
MGALWSWWILWAGATLLWGLTQEASVDLKNTGREEFLTAFLQNYQLAYSKAYPRLLISSLSESPASVSILSQADNTSKKVTVRPGESVMVNISAKAEMIGSKIFQHAVVIHSDYAISVQALNAKPDTAELTLLRPIQALGTEYFVLTPPGTSARNVKEFAVVAGAAGASVSVTLKGSVTFNGKFYPAGDVLRVTLQPYNVAQLQSSVDLSGSKVTASSPVAVLSGHSCAQKHTTCNHVVEQLLPTSAWGTHYVVPTLASQSRYDLAFVVASQATKLTYNHGGITGSRGLQAGDVVEFEVRPSWPLYLSANVGIQVLLFGTGAIRNEVTYDPYLVLIPDVAAYCPAYVVKSVPGCEGVALVVAQTKAISGLTIDGHAVGAKLTWEAVPGSEFSYAEVELGTADMIHTAEATTNLGLLTFGLAKAIGYATAADCGRTVLSPVEPSCEGMQCAAGQRCQVVGGKAGCVAESTAVCRAQGDPHYTTFDGRRYDMMGTCSYTMVELCSEDDTLPAFSVEAKNEHRGSRRVSYVGLVTVRAYSHSVSLTRGEVGFVLVDNQRSRLPVSLSEGRLRVYQSGPRAVVELVFGLVVTYDWDCQLALSLPARFQDQVCGLCGNYNGDPADDFLTPDGALAPDAVEFASSWKLDDGDYLCEDGCQNNCPACTPGQAQHYEGDRLCGMLTKLDGPFAVCHDTLDPRPFLEQCVYDLCVVGGERLSLCRGLSAYAQACLELGISVGDWRSPANCPLSCPANSRYELCGPACPTSCNGAAAPSNCSGRPCVEGCVCLPGFVASGGACVPASSCGCTFQGLQLAPGQEVWADELCQRRCTCNGATHQVTCRDKQSCPAGERCSVQNGLLGCYPDRFGTCQGSGDPHYVSFDGRRFDFMGTCTYLLVGSCGQNAALPAFRVLVENEHRGSQTVSYTRAVRVEARGVKVAVRREYPGQVLVDDVLQYLPFQAADGQVQVFRQGRDAVVRTDFGLTVTYDWNARVTAKVPSSYAEALCGLCGNFNGDPADDLALRGGGQAANALAFGNSWQEETRPGCGATEPGDCPKLDSLVAQQLQSKNECGILADPKGPFRECHSKLDPQGAVRDCVYDRCLLPGQSGPLCDALATYAAACQAAGATVHPWRSEELC

SEQ ID NO: 5192 - protein, 3072 aa, Homo sapiens
  VARIANT 1: note = misc_feature - Xaa can be any naturally occurring amino acid
XLSCPPHSHYEACSYGCPLSCGDLPVPEGCESACREGCVCDAGFVLSGDTCVPVGQCGCLHDDRYYPLGQTFYPGPGCDSLCRCREGGEVSCEPSSCGPHETCRPSGGSLGCVAVGSTTCQASGDPHYTTFDGHRFDFMGTCVYVLAQTCGTRPGLHRFAVLQENVAWGNGRVSVTRVITVQVANFTLRLEQRQWKVTVNGVDMKLPVVLANGQIRASQHGSDVVIETDFGLRVAYDLVYYVRVTVPGNYYQLMCGLCGNYNGDPKDDFQKPNGSQAGNANEFGNSWEEVVSDSPCLPPPTCPPGSEGCIPSEECPPELEKKYQKEEFCGLLSSPTGPLSSCHKLVDPQGPLKDCIFDLCLGGGNLSILCSNIHAYVSACQVAGGHVEPWRNETFCPMECPQNSHYELCADTCSLGCSALSAPLQCPDGCAEGCQCDSGFLYNGQACVPIQQCGCYHNGAYYEPEQTVLIDNCRQQCTCHAGKVVVCQEHSCKPGQVCQPSGGILSCVTKDPCHGVTCRPQETCKEQGGQGVCLPNYEATCWLWGDPHYHSFDGRKFDFQGTCNYVLATTGCPGVSTQGLTPFTVTTKNQNRGNPAVSYVRVVTVAALGTNISIHKDEIGKVRVNGVLTALPVSVADGRISVTQGASKALLVADFGLQVSYDWNWRVDVTLPSSYHGAVCGLCGNMDRNPNNDQVFPNGTLAPSIPIWGGSWRAPGWDPLCWDECRGSCPTCPEDRLEQYEGPGFCGPLAPGTGGPFTTCHAHVPPESFFKGCVLDVCMGGGDRDILCKALASYVAACQAAGVVIEDWRAQVGCEITCPENSHYEVCGPPCPASCPSPAPLTTPAVCEGPCVEGCQCDAGFVLSADRCVPLNNGCGCWANGTYHEAGSEFWADGTCSQWCRCGPGGGSLVCTPASCGLGEVCGLLPSGQHGCQPVSTAECQAWGDPHYVTLDGHRFDFQGTCEYLLSAPCHGPPLGAENFTVTVANEHRGSQAVSYTRSVTLQIYNHSLTLSARWPRKLQVDGVFVTLPFQLDSLLHAHLSGADVVVTTTSGLSLAFDGDSFVRLRVPAAYAGSLCGLCGNYNQDPADDLKAVGGKPAGWQVGGAQGCGECVSKPCPSPCTPEQQESFGGPDACGVISATDGPLAPCHGLVPPAQYFQGCLLDACQVQGHPGGLCPAVATYVAACQAAGAQLREWRRPDFCPFQCPAHSHYELCGDSCPGSCPSLSAPEGCESACREGCVCDAGFVLSGDTCVPVGQCGCLHDDRYYPLGQTFYPGPGCDSLCRCREGGEVSCEPSSCGPHETCRPSGGSLGCVAVGSTTCQASGDPHYTTFDGHRFDFMGTCVYVLAQTCGTRPGLHRFAVLQENVAWGNGRVSVTRVITVQVANFTLRLEQRQWKVTVNGVDMKLPVVLANGQIRASQHGSDVVIETDFGLRVAYDLVYYVRVTVPGNYYQLMCGLCGNYNGDPKDDFQKPNGSQAGNANEFGNSWEEVVPDSPCLPPPTCPPGSAGCIPSDKCPPELEKKYQKEEFCGLLSSPTGPLSSCHKLVDPQGPLKDCIFDLCLGGGNLSILCSNIHAYVSACQAAGGHVEPWRNETFCPMECPQNSHYELCADTCSLGCSALSAPLQCPDGCAEGCQCDSGFLYNGQACVPIQQCGCYHNGVYYEPEQTVLIDNCRQQCTCHVGKVVVCQEHSCKPGQVCQPSGGILSCVTKDPCHGVTCRPQETCKEQGGQGVCLPNYEATCWLWGDPHYHSFDGRKFDFQGTCNYVLATTGCPGVSTQGLTPFTVTTKNQNRGNPAVSYVRVVTVAALGTNISIHKDEIGKVRVNGVLTALPVSVADGRISVAQGASKALLVADFGLQVSYDWNWRVDVTLPSSYHGAVCGLCGNMDRNPNNDQVFPNGTLAPSIPIWGGSWRAPGWDPLCWDECRGSCPTCPEDRLEQYEGPGFCGPLSSGTGGPFTTCHAHVPPESFFKGCVLDVCMGGGDRDILCKALASYVAACQAAGVVIEDWRAQVGCEITCPENSHYEVCGPPCPASCPSPAPLTTPAVCEGPCVEGCQCDAGFVLSADRCVPLNNGCGCWANGTYHEAGSEFWADGTCSQWCRCGPGGGSLVCTPASCGLGEVCGLLPSGQHGCQPVSTAECQAWGDPHYVTLDGHRFDFQGTCEYLLSAPCHGPPLGAENFTVTVANEHRGSQAVSYTRSVTLQIYNHSLTLSARWPRKLQVDGVFVALPFQLDSLLHAHLSGADVVVTTTSGLSLAFDGDSFVRLRVPAAYAASLCGLCGNYNQDPADDLKAVGGKPAGWQVGGAQGCGECVSKPCPSPCTPEQQESFGGPDACGVISATDGPLAPCHGLVPPAQYFQGCLLDACQVQGHPGGLCPAVATYVAACQAAGAQLGEWRRPDFCPLQCPAHSHYELCGDSCPVSCPSLSAPEGCESACREGCVCDAGFVLSGDTCVPVGQCGCLHDGRYYPLGEVFYPGPECERRCECGPGGHVTCQEGAACGPHEECRLEDGVQACHATGCGRCLANGGIHYITLDGRVYDLHGSCSYVLAQVCHPKPGDEDFSIVLEKNAAGDLQRLLVTVAGQVVSLAQGQQVTVDGEAVALPVAVGRVRVTAEGRNMVLQTTKGLRLLFDGDAHLLMSIPSPFRGRLCGLCGNFNGNWSDDFVLPNGSAASSVETFGAAWRAPGSSKGCGEGCGPQGCPVCLAEETAPYESNEACGQLRNPQGPFATCQAVLSPSEYFRQCVYDLCAQKGDKAFLCRSLAAYTAACQAAGVAVKPWRTDSFCPLHCPAHSHYSICTRTCQGSCAALSGLTGCTTRCFEGCECDDRFLLSQGVCIPVQDCGCTHNGRYLPVNSSLLTSDCSERCSCSSSSGLTCQAAGCPPGRVCEVKAEARNCWATRGLCVLSVGANLTTFDGARGATTSPGVYELSSRCPGLQNTIPWYRVVAEVQICHGKTEAVGQVHIFFQDGMVTLTPNKGVWVNGLRVDLPAEKLASVSVSRTPDGSLLVRQKAGVQVWLGANGKVAVIVSNDHAGKLCGACGNFDGDQTNDWHDSQEKPAMEKWRAQDFSPCYG

SEQ ID NO: 5193 - protein, 250 aa, Homo sapiens
MGKWPPWVSVFQEETITLHCEVLHLPGSSSTQWFLNGTATQTSTPSYRITSASVNDSGEYRCQRGLSGRSDPIQLEIHRGWLLLQVSSRVFMEGEPLALRCHAWKDKLVYNVLYYRNGKAFKFFHWNSNLTILKTNISHNGTYHCSGMGKHRYTSAGISQYTVKGLQLPTPVWFHVLFYLAVGIMFLVNTVLWVTIRKELKRKKKWNLEISLDSGHEKKVISSLQEDRHLEEELKCQEQKEEQLQEGVHR

SEQ ID NO: 5194 - protein, 188 aa, Homo sapiens
MWFLTTLLLWGWLLLQVSSRVFMEGEPLALRCHAWKDKLVYNVLYYRNGKAFKFFHWNSNLTILKTNISHNGTYHCSGMGKHRYTSAGISQYTVKGLQLPTPVWFHVLFYLAVGIMFLVNTVLWVTIRKELKRKKKWNLEISLDSGHEKKVISSLQEDRHLEEELKCQEQKEEQLQEGVHRKEPQGAT

SEQ ID NO: 5195 - protein, 224 aa, Homo sapiens
MWFLTTLLLWVPVDGQVDTTKAVITLQPPWVSVFQEETITLHCEVLHLPGSSSTQWFLNGTATQTSTPSYRITSASVNDSGEYRCQRGLSGRSDPIQLEIHRGWLLLQVSSRVFMEGEPLALRCHAWKDKLVYNVLYYRNGKAFKFFHWNSNLTILKTNISHNGTYHCSGMGKHRYTSAGISQYTVKELFPAPVLNASVTSPLLEGNLVTLSCETKLLLQRPGL

SEQ ID NO: 5196 - protein, 224 aa, Homo sapiens; identical to SEQ ID NO: 5195

SEQ ID NO: 5197 - protein, 280 aa, Homo sapiens
MWFLTTLLLWVPVDGQVDTTKAVITLQPPWVSVFQEETITLHCEVLHLPGSSSTQWFLNGTATQTSTPSYRITSASVNDSGEYRCQRGLSGRSDPIQLEIHRGWLLLQVSSRVFMEGEPLALRCHAWKDKLVYNVLYYRNGKAFKFFHWNSNLTILKTNISHNGTYHCSGMGKHRYTSAGISQYTVKGLQLPTPVWFHVLFYLAVGIMFLVNTVLWVTIRKELKRKKKWNLEISLDSGHEKKVISSLQEDRHLEEELKCQEQKEEQLQEGVHRKEPQGAT

SEQ ID NO: 5198 - protein, 225 aa, Homo sapiens
MWFLTTLLLWVPVDGQVVDTTKAVITLQPPWVSVFQEETITLHCEVLHLPGSSSTQWFLNGTATQTSTPSYRITSASVNDSGEYRCQRGLSGRSDPIQLEIHRGWLLLQVSSRVFMEGEPLALRCHAWKDKLVYNVLYYRNGKAFKFFHWNSNLTILKTNISHNGTYHCSGMGKHRYTSAGISQYTVKELFPAPVLNASVTSPLLEGNLVTLSCETKLLLQRPGL

SEQ ID NO: 5199 - protein, 359 aa, Homo sapiens
MAEGTLWQILCVSSDAQPQTFEGVKGADPPTLPPGSFLPGPVLWWGSLARLQTEKSDEVSRKGNWWVTEMGGGAGERLFTSSCLVGLVPLGLRISLVTCPLQCGIMWQLLLPTALLLLVSAGMRTEDLPKAVVFLEPQWYRVLEKDSVTLKCQGAYSPEDNSTQWFHNESLISSQASSYFIDAATVDDSGEYRCQTNLSTLSDPVQLEVHIGWLLLQAPRWVFKEEDPIHLRCHSWKNTALHKVTYLQNGKGRKYFHHNSDFYIPKATLKDSGSYFCRGLFGSKNVSSETVNITITQGLAVSTISSFFPPGYQVSFCLVMVLLFAVDTGLYFSVKTNIRSSTRDWKDHKFKWRKDPQDK

SEQ ID NO: 5200 - protein, 290 aa, Homo sapiens
MGGGAGERLFTSSCLVGLVPLGLRISLVTCPLQCGIMWQLLLPTALLLLVSAGMRTEDLPKAVVFLEPQWYRVLEKDSVTLKCQGAYSPEDNSTQWFHNESLISSQASSYFIDAATVDDSGEYRCQTNLSTLSDPVQLEVHIGWLLLQAPRWVFKEEDPIHLRCHSWKNTALHKVTYLQNGKGRKYFHHNSDFYIPKATLKDSGSYFCRGLFGSKNVSSETVNITITQGLAVSTISSFFPPGYQVSFCLVMVLLFAVDTGLYFSVKTNIRSSTRDWKDHKFKWRKDPQDK

SEQ ID NO: 5201 - protein, 105 aa, Homo sapiens
MWQLLLPTALLLLVSAGMRTDLPKAVVFLEPQWYRVLEKDSVTLKCQGAYSPEDNSTQWFHNESLISSQASSYFIDAATVDDSGEYRCQTNLSTLSDPVQLEVHI

SEQ ID NO: 5202 - protein, 254 aa, Homo sapiens
MWQLLLPTALLLLVSAGMRTEDLPKAVVFLEPQWYRVLEKDSVTLKCQGAYSPEDNSTQWFHNESLISSQASSYFIDAATVDDSGEYRCQTNLSTLSDPVQLEVHIGWLLLQAPRWVFKEEDPIHLRCHSWKNTALHKVTYLQNGKGRKYFHHNSDFYIPKATLKDSGSYFCRGLFGSKNVSSETVNITITQGLAVSTISSFFPPGYQVSFCLVMVLLFAVDTGLYFSVKTNIRSSTRDWKDHKFKWRKDPQDK

SEQ ID NO: 5203 - protein, 254 aa, Homo sapiens; identical to SEQ ID NO: 5202

SEQ ID NO: 5204 - protein, 254 aa, Homo sapiens; identical to SEQ ID NO: 5202

SEQ ID NO: 5205 - protein, 307 aa, Homo sapiens
QTEKSDEVSRKGNWWVTEMGGGAGERLFTSSCLVGLVPLGLRISLVTCPLQCGIMWQLLLPTALLLLVSAGMRTDLPKAVVFLEPQWYRVLEKDSVTLKCQGAYSPEDNSTQWFHNESLISSQASSYFIDAATVDDSGEYRCQTNLSTLSDPVQLEVHIGWLLLQAPRWVFKEEDPIHLRCHSWKNTALHKVTYLQNGKGRKYFHHNSDFYIPKATLKDSGSYFCRGLFGSKNVSSETVNITITQGLAVSTISSFFPPGYQVSFCLVMVLLFAVDTGLYFSVKTNIRSSTRDWKDHKFKWRKDPQDK

SEQ ID NO: 5206 - protein, 211 aa, Homo sapiens
GVPRPQPWALGLLLFLLPGSLGAESHLSLLYHLTAVSSPAPGTPAFWVSGWLGPQQYLSYNSLRGEAEPCGAWVWENQVSWYWEKETTDLRIKEKLFLEAFKALGGKGPYTLQGLLGCELGPDNTSVPTAKFALNGEEFMNFDLKQGTWGGDWPEALAISQRWQQQDKAANKELTFLLFSCPHRLREHLERGRGNLEWKEPKARQIFCAWI

SEQ ID NO: 5207 - protein, 273 aa, Homo sapiens
MGVPRPQPWALGLLLFLLPGSLGAESHLSLLYHLTAVSSPAPGTPAFWVSGWLGPQQYLSYNSLRGEAEPCGAWVWENQVSWYWEKETTDLRIKEKLFLEAFKALGGKEPPSMRLKARPSSPGFSVLTCSAFSFYPPELQLRFLRNGLAAGTGQGDFGPNSDGSFHASSSLTVKSGDEHHYCCIVQHAGLAQPLRVELESPAKSSVLVVGIVIGVLLLTAAAVGGALLWRRMRSGLPAPWISLRGDDTGVLLPTPGEAQDADLKDVNVIPATA

SEQ ID NO: 5208 - protein, 141 aa, Homo sapiens
MGVPRPQPWALGLLLFLLPGSLGAESHLSLLYHLTAVSSPAPGTPAFWVSGWLGPQQYLSYNSLRGEAEPCGAWVWENQVSWYWEKETTDLRIKEKLFLEAFKALGGKGPYTLQGLLGCELGPDNTSVPTAKFALNGEEFM

SEQ ID NO: 5209 - protein, 167 aa, Homo sapiens
MGVPRPQPWALGLLLFLLPGSLGAESHLSLLYHLTAVSSPAPGTPAFWVSGWLGPQQYLSYNSLRGEAEPCGAWVWENQVSWYWEKETTDLRIKEKLFLEAFKALGGKGPYTLQGLLGCELGPDNTSVPTAKFALNGEEFMNFDLKQGTWGGDWPEALAISQRWQQQ

SEQ ID NO: 5210 - protein, 225 aa, Homo sapiens
MGVPRPQPWALGLLLFLLPGSLGAESHLSLLYHLTAVSSPAPGTPAFWVSGWLGPQQYLSYNSLRGEAEPCGAWVWENQVSWYWEKETTDLRIKEKLFLEAFKALGGKGPYTLQGLLGCELGPDNTSVPTAKFALNGEEFMNFDLKQGTWGGDWPEALAISQRWQQQDKAANKELTFLLFSCPHRLREHLERGRGNLEWKDTVSHYVAQAGLELLGSSDSPALVS

SEQ ID NO: 5211 - protein, 365 aa, Homo sapiens
MGVPRPQPWALGLLLFLLPGSLGAESHLSLLYHLTAVSSPAPGTPAFWVSGWLGPQQYLSYNSLRGEAEPCGAWVWENQVSWYWEKETTDLRIKEKLFLEAFKALGGKGPYTLQGLLGCELGPDNTSVPTAKFALNGEEFMNFDLKQGTWGGDWPEALAISQRWQQQDKAANKELTFLLFSCPHRLREHLERGRGNLEWKEPPSMRLKARPSSPGFSVLTCSAFSFYPPELQLRFLRNGLAAGTGQGDFGPNSDGSFHASSSLTVKSGDEHHYCCIVQHAGLAQPLRVELESPAKSSVLVVGIVIGVLLLTAAAVGGALLWRRMRSGLPAPWISLRGDDTGVLLPTPGEAQDADLKDVNVIPATA

SEQ ID NO: 5212 - protein, 365 aa, Homo sapiens; identical to SEQ ID NO: 5211

SEQ ID NO: 5213 - protein, 99 aa, Homo sapiens
MGVPRPQPWALGLLLFLLPGSLGAESPAKSSVLVVGIVIGVLLLTAAAVGGALLWRRMRSGLPAPWISLRGDDTGVLLPTPGEAQDADLKDVNVIPATA

SEQ ID NO: 5214 - protein, 39 aa, Homo sapiens
MNFDLKQGTWGGDWPEALAISQRWQQQDKAANKELTFLL

SEQ ID NO: 5215 - protein, 153 aa, Homo sapiens
WEKETTDLRIKEKLFLEAFKALGGKGPYTLQGLLGCELGPDNTSVPTAKFALNGEEFMNFDLKQGTWGGDWPEALAISQRWQQQDKAANKELTFLLFSCPHRLREHLERGRGNLEWKAPWISLRGDDTGVLLPTPGEAQDADLKDVNVIPATA

SEQ ID NO: 5216 - protein, 189 aa, Homo sapiens
  VARIANT 1: note = misc_feature - Xaa can be any naturally occurring amino acid
XSSPAPGTPAFWVSGWLGPQQYLSYNSLRGEAEPCGAWVWENQVSWYWEKETTDLRIKEKLFLEAFKALGGKGPYTLQGLLGCELGPDNTSVPTAKFALNGEEFMNFDLKQGTWGGDWPEALAISQRWQQQDKAANKELTFLLFSCPHRLREHLERGRGNLEWKAPSPSTLRSCNFGSCGMGWPLAPAR

SEQ ID NO: 5217 - protein, 141 aa, Homo sapiens
MDFWLWPLYFLPEMESCCVAQDGLELVALSDPPGSASQSAGITVSGALRILPEVKVEGELGGSVTIKCPLPEMHVRIYLCREMAGSGTCGTVVSTTNFIKAEYKGRVTLKQYPRKNLFLVEVTQLTESDSGVYACGAGMNT

SEQ ID NO: 5218 - protein, 278 aa, Homo sapiens
MDFWLWPLYFLPEYEPSWEEQPMPETPKWFHLPYLFQMPAYASSSKFVTRVTTPAQRGKVPPVHHSSPTTQITHRPRVSRASSVAGDKPRTFLPSTTASKISALEGLLKPQTPSYNHHTRLHRQRALDYGSQSGREGQGFHILIPTILGLFLLALLGLVVKRAVERRKALSRRARRLAVRMRALESSQRPRGSPRPRSQNNIYSACPRRARGADAAGTGEAPVPGPGAPLPPAPLQVSESPWLHAPSLKTSCEYVSLYHQPAAMMEDSDSDDYINVPA

SEQ ID NO: 5219 - protein, 125 aa, Homo sapiens
MDFWLWPLYFLPVSGALRILPEVKVEGELGGSVTIKCPLPEMHVRIYLCREMAGSGTCGTVVSTTNFIKAEYKGRVTLKQYPRKNLFLVENTSHHGKSSQCLRLQNGFICPICSRCLHMPVLPNS

SEQ ID NO: 5220 - protein, 147 aa, Homo sapiens
MDFWLWPLYFLPVSGALRILPEVKVEGELGGSVTIKCPLPEMHVRIYLCREMAGSGTCGTVVSTTNFIKAEYKGRVTLKQYPRKNLFLVEVTQLTESDSGVYACGAGMNTDRGKTQKVTLNVHSEYEPSWEEQPMPETPKWFHLPYL

SEQ ID NO: 5221 - protein, 151 aa, Homo sapiens
MDFWLWPLYFLPVSGALRILPEVKVEGELGGSVTIKCPLPEMHVRIYLCREMAGSGTCGTVVSTTNFIKAEYKGRVTLKQYPRKNLFLVEVTQLTESDSGVYACGAGMNTDRGKTQKVTLNVHSEYEPSWEEQPMPETPKWFHLPYLFQMP

SEQ ID NO: 5222 - protein, 390 aa, Homo sapiens
MDFWLWPLYFLPVSGALRILPEVKVEGELGGSVTIKCPLPEMHVRIYLCREMAGSGTCGTVVSTTNFIKAEYKGRVTLKQYPRKNLFLVEVTQLTESDSGVYACGAGMNTDRGKTQKVTLNVHSEYEPSWEEQPMPETPKWFHLPYLFQMPAYASSSKFVTRVTTPAQRGKVPPVHHSSPTTQITHRPRVSRASSVAGDKPRTFLPSTTASKISALEGLLKPQTPSYNHHTRLHRQRALDYGSQSGREGQGFHILIPTILGLFLLALLGLVVKRAVERRKALSRRARRLAVRMRALESSQRPRGSPRPRSQNNIYSACPRRARGADAAGTGEAPVPGPGAPLPPAPLQVSESPWLHAPSLKTSCEYVSLYHQPAAMMEDSDSDDYINVPA

SEQ ID NO: 5223 - protein, 306 aa, Homo sapiens
MDFWLWPLYFLPVSGALRILPEVKVEGELGGSVTIKCPLPEMHVRIYLCREMAGSGTCGTVVSTTNFIKAEYKGRVTLKQYPRKNLFLVEVTQLTESDSGVYACGAGMNTDRGKTQKVTLNVHSEYEPSWEEQPMPETPKWFHLPYLFQMPAYASSSKFVTRVTTPAQRGKVPPVHHSSPTTQITHRPRVSRASSVAGDKPRTFLPSTTASKISALEGLLKPQTPSYNHHTRLHRQSPLQAGPPTGREDARPGELPEAPRVAATALPKQHLQRLPAARSWSGRCRHRGGPRSRPRSAVAPRPAAGV

SEQ ID NO: 5224 - protein, 326 aa, Homo sapiens
MELSGATMARGLAVLLVLFLHIKNLPAQAADTCPEVKVVGLEGSDKLTILRGCPGLPGAPGPKGEAGVIGERGERGLPGAPGKAGPVGPKGDRGEKGMRGEKGDAGQSQSCATGPRNCKDLLDRGYFLSGWHTIYLPDCRPLTVLCDMDTDGGGWTVFQRRMDGSVDFYRDWAAYKQGFGSQLGEFWLGNDNIHALTAQGSSELRVDLVDFEGNHQFAKYKSFKVADEAEKYKLVLGAFVGGSAGNSLTGHNNNFFSTKDQDNDVSSSNCAEKFQGAWWYADCHASNLNGLYLMGPHESYANGINWSAAKGYKYSYKVSEMKVRPA

SEQ ID NO: 5225 - protein, 360 aa, Homo sapiens
MELSGATMARGLAVLLVLFLHIKNLPAQAADTCPEVKVVGLEGSDKLTILRGCPGLPGAPGPKGEAGVIGERGERGLPGAPGKAGPVGPKGDRGEKGMRGEKGDAGQSQSCATGPRNCKDLLDRGYFLSGWHTIYLPDCRPLTVLCDMDTDGGGWTVFQRRMDGSVDFYRDWAAYKQGFGSQTHSHDAHSCPFAPSSVKPPHAHNLTRGRIMFLNMFTLGQKSFTSFNVCFLNTSGFDHFPVSVARQVFPWNLVSREESGPLFSRWHYRCSGRLSDFCEDFPPPVIDTGRSSPPPPSLPHPPMPHSQHFTLLEKGHFGVQKTLTKKGESLVGTFLLPTTAEFMLWAGWLLGRDKHLALTK

SEQ ID NO: 5226 - protein, 313 aa, Homo sapiens
MELDRAVGVLGAATLLLSFLGMAWALQAADTCPEVKMVGLEGSDKLTILRGCPGLPGAPGPKGEAGTNGKRGERGPPGPPGKAGPPGPNGAPGEPQPCLTGPRTCKDLLDRGHFLSGWHTIYLPDCRPLTVLCDMDTDGGGWTVFQRRVDGSVDFYRDWATYKQGFGSRLGEFWLGNDNIHALTAQGTSELRVDLVDFEDNYQFAKYRSFKVADEAEKYNLVLGAFVEGSAGDSLTFHNNQSFSTKDQDNDLNTGNCAVMFQGAWWYKNCHVSNLNGRYLRGTHGSFANGINWKSGKGYNYSYKVSEMKVRPA

SEQ ID NO: 5227 - protein, 275 aa, Homo sapiens
MELDRAVGVLGAATLLLSFLGMAWALQAADTCPGERGPPGPPGKAGPPGPNGAPGEPQPCLTGPRTCKDLLDRGHFLSGWHTIYLPDCRPLTVLCDMDTDGGGWTVFQRRVDGSVDFYRDWATYKQGFGSRLGEFWLGNDNIHALTAQGTSELRVDLVDFEDNYQFAKYRSFKVADEAEKYNLVLGAFVEGSAGDSLTFHNNQSFSTKDQDNDLNTGNCAVMFQGAWWYKNCHVSNLNGRYLRGTHGSFANGINWKSGKGYNYSYKVSEMKVRPA

SEQ ID NO: 5228 - protein, 299 aa, Homo sapiens
MDLLWILPSLWLLLLGGPACLKTQEHPSCPGPRELEASKVVLLPSCPGAPGSPGEKGAPGPQGPPGPPGKMGPKGEPGDPVNLLRCQEGPRNCRELLSQGATLSGWYHLCLPEGRALPVFCDMDTEGGGWLVFQRRQDGSVDFFRSWSSYRAGFGNQESEFWLGNENLHQLTLQGNWELRVELEDFNGNRTFAHYATFRLLGEVDHYQLALGKFSEGTAGDSLSLHSGRPFTTYDADHDSSNSNCAVIVHGAWWYASCYRSNLNGRYAVSEAAAHKYGIDWASGRGVGHPYRRVRMMLR

SEQ ID NO: 5229 - protein, 288 aa, Homo sapiens
MDLLWILPSLWLLLLGGPACLKTQEHPSCPGPRELEASKVVLLPSCPGAPGSPGEKGAPGPQGPPGPPGKMGPKGEPGPRNCRELLSQGATLSGWYHLCLPEGRALPVFCDMDTEGGGWLVFQRRQDGSVDFFRSWSSYRAGFGNQESEFWLGNENLHQLTLQGNWELRVELEDFNGNRTFAHYATFRLLGEVDHYQLALGKFSEGTAGDSLSLHSGRPFTTYDADHDSSNSNCAVIVHGAWWYASCYRSNLNGRYAVSEAAAHKYGIDWASGRGVGHPYRRVRMMLR

SEQ ID NO: 5230 - protein, 429 aa, Homo sapiens
MLPRLLLLICAPLCEPAELFLIASPSHPTEGSPVTLTCKMPFLQSSDAQFQFCFFRDTRALGPGWSSSPKLQIAAMWKEDTGSYWCEAQTMASKVLRSRRSQINVHRVPVADVSLETQPPGGQVMEGDRLVLICSVAMGTGDITFLWYKGAVGLNLQSKTQRSLTAEYEIPSVRESDAEQYYCVAENGYGPSPSGLVSITVRIPVSRPILMLRAPRAQAAVEDVLELHCEALRGSPPILYWFYHEDITLGSRSAPSGGGASFNLSLTEEHSGNYSCEANNGLGAQRSEAVTLNFTVPTGARSNHLTSGVIEGLLSTLGPATVALLFCYGLKRKIGRRSARDPLRSLPSPLPQEFTYLNSPTPGQLQPIYENVNVVSGDEVYSLAYYNQPEQESVAAETLGTHMEDKVSLDIYSRLRKANITDVDYEDAM

SEQ ID NO: 5231 - protein, 366 aa, Homo sapiens
MLPRLLLLICAPLCEPAELFLIASPSHPTEGSPVTLTCKMPFLQSSDAQFQFCFFRDTRALGPGWSSSPKLQIAAMWKEDTGSYWCEAQTMASKVLRSRRSQINVHRVPVADVSLETQPPGGQVMEGDRLVLICSVAMGTGDITFLWYKGAVGLNLQSKTQRSLTAEYEIPSVRESDAEQYYCVAENGYGPSPSGLVSITVRIPVSRPILMLRAPRAQAAVEDVLELHCEALRGSPPILYWFYHEDITLGSRSAPSGGGASFNLSLTEEHSGNYSCEANNGLGAQRSEAVTLNFTGRRSARDPLRSLPSPLPQEFTYLNSPTPGQLQPIYENEPREQSVAVHGRQQHSSEQKAQKPWGHIWRTRFP

SEQ ID NO: 5232 - protein, 428 aa, Homo sapiens
MLPRLLLLICAPLCEPAELFLIASPSHPTEGSPVTLTCKMPFLQSSDAQFQFCFFRDTRALGPGWSSSPKLQIAAMWKEDTGSYWCEAQTMASKVLRSRRSQINVHRVPVADVSLETQPPGGQVMEGDRLVLICSVAMGTGDITFLWYKGAVGLNLQSKTQRSLTAEYEIPSVRESDAEQYYCVAENGYGPSPSGLVSITVRIPVSRPILMLRAPRAQAAVEDVLELHCEALRGSPPILYWFYHEDITLGSRSAPSGGGASFNLSLTEEHSGNYSCEANNGLGAQRSEAVTLNFTVPTGARSNHLTSGVIEGLLSTLGPATVALLFCYGLKRKIGRRSARDPLRSLPSPLPQEFTYLNSPTPGQLQPIYENVNVVSGDEVYSLAYYNQPEQESVAETLGTHMEDKVSLDIYSRLRKANITDVDYEDAM

SEQ ID NO: 5233 - protein, 742 aa, Homo sapiens
MLLWLLLLILTPGREQSGVAPKAVLLLNPPWSTAFKGEKVALICSSISHSLAQGDTYWYHDEKLLKIKHDKIQITEPGNYQCKTRGSSLSDAVHVEFSPDWLILQALHPVFEGDNVILRCQGKDNKNTHQKVYYKDGKQLPNSYNLEKITVNSVSRDNSKYHCTAYRKFYILDIEVTSKPLNIQVQELFLHPVLRASSSTPIEGSPMTLTCETQLSPQRPDVQLQFSLFRDSQTLGLGWSRSPRLQIPAMWTEDSGSYWCEVETVTHSIKKRSLRSQIRVQRVPVSNVNLEIRPTGGQLIEGENMVLICSVAQGSGTVTFSWHKEGRVRSLGRKTQRSLLAELHVLTVKESDAGRYYCAADNVHSPILSTWIRVTVRIPVSHPVLTFRAPRAHTVVGDLLELHCESLRGSPPILYRFYHEDVTLGNSSAPSGGGASFNLSLTAEHSGNYSCDADNGLGAQHSHGVSLRVTVPVSRPVLTLRAPGAQAVVGDLLELHCESLRGSFPILYWFYHEDDTLGNISAHSGGGASFNLSLTTEHSGNYSCEADNGLGAQHSKVVTLNVTGTSRNRTGLTAAGITGLVLSILVLAAAAALLHYARARRKPGGLSATGTSSHSPSECQEPSSSRPSRIDPQEPTHSKPLAPMELEPMYSNVNPGDSNPIYSQIWSIQHTKENSANCPMMHQEHEELTVLYSELKKTHPDDSAGEASSRGRAHEEDDEENYENILNPRKNKVQDFPCLCNT

SEQ ID NO: 5234 - protein, 734 aa, Homo sapiens
MLLWLLLLILTPGREQSGVAPKAVLLLNPPWSTAFKGEKVALICSSISHSLAQGDTYWYHDEKLLKIKHDKIQITEPGNYQCKTRGSSLSDAVHVEFSPDWLILQALHPVFEGDNVILRCQGKDNKNTHQKVYYKDGKQLPNSYNLEKITVNSVSRDNSKYHCTAYRKFYILDIEVTSKPLNIQVQELFLHPVLRASSSTPIEGSPMTLTCETQLSPQRPDVQLQFSLFRDSQTLGLGWSRSPRLQIPAMWTEDSGSYWCEVETVTHSIKKRSLRSQIRVQRVPVSNVNLEIRPTGGQLIEGENMVLICSVAQGSGTVTFSWHKEGRVRSLGRKTQRSLLAELHVLTVKESDAGRYYCAADNVHSPILSTWIRVTVRIPVSHPVLTFRAPRAHTVVGDLLELHCESLRGSPPILYRFYHEDVTLGNSSAPSGGGASFNLSLTAEHSGNYSCDADNGLGAQHSHGVSLRVTVPVSRPVLTLRAPGAQAVVGDLLELHCESLRGSFPILYWFYHEDDTLGNISAHSGGGASFNLSLTTEHSGNYSCEADNGLGAQHSKVVTLNVTGTSRNRTGLTAAGITGLVLSILVLAAAAALLHYARARRKPGGLSATGTSSHSPSECQEPSSSRPSRIDPQEPTHSKPLAPMELEPMYSNVNPGDSNPIYSQIWSIQHTKENSANCPMMHQEHEELTVLYSELKKTHPDDSAGEASSRGRAHEEDDEENYENVPRVLLASDH

SEQ ID NO: 5235 - protein, 256 aa, Homo sapiens
MLLWLLLLILTPGREQSGVAPKAVLLLNPPWSTAFKGEKVALICSSISHSLAQGDTYWYHDEKLLKIKHDKIQITEPGNYQCKTRGSSLSDAVHVEFSPDWLILQALHPVFEGDNVILRCQGKDNKNTHQKVYYKDGKQLPNSYNLEKITVNSVSRDNSKYHCTAYRKFYILDIEVTSKPLNIQVQELFLHPVLRASSSTPIEGSPMTLTCETQLSPQRPDVQLQFSLFRDSQTLGLGWSRSPRLQIPAMWTEDSG

SEQ ID NO: 5236 - protein, 740 aa, Homo sapiens
MLLWLLLLILTPGREQSGVAPKAVLLLNPPWSTAFKGEKVALICSSISHSLAQGDTYWYHDEKLLKIKHDKIQITEPGNYQCKTRGSSLSDAVHVEFSPDWLILQALHPVFEGDNVILRCQGKDNKNTHQKVYYKDGKQLPNSYNLEKITVNSVSRDNSKYHCTAYRKFYILDIEVTSKPLNIQVQELFLHPVLRASSSTPIEGSPMTLTCETQLSPQRPDVQLQFSLFRDSQTLGLGWSRSPRLQIPAMWTEDSGSYWCEVETVTHSIKKRSLRSQIRVQRVPVSNVNLEIRPTGGQLIEGENMVLICSVAQGSGTVTFSWHKEGRVRSLGRKTQRSLLAELHVLTVKESDAGRYYCAADNVHSPILSTWIRVTVRTLLSPSVPVSHPVLTFRAPRAHTVVGDLLELHCESLRGSPPILYRFYHEDVTLGNSSAPSGGGASFNLSLTAEHSGNYSCDADNGLGAQHSHGVSLRVTVPVSRPVLTLRAPGAQAVVGDLLELHCESLRGSFPILYWFYHEDDTLGNISAHSGGGASFNLSLTTEHSGNYSCEADNGLGAQHSKVVTLNVTGTSRNRTGLTAAGITGLVLSILVLAAAAALLHYARARRKPGGLSATGTSSHSPSECQEPSSSRPSRIDPQEPTHSKPLAPMELEPMYSNVNPGDSNPIYSQIWSIQHTKENSANCPMMHQEHEELTVLYSELKKTHPDDSAGEASSRGRAHEEDDEENYENVPRVLLASDH

SEQ ID NO: 5237 - protein, 734 aa, Homo sapiens; identical to SEQ ID NO: 5234

SEQ ID NO: 5238 - protein, 639 aa, Homo sapiens
MLLWLLLLILTPGREQSGVAPKAVLLLNPPWSTAFKGEKVALICSSISHSLAQGDTYWYHDEKLLKIKHDKIQITEPGNYQCKTRGSSLSDAVHVEFSPDWLILQALHPVFEGDNVILRCQGKDNKNTHQKVYYKDGKQLPNSYNLEKITVNSVSRDNSKYHCTAYRKFYILDIEVTSKPLNIQVQGVPVSNVNLEIRPTGGQLIEGENMVLICSVAQGSGTVTFSWHKEGRVRSLGRKTQRSLLAELHVLTVKESDAGRYYCAADNVHSPILSTWIRVTVRIPVSHPVLTFRAPRAHTVVGDLLELHCESLRGSPPILYRFYHEDVTLGNSSAPSGGGASFNLSLTAEHSGNYSCDADNGLGAQHSHGVSLRVTVPVSRPVLTLRAPGAQAVVGDLLELHCESLRGSFPILYWFYHEDDTLGNISAHSGGGASFNLSLTTEHSGNYSCEADNGLGAQHSKVVTLNVTGTSRNRTGLTAAGITGLVLSILVLAAAAALLHYARARRKPGGLSATGTSSHSPSECQEPSSSRPSRIDPQEPTHSKPLAPMELEPMYSNVNPGDSNPIYSQIWSIQHTKENSANCPMMHQEHEELTVLYSELKKTHPDDSAGEASSRGRAHEEDDEENYENVPRVLLASDH

SEQ ID NO: 5239 - protein, 592 aa, Homo sapiens
MLLWVILLVLAPVSGQFARTPRPIIFLQPPWTTVFQGERVTLTCKGFRFYSPQKTKWYHRYLGKEILRETPDNILEVQESGEYRCQAQGSPLSSPVHLDFSSASLILQAPLSVFEGDSVVLRCRAKAEVTLNNTIYKNDNVLAFLNKRTDFHIPHACLKDNGAYRCTGYKESCCPVSSNTVKIQVQEPFTRPVLRASSFQPISGNPVTLTCETQLSLERSDVPLRFRFFRDDQTLGLGWSLSPNFQITAMWSKDSGFYWCKAATMPYSVISDSPRSWIQVQIPASHPVLTLSPEKALNFEGTKVTLHCETQEDSLRTLYRFYHEGVPLRHKSVRCERGASISFSLTTENSGNYYCTADNGLGAKPSKAVSLSVTVPVSHPVLNLSSPEDLIFEGAKVTLHCEAQRGSLPILYQFHHEGAALERRSANSAGGVAISFSLTAEHSGNYYCTADNGFGPQRSKAVSLSVTVPVSHPVLTLSSAEALTFEGATVTLHCEVQRGSPQILYQFYHEDMPLWSSSTPSVGRVSFSFSLTEGHSGNYYCTADNGFGPQRSEVVSLFVTGKCWVLASHPPLAEFSLTHSFKNLFALSSFLP

SEQ ID NO: 5240 - protein, 977 aa, Homo sapiens
MLLWVILLVLAPVSGQFARTPRPIIFLQPPWTTVFQGERVTLTCKGFRFYSPQKTKWYHRYLGKEILRETPDNILEVQESGEYRCQAQGSPLSSPVHLDFSSASLILQAPLSVFEGDSVVLRCRAKAEVTLNNTIYKNDNVLAFLNKRTDFHIPHACLKDNGAYRCTGYKESCCPVSSNTVKIQVQEPFTRPVLRASSFQPISGNPVTLTCETQLSLERSDVPLRFRFFRDDQTLGLGWSLSPNFQITAMWSKDSGFYWCKAATMPYSVISDSPRSWIQVQIPASHPVLTLSPEKALNFEGTKVTLHCETQEDSLRTLYRFYHEGVPLRHKSVRCERGASISFSLTTENSGNYYCTADNGLGAKPSKAVSLSVTVPVSHPVLNLSSPEDLIFEGAKVTLHCEAQRGSLPILYQFHHEGAALERRSANSAGGVAISFSLTAEHSGNYYCTADNGFGPQRSKAVSLSVTVPVSHPVLTLSSAEALTFEGATVTLHCEVQRGSPQILYQFYHEDMPLWSSSTPSVGRVSFSFSLTEGHSGNYYCTADNGFGPQRSEVVSLFVTVPVSRPILTLRVPRAQAVVGDLLELHCEAPRGSPPILYWFYHEDVTLGSSSAPSGGEASFNLSLTAEHSGNYSCEANNGLVAQHSDTISLSVIVPVSRPILTFRAPRAQAVVGDLLELHCEALRGSSPILYWFYHEDVTLGKISAPSGGGASFNLSLTTEHSGIYSCEADNGLEAQRSEMVTLKVAVPVSRPVLTLRAPGTHAAVGDLLELHCEALRGSPLILYRFFHEDVTLGNRSSPSGGASLNLSLTAEHSGNYSCEADNGLGAQRSETVTLYITGLTANRSGPFATGVAGGLLSIAGLAAGALLLYCWLSRKAGRKPASDPARSPSDSDSQEPTYHNVPAWEELQPVYTNANPRGENVVYSEVRIIQEKKKHAVASDPRHLRNKGSPIIYSEVKVASTPVSGSLFLASSAPHR

SEQ ID NO: 5241 - protein, 759 aa, Homo sapiens
MLLWVILLVLAPVSGQFARTPRPIIFLQPPWTTVFQGERVTLTCKGFRFYSPQKTKWYHRYLGKEILRETPDNILEVQESGEYRCQAQGSPLSSPVHLDFSSASLILQAPLSVFEGDSVVLRCRAKAEVTLNNTIYKNDNVLAFLNKRTDFHIPHACLKDNGAYRCTGYKESCCPVSSNTVKIQVQEPFTRPVLRASSFQPISGNPVTLTCETQLSLERSDVPLRFRFFRDDQTLGLGWSLSPNFQITAMWSKDSGFYWCKAATMPYSVISDSPRSWIQVQIPASHPVLTLSPEKALNFEGTKVTLHCETQEDSLRTLYRFYHEGVPLRHKSVRCERGASISFSLTTENSGNYYCTADNGLGAKPSKAVSLSVTVPVSHPVLNLSSPEDLIFEGAKVTLHCEAQRGSLPILYQFHHEGAALERRSANSAGGVAISFSLTAEHSGNYYCTADNGFGPQRSKAVSLSVTVPVSHPVLTLSSAEALTFEGATVTLHCEVQRGSPQILYQFYHEDMPLWSSSTPSVGRVSFSFSLTEGHSGNYYCTADNGFGPQRSEVVSLFVTVPVSRPILTLRVPRAQAVVGDLLELHCEAPRGSPPILYWFYHEDVTLGSSSAPSGGEASFNLSLTAEHSGNYSCEANNGLVAQHSDTISLSVIVPVSRPILTFRAPRAQAVVGDLLELHCEALRGSSPILYWFYHEDVTLGKISAPSGGGASFNLSLTTEHSGIYSCEADNGLEAQRSEMVTLKVAGEWALPTSSTSEN

SEQ ID NO: 5242 - protein, 365 aa, Homo sapiens
MKLGCVLMAWALYLSLGVLWVAQMLLAAGCHAAASFETLQCEGPVCTEESSCHTEDDLTDAREAGFQVKAYTFSEPFHLIVSYDWLILQGPAKPVFEGDLLVLRCQAWQDWPLTQVTFYRDGSALGPPGPNREFSITVVQKADSGHYHCSGIFQSPGPGIPETASVVAITVQELFPAPILRAVPSAEPQAGSPMTLSCQTKLPLQRSAARLLFSFYKDGRIVQSRGLSSEFQIPTASEDHSGSYWCEAATEDNQVWKQSPQLEIRVQGASSSAAPPTLNPAPQKSAAPGTAPEEAPGPLPPPPTPSSEDPGFSSPLGMPDPHLYHQMGLLLKHMQDVRVLLGHLLMELRELSGHRKPGTTKATAE

SEQ ID NO: 5243 - protein, 225 aa, Homo sapiens
MKLGCVLMAWALYLSLGVLWVAQMLLAAGCHAELFPAPILRAVPSAEPQAGSPMTLSCQTKLPLQRSAARLLFSFYKDGRIVQSRGLSSEFQIPTASEDHSGSYWCEAATEDNQVWKQSPQLEIRVQGASSSAAPPTLNPAPQKSAAPGTAPEEAPGPLPPPPTPSSEDPGFSSPLGMPDPHLYHQMGLLLKHMQDVRVLLGHLLMELRELSGHRKPGTTKATAE

SEQ ID NO: 5244 - protein, 264 aa, Homo sapiens
MKLGCVLMAWALYLSLGVLWVAQMLLAASFETLQCEGPVCTEESSCHTEDDLTDAREAGFQVKAYTFSEPFHLIVSYDWLILQGPAKPVFEGDLLVLRCQAWQDWPLTQVTFYRDGSALGPPGPNREFSITVVQKADSGHYHCSGIFQSPGPGIPETASVVAITVQGASSSAAPPTLNPAPQKSAAPGTAPEEAPGPLPPPPTPSSEDPGFSSPLGMPDPHLYHQMGLLLKHMQDVRVLLGHLLMELRELSGHRKPGTTKATAE

SEQ ID NO: 5245 - protein, 270 aa, Homo sapiens
MKLGCVLMAWALYLSLGVLWVAQMLLAASFETLQCEGPVCTEESSCHTEDDLTDAREAGFQVKAYTFSEPFHLIVSYELFPAPILRAVPSAEPQAGSPMTLSCQTKLPLQRSAARLLFSFYKDGRIVQSRGLSSEFQIPTASEDHSGSYWCEAATEDNQVWKQSPQLEIRVQGASSSAAPPTLNPAPQKSAAPGTAPEEAPGPLPPPPTPSSEDPGFSSPLGMPDPHLYHQMGLLLKHMQDVRVLLGHLLMELRELSGHRKPGTTKATAE

SEQ ID NO: 5246 - protein, 382 aa, Homo sapiens
MLKKISVGVAGDLNTVTMKLGCVLMAWALYLSLGVLWVAQMLLAAGCHAAASFETLQCEGPVCTEESSCHTEDDLTDAREAGFQVKAYTFSEPFHLIVSYDWLILQGPAKPVFEGDLLVLRCQAWQDWPLTQVTFYRDGSALGPPGPNREFSITVVQKADSGHYHCSGIFQSPGPGIPETASVVAITVQELFPAPILRAVPSAEPQAGSPMTLSCQTKLPLQRSAARLLFSFYKDGRIVQSRGLSSEFQIPTASEDHSGSYWCEAATEDNQVWKQSPQLEIRVQGASSSAAPPTLNPAPQKSAAPGTAPEEAPGPLPPPPTPSSEDPGFSSPLGMPDPHLYHQMGLLLKHMQDVRVLLGHLLMELRELSGHRKPGTTKATAE

SEQ ID NO: 5247 - protein, 242 aa, Homo sapiens
MLKKISVGVAGDLNTVTMKLGCVLMAWALYLSLGVLWVAQMLLAAGCHAELFPAPILRAVPSAEPQAGSPMTLSCQTKLPLQRSAARLLFSFYKDGRIVQSRGLSSEFQIPTASEDHSGSYWCEAATEDNQVWKQSPQLEIRVQGASSSAAPPTLNPAPQKSAAPGTAPEEAPGPLPPPPTPSSEDPGFSSPLGMPDPHLYHQMGLLLKHMQDVRVLLGHLLMELRELSGHRKPGTTKATAE

SEQ ID NO: 5248 - protein, 376 aa, Homo sapiens
MLKKISVGVAGDLNTVTMKLGCVLMAWALYLSLGVLWVAQMLLAASFETLQCEGPVCTEESSCHTEDDLTDAREAGFQVKAYTFSEPFHLIVSYDWLILQGPAKPVFEGDLLVLRCQAWQDWPLTQVTFYRDGSALGPPGPNREFSITVVQKADSGHYHCSGIFQSPGPGIPETASVVAITVQELFPAPILRAVPSAEPQAGSPMTLSCQTKLPLQRSAARLLFSFYKDGRIVQSRGLSSEFQIPTASEDHSGSYWCEAATEDNQVWKQSPQLEIRVQGASSSAAPPTLNPAPQKSAAPGTAPEEAPGPLPPPPTPSSEDPGFSSPLGMPDPHLYHQMGLLLKHMQDVRVLLGHLLMELRELSGHRKPGTTKATAE

SEQ ID NO: 5249 - protein, 287 aa, Homo sapiens
MLKKISVGVAGDLNTVTMKLGCVLMAWALYLSLGVLWVAQMLLAASFETLQCEGPVCTEESSCHTEDDLTDAREAGFQVKAYTFSEPFHLIVSYELFPAPILRAVPSAEPQAGSPMTLSCQTKLPLQRSAARLLFSFYKDGRIVQSRGLSSEFQIPTASEDHSGSYWCEAATEDNQVWKQSPQLEIRVQGASSSAAPPTLNPAPQKSAAPGTAPEEAPGPLPPPPTPSSEDPGFSSPLGMPDPHLYHQMGLLLKHMQDVRVLLGHLLMELRELSGHRKPGTTKATAE

SEQ ID NO: 5250 - protein, 192 aa, Homo sapiens
MLKKISVGVAGDLNTVTMKLGCVLMAWALYLSLGVLWVAQMLLAASFETLQCEGPVCTEESSCHTEDDLTDAREAGFQVKAYTFSEPFHLIVSYGASSSAAPPTLNPAPQKSAAPGTAPEEAPGPLPPPPTPSSEDPGFSSPLGMPDPHLYHQMGLLLKHMQDVRVLLGHLLMELRELSGHRKPGTTKATAE

SEQ ID NO: 5251 - protein, 236 aa, Homo sapiens
MLKKISVGVAGDLNTVTMKLGCVLMAWALYLSLGVLWVAQMLLELFPAPILRAVPSAEPQAGSPMTLSCQTKLPLQRSAARLLFSFYKDGRIVQSRGLSSEFQIPTASEDHSGSYWCEAATEDNQVWKQSPQLEIRVQGASSSAAPPTLNPAPQKSAAPGTAPEEAPGPLPPPPTPSSEDPGFSSPLGMPDPHLYHQMGLLLKHMQDVRVLLGHLLMELRELSGHRKPGTTKATAE

SEQ ID NO: 5252 - protein, 141 aa, Homo sapiens
MLKKISVGVAGDLNTVTMKLGCVLMAWALYLSLGVLWVAQMLLGASSSAAPPTLNPAPQKSAAPGTAPEEAPGPLPPPPTPSSEDPGFSSPLGMPDPHLYHQMGLLLKHMQDVRVLLGHLLMELRELSGHRKPGTTKATAE

SEQ ID NO: 5253 - protein, 152 aa, Homo sapiens
MLLAASFETLQCEGPVCTEESSCHTEDDLTDAREAGFQVKAYTFSEPFHLIVSYGASSSAAPPTLNPAPQKSAAPGTAPEEAPGPLPPPPTPSSEDPGFSSPLGMPDPHLYHQMGLLLKHMQDVRVLLGHLLMELRELSGHRKPGTTKATAE

SEQ ID NO: 5254 - protein, 311 aa, Homo sapiens
MWPLTALLLLATLEKPILSLHPPWTTIFKGERVTLKCDGYHPLLLELQPISTLWYLGHLLLPSHKKSIEVQTPGVYRCQTRGAPVSDPIHLSVSNDWLILQVPYAPVFEGEPLVLRCRGWYDKVVYKLHYYHDGQAVRYFHSSANYTVLQARASDSGRYQCSGTMRIPVESAPMFSAKVAVTVQAARCAASTGAPSTQSRSPRSRSSNRTGARRLPPPAVSGNAVRGCSSRGRVLPWTRPPPPPQLHGPQPWLLVIGRFPSESPRCPDRSRWSPPSGTPPPPGCSSRRAAPRLRGHPPALRRRPWNNRLEP

SEQ ID NO: 5255 - protein, 268 aa, Homo sapiens
MWPLTALLLLATLEKPILSLHPPWTTIFKGERVTLKCDGYHPLLLELQPISTLWYLGHLLLPSHKKSIEVQTPGVYRCQTRGAPVSDPIHLSVSNDWLILQVPYAPVFEGEPLVLRCRGWYDKVVYKLHYYHDGQAVRYFHSSANYTVLQARASDSGRYQCSGTMRIPVESAPMFSAKVAVTVQEARHAAAVRVLQVQPRGAPLRLGRRVHSPGARGRGARIVLVRGGYRHPQCPETQSVAAAPGAGFSPGPGLHHRPSSMGRSLGSW

SEQ ID NO: 5256 - protein, 318 aa, Homo sapiens
MWPLTALLLLVPSSGQAATLEKPILSLHPPWTTIFKGERVTLKCDGYHPLLLELQPISTLWYLGHLLLPSHKKSIEVQTPGVYRCQTRGAPVSDPIHLSVSNDWLILQVPYAPVFEGEPLVLRCRGWYDKVVYKLHYYHDGQAVRYFHSSANYTVLQARASDSGRYQCSGTMRIPVESAPMFSAKVAVTVQAARCAASTGAPSTQSRSPRSRSSNRTGARRLPPPAVSGNAVRGCSSRGRVLPWTRPPPPPQLHGPQPWLLVIGRFPSESPRCPDRSRWSPPSGTPPPPGCSSRRAAPRLRGHPPALRRRPWNNRLEP

SEQ ID NO: 5257 - protein, 275 aa, Homo sapiens
MWPLTALLLLVPSSGQAATLEKPILSLHPPWTTIFKGERVTLKCDGYHPLLLELQPISTLWYLGHLLLPSHKKSIEVQTPGVYRCQTRGAPVSDPIHLSVSNDWLILQVPYAPVFEGEPLVLRCRGWYDKVVYKLHYYHDGQAVRYFHSSANYTVLQARASDSGRYQCSGTMRIPVESAPMFSAKVAVTVQEARHAAAVRVLQVQPRGAPLRLGRRVHSPGARGRGARIVLVRGGYRHPQCPETQSVAAAPGAGFSPGPGLHHRPSSMGRSLGSW

SEQ ID NO: 5258 - protein, 426 aa, Homo sapiens
MWPLTALLLLVPSSGQAATLEKPILSLHPPWTTIFKGERVTLKCDGYHPLLLELQPISTLWYLGHLLLPSHKKSIEVQTPGVYRCQTRGAPVSDPIHLSVSNDWLILQVPYAPVFEGEPLVLRCRGWYDKVVYKLHYYHDGQAVRYFHSSANYTVLQARASDSGRYQCSGTMRIPVESAPMFSAKVAVTVQELFRAPVLRVMGPREARGAALGGVVLRCDTRLHPQKRDTPLQFAFYKYSRAVRRFDWGAEYTVPEPEVEELESYWCEAATATRSVRKRSPWLQLPGPGSPLDPASTTAPAPWAAALAPGNRPLSFRKPPVSRSVPLVTSVRNTTSTGLQFPASGAPTAGPPACAPPTPLEQSAGALKPDVDLLLREMQLLKGLLSRVVLELKEPQALRELRGTPETPTSHFAVSPGTPETTPVES

SEQ ID NO: 5259 - protein, 85 aa, Homo sapiens
MKKVLLLITAILAVAVGFPVSQDQEREKRSISDSDELASGFFVFPYPYPFRPLPPIPFPRFPWFRRNFPIPIPESAPTTPLPSEK

SEQ ID NO: 5260 - protein, 317 aa, Homo sapiens
MGLLLPLALCILVLCCGAMSPPQLALNPSALLSRGCNDSDVLAVAGFALRDINKDRKDGYVLRLNRVNDAQEYRRAISKKKIYMTCPDCPSSIPTDSSNHQVLEAATESLAKYNNENTSKQYSLFKVTRASSQWVVGPSYFVEYLIKESPCTKSQASSCSLQSSDSVPVGLCKGSLTRTHWEKFVSVTCDFFESQAPATGSENSAVNQKPTNLPKVEESQQKNTPPTDSPSKAGPRGSVQYLPDLDDKNSQEKGPQEAFPVHLDLTTNPQGETLDISFLFLEPMEEKLVVLPFPKEKARTAECPGPAQNASPLVLPP

SEQ ID NO: 5261 - protein, 92 aa, Homo sapiens
MGLLLPLALCILVLCCGAMSPPQLALNPSALLSRGCNDSDVLAVAGFALRDINKDRKDGYVLRLNRVNDAQEYRRARWPGISVLSYTGCARD

SEQ ID NO: 5262 - protein, 119 aa, Homo sapiens
MGLLLPLALCILVLCCGAMSPPQLALNPSALLSRGCNDSDVLAVAGFALRDINKDRKDGYVLRLNRVNDAQEYRRGGLGSLFYLTLDVLETDCHVLRKKAWQDCGMRIFFESFQKKRFT

SEQ ID NO: 5263 - protein, 382 aa, Homo sapiens
MGLLLPLALCILVLCCGAMSPPQLALNPSALLSRGCNDSDVLAVAGFALRDINKDRKDGYVLRLNRVNDAQEYRRGGLGSLFYLTLDVLETDCHVLRKKAWQDCGMRIFFESVYGQCKAIFYMNNPSRVLYLAAYNCTLRPVSKKKIYMTCPDCPSSIPTDSSNHQVLEAATESLAKYNNENTSKQYSLFKVTRASSQWVVGPSYFVEYLIKESPCTKSQASSCSLQSSDSVPVGLCKGSLTRTHWEKFVSVTCDFFESQAPATGSENSAVNQKPTNLPKVEESQQKNTPPTDSPSKAGPRGSVQYLPDLDDKNSQEKGPQEAFPVHLDLTTNPQGETLDISFLFLEPMEEKLVVLPFPKEKARTAECPGPAQNASPLVLPP

SEQ ID NO: 5264 - protein, 382 aa, Homo sapiens; identical to SEQ ID NO: 5263

SEQ ID NO: 5265 - protein, 345 aa, Homo sapiens
MGLLLPLALCILVLCCGAMSPPQLALNPSALLSRGCNDSDVLAVAGFALRDINKDRKDGYVLRLNRVNDAQEYRRVYGQCKAIFYMNNPSRVLYLAAYNCTLRPVSKKKIYMTCPDCPSSIPTDSSNHQVLEAATESLAKYNNENTSKQYSLFKVTRASSQWVVGPSYFVEYLIKESPCTKSQASSCSLQSSDSVPVGLCKGSLTRTHWEKFVSVTCDFFESQAPATGSENSAVNQKPTNLPKVEESQQKNTPPTDSPSKAGPRGSVQYLPDLDDKNSQEKGPQEAFPVHLDLTTNPQGETLDISFLFLEPMEEKLVVLPFPKEKARTAECPGPAQNASPLVLPP

SEQ ID NO: 5266 - protein, 104 aa, Homo sapiens
MTCPDCPSSIPTDSSNHQVLEAATESLAKYNNENTSKQYSLFKVTRASSQWVVGPSYFVEYLIKESPCTKSQASSCSLQSSDSVPVGLCKGSLTRTHWEKFVSV

SEQ ID NO: 5267 - protein, 289 aa, Homo sapiens [sequence omitted]

SEQ ID NO: 5268 - protein, 866 aa, Homo sapiens
MFSMRIVCLVLSVVGTAWTADSGEGDFLAEGGGVRGPRVVERHQSACKDSDWPFCSDEDWNYKCPSGCRMKGLIDEVNQDFTNRINKLKNSLFEYQKNNKDSHSLTTNIMEILRGDFSSANNRDNTYNRVSEDLRSRIEVLKRKVIEKVQHIQLLQKNVRAQLVDMKRLEVDIDIKIRSCRGSCSRALAREVDLKDYEDQQKQLEQVIAKDLLPSRDRQHLPLIKMKPVPDLVPGNFKSQLQKVPPEWKALTDMPQMRMELERPGGNEITRGGSTSYGTGSETESPRNPSSAGSWNSGSSGPGSTGNRNPGSSGTGGTATWKPGSSGPGSTGSWNSGSSGTGSTGNQNPGSPRPGSTGTWNPGSSERGSAGHWTSESSVSGSTGQWHSESGSFRPDSPGSGNARPNNPDWGTFEEVSGNVSPGTRREYHTEKLVTSKGDKELRTGKEKVTSGSTTTTRRSCSKTVTKTVIGPDGHKEVTKEVVTSEDGSDCPEAMDLGTLSGIGTLDGFRHRHPDEAAFFDTASTGKTFPGFFSPMLGEFVSETESRGSESGIFTNTKESSSHHPGIAEFPSRGKSSSYSKQFTSSTSYNRGDSTFESKSYKMADEAGSEADHEGTHSTKRGHAKSRPVRDCDDVLQTHPSGTQSGIFNIKLPGSSKIFSVYCDQETSLGGWLLIQQRMDGSLNFNRTWQDYKRGFGSLNDEGEGEFWLGNDYLHLLTQRGSVLRVELEDWAGNEAYAEYHFRVGSEAEGYALQVSSYEGTAGDALIEGSVEEGAEYTSHNNMQFSTFDRDADQWEENCAEVYGGGWWYNNCQAANLNGIYYPGGSYDPRNNSPYEIENGVVWVSFRGADYSLRAVRMKIRPLVTQ

SEQ ID NO: 5269 - protein, 644 aa, Homo sapiens
MFSMRIVCLVLSVVGTAWTADSGEGDFLAEGGGVRGPRVVERHQSACKDSDWPFCSDEDWNYKCPSGCRMKGLIDEVNQDFTNRINKLKNSLFEYQKNNKDSHSLTTNIMEILRGDFSSANNRDNTYNRVSEDLRSRIEVLKRKVIEKVQHIQLLQKNVRAQLVDMKRLEVDIDIKIRSCRGSCSRALAREVDLKDYEDQQKQLEQVIAKDLLPSRDRQHLPLIKMKPVPDLVPGNFKSQLQKVPPEWKALTDMPQMRMELERPGGNEITRGGSTSYGTGSETESPRNPSSAGSWNSGSSGPGSTGNRNPGSSGTGGTATWKPGSSGPGSTGSWNSGSSGTGSTGNQNPGSPRPGSTGTWNPGSSERGSAGHWTSESSVSGSTGQWHSESGSFRPDSPGSGNARPNNPDWGTFEEVSGNVSPGTRREYHTEKLVTSKGDKELRTGKEKVTSGSTTTTRRSCSKTVTKTVIGPDGHKEVTKEVVTSEDGSDCPEAMDLGTLSGIGTLDGFRHRHPDEAAFFDTASTGKTFPGFFSPMLGEFVSETESRGSESGIFTNTKESSSHHPGIAEFPSRGKSSSYSKQFTSSTSYNRGDSTFESKSYKMADEAGSEADHEGTHSTKRGHAKSRPVRGIHTSPLGKPSLSP

SEQ ID NO: 5270 - protein, 272 aa, Homo sapiens
MEYCRTPCTVSCNIPVVSGKECEEIIRKGGETSEMYLIQPDSSVKPYRVYCDMNTENGGWTVIQNRQDGSVDFGRKWDPYKQGFGNVATNTDGKNYCGLPGEYWLGNDKISQLTRMGPTELLIEMEDWKGDKVKAHYGGFTVQNEANKYQISVNKYRGTAGNALMDGASQLMGENRTMTIHNGMFFSTYDRDNDGWLTSDPRKQCSKEDGGGWWYNRCHAANPNGRYYWGGQYTWDMAKHGTDDGVVWMNWKGSWYSMRKMSMKIRPFFPQQ

SEQ ID NO: 5271 - protein, 491 aa, Homo sapiens
MKRMVSWSFHKLKTMKHLLLLLLCVFLVKSQGVNDNEEGFFSARGHRPLDKKREEAPSLRPAPPPISGGGYRARPAKAAATQKKVERKAPDAGGCLHADPDLGVLCPTGCQLQEALLQQERPIRNSVDELNNNVEAVSQTSSSSFQYMYLLKDLWQKRQKQVKDNENVVNEYSSELEKHQLYIDETVNSNIPTNLRVLRSILENLRSKIQKLESDVSAQMEYCRTPCTVSCNIPVVSGKECEEIIRKGGETSEMYLIQPDSSVKPYRVYCDMNTENGGWTVIQNRQDGSVDFGRKWDPYKQGFGNVATNTDGKNYCGLPGEYWLGNDKISQLTRMGPTELLIEMEDWKGDKVKAHYGGFTVQNEANKYQISVNKYRGTAGNALMDGASQLMGENRTMTIHNGMFFSTYDRDNDGWLTSDPRKQCSKEDGGGWWYNRCHAANPNGRYYWGGQYTWDMAKHGTDDGVVWMNWKGSWYSMRKMSMKIRPFFPQQ

SEQ ID NO: 5272 - protein, 45 aa, Homo sapiens
MKRMVSWSFHKLKTMKHLLLLLLCVFLVKSQGVNDNEEMRKLGHR

SEQ ID NO: 5273 - protein, 66 aa, Homo sapiens
MWKWILTHCASAFPHLPGCCCCCFLLLFLVSSVPVTCQALGQDMVSPEATNSSSSSFSSPSSAGRH

SEQ ID NO: 5274 - protein, 208 aa, Homo sapiens
MWKWILTHCASAFPHLPGCCCCCFLLLFLVSSVPVTCQALGQDMVSPEATNSSSSSFSSPSSAGRHVRSYNHLQGDVRWRKLFSFTKYFLKIEKNGKVSGTKKENCPYSILEITSVEIGVVAVKAINSNYYLAMNKKGKLYGSKEFNNDCKLKERIEENGYNTYASFNWQHNGRQMYVALNGKGAPRRGQKTRRKNTSAHFLPMVVHS

SEQ ID NO: 5275 - protein, 216 aa, Homo sapiens
MGAARLLPNLTLCLQLLILCCQTQGENHPSPNFNQYVRDQGAMTDQLSRRQIREYQLYSRTSGKHVQVTGRRISATAEDGNKFAKLIVETDTFGSRVRIKGAESEKYICMNKRGKLIGKPSGKSKDCVFTEIVLENNYTAFQNARHEGWFMAFTRQGRPRQASRSRQNQREAHFIKRLYQGQLPFPNHAEKQKQFEFVGSAPTRRTKRTRRPQPLT

SEQ ID NO: 5276 - protein, 205 aa, Homo sapiens
MGAARLLPNLTLCLQLLILCCQTQYVRDQGAMTDQLSRRQIREYQLYSRTSGKHVQVTGRRISATAEDGNKFAKLIVETDTFGSRVRIKGAESEKYICMNKRGKLIGKPSGKSKDCVFTEIVLENNYTAFQNARHEGWFMAFTRQGRPRQASRSRQNQREAHFIKRLYQGQLPFPNHAEKQKQFEFVGSAPTRRTKRTRRPQPLT

SEQ ID NO: 5277 - protein, 207 aa, Homo sapiens
MYSAPSACTCLCLHFLLLCFQVQVLVAEENVDFRIHVENQTRARDDVSRKQLRLYQLYSRTSGKHIQVLGRRISARGEDGDKYAQLLVETDTFGSQVRIKGKETEFYLCMNRKGKLVGKPDGTSKECVFIEKVLENNYTALMSAKYSGWYVGFTKKGRPRKGPKTRENQQDVHFMKRYPKGQPELQKPFKYTTVTKRSRRIRPTHPA

SEQ ID NO: 5278 - protein, 216 aa, Homo sapiens
MRSGCVVVHVWILAGLWLAVAGRPLAFSDAGPHVHYGWGDPIRLRHLYTSGPHGLSSCFLRIRADGVVDCARGQSAHSLLEIKAVALRTVAIKGVHSVRYLCMGADGKMQGLLQYSEEDCAFEEEIRPDGYNVYRSEKHRLPVSLSSAKQRQLYKNRGFLPLSHFLPMLPMVPEEPEDLRGHLESDMFSSPLETDSMDPFGLVTGLEAVRSPSFEK

SEQ ID NO: 5279 - protein, 209 aa, Homo sapiens
MDSDETGFEHSGLWVSVLAGLLLGACQAHPIPDSSPLLQFGGQVRQRYLYTDDAQQTEAHLEIREDGTVGGAADQSPESLLQLKALKPGVIQILGVKTSRFLCQRPDGALYGSLHFDPEACSFRELLLEDGYNVYQSEAHGLPLHLPGNKSPHRDPAPRGPARFLPLPGLPPALPEPPGILAPQPPDVGSSDPLSMVGPSQGRSPSYAS

SEQ ID NO: 5280 - protein, 209 aa, Homo sapiens; identical to SEQ ID NO: 5279

SEQ ID NO: 5281 - protein, 170 aa, Homo sapiens
MRRRLWLGLAWLLLARAPDAAGTPSASRGPRSYPHLEGDVRWRRLFSSTHFFLRVDPGGRVQGTRWRHGQDSILEIRSVHVGVVVIKAVSSGFYVAMNRRGRLYGSRLYTVDCRFRERIEENGHNTYASQRWRRRGQPMFLALDRRGGPRPGGRTRRYHLSAHFLPVLVS

SEQ ID NO: 5282 - protein, 165 aa, Homo sapiens
MRRRLWLGLAWLLLARAPDAAGTPSASRGPRSYPHLEGDVRWRRLFSSTHFFLRVDPGGRVQGTRWRHGQDSILEIRSVHVGVVVIKAVSSGFYVAMNRRGRLYGSVPGAHRRERPQHLRLTALAPPRPAHVPGAGQEGGAPARRPDAAVPPVRPLPARPGLLRP

SEQ ID NO: 5283 - protein, 251 aa, Homo sapiens
MLGARLRLWVCALCSVCSMSVLRAYPNASPLLGSSWGGLIHLYTATARNSYHLQIHKNGHVDGAPHQTIYSALMIRSEDAGFVVITGVMSRRYLCMDFRGNIFGSHYFDPENCRFQHQTLENGYDVYHSPQYHFLVSLGRAKRAFLPGMNPPPYSQFLSRRNEIPLIHFNTPIPRRHTRSAEDDSERDPLNVLKPRARMTPAPASCSQELPSAEDNSPMASDPLGVVRGGRVNTHAGGTGPEGCRPFAKFI

SEQ ID NO: 5284 - protein, 239 aa, Homo sapiens
MGLIWLLLLSLLEPGWPAAGPGARLRRDAGGRGGVYEHLGGAPRRRKLYCATKYHLQLHPSGRVNGSLENSAYSILEITAVEVGIVAIRGLFSGRYLAMNKRGRLYASEHYSAECEFVERIHELGYNTYASRLYRTVSSTPGARRQPSAERLWYVSVNGKGRPRRGFKTRRTQKSSLFLPRVLDHRDHEMVRQLQSGLPRPPGKGVQPRRRRQKQSPDNLEPSHVQASRLGSQLEASAH

SEQ ID NO: 5285 - protein, 206 aa, Homo sapiens
MSGPGTAAVALLPAVLLALLAPWAGRGGAAAPTAPNGTLEAELERRWESLVALSLARLPVAAQPKEAAVQSGAGDYLLGIKRLRRLYCNVGIGFHLQALPDGRIGGAHADTRDSLLELSPVERGVVSIFGVASRFFVAMSSKGKLYGSPFFTDECTFKEILLPNNYNAYESYKYPGMFIALSKNGKTKKGNRVSPTMKVTHFLPRL

SEQ ID NO: 5286 - protein, 123 aa, Homo sapiens
MSLSFLLLLFFSHLILSAWAHGEKRLAPKGQPGPAATDRNPRGSSSRQSSSSAMSSSSASSSPAASLGSQGSGLEQSSFQWSPSGRRTGSLYCRVGIGFHLQIYPDGKVNGSHEANMLSQVHR

SEQ ID NO: 5287 - protein, 268 aa, Homo sapiens
MSLSFLLLLFFSHLILSAWAHGEKRLAPKGQPGPAATDRNPRGSSSRQSSSSAMSSSSASSSPAASLGSQGSGLEQSSFQWSPSGRRTGSLYCRVGIGFHLQIYPDGKVNGSHEANMLSVLEIFAVSQGIVGIRGVFSNKFLAMSKKGKLHASAKFTDDCKFRERFQENSYNTYASAIHRTEKTGREWYVALNKRGKAKRGCSPRVKPQHISTHFLPRFKQSEQPELSFTVTVPEKKKPPSPIKPKIPLSAPRKNTNSVKYRLKFRFG

SEQ ID NO: 5288 - protein, 119 aa, Homo sapiens
NPRGSSSRQSSSSAMSSSSASSSPAASLGSQGSGLEQSSFQWSPSGRRTGSLYCRVGIGFHLQIYPDGKVNGSHEANMLSVLEIFAVSQGIVGIRGVFSNKFLAMSKKGKLHASNTLET

SEQ ID NO: 5289 - protein, 122 aa, Homo sapiens
MEGGDIRVRRLFCRTQWYLRIDKRGKVKGTQEMKNNYNIMEIRTVAVGIVAIKGVESEFYLAMNKEGKLYAKKECNEDCNFKELILENHYNTYASAKWTHNGGEMFVALNQKGIPVRGKKTK

SEQ ID NO: 5290 - protein, 194 aa, Homo sapiens
MHKWILTWILPTLLYRSCFHIICLVGTISLACNDMTPEQMATNVNCSSPERHTRSYDYMEGGDIRVRRLFCRTQWYLRIDKRGKVKGTQEMKNNYNIMEIRTVAVGIVAIKGVESEFYLAMNKEGKLYAKKECNEDCNFKELILENHYNTYASAKWTHNGGEMFVALNQKGIPVRGKKTKKEQKTAHFLPMAIT

SEQ ID NO: 5291 - protein, 194 aa, Homo sapiens; identical to SEQ ID NO: 5290

SEQ ID NO: 5292 - protein, 194 aa, Homo sapiens; identical to SEQ ID NO: 5290

SEQ ID NO: 5293 - protein, 97 aa, Homo sapiens
MHKWILTWILPTLLYRSCFHIICLVGTISLACNDMTPEQMATNVNCSSPERHTRSYDYMEGGDIRVRRLFCRTQWYLRIDKRGKVKGTQEMKNNYSK

SEQ ID NO: 5294 - protein, 140 aa, Homo sapiens
MAEDGDPFAKLIVETDTFGSRVRVRGAETGLYICMNKKGKLIAKSNGKGKDCVFTEIVLENNYTALQNAKYEGWYMAFTRKGRPRKGSKTRQHQREVHFMKRLPRGHHTTEQSLRFEFLNYPPFTRSLRGSQRTWAPEPR

SEQ ID NO: 5295 - protein, 233 aa, Homo sapiens
MGSPRSALSCLLLHLLVLCLQAQEGPGRGPALGRELASLFRAGREPQGVSQQHVREQSLVTDQLSRRLIRTYQLYSRTSGKHVQVLANKRINAMAEDGDPFAKLIVETDTFGSRVRVRGAETGLYICMNKKGKLIAKSNGKGKDCVFTEIVLENNYTALQNAKYEGWYMAFTRKGRPRKGSKTRQHQREVHFMKRLPRGHHTTEQSLRFEFLNYPPFTRSLRGSQRTWAPEPR

SEQ ID NO: 5296 - protein, 244 aa, Homo sapiens
MGSPRSALSCLLLHLLVLCLQAQEGPGRGPALGRELASLFRAGREPQGVSQQVTVQSSPNFTQHVREQSLVTDQLSRRLIRTYQLYSRTSGKHVQVLANKRINAMAEDGDPFAKLIVETDTFGSRVRVRGAETGLYICMNKKGKLIAKSNGKGKDCVFTEIVLENNYTALQNAKYEGWYMAFTRKGRPRKGSKTRQHQREVHFMKRLPRGHHTTEQSLRFEFLNYPPFTRSLRGSQRTWAPEPR

SEQ ID NO: 5297 - protein, 204 aa, Homo sapiens
MGSPRSALSCLLLHLLVLCLQAQHVREQSLVTDQLSRRLIRTYQLYSRTSGKHVQVLANKRINAMAEDGDPFAKLIVETDTFGSRVRVRGAETGLYICMNKKGKLIAKSNGKGKDCVFTEIVLENNYTALQNAKYEGWYMAFTRKGRPRKGSKTRQHQREVHFMKRLPRGHHTTEQSLRFEFLNYPPFTRSLRGSQRTWAPEPR

SEQ ID NO: 5298 - protein, 37 aa, Homo sapiens
MGSPRSALSCLLLHLLVLCLQAQVRRGARRRGPGAPV

SEQ ID NO: 5299 - protein, 215 aa, Homo sapiens
MGSPRSALSCLLLHLLVLCLQAQVTVQSSPNFTQHVREQSLVTDQLSRRLIRTYQLYSRTSGKHVQVLANKRINAMAEDGDPFAKLIVETDTFGSRVRVRGAETGLYICMNKKGKLIAKSNGKGKDCVFTEIVLENNYTALQNAKYEGWYMAFTRKGRPRKGSKTRQHQREVHFMKRLPRGHHTTEQSLRFEFLNYPPFTRSLRGSQRTWAPEPR

SEQ ID NO: 5300 - protein, 234 aa, Homo sapiens [sequence omitted]

SEQ ID NO: 5301 - protein, 223 aa, Homo sapiens
MKFVPCLLLVTLSCLGTLGQAPRQKQGSTGEEFHFQTGGRDSCTMRPSSLGQGAGEVWLRVDCRNTDQTYWCEYRGQPSMCQAFAADPKPYWNQALQELRRLHHACQGAPVLRPSVCREAGPQAHMQQVTSSLKGSPEPNQQPEAGTPSLRPKATVKLTEATQLGKDSMEELGKAKPTTRPTAKPTQPGPRPGGNEEAKKKAWEHCWKPFQALCAFLISFFRG

SEQ ID NO: 5302 - protein, 258 aa, Homo sapiens
MTPPKLRASLSPSLLLLLSGCLLAAARREKGAASNVAEPVPGPTGGSSGRFLSPEQHACSWQLLLPAPEAAAGSELALRCQSPDGARHQCAYRGHPERCAAYAARRAHFWKQVLGGLRKKRRPCHDPAPLQARLCAGKKGHGAELRLVPRASPPARPTVAGFAGESKPRARNRGRTRERASGPAAGTPPPQSAPPKENPSERKTNEGKRKAALVPNEERPMGTGPDPDGLDGNAELTETYCAEKWHSLCNFFVNFWNG

SEQ ID NO: 5303 - skipped

SEQ ID NO: 5304 - protein, 812 aa, Homo sapiens
MAAVTRDFGEMLLHSGRVLPAEAQPWGAPVEVESFLVHPGDLLQLRCRLRDDVQSINWLRDGVQLAESNRTRITGEEVEVQDSVPADSGLYACVTSSPSGSDTTYFSVNVSDALPSSEDDDDDDDSSSEEKETDNTKPNRMPVAPYWTSPEKMEKKLHAVPAAKTVKFKCPSSGTPNPTLRWLKNGKEFKPDHRIGGYKVRYATWSIIMDSVVPSDKGNYTCIVENEYGSINHTYQLDVVERSPHRPILQAGLPANKTVALGSNVEFMCKVYSDPQPHIQWLKHIEVNGSKIGPDNLPYVQILKTAGVNTTDKEMEVLHLRNVSFEDAGEYTCLAGNSIGLSHHSAWLTVLEALEERPAVMTSPLYLEIIIYCTGAFLISCMVGSVIVYKMKSGTKKSDFHSQMAVHKLAKSIPLRRQVSADSSASMNSGVLLVRPSRLSSSGTPMLAGVSEYELPEDPRWELPRDRLVLGKPLGEGCFGQVVLAEAIGLDKDKPNRVTKVAVKMLKSDATEKDLSDLISEMEMMKMIGKHKNIINLLGACTQDGPLYVIVEYASKGNLREYLQARRPPGLEYCYNPSHNPEEQLSSKDLVSCAYQVARGMEYLASKKCIHRDLAARNVLVTEDNVMKIADFGLARDIHHIDYYKKTTNGRLPVKWMAPEALFDRIYTHQSDVWSFGVLLWEIFTLGGSPYPGVPVEELFKLLKEGHRMDKPSNCTNELYMMMRDCWHAVPSQRPTFKQLVEDLDRIVALTSNQEYLDLSMPLDQYSPSFPDTRSSTCSSGEDSVFSHEPLPEEPCLPRHPAQLANGGLKRR

SEQ ID NO: 5305 - protein, 853 aa, Homo sapiens
MEARVSLKRRIELTVEYPWRCGALSPTSNCRTGMWSWKCLLFWAVLVTATLCTARPSPTLPEQAQPWGAPVEVESFLVHPGDLLQLRCRLRDDVQSINWLRDGVQLAESNRTRITGEEVEVQDSVPADSGLYACVTSSPSGSDTTYFSVNVSDALPSSEDDDDDDDSSSEEKETDNTKPNPVAPYWTSPEKMEKKLHAVPAAKTVKFKCPSSGTPNPTLRWLKNGKEFKPDHRIGGYKVRYATWSIIMDSVVPSDKGNYTCIVENEYGSINHTYQLDVVERSPHRPILQAGLPANKTVALGSNVEFMCKVYSDPQPHIQWLKHIEVNGSKIGPDNLPYVQILKTAGVNTTDKEMEVLHLRNVSFEDAGEYTCLAGNSIGLSHHSAWLTVLEALEERPAVMTSPLYLEIIIYCTGAFLISCMVGSVIVYKMKSGTKKSDFHSQMAVHKLAKSIPLRRQVTVSADSSASMNSGVLLVRPSRLSSSGTPMLAGVSEYELPEDPRWELPRDRLVLGKPLGEGCFGQVVLAEAIGLDKDKPNRVTKVAVKMLKSDATEKDLSDLISEMEMMKMIGKHKNIINLLGACTQDGPLYVIVEYASKGNLREYLQARRPPGLEYCYNPSHNPEEQLSSKDLVSCAYQVARGMEYLASKKCIHRDLAARNVLVTEDNVMKIADFGLARDIHHIDYYKKTTNGRLPVKWMAPEALFDRIYTHQSDVWSFGVLLWEIFTLGGSPYPGVPVEELFKLLKEGHRMDKPSNCTNELYMMMRDCWHAVPSQRPTFKQLVEDLDRIVALTSNQEYLDLSMPLDQYSPSFPDTRSSTCSSGEDSVFSHEPLPEEPCLPRHPAQLANGGLKRR

SEQ ID NO: 5306 - protein, 139 aa, Homo sapiens
MEKKLHAVPAAKTVKFKCPSSGTPNPTLRWLKNGKEFKPDHRIGGYKVRYATWSIIMDSVVPSDKGNYTCIVENEYGSINHTYQLDVVERSPHRPILQAGLPANKTVALGSNVEFMCKVYSDPQPHIQWLKHIEVNGSK

SEQ ID NO: 5307 - protein, 61 aa, Homo sapiens
MWSWKCLLFWAVLVTATLCTARPSPTLPEQACPDLQEAKWCSASFHSITPLPFGLGTRLSD

SEQ ID NO: 5308 - protein, 107 aa, Homo sapiens
MWSWKCLLFWAVLVTATLCTARPSPTLPEQAQPWGAPVEVESFLVHPGDLLQLRCRLRDDVQSINWLRDGVQLAESNRTRITGEEVEVQDSVPADSGLYACVTSSPS

SEQ ID NO: 5309 - protein, 150 aa, Homo sapiens
MWSWKCLLFWAVLVTATLCTARPSPTLPEQAQPWGAPVEVESFLVHPGDLLQLRCRLRDDVQSINWLRDGVQLAESNRTRITGEEVEVQDSVPADSGLYACVTSSPSGSDTTYFSVNVSACPDLQEAKWCSASFHSITPLPFGLGTRLSD

SEQ ID NO: 5310 - protein, 820 aa, Homo sapiens
MWSWKCLLFWAVLVTATLCTARPSPTLPEQAQPWGAPVEVESFLVHPGDLLQLRCRLRDDVQSINWLRDGVQLAESNRTRITGEEVEVQDSVPADSGLYACVTSSPSGSDTTYFSVNVSDALPSSEDDDDDDDSSSEEKETDNTKPNPVAPYWTSPEKMEKKLHAVPAAKTVKFKCPSSGTPNPTLRWLKNGKEFKPDHRIGGYKVRYATWSIIMDSVVPSDKGNYTCIVENEYGSINHTYQLDVVERSPHRPILQAGLPANKTVALGSNVEFMCKVYSDPQPHIQWLKHIEVNGSKIGPDNLPYVQILKTAGVNTTDKEMEVLHLRNVSFEDAGEYTCLAGNSIGLSHHSAWLTVLEALEERPAVMTSPLYLEIIIYCTGAFLISCMVGSVIVYKMKSGTKKSDFHSQMAVHKLAKSIPLRRQVTVSADSSASMNSGVLLVRPSRLSSSGTPMLAGVSEYELPEDPRWELPRDRLVLGKPLGEGCFGQVVLAEAIGLDKDKPNRVTKVAVKMLKSDATEKDLSDLISEMEMMKMIGKHKNIINLLGACTQDGPLYVIVEYASKGNLREYLQARRPPGLEYCYNPSHNPEEQLSSKDLVSCAYQVARGMEYLASKKCIHRDLAARNVLVTEDNVMKIADFGLARDIHHIDYYKKTTNGRLPVKWMAPEALFDRIYTHQSDVWSFGVLLWEIFTLGGSPYPGVPVEELFKLLKEGHRMDKPSNCTNELYMMMRDCWHAVPSQRPTFKQLVEDLDRIVALTSNQEYLDLSMPLDQYSPSFPDTRSSTCSSGEDSVFSHEPLPEEPCLPRHPAQLANGGLKRR

SEQ ID NO: 5311 - protein, 820 aa, Homo sapiens; identical to SEQ ID NO: 5310

SEQ ID NO: 5312 - protein, 820 aa, Homo sapiens; identical to SEQ ID NO: 5310

SEQ ID NO: 5313 - protein, 822 aa, Homo sapiens [sequence omitted]

SEQ ID NO: 5314 - protein, 298 aa, Homo sapiens
MWSWKCLLFWAVLVTATLCTARPSPTLPEQAQPWGAPVEVESFLVHPGDLLQLRCRLRDDVQSINWLRDGVQLAESNRTRITGEEVEVQDSVPADSGLYACVTSSPSGSDTTYFSVNVSDALPSSEDDDDDDDSSSEEKETDNTKPNRMPVAPYWTSPEKMEKKLHAVPAAKTVKFKCPSSGTPNPTLRWLKNGKEFKPDHRIGGYKVRYATWSIIMDSVVPSDKGNYTCIVENEYGSINHTYQLDVVERSPHRPILQAGLPANKTVALGSNVEFMCKVYSDPQPHIQWLKHIEVNGS

SEQ ID NO: 5315 - protein, 820 aa, Homo sapiens
MWSWKCLLFWAVLVTATLCTARPSPTLPEQAQPWGAPVEVESFLVHPGDLLQLRCRLRDDVQSINWLRDGVQLAESNRTRITGEEVEVQDSVPADSGLYACVTSSPSGSDTTYFSVNVSDALPSSEDDDDDDDSSSEEKETDNTKPNRMPVAPYWTSPEKMEKKLHAVPAAKTVKFKCPSSGTPNPTLRWLKNGKEFKPDHRIGGYKVRYATWSIIMDSVVPSDKGNYTCIVENEYGSINHTYQLDVVERSPHRPILQAGLPANKTVALGSNVEFMCKVYSDPQPHIQWLKHIEVNGSKIGPDNLPYVQILKTAGVNTTDKEMEVLHLRNVSFEDAGEYTCLAGNSIGLSHHSAWLTVLEALEERPAVMTSPLYLEIIIYCTGAFLISCMVGSVIVYKMKSGTKKSDFHSQMAVHKLAKSIPLRRQVSADSSASMNSGVLLVRPSRLSSSGTPMLAGVSEYELPEDPRWELPRDRLVLGKPLGEGCFGQVVLAEAIGLDKDKPNRVTKVAVKMLKSDATEKDLSDLISEMEMMKMIGKHKNIINLLGACTQDGPLYVIVEYASKGNLREYLQARRPPGLEYCYNPSHNPEEQLSSKDLVSCAYQVARGMEYLASKKCIHRDLAARNVLVTEDNVMKIADFGLARDIHHIDYYKKTTNGRLPVKWMAPEALFDRIYTHQSDVWSFGVLLWEIFTLGGSPYPGVPVEELFKLLKEGHRMDKPSNCTNELYMMMRDCWHAVPSQRPTFKQLVEDLDRIVALTSNQEYLDLSMPLDQYSPSFPDTRSSTCSSGEDSVFSHEPLPEEPCLPRHPAQLANGGLKRR

SEQ ID NO: 5316 - protein, 367 aa, Homo sapiens
MWSWKCLLFWAVLVTATLCTARPSPTLPEQAQPWGAPVEVESFLVHPGDLLQLRCRLRDDVQSINWLRDGVQLAESNRTRITGEEVEVQDSVPADSGLYACVTSSPSGSDTTYFSVNVSVPIDALPSSEDDDDDDDSSSEEKETDNTKPNPVAPYWTSPEKMEKKLHAVPAAKTVKFKCPSSGTPNPTLRWLKNGKEFKPDHRIGGYKVRYATWSIIMDSVVPSDKGNYTCIVENEYGSINHTYQLDVVERSPHRPILQAGLPANKTVALGSNVEFMCKVYSDPQPHIQWLKHIEVNGSKIGPDNLPYVQILKHSGINSSDAEVLTLFNVTEAQSGEYVCKVSNYIGEANQSAWLTVTRPVAKDCWS

SEQ ID NO: 5317 - protein, 55 aa, Homo sapiens
MWSWKCLLFWAVLVTATLCTARPSPTLPEQDALPSSEDDDDDDDSSSEEKETDNT

SEQ ID NO: 5318 - protein, 85 aa, Homo sapiens
MWSWKCLLFWAVLVTATLCTARPSPTLPEQDALPSSEDDDDDDDSSSEEKETDNTKPNPVAPYWTSPEKMEKKLHAVPAAKTVKF

SEQ ID NO: 5319 - protein, 145 aa, Homo sapiens
MWSWKCLLFWAVLVTATLCTARPSPTLPEQDALPSSEDDDDDDDSSSEEKETDNTKPNPVAPYWTSPEKMEKKLHAVPAAKTVKFKCPSSGTPNPTLRWLKNGKEFKPDHRIGGYKVRYATWSIIMDSVVPSDKGNYTCIVENEY

SEQ ID NO: 5320 - protein, 733 aa, Homo sapiens
MWSWKCLLFWAVLVTATLCTARPSPTLPEQDALPSSEDDDDDDDSSSEEKETDNTKPNPVAPYWTSPEKMEKKLHAVPAAKTVKFKCPSSGTPNPTLRWLKNGKEFKPDHRIGGYKVRYATWSIIMDSVVPSDKGNYTCIVENEYGSINHTYQLDVVERSPHRPILQAGLPANKTVALGSNVEFMCKVYSDPQPHIQWLKHIEVNGSKIGPDNLPYVQILKHSGINSSDAEVLTLFNVTEAQSGEYVCKVSNYIGEANQSAWLTVTRPVAKALEERPAVMTSPLYLEIIIYCTGAFLISCMVGSVIVYKMKSGTKKSDFHSQMAVHKLAKSIPLRRQVTVSADSSASMNSGVLLVRPSRLSSSGTPMLAGVSEYELPEDPRWELPRDRLVLGKPLGEGCFGQVVLAEAIGLDKDKPNRVTKVAVKMLKSDATEKDLSDLISEMEMMKMIGKHKNIINLLGACTQDGPLYVIVEYASKGNLREYLQARRPPGLEYCYNPSHNPEEQLSSKDLVSCAYQVARGMEYLASKKCIHRDLAARNVLVTEDNVMKIADFGLARDIHHIDYYKKTTNGRLPVKWMAPEALFDRIYTHQSDVWSFGVLLWEIFTLGGSPYPGVPVEELFKLLKEGHRMDKPSNCTNELYMMMRDCWHAVPSQRPTFKQLVEDLDRIVALTSNQEYLDLSMPLDQYSPSFPDTRSSTCSSGEDSVFSHEPLPEEPCLPRHPAQLANGGLKRR

SEQ ID NO: 5321 - protein, 228 aa, Homo sapiens
MWSWKCLLFWAVLVTATLCTARPSPTLPEQDALPSSEDDDDDDDSSSEEKETDNTKPNPVAPYWTSPEKMEKKLHAVPAAKTVKFKCPSSGTPNPTLRWLKNGKEFKPDHRIGGYKVRYATWSIIMDSVVPSDKGNYTCIVENEYGSINHTYQLDVVERSPHRPILQAGLPANKTVALGSNVEFMCKVYSDPQPHIQWLKHIEVNGSKIGPDNLPYVQILKPWKRGRQ

SEQ ID NO: 5322 - protein, 731 aa, Homo sapiens
MWSWKCLLFWAVLVTATLCTARPSPTLPEQDALPSSEDDDDDDDSSSEEKETDNTKPNPVAPYWTSPEKMEKKLHAVPAAKTVKFKCPSSGTPNPTLRWLKNGKEFKPDHRIGGYKVRYATWSIIMDSVVPSDKGNYTCIVENEYGSINHTYQLDVVERSPHRPILQAGLPANKTVALGSNVEFMCKVYSDPQPHIQWLKHIEVNGSKIGPDNLPYVQILKTAGVNTTDKEMEVLHLRNVSFEDAGEYTCLAGNSIGLSHHSAWLTVLEALEERPAVMTSPLYLEIIIYCTGAFLISCMVGSVIVYKMKSGTKKSDFHSQMAVHKLAKSIPLRRQVTVSADSSASMNSGVLLVRPSRLSSSGTPMLAGVSEYELPEDPRWELPRDRLVLGKPLGEGCFGQVVLAEAIGLDKDKPNRVTKVAVKMLKSDATEKDLSDLISEMEMMKMIGKHKNIINLLGACTQDGPLYVIVEYASKGNLREYLQARRPPGLEYCYNPSHNPEEQLSSKDLVSCAYQVARGMEYLASKKCIHRDLAARNVLVTEDNVMKIADFGLARDIHHIDYYKKTTNGRLPVKWMAPEALFDRIYTHQSDVWSFGVLLWEIFTLGGSPYPGVPVEELFKLLKEGHRMDKPSNCTNELYMMMRDCWHAVPSQRPTFKQLVEDLDRIVALTSNQEYLDLSMPLDQYSPSFPDTRSSTCSSGEDSVFSHEPLPEEPCLPRHPAQLANGGLKRR

SEQ ID NO: 5323 - protein, 142 aa, Homo sapiens
MWSWKCLLFWAVLVTATLCTARPSPTLPEQDALPSSEDDDDDDDSSSEEKETDNTKPNRMPVAPYWTSPEKMEKKLHAVPAAKTVKFKCPSSGTPNPTLRWLKNGKEFKPDHRIGGYKVRYATWSIIMDSVVPSDKGNYTCI

SEQ ID NO: 5324 - protein, 733 aa, Homo sapiens
MWSWKCLLFWAVLVTATLCTARPSPTLPEQDALPSSEDDDDDDDSSSEEKETDNTKPNRMPVAPYWTSPEKMEKKLHAVPAAKTVKFKCPSSGTPNPTLRWLKNGKEFKPDHRIGGYKVRYATWSIIMDSVVPSDKGNYTCIVENEYGSINHTYQLDVVERSPHRPILQAGLPANKTVALGSNVEFMCKVYSDPQPHIQWLKHIEVNGSKIGPDNLPYVQILKTAGVNTTDKEMEVLHLRNVSFEDAGEYTCLAGNSIGLSHHSAWLTVLEALEERPAVMTSPLYLEIIIYCTGAFLISCMVGSVIVYKMKSGTKKSDFHSQMAVHKLAKSIPLRRQVTVSADSSASMNSGVLLVRPSRLSSSGTPMLAGVSEYELPEDPRWELPRDRLVLGKPLGEGCFGQVVLAEAIGLDKDKPNRVTKVAVKMLKSDATEKDLSDLISEMEMMKMIGKHKNIINLLGACTQDGPLYVIVEYASKGNLREYLQARRPPGLEYCYNPSHNPEEQLSSKDLVSCAYQVARGMEYLASKKCIHRDLAARNVLVTEDNVMKIADFGLARDIHHIDYYKKTTNGRLPVKWMAPEALFDRIYTHQSDVWSFGVLLWEIFTLGGSPYPGVPVEELFKLLKEGHRMDKPSNCTNELYMMMRDCWHAVPSQRPTFKQLVEDLDRIVALTSNQEYLDLSMPLDQYSPSFPDTRSSTCSSGEDSVFSHEPLPEEPCLPRHPAQLANGGLKRR

SEQ ID NO: 5325 - protein, 134 aa, Homo sapiens
VSCAYQVARGMEYLASKKCIHRDLAARNVLVTEDNVMKIADFGLARDIHHIDYYKKTTNGRLPVKWMAPEALFDRIYTHQSDVWSFGVLLWEIFTLGGSPYPGVPVEELFKLLKEGHRMDKPSNCTNELPAAGT

SEQ ID NO: 5326 - protein, 371 aa, Homo sapiens
FSSQPAVHKLTKRIPLRRQVTVSAESSSSMNSNTPLVRITTRLSSTADTPMLAGVSEYELPEDPKWEFPRDKLTLGKPLGEGCFGQVVMAEAVGIDKDKPKEAVTVAVKMLKDDATEKDLSDLVSEMEMMKMIGKHKNIINLLGACTQDGPLYVIVEYASKGNLREYLRARRPPGMEYSYDINRVPEEQMTFKDLVSCTYQLARGMEYLASQKCIHRDLAARNVLVTENNVMKIADFGLARDINNIDYYKKTTNGRLPVKWMAPEALFDRVYTHQSDVWSFGVLMWEIFTLGGSPYPGIPVEELFKLLKEGHRMDKPANCTNELNTWTSANLSNSIHLVTLTQEVLVLQEMILFFLQTPCLTNHAFLSIHT

SEQ ID NO: 5327 - protein, 593 aa, Homo sapiens
MCLNKTKQLFGVAKRLPFWRKERSPHRPILQAGLPANASTVVGGDVEFVCKVYSDAQPHIQWIKHVEKNGSKYGPDGLPYLKVLKAAGVNTTDKEIEVLYIRNVTFEDAGEYTCLAGNSIGISFHSAWLTVLPAPGREKEITASPDYLEIAIYCIGVFLIACMVVTVILCRMKNTTKKPDFSSQPAVHKLTKRIPLRRQVTVSAESSSSMNSNTPLVRITTRLSSTADTPMLAGVSEYELPEDPKWEFPRDKLTLGKPLGEGCFGQVVMAEAVGIDKDKPKEAVTVAVKMLKDDATEKDLSDLVSEMEMMKMIGKHKNIINLLGACTQDGPLYVIVEYASKGNLREYLRARRPPGMEYSYDINRVPEEQMTFKDLVSCTYQLARGMEYLASQKCIHRDLAARNVLVTENNVMKIADFGLARDINNIDYYKKTTNGRLPVKWMAPEALFDRVYTHQSDVWSFGVLMWEIFTLGGSPYPGIPVEELFKLLKEGHRMDKPANCTNELYMMMRDCWHAVPSQRPTFKQLVEDLDRILTLTTNEEYLDLSQPLEQYSPSYPDTRSSCSSGDDSVFSPDPMPYEPCLPQYPHINGSVKT

SEQ ID NO: 5328 - protein, 669 aa, Homo sapiens
MVSWGRFICLVVVTMATLSLARPSFSLVEDTTLEPEDAISSGDDEDDTDGAEDFVSENSNNKRAPYWTNTEKMEKRLHAVPAANTVKFRCPAGGNPMPTMRWLKNGKEFKQEHRIGGYKVRNQHWSLIMESVVPSDKGNYTCVVENEYGSINHTYHLDVVERSPHRPILQAGLPANASTVVGGDVEFVCKVYSDAQPHIQWIKHVEKNGSKYGPDGLPYLKVLKAAGVNTTDKEIEVLYIRNVTFEDAGEYTCLAGNSIGISFHSAWLTVLPAPGREKEITASPDYLEIAIYCIGVFLIACMVVTVILCRMKNTTKKPDFSSQPAVHKLTKRIPLRRQVSAESSSSMNSNTPLVRITTRLSSTADTPMLAGVSEYELPEDPKWEFPRDKLTLGKPLGEGCFGQVVMAEAVGIDKDKPKEAVTVAVKMLKDDATEKDLSDLVSEMEMMKMIGKHKNIINLLGACTQDGPLYVIVEYASKGNLREYLRARRPPGMEYSYDINRVPEEQMTFKDLVSCTYQLARGMEYLASQKCIHRDLAARNVLVTENNVMKIADFGLARDINNIDYYKKTTNGRLPVKWMAPEALFDRVYTHQSDVWSFGVLMWEIFTLGGSPYPGIPVEELFKLLKEGHRMDKPANCTNELYMMMRDCWHAVPSQRPTFKQLVEDLDRI

SEQ ID NO: 5329 - protein, 707 aa, Homo sapiens
MVSWGRFICLVVVTMATLSLARPSFSLVEDTTLEPEDAISSGDDEDDTDGAEDFVSENSNNKRAPYWTNTEKMEKRLHAVPAANTVKFRCPAGGNPMPTMRWLKNGKEFKQEHRIGGYKVRNQHWSLIMESVVPSDKGNYTCVVENEYGSINHTYHLDVVERSPHRPILQAGLPANASTVVGGDVEFVCKVYSDAQPHIQWIKHVEKNGSKYGPDGLPYLKVLKAAGVNTTDKEIEVLYIRNVTFEDAGEYTCLAGNSIGISFHSAWLTVLPAPGREKEITASPDYLEIAIYCIGVFLIACMVVTVILCRMKNTTKKPDFSSQPAVHKLTKRIPLRRQVTVSAESSSSMNSNTPLVRITTRLSSTADTPMLAGVSEYELPEDPKWEFPRDKLTLGKPLGEGCFGQVVMAEAVGIDKDKPKEAVTVAVKMLKDDATEKDLSDLVSEMEMMKMIGKHKNIINLLGACTQDGPLYVIVEYASKGNLREYLRARRPPGMEYSYDINRVPEEQMTFKDLVSCTYQLARGMEYLASQKCIHRDLAARNVLVTENNVMKIADFGLARDINNIDYYKKTTNGRLPVKWMAPEALFDRVYTHQSDVWSFGVLMWEIFTLGGSPYPGIPVEELFKLLKEGHRMDKPANCTNELYMMMRDCWHAVPSQRPTFKQLVEDLDRILTLTTNEEEKKVSGAVDCHKPPCNPSHLPCVLAVDQ

SEQ ID NO: 5330 - protein, 732 aa, Homo sapiens
MVSWGRFICLVVVTMATLSLARPSFSLVEDTTLEPEDAISSGDDEDDTDGAEDFVSENSNNKRAPYWTNTEKMEKRLHAVPAANTVKFRCPAGGNPMPTMRWLKNGKEFKQEHRIGGYKVRNQHWSLIMESVVPSDKGNYTCVVENEYGSINHTYHLDVVERSPHRPILQAGLPANASTVVGGDVEFVCKVYSDAQPHIQWIKHVEKNGSKYGPDGLPYLKVLKAAGVNTTDKEIEVLYIRNVTFEDAGEYTCLAGNSIGISFHSAWLTVLPAPGREKEITASPDYLEIAIYCIGVFLIACMVVTVILCRMKNTTKKPDFSSQPAVHKLTKRIPLRRQVTVSAESSSSMNSNTPLVRITTRLSSTADTPMLAGVSEYELPEDPKWEFPRDKLTLGKPLGEGCFGQVVMAEAVGIDKDKPKEAVTVAVKMLKDDATEKDLSDLVSEMEMMKMIGKHKNIINLLGACTQDGPLYVIVEYASKGNLREYLRARRPPGMEYSYDINRVPEEQMTFKDLVSCTYQLARGMEYLASQKCIHRDLAARNVLVTENNVMKIADFGLARDINNIDYYKKTTNGRLPVKWMAPEALFDRVYTHQSDVWSFGVLMWEIFTLGGSPYPGIPVEELFKLLKEGHRMDKPANCTNELYMMMRDCWHAVPSQRPTFKQLVEDLDRILTLTTNEEYLDLSQPLEQYSPSYPDTRSSCSSGDDSVFSPDPMPYEPCLPQYPHINGSVKT

SEQ ID NO: 5331 - protein, 680 aa, Homo sapiens
MVSWGRFICLVVVTMATLSLARPSFSLVEDTTLEPEDAISSGDDEDDTDGAEDFVSENSNNKRAPYWTNTEKMEKRLHAVPAANTVKFRCPAGGNPMPTMRWLKNGKEFKQEHRIGGYKVRNQHWSLIMESVVPSDKGNYTCVVENEYGSINHTYHLDVVERSPHRPILQAGLPANASTVVGGDVEFVCKVYSDAQPHIQWIKHVEKNGSKYGPDGLPYLKVLKHSGINSSNAEVLALFNVTEADAGEYICKVSNYIGQANQSAWLTVLPKQQAPGREKEITASPDYLEIAIYCIGVFLIACMVVTVILCRMKNTTKKPDFSSQPAVHKLTKRIPLRRQVTVSAESSSSMNSNTPLVRITTRLSSTADTPMLAGVSEYELPEDPKWEFPRDKLTLGKPLGEGCFGQVVMAEAVGIDKDKPKEAVTVAVKMLKDDATEKDLSDLVSEMEMMKMIGKHKNIINLLGACTQDGPLYVIVEYASKGNLREYLRARRPPGMEYSYDINRVPEEQMTFKDLVSCTYQLARGMEYLASQKCIHRDLAARNVLVTENNVMKIADFGLARDINNIDYYKKTTNGRLPVKWMAPEALFDRVYTHQSDVWSFGVLMWEIFTLGGSPYPGIPVEELFKLLKEGHRMDKPANCTNELYMMMRDCWHAVPSQRPTFKQLVEDLDRILTLTTNEI

SEQ ID NO: 5332 - protein, 64 aa, Homo sapiens
MVSWGRFICLVVVTMATLSLARPSFSLVEDTTLEPEDAISSGDDEDDTDGAEDFVSENSNNKSK

SEQ ID NO: 5333 - protein, 144 aa, Homo sapiens
MVSWGRFICLVVVTMATLSLARPSFSLVEDTTLEPEEPPTKYQISQPEVYVAAPGESLEMPSHPEMMRMTPMVRKILSVRTVTTRVSNCPAPMVPERGAWREVLPVTCLLVDSSAPCCVPRPLPFPAVSTFLTFKPENKPVLLH

SEQ ID NO: 5334 - protein, 709 aa, Homo sapiens
MVSWGRFICLVVVTMATLSLARPSFSLVEDTTLEPEEPPTKYQISQPEVYVAAPGESLEVRCLLKDAAVISWTKDGVHLGPNNRTVLIGEYLQIKGATPRDSGLYACTASRTVDSETWYFMVNVTDAISSGDDEDDTDGAEDFVSENSNNKRAPYWTNTEKMEKRLHAVPAANTVKFRCPAGGNPMPTMRWLKNGKEFKQEHRIGGYKVRNQHWSLIMESVVPSDKGNYTCVVENEYGSINHTYHLDVVAPGREKEITASPDYLEIAIYCIGVFLIACMVVTVILCRMKNTTKKPDFSSQPAVHKLTKRIPLRRQVTVSAESSSSMNSNTPLVRITTRLSSTADTPMLAGVSEYELPEDPKWEFPRDKLTLGKPLGEGCFGQVVMAEAVGIDKDKPKEAVTVAVKMLKDDATEKDLSDLVSEMEMMKMIGKHKNIINLLGACTQDGPLYVIVEYASKGNLREYLRARRPPGMEYSYDINRVPEEQMTFKDLVSCTYQLARGMEYLASQKCIHRDLAARNVLVTENNVMKIADFGLARDINNIDYYKKTTNGRLPVKWMAPEALFDRVYTHQSDVWSFGVLMWEIFTLGGSPYPGIPVEELFKLLKEGHRMDKPANCTNELYMMMRDCWHAVPSQRPTFKQLVEDLDRILTLTTNEEYLDLSQPLEQYSPSYPDTRSSCSSGDDSVFSPDPMPYEPCLPQYPHINGSVKT

SEQ ID NO: 5335 - protein, 821 aa, Homo sapiens
MVSWGRFICLVVVTMATLSLARPSFSLVEDTTLEPEEPPTKYQISQPEVYVAAPGESLEVRCLLKDAAVISWTKDGVHLGPNNRTVLIGEYLQIKGATPRDSGLYACTASRTVDSETWYFMVNVTDAISSGDDEDDTDGAEDFVSENSNNKRAPYWTNTEKMEKRLHAVPAANTVKFRCPAGGNPMPTMRWLKNGKEFKQEHRIGGYKVRNQHWSLIMESVVPSDKGNYTCVVENEYGSINHTYHLDVVERSPHRPILQAGLPANASTVVGGDVEFVCKVYSDAQPHIQWIKHVEKNGSKYGPDGLPYLKVLKAAGVNTTDKEIEVLYIRNVTFEDAGEYTCLAGNSIGISFHSAWLTVLPAPGREKEITASPDYLEIAIYCIGVFLIACMVVTVILCRMKNTTKKPDFSSQPAVHKLTKRIPLRRQVTVSAESSSSMNSNTPLVRITTRLSSTADTPMLAGVSEYELPEDPKWEFPRDKLTLGKPLGEGCFGQVVMAEAVGIDKDKPKEAVTVAVKMLKDDATEKDLSDLVSEMEMMKMIGKHKNIINLLGACTQDGPLYVIVEYASKGNLREYLRARRPPGMEYSYDINRVPEEQMTFKDLVSCTYQLARGMEYLASQKCIHRDLAARNVLVTENNVMKIADFGLARDINNIDYYKKTTNGRLPVKWMAPEALFDRVYTHQSDVWSFGVLMWEIFTLGGSPYPGIPVEELFKLLKEGHRMDKPANCTNELYMMMRDCWHAVPSQRPTFKQLVEDLDRILTLTTNEEYLDLSQPLEQYSPSYPDTRSSCSSGDDSVFSPDPMPYEPCLPQYPHINGSVKT

SEQ ID NO: 5336 - protein, 821 aa, Homo sapiens
MVSWGRFICLVVVTMATLSLARPSFSLVEDTTLEPEEPPTKYQISQPEVYVAAPGESLEVRCLLKDAAVISWTKDGVHLGPNNRTVLIGEYLQIKGATPRDSGLYACTASRTVDSETWYFMVNVTDAISSGDDEDDTDGAEDFVSENSNNKRAPYWTNTEKMEKRLHAVPAANTVKFRCPAGGNPMPTMRWLKNGKEFKQEHRIGGYKVRNQHWSLIMESVVPSDKGNYTCVVENEYGSINHTYHLDVVERSPHRPILQAGLPANASTVVGGDVEFVCKVYSDAQPHIQWIKHVEKNGSKYGPDGLPYLKVLKVFAAGVNTTDKEIEVLYIRNVTFEDAGEYTCLAGNSIGISFHSAWLTVLPAPGREKEITASPDYLEIAIYCIGVFLIACMVVTVILCRMKNTTKKPDFSSQPAVHKLTKRIPLRRQVSAESSSSMNSNTPLVRITTRLSSTADTPMLAGVSEYELPEDPKWEFPRDKLTLGKPLGEGCFGQVVMAEAVGIDKDKPKEAVTVAVKMLKDDATEKDLSDLVSEMEMMKMIGKHKNIINLLGACTQDGPLYVIVEYASKGNLREYLRARRPPGMEYSYDINRVPEEQMTFKDLVSCTYQLARGMEYLASQKCIHRDLAARNVLVTENNVMKIADFGLARDINNIDYYKKTTNGRLPVKWMAPEALFDRVYTHQSDVWSFGVLMWEIFTLGGSPYPGIPVEELFKLLKEGHRMDKPANCTNELYMMMRDCWHAVPSQRPTFKQLVEDLDRILTLTTNEEYLDLSQPLEQYSPSYPDTRSSCSSGDDSVFSPDPMPYEPCLPQYPHINGSVKT

SEQ ID NO: 5337 - protein, 819 aa, Homo sapiens
MVSWGRFICLVVVTMATLSLARPSFSLVEDTTLEPEEPPTKYQISQPEVYVAAPGESLEVRCLLKDAAVISWTKDGVHLGPNNRTVLIGEYLQIKGATPRDSGLYACTASRTVDSETWYFMVNVTDAISSGDDEDDTDGAEDFVSENSNNKRAPYWTNTEKMEKRLHAVPAANTVKFRCPAGGNPMPTMRWLKNGKEFKQEHRIGGYKVRNQHWSLIMESVVPSDKGNYTCVVENEYGSINHTYHLDVVERSPHRPILQAGLPANASTVVGGDVEFVCKVYSDAQPHIQWIKHVEKNGSKYGPDGLPYLKVLKAAGVNTTDKEIEVLYIRNVTFEDAGEYTCLAGNSIGISFHSAWLTVLPAPGREKEITASPDYLEIAIYCIGVFLIACMVVTVILCRMKNTTKKPDFSSQPAVHKLTKRIPLRRQVSAESSSSMNSNTPLVRITTRLSSTADTPMLAGVSEYELPEDPKWEFPRDKLTLGKPLGEGCFGQVVMAEAVGIDKDKPKEAVTVAVKMLKDDATEKDLSDLVSEMEMMKMIGKHKNIINLLGACTQDGPLYVIVEYASKGNLREYLRARRPPGMEYSYDINRVPEEQMTFKDLVSCTYQLARGMEYLASQKCIHRDLAARNVLVTENNVMKIADFGLARDINNIDYYKKTTNGRLPVKWMAPEALFDRVYTHQSDVWSFGVLMWEIFTLGGSPYPGIPVEELFKLLKEGHRMDKPANCTNELYMMMRDCWHAVPSQRPTFKQLVEDLDRILTLTTNEEYLDLSQPLEQYSPSYPDTRSSCSSGDDSVFSPDPMPYEPCLPQYPHINGSVKT

SEQ ID NO: 5338 - protein, 768 aa, Homo sapiens
MVSWGRFICLVVVTMATLSLARPSFSLVEDTTLEPEEPPTKYQISQPEVYVAAPGESLEVRCLLKDAAVISWTKDGVHLGPNNRTVLIGEYLQIKGATPRDSGLYACTASRTVDSETWYFMVNVTDAISSGDDEDDTDGAEDFVSENSNNKRAPYWTNTEKMEKRLHAVPAANTVKFRCPAGGNPMPTMRWLKNGKEFKQEHRIGGYKVRNQHWSLIMESVVPSDKGNYTCVVENEYGSINHTYHLDVVERSPHRPILQAGLPANASTVVGGDVEFVCKVYSDAQPHIQWIKHVEKNGSKYGPDGLPYLKVLKHSGINSSNAEVLALFNVTEADAGEYICKVSNYIGQANQSAWLTVLPKQQAPGREKEITASPDYLEIAIYCIGVFLIACMVVTVILCRMKNTTKKPDFSSQPAVHKLTKRIPLRRQVTVSAESSSSMNSNTPLVRITTRLSSTADTPMLAGVSEYELPEDPKWEFPRDKLTLGKPLGEGCFGQVVMAEAVGIDKDKPKEAVTVAVKMLKDDATEKDLSDLVSEMEMMKMIGKHKNIINLLGACTQDGPLYVIVEYASKGNLREYLRARRPPGMEYSYDINRVPEEQMTFKDLVSCTYQLARGMEYLASQKCIHRDLAARNVLVTENNVMKIADFGLARDINNIDYYKKTTNGRLPVKWMAPEALFDRVYTHQSDVWSFGVLMWEIFTLGGSPYPGIPVEELFKLLKEGHRMDKPANCTNELYMMMRDCWHAVPSQRPTFKQLVEDLDRILTLTTNE

SEQ ID NO: 5339 - protein, 769 aa, Homo sapiens
MVSWGRFICLVVVTMATLSLARPSFSLVEDTTLEPEEPPTKYQISQPEVYVAAPGESLEVRCLLKDAAVISWTKDGVHLGPNNRTVLIGEYLQIKGATPRDSGLYACTASRTVDSETWYFMVNVTDAISSGDDEDDTDGAEDFVSENSNNKRAPYWTNTEKMEKRLHAVPAANTVKFRCPAGGNPMPTMRWLKNGKEFKQEHRIGGYKVRNQHWSLIMESVVPSDKGNYTCVVENEYGSINHTYHLDVVERSPHRPILQAGLPANASTVVGGDVEFVCKVYSDAQPHIQWIKHVEKNGSKYGPDGLPYLKVLKHSGINSSNAEVLALFNVTEADAGEYICKVSNYIGQANQSAWLTVLPKQQAPGREKEITASPDYLEIAIYCIGVFLIACMVVTVILCRMKNTTKKPDFSSQPAVHKLTKRIPLRRQVTVSAESSSSMNSNTPLVRITTRLSSTADTPMLAGVSEYELPEDPKWEFPRDKLTLGKPLGEGCFGQVVMAEAVGIDKDKPKEAVTVAVKMLKDDATEKDLSDLVSEMEMMKMIGKHKNIINLLGACTQDGPLYVIVEYASKGNLREYLRARRPPGMEYSYDINRVPEEQMTFKDLVSCTYQLARGMEYLASQKCIHRDLAARNVLVTENNVMKIADFGLARDINNIDYYKKTTNGRLPVKWMAPEALFDRVYTHQSDVWSFGVLMWEIFTLGGSPYPGIPVEELFKLLKEGHRMDKPANCTNELYMMMRDCWHAVPSQRPTFKQLVEDLDRILTLTTNEI

SEQ ID NO: 5340 - protein, 705 aa, Homo sapiens
MVSWGRFICLVVVTMATLSLARPSFSLVEDTTLEPEEPPTKYQISQPEVYVAAPGESLEVRCLLKDAAVISWTKDGVHLGPNNRTVLIGEYLQIKGATPRDSGLYACTASRTVDSETWYFMVNVTDAISSGDDEDDTDGAEDFVSENSNNKRAPYWTNTEKMEKRLHAVPAANTVKFRCPAGGNPMPTMRWLKNGKEFKQEHRIGGYKVRNQHWSLIMESVVPSDKGNYTCVVENEYGSINHTYHLDVVERSPHRPILQAGLPANASTVVGGDVEFVCKVYSDAQPHIQWIKHVEKNGSKYGPDGLPYLKVLKVSAESSSSMNSNTPLVRITTRLSSTADTPMLAGVSEYELPEDPKWEFPRDKLTLGKPLGEGCFGQVVMAEAVGIDKDKPKEAVTVAVKMLKDDATEKDLSDLVSEMEMMKMIGKHKNIINLLGACTQDGPLYVIVEYASKGNLREYLRARRPPGMEYSYDINRVPEEQMTFKDLVSCTYQLARGMEYLASQKCIHRDLAARNVLVTENNVMKIADFGLARDINNIDYYKKTTNGRLPVKWMAPEALFDRVYTHQSDVWSFGVLMWEIFTLGGSPYPGIPVEELFKLLKEGHRMDKPANCTNELYMMMRDCWHAVPSQRPTFKQLVEDLDRILTLTTNEEYLDLSQPLEQYSPSYPDTRSSCSSGDDSVFSPDPMPYEPCLPQYPHINGSVKT

SEQ ID NO: 5341 - protein, 822 aa, Homo sapiens
MVSWGRFICLVVVTMATLSLARPSFSLVEDTTLEPEEPPTKYQISQPEVYVAAPGESLEVRCLLKDAAVISWTKDGVHLGPNNRTVLIGEYLQIKGATPRDSGLYACTASRTVDSETWYFMVNVTDAISSGDDEDDTDGAEDFVSENSNNKRAPYWTNTEKMEKRLHAVPAANTVKFRCPAGGNPMPTMRWLKNGKEFKQEHRIGGYKVRNQHWSLIMESVVPSDKGNYTCVVENEYGSINHTYHLDVVERSPHRPILQAGLPANASTVVGGDVEFVCKVYSDAQPHIQWIKHVEKNGSKYGPDGLPYLKVLKHSGINSSNAEVLALFNVTEADAGEYICKVSNYIGQANQSAWLTVLPKQQAPGREKEITASPDYLEIAIYCIGVFLIACMVVTVILCRMKNTTKKPDFSSQPAVHKLTKRIPLRRQVTVSAESSSSMNSNTPLVRITTRLSSTADTPMLAGVSEYELPEDPKWEFPRDKLTLGKPLGEGCFGQVVMAEAVGIDKDKPKEAVTVAVKMLKDDATEKDLSDLVSEMEMMKMIGKHKNIINLLGACTQDGPLYVIVEYASKGNLREYLRARRPPGMEYSYDINRVPEEQMTFKDLVSCTYQLARGMEYLASQKCIHRDLAARNVLVTENNVMKIADFGLARDINNIDYYKKTTNGRLPVKWMAPEALFDRVYTHQSDVWSFGVLMWEIFTLGGSPYPGIPVEELFKLLKEGHRMDKPANCTNELYMMMRDCWHAVPSQRPTFKQLVEDLDRILTLTTNEEYLDLSQPLEQYSPSYPDTRSSCSSGDDSVFSPDPMPYEPCLPQYPHINGSVKT

SEQ ID NO: 5342 - protein, 254 aa, Homo sapiens
MVSWGRFICLVVVTMATLSLARPSFSLVEDTTLEPEEPPTKYQISQPEVYVAAPGESLEVRCLLKDAAVISWTKDGVHLGPNNRTVLIGEYLQIKGATPRDSGLYACTASRTVDSETWYFMVNVTDAISSGDDEDDTDGAEDFVSENSNNKRAPYWTNTEKMEKRLHAVPAANTVKFRCPAGGNPMPTMRWLKNGKEFKQEHRIGGYKVRNQHWSLIMESVVPSDKGNYTCVVENEYGSINHTYHLDVVGSQGL

SEQ ID NO: 5343 - protein, 704 aa, Homo sapiens
MVSWGRFICLVVVTMATLSLARPSFSLVEDTTLEPEGAPYWTNTEKMEKRLHAVPAANTVKFRCPAGGNPMPTMRWLKNGKEFKQEHRIGGYKVRNQHWSLIMESVVPSDKGNYTCVVENEYGSINHTYHLDVVERSPHRPILQAGLPANASTVVGGDVEFVCKVYSDAQPHIQWIKHVEKNGSKYGPDGLPYLKVLKAAGVNTTDKEIEVLYIRNVTFEDAGEYTCLAGNSIGISFHSAWLTVLPAPGREKEITASPDYLEIAIYCIGVFLIACMVVTVILCRMKNTTKKPDFSSQPAVHKLTKRIPLRRQVSAESSSSMNSNTPLVRITTRLSSTADTPMLAGVSEYELPEDPKWEFPRDKLTLGKPLGEGCFGQVVMAEAVGIDKDKPKEAVTVAVKMLKDDATEKDLSDLVSEMEMMKMIGKHKNIINLLGACTQDGPLYVIVEYASKGNLREYLRARRPPGMEYSYDINRVPEEQMTFKDLVSCTYQLARGMEYLASQKCIHRDLAARNVLVTENNVMKIADFGLARDINNIDYYKKTTNGRLPVKWMAPEALFDRVYTHQSDVWSFGVLMWEIFTLGGSPYPGIPVEELFKLLKEGHRMDKPANCTNELYMMMRDCWHAVPSQRPTFKQLVEDLDRILTLTTNEEYLDLSQPLEQYSPSYPDTRSSCSSGDDSVFSPDPMPYEPCLPQYPHINGSVKT

SEQ ID NO: 5344 - protein, 707 aa, Homo sapiens
MVSWGRFICLVVVTMATLSLARPSFSLVEDTTLEPEGAPYWTNTEKMEKRLHAVPAANTVKFRCPAGGNPMPTMRWLKNGKEFKQEHRIGGYKVRNQHWSLIMESVVPSDKGNYTCVVENEYGSINHTYHLDVVERSPHRPILQAGLPANASTVVGGDVEFVCKVYSDAQPHIQWIKHVEKNGSKYGPDGLPYLKVLKHSGINSSNAEVLALFNVTEADAGEYICKVSNYIGQANQSAWLTVLPKQQAPGREKEITASPDYLEIAIYCIGVFLIACMVVTVILCRMKNTTKKPDFSSQPAVHKLTKRIPLRRQVTVSAESSSSMNSNTPLVRITTRLSSTADTPMLAGVSEYELPEDPKWEFPRDKLTLGKPLGEGCFGQVVMAEAVGIDKDKPKEAVTVAVKMLKDDATEKDLSDLVSEMEMMKMIGKHKNIINLLGACTQDGPLYVIVEYASKGNLREYLRARRPPGMEYSYDINRVPEEQMTFKDLVSCTYQLARGMEYLASQKCIHRDLAARNVLVTENNVMKIADFGLARDINNIDYYKKTTNGRLPVKWMAPEALFDRVYTHQSDVWSFGVLMWEIFTLGGSPYPGIPVEELFKLLKEGHRMDKPANCTNELYMMMRDCWHAVPSQRPTFKQLVEDLDRILTLTTNEEYLDLSQPLEQYSPSYPDTRSSCSSGDDSVFSPDPMPYEPCLPQYPHINGSVKT

SEQ ID NO: 5345 - protein, 251 aa, Homo sapiens
MVSWGRFICLVVVTMATLSLARPSFSLVEDTTLEPEGAPYWTNTEKMEKRLHAVPAANTVKFRCPAGGNPMPTMRWLKNGKEFKQEHRIGGYKVRNQHWSLIMESVVPSDKGNYTCVVENEYGSINHTYHLDVVERSPHRPILQAGLPANASTVVGGDVEFVCKVYSDAQPHIQWIKHVEKNGSKYGPDGLPYLKVLKHSGINSSNAEVLALFNVTEADAGEYICKVSNYIGQANQSAWLTVLPKQQGRRC

SEQ ID NO: 5346 - protein, 86 aa, Homo sapiens
  VARIANT 1: note = misc_feature - Xaa can be any naturally occurring amino acid
XPYPGIPVEELFKLLKEGHRMDKPANCTNELYMMMRDCWHAVPSQRPTFKQLVEDLDRILTLTTNEEYLDLSQPLEPYSPCYPDPR

SEQ ID NO: 5347 - protein, 136 aa, Homo sapiens
  VARIANT 1: note = misc_feature - Xaa can be any naturally occurring amino acid
XSLARPSFSLVEDTTLEPEEPPTKYQISQPEVYVAAPGESLEVRCLLKDAAVISWTKDGVHLGPNNRTVLIGEYLQIKGATPRDSGLYACTASRTVDSETWYFMVNVTDAISSGDDEDDTDGAEDFVSENSNNKSK

SEQ ID NO: 5348 - protein, 364 aa, Homo sapiens
MGAPACALALCVAVAIVAGASSESLGTEQRVVGRAAEVPGPEPGQQEQLVFGSGDAVELSCPPPGGGPMGPTVWVKDGTGLVPSERVLVGPQRLQVLNASHEDSGAYSCRQRLTQRVLCHFSVRVTDAPSSGDDEDGEDEAEDTGVDTGAPYWTRPERMDKKLLAVPAANTVRFRCPAAGNPTPSISWLKNGREFRGEHRIGGIKLRHQQWSLVMESVVPSDRGNYTCVVENKFGSIRQTYTLDVLERSPHRPILQAGLPANQTAVLGSDVEFHCKVYSDAQPHIQWLKHVEVNGSKVGPDGTPYVTVLKSWISESVEADVRLRLANVSERDGGEYLCRATNFIGVAEKAFWLSVHGPRADGGR

SEQ ID NO: 5349 - protein, 694 aa, Homo sapiens
MGAPACALALCVAVAIVAGASSESLGTEQRVVGRAAEVPGPEPGQQEQLVFGSGDAVELSCPPPGGGPMGPTVWVKDGTGLVPSERVLVGPQRLQVLNASHEDSGAYSCRQRLTQRVLCHFSVRVTDAPSSGDDEDGEDEAEDTGVDTGAPYWTRPERMDKKLLAVPAANTVRFRCPAAGNPTPSISWLKNGREFRGEHRIGGIKLRHQQWSLVMESVVPSDRGNYTCVVENKFGSIRQTYTLDVLERSPHRPILQAGLPANQTAVLGSDVEFHCKVYSDAQPHIQWLKHVEVNGSKVGPDGTPYVTVLKVSLESNASMSSNTPLVRIARLSSGEGPTLANVSELELPADPKWELSRARLTLGKPLGEGCFGQVVMAEAIGIDKDRAAKPVTVAVKMLKDDATDKDLSDLVSEMEMMKMIGKHKNIINLLGACTQGGPLYVLVEYAAKGNLREFLRARRPPGLDYSFDTCKPPEEQLTFKDLVSCAYQVARGMEYLASQKCIHRDLAARNVLVTEDNVMKIADFGLARDVHNLDYYKKTTNGRLPVKWMAPEALFDRVYTHQSDVWSFGVLLWEIFTLGGSPYPGIPVEELFKLLKEGHRMDKPANCTHDLYMIMRECWHAAPSQRPTFKQLVEDLDRVLTVTSTDEYLDLSAPFEQYSPGGQDTPSSSSSGDDSVFAHDLLPPAPPSSGGSRT

SEQ ID NO: 5350 - protein, 808 aa, Homo sapiens
MGAPACALALCVAVAIVAGASSESLGTEQRVVGRAAEVPGPEPGQQEQLVFGSGDAVELSCPPPGGGPMGPTVWVKDGTGLVPSERVLVGPQRLQVLNASHEDSGAYSCRQRLTQRVLCHFSVRVTDAPSSGDDEDGEDEAEDTGVDTGAPYWTRPERMDKKLLAVPAANTVRFRCPAAGNPTPSISWLKNGREFRGEHRIGGIKLRHQQWSLVMESVVPSDRGNYTCVVENKFGSIRQTYTLDVLERSPHRPILQAGLPANQTAVLGSDVEFHCKVYSDAQPHIQWLKHVEVNGSKVGPDGTPYVTVLKSWISESVEADVRLRLANVSERDGGEYLCRATNFIGVAEKAFWLSVHGPRAAEEELVEADEAGSVYAGILSYGVGFFLFILVVAAVTLCRLRSPPKKGLGSPTVHKISRFPLKRQVSLESNASMSSNTPLVRIARLSSGEGPTLANVSELELPADPKWELSRARLTLGKPLGEGCFGQVVMAEAIGIDKDRAAKPVTVAVKMLKDDATDKDLSDLVSEMEMMKMIGKHKNIINLLGACTQGGPLYVLVEYAAKGNLREFLRARRPPGLDYSFDTCKPPEEQLTFKDLVSCAYQVARGMEYLASQKCIHRDLAARNVLVTEDNVMKIADFGLARDVHNLDYYKKTTNGRLPVKWMAPEALFDRVYTHQSDVWSFGVLLWEIFTLGGSPYPGIPVEELFKLLKEGHRMDKPANCTHDLYMIMRECWHAAPSQRPTFKQLVEDLDRVLTVTSTDEYLDLSAPFEQYSPGGQDTPSSSSSGDDSVFAHDLLPPAPPSSGGSRT

SEQ ID NO: 5351 - protein, 806 aa, Homo sapiens
MGAPACALALCVAVAIVAGASSESLGTEQRVVGRAAEVPGPEPGQQEQLVFGSGDAVELSCPPPGGGPMGPTVWVKDGTGLVPSERVLVGPQRLQVLNASHEDSGAYSCRQRLTQRVLCHFSVRVTDAPSSGDDEDGEDEAEDTGVDTGAPYWTRPERMDKKLLAVPAANTVRFRCPAAGNPTPSISWLKNGREFRGEHRIGGIKLRHQQWSLVMESVVPSDRGNYTCVVENKFGSIRQTYTLDVLERSPHRPILQAGLPANQTAVLGSDVEFHCKVYSDAQPHIQWLKHVEVNGSKVGPDGTPYVTVLKTAGANTTDKELEVLSLHNVTFEDAGEYTCLAGNSIGFSHHSAWLVVLPAEEELVEADEAGSVYAGILSYGVGFFLFILVVAAVTLCRLRSPPKKGLGSPTVHKISRFPLKRQVSLESNASMSSNTPLVRIARLSSGEGPTLANVSELELPADPKWELSRARLTLGKPLGEGCFGQVVMAEAIGIDKDRAAKPVTVAVKMLKDDATDKDLSDLVSEMEMMKMIGKHKNIINLLGACTQGGPLYVLVEYAAKGNLREFLRARRPPGLDYSFDTCKPPEEQLTFKDLVSCAYQVARGMEYLASQKCIHRDLAARNVLVTEDNVMKIADFGLARDVHNLDYYKKTTNGRLPVKWMAPEALFDRVYTHQSDVWSFGVLLWEIFTLGGSPYPGIPVEELFKLLKEGHRMDKPANCTHDLYMIMRECWHAAPSQRPTFKQLVEDLDRVLTVTSTDEYLDLSAPFEQYSPGGQDTPSSSSSGDDSVFAHDLLPPAPPSSGGSRT

SEQ ID NO: 5352 - protein, 694 aa, Homo sapiens; identical to SEQ ID NO: 5349

SEQ ID NO: 5353 - protein, 792 aa, Homo sapiens
MGAPACALALCVAVAIVAGASSESLGTEQRVVGRAAEVPGPEPGQQEQLVFGSGDAVELSCPPPGGGPMGPTVWVKDGTGLVPSERVLVGPQRLQVLNASHEDSGAYSCRQRLTQRVLCHFSVRVTDAPSSGDDEDGEDEAEDTGVDTGAPYWTRPERMDKKLLAVPAANTVRFRCPAAGNPTPSISWLKNGREFRGEHRIGGIKLRHQQWSLVMESVVPSDRGNYTCVVENKFGSIRQTYTLDVLERSPHRPILQAGLPANQTAVLGSDVEFHCKVYSDAQPHIQWLKHVEVNGSKVGPDGTPYVTVLKTAGANTTDKELEVLSLHNVTFEDAGEYTCLAGNSIGFSHHSAWLVVLPAEEELVEADEAGSVYAGILSYGVGFFLFILVVAAVTLCRLRSPPKKGLGSPTVHKISRFPLKRQQVSLESNASMSSNTPLVRIARLSSGEGPTLANVSELELPADPKWELSRARLTLGKPLGEGCFGQVVMAEAIGIDKDRAAKPVTVAVKMLKDDATDKDLSDLVSEMEMMKMIGKHKNIINLLGACTQGGPLYVLVEYAAKGNLREFLRARRPPGLDYSFDTCKPPEEQLTFKDLVSCAYQVARGMEYLASQKCIHRDLAARNVLVTEDNVMKIADFGLARDVHNLDYYKKTTNLVLWGPALGDLHAGGLPVPRHPCGGALQAAEGGPPHGQARQLHTRPVHDHAGVLACRALPEAHLQAAGGGPGPCPYRDVHRRVPGPVGAFRAVLPGWPGHPQLQLLRGRLRVCPRPAAPGPTQQWGLADVKGHWSPTM

SEQ ID NO: 5354 - protein, 364 aa, Homo sapiens; identical to SEQ ID NO: 5348

SEQ ID NO: 5355 - protein, 112 aa, Homo sapiens
NPTPSISWLKNGREFRGEHRIGGIKLRHQQWSLVMESVVPSDRGNYTCVVENKFGSIRQTYTLDVLERSPHRPILQAGLPANQTAVLGSDVEFHCKTAGANTTDKELEVLSL

SEQ ID NO: 5356 - protein, 72 aa, Homo sapiens
MRLLLALLGVLLSVPGPPVLSLEASEEVELASIHLSLCLRERTGLAGRRALSWAAELVSPAWLPAWSSKSRS

SEQ ID NO: 5357 - protein, 87 aa, Homo sapiens
MRLLLALLGVLLSVPGPPVLSLEASEEVELEPCLAPSLEQQEQELTVALGQPVRLCCGRAERGGHWYKEGSRLAPAGRVRGWRGRLE

SEQ ID NO: 5358 - protein, 108 aa, Homo sapiens
MRLLLALLGVLLSVPGPPVLSLEASEEVELEPCLAPSLEQQEQELTVALGQPVRLCCGRAERGGHWYKEGSRLAPAGRVRGWRGRLEIASFLPEDAGRYLCLARGSMI

SEQ ID NO: 5359 - protein, 114 aa, Homo sapiens
MRLLLALLGVLLSVPGPPVLSLEASEEVELEPCLAPSLEQQEQELTVALGQPVRLCCGRAERGGHWYKEGSRLAPAGRVRGWRGRLEIASFLPEDAGRYLCLARGSMIVLQNLT

SEQ ID NO: 5360 - protein, 201 aa, Homo sapiens
MRLLLALLGVLLSVPGPPVLSLEASEEVELEPCLAPSLEQQEQELTVALGQPVRLCCGRAERGGHWYKEGSRLAPAGRVRGWRGRLEIASFLPEDAGRYLCLARGSMIVLQNLTLITGDSLTSSNDDEDPKSHRDPSNRHSYPQQAPYWTHPQRMEKKLHAVPAGNTVKFRCPAAGNPTPTIRWLKDGQAFHGENRIGGIR

SEQ ID NO: 5361 - protein, 802 aa, Homo sapiens
MRLLLALLGVLLSVPGPPVLSLEASEEVELEPCLAPSLEQQEQELTVALGQPVRLCCGRAERGGHWYKEGSRLAPAGRVRGWRGRLEIASFLPEDAGRYLCLARGSMIVLQNLTLITGDSLTSSNDDEDPKSHRDPSNRHSYPQQAPYWTHPQRMEKKLHAVPAGNTVKFRCPAAGNPTPTIRWLKDGQAFHGENRIGGIRLRHQHWSLVMESVVPSDRGTYTCLVENAVGSIRYNYLLDVLERSPHRPILQAGLPANTTAVVGSDVELLCKVYSDAQPHIQWLKHIVINGSSFGADGFPYVQVLKTADINSSEVEVLYLRNVSAEDAGEYTCLAGNSIGLSYQSAWLTVLPEEDPTWTAAAPEARYTDIILYASGSLALAVLLLLAGLYRGQALHGRHPRPPATVQKLSRFPLARQFSLESGSSGKSSSSLVRGVRLSSSGPALLAGLVSLDLPLDPLWEFPRDRLVLGKPLGEGCFGQVVRAEAFGMDPARPDQASTVAVKMLKDNASDKDLADLVSEMEVMKLIGRHKNIINLLGVCTQEGPLYVIVECAAKGNLREFLRARRPPGPDLSPDGPRSSEGPLSFPVLVSCAYQVARGMQYLESRKCIHRDLAARNVLVTEDNVMKIADFGLARGVHHIDYYKKTSNGRLPVKWMAPEALFDRVYTHQSDVWSFGILLWEIFTLGGSPYPGIPVEELFSLLREGHRMDRPPHCPPELYGLMRECWHAAPSQRPTFKQLVEALDKVLLAVSEEYLDLRLTFGPYSPSGGDASSTCSSSDSVFSHDPLPLGSSSFPFGSGVQT

SEQ ID NO: 5362 - protein, 762 aa, Homo sapiens
MRLLLALLGVLLSVPGPPVLSLEASEEVELEPCLAPSLEQQEQELTVALGQPVRLCCGRAERGGHWYKEGSRLAPAGRVRGWRGRLEIASFLPEDAGRYLCLARGSMIVLQNLTLITGDSLTSSNDDEDPKSHRDPSNRHSYPQQAPYWTHPQRMEKKLHAVPAGNTVKFRCPAAGNPTPTIRWLKDGQAFHGENRIGGIRLRHQHWSLVMESVVPSDRGTYTCLVENAVGSIRYNYLLDVLERSPHRPILQAGLPANTTAVVGSDVELLCKVYSDAQPHIQWLKHIVINGSSFGADGFPYVQVLKTADINSSEVEVLYLRNVSAEDAGEYTCLAGNSIGLSYQSAWLTVLPGTGRIPHLTCDSLTPAGRTKSPTLQFSLESGSSGKSSSSLVRGVRLSSSGPALLAGLVSLDLPLDPLWEFPRDRLVLGKPLGEGCFGQVVRAEAFGMDPARPDQASTVAVKMLKDNASDKDLADLVSEMEVMKLIGRHKNIINLLGVCTQEGPLYVIVECAAKGNLREFLRARRPPGPDLSPDGPRSSEGPLSFPVLVSCAYQVARGMQYLESRKCIHRDLAARNVLVTEDNVMKIADFGLARGVHHIDYYKKTSNGRLPVKWMAPEALFDRVYTHQSDVWSFGILLWEIFTLGGSPYPGIPVEELFSLLREGHRMDRPPHCPPELYGLMRECWHAAPSQRPTFKQLVEALDKVLLAVSEEYLDLRLTFGPYSPSGGDASSTCSSSDSVFSHDPLPLGSSSFPFGSGVQT

SEQ ID NO: 5363 - protein, 734 aa, Homo sapiens
MRLLLALLGVLLSVPGPPVLSLEASEEVELEPCLAPSLEQQEQELTVALGQPVRLCCGRAERGGHWYKEGSRLAPAGRVRGWRGRLEIASFLPEDAGRYLCLARGSMIVLQNLTLITGDSLTSSNDDEDPKSHRDPSNRHSYPQQAPYWTHPQRMEKKLHAVPAGNTVKFRCPAAGNPTPTIRWLKDGQAFHGENRIGGIRLRHQHWSLVMESVVPSDRGTYTCLVENAVGSIRYNYLLDVLERSPHRPILQAGLPANTTAVVGSDVELLCKVYSDAQPHIQWLKHIVINGSSFGADGFPYVQVLKTADINSSEVEVLYLRNVSAEDAGEYTCLAGNSIGLSYQSAWLTVLPEEDPTWTAAAPEASSPWSQALPASQAHPWYEACVSPPAAPPCSPASLVLGKPLGEGCFGQVVRAEAFGMDPARPDQASTVAVKMLKDNASDKDLADLVSEMEVMKLIGRHKNIINLLGVCTQEGPLYVIVECAAKGNLREFLRARRPPGPDLSPDGPRSSEGPLSFPVLVSCAYQVARGMQYLESRKCIHRDLAARNVLVTEDNVMKIADFGLARGVHHIDYYKKTSNGRLPVKWMAPEALFDRVYTHQSDVWSFGILLWEIFTLGGSPYPGIPVEELFSLLREGHRMDRPPHCPPELYGLMRECWHAAPSQRPTFKQLVEALDKVLLAVSEEYLDLRLTFGPYSPSGGDASSTCSSSDSVFSHDPLPLGSSSFPFGSGVQT

SEQ ID NO: 5364 - protein, 802 aa, Homo sapiens; identical to SEQ ID NO: 5361

SEQ ID NO: 5365 - protein, 280 aa, Homo sapiens
  VARIANT 1: note = misc_feature - Xaa can be any naturally occurring amino acid
XRYTDIILYASGSLALAVLLLLAGLYRGQALHGRHPRPPATVQKLSRFPLARQSGSSGKSSSSLVRGVRLSSSGPALLAGLVSLDLPLDPLWEFPRDRLVLGKPLGEGCFGQVVRAEAFGMDPARPDQASTVAVKMLKDNASDKDLADLVSEMEVMKLIGRHKNIINLLGVCTQEGPLYVIVECAAKGNLREFLRARRPPGPDLSPDGPRSSEGPLSFPVLVSCAYQVARGMQYLESRKCIHRDLAARNVLVTEDNVMKIADFGLARGVHHIDYYKKTSN

SEQ ID NO: 5366 - protein, 80 aa, Homo sapiens
MTPSPLLLLLLPPLLLGAFPPAAAARGPPKMADKVVPRQVARLGRTVRLQCPVEGDPPPLTMWTKDGRTIHSGWSRFRVL

SEQ ID NO: 5367 - protein, 152 aa, Homo sapiens
MTPSPLLLLLLPPLLLGAFPPAAAARGPPKMADKVVPRQVARLGRTVRLQCPVEGDPPPLTMWTKDGRTIHSGWSRFRVLPQGLKVKQVEREDAGVYVCKATNGFGSLSVNYTLVVLDDISPGKESLGPDSSSGGQEDPASQQWARPRFTQP

SEQ ID NO: 5368 - protein, 504 aa, Homo sapiens
MTPSPLLLLLLPPLLLGAFPPAAAARGPPKMADKVVPRQVARLGRTVRLQCPVEGDPPPLTMWTKDGRTIHSGWSRFRVLPQGLKVKQVEREDAGVYVCKATNGFGSLSVNYTLVVLDDISPGKESLGPDSSSGGQEDPASQQWARPRFTQPSKMRRRVIARPVGSSVRLKCVASGHPRPDITWMKDDQALTRPEAAEPRKKKWTLSLKNLRPEDSGKYTCRVSNRAGAINATYKVDVIQRTRSKPVLTGTHPVNTTVDFGGTTSFQCKVRSDVKPVIQWLKRVEYGAEGRHNSTIDVGGQKFVVLPTGDVWSRPDGSYLNKLLITRARQDDAGMYICLGANTMGYSFRSAFLTVLPDPKPPGPPVASSSSATSLPWPVVIGIPAGAVFILGTLLLWLCQAQKKPCTPAPAPPLPGHRPPGTARDRSGDKDLPSLAALSAGPGVGLCEEHGSPAAPQHLLGPGPVAGPKLYPKLYTDIHTHTHTHSHTHSHVEGKVHQHIHYQC

SEQ ID NO: 5369 - protein, 504 aa, Homo sapiens; identical to SEQ ID NO: 5368

SEQ ID NO: 5370 - protein, 504 aa, Homo sapiens; identical to SEQ ID NO: 5368

SEQ ID NO: 5371 - protein, 504 aa, Homo sapiens; identical to SEQ ID NO: 5368

SEQ ID NO: 5372 - protein, 119 aa, Homo sapiens
MIDAATLKSRKMLEEIMKYEASILTHDSSIRYLQEIYNSNNQKIVNLKEKVAQLEAQCQEPCKDTVQIHDITGKDCQDIANKGAKQSGLYFIKPLKANQQFLVYCEIDGSGNGWTVFQK

SEQ ID NO: 5373 - protein, 123 aa, Homo sapiens
MIDAATLKSRKMLEEIMKYEASILTHDSSIRYLQEIYNSNNQKIVNLKEKVAQLEAQCQEPCKDTVQIHDITGKDCQDIANKGAKQSGLYFIKPLKANQQFLVYCEIDGSGNGWTVFQKRLDG

SEQ ID NO: 5374 - protein, 453 aa, Homo sapiens
MSWSLHPRNLILYFYALLFLSSTCVAYVATRDNCCILDERFGSYCPTTCGIADFLSTYQTKVDKDLQSLEDILHQVENKTSEVKQLIKAIQLTYNPDESSKPNMIDAATLKSRKMLEEIMKYEASILTHDSSIRYLQEIYNSNNQKIVNLKEKVAQLEAQCQEPCKDTVQIHDITGKDCQDIANKGAKQSGLYFIKPLKANQQFLVYCEIDGSGNGWTVFQKRLDGSVDFKKNWIQYKEGFGHLSPTGTTEFWLGNEKIHLISTQSAIPYALRVELEDWNGRTSTADYAMFKVGPEADKYRLTYAYFAGGDAGDAFDGFDFGDDPSDKFFTSHNGMQFSTWDNDNDKFEGNCAEQDGSGWWMNKCHAGHLNGVYYQGGTYSKASTPNGYDNGIIWATWKTRWYSMKKTTMKIIPFNRLTIGEGQQHHLGGAKQVRPEHPAETEYDSLYPEDDL

SEQ ID NO: 5375 - protein, 437 aa, Homo sapiens
MSWSLHPRNLILYFYALLFLSSTCVAYVATRDNCCILDERFGSYCPTTCGIADFLSTYQTKVDKDLQSLEDILHQVENKTSEVKQLIKAIQLTYNPDESSKPNMIDAATLKSRKMLEEIMKYEASILTHDSSIRYLQEIYNSNNQKIVNLKEKVAQLEAQCQEPCKDTVQIHDITGKDCQDIANKGAKQSGLYFIKPLKANQQFLVYCEIDGSGNGWTVFQKRLDGSVDFKKNWIQYKEGFGHLSPTGTTEFWLGNEKIHLISTQSAIPYALRVELEDWNGRTSTADYAMFKVGPEADKYRLTYAYFAGGDAGDAFDGFDFGDDPSDKFFTSHNGMQFSTWDNDNDKFEGNCAEQDGSGWWMNKCHAGHLNGVYYQGGTYSKASTPNGYDNGIIWATWKTRWYSMKKTTMKIIPFNRLTIGEGQQHHLGGAKQAGDV

SEQ ID NO: 5376 - protein, 461 aa, Homo sapiens
MSWSLHPRNLILYFYALLFLSSTCVAYVATRDNCCILDERFGSYCPTTCGIADFLSTYQTKVDKDLQSLEDILHQVENKTSEVKQLIKAIQLTYNPDESSKPNMIDAATLKSRKMLEEIMKYEASILTHDSSIRYLQEIYNSNNQKIVNLKEKVAQLEAQCQEPCKDTVQIHDITGKVKVDSPSLDCQDIANKGAKQSGLYFIKPLKANQQFLVYCEIDGSGNGWTVFQKRLDGSVDFKKNWIQYKEGFGHLSPTGTTEFWLGNEKIHLISTQSAIPYALRVELEDWNGRTSTADYAMFKVGPEADKYRLTYAYFAGGDAGDAFDGFDFGDDPSDKFFTSHNGMQFSTWDNDNDKFEGNCAEQDGSGWWMNKCHAGHLNGVYYQGGTYSKASTPNGYDNGIIWATWKTRWYSMKKTTMKIIPFNRLTIGEGQQHHLGGAKQVRPEHPAETEYDSLYPEDDL

SEQ ID NO: 5377 - protein, 445 aa, Homo sapiens
MSWSLHPRNLILYFYALLFLSSTCVAYVATRDNCCILDERFGSYCPTTCGIADFLSTYQTKVDKDLQSLEDILHQVENKTSEVKQLIKAIQLTYNPDESSKPNMIDAATLKSRKMLEEIMKYEASILTHDSSIRYLQEIYNSNNQKIVNLKEKVAQLEAQCQEPCKDTVQIHDITGKVKVDSPSLDCQDIANKGAKQSGLYFIKPLKANQQFLVYCEIDGSGNGWTVFQKRLDGSVDFKKNWIQYKEGFGHLSPTGTTEFWLGNEKIHLISTQSAIPYALRVELEDWNGRTSTADYAMFKVGPEADKYRLTYAYFAGGDAGDAFDGFDFGDDPSDKFFTSHNGMQFSTWDNDNDKFEGNCAEQDGSGWWMNKCHAGHLNGVYYQGGTYSKASTPNGYDNGIIWATWKTRWYSMKKTTMKIIPFNRLTIGEGQQHHLGGAKQAGDV

SEQ ID NO: 5378 - protein, 312 aa, Homo sapiens
MAKVFSFILVTTALTMGREISALEDCAQEQMRLRAQVRLLETRVKQQQVKIKQLLQENEVQFLDKGDENTVIDLGSKRQYADCSEIFNDGYKLSGFYKIKPLQSPAEFSVYCDMSDGGGWTVIQRRSDGSENFNRGWKDYENGFGNFVQKHGEYWLGNKNLHFLTTQEDYTLKIDLADFEKNSRYAQYKNFKVGDEKNFYELNIGEYSGTAGDSLAGNFHPEVQWWASHQRMKFSTWDRDHDNYEGNCAEEDQSGWWFNRCHSANLNGVYYSGPYTAKTDNGIVWYTWHGWWYSLKSVVMKIRPNDFIPNVI

SEQ ID NO: 5379 - protein, 312 aa, Homo sapiens; identical to SEQ ID NO: 5378

SEQ ID NO: 5380 - protein, 312 aa, Homo sapiens; identical to SEQ ID NO: 5378

SEQ ID NO: 5381 - protein, 312 aa, Homo sapiens; identical to SEQ ID NO: 5378

SEQ ID NO: 5382 - protein, 312 aa, Homo sapiens; identical to SEQ ID NO: 5378

SEQ ID NO: 5383 - protein, 312 aa, Homo sapiens; identical to SEQ ID NO: 5378

SEQ ID NO: 5384 - protein, 312 aa, Homo sapiens; identical to SEQ ID NO: 5378

SEQ ID NO: 5385 - protein, 225 aa, Homo sapiens
MKLANWYWLSSAVLATYGFLVVANNETEEIKDERAKDVCPVRLESRGKCEEAGECPYQVSLPPLTIQLPKQFSRIEEVFKEVQNLKEIVNSLKKSCQDCKLQADDNGDPGRNGLLLPSTGAPGEVGDNRVRELESEVNKLSSELKNAKEEINVLHGRLEKLNLVNMNNIENYVDSKVANLTFVVNSLDGKCSKCPSQEQIQSRPGMYNNVFLSYVHKCYTAREYL

SEQ ID NO: 5386 - protein, 439 aa, Homo sapiens
MKLANWYWLSSAVLATYGFLVVANNETEEIKDERAKDVCPVRLESRGKCEEAGECPYQVSLPPLTIQLPKQFSRIEEVFKEVQNLKEIVNSLKKSCQDCKLQADDNGDPGRNGLLLPSTGAPGEVGDNRVRELESEVNKLSSELKNAKEEINVLHGRLEKLNLVNMNNIENYVDSKVANLTFVVNSLDGKCSKCPSQEQIQSRPVQHLIYKDCSDYYAIGKRSSETYRVTPDPKNSSFEVYCDMETMGGGWTVLQARLDGSTNFTRTWQDYKAGFGNLRREFWLGNDKIHLLTKSKEMILRIDLEDFNGVELYALYDQFYVANEFLKYRLHVGNYNGTAGDALRFNKHYNHDLKFFTTPDKDNDRYPSGNCGLYYSSGWWFDACLSANLNGKYYHQKYRGVRNGIFWGTWPGVSEAHPGGYKSSFKEAKMMIRPKHFKP

SEQ ID NO: 5387 - protein, 18 aa, Homo sapiens
MAEKFDCHYCRDPLQGKK

SEQ ID NO: 5388 - protein, 66 aa, Homo sapiens
MAEKFDCHYCRDPLQGKKYVQKDGHHCCLKCFDKFCANTCVECRKPIGADSKEVHYKNRFWHDTCF

SEQ ID NO: 5389 - protein, 78 aa, Homo sapiens
MAEKFDCHYCRDPLQGKKYVQKDGHHCCLKCFDKFCANTCVECRKPIGADSKEVHYKNRFWHDTCFRCAKCLHPLANE

SEQ ID NO: 5390 - protein, 130 aa, Homo sapiens
MAEKFDCHYCRDPLQGKKYVQKDGHHCCLKCFDKFCANTCVECRKPIGADSKEVHYKNRFWHDTCFRCAKCLHPLANETFVAKDNKILCNKCTTREDSPKCKGCFKAIVAGDQNVEYKGTVWHKDCFTCS

SEQ ID NO: 5391 - protein, 138 aa, Homo sapiens
MAEKFDCHYCRDPLQGKKYVQKDGHHCCLKCFDKFCANTCVECRKPIGADSKEVHYKNRFWHDTCFRCAKCLHPLANETFVAKDNKILCNKCTTREDSPKCKGCFKAIVAGDQNVEYKGTVWHKDCFTCSNCKQVIGT

SEQ ID NO: 5392 - protein, 141 aa, Homo sapiens
MAEKFDCHYCRDPLQGKKYVQKDGHHCCLKCFDKFCANTCVECRKPIGADSKEVHYKNRFWHDTCFRCAKCLHPLANETFVAKDNKILCNKCTTREDSPKCKGCFKAIVAGDQNVEYKGTVWHKDCFTCSNCKQVIGTGSF

SEQ ID NO: 5393 - protein, 147 aa, Homo sapiens
MAEKFDCHYCRDPLQGKKYVQKDGHHCCLKCFDKFCANTCVECRKPIGADSKEVHYKNRFWHDTCFRCAKCLHPLANETFVAKDNKILCNKCTTREDSPKCKGCFKAIVAGDQNVEYKGTVWHKDCFTCSNCKQVIGTGSFFPKGED

SEQ ID NO: 5394 - protein, 152 aa, Homo sapiens
MAEKFDCHYCRDPLQGKKYVQKDGHHCCLKCFDKFCANTCVECRKPIGADSKEVHYKNRFWHDTCFRCAKCLHPLANETFVAKDNKILCNKCTTREDSPKCKGCFKAIVAGDQNVEYKGTVWHKDCFTCSNCKQVIGTGSFFPKGEDFYCVT

SEQ ID NO: 5395 - protein, 155 aa, Homo sapiens
MAEKFDCHYCRDPLQGKKYVQKDGHHCCLKCFDKFCANTCVECRKPIGADSKEVHYKNRFWHDTCFRCAKCLHPLANETFVAKDNKILCNKCTTREDSPKCKGCFKAIVAGDQNVEYKGTVWHKDCFTCSNCKQVIGTGSFFPKGEDFYCVTCHE

SEQ ID NO: 5396 - protein, 175 aa, Homo sapiens
MAEKFDCHYCRDPLQGKKYVQKDGHHCCLKCFDKFCANTCVECRKPIGADSKEVHYKNRFWHDTCFRCAKCLHPLANETFVAKDNKILCNKCTTREDSPKCKGCFKAIVAGDQNVEYKGTVWHKDCFTCSNCKQVIGTGSFFPKGEDFYCVTCHETKFAKHCVKCNKAITSGGIT

SEQ ID NO: 5397 - protein, 204 aa, Homo sapiens
MAEKFDCHYCRDPLQGKKYVQKDGHHCCLKCFDKFCANTCVECRKPIGADSKEVHYKNRFWHDTCFRCAKCLHPLANETFVAKDNKILCNKCTTREDSPKCKGCFKAIVAGDQNVEYKGTVWHKDCFTCSNCKQVIGTGSFFPKGEDFYCVTCHETKFAKHCVKCNKAITSGGITYQDQPWHADCFVCVTCSKKLAGQRFTAVE

SEQ ID NO: 5398 - protein, 205 aa, Homo sapiens
MAEKFDCHYCRDPLQGKKYVQKDGHHCCLKCFDKFCANTCVECRKPIGADSKEVHYKNRFWHDTCFRCAKCLHPLANETFVAKDNKILCNKCTTREDSPKCKGCFKAIVAGDQNVEYKGTVWHKDCFTCSNCKQVIGTGSFFPKGEDFYCVTCHETKFAKHCVKCNKAITSGGITYQDQPWHADCFVCVTCSKKLAGQRFTAVED

SEQ ID NO: 5399 - protein, 207 aa, Homo sapiens
MAEKFDCHYCRDPLQGKKYVQKDGHHCCLKCFDKFCANTCVECRKPIGADSKEVHYKNRFWHDTCFRCAKCLHPLANETFVAKDNKILCNKCTTREDSPKCKGCFKAIVAGDQNVEYKGTVWHKDCFTCSNCKQVIGTGSFFPKGEDFYCVTCHETKFAKHCVKCNKAITSGGITYQDQPWHADCFVCVTCSKKLAGQRFTAVEDQY

SEQ ID NO: 5400 - protein, 207 aa, Homo sapiens; identical to SEQ ID NO: 5399

SEQ ID NO: 5401 - protein, 280 aa, Homo sapiens
MAEKFDCHYCRDPLQGKKYVQKDGHHCCLKCFDKFCANTCVECRKPIGADSKEVHYKNRFWHDTCFRCAKCLHPLANETFVAKDNKILCNKCTTREDSPKCKGCFKAIVAGDQNVEYKGTVWHKDCFTCSNCKQVIGTGSFFPKGEDFYCVTCHETKFAKHCVKCNKAITSGGITYQDQPWHADCFVCVTCSKKLAGQRFTAVEDQYYCVDCYKNFVAKKCAGCKNPITGFGKGSSVVAYEGQSWHDYCFHCKKCSVNLANKRFVFHQEQVYCPDCAKKL

SEQ ID NO: 5402 - protein, 280 aa, Homo sapiens; identical to SEQ ID NO: 5401

SEQ ID NO: 5403 - protein, 257 aa, Homo sapiens
MAEKFDCHYCRDPLQGKKYVQKDGHHCCLKCFDKFCANTCVECRKPIGADSKEVHYKNRFWHDTCFRCAKCLHPLANETFVAKDNKILCNKCTTREDSPKCKGCFKAIVAGDQNVEYKGTVWHKDCFTCSNCKQVIGTGSFFPKGEDFYCVTCHETKFAKHCVKCNKAITSGGITYQDQPWHADCFVCVTCSKKLAGQRFTAVEDQYYCVDCYKNFVAKKCAGCKNPITGFGKGSSVVAYEGQSWHDYCFHCKKCSV

SEQ ID NO: 5404 - protein, 280 aa, Homo sapiens; identical to SEQ ID NO: 5401

SEQ ID NO: 5405 - protein, 280 aa, Homo sapiens; identical to SEQ ID NO: 5401

SEQ ID NO: 5406 - protein, 280 aa, Homo sapiens; identical to SEQ ID NO: 5401

SEQ ID NO: 5407 - protein, 280 aa, Homo sapiens; identical to SEQ ID NO: 5401

SEQ ID NO: 5408 - protein, 280 aa, Homo sapiens; identical to SEQ ID NO: 5401

SEQ ID NO: 5409 - protein, 323 aa, Homo sapiens
MAEKFDCHYCRDPLQGKKYVQKDGHHCCLKCFDKFCANTCVECRKPIGADSKEVHYKNRFWHDTCFRCAKCLHPLANETFVAKDNKILCNKCTTREDSPKCKGCFKAIVAGDQNVEYKGTVWHKDCFTCSNCKQVIGTGSFFPKGEDFYCVTCHETKFAKHCVKCNKAITSGGITYQDQPWHADCFVCVTCSKKLAGQRFTAVEDQYYCVDCYKNFVAKKCAGCKNPITGKRTVSRVSHPVSKARKPPVCHGKRLPLTLFPSANLRGRHPGGERTCPSWVVVLYRKNRSLAAPRGPGLVKAPVWWPMKDNPGTTTASTAKNAP

SEQ ID NO: 5410 - protein, 323 aa, Homo sapiens; identical to SEQ ID NO: 5409

SEQ ID NO: 5411 - protein, 194 aa, Homo sapiens
MAEKFDCHYCRDPLQGKKYVQKDGHHCCLKCFDKFCANTCVECRKPIGADSKEVHYKNRFWHDTCFRCAKCLHPLANETFVAKDNKILCNKCTTREDSPKCKGCFKAIVAGDQNVEYKGTVWHKDCFTCSNCKQVIGTGSFFPKGEDFYCVTCHETKFAKHCVKCNKGLVKAPVWWPMKDNPGTTTASTAKNAP

SEQ ID NO: 5412 - protein, 296 aa, Homo sapiens
MASHRHSGPSSYKVGTMAEKFDCHYCRDPLQGKKYVQKDGHHCCLKCFDKFCANTCVECRKPIGADSKEVHYKNRFWHDTCFRCAKCLHPLANETFVAKDNKILCNKCTTREDSPKCKGCFKAIVAGDQNVEYKGTVWHKDCFTCSNCKQVIGTGSFFPKGEDFYCVTCHETKFAKHCVKCNKAITSGGITYQDQPWHADCFVCVTCSKKLAGQRFTAVEDQYYCVDCYKNFVAKKCAGCKNPITGFGKGSSVVAYEGQSWHDYCFHCKKCSVNLANKRFVFHQEQVYCPDCAKKL

SEQ ID NO: 5413 - protein, 210 aa, Homo sapiens
MASHRHSGPSSYKVGTMAEKFDCHYCRDPLQGKKYVQKDGHHCCLKCFDKFCANTCVECRKPIGADSKEVHYKNRFWHDTCFRCAKCLHPLANETFVAKDNKILCNKCTTREDSPKCKGCFKAIVAGDQNVEYKGTVWHKDCFTCSNCKQVIGTGSFFPKGEDFYCVTCHETKFAKHCVKCNKGLVKAPVWWPMKDNPGTTTASTAKNAP

SEQ ID NO: 5414 - protein, 309 aa, Homo sapiens
MTFYVASLALELIWMLSSPAGPSSYKVGTMAEKFDCHYCRDPLQGKKYVQKDGHHCCLKCFDKFCANTCVECRKPIGADSKEVHYKNRFWHDTCFRCAKCLHPLANETFVAKDNKILCNKCTTREDSPKCKGCFKAIVAGDQNVEYKGTVWHKDCFTCSNCKQVIGTGSFFPKGEDFYCVTCHETKFAKHCVKCNKAITSGGITYQDQPWHADCFVCVTCSKKLAGQRFTAVEDQYYCVDCYKNFVAKKCAGCKNPITGFGKGSSVVAYEGQSWHDYCFHCKKCSVNLANKRFVFHQEQVYCPDCAKKL

SEQ ID NO: 5415 - protein, 635 aa, Homo sapiens
MAMRPRSHPPVGAGTGGGPACVPVAEASTGAWTAEGAAGTRCRASRAPCRPPPVPAPSQLPASSPTKCEICVKNTAILAITLITPQDPHLDPVPRGQPTFTKKKKTIRLFWNEVRPFDWPCKNNRRCREFLWSKLEPIKVDTSRLEHLFESKSKELSVSKKTAADGKRQEIIVLDSKRSNAINIGLTVLPPPRTIKIAILNFDEYALNKEGIEKILTMIPTDEEKQKIQEAQLANPEIPLGSAEQFLLTLSSISELSARLHLWAFKMDYETTEKEVAEPLLDLKEGIDQLENNKTLGFILSTLLAIGNFLNGTNAKAFELSYLEKVPEVKDTVHKQSLLHHVCTMVVENFPDSSDLYSEIGAITRSAKVDFDQLQDNLCQMERRCKASWDHLKAIAKHEMKPVLKQRMSEFLKDCAERIIILKIVHRRIINRFHSFLLFMGHPPYAIREVNINKFCRIISEFALEYRTTRERVLQQKQKRANHRERNKTRGKMITDSGKFSGSSPAPPSQPQGLSYAEDAAEHENMKAVLKTSSPSVEDATPALGVRTRSRASRGSTSSWTMGTDDSPNVTDDAADEIMDRIVKSATQVPSQRVVPRERKRSRANRKSLRRTLKSGLTPEEARALGLVGTSELQL

SEQ ID NO: 5416 - protein, 1439 aa, Homo sapiens
MATLACRVQFLDDTDPFNSTNFPEPSRPPLFTFREDLALGTQLAGVHRLLQAPHKLDDCTLQLSHNGAYLDLEATLAEQRDELEGFQDDAGRGKKHSIILRTQLSVRVHACIEKLYNSSGRDLRRALFSLKQIFQDDKDLVHEFVVAEGLTCLIKVGAEADQNYQNYILRALGQIMLYVDGMNGVINRNETIQWLYTLIGSKFRLVVKTALKLLLVFVEYSESNAPLLIQAVTAVDTKRGVKPWSNIMEILEEKDGVDTELLVYAMTLVNKTLSGLPDQDTFYDVVDCLEELGIAAVSQRHLNKKGTDLDLVEQLNIYEVALRHEDGDETTEPPPSGCRDRRRASVCSSGGGEHRGLDRRRSRRHSVQSIKSTLSAPTSPCSQSAPSFKPNQVRDLREKYSNFGNNSYHSSRPSSGSSVPTTPTSSVSPPQEARLERSSPSGLLTSSFRQHQESLAAERERRRQEREERLQRIEREERNKFSRDYLDKREEQRQAREERYKYLEQLAAEEHEKELRSRSVSRGRADLSLDLTSPAAPACLAPLSHSPSSSDSQEALTVSASSPGTPHHPQASAGDPEPESEAEPEAEAGAGQVADEAGQDIASAHEGAETEVEQALEQEPEERASLSEKERQNEGVNERDNCSASSVSSSSSTLEREEKEDKLSRDRTTGLWPAGVQDAGVNGQCGDILTNKRFMLDMLYAHNRKSPDDEEKGDGEAGRTQQEAEAVASLATRISTLQANSQTQDESVRRVDVGCLDNRGSVKAFAEKFNSGDLGRGSISPDAEPNDKVPETAPVQPKTESDYIWDQLMANPRELRIQDMDFTDLGEEDDIDVLDVDLGHREAPGPPPPPPPTFLGLPPPPPPPLLDSIPPPPVPGNLLVPPPPVFNAPQGLGWSQVPRGQPTFTKKKKTIRLFWNEVRPFDWPCKNNRRCREFLWSKLEPIKVDTSRLEHLFESKSKELSVSKKTAADGKRQEIIVLDSKRSNAINIGLTVLPPPRTIKIAILNFDEYALNKEGIEKILTMIPTDEEKQKIQEAQLANPEIPLGSAEQFLLTLSSISELSARLHLWAFKMDYETTEKEVAEPLLDLKEGIDQLENNKTLGFILSTLLAIGNFLNGTNAKAFELSYLEKVPEVKDTVHKQSLLHHVCTMVVENFPDSSDLYSEIGAITRSAKVDFDQLQDNLCQMERRCKASWDHLKAIAKHEMKPVLKQRMSEFLKDCAERIIILKIVHRRIINRFHSFLLFMGHPPYAIREVNINKFCRIISEFALEYRTTRERVLQQKQKRANHRERNKTRGKMITDSGKFSGSSPAPPSQPQGLSYAEDAAEHENMKAVLKTSSPSVEDATPALGVRTRSRASRGSTSSWTMGTDDSPNVTDDAADEIMDRIVKSATQVPSQRVVPRERKRSRANRKSLRRTLKSGLTPEEARALGLVGTSELQL

SEQ ID NO: 5417 - protein, 1422 aa, Homo sapiens
MATLACRVQFLDDTDPFNSTNFPEPSRPPLFTFREDLALGTQLAGVHRLLQAPHKLDDCTLQLSHNGAYLDLEATLAEQRDELEGFQDDAGRGKKHSIILRTQLSVRVHACIEKLYNSSGRDLRRALFSLKQIFQDDKDLVHEFVVAEGLTCLIKVGAEADQNYQNYILRALGQIMLYVDGMNGVINRNETIQWLYTLIGSKFRLVVKTALKLLLVFVEYSESNAPLLIQAVTAVDTKRGVKPWSNIMEILEEKDGVDTELLVYAMTLVNKTLSGLPDQDTFYDVVDCLEELGIAAVSQRHLNKKGTDLDLVEQLNIYEVALRHEDGDETTEPPPSGCRDRRRASVCSSGGGEHRGLDRRRSRRHSVQSIKSTLSAPTSPCSQSAPSFKPNQVRDLREKYSNFGNNSYHSSRPSSGSSVPTTPTSSVSPPQEARLERSSPSGLLTSSFRQHQESLAAERERRRQEREERLQRIEREERNKFRYKYLEQLAAEEHEKELRSRSVSRGRADLSLDLTSPAAPACLAPLSHSPSSSDSQEALTVSASSPGTPHHPQASAGDPEPESEAEPEAEAGAGQVADEAGQDIASAHEGAETEVEQALEQEPEERASLSEKERQNEGVNERDNCSASSVSSSSSTLEREEKEDKLSRDRTTGLWPAGVQDAGVNGQCGDILTNKRFMLDMLYAHNRKSPDDEEKGDGEAGRTQQEAEAVASLATRISTLQANSQTQDESVRRVDVGCLDNRGSVKAFAEKFNSGDLGRGSISPDAEPNDKVPETAPVQPKTESDYIWDQLMANPRELRIQDMDFTDLGEEDDIDVLDVDLGHREAPGPPPPPPPTFLGLPPPPPPPLLDSIPPPPVPGNLLVPPPPVFNAPQGLGWSQVPRGQPTFTKKKKTIRLFWNEVRPFDWPCKNNRRCREFLWSKLEPIKVDTSRLEHLFESKSKELSVSKKTAADGKRQEIIVLDSKRSNAINIGLTVLPPPRTIKIAILNFDEYALNKEGIEKILTMIPTDEEKQKIQEAQLANPEIPLGSAEQFLLTLSSISELSARLHLWAFKMDYETTEKEVAEPLLDLKEGIDQLENNKTLGFILSTLLAIGNFLNGTNAKAFELSYLEKVPEVKDTVHKQSLLHHVCTMVVENFPDSSDLYSEIGAITRSAKVDFDQLQDNLCQMERRCKASWDHLKAIAKHEMKPVLKQRMSEFLKDCAERIIILKIVHRRIINRFHSFLLFMGHPPYAIREVNINKFCRIISEFALEYRTTRERVLQQKQKRANHRERNKTRGKMITDSGKFSGSSPAPPSQPQGLSYAEDAAEHENMKAVLKTSSPSVEDATPALGVRTRSRASRGSTSSWTMGTDDSPNVTDDAADEIMDRIVKSATQVPSQRVVPRERKRSRANRKSLRRTLKSGLTPEEARALGLVGTSELQL

SEQ ID NO: 5418 - protein, 1622 aa, Homo sapiens
MATLACRVQFLDDTDPFNSTNFPEPSRPPLFTFREDLALGTQLAGVHRLLQAPHKLDDCTLQLSHNGAYLDLEATLAEQRDELEGFQDDAGRGKKHSIILRTQLSVRVHACIEKLYNSSGRDLRRALFSLKQIFQDDKDLVHEFVVAEGLTCLIKVGAEADQNYQNYILRALGQIMLYVDGMNGVINRNETIQWLYTLIGSKFRLVVKTALKLLLVFVEYSESNAPLLIQAVTAVDTKRGVKPWSNIMEILEEKDGVDTELLVYAMTLVNKTLSGLPDQDTFYDVVDCLEELGIAAVSQRHLNKKGTDLDLVEQLNIYEVALRHEDGDETTEPPPSGCRDRRRASVCSSGGGEHRGLDRRRSRRHSVQSIKSTLSAPTSPCSQSAPSFKPNQVRDLREKEEEEEEEQPITEPSSEEEREDDASCQGKDSKVGAASGQSPTGRDAAPKSSALPAVSNASSQGKPLLVGTAGGTTWHSGSSGSEATPSALLSPPASAARPSSATPGSLKVSPTIDKLPYVPHSPFHLFSYDFEDSSLSTKEKEAESQKENSSSDSFSLSTYSASEPYHFRSFSSNRYSNFGNNSYHSSRPSSGSSVPTTPTSSVSPPQEARLERSSPSGLLTSSFRQHQESLAAERERRRQEREERLQRIEREERNKFSRDYLDKREEQRQAREERYKYLEQLAAEEHEKELRSRSVSRGRADLSLDLTSPAAPACLAPLSHSPSSSDSQEALTVSASSPGTPHHPQASAGDPEPESEAEPEAEAGAGQVADEAGQDIASAHEGAETEVEQALEQEPEERASLSEKERQNEGVNERDNCSASSVSSSSSTLEREEKEDKLSRDRTTGLWPAGVQDAGVNGQCGDILTNKRFMLDMLYAHNRKSPDDEEKGDGEAGRTQQEAEAVASLATRISTLQANSQTQDESVRRVDVGCLDNRGSVKAFAEKFNSGDLGRGSISPDAEPNDKVPETAPVQPKTESDYIWDQLMANPRELRIQDMDFTDLGEEDDIDVLDVDLGHREAPGPPPPPPPTFLGLPPPPPPPLLDSIPPPPVPGNLLVPPPPVFNAPQGLGWSQVPRGQPTFTKKKKTIRLFWNEVRPFDWPCKNNRRCREFLWSKLEPIKVDTSRLEHLFESKSKELSVSKKTAADGKRQEIIVLDSKRSNAINIGLTVLPPPRTIKIAILNFDEYALNKEGIEKILTMIPTDEEKQKIQEAQLANPEIPLGSAEQFLLTLSSISELSARLHLWAFKMDYETTEKEVAEPLLDLKEGIDQLENNKTLGFILSTLLAIGNFLNGTNAKAFELSYLEKVPEVKDTVHKQSLLHHVCTMVVENFPDSSDLYSEIGAITRSAKVDFDQLQDNLCQMERRCKASWDHLKAIAKHEMKPVLKQRMSEFLKDCAERIIILKIVHRRIINRFHSFLLFMGHPPYAIREVNINKFCRIISEFALEYRTTRERVLQQKQKRANHRERNKTRGKMITDTDEEEEVESGKFSGSSPAPPSQPQGLSYAEDAAEHENMKAVLKTSSPSVEDATPALGVRTRSRASRGSTSSWTMGTDDSPNVTDDAADEIMDRIVKSATQVPSQRVVPRERKRSRANRKSLRRTLKSGLTPEEARALGLVGTSELQL

SEQ ID NO: 5419 - protein, 528 aa, Homo sapiens
RLFWNEVRPFDWPCKNNRRCREFLWSKLEPIKVDTSRLEHLFESKSKELSVSKKTAADGKRQEIIVLDSKRSNAINIGLTVLPPPRTIKIAILNFDEYALNKEGIEKILTMIPTDEEKQKIQEAQLANPEIPLGSAEQFLLTLSSISELSARLHLWAFKMDYETTEKEVAEPLLDLKEGIDQLENNKTLGFILSTLLAIGNFLNGTNAKAFELSYLEKVPEVKDTVHKQSLLHHVCTMVVENFPDSSDLYSEIGAITRSAKVDFDQLQDNLCQMERRCKASWDHLKAIAKHEMKPVLKQRMSEFLKDCAERIIILKIVHRRIINRFHSFLLFMGHPPYAIREVNINKFCRIISEFALEYRTTRERVLQQKQKRANHRERNKTRGKMITDSGKFSGSSPAPPSQPQGLSYAEDAAEHENMKAVLKTSSPSVEDATPALGVRTRSRASRGSTSSWTMGTDDSPNVTDDAADEIMDRIVKSATQVPSQRVVPRERKRSRANRKSLRRTLKSGLTPEEARALGLVGTSELQL

SEQ ID NO: 5420 - protein, 375 aa, Homo sapiens
  VARIANT 1: note = misc_feature - Xaa can be any naturally occurring amino acid
XAINIGLTVLPPPRTIKIAILNFDEYALNKEGIEKILTMIPTDEEKQKIQEAQLANPEIPLGSAEQFLLTLSSISELSARLHLWAFKMDYETTEKEVAEPLLDLKEGIDQLENNKTLGFILSTLLAIGNFLNGTNAKAFELSYLEKVPEVKDTVHKQSLLHHVCTMVVENFPDSSDLYSEIGAITRSAKVDFDQLQDNLCQMERRCKASWDHLKAIAKHEMKPVLKQRMSEFLKDCAERIIILKIVHRRIINRFHSFLLFMGHPPYAIREVNINKFCRIISEFALEYRTTRERVLQQKQKRANHRERNKTRGKMITDDPLVPGLWELMTRPMSQMMQLMRSWTASSSQPPKCPVSEWCRGRGNDPGPTGNLCEEP

SEQ ID NO: 5421 - protein, 1200 aa, Homo sapiens
  VARIANT 1: note = misc_feature - Xaa can be any naturally occurring amino acid
XFRLVVKTALKLLLVFVEYSESNAPLLIQAVTAVDTKRGVKPWSNIMEILEEKDGVDTELLVYAMTLVNKTLSGLPDQDTFYDVVDCLEELGIAAVSQRHLNKKGTDLDLVEQLNIYEVALRHEDGDETTEPPPSGCRDRRRASVCSSGGGEHRGLDRRRSRRHSVQSIKSTLSAPTSPCSQSAPSFKPNQVRDLREKSSPSGLLTSSFRQHQESLAAERERRRQEREERLQRIEREERNKFSRDYLDKREEQRQAREERYKYLEQLAAEEHEKELRSRSVSRGRADLSLDLTSPAAPACLAPLSHSPSSSDSQEALTVSASSPGTPHHPQASAGDPEPESEAEPEAEAGAGQVADEAGQDIASAHEGAETEVEQALEQEPEERASLSEKERQNEGVNERDNCSASSVSSSSSTLEREEKEDKLSRDRTTGLWPAGVQDAGVNGQCGDILTNKRFMLDMLYAHNRKSPDDEEKGDGEAGRTQQEAEAVASLATRISTLQANSQTQDESVRRVDVGCLDNRGSVKAFAEKFNSGDLGRGSISPDAEPNDKVPETAPVQPKTESDYIWDQLMANPRELRIQDMDFTDLGEEDDIDVLDVDLGHREAPGPPPPPPPTFLGLPPPPPPPLLDSIPPPPVPGNLLVPPPPVFNAPQGLGWSQVPRGQPTFTKKKKTIRLFWNEVRPFDWPCKNNRRCREFLWSKLEPIKVDTSRLEHLFESKSKELSVSKKTAADGKRQEIIVLDSKRSNAINIGLTVLPPPRTIKIAILNFDEYALNKEGIEKILTMIPTDEEKQKIQEAQLANPEIPLGSAEQFLLTLSSISELSARLHLWAFKMDYETTEKEVAEPLLDLKEGIDQLENNKTLGFILSTLLAIGNFLNGTNAKAFELSYLEKVPEVKDTVHKQSLLHHVCTMVVENFPDSSDLYSEIGAITRSAKVDFDQLQDNLCQMERRCKASWDHLKAIAKHEMKPVLKQRMSEFLKDCAERIIILKIVHRRIINRFHSFLLFMGHPPYAIREVNINKFCRIISEFALEYRTTRERVLQQKQKRANHRERNKTRGKMITDSGKFSGSSPAPPSQPQGLSYAEDAAEHENMKAVLKTSSPSVEDATPALGVRTRSRASRGSTSSWTMGTDDSPNVTDDAADEIMDRIVKSATQVPSQRVVPRERKRSRANRKSLRRTLKSGLTPEEARALGLVGTSELQL

SEQ ID NO: 5422 - protein, 211 aa, Homo sapiens
MVFLKFFCMSFFCHLCQGYFDGPLYPEMSNGTLHHYFVPDGDYEENDDPEKCQLLFRVSDHRRCSQGEGSQVGSLLSLTLREEFTVLGRQVEDAGRVLEGISKSISYDLDGEESYGKYLRRESHQIGDAYSNSDKSLTELESKFKQGQEQDSRQESRLNEDFLGMLVHTRSLLKETLDISVGLRDKYELLALTIRSHGTRLGRLKNDYLKV

SEQ ID NO: 5423 - protein, 458 aa, Homo sapiens
MMLIPMASVMAVTEPKWVSVWSRFLWVTLLSMVLGSLLALLLPLGAVEEQCLAVLKGLYLLRSKPDRAQHAATKCTSPSTELSITSRGATLLVAKTKASPAGKLEARAALNQALEMKRQGKREKAQKLFMHALKMDPDFVDALTEFGIFSEEDKDIIQADYLYTRALTISPYHEKALVNRDRTLPLVEEIDQRYFSIIDSKVKKVMSIPKGNSALRRVMEETYYHHIYHTVAIEGNTLTLSEIRHILETRYAVPGKSLEEQNEVIGMHAAMKYINTTLVSRIGSVTISDVLEIHRRVLGYVDPVEAGRFRTTQVLVGHHIPPHPQDVEKQMQEFVQWLNSEEAMNLHPVEFAALAHYKLVYIHPFIDGNGRTSRLLMNLILMQAGYPPITIRKEQRSDYYHVLEAANEGDVRPFIRFIAKCTETTLDTLLFATTEYSVALPEAQPNHSGFKETLPVKP

SEQ ID NO: 5424 - protein, 180 aa, Homo sapiens
MMLIPMASVMAVTEPKWVSVWSRFLWVTLLSMVLGSLLALLLPLGAVEEQCLAVLKGLYLLRSKPDRAQHAATKCTSPSTELSITSRGATLLVAKTKASPESRRLGSQGGASQNTREWLWGHTDSDCIPPHGWGNRVVPGMLSTHDAAATSSSRPGTQAGHHGFLRRPAQGTAPRMSSAP

SEQ ID NO: 5425 - protein, 139 aa, Homo sapiens
MMLIPMASVMAVTEPKWVSVWSRFLWVTLLSMVLGSLLALLLPLGAVEEQCLAVLKGLYLLRSKPDRAQHAATKCTSPSTELSITSRGATLLVAKTKASPGKTDWPSSSMLVNWIDRHRMCHVLYVGHRGIVNKSALSS

SEQ ID NO: 5426 - protein, 56 aa, Homo sapiens
  VARIANT 1: note = misc_feature - Xaa can be any naturally occurring amino acid
XCLAVLKGLYLLRSKPDRAQHAATKCTSPSTELSITSRGATLLVAKTKASPGKCCT

SEQ ID NO: 5427 - protein, 437 aa, Homo sapiens
MGRRMRGAAATAGLWLLALGSLLALWGGLLPPRTELPASRPPEDRLPRRPARSGGPAPAPRFPLPPPLAWDARGGSLKTFRALLTLAAGADGPPRQSRSEPRWHVSARQPRPEESAAVHGGVFWSRGLEEQVPPGFSEAQAAAWLEAARGARMVALERGGCGRSSNRLARFADGTRACVRYGINPEQIQGEALSYYLARLLGLQRHVPPLALARVEARGAQWAQVQEELRAAHWTEGSVVSLTRWLPNLTDVVVPAPWRSEDGRLRPLRDAGGELANLSQAELVDLVQWTDLILFDYLTANFDRLVSNLFSLQWDPRVMQRATSNLHRGPGGALVFLDNEAGLVHGYRVAGMWDKYNEPLLQSVCVFRERTARRVLELHRGQDAAARLLRLYRRHEPRFPELAALADPHAQLLQRRLDFLAKHILHCKAKYGRRSGT

SEQ ID NO: 5428 - protein, 147 aa, Homo sapiens
MFPAGPPSHSLLRLPLLQLLLLVVQAVGRGLGRASPAGGPLEDVVIERYHIPRACPREVQMGDFVRYHYNGTFEDGKKFDSSGAHSTGCHPLLRCGSAGCVEQGRHRAGEHIAAPAPLPPHGPGRRLCPLPLQWHPAGRHLLRHQLQ

SEQ ID NO: 5429 - protein, 171 aa, Homo sapiens
MFPAGPPSHSLLRLPLLQLLLLVVQAVGRGLGRASPAGGPLEDVVIERYHIPRACPREVQMGDFVRYHYNGTFEDGKKFDSSYDRNTLVAIVVGVGRLITGMDRGLMGMCVNERRRLIVPPHLGYGSIGLAGLIPPDATLYFDVVLLDVWNKEDTVQVSTLLRPPHCPRMV

SEQ ID NO: 5430 - protein, 582 aa, Homo sapiens
MFPAGPPSHSLLRLPLLQLLLLVVQAVGRGLGRASPAGGPLEDVVIERYHIPRACPREVQMGDFVRYHYNGTFEDGKKFDSSYDRNTLVAIVVGVGRLITGMDRGLMGMCVNERRRLIVPPHLGYGSIGLAGLIPPDATLYFDVVLLDVWNKEDTVQVSTLLRPPHCPRMVQDGDFVRYHYNGTLLDGTSFDTSYSKGGTYDTYVGSGWLIKGMDQGLLGMCPGERRKIIIPPFLAYGEKGYGTVIPPQASLVFHVLLIDVHNPKDAVQLETLELPPGCVRRAGAGDFMRYHYNGSLMDGTLFDSSYSRNHTYNTYIGQGYIIPGMDQGLQGACMGERRRITIPPHLAYGENGTGDKIPGSAVLIFNVHVIDFHNPADVVEIRTLSRPSETCNETTKLGDFVRYHYNCSLLDGTQLFTSHDYGAPQEATLGANKVIEGLDTGLQGMCVGERRQLIVPPHLAHGESGARGVPGSAVLLFEVELVSREDGLPTGYLFVWHKDPPANLFEDMDLNKDGEVPPEEFSTFIKAQVSEGKGRLMPGQDPEKTIGDMFQNQDRNQDGKITVDELKLKSDEDEERVHEEL

SEQ ID NO: 5431 - protein, 81 aa, Homo sapiens
MGDFVRYHYNGTFEDGKKFDSSYDRNTLVAIVVGVGRLITGMDRGLMGMCVNERRRLIVPPHLGYGSIGLAGLIPPDATLY

SEQ ID NO: 5432 - protein, 172 aa, Homo sapiens
MGDFVRYHYNGTFEDGKKFDSSYDRNTLVAIVVGVGRLITGMDRGLMGMCVNERRRLIVPPHLGYGSIGLAGLIPPDATLYFDVVLLDVWNKEDTVQVSTLLRPPHCPRMVQDGDFVRYHYNGTLLDGTSFDTSYSKGGTYDTYVGSGWLIKGMDQGLLGMCPGERRKIIIP

SEQ ID NO: 5433 - protein, 386 aa, Homo sapiens
  VARIANT 1: note = misc_feature - Xaa can be any naturally occurring amino acid
XIDVHNPKDAVQLETLELPPGCVRRAGAGDFMRYHYNGSLMDGTLFDSSYSRNHTYNTYIGQGYIIPGMDQGLQGACMGERRRITIPPHLAYGENGTDSIGFLQGSAPLRPFRSGEGQPSLGREGGYGKTEPAYPQDPAVLGASVSSPVKWASHADPQGDKIPGSAVLIFNVHVIDFHNPADVVEIRTLSRPSETCNETTKLGDFVRYHYNCSLLDGTQLFTSHDYGAPQEATLGANKVIEGLDTGLQGMCVGERRQLIVPPHLAHGESGARGVPGSAVLLFEVELVSREDGLPTGYLFVWHKDPPANLFEDMDLNKDGEVPPEEFSTFIKAQVSEGKGRLMPGQDPEKTIGDMFQNQDRNQDGKITVDELKLKSDEDEERVHEEL

SEQ ID NO: 5434 - protein, 99 aa, Homo sapiens
MCVGEKRRAIIPSHLAYGKRGFPPSVPADAVVQYDVELIALIRANYWLKLVKGILPLVGMAMVPALLGLIGYHLYRKANRPKVSKKKLKEEKRNKSKKK

SEQ ID NO: 5435 - protein, 92 aa, Homo sapiens
MTLRPSLLPLHLLLLLLLSAAVCRAEAGLETESPVRTLQVETLGRERDLWKSIRDPCSPIVGGAPRTMCRARCFWRHASHTLHGKLGRWTYY

SEQ ID NO: 5436 - protein, 72 aa, Homo sapiens
MTLRPSLLPLHLLLLLLLSAAVCRAEAGLETESPVRTLQVETLSDRRWSPQNHVPSPLLLETRFTYTTREAW

SEQ ID NO: 5437 - protein, 201 aa, Homo sapiens
MTLRPSLLPLHLLLLLLLSAAVCRAEAGLETESPVRTLQVETLVEPPEPCAEPAAFGDTLHIHYTGSLVDGRIIDTSLTRDPLVIELGQKQVIPGLEQSLLDMCVGEKRRAIIPSHLAYGKRGFPPSVPADAVVQYDVELIALIRANYWLKLVKGILPLVGMAMVPALLGLIGYHLYRKANRPKVSKKKLKEEKRNKSKKK

SEQ ID NO: 5438 - protein, 182 aa, Homo sapiens
MTLRPSLLPLHLLLLLLLSAAVCRAEAGLETESPVRTLQVETLVEPPEPCAEPAAFGDTLHIHYTGSLVDGRIIDTSLTRDPLVIELGQKQVIPGLEQSLLDMCVGEKRRAIIPSHLAYGKRGFPPSVPDGVSLLLPRLECNSAIFTHHNLRHPGSSNSPVSASRVAGITGMRHHDRLILYF

SEQ ID NO: 5439 - protein, 146 aa, Homo sapiens
MTLRPSLLPLHLLLLLLLSAAVCRAEAGLETESPVRTLQVETLVEPPEPCAEPAAFGDTLHIHYTGSLVDGRIIDTSLTRDPLVIELGQKQVIPGLEQSLLDMCVGEKRRAIIPSHLAYGKRGFPPSVPGTKDNLMRPPGMTSSSQ

SEQ ID NO: 5440 - protein, 63 aa, Homo sapiens
SLTRDPLVIELGQKQVIPGLEQSLLDMCVGWKNSCFGCEDSGGFAEGASAGLRLLAYLSCLWL

SEQ ID NO: 5441 - protein, 66 aa, Homo sapiens
MRLFLWNAVLTLFVTSLIGALIPEPEVKIEVLQKPFICHRKTKGGDLMLVHYEGYLEKDGSLFHST

SEQ ID NO: 5442 - protein, 211 aa, Homo sapiens
MRLFLWNAVLTLFVTSLIGALIPEPEVKIEVLQKPFICHRKTKGGDLMLVHYEGYLEKDGSLFHSTHKHNNGQPIWFTLGILEALKGWDQGLKGMCVGEKRKLIIPPALGYGKEGKGKIPPESTLIFNIDLLEIRNGPRSHESFQEMDLNDDWKLSKDEVKAYLKKEFEKHGAVVNESHHDALVEDIFDKEDEDKDGFISAREFTYKHDEL

SEQ ID NO: 5443 - protein, 89 aa, Homo sapiens
  VARIANT 1: note = misc_feature - Xaa can be any naturally occurring amino acid
XVLQKPFICHRKTKGGDLMLVHYEGYLEKDGSLFHSTHKHNNGQPIWFTLGILEALKGWDQGLKGMCVGEKRKLIIPPALGYGKEGKVF

SEQ ID NO: 5444 - protein, 102 aa, Homo sapiens
MRLSWFRVLTVLSICLSAVATATGAEGKRKLQIGVKKRVDHCPIKSRKGDVLHMHYTGKLEDGTEFDSSLPQNQPFVFSLGTGQVIKGWDQGLLGMCEGEKR

SEQ ID NO: 5445 - protein, 142 aa, Homo sapiens
MRLSWFRVLTVLSICLSAVATATGAEGKRKLQIGVKKRVDHCPIKSRKGDVLHMHYTGKLEDGTEFDSSLPQNQPFVFSLGTGQVIKGWDQGLLGMCEGEKRKLVIPSELGYGERGAPPKIPGGATLVFEVELLKIERRTEL

SEQ ID NO: 5446 - protein, 142 aa, Homo sapiens; identical to SEQ ID NO: 5445

SEQ ID NO: 5447 - protein, 142 aa, Homo sapiens; identical to SEQ ID NO: 5445

SEQ ID NO: 5448 - protein, 74 aa, Homo sapiens
MPKTMHFLFRFIVFFYLWGLFTAQRQKKEESTEEVKIEVLHRPENCSKTSKKGDLLNAHYDGYLAKDGSKFYCR

SEQ ID NO: 5449 - protein, 86 aa, Homo sapiens
MPKTMHFLFRFIVFFYLWGLFTAQRQKKEESTEEVKIEVLHRPENCSKTSKKGDLLNAHYDGYLAKDGSKFYCSRRQDSTGCYIDF

SEQ ID NO: 5450 - protein, 222 aa, Homo sapiens
MPKTMHFLFRFIVFFYLWGLFTAQRQKKEESTEEVKIEVLHRPENCSKTSKKGDLLNAHYDGYLAKDGSKFYCSRTQNEGHPKWFVLGVGQVIKGLDIAMTDMCPGEKRKVVIPPSFAYGKEGYAEGKIPPDATLIFEIELYAVTKGPRSIETFKQIDMDNDRQLSKAEINLYLQREFEKDEKPRDKSYQDAVLEDIFKKNDHDGDGFISPKEYNVYQHDEL

SEQ ID NO: 5451 - protein, 221 aa, Homo sapiens
MPKTMHFLFRFIVFFYLWGLFTAQRQKKEESTEEVKIEVLHRPENCSKTSKKGDLLNAHYDGYLAKDGSKFYCSRTQNEGHPKWFVLGVGQVIKGLDIAMTDMCPGEKRKVVIPPSFAYGKEGYEGKIPPDATLIFEIELYAVTKGPRSIETFKQIDMDNDRQLSKAEINLYLQREFEKDEKPRDKSYQDAVLEDIFKKNDHDGDGFISPKEYNVYQHDEL

SEQ ID NO: 5452 - protein, 127 aa, Homo sapiens
MPKTMHFLFRFIVFFYLWGLFTAQRQKKEESTEEVKIEVLHRPENCSKTSKKGDLLNAHYDGYLAKDGSKFYCSRTQNEGHPKWFVLGVGQVIKGLDIAMTDMCPGEKRKVVIPPSFAYGKEGYGST

SEQ ID NO: 5453 - protein, 67 aa, Homo sapiens
  VARIANT 1: note = misc_feature - Xaa can be any naturally occurring amino acid
XGYLAKDGSKFYCSRTQNEGHPKWFVLGVGQVIKGLDIAMTDMCPGEKRKVVIPPSFAYGKEGYGST

SEQ ID NO: 5454 - protein, 623 aa, Homo sapiens
MAFRGWRPPPPPLLLLLLWVTGQAAPVAGLGSDAELQIERRFVPDECPRTVRSGDFVRYHYVGTFPDGQKFDSRYWDTAEDKADKSPCPQVRVGVNTSPSCRLKQKGVGIYWKDLQFLVRVQNHGLSYDRDSTFNVFVGKGQLITGMDQALVGMCVNERRFVKIPPKLAYGNEGVSGVIPPNSVLHFDVLLMDIWNSEDQVQIHTYFKPPSCPRTIQVSDFVRYHYNGTFLDGTLFDSSHNRMKTYDTYVGIGWLIPGMDKGLLGMCVGEKRIITIPPFLAYGEDGDGKDIPGQASLVFDVALLDLHNPKDSISIENKVVPENCERISQSGDFLRYHYNGTLLDGTLFDSSYSRNRTFDTYIGQGYVIPGMDEGLLGVCIGEKRRIVVPPHLGYGEEGRGNIPGSAVLVFDIHVIDFHNPSDSISITSHYKPPDCSVLSKKGDYLKYHYNASLLDGTLLDSTWNLGKTYNIVLGSGQVVLGMDMGLREMCVGEKRTVIIPPHLGYGEAGVDGEVPGSAVLVFDIELLELVAGLPEGYMFIWNGEVSPNLFEEIDKDGNGEVLLEEFSEYIHAQVASGKGKLAPGFDAELIVKNMFTNQDRNGDGKVTAEEFKLKDQEAKHDEL

SEQ ID NO: 5455 - protein, 570 aa, Homo sapiens
MAFRGWRPPPPPLLLLLLWVTGQAAPVAGLGSDAELQIERRFVPDECPRTVRSGDFVRYHYVGTFPDGQKFDSSYDRDSTFNVFVGKGQLITGMDQALVGMCVNERRFVKIPPKLAYGNEGVSGVIPPNSVLHFDVLLMDIWNSEDQVQIHTYFKPPSCPRTIQVSDFVRYHYNGTFLDGTLFDSSHNRMKTYDTYVGIGWLIPGMDKGLLGMCVGEKRIITIPPFLAYGEDGDGKDIPGQASLVFDVALLDLHNPKDSISIENKVVPENCERISQSGDFLRYHYNGTLLDGTLFDSSYSRNRTFDTYIGQGYVIPGMDEGLLGVCIGEKRRIVVPPHLGYGEEGRGNIPGSAVLVFDIHVIDFHNPSDSISITSHYKPPDCSVLSKKGDYLKYHYNASLLDGTLLDSTWNLGKTYNIVLGSGQVVLGMDMGLREMCVGEKRTVIIPPHLGYGEAGVDGEVPGSAVLVFDIELLELVAGLPEGYMFIWNGEVSPNLFEEIDKDGNGEVLLEEFSEYIHAQVASGKGKLAPGFDAELIVKNMFTNQDRNGDGKVTAEEFKLKDQEAKHDEL

SEQ ID NO: 5456 - protein, 338 aa, Homo sapiens
MAGKDIPGQASLVFDVALLDLHNPKDSISIENKVVPENCERISQSGDFLRYHYNGTLLDGTLFDSSYSRNRTFDTYIGQGYVIPGMDEGLLGVCIGEKRRIVVPPHLGYGEEGRGNIPGSAVLVFDIHVIDFHNPSDSISITSHYKPPDCSVLSKKGDYLKYHYNASLLDGTLLDSTWNLGKTYNIVLGSGQVVLGMDMGLREMCVGEKRTVIIPPHLGYGEAGVDGEVPGSAVLVFDIELLELVAGLPEGYMFIWNGEVSPNLFEEIDKDGNGEVLLEEFSEYIHAQVASGKGKLAPGFDAELIVKNMFTNQDRNGDGKVTAEEFKLKDQEAKHDEL

SEQ ID NO: 5457 - protein, 226 aa, Homo sapiens [sequence omitted]

SEQ ID NO: 5458 - protein, 85 aa, Homo sapiens
MLKRFTWTDSKPKASLKIDLRVTSKSKESGLSDVSRPSFCHSSCGHVSEGKRRFTYDHAELERKIACCSPPPDYNSVVLYSTPPI

SEQ ID NO: 5459 - protein, 85 aa, Homo sapiens; identical to SEQ ID NO: 5458

SEQ ID NO: 5460 - protein, 361 aa, Homo sapiens
MNSDLLVDSDGFYKEPITMEDLISYSFQVARGMEFLSSRKCIHRDLAARNILLSENNVVKICDFGLARDIYKNPDYVRKGDTRLPLKWMAPESIFDKIYSTKSDVWSYGVLLWEIFSLGGSPYPGVQMDEDFCSRLREGMRMRAPEYSTPEIYQIMLDCWHRDPKERPRFAELVEKLGDLLQANVQQDGKDYIPINAILTGNSGFTYSTPAFSEDFFKESISAPKFNSGSSDDVRYVNAFKFMSLERIKTFEELLPNATSMFDDYQGDSSTLLASPMLKRFTWTDSKPKASLKIDLRVTSKSKESGLSDVSRPSFCHSSCGHVSEGKRRFTYDHAELERKIACCSPPPDYNSVVLYSTPPI

SEQ ID NO: 5461 - protein, 433 aa, Homo sapiens
MVIVEYCKYGNLSNYLKSKRDLFFLNKDAALHMEPKKEKMEPGLEQGKKPRLDSVTSSESFASSGFQEDKSLSDVEEEEDSDGFYKEPITMEDLISYSFQVARGMEFLSSRKCIHRDLAARNILLSENNVVKICDFGLARDIYKNPDYVRKGDTRLPLKWMAPESIFDKIYSTKSDVWSYGVLLWEIFSLGGSPYPGVQMDEDFCSRLREGMRMRAPEYSTPEIYQIMLDCWHRDPKERPRFAELVEKLGDLLQANVQQDGKDYIPINAILTGNSGFTYSTPAFSEDFFKESISAPKFNSGSSDDVRYVNAFKFMSLERIKTFEELLPNATSMFDDYQGDSSTLLASPMLKRFTWTDSKPKASLKIDLRVTSKSKESGLSDVSRPSFCHSSCGHVSEGKRRFTYDHAELERKIACCSPPPDYNSVVLYSTPPI

SEQ ID NO: 5462 - protein, 1338 aa, Homo sapiens
MVSYWDTGVLLCALLSCLLLTGSSSGSKLKDPELSLKGTQHIMQAGQTLHLQCRGEAAHKWSLPEMVSKESERLSITKSACGRNGKQFCSTLTLNTAQANHTGFYSCKYLAVPTSKKKETESAIYIFISDTGRPFVEMYSEIPEIIHMTEGRELVIPCRVTSPNITVTLKKFPLDTLIPDGKRIIWDSRKGFIISNATYKEIGLLTCEATVNGHLYKTNYLTHRQTNTIIDVQISTPRPVKLLRGHTLVLNCTATTPLNTRVQMTWSYPDEKNKRASVRRRIDQSNSHANIFYSVLTIDKMQNKDKGLYTCRVRSGPSFKSVNTSVHIYDKAFITVKHRKQQVLETVAGKRSYRLSMKVKAFPSPEVVWLKDGLPATEKSARYLTRGYSLIIKDVTEEDAGNYTILLSIKQSNVFKNLTATLIVNVKPQIYEKAVSSFPDPALYPLGSRQILTCTAYGIPQPTIKWFWHPCNHNHSEARCDFCSNNEESFILDADSNMGNRIESITQRMAIIEGKNKMASTLVVADSRISGIYICIASNKVGTVGRNISFYITDVPNGFHVNLEKMPTEGEDLKLSCTVNKFLYRDVTWILLRTVNNRTMHYSISKQKMAITKEHSITLNLTIMNVSLQDSGTYACRARNVYTGEEILQKKEITIRDQEAPYLLRNLSDHTVAISSSTTLDCHANGVPEPQITWFKNNHKIQQEPGIILGPGSSTLFIERVTEEDEGVYHCKATNQKGSVESSAYLTVQGTSDKSNLELITLTCTCVAATLFWLLLTLFIRKMKRSSSEIKTDYLSIIMDPDEVPLDEQCERLPYDASKWEFARERLKLGKSLGRGAFGKVVQASAFGIKKSPTCRTVAVKMLKEGATASEYKALMTELKILTHIGHHLNVVNLLGACTKQGGPLMVIVEYCKYGNLSNYLKSKRDLFFLNKDAALHMEPKKEKMEPGLEQGKKPRLDSVTSSESFASSGFQEDKSLSDVEEEEDSDGFYKEPITMEDLISYSFQVARGMEFLSSRKCIHRDLAARNILLSENNVVKICDFGLARDIYKNPDYVRKGDTRLPLKWMAPESIFDKIYSTKSDVWSYGVLLWEIFSLGGSPYPGVQMDEDFCSRLREGMRMRAPEYSTPEIYQIMLDCWHRDPKERPRFAELVEKLGDLLQANVQQDGKDYIPINAILTGNSGFTYSTPAFSEDFFKESISAPKFNSGSSDDVRYVNAFKFMSLERIKTFEELLPNATSMFDDYQGDSSTLLASPMLKRFTWTDSKPKASLKIDLRVTSKSKESGLSDVSRPSFCHSSCGHVSEGKRRFTYDHAELERKIACCSPPPDYNSVVLYSTPPI

SEQ ID NO: 5463 - protein, 541 aa, Homo sapiens
MVSYWDTGVLLCALLSCLLLTGSSSGSKLKDPELSLKGTQHIMQAGQTLHLQCRGEAAHKWSLPEMVSKESERLSITKSACGRNGKQFCSTLTLNTAQANHTGFYSCKYLAVPTSKKKETESAIYIFISDTGRPFVEMYSEIPEIIHMTEGRELVIPCRVTSPNITVTLKKFPLDTLIPDGKRIIWDSRKGFIISNATYKEIGLLTCEATVNGHLYKTNYLTHRQTNTIIDVQISTPRPVKLLRGHTLVLNCTATTPLNTRVQMTWSYPDEKNKRASVRRRIDQSNSHANIFYSVLTIDKMQNKDKGLYTCRVRSGPSFKSVNTSVHIYDKAFITVKHRKQQVLETVAGKRSYRLSMKVKAFPSPEVVWLKDGLPATEKSARYLTRGYSLIIKDVTEEDAGNYTILLSIKQSNVFKNLTATLIVNVKPQIYEKAVSSFPDPALYPLGSRQILTCTAYGIPQPTIKWFWHPCNHNHSEARCDFCSNNEESFILDADSNMGNRIESITQRMAIIEGKNKLPPANSSFMLPPTSFSSNYFHFLP

SEQ ID NO: 5464 - protein, 733 aa, Homo sapiens
MVSYWDTGVLLCALLSCLLLTGSSSGSKLKDPELSLKGTQHIMQAGQTLHLQCRGEAAHKWSLPEMVSKESERLSITKSACGRNGKQFCSTLTLNTAQANHTGFYSCKYLAVPTSKKKETESAIYIFISDTGRPFVEMYSEIPEIIHMTEGRELVIPCRVTSPNITVTLKKFPLDTLIPDGKRIIWDSRKGFIISNATYKEIGLLTCEATVNGHLYKTNYLTHRQTNTIIDVQISTPRPVKLLRGHTLVLNCTATTPLNTRVQMTWSYPDEKNKRASVRRRIDQSNSHANIFYSVLTIDKMQNKDKGLYTCRVRSGPSFKSVNTSVHIYDKAFITVKHRKQQVLETVAGKRSYRLSMKVKAFPSPEVVWLKDGLPATEKSARYLTRGYSLIIKDVTEEDAGNYTILLSIKQSNVFKNLTATLIVNVKPQIYEKAVSSFPDPALYPLGSRQILTCTAYGIPQPTIKWFWHPCNHNHSEARCDFCSNNEESFILDADSNMGNRIESITQRMAIIEGKNKMASTLVVADSRISGIYICIASNKVGTVGRNISFYITDVPNGFHVNLEKMPTEGEDLKLSCTVNKFLYRDVTWILLRTVNNRTMHYSISKQKMAITKEHSITLNLTIMNVSLQDSGTYACRARNVYTGEEILQKKEITIRDQEAPYLLRNLSDHTVAISSSTTLDCHANGVPEPQITWFKNNHKIQQEPELYTSTSPSSSSSSPLSSSSSSSSSSSS

SEQ ID NO: 5465 - protein, 687 aa, Homo sapiens
MVSYWDTGVLLCALLSCLLLTGSSSGSKLKDPELSLKGTQHIMQAGQTLHLQCRGEAAHKWSLPEMVSKESERLSITKSACGRNGKQFCSTLTLNTAQANHTGFYSCKYLAVPTSKKKETESAIYIFISDTGRPFVEMYSEIPEIIHMTEGRELVIPCRVTSPNITVTLKKFPLDTLIPDGKRIIWDSRKGFIISNATYKEIGLLTCEATVNGHLYKTNYLTHRQTNTIIDVQISTPRPVKLLRGHTLVLNCTATTPLNTRVQMTWSYPDEKNKRASVRRRIDQSNSHANIFYSVLTIDKMQNKDKGLYTCRVRSGPSFKSVNTSVHIYDKAFITVKHRKQQVLETVAGKRSYRLSMKVKAFPSPEVVWLKDGLPATEKSARYLTRGYSLIIKDVTEEDAGNYTILLSIKQSNVFKNLTATLIVNVKPQIYEKAVSSFPDPALYPLGSRQILTCTAYGIPQPTIKWFWHPCNHNHSEARCDFCSNNEESFILDADSNMGNRIESITQRMAIIEGKNKMASTLVVADSRISGIYICIASNKVGTVGRNISFYITDVPNGFHVNLEKMPTEGEDLKLSCTVNKFLYRDVTWILLRTVNNRTMHYSISKQKMAITKEHSITLNLTIMNVSLQDSGTYACRARNVYTGEEILQKKEITIRGEHCNKKAVFSRISKFKSTRNDCTTQSNVKH

SEQ ID NO: 5466 - protein, 665 aa, Homo sapiens
MVSYWDTGVLLCALLSCLLLTGSSSGSKLKDPELSLKGTQHIMQAGQTLHLQCRGEAAHKWSLPEMVSKESERLSITKSACGRNGKQFCSTLTLNTAQANHTGFYSCKYLAVPTSKKKETESAIYIFISDTGRPFVEMYSEIPEIIHMTEGRELVIPCRVTSPNITVTLKKFPLDTLIPDGKRIIWDSRKGFIISNATYKEIGLLTCEATVNGHLYKTNYLTHRQTNTIIDVQISTPRPVKLLRGHTLVLNCTATTPLNTRVQMTWSYPDEKNKRASVRRRIDQSNSHANIFYSVLTIDKMQNKDKGLYTCRVRSGPSFKSVNTSVHIYDKAFITVKHRKQQVLETVAGKRSYRLSMKVKAFPSPEVVWLKDGLPATEKSARYLTRGYSLIIKDVTEEDAGNYTILLSIKQSNVFKNLTATLIVNVKPQIYEKAVSSFPDPALYPLGSRQILTCTAYGIPQPTIKWFWHPCNHNHSEARCDFCSNNEESFILDADSNMGNRIESITQRMAIIEGKNKMASTLVVADSRISGIYICIASNKVGTVGRNISFYITDVPNGFHVNLEKMPTEGEDLKLSCTVNKFLYRDVTWILLRTVNNRTMHYSISKQKMAITKEHSITLNLTIMNVSLQDSGTYACRARNVYTGEEILQKKEITIRGSEEMLLPK

SEQ ID NO: 5467 - protein, 1363 aa, Homo sapiens
MQRGAALCLRLWLCLGLLDGLVSGYSMTPPTLNITEESHVIDTGDSLSISCRGQHPLEWAWPGAQEAPATGDKDSEDTGVVRDCEGTDARPYCKVLLLHEVHANDTGSYVCYYKYIKARIEGTTAASSYVFVRDFEQPFINKPDTLLVNRKDAMWVPCLVSIPGLNVTLRSQSSVLWPDGQEVVWDDRRGMLVSTPLLHDALYLQCETTWGDQDFLSNPFLVHITGNELYDIQLLPRKSLELLVGEKLVLNCTVWAEFNSGVTFDWDYPGKQAERGKWVPERRSQQTHTELSSILTIHNVSQHDLGSYVCKANNGIQRFRESTEVIVHENPFISVEWLKGPILEATAGDELVKLPVKLAAYPPPEFQWYKDGKALSGRHSPHALVLKEVTEASTGTYTLALWNSAAGLRRNISLELVVNVPPQIHEKEASSPSIYSRHSRQALTCTAYGVPLPLSIQWHWRPWTPCKMFAQRSLRRRQQQDLMPQCRDWRAVTTQDAVNPIESLDTWTEFVEGKNKTVSKLVIQNANVSAMYKCVVSNKVGQDERLIYFYVTTIPDGFTIESKPSEELLEGQPVLLSCQADSYKYEHLRWYRLNLSTLHDAHGNPLLLDCKNVHLFATPLAASLEEVAPGARHATLSLSIPRVAPEHEGHYVCEVQDRRSHDKHCHKKYLSVQALEAPRLTQNLTDLLVNVSDSLEMQCLVAGAHAPSIVWYKDERLLEEKSGVDLADSNQKLSIQRVREEDAGRYLCSVCNAKGCVNSSASVAVEGSEDKGSMEIVILVGTGVIAVFFWVLLLLIFCNMRRPAHADIKTGYLSIIMDPGEVPLEEQCEYLSYDASQWEFPRERLHLGRVLGYGAFGKVVEASAFGIHKGSSCDTVAVKMLKEGATASEHRALMSELKILIHIGNHLNVVNLLGACTKPQGPLMVIVEFCKYGNLSNFLRAKRDAFSPCAEKSPEQRGRFRAMVELARLDRRRPGSSDRVLFARFSKTEGGARRASPDQEAEDLWLSPLTMEDLVCYSFQVARGMEFLASRKCIHRDLAARNILLSESDVVKICDFGLARDIYKDPDYVRKGSARLPLKWMAPESIFDKVYTTQSDVWSFGVLLWEIFSLGASPYPGVQINEEFCQRLRDGTRMRAPELATPAIRRIMLNCWSGDPKARPAFSELVEILGDLLQGRGLQEEEEVCMAPRSSQSSEEGSFSQVSTMALHIAQADAEDSPPSLQRHSLAARYYNWVSFPGCLARGAETRGSSRMKTFEEFPMTPTTYKGSVDNQTDSGMVLASEEFEQIESRHRQESGFSCKGPGQNVAVTRAHPDSQGRRRRPERGARGGQVFYNSEYGELSEPSEEDHCSPSARVTFFTDNSY

SEQ ID NO: 5468 - protein, 1298 aa, Homo sapiens
MQRGAALCLRLWLCLGLLDGLVSGYSMTPPTLNITEESHVIDTGDSLSISCRGQHPLEWAWPGAQEAPATGDKDSEDTGVVRDCEGTDARPYCKVLLLHEVHANDTGSYVCYYKYIKARIEGTTAASSYVFVRDFEQPFINKPDTLLVNRKDAMWVPCLVSIPGLNVTLRSQSSVLWPDGQEVVWDDRRGMLVSTPLLHDALYLQCETTWGDQDFLSNPFLVHITGNELYDIQLLPRKSLELLVGEKLVLNCTVWAEFNSGVTFDWDYPGKQAERGKWVPERRSQQTHTELSSILTIHNVSQHDLGSYVCKANNGIQRFRESTEVIVHENPFISVEWLKGPILEATAGDELVKLPVKLAAYPPPEFQWYKDGKALSGRHSPHALVLKEVTEASTGTYTLALWNSAAGLRRNISLELVVNVPPQIHEKEASSPSIYSRHSRQALTCTAYGVPLPLSIQWHWRPWTPCKMFAQRSLRRRQQQDLMPQCRDWRAVTTQDAVNPIESLDTWTEFVEGKNKTVSKLVIQNANVSAMYKCVVSNKVGQDERLIYFYVTTIPDGFTIESKPSEELLEGQPVLLSCQADSYKYEHLRWYRLNLSTLHDAHGNPLLLDCKNVHLFATPLAASLEEVAPGARHATLSLSIPRVAPEHEGHYVCEVQDRRSHDKHCHKKYLSVQALEAPRLTQNLTDLLVNVSDSLEMQCLVAGAHAPSIVWYKDERLLEEKSGVDLADSNQKLSIQRVREEDAGRYLCSVCNAKGCVNSSASVAVEGSEDKGSMEIVILVGTGVIAVFFWVLLLLIFCNMRRPAHADIKTGYLSIIMDPGEVPLEEQCEYLSYDASQWEFPRERLHLGRVLGYGAFGKVVEASAFGIHKGSSCDTVAVKMLKEGATASEHRALMSELKILIHIGNHLNVVNLLGACTKPQGPLMVIVEFCKYGNLSNFLRAKRDAFSPCAEKSPEQRGRFRAMVELARLDRRRPGSSDRVLFARFSKTEGGARRASPDQEAEDLWLSPLTMEDLVCYSFQVARGMEFLASRKCIHRDLAARNILLSESDVVKICDFGLARDIYKDPDYVRKGSARLPLKWMAPESIFDKVYTTQSDVWSFGVLLWEIFSLGASPYPGVQINEEFCQRLRDGTRMRAPELATPAIRRIMLNCWSGDPKARPAFSELVEILGDLLQGRGLQEEEEVCMAPRSSQSSEEGSFSQVSTMALHIAQADAEDSPPSLQRHSLAARYYNWVSFPGCLARGAETRGSSRMKTFEEFPMTPTTYKGSVDNQTDSGMVLASEEFEQIESRHRQESGFR

SEQ ID NO: 5469 - protein, 1306 aa, Homo sapiens
MQRGAALCLRLWLCLGLLDGLVSGYSMTPPTLNITEESHVIDTGDSLSISCRGQHPLEWAWPGAQEAPATGDKDSEDTGVVRDCEGTDARPYCKVLLLHEVHANDTGSYVCYYKYIKARIEGTTAASSYVFVRDFEQPFINKPDTLLVNRKDAMWVPCLVSIPGLNVTLRSQSSVLWPDGQEVVWDDRRGMLVSTPLLHDALYLQCETTWGDQDFLSNPFLVHITGNELYDIQLLPRKSLELLVGEKLVLNCTVWAEFNSGVTFDWDYPGKQAERGKWVPERRSQQTHTELSSILTIHNVSQHDLGSYVCKANNGIQRFRESTEVIVHENPFISVEWLKGPILEATAGDELVKLPVKLAAYPPPEFQWYKDGKALSGRHSPHALVLKEVTEASTGTYTLALWNSAAGLRRNISLELVVNVPPQIHEKEASSPSIYSRHSRQALTCTAYGVPLPLSIQWHWRPWTPCKMFAQRSLRRRQQQDLMPQCRDWRAVTTQDAVNPIESLDTWTEFVEGKNKTVSKLVIQNANVSAMYKCVVSNKVGQDERLIYFYVTTIPDGFTIESKPSEELLEGQPVLLSCQADSYKYEHLRWYRLNLSTLHDAHGNPLLLDCKNVHLFATPLAASLEEVAPGARHATLSLSIPRVAPEHEGHYVCEVQDRRSHDKHCHKKYLSVQALEAPRLTQNLTDLLVNVSDSLEMQCLVAGAHAPSIVWYKDERLLEEKSGVDLADSNQKLSIQRVREEDAGRYLCSVCNAKGCVNSSASVAVEGSEDKGSMEIVILVGTGVIAVFFWVLLLLIFCNMRRPAHADIKTGYLSIIMDPGEVPLEEQCEYLSYDASQWEFPRERLHLGRVLGYGAFGKVVEASAFGIHKGSSCDTVAVKMLKEGATASEHRALMSELKILIHIGNHLNVVNLLGACTKPQGPLMVIVEFCKYGNLSNFLRAKRDAFSPCAEKSPEQRGRFRAMVELARLDRRRPGSSDRVLFARFSKTEGGARRASPDQEAEDLWLSPLTMEDLVCYSFQVARGMEFLASRKCIHRDLAARNILLSESDVVKICDFGLARDIYKDPDYVRKGSARLPLKWMAPESIFDKVYTTQSDVWSFGVLLWEIFSLGASPYPGVQINEEFCQRLRDGTRMRAPELATPAIRRIMLNCWSGDPKARPAFSELVEILGDLLQGRGLQEEEEVCMAPRSSQSSEEGSFSQVSTMALHIAQADAEDSPPSLQRHSLAARYYNWVSFPGCLARGAETRGSSRMKTFEEFPMTPTTYKGSVDNQTDSGMVLASEEFEQIESRHRQESGFRGTRRTRGA

SEQ ID NO: 5470 - protein, 295 aa, Homo sapiens
MQRGAALCLRLWLCLGLLDGLVSGYSMTPPTLNITEESHVIDTGDSLSISCRGQHPLEWAWPGAQEAPATGDKDSEDTGVVRDCEGTDARPYCKVLLLHEVHANDTGSYVCYYKYIKARIEGTTAASSYVFVRDFEQPFINKPDTLLVNRKDAMWVPCLVSIPGLNVTLRSQSSVLWPDGQEVVWDDRRGMLVSTPLLHDALYLQCETTWGDQDFLSNPFLVHITGNELYDIQLLPRKSLELLVGEKLVLNCTVWAEFNSGVTFDWDYPGKQKIPSSASSGSKDPSWRPRQETSW

SEQ ID NO: 5471 - protein, 142 aa, Homo sapiens
MVELARLDRRRPGSSDRVLFARFSKTEGGARRASPDQEAEDLWLSPLTMEDLVCYSFQVARGMEFLASRKCIHRDLAARNILLSESDVVKICDFGLARDIYKDPDYVRKGSARLPLKWMAPESIFDKVYTTQSDVWSFGVLL

SEQ ID NO: 5472 - protein, 126 aa, Homo sapiens
MAKRVAIVGAGVSGLASIKCCLEEGLEPTCFERSDDLGGLWRFTEHVEEGRASLYKSVVSNSCKEMSCYSDFPFPEDYPNYVPNSQFLEYLKMYANHFDLLKHIQFKSGIQLTEQQLFPISCIRDS

SEQ ID NO: 5473 - protein, 532 aa, Homo sapiens
MAKRVAIVGAGVSGLASIKCCLEEGLEPTCFERSDDLGGLWRFTEHVEEGRASLYKSVVSNSCKEMSCYSDFPFPEDYPNYVPNSQFLEYLKMYANHFDLLKHIQFKTKVCSVTKCSDSAVSGQWEVVTMHEEKQESAIFDAVMVCTGFLTNPYLPLDSFPGINAFKGQYFHSRQYKHPDIFKDKRVLVIGMGNSGTDIAVEASHLAEKVFLSTTGGGWVISRIFDSGYPWDMVFMTRFQNMLRNSLPTPIVTWLMERKINNWLNHANYGLIPEDRTQLKEFVLNDELPGRIITGKVFIRPSIKEVKENSVIFNNTSKEEPIDIIVFATGYTFAFPFLDESVVKVEDGQASLYKYIFPAHLQKPTLAIIGLIKPLGSMIPTGETQARWAVRVLKGVNKLPPPSVMIEEINARKENKPSWFGLCYCKALQSDYITYIDELLTYINAKPNLFSMLLTDPHLALTVFFGPCSPYQFRLTGPGKWEGARNAIMTQWDRTFKVIKARVVQESPSPFESFLKVFSFLALLVAIFLIFL

SEQ ID NO: 5474 - protein, 532 aa, Homo sapiens; identical to SEQ ID NO: 5473

SEQ ID NO: 5475 - protein, 532 aa, Homo sapiens; identical to SEQ ID NO: 5473

SEQ ID NO: 5476 - protein, 469 aa, Homo sapiens
MAKRVAIVGAGVSGLASIKCCLEEGLEPTCFERSDDLGGLWRFTTKVCSVTKCSDSAVSGQWEVVTMHEEKQESAIFDAVMVCTGFLTNPYLPLDSFPGINAFKGQYFHSRQYKHPDIFKDKRVLVIGMGNSGTDIAVEASHLAEKVFLSTTGGGWVISRIFDSGYPWDMVFMTRFQNMLRNSLPTPIVTWLMERKINNWLNHANYGLIPEDRTQLKEFVLNDELPGRIITGKVFIRPSIKEVKENSVIFNNTSKEEPIDIIVFATGYTFAFPFLDESVVKVEDGQASLYKYIFPAHLQKPTLAIIGLIKPLGSMIPTGETQARWAVRVLKGVNKLPPPSVMIEEINARKENKPSWFGLCYCKALQSDYITYIDELLTYINAKPNLFSMLLTDPHLALTVFFGPCSPYQFRLTGPGKWEGARNAIMTQWDRTFKVIKARVVQESPSPFESFLKVFSFLALLVAIFLIFL

SEQ ID NO: 5477 - protein, 131 aa, Homo sapiens
MAKKVAVIGAGVSGLISLKCCVDEGLEPTCFERTEDIGGVWRFKENVEDGRASIYQSVVTNTSKEMSCFSDFPMPEDFPNFLHNSKLLEYFRIFAKKFDLLKYIQFQTTVLSVRKCPDFSSSGQWKVVTQS

SEQ ID NO: 5478 - protein, 535 aa, Homo sapiens [sequence omitted]

SEQ ID NO: 5479 - protein, 153 aa, Homo sapiens
TQPREKTILSKRRCQKAKTKENVEDGRASIYQSVVTNTSKEMSCFSDFPMPEDFPNFLHNSKLLEYFRIFAKKFDLLKYIQFQTTVLSVRKCPDFSSSGQWKVVTQSNGKEQSAVFDAVMVCSGHHILPHIPLKSFPGFYQHQAWHLGHEPYL

SEQ ID NO: 5480 - protein, 218 aa, Homo sapiens
MGKKVAIIGAGVSGLASIRSCLEEGLEPTCFEKSNDIGGLWKFSDHAEEGRASIYKSVFSNSSKEMMCFPDFPFPDDFPNFMHNSKIQEYIIAFAKEKNLLKYIQFKTFVSSVNKHPDFATTGQWDVTTERDGKKESAVFDAVMVCSGHHVYPNLPDYKEPGVFNGKRVLVVGLGNSGCDIATELSRTAEQVMISSRSGSWVMSRVWDNGYPWDMLLV

SEQ ID NO: 5481 - protein, 532 aa, Homo sapiens
MGKKVAIIGAGVSGLASIRSCLEEGLEPTCFEKSNDIGGLWKFSDHAEEGRASIYKSVFSNSSKEMMCFPDFPFPDDFPNFMHNSKIQEYIIAFAKEKNLLKYIQFKTFVSSVNKHPDFATTGQWDVTTERDGKKESAVFDAVMVCSGHHVYPNLPKESFPGLNHFKGKCFHSRDYKEPGVFNGKRVLVVGLGNSGCDIATELSRTAEQVMISSRSGSWVMSRVWDNGYPWDMLLVTRFGTFLKNNLPTAISDWLYVKQMNARFKHENYGLMPLNGVLRKEPVFNDELPASILCGIVSVKPNVKEFTETSAIFEDGTIFEGIDCVIFATGYSFAYPFLDESIIKSRNNEIILFKGVFPPLLEKSTIAVIGFVQSLGAAIPTVDLQSRWAAQVIKGTCTLPSMEDMMNDINEKMEKKRKWFGKSETIQTDYIVYMDELSSFIGAKPNIPWLFLTDPKLAMEVYFGPCSPYQFRLVGPGQWPGARNAILTQWDRSLKPMQTRVVGRLQKPCFFFHWLKLFAIPILLIAVFLVLT

SEQ ID NO: 5482 - protein, 48 aa, Homo sapiens
MGKKVAIIGAGVSGLASIRSCLEEGLEPTCFEKSNDIGGLWKFSRSHE

SEQ ID NO: 5483 - protein, 145 aa, Homo sapiens
MTKKRIAVIGGGVSGLSSIKCCVEEGLEPVCFERTDDIGGLWRFQENPEEGRASIYKSVIINTSKEMMCFSDYPIPDHYPNFMHNAQVLEYFRMYAKEFDLLKYIRFKTTVCSVKKQPDFATSGQWEVVTESEGKKEMNVFDGVM

SEQ ID NO: 5484 - protein, 192 aa, Homo sapiens
MTKKRIAVIGGGVSGLSSIKCCVEEGLEPVCFERTDDIGGLWRFQENPEEGRASIYKSVIINTSKEMMCFSDYPIPDHYPNFMHNAQVLEYFRMYAKEFDLLKYIRFKTTVCSVKKQPDFATSGQWEVVTESEGKKEMNVFDGVMVCTGHHTNAHLPLESFPGIEKFKGQYFHSRDYKNPEGFTGKRVIIIG

SEQ ID NO: 5485 - protein, 533 aa, Homo sapiens
MTKKRIAVIGGGVSGLSSIKCCVEEGLEPVCFERTDDIGGLWRFQENPEEGRASIYKSVIINTSKEMMCFSDYPIPDHYPNFMHNAQVLEYFRMYAKEFDLLKYIRFKTTVCSVKKQPDFATSGQWEVVTESEGKKEMNVFDGVMVCTGHHTNAHLPLESFPGIEKFKGQYFHSRDYKNPEGFTGKRVIIIGIGNSGGDLAVEISQTAKQVFLSTRRGAWILNRVGDYGYPADVLFSSRLTHFIWKICGQSLANKYLEKKINQRFDHEMFGLKPKHRALSQHPTLNDDLPNRIISGLVKVKGNVKEFTETAAIFEDGSREDDIDAVIFATGYSFDFPFLEDSVKVVKNKISLYKKVFPPNLERPTLAIIGLIQPLGAIMPISELQGRWATQVFKGLKTLPSQSEMMAEISKAQEEIDKRYVESQRHTIQGDYIDTMEELADLVGVRPNLLSLAFTDPKLALHLLLGPCTPIHYRVQGPGKWDGARKAILTTDDRIRKPLMTRVVERSSSMTSTMTIGKFMLALAFFAIIIAYF

SEQ ID NO: 5486 - protein, 285 aa, Homo sapiens
MTKKRIAVIGGGVSGLSSIKCCVEEGLEPVCFERTDDIGGLWRFQENPEEGRASIYKSVIINTSKEMMCFSDYPIPDHYPNFMHNAQVLEYFRMYAKEFDLLKYIRFKTTVCSVKKQPDFATSGQWEVVTESEGKKEMNVFDGVMVCTGHHTNAHLPLESFPGIEKFKGQYFHSRDYKNPEGFTGKRVIIIGIGNSGGDLAVEISQTAKQVFLSTRRGAWILNRVGDYGYPADVLFSSRLTHFIWKICGQSLANKYLEKKINQRFDHEMFGLKPKHRSKDIALTE

SEQ ID NO: 5487 - protein, 464 aa, Homo sapiens
MTKKRIAVIGGGVSGLSSIKCCVEEGLEPVCFERTDDIGGLWRFQENPEEGRASIYKSVIINTSKEMMCFSDYPIPDHYPNFMHNAQVLEYFRMYAKEFDLLKYIRFKTTVCSVKKQPDFATSGQWEVVTESEGKKEMNVFDGVMVCTGHHTNAHLPLESFPGIEKFKGQYFHSRDYKNPEGFTGKRVIIIGIGNSGGDLAVEISQTAKQVFLSTRRGAWILNRVGDYGYPADVLFSSRLTHFIWKICGQSLANKYLEKKINQRFDHEMFGLKPKHRALSQHPTLNDDLPNRIISGLVKVKGNVKEFTETAAIFEDGSREDDIDAVIFATGYSFDFPFLEDSVKVVKNKISLYKKVFPPNLERPTLAIIGLIQPLGAIMPISELQGRWATQVFKGLKTLPSQSEMMAEISKAQEEIDKSLTMRKTSDKPKLKNILQIPDYLKTVKIINKESLRNCPGIKGPKET

SEQ ID NO: 5488 - protein, 278 aa, Homo sapiens
MTKKRIAVIGGGVSGLSSIKCCVEEGLEPVCFERTDDIGGLWRFQENPEEGRASIYKSVIINTSKEMMCFSDYPIPDHYPNFMHNAQVLEYFRMYAKEFDLLKYIRFKTTVCSVKKQPDFATSGQWEVVTESEGKKEMNVFDGVMVCTGHHTNAHLPLESFPGIEKFKGQYFHSRDYKNPEGFTGKRVIIIGIGNSGGDLAVEISQTAKQVFLSTRRGAWILNRVGDYGYPADVLFSSRLTHFIWKICGQSLANKYLEKKINQRFDHEMFGLKPKHRL

SEQ ID NO: 5489 - protein, 464 aa, Homo sapiens; identical to SEQ ID NO: 5487

SEQ ID NO: 5490 - protein, 376 aa, Homo sapiens
MQWTSLLLLAGLFSLSQAQYEDDPHWWFHYLRSQQSTYYDPYDPYPYETYEPYPYGVDEGPAYTYGSPSPPDPRDCPQECDCPPNFPTAMYCDNRNLKYLPFVPSRMKYVYFQNNQITSIQEGVFDNATGLLWIALHGNQITSDKVGRKVFSKLRHLERLYLDHNNLTRMPGPLPRSLRELHLDHNQISRVPNNALEGLENLTALYLQHNEIQEVGSSMRGLRSLILLDLSYNHLRKVPDGLPSALEQLYMEHNNVYTVPDSYFRGAPKLLYVRLSHNSLTNNGLASNTFNSSSLLELDLSYNQLQKIPPVNTNLENLYLQGNRINEFSISSFCTVVDVVNFSKLQVLRLDGNEIKRSAMPADAPLCLRLASLIEI

SEQ ID NO: 5491 - protein, 1103 aa, Homo sapiens
LRWTPLNSSTIIGYRITVVAAGEGIPIFEDFVDSSVGYYTVTGLEPGIDYDISVITLINGGESAPTTLTQQTAVPPPTDLRFTNIGPDTMRVTWAPPPSIDLTNFLVRYSPVKNEEDVAELSISPSDNAVVLTNLLPGTEYVVSVSSVYEQHESTPLRGRQKTGLDSPTGIDFSDITANSFTVHWIAPRATITGYRIRHHPEHFSGRPREDRVPHSRNSITLTNLTPGTEYVVSIVALNGREESPLLIGQQSTVSDVPRDLEVVAATPTSLLISWDAPAVTVRYYRITYGETGGNSPVQEFTVPGSKSTATISGLKPGVDYTITVYAVTGRGDSPASSKPISINYRTEIDKPSQMQVTDVQDNSISVKWLPSSSPVTGYRVTTTPKNGPGPTKTKTAGPDQTEMTIEGLQPTVEYVVSVYAQNPSGESQPLVQTAVTTIPAPTDLKFTQVTPTSLSAQWTPPNVQLTGYRVRVTPKEKTGPMKEINLAPDSSSVVVSGLMVATKYEVSVYALKDTLTSRPAQGVVTTLENVSPPRRARVTDATETTITISWRTKTETITGFQVDAVPANGQTPIQRTIKPDVRSYTITGLQPGTDYKIYLYTLNDNARSSPVVIDASTAIDAPSNLRFLATTPNSLLVSWQPPRARITGYIIKYEKPGSPPREVVPRPRPGVTEATITGLEPGTEYTIYVIALKNNQKSEPLIGRKKTDELPQLVTLPHPNLHGPEILDVPSTVQKTPFVTHPGYDTGNGIQLPGTSGQQPSVGQQMIFEEHGFRRTTPPTTATPIRHRPRPYPPNVGEEIQIGHIPREDVDYHLYPHGPGLNPNASTGQEALSQTTISWAPFQDTSEYIISCHPVGTDEEPLQFRVPGTSTSATLTGLTRGATYNVIVEALKDQQRHKVREEVVTVGNSVNEGLNQPTDDSCFDPYTVSHYAVGDEWERMSESGFKLLCQCLGFGSGHFRCDSSRWCHDNGVNYKIGEKWDRQGENGQMMSCTCLGNGKGEFKCDPHEATCYDDGKTYHVGEQWQKEYLGAICSCTCFGGQRGWRCDNCRRPGGEPSPEGTTGQSYNQYSQRYHQRTNTNVNCPIECFMPLDVQADREDSRE

SEQ ID NO: 5492 - protein, 2355 aa, Homo sapiens
MLRGPGPGLLLLAVQCLGTAVPSTGASKSKRQAQQMVQPQSPVAVSQSKPGCYDNGKHYQINQQWERTYLGNALVCTCYGGSRGFNCESKPEAEETCFDKYTGNTYRVGDTYERPKDSMIWDCTCIGAGRGRISCTIANRCHEGGQSYKIGDTWRRPHETGGYMLECVCLGNGKGEWTCKPIAEKCFDHAAGTSYVVGETWEKPYQGWMMVDCTCLGEGSGRITCTSRNRCNDQDTRTSYRIGDTWSKKDNRGNLLQCICTGNGRGEWKCERHTSVQTTSSGSGPFTDVRAAVYQPQPHPQPPPYGHCVTDSGVVYSVGMQWLKTQGNKQMLCTCLGNGVSCQETAVTQTYGGNSNGEPCVLPFTYNGRTFYSCTTEGRQDGHLWCSTTSNYEQDQKYSFCTDHTVLVQTRGGNSNGALCHFPFLYNNHNYTDCTSEGRRDNMKWCGTTQNYDADQKFGFCPMAAHEEICTTNEGVMYRIGDQWDKQHDMGHMMRCTCVGNGRGEWTCIAYSQLRDQCIVDDITYNVNDTFHKRHEEGHMLNCTCFGQGRGRWKCDPVDQCQDSETGTFYQIGDSWEKYVHGVRYQCYCYGRGIGEWHCQPLQTYPSSSGPVEVFITETPSQPNSHPIQWNAPQPSHISKYILRWRPKNSVGRWKEATIPGHLNSYTIKGLKPGVVYEGQLISIQQYGHQEVTRFDFTTTSTSTPVTSNTVTGETTPFSPLVATSESVTEITASSFVVSWVSASDTVSGFRVEYELSEEGDEPQYLDLPSTATSVNIPDLLPGRKYIVNVYQISEDGEQSLILSTSQTTAPDAPPDTTVDQVDDTSIVVRWSRPQAPITGYRIVYSPSVEGSSTELNLPETANSVTLSDLQPGVQYNITIYAVEENQESTPVVIQQETTGTPRSDTVPSPRDLQFVEVTDVKVTIMWTPPESAVTGYRVDVIPVNLPGEHGQRLPISRNTFAEVTGLSPGVTYYFKVFAVSHGRESKPLTAQQTTKLDAPTNLQFVNETDSTVLVRWTPPRAQITGYRLTVGLTRRGQPRQYNVGPSVSKYPLRNLQPASEYTVSLVAIKGNQESPKATGVFTTLQPGSSIPPYNTEVTETTIVITWTPAPRIGFKLGVRPSQGGEAPREVTSDSGSIVVSGLTPGVEYVYTIQVLRDGQERDAPIVNKVVTPLSPPTNLHLEANPDTGVLTVSWERSTTPDITGYRITTTPTNGQQGNSLEEVVHADQSSCTFDNLSPGLEYNVSVYTVKDDKESVPISDTIIPAVPPPTDLRFTNIGPDTMRVTWAPPPSIDLTNFLVRYSPVKNEEDVAELSISPSDNAVVLTNLLPGTEYVVSVSSVYEQHESTPLRGRQKTGLDSPTGIDFSDITANSFTVHWIAPRATITGYRIRHHPEHFSGRPREDRVPHSRNSITLTNLTPGTEYVVSIVALNGREESPLLIGQQSTVSDVPRDLEVVAATPTSLLISWDAPAVTVRYYRITYGETGGNSPVQEFTVPGSKSTATISGLKPGVDYTITVYAVTGRGDSPASSKPISINYRTEIDKPSQMQVTDVQDNSISVKWLPSSSPVTGYRVTTTPKNGPGPTKTKTAGPDQTEMTIEGLQPTVEYVVSVYAQNPSGESQPLVQTAVTNIDRPKGLAFTDVDVDSIKIAWESPQGQVSRYRVTYSSPEDGIHELFPAPDGEEDTAELQGLRPGSEYTVSVVALHDDMESQPLIGTQSTAIPAPTDLKFTQVTPTSLSAQWTPPNVQLTGYRVRVTPKEKTGPMKEINLAPDSSSVVVSGLMVATKYEVSVYALKDTLTSRPAQGVVTTLENVSPPRRARVTDATETTITISWRTKTETITGFQVDAVPANGQTPIQRTIKPDVRSYTITGLQPGTDYKIYLYTLNDNARSSPVVIDASTAIDAPSNLRFLATTPNSLLVSWQPPRARITGYIIKYEKPGSPPREVVPRPRPGVTEATITGLEPGTEYTIYVIALKNNQKSEPLIGRKKTDELPQLVTLPHPNLHGPEILDVPSTVQKTPFVTHPGYDTGNGIQLPGTSGQQPSVGQQMIFEEHGFRRTTPPTTATPIRHRPRPYPPNVGQEALSQTTISWAPFQDTSEYIISCHPVGTDEEPLQFRVPGTSTSATLTGLTRGATYNVIVEALKDQQRHKVREEVVTVGNSVNEGLNQPTDDSCFDPYTVSHYAVGDEWERMSESGFKLLCQCLGFGSGHFRCDSSRWCHDNGVNYKIGEKWDRQGENGQMMSCTCLGNGKGEFKCDPHEATCYDDGKTYHVGEQWQKEYLGAICSCTCFGGQRGWRCDNCRRPGGEPSPEGTTGQSYNQYSQRYHQRTNTNVNCPIECFMPLDVQADREDSRE

SEQ ID NO: 5493 - protein, 2477 aa, Homo sapiens
MLRGPGPGLLLLAVQCLGTAVPSTGASKSKRQAQQMVQPQSPVAVSQSKPGCYDNGKHYQINQQWERTYLGNALVCTCYGGSRGFNCESKPEAEETCFDKYTGNTYRVGDTYERPKDSMIWDCTCIGAGRGRISCTIANRCHEGGQSYKIGDTWRRPHETGGYMLECVCLGNGKGEWTCKPIAEKCFDHAAGTSYVVGETWEKPYQGWMMVDCTCLGEGSGRITCTSRNRCNDQDTRTSYRIGDTWSKKDNRGNLLQCICTGNGRGEWKCERHTSVQTTSSGSGPFTDVRAAVYQPQPHPQPPPYGHCVTDSGVVYSVGMQWLKTQGNKQMLCTCLGNGVSCQETAVTQTYGGNSNGEPCVLPFTYNGRTFYSCTTEGRQDGHLWCSTTSNYEQDQKYSFCTDHTVLVQTRGGNSNGALCHFPFLYNNHNYTDCTSEGRRDNMKWCGTTQNYDADQKFGFCPMAAHEEICTTNEGVMYRIGDQWDKQHDMGHMMRCTCVGNGRGEWTCIAYSQLRDQCIVDDITYNVNDTFHKRHEEGHMLNCTCFGQGRGRWKCDPVDQCQDSETGTFYQIGDSWEKYVHGVRYQCYCYGRGIGEWHCQPLQTYPSSSGPVEVFITETPSQPNSHPIQWNAPQPSHISKYILRWRPKNSVGRWKEATIPGHLNSYTIKGLKPGVVYEGQLISIQQYGHQEVTRFDFTTTSTSTPVTSNTVTGETTPFSPLVATSESVTEITASSFVVSWVSASDTVSGFRVEYELSEEGDEPQYLDLPSTATSVNIPDLLPGRKYIVNVYQISEDGEQSLILSTSQTTAPDAPPDTTVDQVDDTSIVVRWSRPQAPITGYRIVYSPSVEGSSTELNLPETANSVTLSDLQPGVQYNITIYAVEENQESTPVVIQQETTGTPRSDTVPSPRDLQFVEVTDVKVTIMWTPPESAVTGYRVDVIPVNLPGEHGQRLPISRNTFAEVTGLSPGVTYYFKVFAVSHGRESKPLTAQQTTKLDAPTNLQFVNETDSTVLVRWTPPRAQITGYRLTVGLTRRGQPRQYNVGPSVSKYPLRNLQPASEYTVSLVAIKGNQESPKATGVFTTLQPGSSIPPYNTEVTETTIVITWTPAPRIGFKLGVRPSQGGEAPREVTSDSGSIVVSGLTPGVEYVYTIQVLRDGQERDAPIVNKVVTPLSPPTNLHLEANPDTGVLTVSWERSTTPDITGYRITTTPTNGQQGNSLEEVVHADQSSCTFDNLSPGLEYNVSVYTVKDDKESVPISDTIIPEVPQLTDLSFVDITDSSIGLRWTPLNSSTIIGYRITVVAAGEGIPIFEDFVDSSVGYYTVTGLEPGIDYDISVITLINGGESAPTTLTQQTAVPPPTDLRFTNIGPDTMRVTWAPPPSIDLTNFLVRYSPVKNEEDVAELSISPSDNAVVLTNLLPGTEYVVSVSSVYEQHESTPLRGRQKTGLDSPTGIDFSDITANSFTVHWIAPRATITGYRIRHHPEHFSGRPREDRVPHSRNSITLTNLTPGTEYVVSIVALNGREESPLLIGQQSTVSDVPRDLEVVAATPTSLLISWDAPAVTVRYYRITYGETGGNSPVQEFTVPGSKSTATISGLKPGVDYTITVYAVTGRGDSPASSKPISINYRTEIDKPSQMQVTDVQDNSISVKWLPSSSPVTGYRVTTTPKNGPGPTKTKTAGPDQTEMTIEGLQPTVEYVVSVYAQNPSGESQPLVQTAVTNIDRPKGLAFTDVDVDSIKIAWESPQGQVSRYRVTYSSPEDGIHELFPAPDGEEDTAELQGLRPGSEYTVSVVALHDDMESQPLIGTQSTAIPAPTDLKFTQVTPTSLSAQWTPPNVQLTGYRVRVTPKEKTGPMKEINLAPDSSSVVVSGLMVATKYEVSVYALKDTLTSRPAQGVVTTLENVSPPRRARVTDATETTITISWRTKTETITGFQVDAVPANGQTPIQRTIKPDVRSYTITGLQPGTDYKIYLYTLNDNARSSPVVIDASTAIDAPSNLRFLATTPNSLLVSWQPPRARITGYIIKYEKPGSPPREVVPRPRPGVTEATITGLEPGTEYTIYVIALKNNQKSEPLIGRKKTDELPQLVTLPHPNLHGPEILDVPSTVQKTPFVTHPGYDTGNGIQLPGTSGQQPSVGQQMIFEEHGFRRTTPPTTATPIRHRPRPYPPNVGEEIQIGHIPREDVDYHLYPHGPGLNPNASTGQEALSQTTISWAPFQDTSEYIISCHPVGTDEEPLQFRVPGTSTSATLTGLTRGATYNVIVEALKDQQRHKVREEVVTVGNSVNEGLNQPTDDSCFDPYTVSHYAVGDEWERMSESGFKLLCQCLGFGSGHFRCDSSRWCHDNGVNYKIGEKWDRQGENGQMMSCTCLGNGKGEFKCDPHEATCYDDGKTYHVGEQWQKEYLGAICSCTCFGGQRGWRCDNCRRPGGEPSPEGTTGQSYNQYSQRYHQRTNTNVNCPIECFMPLDVQADREDSRE

SEQ ID NO: 5494 - protein, 2176 aa, Homo sapiens
MLRGPGPGLLLLAVQCLGTAVPSTGASKSKRQAQQMVQPQSPVAVSQSKPGCYDNGKHYQINQQWERTYLGNALVCTCYGGSRGFNCESKPEAEETCFDKYTGNTYRVGDTYERPKDSMIWDCTCIGAGRGRISCTIANRCHEGGQSYKIGDTWRRPHETGGYMLECVCLGNGKGEWTCKPIAEKCFDHAAGTSYVVGETWEKPYQGWMMVDCTCLGEGSGRITCTSRNRCNDQDTRTSYRIGDTWSKKDNRGNLLQCICTGNGRGEWKCERHTSVQTTSSGSGPFTDVRAAVYQPQPHPQPPPYGHCVTDSGVVYSVGMQWLKTQGNKQMLCTCLGNGVSCQETAVTQTYGGNSNGEPCVLPFTYNGRTFYSCTTEGRQDGHLWCSTTSNYEQDQKYSFCTDHTVLVQTRGGNSNGALCHFPFLYNNHNYTDCTSEGRRDNMKWCGTTQNYDADQKFGFCPMAAHEEICTTNEGVMYRIGDQWDKQHDMGHMMRCTCVGNGRGEWTCIAYSQLRDQCIVDDITYNVNDTFHKRHEEGHMLNCTCFGQGRGRWKCDPVDQCQDSETGTFYQIGDSWEKYVHGVRYQCYCYGRGIGEWHCQPLQTYPSSSGPVEVFITETPSQPNSHPIQWNAPQPSHISKYILRWRPKNSVGRWKEATIPGHLNSYTIKGLKPGVVYEGQLISIQQYGHQEVTRFDFTTTSTSTPVTSNTVTGETTPFSPLVATSESVTEITASSFVVSWVSASDTVSGFRVEYELSEEGDEPQYLDLPSTATSVNIPDLLPGRKYIVNVYQISEDGEQSLILSTSQTTAPDAPPDTTVDQVDDTSIVVRWSRPQAPITGYRIVYSPSVEGSSTELNLPETANSVTLSDLQPGVQYNITIYAVEENQESTPVVIQQETTGTPRSDTVPSPRDLQFVEVTDVKVTIMWTPPESAVTGYRVDVIPVNLPGEHGQRLPISRNTFAEVTGLSPGVTYYFKVFAVSHGRESKPLTAQQTTKLDAPTNLQFVNETDSTVLVRWTPPRAQITGYRLTVGLTRRGQPRQYNVGPSVSKYPLRNLQPASEYTVSLVAIKGNQESPKATGVFTTLQPGSSIPPYNTEVTETTIVITWTPAPRIGFKLGVRPSQGGEAPREVTSDSGSIVVSGLTPGVEYVYTIQVLRDGQERDAPIVNKVVTPLSPPTNLHLEANPDTGVLTVSWERSTTPDITGYRITTTPTNGQQGNSLEEVVHADQSSCTFDNLSPGLEYNVSVYTVKDDKESVPISDTIIPAVPPPTDLRFTNIGPDTMRVTWAPPPSIDLTNFLVRYSPVKNEEDVAELSISPSDNAVVLTNLLPGTEYVVSVSSVYEQHESTPLRGRQKTGLDSPTGIDFSDITANSFTVHWIAPRATITGYRIRHHPEHFSGRPREDRVPHSRNSITLTNLTPGTEYVVSIVALNGREESPLLIGQQSTVSDVPRDLEVVAATPTSLLISWDAPAVTVRYYRITYGETGGNSPVQEFTVPGSKSTATISGLKPGVDYTITVYAVTGRGDSPASSKPISINYRTEIDKPSQMQVTDVQDNSISVKWLPSSSPVTGYRVTTTPKNGPGPTKTKTAGPDQTEMTIEGLQPTVEYVVSVYAQNPSGESQPLVQTAVTTIPAPTDLKFTQVTPTSLSAQWTPPNVQLTGYRVRVTPKEKTGPMKEINLAPDSSSVVVSGLMVATKYEVSVYALKDTLTSRPAQGVVTTLENVSPPRRARVTDATETTITISWRTKTETITGFQVDAVPANGQTPIQRTIKPDVRSYTITGLQPGTDYKIYLYTLNDNARSSPVVIDASTAIDAPSNLRFLATTPNSLLVSWQPPRARITGYIIKYEKPGSPPREVVPRPRPGVTEATITGLEPGTEYTIYVIALKNNQKSEPLIGRKKTGQEALSQTTISWAPFQDTSEYIISCHPVGTDEEPLQFRVPGTSTSATLTGLTRGATYNVIVEALKDQQRHKVREEVVTVGNSVNEGLNQPTDDSCFDPYTVSHYAVGDEWERMSESGFKLLCQCLGFGSGHFRCDSSRWCHDNGVNYKIGEKWDRQGENGQMMSCTCLGNGKGEFKCDPHEATCYDDGKTYHVGEQWQKEYLGAICSCTCFGGQRGWRCDNCRRPGGEPSPEGTTGQSYNQYSQRYHQRTNTNVNCPIECFMPLDVQADREDSRE

SEQ ID NO: 5495 - protein, 2386 aa, Homo sapiens
MLRGPGPGLLLLAVQCLGTAVPSTGASKSKRQAQQMVQPQSPVAVSQSKPGCYDNGKHYQINQQWERTYLGNALVCTCYGGSRGFNCESKPEAEETCFDKYTGNTYRVGDTYERPKDSMIWDCTCIGAGRGRISCTIANRCHEGGQSYKIGDTWRRPHETGGYMLECVCLGNGKGEWTCKPIAEKCFDHAAGTSYVVGETWEKPYQGWMMVDCTCLGEGSGRITCTSRNRCNDQDTRTSYRIGDTWSKKDNRGNLLQCICTGNGRGEWKCERHTSVQTTSSGSGPFTDVRAAVYQPQPHPQPPPYGHCVTDSGVVYSVGMQWLKTQGNKQMLCTCLGNGVSCQETAVTQTYGGNSNGEPCVLPFTYNGRTFYSCTTEGRQDGHLWCSTTSNYEQDQKYSFCTDHTVLVQTRGGNSNGALCHFPFLYNNHNYTDCTSEGRRDNMKWCGTTQNYDADQKFGFCPMAAHEEICTTNEGVMYRIGDQWDKQHDMGHMMRCTCVGNGRGEWTCIAYSQLRDQCIVDDITYNVNDTFHKRHEEGHMLNCTCFGQGRGRWKCDPVDQCQDSETGTFYQIGDSWEKYVHGVRYQCYCYGRGIGEWHCQPLQTYPSSSGPVEVFITETPSQPNSHPIQWNAPQPSHISKYILRWRPKNSVGRWKEATIPGHLNSYTIKGLKPGVVYEGQLISIQQYGHQEVTRFDFTTTSTSTPVTSNTVTGETTPFSPLVATSESVTEITASSFVVSWVSASDTVSGFRVEYELSEEGDEPQYLDLPSTATSVNIPDLLPGRKYIVNVYQISEDGEQSLILSTSQTTAPDAPPDTTVDQVDDTSIVVRWSRPQAPITGYRIVYSPSVEGSSTELNLPETANSVTLSDLQPGVQYNITIYAVEENQESTPVVIQQETTGTPRSDTVPSPRDLQFVEVTDVKVTIMWTPPESAVTGYRVDVIPVNLPGEHGQRLPISRNTFAEVTGLSPGVTYYFKVFAVSHGRESKPLTAQQTTKLDAPTNLQFVNETDSTVLVRWTPPRAQITGYRLTVGLTRRGQPRQYNVGPSVSKYPLRNLQPASEYTVSLVAIKGNQESPKATGVFTTLQPGSSIPPYNTEVTETTIVITWTPAPRIGFKLGVRPSQGGEAPREVTSDSGSIVVSGLTPGVEYVYTIQVLRDGQERDAPIVNKVVTPLSPPTNLHLEANPDTGVLTVSWERSTTPDITGYRITTTPTNGQQGNSLEEVVHADQSSCTFDNLSPGLEYNVSVYTVKDDKESVPISDTIIPAVPPPTDLRFTNIGPDTMRVTWAPPPSIDLTNFLVRYSPVKNEEDVAELSISPSDNAVVLTNLLPGTEYVVSVSSVYEQHESTPLRGRQKTGLDSPTGIDFSDITANSFTVHWIAPRATITGYRIRHHPEHFSGRPREDRVPHSRNSITLTNLTPGTEYVVSIVALNGREESPLLIGQQSTVSDVPRDLEVVAATPTSLLISWDAPAVTVRYYRITYGETGGNSPVQEFTVPGSKSTATISGLKPGVDYTITVYAVTGRGDSPASSKPISINYRTEIDKPSQMQVTDVQDNSISVKWLPSSSPVTGYRVTTTPKNGPGPTKTKTAGPDQTEMTIEGLQPTVEYVVSVYAQNPSGESQPLVQTAVTNIDRPKGLAFTDVDVDSIKIAWESPQGQVSRYRVTYSSPEDGIHELFPAPDGEEDTAELQGLRPGSEYTVSVVALHDDMESQPLIGTQSTAIPAPTDLKFTQVTPTSLSAQWTPPNVQLTGYRVRVTPKEKTGPMKEINLAPDSSSVVVSGLMVATKYEVSVYALKDTLTSRPAQGVVTTLENVSPPRRARVTDATETTITISWRTKTETITGFQVDAVPANGQTPIQRTIKPDVRSYTITGLQPGTDYKIYLYTLNDNARSSPVVIDASTAIDAPSNLRFLATTPNSLLVSWQPPRARITGYIIKYEKPGSPPREVVPRPRPGVTEATITGLEPGTEYTIYVIALKNNQKSEPLIGRKKTDELPQLVTLPHPNLHGPEILDVPSTVQKTPFVTHPGYDTGNGIQLPGTSGQQPSVGQQMIFEEHGFRRTTPPTTATPIRHRPRPYPPNVGEEIQIGHIPREDVDYHLYPHGPGLNPNASTGQEALSQTTISWAPFQDTSEYIISCHPVGTDEEPLQFRVPGTSTSATLTGLTRGATYNVIVEALKDQQRHKVREEVVTVGNSVNEGLNQPTDDSCFDPYTVSHYAVGDEWERMSESGFKLLCQCLGFGSGHFRCDSSRWCHDNGVNYKIGEKWDRQGENGQMMSCTCLGNGKGEFKCDPHEATCYDDGKTYHVGEQWQKEYLGAICSCTCFGGQRGWRCDNCRRPGGEPSPEGTTGQSYNQYSQRYHQRTNTNVNCPIECFMPLDVQADREDSRE

SEQ ID NO: 5496 - protein, 2296 aa, Homo sapiens
MLRGPGPGLLLLAVQCLGTAVPSTGASKSKRQAQQMVQPQSPVAVSQSKPGCYDNGKHYQINQQWERTYLGNALVCTCYGGSRGFNCESKPEAEETCFDKYTGNTYRVGDTYERPKDSMIWDCTCIGAGRGRISCTIANRCHEGGQSYKIGDTWRRPHETGGYMLECVCLGNGKGEWTCKPIAEKCFDHAAGTSYVVGETWEKPYQGWMMVDCTCLGEGSGRITCTSRNRCNDQDTRTSYRIGDTWSKKDNRGNLLQCICTGNGRGEWKCERHTSVQTTSSGSGPFTDVRAAVYQPQPHPQPPPYGHCVTDSGVVYSVGMQWLKTQGNKQMLCTCLGNGVSCQETAVTQTYGGNSNGEPCVLPFTYNGRTFYSCTTEGRQDGHLWCSTTSNYEQDQKYSFCTDHTVLVQTRGGNSNGALCHFPFLYNNHNYTDCTSEGRRDNMKWCGTTQNYDADQKFGFCPMAAHEEICTTNEGVMYRIGDQWDKQHDMGHMMRCTCVGNGRGEWTCIAYSQLRDQCIVDDITYNVNDTFHKRHEEGHMLNCTCFGQGRGRWKCDPVDQCQDSETGTFYQIGDSWEKYVHGVRYQCYCYGRGIGEWHCQPLQTYPSSSGPVEVFITETPSQPNSHPIQWNAPQPSHISKYILRWRPKNSVGRWKEATIPGHLNSYTIKGLKPGVVYEGQLISIQQYGHQEVTRFDFTTTSTSTPVTSNTVTGETTPFSPLVATSESVTEITASSFVVSWVSASDTVSGFRVEYELSEEGDEPQYLDLPSTATSVNIPDLLPGRKYIVNVYQISEDGEQSLILSTSQTTAPDAPPDTTVDQVDDTSIVVRWSRPQAPITGYRIVYSPSVEGSSTELNLPETANSVTLSDLQPGVQYNITIYAVEENQESTPVVIQQETTGTPRSDTVPSPRDLQFVEVTDVKVTIMWTPPESAVTGYRVDVIPVNLPGEHGQRLPISRNTFAEVTGLSPGVTYYFKVFAVSHGRESKPLTAQQTTKLDAPTNLQFVNETDSTVLVRWTPPRAQITGYRLTVGLTRRGQPRQYNVGPSVSKYPLRNLQPASEYTVSLVAIKGNQESPKATGVFTTLQPGSSIPPYNTEVTETTIVITWTPAPRIGFKLGVRPSQGGEAPREVTSDSGSIVVSGLTPGVEYVYTIQVLRDGQERDAPIVNKVVTPLSPPTNLHLEANPDTGVLTVSWERSTTPDITGYRITTTPTNGQQGNSLEEVVHADQSSCTFDNLSPGLEYNVSVYTVKDDKESVPISDTIIPAVPPPTDLRFTNIGPDTMRVTWAPPPSIDLTNFLVRYSPVKNEEDVAELSISPSDNAVVLTNLLPGTEYVVSVSSVYEQHESTPLRGRQKTGLDSPTGIDFSDITANSFTVHWIAPRATITGYRIRHHPEHFSGRPREDRVPHSRNSITLTNLTPGTEYVVSIVALNGREESPLLIGQQSTVSDVPRDLEVVAATPTSLLISWDAPAVTVRYYRITYGETGGNSPVQEFTVPGSKSTATISGLKPGVDYTITVYAVTGRGDSPASSKPISINYRTEIDKPSQMQVTDVQDNSISVKWLPSSSPVTGYRVTTTPKNGPGPTKTKTAGPDQTEMTIEGLQPTVEYVVSVYAQNPSGESQPLVQTAVTTIPAPTDLKFTQVTPTSLSAQWTPPNVQLTGYRVRVTPKEKTGPMKEINLAPDSSSVVVSGLMVATKYEVSVYALKDTLTSRPAQGVVTTLENVSPPRRARVTDATETTITISWRTKTETITGFQVDAVPANGQTPIQRTIKPDVRSYTITGLQPGTDYKIYLYTLNDNARSSPVVIDASTAIDAPSNLRFLATTPNSLLVSWQPPRARITGYIIKYEKPGSPPREVVPRPRPGVTEATITGLEPGTEYTIYVIALKNNQKSEPLIGRKKTDELPQLVTLPHPNLHGPEILDVPSTVQKTPFVTHPGYDTGNGIQLPGTSGQQPSVGQQMIFEEHGFRRTTPPTTATPIRHRPRPYPPNVGEEIQIGHIPREDVDYHLYPHGPGLNPNASTGQEALSQTTISWAPFQDTSEYIISCHPVGTDEEPLQFRVPGTSTSATLTGLTRGATYNVIVEALKDQQRHKVREEVVTVGNSVNEGLNQPTDDSCFDPYTVSHYAVGDEWERMSESGFKLLCQCLGFGSGHFRCDSSRWCHDNGVNYKIGEKWDRQGENGQMMSCTCLGNGKGEFKCDPHEATCYDDGKTYHVGEQWQKEYLGAICSCTCFGGQRGWRCDNCRRPGGEPSPEGTTGQSYNQYSQRYHQRTNTNVNCPIECFMPLDVQADREDSRE

SEQ ID NO: 5497 - protein, 2446 aa, Homo sapiens
MLRGPGPGLLLLAVQCLGTAVPSTGASKSKRQAQQMVQPQSPVAVSQSKPGCYDNGKHYQINQQWERTYLGNALVCTCYGGSRGFNCESKPEAEETCFDKYTGNTYRVGDTYERPKDSMIWDCTCIGAGRGRISCTIANRCHEGGQSYKIGDTWRRPHETGGYMLECVCLGNGKGEWTCKPIAEKCFDHAAGTSYVVGETWEKPYQGWMMVDCTCLGEGSGRITCTSRNRCNDQDTRTSYRIGDTWSKKDNRGNLLQCICTGNGRGEWKCERHTSVQTTSSGSGPFTDVRAAVYQPQPHPQPPPYGHCVTDSGVVYSVGMQWLKTQGNKQMLCTCLGNGVSCQETAVTQTYGGNSNGEPCVLPFTYNGRTFYSCTTEGRQDGHLWCSTTSNYEQDQKYSFCTDHTVLVQTRGGNSNGALCHFPFLYNNHNYTDCTSEGRRDNMKWCGTTQNYDADQKFGFCPMAAHEEICTTNEGVMYRIGDQWDKQHDMGHMMRCTCVGNGRGEWTCIAYSQLRDQCIVDDITYNVNDTFHKRHEEGHMLNCTCFGQGRGRWKCDPVDQCQDSETGTFYQIGDSWEKYVHGVRYQCYCYGRGIGEWHCQPLQTYPSSSGPVEVFITETPSQPNSHPIQWNAPQPSHISKYILRWRPKNSVGRWKEATIPGHLNSYTIKGLKPGVVYEGQLISIQQYGHQEVTRFDFTTTSTSTPVTSNTVTGETTPFSPLVATSESVTEITASSFVVSWVSASDTVSGFRVEYELSEEGDEPQYLDLPSTATSVNIPDLLPGRKYIVNVYQISEDGEQSLILSTSQTTAPDAPPDTTVDQVDDTSIVVRWSRPQAPITGYRIVYSPSVEGSSTELNLPETANSVTLSDLQPGVQYNITIYAVEENQESTPVVIQQETTGTPRSDTVPSPRDLQFVEVTDVKVTIMWTPPESAVTGYRVDVIPVNLPGEHGQRLPISRNTFAEVTGLSPGVTYYFKVFAVSHGRESKPLTAQQTTKLDAPTNLQFVNETDSTVLVRWTPPRAQITGYRLTVGLTRRGQPRQYNVGPSVSKYPLRNLQPASEYTVSLVAIKGNQESPKATGVFTTLQPGSSIPPYNTEVTETTIVITWTPAPRIGFKLGVRPSQGGEAPREVTSDSGSIVVSGLTPGVEYVYTIQVLRDGQERDAPIVNKVVTPLSPPTNLHLEANPDTGVLTVSWERSTTPDITGYRITTTPTNGQQGNSLEEVVHADQSSCTFDNLSPGLEYNVSVYTVKDDKESVPISDTIIPEVPQLTDLSFVDITDSSIGLRWTPLNSSTIIGYRITVVAAGEGIPIFEDFVDSSVGYYTVTGLEPGIDYDISVITLINGGESAPTTLTQQTAVPPPTDLRFTNIGPDTMRVTWAPPPSIDLTNFLVRYSPVKNEEDVAELSISPSDNAVVLTNLLPGTEYVVSVSSVYEQHESTPLRGRQKTGLDSPTGIDFSDITANSFTVHWIAPRATITGYRIRHHPEHFSGRPREDRVPHSRNSITLTNLTPGTEYVVSIVALNGREESPLLIGQQSTVSDVPRDLEVVAATPTSLLISWDAPAVTVRYYRITYGETGGNSPVQEFTVPGSKSTATISGLKPGVDYTITVYAVTGRGDSPASSKPISINYRTEIDKPSQMQVTDVQDNSISVKWLPSSSPVTGYRVTTTPKNGPGPTKTKTAGPDQTEMTIEGLQPTVEYVVSVYAQNPSGESQPLVQTAVTNIDRPKGLAFTDVDVDSIKIAWESPQGQVSRYRVTYSSPEDGIHELFPAPDGEEDTAELQGLRPGSEYTVSVVALHDDMESQPLIGTQSTAIPAPTDLKFTQVTPTSLSAQWTPPNVQLTGYRVRVTPKEKTGPMKEINLAPDSSSVVVSGLMVATKYEVSVYALKDTLTSRPAQGVVTTLENVSPPRRARVTDATETTITISWRTKTETITGFQVDAVPANGQTPIQRTIKPDVRSYTITGLQPGTDYKIYLYTLNDNARSSPVVIDASTAIDAPSNLRFLATTPNSLLVSWQPPRARITGYIIKYEKPGSPPREVVPRPRPGVTEATITGLEPGTEYTIYVIALKNNQKSEPLIGRKKTDELPQLVTLPHPNLHGPEILDVPSTVQKTPFVTHPGYDTGNGIQLPGTSGQQPSVGQQMIFEEHGFRRTTPPTTATPIRHRPRPYPPNVGQEALSQTTISWAPFQDTSEYIISCHPVGTDEEPLQFRVPGTSTSATLTGLTRGATYNVIVEALKDQQRHKVREEVVTVGNSVNEGLNQPTDDSCFDPYTVSHYAVGDEWERMSESGFKLLCQCLGFGSGHFRCDSSRWCHDNGVNYKIGEKWDRQGENGQMMSCTCLGNGKGEFKCDPHEATCYDDGKTYHVGEQWQKEYLGAICSCTCFGGQRGWRCDNCRRPGGEPSPEGTTGQSYNQYSQRYHQRTNTNVNCPIECFMPLDVQADREDSRE

SEQ ID NO: 5498 - protein, 2330 aa, Homo sapiens
MLRGPGPGLLLLAVQCLGTAVPSTGASKSKRQAQQMVQPQSPVAVSQSKPGCYDNGKHYQINQQWERTYLGNALVCTCYGGSRGFNCESKPEAEETCFDKYTGNTYRVGDTYERPKDSMIWDCTCIGAGRGRISCTIANRCHEGGQSYKIGDTWRRPHETGGYMLECVCLGNGKGEWTCKPIAEKCFDHAAGTSYVVGETWEKPYQGWMMVDCTCLGEGSGRITCTSRNRCNDQDTRTSYRIGDTWSKKDNRGNLLQCICTGNGRGEWKCERHTSVQTTSSGSGPFTDVRAAVYQPQPHPQPPPYGHCVTDSGVVYSVGMQWLKTQGNKQMLCTCLGNGVSCQETAVTQTYGGNSNGEPCVLPFTYNGRTFYSCTTEGRQDGHLWCSTTSNYEQDQKYSFCTDHTVLVQTRGGNSNGALCHFPFLYNNHNYTDCTSEGRRDNMKWCGTTQNYDADQKFGFCPMAAHEEICTTNEGVMYRIGDQWDKQHDMGHMMRCTCVGNGRGEWTCIAYSQLRDQCIVDDITYNVNDTFHKRHEEGHMLNCTCFGQGRGRWKCDPVDQCQDSETGTFYQIGDSWEKYVHGVRYQCYCYGRGIGEWHCQPLQTYPSSSGPVEVFITETPSQPNSHPIQWNAPQPSHISKYILRWRPKNSVGRWKEATIPGHLNSYTIKGLKPGVVYEGQLISIQQYGHQEVTRFDFTTTSTSTPVTSNTVTGETTPFSPLVATSESVTEITASSFVVSWVSASDTVSGFRVEYELSEEGDEPQYLDLPSTATSVNIPDLLPGRKYIVNVYQISEDGEQSLILSTSQTTAPDAPPDTTVDQVDDTSIVVRWSRPQAPITGYRIVYSPSVEGSSTELNLPETANSVTLSDLQPGVQYNITIYAVEENQESTPVVIQQETTGTPRSDTVPSPRDLQFVEVTDVKVTIMWTPPESAVTGYRVDVIPVNLPGEHGQRLPISRNTFAEVTGLSPGVTYYFKVFAVSHGRESKPLTAQQTTKLDAPTNLQFVNETDSTVLVRWTPPRAQITGYRLTVGLTRRGQPRQYNVGPSVSKYPLRNLQPASEYTVSLVAIKGNQESPKATGVFTTLQPGSSIPPYNTEVTETTIVITWTPAPRIGFKLGVRPSQGGEAPREVTSDSGSIVVSGLTPGVEYVYTIQVLRDGQERDAPIVNKVVTPLSPPTNLHLEANPDTGVLTVSWERSTTPDITGYRITTTPTNGQQGNSLEEVVHADQSSCTFDNLSPGLEYNVSVYTVKDDKESVPISDTIIPAVPPPTDLRFTNIGPDTMRVTWAPPPSIDLTNFLVRYSPVKNEEDVAELSISPSDNAVVLTNLLPGTEYVVSVSSVYEQHESTPLRGRQKTGLDSPTGIDFSDITANSFTVHWIAPRATITGYRIRHHPEHFSGRPREDRVPHSRNSITLTNLTPGTEYVVSIVALNGREESPLLIGQQSTVSDVPRDLEVVAATPTSLLISWDAPAVTVRYYRITYGETGGNSPVQEFTVPGSKSTATISGLKPGVDYTITVYAVTGRGDSPASSKPISINYRTEIDKPSQMQVTDVQDNSISVKWLPSSSPVTGYRVTTTPKNGPGPTKTKTAGPDQTEMTIEGLQPTVEYVVSVYAQNPSGESQPLVQTAVTNIDRPKGLAFTDVDVDSIKIAWESPQGQVSRYRVTYSSPEDGIHELFPAPDGEEDTAELQGLRPGSEYTVSVVALHDDMESQPLIGTQSTAIPAPTDLKFTQVTPTSLSAQWTPPNVQLTGYRVRVTPKEKTGPMKEINLAPDSSSVVVSGLMVATKYEVSVYALKDTLTSRPAQGVVTTLENVSPPRRARVTDATETTITISWRTKTETITGFQVDAVPANGQTPIQRTIKPDVRSYTITGLQPGTDYKIYLYTLNDNARSSPVVIDASTAIDAPSNLRFLATTPNSLLVSWQPPRARITGYIIKYEKPGSPPREVVPRPRPGVTEATITGLEPGTEYTIYVIALKNNQKSEPLIGRKKTVQKTPFVTHPGYDTGNGIQLPGTSGQQPSVGQQMIFEEHGFRRTTPPTTATPIRHRPRPYPPNVGQEALSQTTISWAPFQDTSEYIISCHPVGTDEEPLQFRVPGTSTSATLTGLTRGATYNVIVEALKDQQRHKVREEVVTVGNSVNEGLNQPTDDSCFDPYTVSHYAVGDEWERMSESGFKLLCQCLGFGSGHFRCDSSRWCHDNGVNYKIGEKWDRQGENGQMMSCTCLGNGKGEFKCDPHEATCYDDGKTYHVGEQWQKEYLGAICSCTCFGGQRGWRCDNCRRPGGEPSPEGTTGQSYNQYSQRYHQRTNTNVNCPIECFMPLDVQADREDSRE

SEQ ID NO: 5499 - protein, 2240 aa, Homo sapiens
MLRGPGPGLLLLAVQCLGTAVPSTGASKSKRQAQQMVQPQSPVAVSQSKPGCYDNGKHYQINQQWERTYLGNALVCTCYGGSRGFNCESKPEAEETCFDKYTGNTYRVGDTYERPKDSMIWDCTCIGAGRGRISCTIANRCHEGGQSYKIGDTWRRPHETGGYMLECVCLGNGKGEWTCKPIAEKCFDHAAGTSYVVGETWEKPYQGWMMVDCTCLGEGSGRITCTSRNRCNDQDTRTSYRIGDTWSKKDNRGNLLQCICTGNGRGEWKCERHTSVQTTSSGSGPFTDVRAAVYQPQPHPQPPPYGHCVTDSGVVYSVGMQWLKTQGNKQMLCTCLGNGVSCQETAVTQTYGGNSNGEPCVLPFTYNGRTFYSCTTEGRQDGHLWCSTTSNYEQDQKYSFCTDHTVLVQTRGGNSNGALCHFPFLYNNHNYTDCTSEGRRDNMKWCGTTQNYDADQKFGFCPMAAHEEICTTNEGVMYRIGDQWDKQHDMGHMMRCTCVGNGRGEWTCIAYSQLRDQCIVDDITYNVNDTFHKRHEEGHMLNCTCFGQGRGRWKCDPVDQCQDSETGTFYQIGDSWEKYVHGVRYQCYCYGRGIGEWHCQPLQTYPSSSGPVEVFITETPSQPNSHPIQWNAPQPSHISKYILRWRPKNSVGRWKEATIPGHLNSYTIKGLKPGVVYEGQLISIQQYGHQEVTRFDFTTTSTSTPVTSNTVTGETTPFSPLVATSESVTEITASSFVVSWVSASDTVSGFRVEYELSEEGDEPQYLDLPSTATSVNIPDLLPGRKYIVNVYQISEDGEQSLILSTSQTTAPDAPPDTTVDQVDDTSIVVRWSRPQAPITGYRIVYSPSVEGSSTELNLPETANSVTLSDLQPGVQYNITIYAVEENQESTPVVIQQETTGTPRSDTVPSPRDLQFVEVTDVKVTIMWTPPESAVTGYRVDVIPVNLPGEHGQRLPISRNTFAEVTGLSPGVTYYFKVFAVSHGRESKPLTAQQTTKLDAPTNLQFVNETDSTVLVRWTPPRAQITGYRLTVGLTRRGQPRQYNVGPSVSKYPLRNLQPASEYTVSLVAIKGNQESPKATGVFTTLQPGSSIPPYNTEVTETTIVITWTPAPRIGFKLGVRPSQGGEAPREVTSDSGSIVVSGLTPGVEYVYTIQVLRDGQERDAPIVNKVVTPLSPPTNLHLEANPDTGVLTVSWERSTTPDITGYRITTTPTNGQQGNSLEEVVHADQSSCTFDNLSPGLEYNVSVYTVKDDKESVPISDTIIPAVPPPTDLRFTNIGPDTMRVTWAPPPSIDLTNFLVRYSPVKNEEDVAELSISPSDNAVVLTNLLPGTEYVVSVSSVYEQHESTPLRGRQKTGLDSPTGIDFSDITANSFTVHWIAPRATITGYRIRHHPEHFSGRPREDRVPHSRNSITLTNLTPGTEYVVSIVALNGREESPLLIGQQSTVSDVPRDLEVVAATPTSLLISWDAPAVTVRYYRITYGETGGNSPVQEFTVPGSKSTATISGLKPGVDYTITVYAVTGRGDSPASSKPISINYRTEIDKPSQMQVTDVQDNSISVKWLPSSSPVTGYRVTTTPKNGPGPTKTKTAGPDQTEMTIEGLQPTVEYVVSVYAQNPSGESQPLVQTAVTTIPAPTDLKFTQVTPTSLSAQWTPPNVQLTGYRVRVTPKEKTGPMKEINLAPDSSSVVVSGLMVATKYEVSVYALKDTLTSRPAQGVVTTLENVSPPRRARVTDATETTITISWRTKTETITGFQVDAVPANGQTPIQRTIKPDVRSYTITGLQPGTDYKIYLYTLNDNARSSPVVIDASTAIDAPSNLRFLATTPNSLLVSWQPPRARITGYIIKYEKPGSPPREVVPRPRPGVTEATITGLEPGTEYTIYVIALKNNQKSEPLIGRKKTVQKTPFVTHPGYDTGNGIQLPGTSGQQPSVGQQMIFEEHGFRRTTPPTTATPIRHRPRPYPPNVGQEALSQTTISWAPFQDTSEYIISCHPVGTDEEPLQFRVPGTSTSATLTGLTRGATYNVIVEALKDQQRHKVREEVVTVGNSVNEGLNQPTDDSCFDPYTVSHYAVGDEWERMSESGFKLLCQCLGFGSGHFRCDSSRWCHDNGVNYKIGEKWDRQGENGQMMSCTCLGNGKGEFKCDPHEATCYDDGKTYHVGEQWQKEYLGAICSCTCFGGQRGWRCDNCRRPGGEPSPEGTTGQSYNQYSQRYHQRTNTNVNCPIECFMPLDVQADREDSRE

SEQ ID NO: 5500 - protein, 657 aa, Homo sapiens
MLRGPGPGLLLLAVQCLGTAVPSTGASKSKRQAQQMVQPQSPVAVSQSKPGCYDNGKHYQINQQWERTYLGNALVCTCYGGSRGFNCESKPEAEETCFDKYTGNTYRVGDTYERPKDSMIWDCTCIGAGRGRISCTIANRCHEGGQSYKIGDTWRRPHETGGYMLECVCLGNGKGEWTCKPIAEKCFDHAAGTSYVVGETWEKPYQGWMMVDCTCLGEGSGRITCTSRNRCNDQDTRTSYRIGDTWSKKDNRGNLLQCICTGNGRGEWKCERHTSVQTTSSGSGPFTDVRAAVYQPQPHPQPPPYGHCVTDSGVVYSVGMQWLKTQGNKQMLCTCLGNGVSCQETAVTQTYGGNSNGEPCVLPFTYNGRTFYSCTTEGRQDGHLWCSTTSNYEQDQKYSFCTDHTVLVQTRGGNSNGALCHFPFLYNNHNYTDCTSEGRRDNMKWCGTTQNYDADQKFGFCPMAAHEEICTTNEGVMYRIGDQWDKQHDMGHMMRCTCVGNGRGEWTCIAYSQLRDQCIVDDITYNVNDTFHKRHEEGHMLNCTCFGQGRGRWKCDPVDQCQDSETGTFYQIGDSWEKYVHGVRYQCYCYGRGIGEWHCQPLQTYPSSSGPVEVFITETPSQPNSHPIQWNAPQPSHISKYILRWRPVSIPPRNLGY

SEQ ID NO: 5501 - protein, 2267 aa, Homo sapiens
MLRGPGPGLLLLAVQCLGTAVPSTGASKSKRQAQQMVQPQSPVAVSQSKPGCYDNGKHYQINQQWERTYLGNALVCTCYGGSRGFNCESKPEAEETCFDKYTGNTYRVGDTYERPKDSMIWDCTCIGAGRGRISCTIANRCHEGGQSYKIGDTWRRPHETGGYMLECVCLGNGKGEWTCKPIAEKCFDHAAGTSYVVGETWEKPYQGWMMVDCTCLGEGSGRITCTSRNRCNDQDTRTSYRIGDTWSKKDNRGNLLQCICTGNGRGEWKCERHTSVQTTSSGSGPFTDVRAAVYQPQPHPQPPPYGHCVTDSGVVYSVGMQWLKTQGNKQMLCTCLGNGVSCQETAVTQTYGGNSNGEPCVLPFTYNGRTFYSCTTEGRQDGHLWCSTTSNYEQDQKYSFCTDHTVLVQTRGGNSNGALCHFPFLYNNHNYTDCTSEGRRDNMKWCGTTQNYDADQKFGFCPMAAHEEICTTNEGVMYRIGDQWDKQHDMGHMMRCTCVGNGRGEWTCIAYSQLRDQCIVDDITYNVNDTFHKRHEEGHMLNCTCFGQGRGRWKCDPVDQCQDSETGTFYQIGDSWEKYVHGVRYQCYCYGRGIGEWHCQPLQTYPSSSGPVEVFITETPSQPNSHPIQWNAPQPSHISKYILRWRPKNSVGRWKEATIPGHLNSYTIKGLKPGVVYEGQLISIQQYGHQEVTRFDFTTTSTSTPVTSNTVTGETTPFSPLVATSESVTEITASSFVVSWVSASDTVSGFRVEYELSEEGDEPQYLDLPSTATSVNIPDLLPGRKYIVNVYQISEDGEQSLILSTSQTTAPDAPPDTTVDQVDDTSIVVRWSRPQAPITGYRIVYSPSVEGSSTELNLPETANSVTLSDLQPGVQYNITIYAVEENQESTPVVIQQETTGTPRSDTVPSPRDLQFVEVTDVKVTIMWTPPESAVTGYRVDVIPVNLPGEHGQRLPISRNTFAEVTGLSPGVTYYFKVFAVSHGRESKPLTAQQTTKLDAPTNLQFVNETDSTVLVRWTPPRAQITGYRLTVGLTRRGQPRQYNVGPSVSKYPLRNLQPASEYTVSLVAIKGNQESPKATGVFTTLQPGSSIPPYNTEVTETTIVITWTPAPRIGFKLGVRPSQGGEAPREVTSDSGSIVVSGLTPGVEYVYTIQVLRDGQERDAPIVNKVVTPLSPPTNLHLEANPDTGVLTVSWERSTTPDITGYRITTTPTNGQQGNSLEEVVHADQSSCTFDNLSPGLEYNVSVYTVKDDKESVPISDTIIPEVPQLTDLSFVDITDSSIGLRWTPLNSSTIIGYRITVVAAGEGIPIFEDFVDSSVGYYTVTGLEPGIDYDISVITLINGGESAPTTLTQQTAVPPPTDLRFTNIGPDTMRVTWAPPPSIDLTNFLVRYSPVKNEEDVAELSISPSDNAVVLTNLLPGTEYVVSVSSVYEQHESTPLRGRQKTGLDSPTGIDFSDITANSFTVHWIAPRATITGYRIRHHPEHFSGRPREDRVPHSRNSITLTNLTPGTEYVVSIVALNGREESPLLIGQQSTVSDVPRDLEVVAATPTSLLISWDAPAVTVRYYRITYGETGGNSPVQEFTVPGSKSTATISGLKPGVDYTITVYAVTGRGDSPASSKPISINYRTEIDKPSQMQVTDVQDNSISVKWLPSSSPVTGYRVTTTPKNGPGPTKTKTAGPDQTEMTIEGLQPTVEYVVSVYAQNPSGESQPLVQTAVTTIPAPTDLKFTQVTPTSLSAQWTPPNVQLTGYRVRVTPKEKTGPMKEINLAPDSSSVVVSGLMVATKYEVSVYALKDTLTSRPAQGVVTTLENVSPPRRARVTDATETTITISWRTKTETITGFQVDAVPANGQTPIQRTIKPDVRSYTITGLQPGTDYKIYLYTLNDNARSSPVVIDASTAIDAPSNLRFLATTPNSLLVSWQPPRARITGYIIKYEKPGSPPREVVPRPRPGVTEATITGLEPGTEYTIYVIALKNNQKSEPLIGRKKTGQEALSQTTISWAPFQDTSEYIISCHPVGTDEEPLQFRVPGTSTSATLTGLTRGATYNVIVEALKDQQRHKVREEVVTVGNSVNEGLNQPTDDSCFDPYTVSHYAVGDEWERMSESGFKLLCQCLGFGSGHFRCDSSRWCHDNGVNYKIGEKWDRQGENGQMMSCTCLGNGKGEFKCDPHEATCYDDGKTYHVGEQWQKEYLGAICSCTCFGGQRGWRCDNCRRPGGEPSPEGTTGQSYNQYSQRYHQRTNTNVNCPIECFMPLDVQADREDSRE

SEQ ID NO: 5502 - protein, 2265 aa, Homo sapiens
MLRGPGPGLLLLAVQCLGTAVPSTGASKSKRQAQQMVQPQSPVAVSQSKPGCYDNGKHYQINQQWERTYLGNALVCTCYGGSRGFNCESKPEAEETCFDKYTGNTYRVGDTYERPKDSMIWDCTCIGAGRGRISCTIANRCHEGGQSYKIGDTWRRPHETGGYMLECVCLGNGKGEWTCKPIAEKCFDHAAGTSYVVGETWEKPYQGWMMVDCTCLGEGSGRITCTSRNRCNDQDTRTSYRIGDTWSKKDNRGNLLQCICTGNGRGEWKCERHTSVQTTSSGSGPFTDVRAAVYQPQPHPQPPPYGHCVTDSGVVYSVGMQWLKTQGNKQMLCTCLGNGVSCQETAVTQTYGGNSNGEPCVLPFTYNGRTFYSCTTEGRQDGHLWCSTTSNYEQDQKYSFCTDHTVLVQTRGGNSNGALCHFPFLYNNHNYTDCTSEGRRDNMKWCGTTQNYDADQKFGFCPMAAHEEICTTNEGVMYRIGDQWDKQHDMGHMMRCTCVGNGRGEWTCIAYSQLRDQCIVDDITYNVNDTFHKRHEEGHMLNCTCFGQGRGRWKCDPVDQCQDSETGTFYQIGDSWEKYVHGVRYQCYCYGRGIGEWHCQPLQTYPSSSGPVEVFITETPSQPNSHPIQWNAPQPSHISKYILRWRPKNSVGRWKEATIPGHLNSYTIKGLKPGVVYEGQLISIQQYGHQEVTRFDFTTTSTSTPVTSNTVTGETTPFSPLVATSESVTEITASSFVVSWVSASDTVSGFRVEYELSEEGDEPQYLDLPSTATSVNIPDLLPGRKYIVNVYQISEDGEQSLILSTSQTTAPDAPPDTTVDQVDDTSIVVRWSRPQAPITGYRIVYSPSVEGSSTELNLPETANSVTLSDLQPGVQYNITIYAVEENQESTPVVIQQETTGTPRSDTVPSPRDLQFVEVTDVKVTIMWTPPESAVTGYRVDVIPVNLPGEHGQRLPISRNTFAEVTGLSPGVTYYFKVFAVSHGRESKPLTAQQTTKLDAPTNLQFVNETDSTVLVRWTPPRAQITGYRLTVGLTRRGQPRQYNVGPSVSKYPLRNLQPASEYTVSLVAIKGNQESPKATGVFTTLQPGSSIPPYNTEVTETTIVITWTPAPRIGFKLGVRPSQGGEAPREVTSDSGSIVVSGLTPGVEYVYTIQVLRDGQERDAPIVNKVVTPLSPPTNLHLEANPDTGVLTVSWERSTTPDITGYRITTTPTNGQQGNSLEEVVHADQSSCTFDNLSPGLEYNVSVYTVKDDKESVPISDTIIPAVPPPTDLRFTNIGPDTMRVTWAPPPSIDLTNFLVRYSPVKNEEDVAELSISPSDNAVVLTNLLPGTEYVVSVSSVYEQHESTPLRGRQKTGLDSPTGIDFSDITANSFTVHWIAPRATITGYRIRHHPEHFSGRPREDRVPHSRNSITLTNLTPGTEYVVSIVALNGREESPLLIGQQSTVSDVPRDLEVVAATPTSLLISWDAPAVTVRYYRITYGETGGNSPVQEFTVPGSKSTATISGLKPGVDYTITVYAVTGRGDSPASSKPISINYRTEIDKPSQMQVTDVQDNSISVKWLPSSSPVTGYRVTTTPKNGPGPTKTKTAGPDQTEMTIEGLQPTVEYVVSVYAQNPSGESQPLVQTAVTTIPAPTDLKFTQVTPTSLSAQWTPPNVQLTGYRVRVTPKEKTGPMKEINLAPDSSSVVVSGLMVATKYEVSVYALKDTLTSRPAQGVVTTLENVSPPRRARVTDATETTITISWRTKTETITGFQVDAVPANGQTPIQRTIKPDVRSYTITGLQPGTDYKIYLYTLNDNARSSPVVIDASTAIDAPSNLRFLATTPNSLLVSWQPPRARITGYIIKYEKPGSPPREVVPRPRPGVTEATITGLEPGTEYTIYVIALKNNQKSEPLIGRKKTDELPQLVTLPHPNLHGPEILDVPSTVQKTPFVTHPGYDTGNGIQLPGTSGQQPSVGQQMIFEEHGFRRTTPPTTATPIRHRPRPYPPNVGQEALSQTTISWAPFQDTSEYIISCHPVGTDEEPLQFRVPGTSTSATLTGLTRGATYNVIVEALKDQQRHKVREEVVTVGNSVNEGLNQPTDDSCFDPYTVSHYAVGDEWERMSESGFKLLCQCLGFGSGHFRCDSSRWCHDNGVNYKIGEKWDRQGENGQMMSCTCLGNGKGEFKCDPHEATCYDDGKTYHVGEQWQKEYLGAICSCTCFGGQRGWRCDNCRRPGGEPSPEGTTGQSYNQYSQRYHQRTNTNVNCPIECFMPLDVQADREDSRE

SEQ ID NO: 5503 - protein, 241 aa, Homo sapiens
YLYTLNDNARSSPVVIDASTAIDAPSNLRFLATTPNSLLVSWQPPRARITGYIIKYEKPGSPPREVVPRPRPGVTEATITGLEPGTEYTIYVIALKNNQKSEPLIGRKKTVQKTPFVTHPGYDTGNGIQLPGTSGQQPSVGQQMIFEEHGFRRTTPPTTATPIRHRPRPYPPNVGEEIQIGHIPREDVDYHLYPHGPGLNPNASTGQEALSQTTISWAPFQDTSEYIISCHPVGTDEEPLQ

SEQ ID NO: 5504 - protein, 1894 aa, Homo sapiens
MAPEAGATLRAPRRLSWAALLLLAALLPVASSAAASVDHPLKPRHVKLLSTKMGLKVTWDPPKDATSRPVEHYNIAYGKSLKSLKYIKVNAETYSFLIEDVEPGVVYFVLLTAENHSGVSRPVYRAESPPGGEWIEIDGFPIKGPGPFNETVTEKEVPNKPLRVRVRSSDDRLSVAWKAPRLSGAKSPRRSRGFLLGYGESGRKMNYVPLTRDERTHEIKKLASESVYVVSLQSMNSQGRSQPVYRAALTKRKISEEDELDVPDDISVRVMSSQSVLVSWVDPVLEKQKKVVASRQYTVRYREKGELARWDYKQIANRRVLIENLIPDTVYEFAVRISQGERDGKWSTSVFQRTPESAPTTAPENLNVWPVNGKPTVVAASWDALPETEGKVKEYILSYAPALKPFGAKSLTYPGDTTSALVDGLQPGERYLFKIRATNRRGLGPHSKAFIVAMPTTSKADVEQNTEDNGKPEKPEPSSPSPRAPASSQHPSVPASPQGRNAKDLLLDLKNKILANGGAPRKPQLRAKKAEELDLQSTEITGEEELGSREDSPMSPSDTQDQKRTLRPPSRHGHSVVAPGRTAVRARMPALPRREGVDKPGFSLATQPRPGAPPSASASPAHHASTQGTSHRPSLPASLNDNDLVDSDEDERAVGSLHPKGAFAQPRPALSPSRQSPSSVLRDRSSVHPGAKPASPARRTPHSGAAEEDSSASAPPSRLSPPHGGSSRLLPTQPHLSSPLSKGGKDGEDAPATNSNAPSRSTMSSSVSSHLSSRTQVSEGAEASDGESHGDGDREDGGRQAEATAQTLRARPASGHFHLLRHKPFAANGRSPSRFSIGRGPRLQPSSSPQSTVPSRAHPRVPSHSDSHPKLSSGIHGDEEDEKPLPATVVNDHVPSSSRQPISRGWEDLRRSPQRGASLHRKEPIPENPKSTGADTHPQGKYSSLASKAQDVQQSTDADTEGHSPKAQPGSTDRHASPARPPAARSQQHPSVPRRMTPGRAPQQQPPPPVATSQHHPGPQSRDAGRSPSQPRLSLTQAGRPRPTSQGRSHSSSDPYTASSRGMLPTALQNQDEDAQGSYDDDSTEVEAQDVRAPAHAARAKEAAASLPKHQQVESPTGAGAGGDHRSQRGHAASPARPSRPGGPQSRARVPSRAAPGKSEPPSKRPLSSKSQQSVSAEDDEEEDAGFFKGGKEDLLSSSVPKWPSSSTPRGGKDADGSLAKEEREPAIALAPRGGSLAPVKRPLPPPPGSSPRASHVPSRLPPRSAATVSPVAGTHPWPQYTTRAPPGHFSTTPMLSLRQRMMHARFRNPLSRQPARPSYRQGYNGRPNVEGKVLPGSNGKPNGQRIINGPQGTKWVVDLDRGLVLNAEGRYLQDSHGNPLRIKLGGDGRTIVDLEGTPVVSPDGLPLFGQGRHGTPLANAQDKPILSLGGKPLVGLEVIKKTTHPPTTTMQPTTTTTPLPTTTTPRPTTATTRRTTTTRRTTTRRPTTTVRTTTRTTTTTTPTPTTPIPTCPPGTLERHDDDGNLIMSSNGIPECYAEEDEFSGLETDTAVPTEEAYVIYDEDYEFETSRPPTTTEPSTTATTPRVIPEEGAISSFPEEEFDLAGRKRFVAPYVTYLNKDPSAPCSLTDALDHFQVDSLDEIIPNDLKKSDLPPQHAPRNITVVAVEGCHSFVIVDWDKATPGDVVTGYLVYSASYEDFIRNKWSTQASSVTHLPIENLKPNTRYYFKVQAQNPHGYGPISPSVSFVTESDNPLLVVRPPGGEPIWIPFAFKHDPSYTDCHGRQYVKRTWYRKFVGVVLCNSLRYKIYLSDNLKDTFYSIGDSWGRGEDHCQFVDSHLDGRTGPQSYVEALPTIQGYYRQYRQEPVRFGNIGFGTPYYYVGWYECGVSIPGKW

SEQ ID NO: 5505 - protein, 1790 aa, Homo sapiens
  VARIANT 1: note = misc_feature - Xaa can be any naturally occurring amino acid
XPRHVKLLSTKMGLKVTWDPPKDATSRPVEHYNIAYGKSLKSLKYIKVNAETYSFLIEDVEPGVVYFVLLTAENHSGVSRPVYRAESPPGGEWIEIDGFPIKGPGPFNETVTEKEVPNKPLRVRVRSSDDRLSVAWKAPRLSGAKSPRRSRGFLLGYGESGRKMNYVPLTRDERTHEIKKLASESVYVVSLQSMNSQGRSQPVYRAALTKRKISEEDELDVPDDISVRVMSSQSVLVSWVDPVLEKQKKVVASRQYTVRYREKGELARWDYKQIANRRVLIENLIPDTVYEFAVRISQGERDGKWSTSVFQRTPESAPTTAPENLNVWPVNGKPTVVAASWDALPETEGKVKASKADVEQNTEDNGKPEKPEPSSPSPRAPASSQHPSVPASPQGRNAKDLLLDLKNKILANGGAPRKPQLRAKKAEELDLQSTEITGEEELGSREDSPMSPSDTQDQKRTLRPPSRHGHSVVAPGRTAVRARMPALPRREGVDKPGFSLATQPRPGAPPSASASPAHHASTQGTSHRPSLPASLNDNDLVDSDEDERAVGSLHPKGAFAQPRPALSPSRQSPSSVLRDRSSVHPGAKPASPARRTPHSGAAEEDSSASAPPSRLSPPHGGSSRLLPTQPHLSSPLSKGGKDGEDAPATNSNAPSRSTMSSSVSSHLSSRTQVSEGAEASDGESHGDGDREDGGRQAEATAQTLRARPASGHFHLLRHKPFAANGRSPSRFSIGRGPRLQPSSSPQSTVPSRAHPRVPSHSDSHPKLSSGIHGDEEDEKPLPATVVNDHVPSSSRQPISRGWEDLRRSPQRGASLHRKEPIPENPKSTGADTHPQGKYSSLASKAQDVQQSTDADTEGHSPKAQPGSTDRHASPARPPAARSQQHPSVPRRMTPGRAPQQQPPPPVATSQHHPGPQSRDAGRSPSQPRLSLTQAGRPRPTSQGRSHSSSDPYTASSRGMLPTALQNQDEDAQGSYDDDSTEVEAQDVRAPAHAARAKEAAASLPKHQQVESPTGAGAGGDHRSQRGHAASPARPSRPGGPQSRARVPSRAAPGKSEPPSKRPLSSKSQQSVSAEDDEEEDAGFFKGGKEDLLSSSVPKWPSSSTPRGGKDADGSLAKEEREPAIALAPRGGSLAPVKRPLPPPPGSSPRASHVPSRLPPRSAATVSPVAGTHPWPQYTTRAPPGHFSTTPMLSLRQRMMHARFRNPLSRQPARPSYRQGYNGRPNVEGKVLPGSNGKPNGQRIINGPQGTKWVVDLDRGLVLNAEGRYLQDSHGNPLRIKLGGDGRTIVDLEGTPVVSPDGLPLFGQGRHGTPLANAQDKPILSLGGKPLVGLEVIKKTTHPPTTTMQPTTTTTPLPTTTTPRPTTATTRRTTTTRRTTTRRPTTTVRTTTRTTTTTTPTPTTPIPTCPPGTLERHDDDGNLIMSSNGIPECYAEEDEFSGLETDTAVPTEEAYVIYDEDYEFETSRPPTTTEPSTTATTPRVIPEEGAISSFPEEEFDLAGRKRFVAPYVTYLNKDPSAPCSLTDALDHFQVDSLDEIIPNDLKKSDLPPQHAPRNITVVAVEGCHSFVIVDWDKATPGDVVTGYLVYSASYEDFIRNKWSTQASSVTHLPIENLKPNTRYYFKVQAQNPHGYGPISPSVSFVTESDNPLLVVRPPGGEPIWIPFAFKHDPSYTDCHGRQYVKRTWYRKFVGVVLCNSLRYKIYLSDNLKDTFYSIGDSWGRGEDHCQFVDSHLDGRTGPQSYVEALPTIQGYYRQYRQEPVRFGNIGFGTPYYYVGWYECGVSIPGKW

SEQ ID NO: 5506 - protein, 733 aa, Homo sapiens
MAGGRETCLPLIGFILICLKMVASAKSAPEIPTIDQAYSKLSNSITVEWATVPGATSYLLTAEDGDTVIETTVANSPGTVTGLKAATWYEITIRSISAAGRSQASPPKQAKTVLAAPILEVSSPSSDSILVQWEAVYMAIAFSVSIMRANGLGSIWKENTTNTSLTFTSLEAGTLYTIKAYAWNANRIPGDDSTCNQRTSPRAPANIQVSFDSGALKASFSWARAEGAFNYTVMALSDSSELTCSTTFSSCTISSLQCGTEYLISVLASNDAGSSKSSSAMTLKTVACAPGRVTIQEDPPGHLSVAWSSVDLGDYYVVFVKSDDGLEVHCNTSLTQCNFLSECGFTYFISVFVYNKAGQSPLGDIFNYTTAPCCPSDINPVLVSSDRVEIVWSPVRGAELYETKAVDGYNMVECNDTTPACTLSALECDTKYNITVYSFNEVRGSNMSCTPQFITTAPCSPEIKNVSRDAFSMINVHWRSTNDDATYTVTAQGEKGLYQCSSTGESCTMRGLPCGSVFSVTAVAETQAGRSLPSYSVPLETVPCCPTGLTVTQITQSVINVSWTIGRVAQTHVAVLESHTGQSKCHTHQNHCLLGCITCGINYTVTLKAISATGLTADCSYQSYFSGACCPLGVKLYRLGPNGIRIYWQASRGSANYSTDLYGSKGIFTCTPSAGLSFCDVTEIPCGDVYTVMVSPVAKTGLKLTFCPKKIYSVTCSGSTLGMVIYRGKRNEE

SEQ ID NO: 5507 - protein, 499 aa, Homo sapiens
  VARIANT 1: note = misc_feature - Xaa can be any naturally occurring amino acid
XEGAFNYTVMALSDSSELTCSTTFSSCTISSLQCGTEYLISVLASNDAGSSKSSSAMTLKTVACAPGRVTIQEDPPGHLSVAWSSVDLGDYYVVFVKSDDGLEVHCNTSLTQCNFLSECGFTYFISVFVYNKAGQSPLGDIFNYTTAPCCPSDINPVLVSSDRVEIVWSPVRGAELYETKAVDGYNMVECNDTTPACTLSALECDTKYNITVYSFNEVRGSNMSCTPQFITTAPCSPEIKNVSRDAFSMINVHWRSTNDDATYTVTAQGEKGLYQCSSTGESCTMRGLPCGSVFSVTAVAETQAGRSLPSYSVPLETVPCCPTGLTVTQITQSVINVSWTIGRVAQTHVAVLESHTGQSKCHTHQNHCLLGCITCGINYTVTLKAISATGLTADCSYQSYFSGACCPLGVKLYRLGPNGIRIYWQASRGSANYSTDLYGSKGIFTCTPSAGLSFCDVTEIPCGDVYTVMVSPVAKTGLKLTFCPKKIYSVIYRGKRNEE

SEQ ID NO: 5508 - protein, 46 aa, Homo sapiens
MAVSDVPSLSVGKEVQWEKLIAKAASIRDICHINMVQICWQLFLKC

SEQ ID NO: 5509 - protein, 1237 aa, Homo sapiens
MAVSDVPSLSVGKEVQWEKLIAKAASIRDICKQRPYQHGADMLAAISQVLNECTKPDQATPAALVLQGLHALCQAEVVCIRSTWNALSPKLSCDTRPLILKTLSELFSLVPSLTVNTTEYENFKVQVLSFLWTHTQNKDPIVANAAYRSLANFSAGEHTILHLPEKIRPEIPIPEELDDDEDVEDVDLSVPGSCYLKLLSLTPPLVLPALEEFFTSLVKQEMVNMPRGIYHSALKGGARSDQGKTVAGIPNFILKMYETNKQPGLKPGLAGGMLFCYDVSMYQSKDGKPLNRLMASRGRSFKQTSLALVHEVHIQLSEWHRAIFLPQAWLAYMNRAYHAILQGRLGELELQLKHGKEEPEEVQYKKSTAWLWVRDMLTDEITKAAAKESPVVKGNALLALSSLAVVVSRHEASLSSDSDGLLEVQPNFLSMKEWVSMVLDTLLVIVDSHYQPRGQLLSWFYYKSYSGENTASAIARSAAATALSLLVPVFIISCKEKVEEILNMLTARLPGKPSADESQAVQIHMGLALGMFLSRLCEEKLSDISGQEMNLLLMKSLDALENCCFDTSLEYNTGCILGVGLVLSLMSHSSQMQSRVHVAALLRKLSAHVDDSGSQSRTFQEVLAYTLSCVCTSAFSAGIIEATEAEDVMNKLRLLVENSQQTSGFALALGNIVHGLSVCGHGKAEDLGSKLLPAWIRIVLTEGTPTMLCLAALHGMVALVGSEGDVMQLKSEAIQTSHFQGRLNEVIRTLTQVISVSGVIGLQSNAVWLLGHLHLSTLSSSQSRASVPTDYSYLPESSFIGAAIGFFITGGKKGPESVPPSLLKVVMKPIATVGESYQYPPVNWAALLSPLMRLNFGEEIQQLCLEIMVTQAQSSQNAAALLGLWVTPPLIHSLSLNTKRYLLISAPLWIKHISDEQILGFVENLMVAVFKAASPLGSPELCPSALHGLSQAMKLPSPAHHLWSLLSEATGKIFDLLPNKIRRKDLELYISIAKCLLEMTDDDANRIAQVTKSNIEKAAFVKLYLVSQGRFPLVNLTDMLSVAVQHREKEVLAWMILHSLYQARIVSHANTGVLKRMEWLLELMGYIRNVAYQSTSFHNTALDKALDFFLLIFATAVVAWADHTAPLLLGLSASWLPWHQENGPAGPVPSFLGRSPMHRVTLQEVLTLLPNSMALLLQKEPWKEQTQKFIDWLFSIMESPKEALSAQSRDLLKATLLSLRVLPEFKKKAVWTRAYGW

SEQ ID NO: 5510 - protein, 99 aa, Homo sapiens
MLTARLPGKPSADESQAVQIHMGLALGMFLSRLCEEKLSDISGQEMNLLLMKSLDALENCCFDTSLEYNTGCILGVGLVLSLMSHSSQMQSRVHVAALL

SEQ ID NO: 5511 - protein, 128 aa, Homo sapiens
MLTARLPGKPSADESQAVQIHMGLALGMFLSRLCEEKLSDISGQEMNLLLMKSLDALENCCFDTSLEYNTGCILGVGLVLSLMSHSSQMQSRVHVAALLRKLSAHVDDSGSQSRTFQEVLAYTLSCVC

SEQ ID NO: 5512 - protein, 180 aa, Homo sapiens
MPKVFSVYFVCLCPALGKICDISGQEMNLLLMKSLDALENCCFDTSLEYNTGCILGVGLVLSLMSHSSQMQSRVHVAALLRKLSAHVDDSGSQSRTFQEVLAYTLSCVCTSAFSAGIIEATEAEDVMNKLRLLVENSQQTSGFALALGNIVHGLSVCGHGKAEDLGSKLLPAWIRIVLTE

SEQ ID NO: 5513 - protein, 1801 aa, Homo sapiens
MSDDIRKRFEFPNSLIQSQAVGHLIAAVLKENGFSEKIHQSTNQTPALNLLWEKCCSDNVVVRTACCEGLVALVAQDHAEFSYVLNGILNLIPSTRNTHGLIKAIMHLLQMQALKEGQGGEKNIQSIYTIRNHPHPLITVLEHRPDCWPVFLQQLTAFFQQCPERLEVSCIQIMAPFLWYLYCEPSQLQEYAKLRLALLKVLLQPQVLCDKDQPSILEQQILQLCCDIVPCLQVKDLIQTTEAMMFIEEVCLSLLRHPVFWKIQLTQMSLQLLCVSEVSLKITGECSSSIHLLEHSVELLKEDFPVELVIIGIALLLLQTPASQQKPILNLALKLLSVTEDQKIPKSSLLLVMPILQILSSTALEDCISVDEEGPSRQQLALNLLEMIQQECYRDDHQKLSYKLVCPVTSMYGTIFTAWRILEVMTDSSAASDWLASVESLLPITAVIPAPAFLLLAHLLVEDKGQNLHQILKVTTELAQADSSQVPNLIPVLMFKLGRPLEPILYNDILYTLPKLGVHKVCIGQILRIIQLLGTTPRLRAVTLRLLTSLWEKQDRVYPELQRFMAVSDVPSLSVGKEVQWEKLIAKAASIRDICKQRPYQHGADMLAAISQVLNECTKPDQATPAALVLQGLHALCQAEVVCIRSTWNALSPKLSCDTRPLILKTLSELFSLVPSLTVNTTEYENFKVQVLSFLWTHTQNKDPIVANAAYRSLANFSAGEHTILHLPEKIRPEIPIPEELDDDEDVEDVDLSVPGSCYLKLLSLTPPLVLPALEEFFTSLVKQEMVNMPRGIYHSALKGGARSDQGKTVAGIPNFILKMYETNKQPGLKPGLAGGMLFCYDVSMYQSKDGKPLNRLMASRGRSFKQTSLALVHEVHIQLSEWHRAIFLPQAWLAYMNRAYHAILQGRLGELELQLKHGKEEPEEVQYKKSTAWLWVRDMLTDEITKAAAKESPVVKGNALLALSSLAVVVSRHEASLSSDSDGLLEVQPNFLSMKEWVSMVLDTLLVIVDSHYQPRGQLLSWFYYKSYSGENTASAIARSAAATALSLLVPVFIISCKEKVEEILNMLTARLPGKPSADESQAVQIHMGLALGMFLSRLCEEKLSDISGQEMNLLLMKSLDALENCCFDTSLEYNTGCILGVGLVLSLMSHSSQMQSRVHVAALLRKLSAHVDDSGSQSRTFQEVLAYTLSCVCTSAFSAGIIEATEAEDVMNKLRLLVENSQQTSGFALALGNIVHGLSVCGHGKAEDLGSKLLPAWIRIVLTEGTPTMLCLAALHGMVALVGSEGDVMQLKSEAIQTSHFQGRLNEVIRTLTQVISVSGVIGLQSNAVWLLGHLHLSTLSSSQSRASVPTDYSYLPESSFIGAAIGFFITGGKKGPESVPPSLLKVVMKPIATVGESYQYPPVNWAALLSPLMRLNFGEEIQQLCLEIMVTQAQSSQNAAALLGLWVTPPLIHSLSLNTKRYLLISAPLWIKHISDEQILGFVENLMVAVFKAASPLGSPELCPSALHGLSQAMKLPSPAHHLWSLLSEATGKIFDLLPNKIRRKDLELYISIAKCLLEMTDDDANRIAQVTKSNIEKAAFVKLYLVSQGRFPLVNLTDMLSVAVQHREKEVLAWMILHSLYQARIVSHANTGVLKRMEWLLELMGYIRNVAYQSTSFHNTALDKALDFFLLIFATAVVAWADHTAPLLLGLSASWLPWHQENGPAGPVPSFLGRSPMHRVTLQEVLTLLPNSMALLLQKEPWKEQTQKFIDWLFSIMESPKEALSAQSRDLLKATLLSLRVLPEFKKKAVWTRAYGW

SEQ ID NO: 5514 - protein, 1801 aa, Homo sapiens; identical to SEQ ID NO: 5513

SEQ ID NO: 5515 - protein, 181 aa, Homo sapiens
MLPAATEGQKDMVWKWMPLLLLLVCVATMCSAQDRTDLLNVCMDAKHHKTKPGPEDKLHDQCSPWKKNACCTASTSQELHKDTSRLYNFNWDHCGKMEPACKRHFIQDTCLYECSPNLGPWIQQVNQSWRKERFLDVPLCKEDCQRWWEDCHTSHTCKSNWHRGWDWTSGVNKCPAGALCR

SEQ ID NO: 5516 - protein, 198 aa, Homo sapiens
MLPAATELRLQGQKDMVWKWMPLLLLLVCVATMCSAQDRTDLLNVCMDAKHHKTKPGPEDKLHDQCSPWKKNACCTASTSQELHKDTSRLYNFNWDHCGKMEPACKRHFIQDTCLYECSPNLGPWIQQVNQSWRKERFLDVPLCKEDCQRWWEDCHTSHTCKSNWHRGWDWTSGVNKCPAGALCRTFESYFPTPAALC

SEQ ID NO: 5517 - protein, 214 aa, Homo sapiens
MLPAATEVQCSPWKKNACCTASTSQELHKDTSRLYNFNWDHCGKMEPACKRHFIQDTCLYECSPNLGPWIQQVNQSWRKERFLDVPLCKEDCQRWWEDCHTSHTCKSNWHRGWDWTSGVNKCPAGALCRTFESYFPTPAALCEGLWSHSYKVSNYSRGSGRCIQMWFDSAQGNPNEEVARFYAAAMHVNAGEMLHGTGGLLLSLALMLQLWLLG

SEQ ID NO: 5518 - protein, 210 aa, Homo sapiens
MLPAATEVQGQKDMVWKWMPLLLLLVCVATMCSAQDRTDLLNVCMDAKHHKTKPGPEDKLHDQCSPWKKNACCTASTSQELHKDTSRLYNFNWDHCGKMEPACKRHFIQDTCLYECSPNLGPWIQQVNQSWRKERFLDVPLCKEDCQRWWEDCHTSHTCKSNWHRGWDWTSGVNKCPAGALCRTFESYFPTPAALCEGLWSHSYKVSNYS

SEQ ID NO: 5519 - protein, 148 aa, Homo sapiens
MLPAATEVQKDHAGSCGEGNLKGKKLEEGRLDTKHRAMLRLQGQKDMVWKWMPLLLLLVCVATMCSAQDRTDLLNVCMDAKHHKTKPGPEDKLHDQCSPWKKNACCTASTSQELHKDTSRLYNFNWDHCGKMEPACKRHFIQDTCLYE

SEQ ID NO: 5520 - protein, 251 aa, Homo sapiens
MLPAATEVQLRLQGQKDMVWKWMPLLLLLVCVATMCSAQDRTDLLNVCMDAKHHKTKPGPEDKLHDQCSPWKKNACCTASTSQELHKDTSRLYNFNWDHCGKMEPACKRHFIQDTCLYECSPNLGPWIQQVNQSWRKERFLDVPLCKEDCQRWWEDCHTSHTCKSNWHRGWDWTSAALCEGLWSHSYKVSNYSRGSGRCIQMWFDSAQGNPNEEVARFYAAAMHVNAGEMLHGTGGLLLSLALMLQLWLLG

SEQ ID NO: 5521 - protein, 244 aa, Homo sapiens
MLPAATEVQLRLQGQKDMVWKWMPLLLLLVCVATMCSAQDRTDLLNVCMDAKHHKTKPGPEDKLHDQCSPWKKNACCTASTSQELHKDTSRLYNFNWDHCGKMEPACSATSSRTPVSMSAHQPGALDPAGIRAGAKNASWMCPYAKRTVSAGGRIVTPPTRARATGTEDGTGPQELTSAQLGLSAAPLSPTSPLQLPFVKASGVTHTRSATTAEGAAAASRCGLIQPRATPTRKWRGSMLQPCM

SEQ ID NO: 5522 - protein, 169 aa, Homo sapiens
MVWKWMPLLLLLVCVATMCSAQDRTDLLNVCMDAKHHKTKPGPEDKLHDQCSPWKKNACCTASTSQELHKDTSRLYNFNWDHCGKMEPACKRHFIQDTCLYECSPNLGPWIQQVNQSWRKERFLDVPLCKEDCQRWWEDCHTSHTCKSNWHRGWDWTSAALCEGLWSHS

SEQ ID NO: 5523 - protein, 171 aa, Homo sapiens
MVWKWMPLLLLLVCVATMCSAQDRTDLLNVCMDAKHHKTKPGPEDKLHDQCSPWKKNACCTASTSQELHKDTSRLYNFNWDHCGKMEPACKRHFIQDTCLYECSPNLGPWIQQVNQSWRKERFLDVPLCKEDCQRWWEDCHTSHTCKSNWHRGWDWTSGVNKCPAGALCRT

SEQ ID NO: 5524 - protein, 255 aa, Homo sapiens
MVWKWMPLLLLLVCVATMCSAQDRTDLLNVCMDAKHHKTKPGPEDKLHDQCSPWKKNACCTASTSQELHKDTSRLYNFNWDHCGKMEPACKRHFIQDTCLYECSPNLGPWIQQVNQSWRKERFLDVPLCKEDCQRWWEDCHTSHTCKSNWHRGWDWTSGVNKCPAGALCRTFESYFPTPAALCEGLWSHSYKVSNYSRGSGRCIQMWFDSAQGNPNEEVARFYAAAMHVNAGEMLHGTGGLLLSLALMLQLWLLG

SEQ ID NO: 5525 - protein, 74 aa, Homo sapiens
MAWQMMQLLLLALVTAAGSAQPRSARARTDLLNVCMNAKHHKTQPSPEDELYGQCSPWKKNACCTASTSQELHK

SEQ ID NO: 5526 - protein, 104 aa, Homo sapiens
MAWQMMQLLLLALVTAAGSAQPRSARARTDLLNVCMNAKHHKTQPSPEDELYGQCSPWKKNACCTASTSQELHKDTSRLYNFNWDHCGKMEPTCKRHFIQDSCL

SEQ ID NO: 5527 - protein, 178 aa, Homo sapiens
MDMAWQMMQLLLLALVTAAGSAQPRSARARTDLLNVCMNAKHHKTQPSPEDELYGQCSPWKKNACCTASTSQELHKDTSRLYNFNWDHCGKMEPTCKRHFIQDSCLYECSPNLGPWIRQVNQSWRKERILNVPLCKEDCERWWEDCRTSYTCKSNWHKGWNWTSGINECPAGALCSTF

SEQ ID NO: 5528 - protein, 245 aa, Homo sapiens
MDMAWQMMQLLLLALVTAAGSAQPRSARARTDLLNVCMNAKHHKTQPSPEDELYGQCSPWKKNACCTASTSQELHKDTSRLYNFNWDHCGKMEPTCKRHFIQDSCLYECSPNLGPWIRQVNQSWRKERILNVPLCKEDCERWWEDCRTSYTCKSNWHKGWNWTSGINECPAGALCSTFESYFPTPAALCEGLWSHSFKVSNYSRGSGRCIQMWFDSAQGNPNEEVAKFYAAAMNAGAPSRGIIDS

SEQ ID NO: 5529 - protein, 172 aa, Homo sapiens
MDMAWQMMQLLLLALVTAAGSAQPRSARARTDLLNVCMNAKHHKTQPSPEDELYGQVGAPQGPSPGSVPLDDLPGAEEPEYGGDGCGGERLSPVSSPPSAVPGRRMPAARPAPARSCTRTPPACTTLTGITVVRWNPPASATLSRTAVSMSAHPTWGPGSGRSTRAGAKSAF

SEQ ID NO: 5530 - protein, 86 aa, Homo sapiens
MGLSAAAPLWGPPGLLLAIALHPALSVPPRRDYCVLGAGPAGLQMAYFLQRAGRDYAVFERAPRPGSFFTRYPRHRKLISINKRYT

SEQ ID NO: 5531 - protein, 684 aa, Homo sapiens
MGLSAAAPLWGPPGLLLAIALHPALSVPPRRDYCVLGAGPAGLQMAYFLQRAGRDYAVFERAPRPGSFFTRYPRHRKLISINKRYTGKANAEFNLRHDWNSLLSHDPRLLFRHYSRAYFPDARDMVRYLGDFADTLGLRVQYNTTIAHVTLDKDRQAWNGHYFILTDQKGQVHQCSVLFVATGLSVPNQVDFPGSEYAEGYESVSVDPEDFVGQNVLILGRGNSAFETAENILGVTNFIHMLSRSRVRLSWATHYVGDLRAINNGLLDTYQLKSLDGLLESDLTDLAILKDSKGKFHVTPKFFLEEANTNQSADSITLPQDDNDNFAMRVPYDRVIRCLGWNFDFSIFNKSLRLNSGNAFGKKYPLIRASYESKGSRGLFILGTASHSVDYRKSAGGFIHGFRYTVRAVHRLLEHRHHSVTWPATELPITQLTSSIVRRVNEASGLYQMFGVLADVILLKENSTAFEYLEEFPIQMLAQLETLTGRKAKHGLFVINMEYGRNFSGPDKDVFFDDRSVGHTEDAWQSNFLHPVIYYYRYLPTEQEVRFRPAHWPLPRPTAIHHIVEDFLTDWTAPIGHILPLRRFLENCLDTDLRSFYAESCFLFALTRQKLPPFCQQGYLRMQGLVSTESLWQHRVESRLLRDYAPTGRRLEDSSQQLGDQEPLGSPLAPGPLAQSVDSNKEEL

SEQ ID NO: 5532 - protein, 684 aa, Homo sapiens; identical to SEQ ID NO: 5531

SEQ ID NO: 5533 - protein, 684 aa, Homo sapiens; identical to SEQ ID NO: 5531

SEQ ID NO: 5534 - protein, 157 aa, Homo sapiens
MLPEQGPQPSTMPLWCLLAACTSLPRQAATMLEEAASPNEAVHASTSGSGALTDQTFTDLSAAEASSEEVPDFMEVPHSVHHKINCFFYLEKQLCQLPSPLCLSSLLTLKLKTTVPAPGRWWSFQPHKAFPLLVGTPGSWQSTIDPAWAAPSQPSPG

SEQ ID NO: 5535 - protein, 57 aa, Homo sapiens
MAAVRALVASRLAAASAFTSLSPGGRTPSQRAALHLSVPRPAARVALDPGAPEPWRG

SEQ ID NO: 5536 - protein, 237 aa, Homo sapiens
MAAVRALVASRLAAASAFTSLSPGGRTPSQRAALHLSVPRPAARVALVLSGCGVYDGTEIHEASAILVHLSRGGAEVQIFAPDVPQMHVIDHTKGQPSEGESRNVLTESARIARGKITDLANLSAANHDAAIFPGGFGAAKNLLCCIAPVLAAKVLRGVEVTVGHEQEEGGKWPYAGTAEAIKALGAKHCVKEVVEAHVDQKNKVVTTPAFMCETALHYIHDGIGAMVRKVLELTGK

SEQ ID NO: 5537 - protein, 268 aa, Homo sapiens
MAAVRALVASRLAAASAFTSLSPGGRTPSQRAALHLSVPRPAARVALVLSGCGVYDGTEIHEASAILVHLSRGGAEVQIFAPDVPQMHVIDHTKGQPSEGESRNVLTESARIARGKITDLANLSAANHDAAIFPGGFGAAKNLSTFAVDGKDCKVNKEVERVLKEFHQAGKPIGLCCIAPVLAAKVLRGVEVTVGHEQEEGGKWPYAGTAEAIKALGAKHCVKEVVEAHVDQKNKVVTTPAFMCETALHYIHDGIGAMVRKVLELTGK

SEQ ID NO: 5538 - protein, 182 aa, Homo sapiens
MHVIDHTKGQPSEGESRNVLTESARIARGKITDLANLSAANHDAAIFPGGFGAAKNLSTFAVDGKDCKVNKEVERVLKEFHQAGKPIGLCCIAPVLAAKVLRGVEVTVGHEQEEGGKWPYAGTAEAIKALGAKHCVKEVVEAHVDQKNKVVTTPAFMCETALHYIHDGIGAMVRKVLELTGK

SEQ ID NO: 5539 - protein, 224 aa, Homo sapiens; identical to SEQ ID NO: 1865

SEQ ID NO: 5540 - protein, 106 aa, Homo sapiens
  VARIANT 1: note = misc_feature - Xaa can be any naturally occurring amino acid
XDGTEIHEASAILVHLSRGGAEVQIFAPDVPQMHVIDHTKGQPSEGESRNVLTESARIARGKITDLANLSAANHDAAIFPGGFGAAKNLGSPYSDPAKHRSLGLQL

SEQ ID NO: 5541 - protein, 137 aa, Homo sapiens
  VARIANT 1: note = misc_feature - Xaa can be any naturally occurring amino acid
XDGTEIHEASAILVHLSRGGAEVQIFAPDVPQMHVIDHTKGQPSEGESRNVLTESARIARGKITDLANLSAANHDAAIFPGGFGAAKNLSTFAVDGKDCKVNKEVERVLKEFHQAGKPIGGSPYSDPAKHRSLGLQL

SEQ ID NO: 5542 - protein, 537 aa, Homo sapiens
MLNTLQTNAGYLEQVKRQRGDPQTQLEAMELYLARSGLQVEDLDRLNIIHVTGTKGKGSTCAFTECILRSYGLKTGFFSSPHLVQVRERIRINGQPISPELFTKYFWRLYHRLEETKDGSCVSMPPYFRFLTLMAFHVFLQEKVDLAVVEVGIGGAYDCTNIIRKPVVCGVSSLGIDHTSLLGDTVEKIAWQKGGIFKQGVPAFTVLQPEGPLAVLRDRAQQISCPLYLCPMLEALEEGGPPLTLGLEGEHQRSNAALALQLAHCWLQRQDRHGAGEPKASRPGLLWQLPLAPVFQPTSHMRLGLRNTEWPGRTQVLRRGPLTWYLDGAHTASSAQACVRWFRQALQGRERPSGGPEVRVLLFNATGDRDPAALLKLLQPCQFDYAVFCPNLTEVSSTGNADQQNFTVTLDQVLLRCLEHQQHWNHLDEEQASPDLWSAPSPEPGGSASLLLAPHPPHTCSASSLVFSCISHALQWISQGRDPIFQPPSPPKGLLTHPVAHSGASILREAAAIHVLVTGSLHLVGGVLKLLEPALSQ

SEQ ID NO: 5543 - protein, 265 aa, Homo sapiens
MLNTLQTNAGYLEQVKRQRGDPQTQLEAMELYLARSGLQVEDLDRLNIIHVTGTKGKGSTCAFTECILRSYGLKTGFFSSPHLVQVRERIRINGQPISPELFTKYFWRLYHRLEETKDGSCVSMPPYFRFLTLMAFHVFLQEKVDLAVVEVGIGGAYDCTNIIRKPVVCGVSSLGIDHTSLLGDTVEKIAWQKGGIFKQGVPAFTVLQPEGPLAVLRDRAQQISVLGSQRHPGQGSCGSCPWHLCSSPHPTCGSGFGTRSGRAGR

SEQ ID NO: 5544 - protein, 194 aa, Homo sapiens
MLNTLQTNAGYLEQVKRQRGDPQTQLEAMELYLARSGLQVEDLDRLNIIHVTGTKGKGSTCAFTECILRSYGLKTGFFSSPHLVQVRERIRINGQPISPELFTKYFWRLYHRLEETKVDLAVVEVGIGGAYDCTNIIRKPVVCGVSSLGIDHTSLLGDTVEKIAWQKGGIFKQGVPAFTVLQPEGPLAVLRDRA

SEQ ID NO: 5545 - protein, 375 aa, Homo sapiens
MSRARSHLRAALFLAAASARGITTQVAARRGLSAWPVPQEPSMEYQDAVRMLNTLQTNAGYLEQVKRQRGDPQTQLEAMELYLARSGLQVEDLDRLNIIHVTGTKGKGSTCAFTECILRSYGLKTGFFSSPHLVQVRERIRINGQPISPELFTKYFWRLYHRLEETKDGSCVSMPPYFRFLTLMAFHVFLQEKVDLAVVEVGIGGAYDCTNIIRKPVVCGVSSLGIDHTSLLGDTVEKIAWQKGGIFKQGVPAFTVLQPEGPLAVLRDRAQQISVLGSQRHPGQGSCGSCPWHLCSSPHPTCGSGFGTRSGRAGRRCCGAGPSPGTWTVRTPPAARRPACAGSARRCRAARGRAVAPRFESCSSMLPGTGTRRPC

SEQ ID NO: 5546 - protein, 587 aa, Homo sapiens
MSRARSHLRAALFLAAASARGITTQVAARRGLSAWPVPQEPSMEYQDAVRMLNTLQTNAGYLEQVKRQRGDPQTQLEAMELYLARSGLQVEDLDRLNIIHVTGTKGKGSTCAFTECILRSYGLKTGFFSSPHLVQVRERIRINGQPISPELFTKYFWRLYHRLEETKDGSCVSMPPYFRFLTLMAFHVFLQEKVDLAVVEVGIGGAYDCTNIIRKPVVCGVSSLGIDHTSLLGDTVEKIAWQKGGIFKQGVPAFTVLQPEGPLAVLRDRAQQISCPLYLCPMLEALEEGGPPLTLGLEGEHQRSNAALALQLAHCWLQRQDRHGAGEPKASRPGLLWQLPLAPVFQPTSHMRLGLRNTEWPGRTQVLRRGPLTWYLDGAHTASSAQACVRWFRQALQGRERPSGGPEVRVLLFNATGDRDPAALLKLLQPCQFDYAVFCPNLTEVSSTGNADQQNFTVTLDQVLLRCLEHQQHWNHLDEEQASPDLWSAPSPEPGGSASLLLAPHPPHTCSASSLVFSCISHALQWISQGRDPIFQPPSPPKGLLTHPVAHSGASILREAAAIHVLVTGSLHLVGGVLKLLEPALSQ

SEQ ID NO: 5547 - protein, 375 aa, Homo sapiens; identical to SEQ ID NO: 5545

SEQ ID NO: 5548 - protein, 561 aa, Homo sapiens
MSRARSHLRAALFLAAASARGITTQVAARRGLSAWPVPQEPSMEYQDAVRMLNTLQTNAGYLEQVKRQRGDPQTQLEAMELYLARSGLQVEDLDRLNIIHVTGTKGKGSTCAFTECILRSYGLKTGFFSSPHLVQVRERIRINGQPISPELFTKYFWRLYHRLEETKVDLAVVEVGIGGAYDCTNIIRKPVVCGVSSLGIDHTSLLGDTVEKIAWQKGGIFKQGVPAFTVLQPEGPLAVLRDRAQQISCPLYLCPMLEALEEGGPPLTLGLEGEHQRSNAALALQLAHCWLQRQDRHGAGEPKASRPGLLWQLPLAPVFQPTSHMRLGLRNTEWPGRTQVLRRGPLTWYLDGAHTASSAQACVRWFRQALQGRERPSGGPEVRVLLFNATGDRDPAALLKLLQPCQFDYAVFCPNLTEVSSTGNADQQNFTVTLDQVLLRCLEHQQHWNHLDEEQASPDLWSAPSPEPGGSASLLLAPHPPHTCSASSLVFSCISHALQWISQGRDPIFQPPSPPKGLLTHPVAHSGASILREAAAIHVLVTGSLHLVGGVLKLLEPALSQ

SEQ ID NO: 5549 - protein, 1976 aa, Homo sapiens
MGVLKVWLGLALALAEFAVLPHHSEGACVYQDSLLADATIWKPDSCQSCRCHGDIVICKPAVCRNPQCAFEKGEVLQIAANQCCPECVLRTPGSCHHEKKIHEHGTEWASSPCSVCSCNHGEVRCTPQPCPPLSCGHQELAFIPEGSCCPVCVGLGKPCSYEGHVFQDGEDWRLSRCAKCLCRNGVAQCFTAQCQPLFCNQDETVVRVPGKCCPQCSARSCSAAGQVYEHGEQWSENACTTCICDRGEVRCHKQACLPLRCGKGQSRARRHGQCCEECVSPAGSCSYDGVVRYQDEMWKGSACEFCMCDHGQVTCQTGECAKVECARDEELIHLDGKCCPECISRNGYCVYEETGEFMSSNASEVKRIPEGEKWEDGPCKVCECRGAQVTCYEPSCPPCPVGTLALEVKGQCCPDCTSVHCHPDCLTCSQSPDHCDLCQDPTKLLQNGWCVHSCGLGFYQAGSLCLACQPQCSTCTSGLECSSCQPPLLMRHGQCVPTCGDGFYQDRHSCAVCHESCAGCWGPTEKHCLACRDPLHVLRDGGCESSCGKGFYNRQGTCSACDQSCDSCGPSSPRCLTCTEKTVLHDGKCMSECPGGYYADATGRCKVCHNSCASCSGPTPSHCTACSPPKALRQGHCLPRCGEGFYSDHGVCKACHSSCLACMGPAPSHCTGCKKPEEGLQVEQLSDVGIPSGECLAQCRAHFYLESTGICEACHQSCFRCAGKSPHNCTDCGPSHVLLDGQCLSQCPDGYFHQEGSCTECHPTCRQCHGPLESDCISCYPHISLTNGNCRTSCREEQFLNLVGYCADCHHLCQHCAADLHNTGSICLRCQNAHYLLLGDHCVPDCPSGYYAERGACKKCHSSCRTCQGRGPFSCSSCDTNLVLSHTGTCSTTCFPGHYLDDNHVCQPCNTHCGSCDSQASCTSCRDPNKVLLFGECQYESCAPQYYLDFSTNTCKECDWSCSACSGPLKTDCLQCMDGYVLQDGACVEQCLSSFYQDSGLCKNCDSYCLQCQGPHECTRCKGPFLLLEAQCVQECGKGYFADHAKHKCTACPQGCLQCSHRDRCHLCDHGFFLKSGLCVYNCVPGFSVHTSNETCSGKIHTPSLHVNGSLILPIGSIKPLDFSLLNVQDQEGRVEDLLFHVVSTPTNGQLVLSRNGKEVQLDKAGRFSWKDVNEKKVRFVHSKEKLRKGYLFLKISDQQFFSEPQLINIQAFSTQAPYVLRNEVLHISRGERATITTQMLDIRDDDNPQDVVIEIIDPPLHGQLLQTLQSPATPIYQFQLDELSRGLLHYAHDGSDSTSDVAVLQANDGHSFHNILFQVKTVPQNDRGLQLVANSMVWVPEGGMLQITNRILQAEAPGASAEEIIYKITQDYPQFGEVVLLVNMPADSPADEGQHLPDGRTATPTSTFTQQDINEGIVWYRHSGAPAQSDSFRFEVSSASNAQTRLESHMFNIAILPQTPEAPKVSLEASLHMTAREDGLTVIQPHSLSFINSEKPSGKIVYNITLPLHPNQGIIEHRDHPHSPIRYFTQEDINQGKVMYRPPPAAPHLQELMAFSFAGLPESVKFHFTVSDGEHTSPEMVLTIHLLPSDQQLPVFQVTAPRLAVSPGGSTSVGLQVVVRDAETAPKELFFELRRPPQHGVLLKHTAEFRRPMATGDTFTYEDVEKNALQYIHDGSSTREDSMEISVTDGLTVTMLEVRVEVSLSEDRGPRLAAGSSLSITVASKSTAIITRSHLAYVDDSSPDPEIWIQLNYLPSYGTLLRISGSEVEELSEVSNFTMEDINNKKIRYSAVFETDGHLVTDSFYFSVSDMDHNHLDNQIFTIMITPAENPPPVIAFADLITVDEGGRAPLSFHHFFATDDDDNLQRDAIIKLSALPKYGCIENTGTGDRFGPETASDLEASFPIQDVLENYIYYFQSVHESIEPTHDIFSFYVSDGTSRSEIHSINITIEVKTLEVGKVEPLTTIFHTIRELSL

SEQ ID NO: 5550 - protein, 4012 aa, Homo sapiens
MGVLKVWLGLALALAEFAVLPHHSEGACVYQDSLLADATIWKPDSCQSCRCHGDIVICKPAVCRNPQCAFEKGEVLQIAANQCCPECVLRTPGSCHHEKKIHEHGTEWASSPCSVCSCNHGEVRCTPQPCPPLSCGHQELAFIPEGSCCPVCVGLGKPCSYEGHVFQDGEDWRLSRCAKCLCRNGVAQCFTAQCQPLFCNQDETVVRVPGKCCPQCSARSCSAAGQVYEHGEQWSENACTTCICDRGEVRCHKQACLPLRCGKGQSRARRHGQCCEECVSPAGSCSYDGVVRYQDEMWKGSACEFCMCDHGQVTCQTGECAKVECARDEELIHLDGKCCPECISRNGYCVYEETGEFMSSNASEVKRIPEGEKWEDGPCKVCECRGAQVTCYEPSCPPCPVGTLALEVKGQCCPDCTSVHCHPDCLTCSQSPDHCDLCQDPTKLLQNGWCVHSCGLGFYQAGSLCLACQPQCSTCTSGLECSSCQPPLLMRHGQCVPTCGDGFYQDRHSCAVCHESCAGCWGPTEKHCLACRDPLHVLRDGGCESSCGKGFYNRQGTCSACDQSCDSCGPSSPRCLTCTEKTVLHDGKCMSECPGGYYADATGRCKVCHNSCASCSGPTPSHCTACSPPKALRQGHCLPRCGEGFYSDHGVCKACHSSCLACMGPAPSHCTGCKKPEEGLQVEQLSDVGIPSGECLAQCRAHFYLESTGICEACHQSCFRCAGKSPHNCTDCGPSHVLLDGQCLSQCPDGYFHQEGSCTECHPTCRQCHGPLESDCISCYPHISLTNGNCRTSCREEQFLNLVGYCADCHHLCQHCAADLHNTGSICLRCQNAHYLLLGDHCVPDCPSGYYAERGACKKCHSSCRTCQGRGPFSCSSCDTNLVLSHTGTCSTTCFPGHYLDDNHVCQPCNTHCGSCDSQASCTSCRDPNKVLLFGECQYESCAPQYYLDFSTNTCKECDWSCSACSGPLKTDCLQCMDGYVLQDGACVEQCLSSFYQDSGLCKNCDSYCLQCQGPHECTRCKGPFLLLEAQCVQECGKGYFADHAKHKCTACPQGCLQCSHRDRCHLCDHGFFLKSGLCVYNCVPGFSVHTSNETCSGKIHTPSLHVNGSLILPIGSIKPLDFSLLNVQDQEGRVEDLLFHVVSTPTNGQLVLSRNGKEVQLDKAGRFSWKDVNEKKVRFVHSKEKLRKGYLFLKISDQQFFSEPQLINIQAFSTQAPYVLRNEVLHISRGERATITTQMLDIRDDDNPQDVVIEIIDPPLHGQLLQTLQSPATPIYQFQLDELSRGLLHYAHDGSDSTSDVAVLQANDGHSFHNILFQVKTVPQNDRGLQLVANSMVWVPEGGMLQITNRILQAEAPGASAEEIIYKITQDYPQFGEVVLLVNMPADSPADEGQHLPDGRTATPTSTFTQQDINEGIVWYRHSGAPAQSDSFRFEVSSASNAQTRLESHMFNIAILPQTPEAPKVSLEASLHMTAREDGLTVIQPHSLSFINSEKPSGKIVYNITLPLHPNQGIIEHRDHPHSPIRYFTQEDINQGKVMYRPPPAAPHLQELMAFSFAGLPESVKFHFTVSDGEHTSPEMVLTIHLLPSDQQLPVFQVTAPRLAVSPGGSTSVGLQVVVRDAETAPKELFFELRRPPQHGVLLKHTAEFRRPMATGDTFTYEDVEKNALQYIHDGSSTREDSMEISVTDGLTVTMLEVRVEVSLSEDRGPRLAAGSSLSITVASKSTAIITRSHLAYVDDSSPDPEIWIQLNYLPSYGTLLRISGSEVEELSEVSNFTMEDINNKKIRYSAVFETDGHLVTDSFYFSVSDMDHNHLDNQIFTIMITPAENPPPVIAFADLITVDEGGRAPLSFHHFFATDDDDNLQRDAIIKLSALPKYGCIENTGTGDRFGPETASDLEASFPIQDVLENYIYYFQSVHESIEPTHDIFSFYVSDGTSRSEIHSINITIERKNDEPPRMTLQPLRVQLSSGVVISNSSLSLQDLDTPDNELIFVLTKKPDHGHVLWRQTASEPLENGRVLVQGSTFTYQDILAGLVGYVPSVPGMVVDEFQFSLTDGLHVDTGRMKIYTELPASDTPHLAINQGLQLSAGSVARITEQHLKVTDIDSDDHQVMYIMKEDPGAGRLQMMKHGNLEQISIKGPIRSFTQADISQGHVEYSHGTGEPGGSFAFKFDVVDGEGNRLIDKSFSISILEDKSPPVITTNKGLVLDENSVKKITTLQLSATDQDSGPTELIYRITRQPQLGHLEHAASPGIQISSFTQADLTSRNVQYVHSSEAEKHSDAFSFTLSDGVSEVTQTFHITLHPVDDSLPVVQNLGMRVQEGMRKTITEFELKAVDADTEAESVTFTIVQPPRHGTIERTSNGQHFHLTSTFTMKDIYQNRVSYSHDGSNSLKDRFTFTVSDGTNPFFIIEEGGKEIMTAAPQPFRVDILPVDDGTPRIVTNLGLQWLEYMDGKATNLITKKELLTMDPDTEDAQLVYEITTGPKHGFVENKLQPGRAAATFTQEDVNLGLIRYVLHKEKIREMMDSFQFLVKDSKPNVVSDNVFHIQWSLISFKYTSYNVSEKAGSVSVTVQRTGNLNQYAIVLCRTEQGTASSSSRVSSQPGQQDYVEYAGQVQFDEREDTKSCTIVINDDDVFENVESFTVELSMPAYALLGEFTQAKVIINDTEDEPTLEFDKKIYWVNESAGFLFAPIERKGDASSIVSAICYTVPKSAMGSSLYALESGSDFKSRGMSAASRVIFGPGVTMSTCDVMLIDDSEYEEEEEFEIALADASDNARIGRVATAKVLISGPNDASTVSLGNTAFTVSEDAGTVKIPVIRHGTDLSTFASVWCATRPSDPASATPGVDYVPSSRKVEFGPGVIEQYCTLTILDDTQYPVIEGLETFVVFLSSAQGAELTKPFQAVIAINDTFQDVPSMQFAKDLLLVKEKEGVLHVPITRSGDLSYESSVRCYTQSHSAQVMEDFEERQNADSSRITFLKGDKVKNCTVYIHDDSMFEPEEQFRVYLGLPLGNHWSGARIGKNNMATITISNDEDAPTIEFEEAAYQVREPAGPDAIAILNIKVIRRGDQNRTSKVRCSTRDGSAQSGVDYYPKSRVLKFSPGVDHIFFKVEILSNEDREWHESFSLVLGPDDPVEAVLGDVTTATVTILDQEAAGSLILPAPPIVVTLADYDHVEEVTKEGVKKSPSPGYPLVCVTPCDPHFPRYAVMKERCSEAGINQTSVQFSWEVAAPTDGNGARSPFETITDNTPFTSVNHMVLDSIYFSRRFHVRCVAKAVDKVGHVGTPLRSNIVTIGTDSAICHTPVVAGTSRGFQAQSFIATLKYLDVKHKEHPNRIHISVQIPHQDGMLPLISTMPLHNLHFLLSESIYRHQHVCSNLVTTYDLRGISEAGFLDDVVYDSTALGPGYDRPFQFDPSVREPKTIQLYKHLNLKSCVWTFDAYYDMTELIDVCGGSVTADFQVRDSAQSFLTVHVPLYVSYIYVTAPRGWASLEHHTEMEFSFFYDTVLWRTGIQTDSVLSARLQIIRIYIREDGRLVIEFKTHAKFRGQFVMEHHTLPEVKSFVLTPDHLGGIEFDLQLLWSAQTFDSPHQLWRATSSYNRKDYSGEYTIYLIPCTVQPTQPWVDPGEKPLACTAHAPERFLIPIAFQQTNRPVPVVYSLNTEFQLCNNEKVFLMDPNTSDMSLAEMDYKGAFSKGQILYGRVLWNPEQNLNSAYKLQLEKVYLCTGKDGYVPFFDPTGTIYNEGPQYGCIQPNKHLKHRFLLLDRNQPEVTDKYFHDVPFEAHFASELPDFHVVSNMPGVDGFTLKVDALYKVEAGHQWYLQVIYIIGPDTISGPRVQRSLTAPLRRNRRDLVEPDGQLILDDSLIYDNEGDQVKNGTNMKSLNLEMQELAVAASLSQTGASIGSALAAIMLLLLVFLVACFINRKCQKQRKKKPAEDILEEYPLNTKVEVPKRHPDRVEKNVNRHYCTVRNVNILSEPEAAYTFKGAKVKRLNLEVRVHNNLQDGTEV

SEQ ID NO: 5551 - protein, 39 aa, Homo sapiens
MGVLKVWLGLALALAEFAVLPHHSEGACVYQDSLLAEGG

SEQ ID NO: 5552 - protein, 652 aa, Homo sapiens
  VARIANT 1: note = misc_feature - Xaa can be any naturally occurring amino acid
XCSYEGHVFQDGEDWRLSRCAKCLCRNGVAQCFTAQCQPLFCNQDETVVRVPGKCCPQCSARSCSAAGQVYEHGEQWSENACTTCICDRGEVRCHKQACLPLRCGKGQSRARRHGQCCEECVSPAGSCSYDGVVRYQDEMWKGSACEFCMCDHGQVTCQTGECAKVECARDEELIHLDGKCCPECISRNGYCVYEETGEFMSSNASEVKRIPEGEKWEDGPCKVCECRGAQVTCYEPSCPPCPVGTLALEVKGQCCPDCTSVHCHPDCLTCSQSPDHCDLCQDPTKLLQNGWCVHSCGLGFYQAGSLCLACQPQCSTCTSGLECSSCQPPLLMRHGQCVPTCGDGFYQDRHSCAVCHESCAGCWGPTEKHCLACRDPLHVLRDGGCESSCGKGFYNRQGTCSACDQSCDSCGPSSPRCLTCTEKTVLHDGKCMSECPGGYYADATGRCKVCHNSCASCSGPTPSHCTACSPPKALRQGHCLPRCGEGFYSDHGVCKACHSSCLACMGPAPSHCTGCKKPEEGLQVEQLSDVGIPSGECLAQCRAHFYLESTGICEACHQSCFRCAGKSPHNCTDCGPSHVLLDGQCLSQCPDGYFHQEGSCTECHPTCRQCHGPLESDCISCYPHISLTNGNCRTSCREEQFLNLVGYCAGE

SEQ ID NO: 5553 - protein, 666 aa, Homo sapiens
  VARIANT 1: note = misc_feature - Xaa can be any naturally occurring amino acid
XGEVLQIAANQCCPECVLRTPGSCHHEKKIHEHGTEWASSPCSVCSCNHGEVRCTPQPCPPLSCGHQELAFIPEGSCCPVCVGLGKPCSYEGHVFQDGEDWRLSRCAKCLCRNGVAQCFTAQCQPLFCNQDETVVRVPGKCCPQCSARSCSAAGQVYEHGEQWSENACTTCICDRGEVRCHKQACLPLRCGKGQSRARRHGQCCEECVSPAGSCSYDGVVRYQDEMWKGSACEFCMCDHGQVTCQTGECAKVECARDEELIHLDGKCCPECISRNGYCVYEETGEFMSSNASEVKRIPEGEKWEDGPCKVCECRGAQVTCYEPSCPPCPVGTLALEVKGQCCPDCTSVHCHPDCLTCSQSPDHCDLCQDPTKLLQNGWCVHSCGLGFYQAGSLCLACQPQCSTCTSGLECSSCQPPLLMRHGQCVPTCGDGFYQDRHSCAVCHESCAGCWGPTEKHCLACRDPLHVLRDGGCESSCGKGFYNRQGTCSACDQSCDSCGPSSPRCLTCTEKTVLHDGKCMSECPGGYYADATGRCKVCHNSCASCSGPTPSHCTACSPPKALRQGHCLPRCGEGFYSDHGVCKACHSSCLACMGPAPSHCTGCKKPEEGLQVEQLSDVGIPSGECLAQCRAHFYLESTGICEGQNLDFCQNLEVISAVCLGISSTEN

SEQ ID NO: 5554 - protein, 426 aa, Homo sapiens
  VARIANT 1: note = misc_feature - Xaa can be any naturally occurring amino acid
XTLPLHPNQGLPESVKFHFTVSDGEHTSPEMVLTIHLLPSDQQLPVFQVTAPRLAVSPGGSTSVGLQVVVRDAETAPKELFFELRRPPQHGVLLKHTAEFRRPMATGDTFTYEDVEKNALQYIHDGSSTREDSMEISVTDGLTVTMLEVRVEVSLSEDRGPRLAAGSSLSITVASKSTAIITRSHLAYVDDSSPDPEIWIQLNYLPSYGTLLRISGSEVEELSEVSNFTMEDINNKKIRYSAVFETDGHLVTDSFYFSVSDMDHNHLDNQIFTIMITPAENPPPVIAFADLITVDEGGRAPLSFHHFFATDDDDNLQRDAIIKLSALPKYGCIENTGTGDRFGPETASDLEASFPIQDVLENYIYYFQSVHESIEPTHDIFSFYVSDGTSRSEIHSINITIEVKTLEVGKVEPLTTIFHTIRELSL

SEQ ID NO: 5555 - protein, 222 aa, Homo sapiens
MLDESLAVRRSKKCKEMIMHWEKKEDIDIVNTVDQLDKTAPRITLLHSPSQVGLLKNGCYGIYITSRVLKASDPDTEDDQIIFKILQGPKHGHLENTTTGEFIHEKFSQKDLNSKTILYIINPSLEVNSDTVEFQIMDPTGNSATPQILELKWSHIEWSQTEYEVCENVGLLPLEIIRRGYSMDSAFVGIKVNQVSAAVGKDFTVIPSKLIQFDPGSSILCL

SEQ ID NO: 5556 - protein, 2179 aa, Homo sapiens
MNSLSWGAANAVLLLLLLAWASPTFISINRGVRVMKGHSAFLSGDDLKFAIPKEKDACKVEVVMNEPITQRVGKLTPQVFDCHFLPNEVKYVHNGCPILDEDTVKLRLYRFTERDTFIETFILWVYLLEPDCNIIHMSNNVLEVPEFNGLSQAIDKNLLRFDYDRMASLECTVSLDTARTRLPAHGQMVLGEPRPEEPRGDQPHSFFPESQLRAKLKCPGGSCTPGLKKIGSLKVSCEEFLLMGLRYQHLDPPSPNIDYISIQLDLTDTRSKIVYKSESAWLPVYIRAGIPNQIPKAAFMAVFILEVDQFILTSLTTSVLDCEEDETPKPLLVFNITKAPLQGYVTHLLDHTRPISSFTWKDLSDMQIAYQPPNSSHSERRHDEVELEVYDFFFERSAPMTVHISIRTADTNAPRVSWNTGLSLLEGQSRAITWEQFQVVDNDDIGAVRLVTVGGLQHGWLTLRGGKGFLFTVADLQAGVVRYHHDDSDSTKDFVVFRIFDGHHSIRHKFPINVLPKDDSPPFLITNVVIELEEGQTILIQGSMLRASDVDASDDYIFFNITKPPQAGEIMKKPGPGLIGYPVHGFLQRDLFNGIIYYRHFGGEIFEDSFQFVLWDSHEPPNLSVPQVATIHITPVDDQLPKEAPGVSRHLVVKETEVAYITKKQLHFIDSESYDRELVYTITTPPFFSFSHRHLDAGKLFMVDSIPKVVKNPTALELRSFTQHAVNYMKVAYMPPMQDIGPHCRDVQFTFSVSNQHGGTLHGICFNITILPVDNQVPEAFTNPLKVTEGGQSIISTEHILISDADTKLDNIDLSLRELPLHGRVELNGFPLNSGGTFSWGDLHTLKVRYQHDGTEVLQDDLLLEVTDGTNSAEFVLHVEVFPVNDEPPVLKADLMPVMNCSEGGEVVITSEYIFATDVDSDNLKLMFVIAREPQHGVVRRAGVTVDQFSQRDVISEAVTYKHTGGEIGLMPCFDTITLVVSDGEAGPFVNGCCYNGPNPSVPLHASFPVYDLNITVYPVDNQPPSIAIGPVFVVDEGCSTALTVNHLSATDPDTAADDLEFVLVSPPQFGYLENILPSVGFEKSNIGISIDSFQWKDMNAFHINYVQSRHLRIEPTADQFTVYVTDGKHHSLEIPFSIIINPTNDEAPDFVVQNITVCEGQMKELDSSIISAVDLDIPQDALLFSITQKPRHGLLIDRGFSKDFSENKQPANPHQKHAPVHSFSMELLKTGMRLTYMHDDSESLADDFTIQLSDGKHKILKTISVEVIPVNDEKPMLSKKAEIAMNMGETRIISSAILSAIDEDSPREKIYYVFERLPQNGQLQLKIGRDWVPLSPGMKCTQEEVDLNLLRYTHTGAMDSQNQDSFTFYLWDGNNRSPALDCQITIKDMEKGDIVILTKPLVVSKGDRGFLTTTTLLAVDGTDKPEELLYVITSPPRYGQIEYVHYPGVPITNFSQMDVVGQTVCYVHKSKVTVSSDRFRFIISNGLRTEHGVFEITLETVDRALPVVTRNKGLRLAQGAVGLLSPDLLQLTDPDTPAENLTFLLVQLPQHGQLYLWGTGLLQHNFTQQDVDSKNVAYRHSGGDSQTDCFTFMATDGTNQGFIVNGRVWEEPVLFTIQVDQLDKTAPRITLLHSPSQVGLLKNGCYGIYITSRVLKASDPDTEDDQIIFKILQGPKHGHLENTTTGEFIHEKFSQKDLNSKTILYIINPSLEVNSDTVEFQIMDPTGNSATPQILELKWSHIEWSQTEYEVCENVGLLPLEIIRRGYSMDSAFVGIKVNQVSAAVGKDFTVIPSKLIQFDPGMSTKMWNIAITYDGLEEDDEVFEVILNSPVNAVLGTKTKAAVKILDSKGGQCHPSYSSNQSKHSTWEKGIWHLLPPGSSSSTTSGSFHLERRPLPSSMQLAVIRGDTLRGFDSTDLSQRKLRTRGNGKTVRPSSVYRNGTDIIYNYHGIVSLKLEDDSFPTHKRKAKVSIISQPQKTIKVAELPQADKVESTTDSHFPRQDQLPSFPKNCTLELKGLFHFEEGIQKLYQCNGIAWKAWSPQTKDVEDKSCPAGWHQHSGYCHILITEQKGTWNAAAQACREQYLGNLVTVFSRQHMRWLWDIGGRKSFWIGLNDQVHAGHWEWIGGEPVAFTNGRRGPSQRSKLGKSCVLVQRQGKWQTKDCRRAKPHNYVCSRKL

SEQ ID NO: 5557 - protein, 2179 aa, Homo sapiens; identical to SEQ ID NO: 5556

SEQ ID NO: 5558 - protein, 1335 aa, Homo sapiens
MNSLSWGAANAVLLLLLLAWASPTFISINRGVRVMKGHSAFLSGDDLKFAIPKEKDACKVEVVMNEPITQRVGKLTPQVFDCHFLPNEVKYVHNGCPILDEDTVKLRLYRFTERDTFIETFILWVYLLEPDCNIIHMSNNVLEVPEFNGLSQAIDKNLLRFDYDRMASLECTVSLDTARTRLPAHGQMVLGEPRPEEPRGDQPHSFFPESQLRAKLKCPGGSCTPGLKKIGSLKVSCEEFLLMGLRYQHLDPPSPNIDYISIQLDLTDTRSKIVYKSESAWLPVYIRAGIPNQIPKAAFMAVFILEVDQFILTSLTTSVLDCEEDETPKPLLVFNITKAPLQGYVTHLLDHTRPISSFTWKDLSDMQIAYQPPNSSHSERRHDEVELEVYDFFFERSAPMTVHISIRTADTNAPRVSWNTGLSLLEGQSRAITWEQFQVVDNDDIGAVRLVTVGGLQHGWLTLRGGKGFLFTVADLQAGVVRYHHDDSDSTKDFVVFRIFDGHHSIRHKFPINVLPKDDSPPFLITNVVIELEEGQTILIQGSMLRASDVDASDDYIFFNITKPPQAGEIMKKPGPGLIGYPVHGFLQRDLFNGIIYYRHFGGEIFEDSFQFVLWDSHEPPNLSVPQVATIHITPVDDQLPKEAPGVSRHLVVKETEVAYITKKQLHFIDSESYDRELVYTITTPPFFSFSHRHLDAGKLFMVDSIPKVVKNPTALELRSFTQHAVNYMKVAYMPPMQDIGPHCRDVQFTFSVSNQHGGTLHGICFNITILPVDNQVPEAFTNPLKVTEGGQSIISTEHILISDADTKLDNIDLSLRELPLHGRVELNGFPLNSGGTFSWGDLHTLKVRYQHDGTEVLQDDLLLEVTDGTNSAEFVLHVEVFPVNDEPPVLKADLMPVMNCSEGGEVVITSEYIFATDVDSDNLKLMFVIAREPQHGVVRRAGVTVDQFSQRDVISEAVTYKHTGGEIGLMPCFDTITLVVSDGEAGPFVNGCCYNGPNPSVPLHASFPVYDLNITVYPVDNQPPSIAIGPVFVVDEGCSTALTVNHLSATDPDTAADDLEFVLVSPPQFGYLENILPSVGFEKSNIGISIDSFQWKDMNAFHINYVQSRHLRIEPTADQFTVYVTDGKHHSLEIPFSIIINPTNDEAPDFVVQNITVCEGQMKELDSSIISAVDLDIPQDALLFSITQKPRHGLLIDRGFSKDFSENKQPANPHQKHAPVHSFSMELLKTGMRLTYMHDDSESLADDFTIQLSDGKHKILKTISVEVIPVNDEKPMLSKKAEIAMNMGETRIISSAILSAIDEDSPREKIYYVFERLPQNGQLQLKECQLRCGI

SEQ ID NO: 5559 - protein, 715 aa, Homo sapiens
MVTQESMLKAALPLFTRFIISNGLRTEHGVFEITLETVDRALPVVTRNKGLRLAQGAVGLLSPDLLQLTDPDTPAENLTFLLVQLPQHGQLYLWGTGLLQHNFTQQDVDSKNVAYRHSGGDSQTDCFTFMATDGTNQGFIVNGRVWEEPVLFTIQVDQLDKTAPRITLLHSPSQVGLLKNGCYGIYITSRVLKASDPDTEDDQIIFKILQGPKHGHLENTTTGEFIHEKFSQKDLNSKTILYIINPSLEVNSDTVEFQIMDPTGNSATPQILELKWSHIEWSQTEYEVCENVGLLPLEIIRRGYSMDSAFVGIKVNQVSAAVGKDFTVIPSKLIQFDPGMSTKMWNIAITYDGLEEDDEVFEVILNSPVNAVLGTKTKAAVKILDSKGGQCHPSYSSNQSKHSTWEKGIWHLLPPGSSSSTTSGSFHLERRPLPSSMQLAVIRGDTLRGFDSTDLSQRKLRTRGNGKTVRPSSVYRNGTDIIYNYHGIVSLKLEDDSFPTHKRKAKVSIISQPQKTIKVAELPQADKVESTTDSHFPRQDQLPSFPKNCTLELKGLFHFEEGIQKLYQCNGIAWKAWSPQTKDVEDKSCPAGWHQHSGYCHILITEQKGTWNAAAQACREQYLGNLVTVFSRQHMRWLWDIGGRKSFWIGLNDQVHAGHWEWIGGEPVAFTNGRRGPSQRSKLGKSCVLVQRQGKWQTKDCRRAKPHNYVCSRKL

SEQ ID NO: 5560 - protein, 2139 aa, Homo sapiens
MAGASRHPTGTPRQLLVALACLLLSRPALQGRASSLGTEPDPALYLPARGALDGTRPDGPSVLIANPGLRVPLGRSLWLDPLRDLVIGVQPGDRCEVTVLDALPRLKGALSPRRFPCTFGPRQVQYTHFGSHSPGRARVLLQLRYDAPTHTLVLPFTLAVDLVFSQLELVTRNRPLVVEKLRSWSRAIDRRVLDFASLKSGATATRRCRLTPLPHEDGPLPKYGRLVDAVGAPLPRGKGVDCEAFLRAGVRYQHTATSSPNRDYVPMMVELLGPEGQDAGSAGVLVREHFQLLVRIRGGAENTPPRPSFMATMMMEVDPLVLTALTPDALAAEDVESDPGDLVFNILNAPTHPPGHPGQQGYVVSTDDPLGLPVSFFTQQELRELKIAYQPPAENSHGERLFQLELEVVDGDGAASDPFAFMVTVKSMNTLVPVASHNRGLVLFEGQSRPLSSTHSIPISDKDNLEEVKMAAVRGLRHGQLVVFGAPAGCKYFTPADLAAGRVVYQHDGSNTYSDNIIFRMEDGHHQVDFLFPLTILPVDDEPPMVNTNTGLSLTEGQVVQISPFVLSATDIDSEDSTIHFVLENQPLKGNEEEPQWELAPGSSHSGHYLGDLLLQQAELPLSTEDEDWHYMEKEGLYEKVVTEWLQRDIMEGRLFYRHLGPHSPQSVMVQLAFHVQDDHDPPNLSKQHIFTIKVQPVDILSPQLYPGTTLEMTVQEYQLTHFQKNFLRYIDQDSDDQNLWYTLLTLPTDTDGNHQVRAGEIVLTDSPDTLIMHFTQAQVNQHKVAYQPPQKLGIAPRVVQFTYQVEDAAGNSVPGTFTLFLQPVDNQPPEVTNRGFAILEGGSFNLSSNELHVTDPDTDIDQIVFILVRGPQHGHLQYFKRCMVPGESFMQADVINGSVSYQHGRDQTTTSDTFHLEVSDGVHHIPITIPISVHPNVANRSPRISLRSSSLLDVSIDVLENKATEITMGVIHGKRKDVGDLMLSFIVKDSPKLGTILVNGLPTERFTQEDLINGRVAYAHTAGEVGFQKQHDAFSLILSKDSYQWVVGNSIIEKVQVQVTVLPVDNVGPKVFVGESFIVYEGEKNSLTLQHLHVEDVDTHQDELLCTVTSQPASGYLEKIASAPGSKMSQSGSPISAFSLRDIQVRHINYVQSIHKGVEPQEDQFTFYCSDGINFSPNVFFPIIILPTNDEQPKLFAHEFKVLEGMSLVIDTQLLNGADADLPPNELHFQLTALPRHGRIIQQLATGSQPIHSFTLKEIQEASTIVYEHDDSETKEDSFEVWLSDGKHTTHRKVPIVVTLVDDETPHLTVNNGLKVEKGHSEIITNRILKATDLDSDDKSLSFVLHSGPQQGLLQRLRKPRGEVRNNLTLGMNFTQDEINRGLICYIHTGQEGIVDIIKFDVTDGVNTLTDHYFYVTIGNLDSVFPEVISKRITLIEGARVTLTNNLLTNSDINSSDEHHFSITRAPSLGHLESSDYAGEPIASFTQLQLASNKISYVHTSNDEKKMDSFEFQVIGELYPVFRTFRIFITDVDNKKPILTIHRLTLQKEDSQLITLLELTVEDSDTPDDLILFTITQVPMHGKILYNGSRPVTTFTKQDLNKNLISYKHDGSETTEDSFSLTVTDGTHTDFYVLPDTALATHKPQVMRVQIRSLDNRLPQITTNRGAPALKRLHTGHMGFLITSKSLKAEDQDSPHRLLKYKVTRGPEHGFIIKTGLGNQSTRVFTQADIDEMKISYVLNEGSNASKDIFYFSVEDNGGNKLTNQPFHLNWAWICLEKEYYIVDEDSTFLEVTLTRRGYLGETSFISIGTKDETAKKDKDFKWKTNKQIQFNPGQTTATWRVRIIPDNEYETSETFQIILSEPLMAVLEFPEMATVEIVDPGDESTVYIPEAEYKIEEDIGELLIPVRRSGDASQELIVICSTRQGSATGTISSTVLFSDYISRPEDHTSILHFDKNETQKTCQVLIIDDSLYEEEESFSVSLRLPVGGQLGARFPTTKVTILADRYDEPVLHFGDAEYHVNESARYVEVCVWRRGTDLSQPSSIAVRSRKSEQESAEAGTDYVGISRNLDFAPGVRMQTFQVTILDDLGQPTLEGPEKFELLLQMPMGAVLGEPNKTTIFIEDTITDCKQSACSSFD

SEQ ID NO: 5561 - protein, 1284 aa, Homo sapiens
MHVFIVGMSLSSVTLASALQVRGEALSEEEIWSLLFLAAEQLLEDLRNDSSDYVVCPWSALLSAAGSLSFQGRVSHIEAAPFKAPELLQGQSEDEQPDASQPLQLCEPLHSILLTMCEDQPHRRCTLQSVLEACRVHEKEVSVYPAPAGLHIRRLVGLVLGTISEVEKRVVEESSSVQQNRSYLLRKRLRGTSSESPAAQAPECLHPCRVSERSTETQSSPEPHWSTLTHSHCSLLVNRALPGADPQDQQAGRRLSSGSVHSAADSSWPTTPSQRGFLQRRSKFSRPEFILLAGEAPMTLHLPGSVVTKKGKSYLALRDLCVVLLNGQHLEVKCDVESTVGAVFNAVTSFANLEELTYFGLAYMKSKEFFFLDSETRLCKIAPEGWREQPQKTSMNTFTLFLRIKFFVSHYGLLQHSLTRHQFYLQLRKDILEERLYCNEEILLQLGVLALQAEFGNYPKEVESKPYFHVEDYIPASLIERMTALRVQVEVSEMHRLSSALWGEDAELKFLRVTQQLPEYGVLVHQVFSEKRRPEEEMALGICAKGVIVYEVKNNSRIAMLRFQWRETGKISTYQKKFTITSSVTGKKHTFVTDSAKTSKYLLDLCSAQHGFNAQMGSGQPSHVLFDHDKFVQMANLSPAHQARSKPLIWIQRLSCSENELFVSRLQGAAGGLLSTSMDNFNVDGSKEAGAEGIGRSPCTGREQLKSACVIQKPMTWDSLSGPPVQSMHAGSKNNRRKSFIAEPGREIVRVTLKRDPHRGFGFVINEGEYSGQADPGIFISSIIPGGPAEKAKTIKPGGQILALNHISLEGFTFNMAVRMIQNSPDNIELIISQSKGVGGNNPDEEKNSTANSGVSSTDILSFGYQGSLLSHTQDQDRNTEELDMAGVQSLVPRLRHQLSFLPLKGAGSSCPPSPPEISAGEIYFVELVKEDGTLGFSVTGGINTSVPYGGIYVKSIVPGGPAAKEGQILQGDRLLQVDGVILCGLTHKQAVQCLTGPGQVARLVLERRVPRSTQQCPSANDSMGDERTAVSLVTALPGRPSSCVSVTDGPKFEVKLKKNANGLGFSFVQMEKESCSHLKSDLVRIKRLFPGQPAEENGAIAAGDIILAVNGRSTEGLIFQEVLHLLRGAPQEVTLLLCRPPPGALPELEQEWQTPELSADKEFTRATCTDSCTSPILDQEDSWRDSASPDAGEGLGLRPESSQKAIREAQWGQNRERPWASSLTHSPESHPHLCKLHQERDESTLATSLEKDVRQNCYSVCDIMRLGRYSFSSPLTRLSTDIF

SEQ ID NO: 5562 - protein, 66 aa, Homo sapiens
MQPLTKDAGMSLSSVTLASALQVRGEALSEEEIWSLLFLAAEQLLEDLRNAPAALRAPALHPADHV

SEQ ID NO: 5563 - protein, 1309 aa, Homo sapiens
MQPLTKDAGMSLSSVTLASALQVRGEALSEEEIWSLLFLAAEQLLEDLRNDSSDYVVCPWSALLSAAGSLSFQGRVSHIEAAPFKAPELLQGQSEDEQPDASQMHVYSLGMTLYWSAGFHVPPHQPLQLCEPLHSILLTMCEDQPHRRCTLQSVLEACRVHEKEVSVYPAPAGLHIRRLVGLVLGTISEVEKRVVEESSSVQQNRSYLLRKRLRGTSSESPAAQAPECLHPCRVSERSTETQSSPEPHWSTLTHSHCSLLVNRALPGADPQDQQAGRRLSSGSVHSAADSSWPTTPSQRGFLQRRSKFSRPEFILLAGEAPMTLHLPGSVVTKKGKSYLALRDLCVVLLNGQHLEVKCDVESTVGAVFNAVTSFANLEELTYFGLAYMKSKEFFFLDSETRLCKIAPEGWREQPQKTSMNTFTLFLRIKFFVSHYGLLQHSLTRHQFYLQLRKDILEERLYCNEEILLQLGVLALQAEFGNYPKEQVESKPYFHVEDYIPASLIERMTALRVQVEVSEMHRLSSALWGEDAELKFLRVTQQLPEYGVLVHQVFSEKRRPEEEMALGICAKGVIVYEVKNNSRIAMLRFQWRETGKISTYQKKFTITSSVTGKKHTFVTDSAKTSKYLLDLCSAQHGFNAQMGSGQPSHVLFDHDKFVQMANLSPAHQARSKPLIWIQRLSCSENELFVSRLQGAAGGLLSTSMDNFNVDGSKEAGAEGIGRSPCTGREQLKSACVIQKPMTWDSLSGPPVQSMHAGSKNNRRKSFIAEPGREIVRVTLKRDPHRGFGFVINEGEYSGQADPGIFISSIIPGGPAEKAKTIKPGGQILALNHISLEGFTFNMAVRMIQNSPDNIELIISQSKGVGGNNPDEEKNSTANSGVSSTDILSFGYQGSLLSHTQDQDRNTEELDMAGVQSLVPRLRHQLSFLPLKGAGSSCPPSPPEISAGEIYFVELVKEDGTLGFSVTGGINTSVPYGGIYVKSIVPGGPAAKEGQILQGDRLLQVDGVILCGLTHKQAVQCLTGPGQVARLVLERRVPRSTQQCPSANDSMGDERTAVSLVTALPGRPSSCVSVTDGPKFEVKLKKNANGLGFSFVQMEKESCSHLKSDLVRIKRLFPGQPAEENGAIAAGDIILAVNGRSTEGLIFQEVLHLLRGAPQEVTLLLCRPPPGALPELEQEWQTPELSADKEFTRATCTDSCTSPILDQEDSWRDSASPDAGEGLGLRPESSQKAIREAQWGQNRERPWASSLTHSPESHPHLCKLHQERDESTLATSLEKDVRQNCYSVCDIMRLGRYSFSSPLTRLSTDIF

SEQ ID NO: 5564 - protein, 1397 aa, Homo sapiens
MQPLTKDAGMSLSSVTLASALQVRGEALSEEEIWSLLFLAAEQLLEDLRNDSSDYVVCPWSALLSAAGSLSFQGRVSHIEAAPFKAPELLQGQSEDEQPDASQMHVYSLGMTLYWSAGFHVPPHQPLQLCEPLHSILLTMCEDQPHRRCTLQSVLEACRVHEKEVSVYPAPAGLHIRRLVGLVLGTISEVEKRVVEESSSVQQNRSYLLRKRLRGTSSESPAAQAPECLHPCRVSERSTETQSSPEPHWSTLTHSHCSLLVNRALPGADPQDQQAGRRLSSGSVHSAADSSWPTTPSQRGFLQRRSKFSRPEFILLAGEAPMTLHLPGSVVTKKGKSYLALRDLCVVLLNGQHLEVKCDVESTVGAVFNAVTSFANLEELTYFGLAYMKSKEFFFLDSETRLCKIAPEGWREQPQKTSMNTFTLFLRIKFFVSHYGLLQHSLTRHQFYLQLRKDILEERLYCNEEILLQLGVLALQAEFGNYPKEQVESKPYFHVEDYIPASLIERMTALRVQVEVSEMHRLSSALWGEDAELKFLRVTQQLPEYGVLVHQVFSEKRRPEEEMALGICAKGVIVYEVKNNSRIAMLRFQWRETGKISTYQKKFTITSSVTGKKHTFVTDSAKTSKYLLDLCSAQHGFNAQMGSGQPSHVLFDHDKFVQMANLSPAHQARSKPLIWIQRLSCSENELFVSRLQGAAGGLLSTSMDNFNVDGSKEAGAEGIGRSPCTGREQLKSACVIQKPMTWDSLSGPPVQSMHAGSKNNRRKSFIAEPGREIVRVTLKRDPHRGFGFVINEGEYSGQADPGIFISSIIPGGPAEKAKTIKPGGQILALNHISLEGFTFNMAVRMIQNSPDNIELIISQSKGVGGNNPDEEKNSTANSGVSSTDILSFGYQGSLLSHTQDQDRNTEELDMAGVQSLVPRLRHQLSFLPLKGAGSSCPPSPPEISAGEIYFVELVKEDGTLGFSVTGGINTSVPYGGIYVKSIVPGGPAAKEGQILQGDRLLQVDGVILCGLTHKQAVQCLTGPGQVARLVLERRVPRSTQQCPSANDSMGDERTAVSLVTALPGRPSSCVSVTDGPKFEVKLKKNANGLGFSFVQMEKESCSHLKSDLVRIKRLFPGQPAEENGAIAAGDIILAVNGRSTEGLIFQEVLHLLRGAPQEVTLLLCRPPPGALPELEQEWQTPELSADKEFTRATCTDSCTSPILDQEDSWRDSASPDAGEGLGLRPESSQKAIREAQWGQNRERPWASSLTHSPESHPHLCKLHQERDESTLATSLEKDVRQNCYSVCDIMRLGSPELDGEDGEGDMYHPCGAPSPTSEDEEYLTINSTCQGQLPCEECLEADSGTIPLPQFCSWGTVPESLPPEESPESGSEWEDLEEPVALEYGALRSLSFGGLNV

SEQ ID NO: 5565 - protein, 325 aa, Homo sapiens
MVCGSPGGMLLLRAGLLALAALCLLRVPGARAAACEPVRIPLCKSLPWNMTKMPNHLHHSTQANAILAIEQFEGLLGTHCSPDLLFFLCAMYAPICTIDFQHEPIKPCKSVCERARQGCEPILIKYRHSWPENLACEELPVYDRGVCISPEAIVTADGADFPMDSSNGNCRGASSERCKCKPIRATQKTYFRNNYNYVIRAKVKEIKTKCHDVTAVVEVKEILKSSLVNIPRDTVNLYTSSGCLCPPLNVNEEYIIMGYEDEERSRLLLVEGSIAEKWKDRLGKKVKRWDMKLRHLGLSKSDSSNSDSTQSQKSGRNSNPRQARN

SEQ ID NO: 5566 - protein, 129 aa, Homo sapiens
MKTLQFFFLFCCWKAICCNSCELTNITIAIEKEECRFCISINTTWCAGYCYTRDLVYKDPARPKIQKTCTFKELVYETVRVPGCAHHADSLYTYPVATQCHCGKCDSDSTDCTVRGLGPSYCSFGEMKE

SEQ ID NO: 5567 - protein, 129 aa, Homo sapiens; identical to SEQ ID NO: 5566

SEQ ID NO: 5568 - protein, 129 aa, Homo sapiens; identical to SEQ ID NO: 5566

SEQ ID NO: 5569 - protein, 695 aa, Homo sapiens
MALLLVSLLAFLSLGSGCHHRICHCSNRVFLCQESKVTEIPSDLPRNAIELRFVLTKLRVIQKGAFSGFGDLEKIEISQNDVLEVIEADVFSNLPKLHEIRIEKANNLLYINPEAFQNLPNLQYLLISNTGIKHLPDVHKIHSLQKVLLDIQDNINIHTIERNSFVGLSFESVILWLNKNGIQEIHNCAFNGTQLDELNLSDNNNLEELPNDVFHGASGPVILDISRTRIHSLPSYGLENLKKLRARSTYNLKKLPTLEKLVALMEASLTYPSHCCAFANWRRQISELHPICNKSILRQEVDYMTQARGQRSSLAEDNESSYSRGFDMTYTEFDYDLCNEVVDVTCSPKPDAFNPCEDIMGYNILRVLIWFISILAITGNIIVLVILTTSQYKLTVPRFLMCNLAFADLCIGIYLLLIASVDIHTKSQYHNYAIDWQTGAGCDAAGFFTVFASELSVYTLTAITLERWHTITHAMQLDCKVQLRHAASVMVMGWIFAFAAALFPIFGISSYMKVSICLPMDIDSPLSQLYVMSLLVLNVLAFVVICGCYIHIYLTVRNPNIVSSSSDTRIAKRMAMLIFTDFLCMAPISFFAISASLKVPLITVSKAKILLVLFHPINSCANPFLYAIFTKNFRRDFFILLSKCGCYEMQAQIYRTETSSTVHNTHPRNGHCSSAPRVTSGSTYILVPLSHLAQN

SEQ ID NO: 5570 - protein, 278 aa, Homo sapiens
MALLLVSLLAFLSLGSGCHHRICHCSNRVFLCQESKVTEIPSDLPRNAIELRFVLTKLRVIQKGAFSGFGDLEKIEISQNDVLEVIEADVFSNLPKLHEIRIEKANNLLYINPEAFQNLPNLQYLLISNTGIKHLPDVHKIHSLQKVLLDIQDNINIHTIERNSFVGLSFESVILWLNKNGIQEIHNCAFNGTQLDELNLSDNNNLEELPNDVFHGASGPVILSELHPICNKSILRQEVDYMTQARGQRSSLAEDNESSYSRGFDMTYTEFDYDLCNE

SEQ ID NO: 5571 - protein, 669 aa, Homo sapiens
MALLLVSLLAFLSLGSGCHHRICHCSNRVFLCQESKVTEIPSDLPRNAIELRFVLTKLRVIQKGAFSGFGDLEKIEISQNDVLEVIEADVFSNLPKLHEIRIEKANNLLYINPEAFQNLPNLQYLLISNTGIKHLPDVHKIHSLQKVLLWLNKNGIQEIHNCAFNGTQLDELNLSDNNNLEELPNDVFHGASGPVILDISRTRIHSLPSYGLENLKKLRARSTYNLKKLPTLEKLVALMEASLTYPSHCCAFANWRRQISELHPICNKSILRQEVDYMTQARGQRSSLAEDNESSYSRGFDMTYTEFDYDLCNEVVDVTCSPKPDAFNPCEDIMGYNILRVLIWFISILAITGNIIVLVILTTSQYKLTVPRFLMCNLAFADLCIGIYLLLIASVDIHTKSQYHNYAIDWQTGAGCDAAGFFTVFASELSVYTLTAITLERWHTITHAMQLDCKVQLRHAASVMVMGWIFAFAAALFPIFGISSYMKVSICLPMDIDSPLSQLYVMSLLVLNVLAFVVICGCYIHIYLTVRNPNIVSSSSDTRIAKRMAMLIFTDFLCMAPISFFAISASLKVPLITVSKAKILLVLFHPINSCANPFLYAIFTKNFRRDFFILLSKCGCYEMQAQIYRTETSSTVHNTHPRNGHCSSAPRVTSGSTYILVPLSHLAQN

SEQ ID NO: 5572 - protein, 152 aa, Homo sapiens
MALLLVSLLAFLSLGSGCHHRICHCSNRVFLCQESKVTEIPSDLPRNAIELRFVLTKLRVIQKGAFSGFGDLEKIEISQNDVLEVIEADVFSNLPKLHEIRIEKANNLLYINPEAFQNLPNLQYLSFSSFVLENAKVENGDHRAFSDRTNAL

SEQ ID NO: 5573 - protein, 215 aa, Homo sapiens
GPVCGLDGKTYRNECALLKARCKEQPELEVQYQGRCKKTCRDVFCPGSSTCVVDQTNNAYCVTCNRICPEPASSEQYLCGNDGVTYSSACHLRKATCLLGRSIGLAYEGKCITKSCEDIQCTGGKKCLWDFKVGRGRCSLCDELCPDSKSDEPVCASDNATYASECAMKEAACSSGVLLEVKHSGSCNSISEDTEEEEEDEDQDYSFPISSILEW

SEQ ID NO: 5574 - protein, 344 aa, Homo sapiens
MVRARHQPGGLCLLLLLLCQFMEDRSAQAGNCWLRQAKNGRCQVLYKTELSKEECCSTGRLSTSWTEEDVNDNTLFKWMIFNGGAPNCIPCKETCENVDCGPGKKCRMNKKNKPRCVCAPDCSNITWKGPVCGLDGKTYRNECALLKARCKEQPELEVQYQGRCKKTCRDVFCPGSSTCVVDQTNNAYCVTCNRICPEPASSEQYLCGNDGVTYSSACHLRKATCLLGRSIGLAYEGKCIKAKSCEDIQCTGGKKCLWDFKVGRGRCSLCDELCPDSKSDEPVCASDNATYASECAMKEAACSSGVLLEVKHSGSCNSISEDTEEEEEDEDQDYSFPISSILEW

SEQ ID NO: 5575 - protein, 317 aa, Homo sapiens
MVRARHQPGGLCLLLLLLCQFMEDRSAQAGNCWLRQAKNGRCQVLYKTELSKEECCSTGRLSTSWTEEDVNDNTLFKWMIFNGGAPNCIPCKETCENVDCGPGKKCRMNKKNKPRCVCAPDCSNITWKGPVCGLDGKTYRNECALLKARCKEQPELEVQYQGRCKKTCRDVFCPGSSTCVVDQTNNAYCVTCNRICPEPASSEQYLCGNDGVTYSSACHLRKATCLLGRSIGLAYEGKCIKAKSCEDIQCTGGKKCLWDFKVGRGRCSLCDELCPDSKSDEPVCASDNATYASECAMKEAACSSGVLLEVKHSGSCN

SEQ ID NO: 5576 - protein, 102 aa, Homo sapiens
  VARIANT 1: note = misc_feature - Xaa can be any naturally occurring amino acid
XSACHLRKATCLLGRSIGLAYEGKCITKSCEDIQCTGGKKCLWDFKVGRGRCSLCDELCPDSKSDEPVCASDNATYASECAMKEAACSSGVLLEVKHSGSCN

SEQ ID NO: 5577 - protein, 140 aa, Homo sapiens
MWKRWLALALALVAVAWVRAEEELRSKSKICANVFCGAGRECAVTEKGEPTCLCIEQCKPHKRPVCGSNGKTYLNHCELHRDACLTGSKIQVDYDGHCKEKKSVSPSASPVVCYQSNRDELRRRIIQWLEAEIIPDGWFS

SEQ ID NO: 5578 - protein, 308 aa, Homo sapiens
MWKRWLALALALVAVAWVRAEEELRSKSKICANVFCGAGRECAVTEKGEPTCLCIEQCKPHKRPVCGSNGKTYLNHCELHRDACLTGSKIQVDYDGHCKEKKSVSPSASPVVCYQSNRDELRRRIIQWLEAEIIPDGWFSKGSNYSEILDKYFKNFDNGDSRLDSSEFLKFVEQNETAINITTYPDQENNKLLRGLCVDALIELSDENADWKLSFQEFLKCLNPSFNPPEKKCALEDETYADGAETEVDCNRCVCACGNWVCTAMTCDGKNQKGAQTQTEEEMTRYVQELQKHQETAEKTKRVSTKEI

SEQ ID NO: 5579 - protein, 273 aa, Homo sapiens
MWKRWLALALALVAVAWVRAEQCKPHKRPVCGSNGKTYLNHCELHRDACLTGSKIQVDYDGHCKEKKSVSPSASPVVCYQSNRDELRRRIIQWLEAEIIPDGWFSKGSNYSEILDKYFKNFDNGDSRLDSSEFLKFVEQNETAINITTYPDQENNKLLRGLCVDALIELSDENADWKLSFQEFLKCLNPSFNPPEKKCALEDETYADGAETEVDCNRCVCACGNWVCTAMTCDGKNQKGAQTQTEEEMTRYVQELQKHQETAEKTKRVSTKEI

SEQ ID NO: 5580 - protein, 20 aa, Homo sapiens
  VARIANT 1: note = misc_feature - Xaa can be any naturally occurring amino acid
XSFQEFLKCLNPSFNPPEKK

SEQ ID NO: 5581 - protein, 84 aa, Homo sapiens
MLGGRPRCECAPDCSGLPARLQVCGSDGATYRDECELRAARCRGHPDLSVMYRGRCRKSCEHVVCPRPQSCVVDQTGSAHCVVC

SEQ ID NO: 5582 - protein, 263 aa, Homo sapiens
MRPGAPGPLWPLPWGALAWAVGFVSSMGSGNPAPGGVCWLQQGQEATCSLVLQTDVTRAECCASGNIDTAWSNLTHPGNKINLLGFLGLVHCLPCKDSCDGVECGPGKACRMLGGRPRCECAPDCSGLPARLQVCGSDGATYRDECELRAARCRGHPDLSVMYRGRCRKSCEHVVCPRPQSCVVDQTGSAHCVVCRAAPCPVPSSPGQELCGNNNVTYISSCHMRQATCFLGRSIGVRHAGSCAGTPEEPPGGESAEEEENFV

SEQ ID NO: 5583 - protein, 92 aa, Homo sapiens
MRQATCFLGRSIGVRHAGSCAGADAGRGHRPVLGAGEPPALRPQCSYRPLQAPLRSRQVVSLQKRKRTSCEPAGQAWAWCPRPPIIPCYLLP

SEQ ID NO: 5584 - protein, 40 aa, Homo sapiens
MRQATCFLGRSIGVRHAGSCAGTPEEPPGGESAEEEENFV

SEQ ID NO: 5585 - protein, 40 aa, Homo sapiens; identical to SEQ ID NO: 5584

SEQ ID NO: 5586 - protein, 40 aa, Homo sapiens; identical to SEQ ID NO: 5584

SEQ ID NO: 5587 - protein, 673 aa, Homo sapiens
MKPGGFWLHLTLLGASLPAALGWMDPGTSRGPDVGVGESQAEEPRSFEVTRREGLSSHNELLASCGKKFCSRGSRCVLSLAPEDRVSVTTVTVGLSTVLTCAVHGDLRPPIIWKRNGLTLNFLDLEDINDFGEDDSLYITKVTTIHMGNYTCHASGHEQLFQTHVLQVNVPPVIRVYPESQAQEPGVAASLRCHAEGIPMPRITWLKNGVDVSTQMSKQLSLLANGSELHISSVRYEDTGAYTCIAKNEVGVDEDISSLFIEDSARKTLANILWREEGLSVGNMFYVFSDDGIIVIHPVDCEIQRHLKPTEKIFMSYEEICPQREKNATQPCQWVSAVNVRNRYIYVAQPALSRVLVVDIQAQKVLQSIGVDPLPAKLSYDKSHDQVWVLSWGDVHKSRPSLQVITEASTGQSQHLIRTPFAGVDDFFIPPTNLIINHIRFGFIFNKSDPAVHKVDLETMMPLKTIGLHHHGCVPQAMAHTHLGGYFFIQCRQDSPASAARQLLVDSVTDSVLGPNGDVTGTPHTSPDGRFIVSAAADSPWLHVQEITVRGEIQTLYDLQINSGISDLAFQRSFTESNQYNIYAALHTEPDLLFLELSTGKVGMLKNLKEPPAGPAQPWGGTHRIMRDSGLFGQYLLTPARESLFLINGRQNTLRCEVSGIKGGTTVVWVGEV

SEQ ID NO: 5588 - protein, 842 aa, Homo sapiens
MKPGGFWLHLTLLGASLPAALGWMDPGTSRGPDVGVGESQAEEPRSFEVTRREGLSSHNELLASCGKKFCSRGSRCVLSRKTGEPECQCLEACRPSYVPVCGSDGRFYENHCKLHRAACLLGKRITVIHSKDCFLKGDTCTMAGYARLKNVLLALQTRLQPLQEGDSRQDPASQKRLLVESLFRDLDADGNGHLSSSELAQHVLKKQDLDEDLLGCSPGDLLRFDDYNSDSSLTLREFYMAFQVVQLSLAPEDRVSVTTVTVGLSTVLTCAVHGDLRPPIIWKRNGLTLNFLDLEDINDFGEDDSLYITKVTTIHMGNYTCHASGHEQLFQTHVLQVNVPPVIRVYPESQAQEPGVAASLRCHAEGIPMPRITWLKNGVDVSTQMSKQLSLLANGSELHISSVRYEDTGAYTCIAKNEVGVDEDISSLFIEDSARKTLANILWREEGLSVGNMFYVFSDDGIIVIHPVDCEIQRHLKPTEKIFMSYEEICPQREKNATQPCQWVSAVNVRNRYIYVAQPALSRVLVVDIQAQKVLQSIGVDPLPAKLSYDKSHDQVWVLSWGDVHKSRPSLQVITEASTGQSQHLIRTPFAGVDDFFIPPTNLIINHIRFGFIFNKSDPAVHKVDLETMMPLKTIGLHHHGCVPQAMAHTHLGGYFFIQCRQDSPASAARQLLVDSVTDSVLGPNGDVTGTPHTSPDGRFIVSAAADSPWLHVQEITVRGEIQTLYDLQINSGISDLAFQRSFTESNQYNIYAALHTEPDLLFLELSTGKVGMLKNLKEPPAGPAQPWGGTHRIMRDSGLFGQYLLTPARESLFLINGRQNTLRCEVSGIKGGTTVVWVGEV

SEQ ID NO: 5589 - protein, 157 aa, Homo sapiens
MNPVPQMEMQKSPVFCVAHAGSCRPELFLFGHLGSSWGLDLKEEEPRSFEVTRREGLSSHNELLASCGKKFCSRGSRCVLSRKTGEPECQCLEACRPSYVPVCGSDGRFYENHCKLHRAACLLGKRITVIHSKDCFLKGDTCTMAGYARLKNVLLAL

SEQ ID NO: 5590 - protein, 846 aa, Homo sapiens
MFKCWSVVLVLGFIFLESEGRPTKEGGYGLKSYQPLMRLRHKEKNQESSRVKGFMIQDGPFGSCENKYCGLGRHCVTSRETGQAECACMDLCKRHYKPVCGSDGEFYENHCEVHRAACLKKQKITIVHNEDCFFKGDKCKTTEYSKMKNMLLDLQNQKYIMQENENPNGDDISRKKLLVDQMFKYFDADSNGLVDINELTQVIKQEELGKDLFDCTLYVLLKYDDFNADKHLALEEFYRAFQVIQLSLPEDQKLSITAATVGQSAVLSCAIQGTLRPPIIWKRNNIILNNLDLEDINDFGDDGSLYITKVTTTHVGNYTCYADGYEQVYQTHIFQVNVPPVIRVYPESQAREPGVTASLRCHAEGIPKPQLGWLKNGIDITPKLSKQLTLQANGSEVHISNVRYEDTGAYTCIAKNEAGVDEDISSLFVEDSARKTLANILWREEGLGIGNMFYVFYEDGIKVIQPIECEFQRHIKPSEKLLGFQDEVCPKAEGDEVQRCVWASAVNVKDKFIYVAQPTLDRVLIVDVQSQKVVQAVSTDPVPVKLHYDKSHDQVWVLSWGTLEKTSPTLQVITLASGNVPHHTIHTQPVGKQFDRVDDFFIPTTTLIITHMRFGFILHKDEAALQKIDLETMSYIKTINLKDYKCVPQSLAYTHLGGYYFIGCKPDSTGAVSPQVMVDGVTDSVIGFNSDVTGTPYVSPDGHYLVSINDVKGLVRVQYITIRGEIQEAFDIYTNLHISDLAFQPSFTEAHQYNIYGSSSTQTDVLFVELSSGKVKMIKSLKEPLKAEEWPWNRKNRQIQDSGLFGQYLMTPSKDSLFILDGRLNKLNCEITEVEKGNTVIWVGDA

SEQ ID NO: 5591 - protein, 837 aa, Homo sapiens
MFKCWSVVLVLGFIFLESEGRPTKEGGYGLKSYQPLMRLRHKEKNQESSRVKGFMIQDGPFGSCENKYCGLGRHCVTSRETGQAECACMDLCKRHYKPVCGSDGEFYENHCEVHRAACLKKQKITIVHNEDCFFKGDKCKTTEYSKMKNMLLDLQNQKYIMQENENPNGDDISRKKLLVDQMFKYFDADSNGLVDINELTQVIKQEELGKDLFDCTLYVLLKYDDFNADKHLALEEFYRAFQVIQLSLPEDQKLSITAATVGQSAVLSCAIQGTLRPPIIWKRNNIILNNLDLEDINDFGDDGSLYITKVTTTHVGNYTCYADGYEQVYQTHIFQVNVPPVIRVYPESQAREPGVTASLRCHAEGIPKPQLGWLKNGIDITPKLSKQLTLQANGSEVHISNVRYEDTGAYTCIAKNEAGVDEDISSLFVEDSARKTRLGIGNMFYVFYEDGIKVIQPIECEFQRHIKPSEKLLGFQDEVCPKAEGDEVQRCVWASAVNVKDKFIYVAQPTLDRVLIVDVQSQKVVQAVSTDPVPVKLHYDKSHDQVWVLSWGTLEKTSPTLQVITLASGNVPHHTIHTQPVGKQFDRVDDFFIPTTTLIITHMRFGFILHKDEAALQKIDLETMSYIKTINLKDYKCVPQSLAYTHLGGYYFIGCKPDSTGAVSPQVMVDGVTDSVIGFNSDVTGTPYVSPDGHYLVSINDVKGLVRVQYITIRGEIQEAFDIYTNLHISDLAFQPSFTEAHQYNIYGSSSTQTDVLFVELSSGKVKMIKSLKEPLKAEEWPWNRKNRQIQDSGLFGQYLMTPSKDSLFILDGRLNKLNCEITEVEKGNTVIWVGDA

SEQ ID NO: 5592 - protein, 847 aa, Homo sapiens
MFKCWSVVLVLGFIFLESEGRPTKEGGYGLKSYQPLMRLRHKQEKNQESSRVKGFMIQDGPFGSCENKYCGLGRHCVTSRETGQAECACMDLCKRHYKPVCGSDGEFYENHCEVHRAACLKKQKITIVHNEDCFFKGDKCKTTEYSKMKNMLLDLQNQKYIMQENENPNGDDISRKKLLVDQMFKYFDADSNGLVDINELTQVIKQEELGKDLFDCTLYVLLKYDDFNADKHLALEEFYRAFQVIQLSLPEDQKLSITAATVGQSAVLSCAIQGTLRPPIIWKRNNIILNNLDLEDINDFGDDGSLYITKVTTTHVGNYTCYADGYEQVYQTHIFQVNVPPVIRVYPESQAREPGVTASLRCHAEGIPKPQLGWLKNGIDITPKLSKQLTLQANGSEVHISNVRYEDTGAYTCIAKNEAGVDEDISSLFVEDSARKTLANILWREEGLGIGNMFYVFYEDGIKVIQPIECEFQRHIKPSEKLLGFQDEVCPKAEGDEVQRCVWASAVNVKDKFIYVAQPTLDRVLIVDVQSQKVVQAVSTDPVPVKLHYDKSHDQVWVLSWGTLEKTSPTLQVITLASGNVPHHTIHTQPVGKQFDRVDDFFIPTTTLIITHMRFGFILHKDEAALQKIDLETMSYIKTINLKDYKCVPQSLAYTHLGGYYFIGCKPDSTGAVSPQVMVDGVTDSVIGFNSDVTGTPYVSPDGHYLVSINDVKGLVRVQYITIRGEIQEAFDIYTNLHISDLAFQPSFTEAHQYNIYGSSSTQTDVLFVELSSGKVKMIKSLKEPLKAEEWPWNRKNRQIQDSGLFGQYLMTPSKDSLFILDGRLNKLNCEITEVEKGNTVIWVGDA

SEQ ID NO: 5593 - protein, 138 aa, Homo sapiens
MSSSRVGLRLAACLLNVSEAGRKYIVENIAKAALLDKNGKKHPQVSVLNIFSDQDYKRSVITIATSVDKLGLAEDLVLHVPGCSVFLFGEADLPEKRSLVQRRKQLGWFTRRDFSALQPDLGAAPSQRCGLTACFRAL

SEQ ID NO: 5594 - protein, 147 aa, Homo sapiens
MSSSRVGLRLAACLLNVSEAGRKYIVENIAKAALLDKNGKKHPQVSVLNIFSDQDYKRSVITIATSVDKLGLAEDLVLHVPGCSVFLFGEADLPEKRSLVQRRKQLGWFTRRDFSALQPDLGAAPSQRCGLTGSEHGFCFALFFFFF

SEQ ID NO: 5595 - protein, 114 aa, Homo sapiens
MSSSRVGLRLAACLLNVSEAGRKYIVENIAKAALLDKNGKKHPQVSVLNIFSDQDYKRSVITIATSVDKLGSSVLAACLEAFQAIDMEVQEGIHPCLGAVDLIPIYPLSGVTVE

SEQ ID NO: 5596 - protein, 77 aa, Homo sapiens
MSSSRVGLRLAACLLNVSEAGRKYIVENIAKAALLDKNGKKHPQVSVLNIFSDQDYKRSVITIATSVDKLVDKRNQA

SEQ ID NO: 5597 - protein, 466 aa, Homo sapiens
MRAPGMRSRPAGPALLLLLLFLGAAESVRRAQPPRRYTPDWPSLDSRPLPAWFDEAKFGVFIHWGVFSVPAWGSEWFWWHWQGEGRPQYQRFMRDNYPPGFSYADFGPQFTARFFHPEEWADLFQAAGAKYVVLTTKHHEGFTNWPSPVSWNWNSKDVGPHRDLVGELGTALRKRNIRYGLYHSLLEWFHPLYLLDKKNGFKTQHFVSAKTMPELYDLVNSYKPDLIWSDGEWECPDTYWNSTNFLSWLYNDSPVKDEVVVNDRWGQNCSCHHGGYYNCEDKFKPQSLPDHKWEMCTSIDKFSWGYRRDMALSDVTEESEIISELVQTVSLGGNYLLNIGPTKDGLIVPIFQERLLAVGKWLSINGEAIYASKPWRVQWEKNTTSVWYTSKGSAVYAIFLHWPENGVLNLESPITTSTTKITMLGIQGDLKWSTDPDKGLFISLPQLPPSAVPAEFAWTIKLTGVK

SEQ ID NO: 5598 - protein, 467 aa, Homo sapiens
MRPQELPRLAFPLLLLLLLLLPPPPCPAHSATRFDPTWESLDARQLPAWFDQAKFGIFIHWGVFSVPSFGSEWFWWYWQKEKIPKYVEFMKDNYPPSFKYEDFGPLFTAKFFNANQWADIFQASGAKYIVLTSKHHEGFTLWGSEYSWNWNAIDEGPKRDIVKELEVAIRNRTDLRFGLYYSLFEWFHPLFLEDESSSFHKRQFPVSKTLPELYELVNNYQPEVLWSDGDGGAPDQYWNSTGFLAWLYNESPVRGTVVTNDRWGAGSICKHGGFYTCSDRYNPGHLLPHKWENCMTIDKLSWGYRREAGISDYLTIEELVKQLVETVSCGGNLLMNIGPTLDGTISVVFEERLRQMGSWLKVNGEAIYETHTWRSQNDTVTPDVWYTSKPKEKLVYAIFLKWPTSGQLFLGHPKAILGATEVKLLGHGQPLNWISLEQNGIMVELPQLTIHQMPCKWGWALALTNVI

SEQ ID NO: 5599 - protein, 109 aa, Homo sapiens
QLVETVSCGGNLLMNIGPTLDGTISVVFEERLRQMGSWLKVNGEAIYETHTWRSQNDTVTPDVWYTSKPKEKLVYAIFLKWPTSGQLFLGHPKAILGATEVRGNFTLFL

SEQ ID NO: 5600 - protein, 69 aa, Homo sapiens
KPAHLNANDWATNGVGRKVSHSYGYGLWTQAPWWPWPRIGPQWPPSGSASSTSSPSPKTSGNGSRCGRP

SEQ ID NO: 5601 - protein, 69 aa, Homo sapiens
MELRPWLLWVVAATGTLVLLAADAQGQKVFTNTWAVRIPGGPAVANSVARKHGFLNLGQIFGDYYHFWH

SEQ ID NO: 5602 - protein, 794 aa, Homo sapiens
MELRPWLLWVVAATGTLVLLAADAQGQKVFTNTWAVRIPGGPAVANSVARKHGFLNLGQIFGDYYHFWHRGVTKRSLSPHRPRHSRLQREPQVQWLEQQVAKRRTKRDVYQEPTDPKFPQQWYLSGVTQRDLNVKAAWAQGYTGHGIVVSILDDGIEKNHPDLAGNYDPGASFDVNDQDPDPQPRYTQMNDNRHGTRCAGEVAAVANNGVCGVGVAYNARIGGVRMLDGEVTDAVEARSLGLNPNHIHIYSASWGPEDDGKTVDGPARLAEEAFFRGVSQGRGGLGSIFVWASGNGGREHDSCNCDGYTNSIYTLSISSATQFGNVPWYSEACSSTLATTYSSGNQNEKQIVTTDLRQKCTESHTGTSASAPLAAGIIALTLEANKNLTWRDMQHLVVQTSKPAHLNANDWATNGVGRKVSHSYGYGLLDAGAMVALAQNWTTVAPQRKCIIDILTEPKDIGKRLEVRKTVTACLGEPNHITRLEHAQARLTLSYNRRGDLAIHLVSPMGTRSTLLAARPHDYSADGFNDWAFMTTHSWDEDPSGEWVLEIENTSEANNYGTLTKFTLVLYGTAPEGLPVPPESSGCKTLTSSQACVVCEEGFSLHQKSCVQHCPPGFAPQVLDTHYSTENDVETIRASVCAPCHASCATCQGPALTDCLSCPSHASLDPVEQTCSRQSQSSRESPPQQQPPRLPPEVEAGQRLRAGLLPSHLPEVVAGLSCAFIVLVFVTVFLVLQLRSGFSFRGVKVYTMDRGLISYKGLPPEAWQEECPSDSEEDEGRGERTAFIKDQSAL

SEQ ID NO: 5603 - protein, 794 aa, Homo sapiens; identical to SEQ ID NO: 5602

SEQ ID NO: 5604 - protein, 794 aa, Homo sapiens; identical to SEQ ID NO: 5602

SEQ ID NO: 5605 - protein, 175 aa, Homo sapiens
MELRPWLLWVVAATGTLVLLAADAQGQKVFTNTWAVRIPGGPAVANSVARKHGFLNLGQIFGDYYHFWHRGVTKRSLSPHRPRHSRLQREPQWLEQQVAKRRTKRDVYQEPTDPKFPQQWYLSGVTQRDLNVKAAWAQGYTGHGIVVSILDDGIEKNHPDLAGNYDPGASFDVND

SEQ ID NO: 5606 - protein, 216 aa, Homo sapiens
PNHIHIYSASWGPEDDGKTVDGPARLAEEAFFRGVSQGRGGLGSIFVWASGNGGREHDSCNCDGYTNSIYTLSISSATQFGNVPWYSEACSSTLATTYSSGNQNEKQIVTTDLRQKCTESHTGTSASAPLAAGIIALTLEANKNLTWRDMQHLVVQTSKPAHLNANDWATNGVGRKVSHSYGYGLLDAGAMVALAQNWTTVAPQRKCIIDILTEPK

SEQ ID NO: 5607 - protein, 451 aa, Homo sapiens
MVELGKFERKEFKSSSLQDGHTKMEEAPTHLNSFLKKEGLTFNRKRKWELDSYPIMLWWSPLTGETGRLGQCGADACFFTINRTYLHHHMTKAFLFYGTDFNIDSLPLPRKAHHDWAVFHEESPKNNYKLFHKPVITLFNYTATFSRHSHLPLTTQYLESIEVLKSLRYLVPLQSKNKLRKRLAPLVYVQSDCDPPSDRDSYVRELMTYIEVDSYGECLRNKDLPQQLKNPASMDADGFYRIIAQYKFILAFENAVCDDYITEKFWRPLKLGVVPVYYGSPSITDWLPSNKSAILVSEFSHPRELASYIRRLDSDDRLYEAYVEWKLKGEISNQRLLTALRERKWGVQDVNQDNYIDAFECMVCTKVWANIRLQEKGLPPKRWEAEDTHLSCPEPTVFAFSPLRTPPLSSLREMWISSFEQSKKEAQALRWLVDRNQNFSSQEFWGLVFKD

SEQ ID NO: 5608 - protein, 451 aa, Homo sapiens; identical to SEQ ID NO: 5607

SEQ ID NO: 5609 - protein, 479 aa, Homo sapiens
MVRIQRRKLLASCLCVTATVFLLVTLQVMVELGKFERKEFKSSSLQDGHTKMEEAPTHLNSFLKKEGLTFNRKRKWELDSYPIMLWWSPLTGETGRLGQCGADACFFTINRTYLHHHMTKAFLFYGTDFNIDSLPLPRKAHHDWAVFHEESPKNNYKLFHKPVITLFNYTATFSRHSHLPLTTQYLESIEVLKSLRYLVPLQSKNKLRKRLAPLVYVQSDCDPPSDRDSYVRELMTYIEVDSYGECLRNKDLPQQLKNPASMDADGFYRIIAQYKFILAFENAVCDDYITEKFWRPLKLGVVPVYYGSPSITDWLPSNKSAILVSEFSHPRELASYIRRLDSDDRLYEAYVEWKLKGEISNQRLLTALRERKWGVQDVNQDNYIDAFECMVCTKVWANIRLQEKGLPPKRWEAEDTHLSCPEPTVFAFSPLRTPPLSSLREMWISSFEQSKKEAQALRWLVDRNQNFSSQEFWGLVFKD

SEQ ID NO: 5610 - protein, 492 aa, Homo sapiens
MAAGPIRVVLVLLGVLSVCAASGHGSVAEREAGGEAEWAEPWDGAVFRPPSALGAVGVTRSSGTPRPGREEAGDLPVLLWWSPGLFPHFPGDSERIECARGACVASRNRRALRDSRTRALLFYGTDFRASAAPLPRLAHQSWALLHEESPLNNFLLSHGPGIRLFNLTSTFSRHSDYPLSLQWLPGTAYLRRPVPPPMERAEWRRRGYAPLLYLQSHCDVPADRDRYVRELMRHIPVDSYGKCLQNRELPTARLQDTATATTEDPELLAFLSRYKFHLALENAICNDYMTEKLWRPMHLGAVPVYRGSPSVRDWMPNNHSVILIDDFESPQKLAEFIDFLDKNDEEYMKYLAYKQPGGITNQFLLDSLKHREWGVNDPLLPNYLNGFECFVCDYELARLDAEKAHAASPGDSPVFEPHIAQPSHMDCPVPTPGFGNVEEIPENDSWKEMWLQDYWQGLDQGEALTAMIHNNETEQTKFWDYLHEIFMKRQHL

SEQ ID NO: 5611 - protein, 476 aa, Homo sapiens
MAAGPIRVVLVLLGVLSVCAASGHGSVAEREAGGEAEWAEPWDGAVFRPPSALGAVGVTRSSGTPRPGREEAGDLPVLLWWSPGLFPHFPGDSERIECARGACVASRNRRALRDSRTRALLFYGTDFRASAAPLPRLAHQSWALLHEESPLNNFLLSHGPGIRLFNLTSTFSRHSDYPLSLQWLPGTAYLRRPVPPPMERAEWRRRGYAPLLYLQSHCDVPADRDRYVRELMRHIPVDSYGKCLQNRELPTARLQDTATATTEDPELLAFLSRYKFHLALENAICNDYMTEKLWRPMHLGAVPVYRGSPSVRDWMPNNHSVILIDDFESPQKLAEFIDFLDKNDEEYMKYLAYKQPGGITNQFLLDSLKHREWGVNDPLLPNYLNGFECFVCDYELARLDAEKAHAASPGDSPVFEPHIAQPSHMDCPVPTPGFGNVEEIPENDSSLVQVRDHCICLRFLWPHSEKGRTHNYAAVP

SEQ ID NO: 5612 - protein, 135 aa, Homo sapiens
MNLRKSGTLGHPGSLDETTYERLAEETLDSLAEFFEDLADKPYTFEDYDVSFGSGVLTVKLGGDLGTYVINKQTPNKQIWLSSPSSGPKRYDWTGKNWVYSHDGVSLHELLAAELTKALKTKLDLSSLAYSGKDA

SEQ ID NO: 5613 - protein, 135 aa, Homo sapiens; identical to SEQ ID NO: 5612

SEQ ID NO: 5614 - protein, 171 aa, Homo sapiens
MWTLGRRAVAGLLASPSPAQAQTLTRVPRPAELAPLCGRRGLRTDIDATCTPRRASSNQRGLNQIWNVKKQSVYLMNLRKSGTLGHPGSLDETTYERLAEETLDSLAEFFEDLADKPYTFEDYDVSFGSGVLTVKLGGDLGTYVINKQTPNKQIWLSSPSRLTWLLWLFHP

SEQ ID NO: 5615 - protein, 196 aa, Homo sapiens
MWTLGRRAVAGLLASPSPAQAQTLTRVPRPAELAPLCGRRGLRTDIDATCTPRRASSNQRGLNQIWNVKKQSVYLMNLRKSGTLGHPGSLDETTYERLAEETLDSLAEFFEDLADKPYTFEDYDVSFGSGVLTVKLGGDLGTYVINKQTPNKQIWLSSPSRYVVDLSVMTGLGKTGCTPTTACPSMSCWPQSSLKP

SEQ ID NO: 5616 - protein, 210 aa, Homo sapiens
MWTLGRRAVAGLLASPSPAQAQTLTRVPRPAELAPLCGRRGLRTDIDATCTPRRASSNQRGLNQIWNVKKQSVYLMNLRKSGTLGHPGSLDETTYERLAEETLDSLAEFFEDLADKPYTFEDYDVSFGSGVLTVKLGGDLGTYVINKQTPNKQIWLSSPSSGPKRYDWTGKNWVYSHDGVSLHELLAAELTKALKTKLDLSSLAYSGKDA

SEQ ID NO: 5617 - protein, 210 aa, Homo sapiens; identical to SEQ ID NO: 5616

SEQ ID NO: 5618 - protein, 196 aa, Homo sapiens
MWTLGRRAVAGLLASPSPAQAQTLTRVPRPAELAPLCGRRGLRTDIDATCTPRRASSNQRGLNQIWNVKKQSVYLMNLRKSGTLGHPGSLDETTYERLAEETLDSLAEFFEDLADKPYTFEDYDVSFGVNVAPVAVPSLRKSEDHALQTGHVLDYLCFCLLGFQSASEQRSNPDSVVHRMAGDGVWLCRPGWSAMA

SEQ ID NO: 5619 - protein, 91 aa, Homo sapiens
MWTLGRRAVAGLLASPSPAQAQTLTRVPRPAELAPLCGRRGLRTDIDATCTPRRASSNQRGLNQIWNVKKQSVYLMNLRKSGTLGHPGVVS

SEQ ID NO: 5620 - protein, 19 aa, Homo sapiens
MAELTVEVRGSNGAFYKAI

SEQ ID NO: 5621 - protein, 621 aa, Homo sapiens
MAELTVEVRGSNGAFYKGFIKDVHEDSLTVVFENNWQPERQVPFNEVRLPPPPDIKKEISEGDEVEVYSRANDQEPCGWWLAKVRMMKGEFYVIEYAACDATYNEIVTFERLRPVNQNKTVKKNTFFKCTVDVPEDLREACANENAHKDFKKAVGACRIFYHPETTQLMILSASEATVKRVNILSDMHLRSIRTKLMLMSRNEEATKHLECTKQLAAAFHEEFVVREDLMGLAIGTHGSNIQQARKVPGVTAIELDEDTGTFRIYGESADAVKKARGFLEFVEDFIQVPRNLVGKVIGKNGKVIQEIVDKSGVVRVRIEGDNENKLPREDGMVPFVFVGTKESIGNVQVLLEYHIAYLKEVEQLRMERLQIDEQLRQIGSRSYSGRGRGRRGPNYTSGYGTNSELSNPSETESERKDELSDWSLAGEDDRDSRHQRDSRRRPGGRGRSVSGGRGRGGPRGGKSSISSVLKDPDSNPYSLLDNTESDQTADTDASESHHSTNRRRRSRRRRTDEDAVLMDGMTESDTASVNENGLVTVADYISRAESQSRQRNLPRETLAKNKKEMAKDVIEEHGPSEKAINGPTSASGDDISKLQRTPGEEKINTLKEENTQEAAVLNGVS

SEQ ID NO: 5622 - protein, 539 aa, Homo sapiens
MAELTVEVRGSNGAFYKGFIKDVHEDSLTVVFENNWQPERQVPFNEVRLPPPPDIKKEISEGDEVEVYSRANDQEPCGWWLAKVRMMKGEFYVIEYAACDATYNEIVTFERLRPVNQNKTVKKNTFFKCTVDVPEDLREACANENAHKDFKKAVGACRIFYHPETTQLMILSASEATVKRVNILSDMHLRSIRTKLMLMSRNEEATKHLECTKQLAAAFHEEFVVREDLMGLAIGTHGSNIQQARKVPGVTAIELDEDTGTFRIYGESADAVKKARGFLEFVEDFIQVPRNLVGKVIGKNGKVIQEIVDKSGVVRVRIEGDNENKLPREDGMVPFVFVGTKESIGNVQVLLEYHIAYLKEVEQLRMERLQIDEQLRQIGSRSYSGRGRGRRGPNYTSGYGTNSELSNPSETESERKDELSDWSLAGEDDRDSRHQRDSRRRPGGRGRSVSGGRGRGGPRGGKSSISSVLKDPDSNPYSLLDNTESDQTADTDASESHHSTNRRRRSRRRRTDEDAVLMDGMTESDTASVNENGLGKRCD

SEQ ID NO: 5623 - protein, 490 aa, Homo sapiens
MAELTVEVRGSNGAFYKVYSRANDQEPCGWWLAKVRMMKGEFYVIEYAACDATYNEIVTFERLRPVNQNKTVKKNTFFKCTVDVPEDLREACANENAHKDFKKAVGACRIFYHPETTQLMILSASEATVKRVNILSDMHLRSIRTKLMLMSRNEEATKHLECTKQLAAAFHEEFVVREDLMGLAIGTHGSNIQQARKVPGVTAIELDEDTGTFRIYGESADAVKKARGFLEFVEDFIQVPRNLVGKVIGKNGKVIQEIVDKSGVVRVRIEGDNENKLPREDGMVPFVFVGTKESIGNVQVLLEYHIAYLKEVEQLRMERLQIDEQLRQIGSRSYSGRGRGRRGPNYTSGYGTNSELSNPSETESERKDELSDWSLAGEDDRDSRHQRDSRRRPGGRGRSVSGGRGRGGPRGGKSSISSVLKDPDSNPYSLLDNTESDQTADTDASESHHSTNRRRRSRRRRTDEDAVLMDGMTESDTASVNENGLGKRCD

SEQ ID NO: 5624 - protein, 75 aa, Homo sapiens
MMKGEFYVIEYAACDATYNEIVTFERLRPVNQNKTVKKNTFFKCTVDVPEDLREACANENAHKDFKKAVGACRIF

SEQ ID NO: 5625 - protein, 94 aa, Homo sapiens
MMKGEFYVIEYAACDATYNEIVTFERLRPVNQNKTVKKNTFFKCTVDVPEDLREACANENAHKDFKKAVGACRIFYHPETTQLMILSASEATVK

SEQ ID NO: 5626 - protein, 119 aa, Homo sapiens
MMKGEFYVIEYAACDATYNEIVTFERLRPVNQNKTVKKNTFFKCTVDVPEDLREACANENAHKDFKKAVGACRIFYHPETTQLMILSASEATVKRVNILSDMHLRSIRTKLMLMSRNEE

SEQ ID NO: 5627 - protein, 123 aa, Homo sapiens
MMKGEFYVIEYAACDATYNEIVTFERLRPVNQNKTVKKNTFFKCTVDVPEDLREACANENAHKDFKKAVGACRIFYHPETTQLMILSASEATVKRVNILSDMHLRSIRTKLMLMSRNEEATKH

SEQ ID NO: 5628 - protein, 536 aa, Homo sapiens
MMKGEFYVIEYAACDATYNEIVTFERLRPVNQNKTVKKNTFFKCTVDVPEDLREACANENAHKDFKKAVGACRIFYHPETTQLMILSASEATVKRVNILSDMHLRSIRTKLMLMSRNEEATKHLECTKQLAAAFHEEFVVREDLMGLAIGTHGSNIQQARKVPGVTAIELDEDTGTFRIYGESADAVKKARGFLEFVEDFIQVPRNLVGKVIGKNGKVIQEIVDKSGVVRVRIEGDNENKLPREDGMVPFVFVGTKESIGNVQVLLEYHIAYLKEVEQLRMERLQIDEQLRQIGSRSYSGRGRGRRGPNYTSGYGTNSELSNPSETESERKDELSDWSLAGEDDRDSRHQRDSRRRPGGRGRSVSGGRGRGGPRGGKSSISSVLKDPDSNPYSLLDNTESDQTADTDASESHHSTNRRRRSRRRRTDEDAVLMDGMTESDTASVNENGLVTVADYISRAESQSRQRNLPRETLAKNKKEMAKDVIEEHGPSEKAINGPTSASGDDISKLQRTPGEEKINTLKEENTQEAAVLNGVS

SEQ ID NO: 5629 - protein, 454 aa, Homo sapiens
MMKGEFYVIEYAACDATYNEIVTFERLRPVNQNKTVKKNTFFKCTVDVPEDLREACANENAHKDFKKAVGACRIFYHPETTQLMILSASEATVKRVNILSDMHLRSIRTKLMLMSRNEEATKHLECTKQLAAAFHEEFVVREDLMGLAIGTHGSNIQQARKVPGVTAIELDEDTGTFRIYGESADAVKKARGFLEFVEDFIQVPRNLVGKVIGKNGKVIQEIVDKSGVVRVRIEGDNENKLPREDGMVPFVFVGTKESIGNVQVLLEYHIAYLKEVEQLRMERLQIDEQLRQIGSRSYSGRGRGRRGPNYTSGYGTNSELSNPSETESERKDELSDWSLAGEDDRDSRHQRDSRRRPGGRGRSVSGGRGRGGPRGGKSSISSVLKDPDSNPYSLLDNTESDQTADTDASESHHSTNRRRRSRRRRTDEDAVLMDGMTESDTASVNENGLGKRCD

SEQ ID NO: 5630 - protein, 151 aa, Homo sapiens
MRAVNILVYFFGFFWWFFNVQGFIKDVHEDSLTVVFENNWQPERQVPFNEVRLPPPPDIKKEISEGDEVEVYSRANDQEPCGWWLAKVRMMKGEFYVIEYAACDATYNEIVTFERLRPVNQNKTVKKNTFFKCTVDVPEDLREACANENAH

SEQ ID NO: 5631 - protein, 608 aa, Homo sapiens
MVTEGFIKDVHEDSLTVVFENNWQPERQVPFNEVRLPPPPDIKKEISEGDEVEVYSRANDQEPCGWWLAKVRMMKGEFYVIEYAACDATYNEIVTFERLRPVNQNKTVKKNTFFKCTVDVPEDLREACANENAHKDFKKAVGACRIFYHPETTQLMILSASEATVKRVNILSDMHLRSIRTKLMLMSRNEEATKHLECTKQLAAAFHEEFVVREDLMGLAIGTHGSNIQQARKVPGVTAIELDEDTGTFRIYGESADAVKKARGFLEFVEDFIQVPRNLVGKVIGKNGKVIQEIVDKSGVVRVRIEGDNENKLPREDGMVPFVFVGTKESIGNVQVLLEYHIAYLKEVEQLRMERLQIDEQLRQIGSRSYSGRGRGRRGPNYTSGYGTNSELSNPSETESERKDELSDWSLAGEDDRDSRHQRDSRRRPGGRGRSVSGGRGRGGPRGGKSSISSVLKDPDSNPYSLLDNTESDQTADTDASESHHSTNRRRRSRRRRTDEDAVLMDGMTESDTASVNENGLVTVADYISRAESQSRQRNLPRETLAKNKKEMAKDVIEEHGPSEKAINGPTSASGDDISKLQRTPGEEKINTLKEENTQEAAVLNGVS

SEQ ID NO: 5632 - protein, 247 aa, Homo sapiens
  VARIANT 1: note = misc_feature - Xaa can be any naturally occurring amino acid
XTNSELSNPSETESERKDELSDWSLAGEDDRDSRHQRDSRRRPGGRGRSVSGGRGRGGPRGGKSSISSVLKDPDSNPYSLLDNTESDQTADTDASESHHSTNRRRRSRRRRTDEDAVLMDGMTESDTASVNENGLDDSEKKPQRRNRSRRRRFRGQAEDRQPVTVADYISRAESQSRQRNLPRETLAKNKKEMAKDVIEEHGPSEKAINGPTSASGDDISKLQRTPGEEKINTLKEENTQEAAVLNG

SEQ ID NO: 5633 - protein, 144 aa, Homo sapiens
MGRGYSGALQARGGLEEPLERGLRGPSFTQSPLHGAAAAYLSAQRDASLPVPGQRSDMQKVTLGLLVFLAGFPVLDANDLEDKNSPFYYDWHSLQVGGLICAGVLCAMGIIIVMSAKCKCKFGQKSGHHPGETPPLITPGSAQS

SEQ ID NO: 5634 - protein, 70 aa, Homo sapiens
MQKVTLGLLVFLAGFPVLDANDLEDKNSPFYYDWHSLQVGGLICAGVLCAMGIIIVMSAKCKCKFGQKSG

SEQ ID NO: 5635 - protein, 87 aa, Homo sapiens
MQKVTLGLLVFLAGFPVLDANDLEDKNSPFYYDWHSLQVGGLICAGVLCAMGIIIVMSAKCKCKFGQKSGHHPGETPPLITPGSAQS

SEQ ID NO: 5636 - protein, 87 aa, Homo sapiens; identical to SEQ ID NO: 5635

SEQ ID NO: 5637 - protein, 87 aa, Homo sapiens; identical to SEQ ID NO: 5635

SEQ ID NO: 5638 - protein, 96 aa, Homo sapiens
MQKVTLGLLVFLAGFPVLDANDLEDKNSPFYYDWHSLQVGGLICAGVLCAMGIIIVMSEWRSSGEQAGRGWGSPPLTTQLSPTGAKCKCKFGQKSG

SEQ ID NO: 5639 - protein, 113 aa, Homo sapiens
MQKVTLGLLVFLAGFPVLDANDLEDKNSPFYYDWHSLQVGGLICAGVLCAMGIIIVMSEWRSSGEQAGRGWGSPPLTTQLSPTGAKCKCKFGQKSGHHPGETPPLITPGSAQS

SEQ ID NO: 5640 - protein, 113 aa, Homo sapiens; identical to SEQ ID NO: 5639

SEQ ID NO: 5641 - protein, 113 aa, Homo sapiens; identical to SEQ ID NO: 5639

SEQ ID NO: 5642 - protein, 116 aa, Homo sapiens
MQKVTLGLLVFLAGFPVLDANDLEDKNSPFYYGAPYIFVKRMGGQMERTQAGTEVPSTFLLDWHSLQVGGLICAGVLCAMGIIIVMSAKCKCKFGQKSGHHPGETPPLITPGSAQS

SEQ ID NO: 5643 - protein, 116 aa, Homo sapiens; identical to SEQ ID NO: 5642

SEQ ID NO: 5644 - protein, 61 aa, Homo sapiens
MQKVTLGLLVFLAGFPVLDANDLEDKNSPFYYGESPCPLSPPHNPTYCLVPRVPIQGWGLT

SEQ ID NO: 5645 - protein, 61 aa, Homo sapiens; identical to SEQ ID NO: 5644

SEQ ID NO: 5646 - protein, 844 aa, Homo sapiens
MGPGAPFARVGWPLPLLVVMAAGVAPVWASHSPHLPRPHSRVPPHPSSERRAVYIGALFPMSGGWPGGQACQPAVEMALEDVNSRRDILPDYELKLIHHDSKCDPGQATKYLYELLYNDPIKIILMPGCSSVSTLVAEAARMWNLIVLSYGSSSPALSNRQRFPTFFRTHPSATLHNPTRVKLFEKWGWKKIATIQQTTEVFTSTLDDLEERVKEAGIEITFRQSFFSDPAVPVKNLKRQDARIIVGLFYETEARKVFCEVYKERLFGKKYVWFLIGWYADNWFKIYDPSINCTVDEMTEAVEGHITTEIVMLNPANTRSISNMTSQEFVEKLTKRLKRHPEETGGFQEAPLAYDAIWALALALNKTSGGGGRSGVRLEDFNYNNQTITDQIYRAMNSSSFEGVSGHVVFDASGSRMAWTLIEQLQGGSYKKIGYYDSTKDDLSWSKTDKWIGGSPPADQTLVIKTFRFLSQKLFISVSVLSSLGIVLAVVCLSFNIYNSHVRYIQNSQPNLNNLTAVGCSLALAAVFPLGLDGYHIGRNQFPFVCQARLWLLGLGFSLGYGSMFTKIWWVHTVFTKKEEKKEWRKTLEPWKLYATVGLLVGMDVLTLAIWQIVDPLHRTIETFAKEEPKEDIDVSILPQLEHCSSRKMNTWLGIFYGYKGLLLLLGIFLAYETKSVSTEKINDHRAVGMAIYNVAVLCLITAPVTMILSSQQDAAFAFASLAIVFSSYITLVVLFVPKMRRLITRGEWQSEAQDTMKTGSSTNNNEEEKSRLLEKENRELEKIIAEKEERVSELRHQLQSRQQLRSRRHPPTPPEPSGGLPRGPPEPPDRLSCDGSRVHLLYK

SEQ ID NO: 5647 - protein, 844 aa, Homo sapiens; identical to SEQ ID NO: 5646

SEQ ID NO: 5648 - protein, 131 aa, Homo sapiens
MLLLLLLAPLFLRPPGAGGAQTPNATSEGCQIIHPPWEGGIRYRGLTRDQVKAINFLPVDYEIEYVCRGEREVVGPKVRKCLANGSWTDMDTPSRCGTLPSETQASALPGLQHGQVWEGAGDQAREAGRQW

SEQ ID NO: 5649 - protein, 97 aa, Homo sapiens
MLLLLLLAPLFLRPPGAGGAQTPNATSEGCQIIHPPWEGGIRYRGLTRDQVKAINFLPVDYEIEYVCRGEREVVGPKVRKCLANGSWTDMDTPSRCV

SEQ ID NO: 5650 - protein, 899 aa, Homo sapiens
MLLLLLLAPLFLRPPGAGGAQTPNATSEGCQIIHPPWEGGIRYRGLTRDQVKAINFLPVDYEIEYVCRGEREVVGPKVRKCLANGSWTDMDTPSRCVNRTPHSERRAVYIGALFPMSGGWPGGQACQPAVEMALEDVNSRRDILPDYELKLIHHDSKCDPGQATKYLYELLYNDPIKIILMPGCSSVSTLVAEAARMWNLIVLSYGSSSPALSNRQRFPTFFRTHPSATLHNPTRVKLFEKWGWKKIATIQQTTEVFTSTLDDLEERVKEAGIEITFRQSFFSDPAVPVKNLKRQDARIIVGLFYETEARKVFCEVYKERLFGKKYVWFLIGWYADNWFKIYDPSINCTVDEMTEAVEGHITTEIVMLNPANTRSISNMTSQEFVEKLTKRLKRHPEETGGFQEAPLAYDAIWALALALNKTSGGGGRSGVRLEDFNYNNQTITDQIYRAMNSSSFEGVSGHVVFDASGSRMAWTLIEQLQGGSYKKIGYYDSTKDDLSWSKTDKWIGGSPPADQTLVIKTFRFLSQKLFISVSVLSSLGIVLAVVCLSFNIYNSHVRYIQNSQPNLNNLTAVGCSLALAAVFPLGLDGYHIGRNQFPFVCQARLWLLGLGFSLGYGSMFTKIWWVHTVFTKKEEKKEWRKTLEPWKLYATVGLLVGMDVLTLAIWQIVDPLHRTIETFAKEEPKEDIDVSILPQLEHCSSRKMNTWLGIFYGYKGLLLLLGIFLAYETKSVSTEKINDHRAVGMAIYNVAVLCLITAPVTMILSSQQDAAFAFASLAIVFSSYITLVVLFVPKMRRLITRGEWQSEAQDTMKTGSSTNNNEEEKSRLLEKENRELEKIIAEKEERVSELRHQLQSRQQLRSRRHPPTPPEPSGGLPRGPPEPPDRLSCDGSRVHLLYK

SEQ ID NO: 5651 - protein, 137 aa, Homo sapiens
MLLLLLLAPLFLRPPGAGGAQTPNATSEGCQIIHPPWEGGIRYRGLTRDQVKAINFLPVDYEIEYVCRGEREVVGPKVRKCLANGSWTDMDTPSRCVRICSKSYLTLENGKVFLTGGDLPALDGARVDFRCDPDFHL

SEQ ID NO: 5652 - protein, 156 aa, Homo sapiens
MLLLLLLAPLFLRPPGAGGAQTPNATSEGCQIIHPPWEGGIRYRGLTRDQVKAINFLPVDYEIEYVCRGEREVVGPKVRKCLANGSWTDMDTPSRCVRICSKSYLTLENGKVFLTGGDLPALDGARVDFRCDPDFHLVGSSRSICSQGQWSTPKPH

SEQ ID NO: 5653 - protein, 193 aa, Homo sapiens
MLLLLLLAPLFLRPPGAGGAQTPNATSEGCQIIHPPWEGGIRYRGLTRDQVKAINFLPVDYEIEYVCRGEREVVGPKVRKCLANGSWTDMDTPSRCVRICSKSYLTLENGKVFLTGGDLPALDGARVDFRCDPDFHLVGSSRSICSQGQWSTPKPHCQGTLPSETQASALPGLQHGQVWEGAGDQAREAGRQW

SEQ ID NO: 5654 - protein, 961 aa, Homo sapiens
MLLLLLLAPLFLRPPGAGGAQTPNATSEGCQIIHPPWEGGIRYRGLTRDQVKAINFLPVDYEIEYVCRGEREVVGPKVRKCLANGSWTDMDTPSRCVRICSKSYLTLENGKVFLTGGDLPALDGARVDFRCDPDFHLVGSSRSICSQGQWSTPKPHCQVNRTPHSERRAVYIGALFPMSGGWPGGQACQPAVEMALEDVNSRRDILPDYELKLIHHDSKCDPGQATKYLYELLYNDPIKIILMPGCSSVSTLVAEAARMWNLIVLSYGSSSPALSNRQRFPTFFRTHPSATLHNPTRVKLFEKWGWKKIATIQQTTEVFTSTLDDLEERVKEAGIEITFRQSFFSDPAVPVKNLKRQDARIIVGLFYETEARKVFCEVYKERLFGKKYVWFLIGWYADNWFKIYDPSINCTVDEMTEAVEGHITTEIVMLNPANTRSISNMTSQEFVEKLTKRLKRHPEETGGFQEAPLAYDAIWALALALNKTSGGGGRSGVRLEDFNYNNQTITDQIYRAMNSSSFEGVSGHVVFDASGSRMAWTLIEQLQGGSYKKIGYYDSTKDDLSWSKTDKWIGGSPPADQTLVIKTFRFLSQKLFISVSVLSSLGIVLAVVCLSFNIYNSHVRYIQNSQPNLNNLTAVGCSLALAAVFPLGLDGYHIGRNQFPFVCQARLWLLGLGFSLGYGSMFTKIWWVHTVFTKKEEKKEWRKTLEPWKLYATVGLLVGMDVLTLAIWQIVDPLHRTIETFAKEEPKEDIDVSILPQLEHCSSRKMNTWLGIFYGYKGLLLLLGIFLAYETKSVSTEKINDHRAVGMAIYNVAVLCLITAPVTMILSSQQDAAFAFASLAIVFSSYITLVVLFVPKMRRLITRGEWQSEAQDTMKTGSSTNNNEEEKSRLLEKENRELEKIIAEKEERVSELRHQLQSRQQLRSRRHPPTPPEPSGGLPRGPPEPPDRLSCDGSRVHLLYK

SEQ ID NO: 5655 - protein, 578 aa, Homo sapiens
MLLLLLLAPLFLRPPGAGGAQTPNATSEGCQIIHPPWEGGIRYRGLTRDQVKAINFLPVDYEIEYVCRGEREVVGPKVRKCLANGSWTDMDTPSRCVRICSKSYLTLENGKVFLTGGDLPALDGARVDFRCDPDFHLVGSSRSICSQGQWSTPKPHCQVNRTPHSERRAVYIGALFPMSGGWPGGQACQPAVEMALEDVNSRRDILPDYELKLIHHDSKCDPGQATKYLYELLYNDPIKIILMPGCSSVSTLVAEAARMWNLIVLSYGSSSPALSNRQRFPTFFRTHPSATLHNPTRVKLFEKWGWKKIATIQQTTEVFTSTLDDLEERVKEAGIEITFRQSFFSDPAVPVKNLKRQDARIIVGLFYETEARKVFCEVYKERLFGKKYVWFLIGWYADNWFKIYDPSINCTVDEMTEAVEGHITTEIVMLNPANTRSISNMTSQEFVEKLTKRLKRHPEETGGFQEAPLAYDAIWALALALNKTSGGGGRSGVRLEDFNYNNQTITDQIYRAMNSSSFEGVSGHVVFDASGSRMAWTLIEQLQGGSYKKIGYYDSTKDDLSWSKTDKWIVISRTHSPT

SEQ ID NO: 5656 - protein, 578 aa, Homo sapiens; identical to SEQ ID NO: 5655

SEQ ID NO: 5657 - protein, 133 aa, Homo sapiens
MPGAWMLLLLLLAPLFLRPPGAGGAQTPNATSEGCQIIHPPWEGGIRYRGLTRDQVKAINFLPVDYEIEYVCRGEREVVGPKVRKCLANGSWTDMDTPSRCVRICSKSYLTLENGKVFLTGGDLPALDGARVD

SEQ ID NO: 5658 - protein, 70 aa, Homo sapiens
MRKSPGLSDCLWAWILLLSTLTGRRTSRKSHQNTDLYEVNEGKDVAMDSRHYKMNLKTIPLSSPGFWTDS

SEQ ID NO: 5659 - protein, 35 aa, Homo sapiens
MRKSPGLSDCLWAWILLLSTLTGRSYGQPSLQDEL

SEQ ID NO: 5660 - protein, 85 aa, Homo sapiens
MRKSPGLSDCLWAWILLLSTLTGRSYGQPSLQDELKDNTTVFTRILDRLLDGYDNRLRPGLGERVTEVKTDIFVTSFGPVSDHDM

SEQ ID NO: 5661 - protein, 168 aa, Homo sapiens
MRKSPGLSDCLWAWILLLSTLTGRSYGQPSLQDELKDNTTVFTRILDRLLDGYDNRLRPGLGERVTEVKTDIFVTSFGPVSDHDMEYTIDVFFRQSWKDERLKFKGPMTVLRLNNLMASKIWTPDTFFHNGKKSVAHNMTMPNKLLRITEDGTLLYTMRLTVRAECPM

SEQ ID NO: 5662 - protein, 456 aa, Homo sapiens
MRKSPGLSDCLWAWILLLSTLTGRSYGQPSLQDELKDNTTVFTRILDRLLDGYDNRLRPGLGERVTEVKTDIFVTSFGPVSDHDMEYTIDVFFRQSWKDERLKFKGPMTVLRLNNLMASKIWTPDTFFHNGKKSVAHNMTMPNKLLRITEDGTLLYTMRLTVRAECPMHLEDFPMDAHACPLKFGSYAYTRAEVVYEWTREPARSVVVAEDGSRLNQYDLLGQTVDSGIVQSSTGEYVVMTTHFHLKRKIGYFVIQTYLPCIMTVILSQVSFWLNRESVPARTVFGVTTVLTMTTLSISARNSLPKVAYATAMDWFIAVCYAFVFSALIEFATVNYFTKRGYAWDGKSVVPEKPKKVKDPLIKKNNTYAPTATSYTPNLARGDPGLATIAKSATIEPKEVKPETKPPEPKKTFNSVSKIDRLSRIAFPLLFGIFNLVYWATYLNREPQLKAPTPHQ

SEQ ID NO: 5663 - protein, 456 aa, Homo sapiens; identical to SEQ ID NO: 5662

SEQ ID NO: 5664 - protein, 456 aa, Homo sapiens; identical to SEQ ID NO: 5662

SEQ ID NO: 5665 - protein, 456 aa, Homo sapiens; identical to SEQ ID NO: 5662

SEQ ID NO: 5666 - protein, 456 aa, Homo sapiens; identical to SEQ ID NO: 5662

SEQ ID NO: 5667 - protein, 456 aa, Homo sapiens; identical to SEQ ID NO: 5662

SEQ ID NO: 5668 - protein, 285 aa, Homo sapiens
MRKSPGLSDCLWAWILLLSTLTGRSYGQPSLQDELKDNTTVFTRILDRLLDGYDNRLRPGLGERVTEVKTDIFVTSFGPVSDHDMEYTIDVFFRQSWKDERLKFKGPMTVLRLNNLMASKIWTPDTFFHNGKKSVAHNMTMPNKLLRITEDGTLLYTMRLTVRAECPMHLEDFPMDAHACPLKFGSYAYTRAEVVYEWTREPARSVVVAEDGSRLNQYDLLGQTVDSGIVQSSTGEYVVMTTHFHLKRKIGYFVIQTYLPCIMTVILSQVSFWLNRESVPARTVF

SEQ ID NO: 5669 - protein, 456 aa, Homo sapiens; identical to SEQ ID NO: 5662

SEQ ID NO: 5670 - protein, 456 aa, Homo sapiens; identical to SEQ ID NO: 5662

SEQ ID NO: 5671 - protein, 94 aa, Homo sapiens
MRKSPGLSDCLWAWILLLSTLTGRSYGQPSLQDELKDNTTVFTRILDRLLDGYDNRLRPGLGERVTEVKTDIFVTSFGPVSDHDMIFALQNTAQ

SEQ ID NO: 5672 - protein, 471 aa, Homo sapiens
MVQVSIASNELLQPAMRKSPGLSDCLWAWILLLSTLTGRSYGQPSLQDELKDNTTVFTRILDRLLDGYDNRLRPGLGERVTEVKTDIFVTSFGPVSDHDMEYTIDVFFRQSWKDERLKFKGPMTVLRLNNLMASKIWTPDTFFHNGKKSVAHNMTMPNKLLRITEDGTLLYTMRLTVRAECPMHLEDFPMDAHACPLKFGSYAYTRAEVVYEWTREPARSVVVAEDGSRLNQYDLLGQTVDSGIVQSSTGEYVVMTTHFHLKRKIGYFVIQTYLPCIMTVILSQVSFWLNRESVPARTVFGVTTVLTMTTLSISARNSLPKVAYATAMDWFIAVCYAFVFSALIEFATVNYFTKRGYAWDGKSVVPEKPKKVKDPLIKKNNTYAPTATSYTPNLARGDPGLATIAKSATIEPKEVKPETKPPEPKKTFNSVSKIDRLSRIAFPLLFGIFNLVYWATYLNREPQLKAPTPHQ

SEQ ID NO: 5673 - protein, 113 aa, Homo sapiens
MVQVSIASNEVSYPSELLQPAMRKSPGLSDCLWAWILLLSTLTGRSYGQPSLQDELKDNTTVFTRILDRLLDGYDNRLRPGLGERVTEVKTDIFVTSFGPVSDHDMEYTIDVF

SEQ ID NO: 5674 - protein, 427 aa, Homo sapiens
MEYTIDVFFRQKWKDERLKFKGPMNILRLNNLMASKIWTPDTFFHNGKKSVAHNMTMPNKLLRIQDDGTLLYTMRLTVQAECPMHLEDFPMDAHSCPLKFGSYAYTTSEVTYIWTYNASDSVQVAPDGSRLNQYDLLGQSIGKETIKSSTGEYTVMTAHFHLKRKIGYFVIQTYLPCIMTVILSQVSFWLNRESVPARTVFGVTTVLTMTTLSISARNSLPKVAYATAMDWFIAVCYAFVFSALIEFATVNYFTKRGWAWDGKSVVNDKSPSIKAEGITLTYNSVKAILQGAKLIWSKYIAFSWPSLFQEKTLEYLEKWMDCLTFKQSSKKEKASVMIQNNAYAVAVANYAPNLSKDPVLSTISKSATTPEPNKKPENKPAEAKKTFNSVSKIDRMSRIVFPVLFGTFNLVYWATYLNREPVLGVSP

SEQ ID NO: 5675 - protein, 137 aa, Homo sapiens
MKTKLNIYNMQFLLFVFLVWDPARLVLANIQEDEAKNNITIFTRILDRLLDGYDNRLRPGLGDSITEVFTNIYVTSFGPVSDTDMEYTIDVFFRQKWKDERLKFKGPMNILRLNNLMASKIWTPDTFFHNGKKSVAH

SEQ ID NO: 5676 - protein, 152 aa, Homo sapiens
MKTKLNIYNMQFLLFVFLVWDPARLVLANIQEDEAKNNITIFTRILDRLLDGYDNRLRPGLGDSITEVFTNIYVTSFGPVSDTDMEYTIDVFFRQKWKDERLKFKGPMNILRLNNLMASKIWTPDTFFHNGKKSVAHNMTMPNKLLRIQDDG

SEQ ID NO: 5677 - protein, 159 aa, Homo sapiens
MKTKLNIYNMQFLLFVFLVWDPARLVLANIQEDEAKNNITIFTRILDRLLDGYDNRLRPGLGDSITEVFTNIYVTSFGPVSDTDMEYTIDVFFRQKWKDERLKFKGPMNILRLNNLMASKIWTPDTFFHNGKKSVAHNMTMPNKLLRIQDDGTLLYTMR

SEQ ID NO: 5678 - protein, 451 aa, Homo sapiens
MKTKLNIYNMQFLLFVFLVWDPARLVLANIQEDEAKNNITIFTRILDRLLDGYDNRLRPGLGDSITEVFTNIYVTSFGPVSDTDMEYTIDVFFRQKWKDERLKFKGPMNILRLNNLMASKIWTPDTFFHNGKKSVAHNMTMPNKLLRIQDDGTLLYTMRLTVQAECPMHLEDFPMDAHSCPLKFGSYAYTTSEVTYIWTYNASDSVQVAPDGSRLNQYDLLGQSIGKETIKSSTGEYTVMTAHFHLKRKIGYFVIQTYLPCIMTVILSQVSFWLNRESVPARTVFGVTTVLTMTTLSISARNSLPKVAYATAMDWFIAVCYAFVFSALIEFATVNYFTKRGWAWDGKSVVNDKKKEKASVMIQNNAYAVAVANYAPNLSKDPVLSTISKSATTPEPNKKPENKPAEAKKTFNSVSKIDRMSRIVFPVLFGTFNLVYWATYLNREPVLGVSP

SEQ ID NO: 5679 - protein, 451 aa, Homo sapiens; identical to SEQ ID NO: 5678

SEQ ID NO: 5680 - protein, 511 aa, Homo sapiens
MKTKLNIYNMQFLLFVFLVWDPARLVLANIQEDEAKNNITIFTRILDRLLDGYDNRLRPGLGDSITEVFTNIYVTSFGPVSDTDMEYTIDVFFRQKWKDERLKFKGPMNILRLNNLMASKIWTPDTFFHNGKKSVAHNMTMPNKLLRIQDDGTLLYTMRLTVQAECPMHLEDFPMDAHSCPLKFGSYAYTTSEVTYIWTYNASDSVQVAPDGSRLNQYDLLGQSIGKETIKSSTGEYTVMTAHFHLKRKIGYFVIQTYLPCIMTVILSQVSFWLNRESVPARTVFGVTTVLTMTTLSISARNSLPKVAYATAMDWFIAVCYAFVFSALIEFATVNYFTKRGWAWDGKSVVNDKSPSIKAEGITLTYNSVKAILQGAKLIWSKYIAFSWPSLFQEKTLEYLEKWMDCLTFKQSSKKEKASVMIQNNAYAVAVANYAPNLSKDPVLSTISKSATTPEPNKKPENKPAEAKKTFNSVSKIDRMSRIVFPVLFGTFNLVYWATYLNREPVLGVSP

SEQ ID NO: 5681 - protein, 451 aa, Homo sapiens; identical to SEQ ID NO: 5678

SEQ ID NO: 5682 - protein, 367 aa, Homo sapiens
MKTKLNIYNMQFLLFVFLVWDPARLVLANIQEDEAKNNITIFTRILDRLLDGYDNRLRPGLGDSITEVFTNIYVTSFGPVSDTDMEYTIDVFFRQKWKDERLKFKGPMNILRLNNLMASKIWTPDTFFHNGKKSVAHNMTMPNKLLRIQDDGTLLYTMRLTVQAECPMHLEDFPMDAHSCPLKFGSYAYTTSEVTYIWTYNASDSVQVAPDGSRLNQYDLLGQSIGKETIKSSTGEYTVMTAHFHLKRKIGYFVIQTYLPCIMTVILSQVSFWLNRESVPARTVFGVTTVLTMTTLSISARNSLPKVAYATAMDWFIAVCYAFVFSALIEFATVNYFTKRGWAWDGKSVVNDKVSESFRVIIIKKIP

SEQ ID NO: 5683 - protein, 451 aa, Homo sapiens; identical to SEQ ID NO: 5678

SEQ ID NO: 5684 - protein, 66 aa, Homo sapiens
MKTKLNIYNMQFLLFVFLVWDPARLVLANIQEDEAKNNITIFTRILDRLLDGYDNRLRPGLGGIYN

SEQ ID NO: 5685 - protein, 66 aa, Homo sapiens; identical to SEQ ID NO: 5684

SEQ ID NO: 5686 - protein, 66 aa, Homo sapiens; identical to SEQ ID NO: 5684

SEQ ID NO: 5687 - protein, 73 aa, Homo sapiens
MKTKLNIYNMQFLLFVFLVWDPARLVLANIQEDEAKNNITIFTRILDRLLDGYDNRLRPGLGVSRVESPVCVT

SEQ ID NO: 5688 - protein, 56 aa, Homo sapiens
SSTGEYTVMTAHFHLKRKIGYFVIQTYLPCIMTVILSQVSFWLNRESVPARTVFGE

SEQ ID NO: 5689 - protein, 16 aa, Homo sapiens
MDNGMFSGFIMIKNLL

SEQ ID NO: 5690 - protein, 86 aa, Homo sapiens
MDNGMFSGFIMIKNLLLFCISMNLSSHFGFSQMPTSSVKDETNDNITIFTRILDGLLDGYDNRLRPGLGERITQVRTDIYVTSFGP

SEQ ID NO: 5691 - protein, 149 aa, Homo sapiens
MDNGMFSGFIMIKNLLLFCISMNLSSHFGFSQMPTSSVKDETNDNITIFTRILDGLLDGYDNRLRPGLGERITQVRTDIYVTSFGPVSDTEMEYTIDVFFRQSWKDERLRFKGPMQRLPLNNLLASKIWTPDTFFHNGKKSIAHNMTTP

SEQ ID NO: 5692 - protein, 166 aa, Homo sapiens
MDNGMFSGFIMIKNLLLFCISMNLSSHFGFSQMPTSSVKDETNDNITIFTRILDGLLDGYDNRLRPGLGERITQVRTDIYVTSFGPVSDTEMEYTIDVFFRQSWKDERLRFKGPMQRLPLNNLLASKIWTPDTFFHNGKKSIAHNMTTPNKLLRLEDDGTLLYTMR

SEQ ID NO: 5693 - protein, 462 aa, Homo sapiens
MDNGMFSGFIMIKNLLLFCISMNLSSHFGFSQMPTSSVKDETNDNITIFTRILDGLLDGYDNRLRPGLGERITQVRTDIYVTSFGPVSDTEMEYTIDVFFRQSWKDERLRFKGPMQRLPLNNLLASKIWTPDTFFHNGKKSIAHNMTTPNKLLRLEDDGTLLYTMRLTISAECPMQLEDFPMDAHACPLKFGSYAYPNSEVVYVWTNGSTKSVVVAEDGSRLNQYHLMGQTVGTENISTSTGEYTIMTAHFHLKRKIGYFVIQTYLPCIMTVILSQVSFWLNRESVPARTVFGVTTVLTMTTLSISARNSLPKVAYATAMDWFIAVCYAFVFSALIEFATVNYFTKRGWAWDGKKALEAAKIKKKREVILNKSTNAFTTGKMSHPPNIPKEQTPAGTSNTTSVSVKPSEEKTSESKKTYNSISKIDKMSRIVFPVLFGTFNLVYWATYLNREPVIKGAASPK

SEQ ID NO: 5694 - protein, 462 aa, Homo sapiens; identical to SEQ ID NO: 5693

SEQ ID NO: 5695 - protein, 462 aa, Homo sapiens; identical to SEQ ID NO: 5693

SEQ ID NO: 5696 - protein, 86 aa, Homo sapiens
MPTSSVKDETNDNITIFTRILDGLLDGYDNRLRPGLGERITQVRTDIYVTSFGPVSDTEMEYTIDVFFRQSWKDERLRFKGPMQRL

SEQ ID NO: 5697 - protein, 166 aa, Homo sapiens
MPTSSVKDETNDNITIFTRILDGLLDGYDNRLRPGLGERITQVRTDIYVTSFGPVSDTEMEYTIDVFFRQSWKDERLRFKGPMQRLPLNNLLASKIWTPDTFFHNGKKSIAHNMTTPNKLLRLEDDGTLLYTMRLTISAECPMQLEDFPMDAHACPLKFGSYAYPN

SEQ ID NO: 5698 - protein, 258 aa, Homo sapiens
EAGVRGTEEDGCWVCNLESVSQSQTWQENKLSEYQIDIFFAQTWTDSRLRFNSTMKILTLNSNMVGLIWIPDTIFRNSKTAEAHWITTPNQLLRIWNDGKILYTLRLTINAECQLQLHNFPMDEHSCPLIFSSYGYPKEEMIYRWRKNSVEAADQKSWRLYQFDFMGLRNTTEIVTTSAGDYVVMTIYFELSRRMGYFTIQTYIPCILTVVLSWVSFWIKKDATPARTALGITTVLTMTTLSTIARKSLPRVSYVTAM

SEQ ID NO: 5699 - protein, 467 aa, Homo sapiens
MAPKLLLLLCLFSGLHARSRKVEEDEYEDSSSNQKWVLAPKSQDTDVTLILNKLLREYDKKLRPDIGIKPTVIDVDIYVNSIGPVSSINMEYQIDIFFAQTWTDSRLRFNSTMKILTLNSNMVGLIWIPDTIFRNSKTAEAHWITTPNQLLRIWNDGKILYTLRLTINAECQLQLHNFPMDEHSCPLIFSSYGYPKEEMIYRWRKNSVEAADQKSWRLYQFDFMGLRNTTEIVTTSAGDYVVMTIYFELSRRMGYFTIQTYIPCILTVVLSWVSFWIKKDATPARTALGITTVLTMTTLSTIARKSLPRVSYVTAMDLFVTVCFLFVFAALMEYATLNYYSSCRKPTTTKKTTSLLHPDSSRWIPERISLQAPSNYSLLDMRPPPTAMITLNNSVYWQEFEDTCVYECLDGKDCQSFFCCYEECKSGSWRKGRIHIDILELDSYSRVFFPTSFLLFNLVYWVGYLYL

SEQ ID NO: 5700 - protein, 253 aa, Homo sapiens
MAPKLLLLLCLFSGLHARSRKVEEDEYEDSSSNQKWVLAPKSQDTDVTLILNKLLREYDKKLRPDIGIKPTVIDVDIYVNSIGPVSSINMEYQIDIFFAQTWTDSRLRFNSTMKILTLNSNMVGLIWIPDTIFRNSKTAEAHWITTPNQLLRIWNDGKILYTLRLTINAECQLQLHNFPMDEHSCPLIFSSYGYPKEEMIYRWRKNSVEAADQKSWRLYQFDFMGLRNTTEIVTTSAGRNLLKEAQLSKAREA

SEQ ID NO: 5701 - protein, 288 aa, Homo sapiens
MDEHSCPLIFSSYGYPKEEMIYRWRKNSVEAADQKSWRLYQFDFMGLRNTTEIVTTSAGDYVVMTIYFELSRRMGYFTIQTYIPCILTVVLSWVSFWIKKDATPARTALGITTVLTMTTLSTIARKSLPRVSYVTAMDLFVTVCFLFVFAALMEYATLNYYSSCRKPTTTKKTTSLLHPDSSRWIPERISLQAPSNYSLLDMRPPPTAMITLNNSVYWQEFEDTCVYECLDGKDCQSFFCCYEECKSGSWRKGRIHIDILELDSYSRVFFPTSFLLFNLVYWVGYLYL

SEQ ID NO: 5702 - protein, 38 aa, Homo sapiens
  VARIANT 1: note = misc_feature - Xaa can be any naturally occurring amino acid
XAECQLQLHNFPMDEHSCPLIFSSSTILAFRLSLHAYR

SEQ ID NO: 5703 - protein, 169 aa, Homo sapiens
  VARIANT 1: note = misc_feature - Xaa can be any naturally occurring amino acid
XDYVVMTIYFELSRRMGYFTIQTYIPCILTVVLSWVSFWIKKDATPARTALGITTVLTMTTLSTIARKSLPRVSYVTAMDLFVTVCFLFVFAALMEYATLNYYSSCRKPTTTKKTTSLLHPDSSRWIPERISLQAPSKPSCCPACGLQGLPFRSLVSHPRISRAFCLPV

SEQ ID NO: 5704 - protein, 52 aa, Homo sapiens
MNYSLHLAFVCLSLFTERMCIQGSQFNVEVGRSDKLSLPGFENLTAGYNKFL

SEQ ID NO: 5705 - protein, 59 aa, Homo sapiens
MNYSLHLAFVCLSLFTERMCIQGSQFNVEVGRSDKLSLPGFENLTAGYNKFLRPNFGGE

SEQ ID NO: 5706 - protein, 92 aa, Homo sapiens
MNYSLHLAFVCLSLFTERMCIQGSQFNVEVGRSDKLSLPGFENLTAGYNKFLRPNFGGEPVQIALTLDIASISSISESNMDYTATIYLRQRW

SEQ ID NO: 5707 - protein, 171 aa, Homo sapiens
MNYSLHLAFVCLSLFTERMCIQGSQFNVEVGRSDKLSLPGFENLTAGYNKFLRPNFGGEPVQIALTLDIASISSISESNMDYTATIYLRQRWMDQRLVFEGNKSFTLDARLVEFLWVPDTYIVESKKSFLHEVTVGNRLIRLFSNGTVLYALRITTTVACNMDLSKYPMDT

SEQ ID NO: 5708 - protein, 189 aa, Homo sapiens
MNYSLHLAFVCLSLFTERMCIQGSQFNVEVGRSDKLSLPGFENLTAGYNKFLRPNFGGEPVQIALTLDIASISSISESNMDYTATIYLRQRWMDQRLVFEGNKSFTLDARLVEFLWVPDTYIVESKKSFLHEVTVGNRLIRLFSNGTVLYALRITTTVACNMDLSKYPMDTQTCKLQLESWGYDGNDVE

SEQ ID NO: 5709 - protein, 440 aa, Homo sapiens
MNYSLHLAFVCLSLFTERMCIQGSQFNVEVGRSDKLSLPGFENLTAGYNKFLRPNFGGEPVQIALTLDIASISSISESNMDYTATIYLRQRWMDQRLVFEGNKSFTLDARLVEFLWVPDTYIVESKKSFLHEVTVGNRLIRLFSNGTVLYALRITTTVACNMDLSKYPMDTQTCKLQLESWGYDGNDVEFTWLRGNDSVRGLEHLRLAQYTIERYFTLVTRSQQETGNYTRLVLQFELRRNVLYFILETYVPSTFLVVLSWVSFWISLDSVPARTCIGVTTVLSMTTLMIGSRTSLPNTNCFIKAIDVYLGICFSFVFGALLEYAVAHYSSLQQMAAKDRGTTKEVEEVSITNIINSSISSFKRKISFASIEISSDNVDYSDLTMKTSDKFKFVFREKMGRIVDYFTIQNPSNVDHYSKLLFPLIFMLANVFYWAYYMYF

SEQ ID NO: 5710 - protein, 440 aa, Homo sapiens; identical to SEQ ID NO: 5709

SEQ ID NO: 5711 - protein, 349 aa, Homo sapiens
MNYSLHLAFVCLSLFTERMCIQGSQFNVEVGRSDKLSLPGFENLTAGYNKFLRPNFGGEPVQIALTLDIASISSISESNMDYTATIYLRQRWMDQRLVFEGNKSFTLDARLVEFLWVPDTYIVESKKSFLHEVTVGNRLIRLFSNGTVLYALRITTTVACNMDLSKYPMDTQTCKLQLESWGYDGNDVEFTWLRGNDSVRGLEHLRLAQYTIERYFTLVTRSQQETGNYTRLVLQFELRRNVLYFILETYVPSTFLVVLSWVSFWISLDSVPARTCIGVTTVLSMTTLMIGSRTSLPNTNCFIKAIDVYLGICFSFVFGALLEYAVAHYSSLQQMAAKDRQKICYLYAA

SEQ ID NO: 5712 - protein, 289 aa, Homo sapiens
MNYSLHLAFVCLSLFTERMCIQGSQFNVEVGRSDKLSLPGFENLTAGYNKFLRPNFGGEPVQIALTLDIASISSISESNMDYTATIYLRQRWMDQRLVFEGNKSFTLDARLVEFLWVPDTYIVESKKSFLHEVTVGNRLIRLFSNGTVLYALRITTTVACNMDLSKYPMDTQTCKLQLESWGYDGNDVEFTWLRGNDSVRGLEHLRLAQYTIERYFTLVTRSQQETGNYTRLVLQFELRRNVLYFILETYVPSTFLVVLSWVSFWISLDSVPARTCIGDNKGSRRSQYY

SEQ ID NO: 5713 - protein, 123 aa, Homo sapiens
MARGSALLLASLLLAAALSASAGLWSPAKEKRGWTLNSAGYLLGPHAVGNHRSFSDKNGLTSKRELRPEDDMKPGSFDRSIPENNIMRTIIEFLSFLHLKEAGALDRLLDLPAAASSEDIERS

SEQ ID NO: 5714 - protein, 113 aa, Homo sapiens
MLPPQKKPWESMAKGLVLGALFTSFLLLVYSYAVPPLHAGLASTRTPEAAASCSPPALEPEAVIRANGSAGECQPRRNIVFLKTHKTASSTLLNILFRFGQKHRLKFAFPNGR

SEQ ID NO: 5715 - protein, 164 aa, Homo sapiens
MLPPQKKPWESMAKGLVLGALFTSFLLLVYSYAVPPLHAGLASTRTPEAAASCSPPALEPEAVIRANGSAGECQPRRNIVFLKTHKTASSTLLNILFRFGQKHRLKFAFPNGRNDFDYPTFFARSLVQDYRPGACFNIICNHMRFHYDEVRGLVPTNAIFITVL

SEQ ID NO: 5716 - protein, 265 aa, Homo sapiens
MLPPQKKPWESMAKGLVLGALFTSFLLLVYSYAVPPLHAGLASTRTPEAAASCSPPALEPEAVIRANGSAGECQPRRNIVFLKTHKTASSTLLNILFRFGQKHRLKFAFPNGRNDFDYPTFFARSLVQDYRPGACFNIICNHMRFHYDEVRGLVPTNAIFITVLRDPARLFESSFHYFGPVVPLTWKLSAGDKLTEFLQDPDRYYDPNGFNAHYLRNLLFFDLGYDNSLDPSSPQVQEHILEVERRFHLVLLQEYFDESLVLLKD

SEQ ID NO: 5717 - protein, 71 aa, Homo sapiens
MLPPQKKPWESMAKGLVLGALFTSFLLLVYSYAVPPLHAGLASTTPEAAASCSPPALEPEAVIRANGSAGE

SEQ ID NO: 5718 - protein, 76 aa, Homo sapiens
MLPPQKKPWESMAKGLVLGALFTSFLLLVYSYAVPPLHAGLASTTPEAAASCSPPALEPEAVIRANGSAGECQPRR

SEQ ID NO: 5719 - protein, 85 aa, Homo sapiens
MLPPQKKPWESMAKGLVLGALFTSFLLLVYSYAVPPLHAGLASTTPEAAASCSPPALEPEAVIRANGSAGECQPRRNIVFLKTHK

SEQ ID NO: 5720 - protein, 95 aa, Homo sapiens
MLPPQKKPWESMAKGLVLGALFTSFLLLVYSYAVPPLHAGLASTTPEAAASCSPPALEPEAVIRANGSAGECQPRRNIVFLKTHKTASSTLLNIL

SEQ ID NO: 5721 - protein, 99 aa, Homo sapiens
MLPPQKKPWESMAKGLVLGALFTSFLLLVYSYAVPPLHAGLASTTPEAAASCSPPALEPEAVIRANGSAGECQPRRNIVFLKTHKTASSTLLNILFRFG

SEQ ID NO: 5722 - protein, 100 aa, Homo sapiens
MLPPQKKPWESMAKGLVLGALFTSFLLLVYSYAVPPLHAGLASTTPEAAASCSPPALEPEAVIRANGSAGECQPRRNIVFLKTHKTASSTLLNILFRFGQ

SEQ ID NO: 5723 - protein, 103 aa, Homo sapiens
MLPPQKKPWESMAKGLVLGALFTSFLLLVYSYAVPPLHAGLASTTPEAAASCSPPALEPEAVIRANGSAGECQPRRNIVFLKTHKTASSTLLNILFRFGQKHR

SEQ ID NO: 5724 - protein, 143 aa, Homo sapiens
MLPPQKKPWESMAKGLVLGALFTSFLLLVYSYAVPPLHAGLASTTPEAAASCSPPALEPEAVIRANGSAGECQPRRNIVFLKTHKTASSTLLNILFRFGQKHRLKFAFPNGRNDFDYPTFFARSLVQDYRPGACFNIICNHMR

SEQ ID NO: 5725 - protein, 149 aa, Homo sapiens
MLPPQKKPWESMAKGLVLGALFTSFLLLVYSYAVPPLHAGLASTTPEAAASCSPPALEPEAVIRANGSAGECQPRRNIVFLKTHKTASSTLLNILFRFGQKHRLKFAFPNGRNDFDYPTFFARSLVQDYRPGACFNIICNHMRFHYDEV

SEQ ID NO: 5726 - protein, 170 aa, Homo sapiens
MLPPQKKPWESMAKGLVLGALFTSFLLLVYSYAVPPLHAGLASTTPEAAASCSPPALEPEAVIRANGSAGECQPRRNIVFLKTHKTASSTLLNILFRFGQKHRLKFAFPNGRNDFDYPTFFARSLVQDYRPGACFNIICNHMRFHYDEVRGLVPTNAIFITVLRDPARLF

SEQ ID NO: 5727 - protein, 199 aa, Homo sapiens
MLPPQKKPWESMAKGLVLGALFTSFLLLVYSYAVPPLHAGLASTTPEAAASCSPPALEPEAVIRANGSAGECQPRRNIVFLKTHKTASSTLLNILFRFGQKHRLKFAFPNGRNDFDYPTFFARSLVQDYRPGACFNIICNHMRFHYDEVRGLVPTNAIFITVLRDPARLFESSFHYFGPVVPLTWKLSAGDKLTEFLQD

SEQ ID NO: 5728 - protein, 242 aa, Homo sapiens
MLPPQKKPWESMAKGLVLGALFTSFLLLVYSYAVPPLHAGLASTTPEAAASCSPPALEPEAVIRANGSAGECQPRRNIVFLKTHKTASSTLLNILFRFGQKHRLKFAFPNGRNDFDYPTFFARSLVQDYRPGACFNIICNHMRFHYDEVRGLVPTNAIFITVLRDPARLFESSFHYFGPVVPLTWKLSAGDKLTEFLQDPDRYYDPNGFNAHYLRNLLFFDLGYDNSLDPSSPQVQEHILEV

SEQ ID NO: 5729 - protein, 423 aa, Homo sapiens
MLPPQKKPWESMAKGLVLGALFTSFLLLVYSYAVPPLHAGLASTTPEAAASCSPPALEPEAVIRANGSAGECQPRRNIVFLKTHKTASSTLLNILFRFGQKHRLKFAFPNGRNDFDYPTFFARSLVQDYRPGACFNIICNHMRFHYDEVRGLVPTNAIFITVLRDPARLFESSFHYFGPVVPLTWKLSAGDKLTEFLQDPDRYYDPNGFNAHYLRNLLFFDLGYDNSLDPSSPQVQEHILEVERRFHLVLLQEYFDESLVLLKDLLCWELEDVLYFKLNARRDSPVPRLSGELYGRATAWNMLDSHLYRHFNASFWRKVEAFGRERMAREVAALRHANERMRTICIDGGHAVDAAAIQDEAMQPWQPLGTKSILGYNLKKSIGQRHAQLCRRMLTPEIQYLMDLGANLWVTKLWKFIRDFLRW

SEQ ID NO: 5730 - protein, 279 aa, Homo sapiens
MLPPQKKPWESMAKGLVLGALFTSFLLLVYSYAVPPLHAGLASTTPEAAASCSPPALEPEAVIRANGSAGECQPRRNIVFLKTHKTASSTLLNILFRFGQKHRLKFAFPNGRNDFDYPTFFARSLVQDYRPGACFNIICNHMRFHYDEVRGLVPTNAIFITVLRDPARLFESSFHYFGPVVPLTWKLSAGDKLTEFLQDPDRYYDPNGFNAHYLRNLLFFDLGYDNSLDPSSPQVQEHILEVERRFHLVLLQEYFDESLVLLKDLLCWELEDVLYFKLN

SEQ ID NO: 5731 - protein, 423 aa, Homo sapiens; identical to SEQ ID NO: 5729

SEQ ID NO: 5732 - protein, 423 aa, Homo sapiens; identical to SEQ ID NO: 5729

SEQ ID NO: 5733 - protein, 423 aa, Homo sapiens; identical to SEQ ID NO: 5729

SEQ ID NO: 5734 - protein, 423 aa, Homo sapiens; identical to SEQ ID NO: 5729

SEQ ID NO: 5735 - protein, 423 aa, Homo sapiens; identical to SEQ ID NO: 5729

SEQ ID NO: 5736 - protein, 398 aa, Homo sapiens
MMSMLGGLQRYFRVILLLLLALTLLLLAGFLHSDLELDTPLFGGQAEGPPVTNIMFLKTHKTASSTVLNILYRFAETHNLSVALPAGSRVHLGYPWLFLARYVEGVGSQQRFNIMCNHLRFNLPQVQKVMPNDTFYFSILRNPVFQLESSFIYYKTYAPAFRGAPSLDAFLASPRTFYNDSRHLRNVYAKNNMWFDFGFDPNAQCEEGYVRARIAEVERRFRLVLIAEHLDESLVLLRRRLRWALDDVVAFRLNSRSARSVARLSPETRERARSWCALDWRLYEHFNRTLWAQLRAELGPRRLRGEVERLRARRRELASLCLQDGGALKNHTQIRDPRLRPYQSGKADILGYNLRPGLDNQTLGVCQRLVMPELQYMARLYALQFPEKPLKNIPFLGA

SEQ ID NO: 5737 - protein, 431 aa, Homo sapiens
MPPILQRLQQATKMMSRRKILLLVLGCSTVSLLIHQGAQLSWYPKLFPLSCPPLRNSPPRPKHMTVAFLKTHKTAGTTVQNILFRFAERHNLTVALPHPSCEHQFCYPRNFSAHFVHPATRPPHVLASHLRFDRAELERLMPPSTVYVTILREPAAMFESLFSYYNQYCPAFRRVPNASLEAFLRAPEAYYRAGEHFAMFAHNTLAYDLGGDNERSPRDDAAYLAGLIRQVEEVFSLVMIAEYFDESLVLLRRLLAWDLDDVLYAKLNARAASSRLAAIPAALARAARTWNALDAGLYDHFNATFWRHVARAGRACVEREARELREARQRLLRRCFGDEPLLRPAAQIRTKQLQPWQPSRKVDIMGYDLPGGGAGPATEACLKLAMPEVQYSNYLLRKQKRRGGARARPEPVLDNPPPRPIRVLPRGPQGP

SEQ ID NO: 5738 - protein, 431 aa, Homo sapiens; identical to SEQ ID NO: 5737

SEQ ID NO: 5739 - protein, 62 aa, Homo sapiens
KAMTAAAGSAGRAAVPLLLCALLAPGGAYVLDDSDGLGREFDGIGAVSGGGDWCLKVSLKGR

SEQ ID NO: 5740 - protein, 685 aa, Homo sapiens
MAEWLLSASWQRRAKAMTAAAGSAGRAAVPLLLCALLAPGGAYVLDDSDGLGREFDGIGAVSGGGATSRLLVNYPEPYRSQILDYLFKPNFGASLHILKVEIGGDGQTTDGTEPSHMHYALDENYFRGYEWWLMKEAKKRNPNITLIGLPWSFPGWLGKGFDWPYVNLQLTAYYVVTWIVGAKRYHDLDIDYIGIWNERSYNANYIKILRKMLNYQGLQRVKIIASDNLWESISASMLLDAELFKVVDVIGAHYPGTHSAKDAKLTGKKLWSSEDFSTLNSDMGAGCWGRILNQNYINGYMTSTIAWNLVASYYEQLPYGRCGLMTAQEPWSGHYVVESPVWVSAHTTQFTQPGWYYLKTVGHLEKGGSYVALTDGLGNLTIIIETMSHKHSKCIRPFLPYFNVSQQFATFVLKGSFSEIPELQVWYTKLGKTSERFLFKQLDSLWLLDSDGSFTLSLHEDELFTLTTLTTGRKGSYPLPPKSQPFPSTYKDDFNVDYPFFSEAPNFADQTGVFEYFTNIEDPGEHHFTLRQVLNQRPITWAADASNTISIIGDYNWTNLTIKCDVYIETPDTGGVFIAGRVNKGGILIRSARGIFFWIFANGSYRVTGDLAGWIIYALGRVEVTAKKWYTLTLTIKGHFTSGMLNDKSLWTDIPVNFPKNGWAAIGTHSFEFAQFDNFLVEATR

SEQ ID NO: 5741 - protein, 211 aa, Homo sapiens
MAEWLLSASWQRRAKAMTAAAGSAGRAAVPLLLCALLAPGGAYVLDDSDGLGREFDGIGAVSGGGATSRLLVNYPEPYRSQILDYLFKPNFGASLHILKVEIGGDGQTTDGTEPSHMHYALDENYFRGYEWWLMKEAKKRNPNITLIGLPWSFPGWLGKGFDWPYVNLQLTAYYVVTWIVGAKRYHDLDIDYIGIWNERSYNANYIKVFGE

SEQ ID NO: 5742 - protein, 112 aa, Homo sapiens
MAEWLLSASWQRRAKAMTAAAGSAGRAAVPLLLCALLAPGGAYVLDDSDGLGREFDGIGAVSGGGATSRLLVNYPEPYRSQILDYLFKPNFGASLHILKVEIGGDGQTTDIL

SEQ ID NO: 5743 - protein, 662 aa, Homo sapiens
MAEWLLSASWQRRAKAMTAAAGSAGRAAVPLLLCALLAPGGAYVLDDSDGLGREFDGIGAVSGGGPNFGASLHILKVEIGGDGQTTDGTEPSHMHYALDENYFRGYEWWLMKEAKKRNPNITLIGLPWSFPGWLGKGFDWPYVNLQLTAYYVVTWIVGAKRYHDLDIDYIGIWNERSYNANYIKILRKMLNYQGLQRVKIIASDNLWESISASMLLDAELFKVVDVIGAHYPGTHSAKDAKLTGKKLWSSEDFSTLNSDMGAGCWGRILNQNYINGYMTSTIAWNLVASYYEQLPYGRCGLMTAQEPWSGHYVVESPVWVSAHTTQFTQPGWYYLKTVGHLEKGGSYVALTDGLGNLTIIIETMSHKHSKCIRPFLPYFNVSQQFATFVLKGSFSEIPELQVWYTKLGKTSERFLFKQLDSLWLLDSDGSFTLSLHEDELFTLTTLTTGRKGSYPLPPKSQPFPSTYKDDFNVDYPFFSEAPNFADQTGVFEYFTNIEDPGEHHFTLRQVLNQRPITWAADASNTISIIGDYNWTNLTIKCDVYIETPDTGGVFIAGRVNKGGILIRSARGIFFWIFANGSYRVTGDLAGWIIYALGRVEVTAKKWYTLTLTIKGHFTSGMLNDKSLWTDIPVNFPKNGWAAIGTHSFEFAQFDNFLVEATR

SEQ ID NO: 5744 - protein, 589 aa, Homo sapiens
MGFMVADLWATSRLLVNYPEPYRSQILDYLFKPNFGASLHILKVEIGGDGQTTDGTEPSHMHYALDENYFRGYEWWLMKEAKKRNPNITLIGLPWSFPGWLGKGFDWPYVNLQLTAYYVVTWIVGAKRYHDLDIDYIGIWNERSYNANYIKILRKMLNYQGLQRVKIIASDNLWESISASMLLDAELFKVVDVIGAHYPGTHSAKDAKLTGKKLWSSEDFSTLNSDMGAGCWGRILNQNYINGYMTSTIAWNLVASYYEQLPYGRCGLMTAQEPWSGHYVVESPVWVSAHTTQFTQPGWYYLKTVGHLEKGGSYVALTDGLGNLTIIIETMSHKHSKCIRPFLPYFNVSQQFATFVLKGSFSEIPELQVWYTKLGKTSERFLFKQLDSLWLLDSDGSFTLSLHEDELFTLTTLTTGRKGSYPLPPKSQPFPSTYKDDFNVDYPFFSEAPNFADQTGVFEYFTNIEDPGEHHFTLRQVLNQRPITWAADASNTISIIGDYNWTNLTIKCDVYIETPDTGGVFIAGRVNKGGILIRSARGIFFWIFANGSYRVTGDLAGWIIYALGRVEVTAKKWYTLTLTIKVAGRRKKT

SEQ ID NO: 5745 - protein, 659 aa, Homo sapiens
MLGKSHGRATHGPLPLADLGIHLPCVKVLHQVTPEEKPAATSRLLVNYPEPYRSQILDYLFKPNFGASLHILKVEIGGDGQTTDGTEPSHMHYALDENYFRGYEWWLMKEAKKRNPNITLIGLPWSFPGWLGKGFDWPYVNLQLTAYYVVTWIVGAKRYHDLDIDYIGIWNERSYNANYIKILRKMLNYQGLQRVKIIASDNLWESISASMLLDAELFKVVDVIGAHYPGTHSAKDAKLTGKKLWSSEDFSTLNSDMGAGCWGRILNQNYINGYMTSTIAWNLVASYYEQLPYGRCGLMTAQEPWSGHYVVESPVWVSAHTTQFTQPGWYYLKTVGHLEKGGSYVALTDGLGNLTIIIETMSHKHSKCIRPFLPYFNVSQQFATFVLKGSFSEIPELQVWYTKLGKTSERFLFKQLDSLWLLDSDGSFTLSLHEDELFTLTTLTTGRKGSYPLPPKSQPFPSTYKDDFNVDYPFFSEAPNFADQTGVFEYFTNIEDPGEHHFTLRQVLNQRPITWAADASNTISIIGDYNWTNLTIKCDVYIETPDTGGVFIAGRVNKGGILIRSARGIFFWIFANGSYRVTGDLAGWIIYALGRVEVTAKKWYTLTLTIKGHFTSGMLNDKSLWTDIPVNFPKNGWAAIGTHSFEFAQFDNFLVEATR

SEQ ID NO: 5746 - protein, 434 aa, Homo sapiens
MLNYQGLQRVKIIASDNLWESISASMLLDAELFKVVDVIGAHYPGTHSAKDAKLTGKKLWSSEDFSTLNSDMGAGCWGRILNQNYINGYMTSTIAWNLVASYYEQLPYGRCGLMTAQEPWSGHYVVESPVWVSAHTTQFTQPGWYYLKTVGHLEKGGSYVALTDGLGNLTIIIETMSHKHSKCIRPFLPYFNVSQQFATFVLKGSFSEIPELQVWYTKLGKTSERFLFKQLDSLWLLDSDGSFTLSLHEDELFTLTTLTTGRKGSYPLPPKSQPFPSTYKDDFNVDYPFFSEAPNFADQTGVFEYFTNIEDPGEHHFTLRQVLNQRPITWAADASNTISIIGDYNWTNLTIKCDVYIETPDTGGVFIAGRVNKGGILIRSARGIFFWIFANGSYRVTGDLAGWIIYALGRVEVTAKKWYTLTLTIKVAGRRKKT

SEQ ID NO: 5747 - protein, 72 aa, Homo sapiens
  VARIANT 1: note = misc_feature - Xaa can be any naturally occurring amino acid
XKLGKTSERFLFKQLDSLWLLDSDGSFTLSLHEDELFTLTTLTTGRKGSYPLPPKSQPFPSTYKDDFNVGPI

SEQ ID NO: 5748 - protein, 404 aa, Homo sapiens
  VARIANT 1: note = misc_feature - Xaa can be any naturally occurring amino acid
XLLSASWQRRAKAMTAAAGSAGRAAVPLLLCALLAPGGAYVLDDSDGLGREFDGIGAVSGGGATSRLLVNYPEPYRSQILDYLFKPNFGASLHILKVEIGGDGQTTDGTEPSHMHYALDENYFRGYEWWLMKEAKKRNPNITLIGLPWSFPGWLGKGFDWPYVNLQLTAYYVVTWIVGAKRYHDLDIDYIGIWNERSYNANYIKILRKMLNYQGLQRVKIIASDNLWESISASMLLDAELFKVVDVIGAHYPGTHSAKDAKLTGKKLWSSEDFSTLNSDMGAGCWGRILNQNYINGYMTSTIAWNLVASYYEQLPYGRCGLMTAQEPWSGHYVVESPVWVSAHTTQFTQPGWYYLKTVGHLEKGGSYVALTDGLGNLTIIIETMVNFCCCYWINSLLYYWKNKI

SEQ ID NO: 5749 - protein, 78 aa, Homo sapiens
MAAVVAATRWWQLLLVLSAAGMGASGAPQPPNILLLLMDDESLPPPRAAGSPRWAPVLPDGCLCPLENAERRSGVPKV

SEQ ID NO: 5750 - protein, 116 aa, Homo sapiens
MAAVVAATRWWQLLLVLSAAGMGASGAPQPPNILLLLMDDESLPPPRAAGSPRWAPVLPDGCLCPLENAERSDCFPEHALQRPGVRVLTAVAGPFSALSGISLLKILCFRISSFHF

SEQ ID NO: 5751 - protein, 522 aa, Homo sapiens
MAAVVAATRWWQLLLVLSAAGMGASGAPQPPNILLLLMDDMGWGDLGVYGEPSRETPNLDRMAAEGLLFPNFYSANPLCSPSRAALLTGRLPIRNGFYTTNAHARNAYTPQEIVGGIPDSEQLLPELLKKAGYVSKIVGKWHLGHRPQFHPLKHGFDEWFGSPNCHFGPYDNKARPNIPVYRDWEMVGRYYEEFPINLKTGEANLTQIYLQEALDFIKRQARHHPFFLYWAVDATHAPVYASKPFLGTSQRGRYGDAVREIDDSIGKILELLQDLHVADNTFVFFTSDNGAALISAPEQGGSNGPFLCGKQTTFEGGMREPALAWWPGHVTAGQVSHQLGSIMDLFTTSLALAGLTPPSDRAIDGLNLLPTLLQGRLMDRPIFYYRGDTLMAATLGQHKAHFWTWTNSWENFRQGIDFCPGQNVSGVTTHNLEDHTKLPLIFHLGRDPGERFPLSFASAEYQEALSRITSVVQQHQEALVPAQPQLNVCNWAVMNWAPPGCEKLGKCLTPPESIPKKCLWSH

SEQ ID NO: 5752 - protein, 170 aa, Homo sapiens
MTGTASSLAARAALLTGRLPIRNGFYTTNAHARNAYTPQEIVGGIPDSEQLLPELLKKAGYVSKIVGKWHLGHRPQFHPLKHGFDEWFGSPNCHFGPYDNKARPNIPVYRDWEMVGRYYEEFPINLKTGEANLTQIYLQEALDFIKRQARHHPFFLYWAVDATHAPVYAS

SEQ ID NO: 5753 - protein, 51 aa, Homo sapiens
SAAGMGASGAPQPPNILLLLMDDMHVFRGQLLRACRCWCQAGRRQTDTFPT

SEQ ID NO: 5754 - protein, 69 aa, Homo sapiens
SAAGMGASGAPQPPNILLLLMDDRGRHCSQDGYPSAMASTPPTPMPETPTHRRRLWAASQTRSSSCRSF

SEQ ID NO: 5755 - protein, 202 aa, Homo sapiens
MRRKEKRLLQAVALVLAALVLLPNVGLWALYRERQPDGTPGGSGAAVAPAAGQGSHSRQKKTFFLGDGQKLKDWHDKEAIRRDAQRVGNGEQGRPYPMTDAERVDQAYRENGFNIYVSDKISLNRSLPDIRHPNCNSKRYLETLPNTSIIIPFHNEGWSSLLRTVHSVLNRSPPELVAEIVLVDDFSDRDLPTASTPSPFVC

SEQ ID NO: 5756 - protein, 541 aa, Homo sapiens
MRRKEKRLLQAVALVLAALVLLPNVGLWALYRERQPDGTPGGSGAAVAPAAGQGSHSRQKKTFFLGDGQKLKDWHDKEAIRRDAQRVGNGEQGRPYPMTDAERVDQAYRENGFNIYVSDKISLNRSLPDIRHPNCNSKRYLETLPNTSIIIPFHNEGWSSLLRTVHSVLNRSPPELVAEIVLVDDFSDRDRIARNRKTIVCPMIDVIDHDDFRYETQAGDAMRGAFDWEMYYKRIPIPPELQKADPSDPFESPVMAGGLFAVDRKWFWELGGYDPGLEIWGGEQYEISFKVWMCGGRMEDIPCSRVGHIYRKYVPYKVPAGVSLARNLKRVAEVWMDEYAEYIYQRRPEYRHLSAGDVAVQKKLRSSLNCKSFKWFMTKIAWDLPKFYPPVEPPAAAWGEIRNVGTGLCADTKHGALGSPLRLEGCVRGRGEAAWNNMQVFTFTWREDIRPGDPQHTKKFCFDAISHTSPVTLYDCHSMKGNQLWKYRKDKTLYHPVSGSCMDCSESDHRIFMNTCNPSSLTQQWLFEHTNSTVLEKFNRN

SEQ ID NO: 5757 - protein, 603 aa, Homo sapiens
MRRKEKRLLQAVALVLAALVLLPNVGLWALYRERQPDGTPGGSGAAVAPAAGQGSHSRQKKTFFLGDGQKLKDWHDKEAIRRDAQRVGNGEQGRPYPMTDAERVDQAYRENGFNIYVSDKISLNRSLPDIRHPNCNSKRYLETLPNTSIIIPFHNEGWSSLLRTVHSVLNRSPPELVAEIVLVDDFSDREHLKKPLEDYMALFPSVRILRTKKREGLIRTRMLGASVATGDVITFLDSHCEANVNWLPPLLDRIARNRKTIVCPMIDVIDHDDFRYETQAGDAMRGAFDWEMYYKRIPIPPELQKADPSDPFESPVMAGGLFAVDRKWFWELGGYDPGLEIWGGEQYEISFKVWMCGGRMEDIPCSRVGHIYRKYVPYKVPAGVSLARNLKRVAEVWMDEYAEYIYQRRPEYRHLSAGDVAVQKKLRSSLNCKSFKWFMTKIAWDLPKFYPPVEPPAAAWGEIRNVGTGLCADTKHGALGSPLRLEGCVRGRGEAAWNNMQVFTFTWREDIRPGDPQHTKKFCFDAISHTSPVTLYDCHSMKGNQLWKYRKDKTLYHPVSGSCMDCSESDHRIFMNTCNPSSLTQQWLFEHTNSTVLEKFNRN

SEQ ID NO: 5758 - protein, 366 aa, Homo sapiens
MRRKEKRLLQAVALVLAALVLLPNVGLWALYRERQPDGTPGGSGAAVAPAAGQGSHSRQKKTFFLGDGQKLKDWHDKEAIRRDAQRVGNGEQGRPYPMTDAERVDQAYRENGFNIYVSDKISLNRSLPDIRHPNCNSKRYLETLPNTSIIIPFHNEGWSSLLRTVHSVLNRSPPELVAEIVLVDDFSDREHLKKPLEDYMALFPSVRILRTKKREGLIRTRMLGASVATGDVITFLDSHCEANVNWLPPLLDRIARNRKTIVCPMIDVIDHDDFRYETQAGDAMRGAFDWEMYYKRIPIPPELQKADPSDPFESPVMAGGLFAVDRKWFWELGGYDPGLEIWGGEQYEISFKVSQLSRRPVLGTAS

SEQ ID NO: 5759 - protein, 581 aa, Homo sapiens [sequence omitted]

SEQ ID NO: 5760 - protein, 31 aa, Homo sapiens
  VARIANT 1: note = misc_feature - Xaa can be any naturally occurring amino acid
XINIYLSDRISLHRRLPERWNPLAPEGALGQ

SEQ ID NO: 5761 - protein, 141 aa, Homo sapiens
ALPEVRHPLCLQQHPQDSLPTASVILCFHDEAWSTLLRTVHSILDTVPRAFLKEIILVDDLSQQGSHGFPPGSSGTTQVCSQRICGQAGGGEVTQEQQEAGCHQGPDAGGHQSHRGCARLHGCPLRVPPRLAGAPPQQNSW

SEQ ID NO: 5762 - protein, 196 aa, Homo sapiens
MERLQLQRRLGCRTFHWFLANVYPELYPSEPRPSFSGKLHNTGLGLCADCQAEGDILGCPMVLAPCSDSRQQQYLQHTSRKEIHFGSPQHLCFAVRQEQVILQNCTEEGLAIHQQHWDFQENGMIVHILSGKCMEAVVQENNKDLYLRPCDEKPASSGVLTRSMLWMNDECQCQKEKRILAIKIQLQVNLKSLYIS

SEQ ID NO: 5763 - protein, 639 aa, Homo sapiens
MLLRKRYRHRPCRLQFLLLLLMLGCVLMMVAMLHPPHHTLHQTVTAQASKHSPEARYRLDFGESQDWVLEAEDEGEEYSPLEGLPPFISLREDQLLVAVALPQARRNQSQGRRGGSYRLIKQPRRQDKEAPKRDWGADEDGEVSEEEELTPFSLDPRGLQEALSARIPLQRALPEVRHPLCLQQHPQDSLPTASVILCFHDEAWSTLLRTVHSILDTVPRAFLKEIILVDDLSQQGQLKSALSEYVARLEGVKLLRSNKRLGAIRARMLGATRATGDVLVFMDAHCECHPGWLEPLLSRIAGDRSRVVSPVIDVIDWKTFQYYPSKDLQRGVLDWKLDFHWEPLPEHVRKALQSPISPIRSPVVPGEVVAMDRHYFQNTGAYDSLMSLRGGENLELSFKAWLCGGSVEILPCSRVGHIYQNQDSHSPLDQEATLRNRVRIAETWLGSFKETFYKHSPEAFSLSKAEKPDCMERLQLQRRLGCRTFHWFLANVYPELYPSEPRPSFSGKLHNTGLGLCADCQAEGDILGCPMVLAPCSDSRQQQYLQHTSRKEIHFGSPQHLCFAVRQEQVILQNCTEEGLAIHQQHWDFQENGMIVHILSGKCMEAVVQENNKDLYLRPCDGKARQQWRFDQINAVDER

SEQ ID NO: 5764 - protein, 617 aa, Homo sapiens
MLLRKRYRHRPCRLQFLLLLLMLGCVLMMVAMLHPPHHTLHQTVTAQASKHSPEARYRLDFGESQDWVLEAEDEGEEYSPLEGLPPFISLREDQLLVAVALPQARRNQSQGRRGGSYRLIKQPRRQDKEAPKRDWGADEDGEVSEEEELTPFSLDPRGLQEALSARIPLQRALPEVRHPLCLQQHPQDSLPTASVILCFHDEAWSTLLRTVHSILDTVPRAFLKEIILVDDLSQQGQLKSALSEYVARLEGVKLLRSNKRLGAIRARMLGATRATGDVLVFMDAHCECHPGWLEPLLSRIAGDRSRVVSPVIDVIDWKTFQYYPSKDLQRGVLDWKLDFHWEPLPEHVRKALQSPISPIRSPVVPGEVVAMDRHYFQNTGAYDSLMSLRGGENLELSFKAWLCGGSVEILPCSRVGHIYQNQDSHSPLDQEATLRNRVRIAETWLGSFKETFYKHSPEAFSLSKAEKPDCMERLQLQRRLGCRTFHWFLANVYPELYPSEPRPSFSGKLHNTGLGLCADCQAEGDILGCPMVLAPCSDSRQQQYLQHTSRKEIHFGSPQHLCFAVRQEQVILQNCTEEGLAIHQQHWDFQEDENRANSAAAEAYQRPLTFQQIVNNG

SEQ ID NO: 5765 - protein, 571 aa, Homo sapiens
MRRRSRMLLCFAFLWVLGIAYYMYSGGGSALAGGAGGGAGRKEDWNEIDPIKKKDLHHSNGEEKAQSMETLPPGKVRWPDFNQEAYVGGTMVRSGQDPYARNKFNQVESDKLRMDRAIPDTRHDQCQRKQWRVDLPATSVVITFHNEARSALLRTVVSVLKKSPPHLIKEIILVDDYSNDPEDGALLGKIEKVRVLRNDRREGLMRSRVRGADAAQAKVLTFLDSHCECNEHWLEPLLERVAEDRTRVVSPIIDVINMDNFQYVGASADLKGGFDWNLVFKWDYMTPEQRRSRQGNPVAPIKTPMIAGGLFVMDKFYFEELGKYDMMMDVWGGENLEISFRVWQCGGSLEIIPCSRVGHVFRKQHPYTFPGGSGTVFARNTRRAAEVWMDEYKNFYYAAVPSARNVPYGNIQSRLELRKKLSCKPFKWYLENVYPELRVPDHQDIAFGALQQGTNCLDTLGHFADGVVGVYECHNAGGNQEWALTKEKSVKHMDLCLTVVDRAPGSLIKLQGCRENDSRQKWEQIEGNSKLRHVGSNLCLDSRTAKSGGLSVEVCGPALSQQWKFTLNLQQ

SEQ ID NO: 5766 - protein, 23 aa, Homo sapiens
MRLLRRRHMPLRLAMVGCAFVLF

SEQ ID NO: 5767 - protein, 23 aa, Homo sapiens
MRLLRRRHMPLRLAMVGCAFVLF

SEQ ID NO: 5768 - protein, 39 aa, Homo sapiens
MRLLRRRHMPLRLAMVGCAFVLFLFLLHRDVSSREEATE

SEQ ID NO: 5769 - protein, 55 aa, Homo sapiens
MRLLRRRHMPLRLAMVGCAFVLFLFLLHRDVSSREEATEKPWLKSLVSRKDHVLD

SEQ ID NO: 5770 - protein, 62 aa, Homo sapiens
MRLLRRRHMPLRLAMVGCAFVLFLFLLHRDVSSREEATEKPWLKSLVSRKDHVLDLMLEAMN

SEQ ID NO: 5771 - protein, 69 aa, Homo sapiens
MRLLRRRHMPLRLAMVGCAFVLFLFLLHRDVSSREEATEKPWLKSLVSRKDHVLDLMLEAMNNLRDSMP

SEQ ID NO: 5772 - protein, 78 aa, Homo sapiens
MRLLRRRHMPLRLAMVGCAFVLFLFLLHRDVSSREEATEKPWLKSLVSRKDHVLDLMLEAMNNLRDSMPKLQIRAPEA

SEQ ID NO: 5773 - protein, 123 aa, Homo sapiens
MRLLRRRHMPLRLAMVGCAFVLFLFLLHRDVSSREEATEKPWLKSLVSRKDHVLDLMLEAMNNLRDSMPKLQIRAPEAQQTLFSINQSCLPGFYTPAELKPFWERPPQDPNAPGADGKAFQKS

SEQ ID NO: 5774 - protein, 137 aa, Homo sapiens
MRLLRRRHMPLRLAMVGCAFVLFLFLLHRDVSSREEATEKPWLKSLVSRKDHVLDLMLEAMNNLRDSMPKLQIRAPEAQQTLFSINQSCLPGFYTPAELKPFWERPPQDPNAPGADGKAFQKSKWTPLETQEKEEGY

SEQ ID NO: 5775 - protein, 622 aa, Homo sapiens
MRLLRRRHMPLRLAMVGCAFVLFLFLLHRDVSSREEATEKPWLKSLVSRKDHVLDLMLEAMNNLRDSMPKLQIRAPEAQQTLFSINQSCLPGFYTPAELKPFWERPPQDPNAPGADGKAFQKSKWTPLETQEKEEGYKKHCFNAFASDRISLQRSLGPDTRPPECVDQKFRRCPPLATTSVIIVFHNEAWSTLLRTVYSVLHTTPAILLKEIILVDDASTEEHLKEKLEQYVKQLQVVRVVRQEERKGLITARLLGASVAQAEVLTFLDAHCECFHGWLEPLLARIAEDKTVVVSPDIVTIDLNTFEFAKPVQRGRVHSRGNFDWSLTFGWETLPPHEKQRRKDETYPIKSPTFAGGLFSISKSYFEHIGTYDNQMEIWGGENVEMSFRVWQCGGQLEIIPCSVVGHVFRTKSPHTFPKGTSVIARNQVRLAEVWMDSYKKIFYRRNLQAAKMAQEKSFGDISERLQLREQLHCHNFSWYLHNVYPEMFVPDLTPTFYGAIKNLGTNQCLDVGENNRGGKPLIMYSCHGLGGNQYFEYTTQRDLRHNIAKQLCLHVSKGALGLGSCHFTGKNSQVPKDEEWELAQDQLIRNSGSGTCLTSQDKKPAMAPCNPSDPHQLWLFV

SEQ ID NO: 5776 - protein, 365 aa, Homo sapiens
MRLLRRRHMPLRLAMVGCAFVLFLFLLHRDVSSREEATEKPWLKSLVSRKDHVLDLMLEAMNNLRDSMPKLQIRAPEAQQTLFSINQSCLPGFYTPAELKPFWERPPQDPNAPGADGKAFQKSKWTPLETQEKEEGYKKHCFNAFASDRISLQRSLGPDTRPPECVDQKFRRCPPLATTSVIIVFHNEAWSTLLRTVYSVLHTTPAILLKEIILVDDASTEEHLKEKLEQYVKQLQVVRVVRQEERKGLITARLLGASVAQAEVLTFLDAHCECFHGWLEPLLARIAEDKTVVVSPDIVTIDLNTFEFAKPVQRGRVHSRGNFDWSLTFGWETLPPHEKQRRKDETYPIKCGSVGASWRSSPALS

SEQ ID NO: 5777 - protein, 622 aa, Homo sapiens; identical to SEQ ID NO: 5775

SEQ ID NO: 5778 - protein, 637 aa, Homo sapiens
MMFWRKLPKALFIGLTLAIAVNLLLVFSSKGTLQNLFTGGLHRELPLHLNKRYGAVIKRLSHLEVELQDLKESMKLALRQQENVNSTLKRAKDEVRPLLKAMETKVNETKKHKTQMKLFPHSQLFRQWGEDLSEAQQKAAQDLFRKFGYNAYLSNQLPLNRTIPDTRDYRCLRKTYPSQLPSLSVILIFVNEALSIIQRAITSIINRTPSRLLKEIILVDDFSSNGELKVHLDEKIKLYNQKYPGLLKIIRHPERKGLAQARNTGWEAATADVVAILDAHIEVNVGWAEPILARIQEDRTVIVSPVFDNIRFDTFKLDKYELAVDGFNWELWCRYDALPQAWIDLHDVTAPVKSPSIMGILAANRHFLGEIGSLDGGMLIYGGENVELSLRVWQCGGKVEILPCSRIAHLERHHKPYALDLTAALKRNALRVAEIWMDEHKHMVYLAWNIPLQNSGIDFGDVSSRMALREKLKCKTFDWYLKNVYPLLKPLHTIVGYGRMKNLLDENVCLDQGPVPGNTPIMYYCHEFSSQNVYYHLTGELYVGQLIAEASASDRCLTDPGKAEKPTLEPCSKAAKNRLHIYWDFKPGGAVINRDTKRCLEMKKDLLGSHVLVLQTCSTQVWEIQHTVRDWGQTNSQ

SEQ ID NO: 5779 - protein, 529 aa, Homo sapiens
MRSEKSLTLAAPGEVRGPEGEQQDAGDFPEAGGGGGCCSSERLVINISGLRFETQLRTLSLFPDTLLGDPGRRVRFFDPLRNEYFFDRNRPSFDAILYYYQSGGRLRRPVNVPLDIFLEEIRFYQLGDEALAAFREDEGCLPEGGEDEKPLPSQPFQRQVWLLFEYPESSGPARGIAIVSVLVILISIVIFCLETLPQFRVDGRGGNNGGVSRVSPVSRGSQEEEEDEDDSYTFHHGITPGEMGTGGSSSLSTLGGSFFTDPFFLVETLCIVWFTFELLVRFSACPSKPAFFRNIMNIIDLVAIFPYFITLGTELVQQQEQQPASGGGGQNGQQAMSLAILRVIRLVRVFRIFKLSRHSKGLQILGKTLQASMRELGLLIFFLFIGVILFSSAVYFAEADDDDSLFPSIPDAFWWAVVTMTTVGYGDMYPMTVGGKIVGSLCAIAGVLTIALPVPVIVSNFNYFYHRETEQEEQGQYTHVTCGQPAPDLRATDNGLGKPDFPEANRERRPSYLPTPHRAYAEKRMLTEV

SEQ ID NO: 5780 - protein, 88 aa, Homo sapiens
  VARIANT 1: note = misc_feature - Xaa can be any naturally occurring amino acid
XENVCLDQGPVPGNTPIMYYCHEFSSQNVYYHLTGELYVGQLIAEASASDRCLTDPGKAEKPTLEPCSKAAKNRLHIYWDFKPPTITK

SEQ ID NO: 5781 - protein, 161 aa, Homo sapiens
  VARIANT 1: note = misc_feature - Xaa can be any naturally occurring amino acid
XYPLLKPLHTIVGYGRMKNLLDENVCLDQGPVPGNTPIMYYCHEFSSQNVYYHLTGELYVGQLIAEASASDRCLTDPGKAEKPTLEPCSKAAKNRLHIYWDFKPEKCWQVVQARTSMHRILTAAGPSTSSEDENPAWHRWQASGLTPLWRPPTSSNQARKS

SEQ ID NO: 5782 - protein, 417 aa, Homo sapiens
EHLKDKLEEYMARFSKVRIVRTKKREGLIRTRLLGASMARGEVLTFLDSHCEVNVNWLPPLLNQIALNHKTIVCPMIDVIDHNHFGYEAQAGDAMRGAFDWEMYYKRIPIPPELQRADPSDPFESPVMAGGLFAVDRKWFWELGGYDPGLEIWGGEQYEISFKVWMCGGEMFDVPCSRVGHIYRKYVPYKVPSGTSLARNLKRVAETWMDEFAEYIYQRRPEYRHLSTGDISAQKELRKQLKCKDFKWFMAAVAWDVPKYYPPVEPPPAAWGEIRNVAANLCVDSKHGATGTELRLDICVKDGSERTWSHEQLFTFGWREDIRPGEPLHTRKFCFDAISHNSPVTLYDCHGMKGNQLWGYRKDRTLFHPVSNSCMDCNPAEKKIFMARCDPLSETQQWIFEHINMTVLEKFNHHANS

SEQ ID NO: 5783 - protein, 601 aa, Homo sapiens
MKRKQKRFLQMTLLFTVALIFLPNVGLWSLYKDKHLVKSAEPGEQQTFPLGLGDGQFYSWTDGLRRKDWHDYESIQKEAMRSGKGEHGKPYPLTEEDHDDSAYRENGFNIFVSNNIALERSLPDIRHANCKHKMYLERLPNTSIIIPFHNEGWTSLLRTIHSIINRTPGSLIAEIILVDDFSEREHLKDKLEEYMARFSKVRIVRTKKREGLIRTRLLGASMARGEVLTFLDSHCEVNVNWLPPLLNQIALNHKTIVCPMIDVIDHNHFGYEAQAGDAMRGAFDWEMYYKRIPIPPELQRADPSDPFESPVMAGGLFAVDRKWFWELGGYDPGLEIWGGEQYEISFKVWMCGGEMFDVPCSRVGHIYRKYVPYKVPSGTSLARNLKRVAETWMDEFAEYIYQRRPEYRHLSTGDISAQKELRKQLKCKDFKWFMAAVAWDVPKYYPPVEPPPAAWGEIRNVAANLCVDSKHGATGTELRLDICVKDGSERTWSHEQLFTFGWREDIRPGEPLHTRKFCFDAISHNSPVTLYDCHGMKGNQLWGYRKDRTLFHPVSNSCMDCNPAEKKIFMARCDPLSETQQWIFEHINMTVLEKFNHHANS

SEQ ID NO: 5784 - protein, 61 aa, Homo sapiens
MKRKQKRFLQMTLLFTVALIFLPNVGLWSLYKDKHLVKSAEPGEQQVSATQRKITQGLVRQ

SEQ ID NO: 5785 - protein, 584 aa, Homo sapiens
MRAKFRAGAGHQRNPSISADHGVHELVYQTFPLGLGDGQFYSWTDGLRRKDWHDYESIQKEAMRSGKGEHGKPYPLTEEDHDDSAYRENGFNIFVSNNIALERSLPDIRHANCKHKMYLERLPNTSIIIPFHNEGWTSLLRTIHSIINRTPGSLIAEIILVDDFSEREHLKDKLEEYMARFSKVRIVRTKKREGLIRTRLLGASMARGEVLTFLDSHCEVNVNWLPPLLNQIALNHKTIVCPMIDVIDHNHFGYEAQAGDAMRGAFDWEMYYKRIPIPPELQRADPSDPFESPVMAGGLFAVDRKWFWELGGYDPGLEIWGGEQYEISFKVWMCGGEMFDVPCSRVGHIYRKYVPYKVPSGTSLARNLKRVAETWMDEFAEYIYQRRPEYRHLSTGDISAQKELRKQLKCKDFKWFMAAVAWDVPKYYPPVEPPPAAWGEIRNVAANLCVDSKHGATGTELRLDICVKDGSERTWSHEQLFTFGWREDIRPGEPLHTRKFCFDAISHNSPVTLYDCHGMKGNQLWGYRKDRTLFHPVSNSCMDCNPAEKKIFMARCDPLSETQQWIFEHINMTVLEKFNHHANS

SEQ ID NO: 5786 - protein, 116 aa, Homo sapiens
MAPPSVPLVLLLVLLLSLAETPASAPAHRGRGGWTLNSAGYLLGPVLHLPQMGDQDGKRETALEILDLWKAIDGLPYSHPPQPSKRNVMETFAKPEIGDLGMLSMKIPKEEDVLKS

SEQ ID NO: 5787 - protein, 49 aa, Homo sapiens
MAPPSVPLVLLLVLLLSLAETPASAPAHRSSTFPKWVTKTERGRQPLRS

SEQ ID NO: 5788 - protein, 49 aa, Homo sapiens; identical to SEQ ID NO: 5787

SEQ ID NO: 5789 - protein, 119 aa, Homo sapiens
MAAVAAVAARRRRLSVSGRDENSVELTMAEGPYKIILTARPFRLDLLEDRSLLLSVNARGLLEFEHQRAPRVSFSDKVNLTLGSIWDKIKNLFSRQGSKDPAEGDGAQPEETPRDGDKA

SEQ ID NO: 5790 - protein, 852 aa, Homo sapiens
MAAVAAVAARRRRLSVSGRDENSVELTMAEGPYKIILTARPFRLDLLEDRSLLLSVNARGLLEFEHQRAPRVSFSDKVNLTLGSIWDKIKNLFSRQGSKDPAEGDGAQPEETPRDGDKPEETQGKAEKDEPGAWEETFKTHSDSKPYGPMSVGLDFSLPGMEHVYGIPEHADNLRLKVTEGGEPYRLYNLDVFQYELYNPMALYGSVPVLLAHNPHRDLGIFWLNAAETWVDISSNTAGKTLFGKMMDYLQGSGETPQTDVRWMSETGIIDVFLLLGPSISDVFRQYASLTGTQALPPLFSLGYHQSRWNYRDEADVLEVDQGFDDHNLPCDVIWLDIEHADGKRYFTWDPSRFPQPRTMLERLASKRRKLVAIVDPHIKVDSGYRVHEELRNLGLYVKTRDGSDYEGWCWPGSAGYPDFTNPTMRAWWANMFSYDNYEGSAPNLFVWNDMNEPSVFNGPEVTMLKDAQHYGGWEHRDVHNIYGLYVHMATADGLRQRSGGMERPFVLARAFFAGSQRFGAVWTGDNTAEWDHLKISIPMCLSLGLVGLSFCGADVGGFFKNPEPELLVRWYQMGAYQPFFRAHAHLDTGRREPWLLPSQHNDIIRDALGQRYSLLPFWYTLLYQAHREGIPVMRPLWVQYPQDVTTFNIDDQYLLGDALLVHPVSDSGAHGVQVYLPGQGEVWYDIQSYQKHHGPQTLYLPVTLSSIPVFQRGGTIVPRWMRVRRSSECMKDDPITLFVALSPQGTAQGELFLDDGHTFNYQTRQEFLLRRFSFSGNTLVSSSADPEGHFETPIWIERVVIIGAGKPAAVVLQTKGSPESRLSFQHDPETSVLVLRKPGINVASDWSIHLR

SEQ ID NO: 5791 - protein, 76 aa, Homo sapiens
MAAVAAVAARRRRSWASLVLAFLGVCLGITLAVDRSNFKTCEESSFCDREAYGQASLHTEPCWTLYSLVLIPSRSI

SEQ ID NO: 5792 - protein, 52 aa, Homo sapiens
MAAVAAVAARRRRSWASLVLAFLGVCLGITLAVDRSNFKTCEESSFCKCCWC

SEQ ID NO: 5793 - protein, 52 aa, Homo sapiens; identical to SEQ ID NO: 5792

SEQ ID NO: 5794 - protein, 52 aa, Homo sapiens; identical to SEQ ID NO: 5792

SEQ ID NO: 5795 - protein, 966 aa, Homo sapiens
MAAVAAVAARRRRSWASLVLAFLGVCLGITLAVDRSNFKTCEESSFCKRQRSIRPGLSPYRALLDSLQLGPDSLTVHLIHEVTKVLLVLELQGLQKNMTRFRIDELEPRRPRYRVPDVLVADPPIARLSVSGRDENSVELTMAEGPYKIILTARPFRLDLLEDRSLLLSVNARGLLEFEHQRAPRVSFSDKVNLTLGSIWDKIKNLFSRQGSKDPAEGDGAQPEETPRDGDKPEETQGKAEKDEPGAWEETFKTHSDSKPYGPMSVGLDFSLPGMEHVYGIPEHADNLRLKVTEGGEPYRLYNLDVFQYELYNPMALYGSVPVLLAHNPHRDLGIFWLNAAETWVDISSNTAGKTLFGKMMDYLQGSGETPQTDVRWMSETGIIDVFLLLGPSISDVFRQYASLTGTQALPPLFSLGYHQSRWNYRDEADVLEVDQGFDDHNLPCDVIWLDIEHADGKRYFTWDPSRFPQPRTMLERLASKRRKLVAIVDPHIKVDSGYRVHEELRNLGLYVKTRDGSDYEGWCWPGSAGYPDFTNPTMRAWWANMFSYDNYEGSAPNLFVWNDMNEPSVFNGPEVTMLKDAQHYGGWEHRDVHNIYGLYVHMATADGLRQRSGGMERPFVLARAFFAGSQRFGAVWTGDNTAEWDHLKISIPMCLSLGLVGLSFCGADVGGFFKNPEPELLVRWYQMGAYQPFFRAHAHLDTGRREPWLLPSQHNDIIRDALGQRYSLLPFWYTLLYQAHREGIPVMRPLWVQYPQDVTTFNIDDQYLLGDALLVHPVSDSGAHGVQVYLPGQGEVWYDIQSYQKHHGPQTLYLPVTLSSIPVFQRGGTIVPRWMRVRRSSECMKDDPITLFVALSPQGTAQGELFLDDGHTFNYQTRQEFLLRRFSFSGNTLVSSSADPEGHFETPIWIERVVIIGAGKPAAVVLQTKGSPESRLSFQHDPETSVLVLRKPGINVASDWSIHLR

SEQ ID NO: 5796 - protein, 944 aa, Homo sapiens
MAAVAAVAARRRRSWASLVLAFLGVCLGITLAVDRSNFKTCEESSFCKRQRSIRPGLSPYRALLDSLQLGPDSLTVHLIHEVTKVLLVLELQGLQKNMTRFRIDELEPRRPRYRVPDVLVADPPIARLSVSGRDENSVELTMAEGPYKIILTARPFRLDLLEDRSLLLSVNARGLLEFEHQRAPRVSQGSKDPAEGDGAQPEETPRDGDKPEETQGKAEKDEPGAWEETFKTHSDSKPYGPMSVGLDFSLPGMEHVYGIPEHADNLRLKVTEGGEPYRLYNLDVFQYELYNPMALYGSVPVLLAHNPHRDLGIFWLNAAETWVDISSNTAGKTLFGKMMDYLQGSGETPQTDVRWMSETGIIDVFLLLGPSISDVFRQYASLTGTQALPPLFSLGYHQSRWNYRDEADVLEVDQGFDDHNLPCDVIWLDIEHADGKRYFTWDPSRFPQPRTMLERLASKRRKLVAIVDPHIKVDSGYRVHEELRNLGLYVKTRDGSDYEGWCWPGSAGYPDFTNPTMRAWWANMFSYDNYEGSAPNLFVWNDMNEPSVFNGPEVTMLKDAQHYGGWEHRDVHNIYGLYVHMATADGLRQRSGGMERPFVLARAFFAGSQRFGAVWTGDNTAEWDHLKISIPMCLSLGLVGLSFCGADVGGFFKNPEPELLVRWYQMGAYQPFFRAHAHLDTGRREPWLLPSQHNDIIRDALGQRYSLLPFWYTLLYQAHREGIPVMRPLWVQYPQDVTTFNIDDQYLLGDALLVHPVSDSGAHGVQVYLPGQGEVWYDIQSYQKHHGPQTLYLPVTLSSIPVFQRGGTIVPRWMRVRRSSECMKDDPITLFVALSPQGTAQGELFLDDGHTFNYQTRQEFLLRRFSFSGNTLVSSSADPEGHFETPIWIERVVIIGAGKPAAVVLQTKGSPESRLSFQHDPETSVLVLRKPGINVASDWSIHLR

SEQ ID NO: 5797 - protein, 847 aa, Homo sapiens
MTRFRIDELEPRRPRYRVPDVLVADPPIARLSVSGRDENSVELTMAEGPYKIILTARPFRLDLLEDRSLLLSVNARGLLEFEHQRAPRVSQGSKDPAEGDGAQPEETPRDGDKPEETQGKAEKDEPGAWEETFKTHSDSKPYGPMSVGLDFSLPGMEHVYGIPEHADNLRLKVTEGGEPYRLYNLDVFQYELYNPMALYGSVPVLLAHNPHRDLGIFWLNAAETWVDISSNTAGKTLFGKMMDYLQGSGETPQTDVRWMSETGIIDVFLLLGPSISDVFRQYASLTGTQALPPLFSLGYHQSRWNYRDEADVLEVDQGFDDHNLPCDVIWLDIEHADGKRYFTWDPSRFPQPRTMLERLASKRRKLVAIVDPHIKVDSGYRVHEELRNLGLYVKTRDGSDYEGWCWPGSAGYPDFTNPTMRAWWANMFSYDNYEGSAPNLFVWNDMNEPSVFNGPEVTMLKDAQHYGGWEHRDVHNIYGLYVHMATADGLRQRSGGMERPFVLARAFFAGSQRFGAVWTGDNTAEWDHLKISIPMCLSLGLVGLSFCGADVGGFFKNPEPELLVRWYQMGAYQPFFRAHAHLDTGRREPWLLPSQHNDIIRDALGQRYSLLPFWYTLLYQAHREGIPVMRPLWVQYPQDVTTFNIDDQYLLGDALLVHPVSDSGAHGVQVYLPGQGEVWYDIQSYQKHHGPQTLYLPVTLSSIPVFQRGGTIVPRWMRVRRSSECMKDDPITLFVALSPQGTAQGELFLDDGHTFNYQTRQEFLLRRFSFSGNTLVSSSADPEGHFETPIWIERVVIIGAGKPAAVVLQTKGSPESRLSFQHDPETSVLVLRKPGINVASDWSIHLR

SEQ ID NO: 5798 - protein, 79 aa, Homo sapiens
MPSPRPVLLRGARAALLLLLPPRLLARPSLLLRRSLSAASCPPISLPAAASRSSMDGAGAEEVLAPLRLAVRQQAVWNQ

SEQ ID NO: 5799 - protein, 79 aa, Homo sapiens; identical to SEQ ID NO: 5798

SEQ ID NO: 5800 - protein, 739 aa, Homo sapiens
MPSPRPVLLRGARAALLLLLPPRLLARPSLLLRRSLSAASCPPISLPAAASRSSMDGAGAEEVLAPLRLAVRQQGDLVRKLKEDKAPQVDVDKAVAELKARKRVLEAKELALQPKDDIVDRAKMEDTLKRRFFYDQAFAIYGGVSGLYDFGPVGCALKNNIIQTWRQHFIQEEQILEIDCTMLTPEPVLKTSGHVDKFADFMVKDVKNGECFRADHLLKAHLQKLMSDKKCSVEKKSEMESVLAQLDNYGQQELADLFVNYNVKSPITGNDLSPPVSFNLMFKTFIGPGGNMPGYLRPETAQGIFLNFKRLLEFNQGKLPFAAAQIGNSFRNEISPRSGLIRVREFTMAEIEHFVDPSEKDHPKFQNVADLHLYLYSAKAQVSGQSARKMRLGDAVEQGVINNTVLGYFIGRIYLYLTKVGISPDKLRFRQHMENEMAHYACDCWDAESKTSYGWIEIVGCADRSCYDLSCHARATKVPLVAEKPLKEPKTVNVVQFEPSKGAIGKAYKKDAKLVMEYLAICDECYITEMEMLLNEKGEFTIETEGKTFQLTKDMINVKRFQKTLYVEEVVPNVIEPSFGLGRIMYTVFEHTFHVREGDEQRTFFSFPAVVAPFKCSVLPLSQNQEFMPFVKELSEALTRHGVSHKVDDSSGSIGRRYARTDEIGVAFGVTIDFDTVNKTPHTATLRDRDSMRQIRAEISELPSIVQDLANGNITWADVEARYPLFEGQETGKKETIEE

SEQ ID NO: 5801 - protein, 77 aa, Homo sapiens
VVQFEPSKGAIGKAYKKDAKLVMEYLAICDECYITEMEMLLNEKGEFTIETEGKTFQLTKDMINVKRFQKTLYEQIL

SEQ ID NO: 5802 - protein, 345 aa, Homo sapiens
MVAALLGGGGEARGGTVPGAWLCLMALLQLLGSAPRGSGLAHGRRLICWQALLQCQGEPECSYAYNQYAEACAPVLAQHGGGDAPGAAAAAFPASAASFSSRWRCPSHCISALIQLNHTRRGPALEDCDCAQDENCKSTKRAIEPCLPRTSGGGAGGPGAGGVMGCTEARRRCDRDSRCNLALSRYLTYCGKVFNGLRCTDECRTVIEDMLAMPKAALLNDCVCDGLERPICESVKENMARLCFGAELGNGPGSSGSDGGLDDYYDEDYDDEQRTGGAGGEQPLDDDDGVPHPPRPGSGAAASGGRGDLPYGPGRRSSGGGGRLAPRGAWTPLASILLLLLGPLF

SEQ ID NO: 5803 - protein, 678 aa, Homo sapiens
MAPSLSPGPAALRRAPQLLLLLLAAECALAALLPAREATQFLRPRQRRAFQVFEEAKQGHLERECVEELCSREEAREVFENDPETDYFYPRYLDCINKYGSPYTKNSGFATCVQNLPDQCTPNPCDRKGTQACQDLMGNFFCLCKAGWGGRLCDKDVNECSQENGGCLQICHNKPGSFHCSCHSGFELSSDGRTCQDIDECADSEACGEARCKNLPGSYSCLCDEGFAYSSQEKACRDVDECLQGRCEQVCVNSPGSYTCHCDGRGGLKLSQDMDTCEDILPCVPFSVAKSVKSLYLGRMFSGTPVIRLRFKRLQPTRLVAEFDFRTFDPEGILLFAGGHQDSTWIVLALRAGRLELQLRYNGVGRVTSSGPVINHGMWQTISVEELARNLVIKVNRDAVMKIAVAGDLFQPERGLYHLNLTVGGIPFHEKDLVQPINPRLDGCMRSWNWLNGEDTTIQETVKVNTRMQCFSVTERGSFYPGSGFAFYSLDYMRTPLDVGTESTWEVEVVAHIRPAADTGVLFALWAPDLRAVPLSVALVDYHSTKKLKKQLVVLAVEHTALALMEIKVCDGQEHVVTVSLRDGEATLEVDGTRGQSEVSAAQLQERLAVLERHLRSPVLTFAGGLPDVPVTSAPVTAFYRGCMTLEVNRRLLDLDEAAYKHSDITAHSCPPVEPAAA

SEQ ID NO: 5804 - protein, 101 aa, Homo sapiens
MQRLCVYVLIFALALAAFSEASWKPRSQQPDAPLGTGANRDLELPWLEQQGPASHHRRQLGPQGPPHLVADPSKKQGPWLEEEEEAYGWMDFGRRSAEDEN

SEQ ID NO: 5805 - protein, 144 aa, Homo sapiens
KLESIDGARYHALLIPSCPGALTDLASSGSLARILQHFHSESKPICAVGHGVAALCCATNEDRSWVFDSYSLTGPSVCELVRAPGFARLPLVVEDFVKDSGACFSGLGAAPGWGRGGKQEDRPPEEQRRAGEDFPIYQCVFIYP

SEQ ID NO: 5806 - protein, 184 aa, Homo sapiens
MASERLPNRPACLLVASGAAEGVSAQSFLHCFTMASTAFNLQVATPGGKAMEFVDVTESNARWVQDFRLKAYASPAKLESIDEPICAVGHGVAALCCATNEDRSWVFDSYSLTGPSVCELVRAPGFARLPLVVEDFVKDSGACFSASEPDAVHVVLDRHLVTGQNASSTVPAVQNLLFLCGSRK

SEQ ID NO: 5807 - protein, 184 aa, Homo sapiens; identical to SEQ ID NO: 5806

SEQ ID NO: 5808 - protein, 186 aa, Homo sapiens
MASERLPNRPACLLVASGAAEGVSAQSFLHCFTMASTAFNLQVATPGGKAMEFVDVTESNARWVQDFRLKAYASPAKLESIDGARYHALLIPSCPGALTDLASSGSLARILQHFHSESKPICAVGHGVAALCCATNEDRSWVFDSYSLTGGLGLSQEPPPRSRSPLCVSSSGPPASPACRSWWRTS

SEQ ID NO: 5809 - protein, 220 aa, Homo sapiens
MASERLPNRPACLLVASGAAEGVSAQSFLHCFTMASTAFNLQVATPGGKAMEFVDVTESNARWVQDFRLKAYASPAKLESIDGARYHALLIPSCPGALTDLASSGSLARILQHFHSESKPICAVGHGVAALCCATNEDRSWVFDSYSLTGPSVCELVRAPGFARLPLVVEDFVKDSGACFSASEPDAVHVVLDRHLVTGQNASSTVPAVQNLLFLCGSRK

SEQ ID NO: 5810 - protein, 250 aa, Homo sapiens
MASERLPNRPACLLVASGAAEGVSAQSFLHCFTMASTAFNLQVATPGGKAMEFVDVTESNARWVQDFRLKAYASPAKLESIDGARYHALLIPSCPGALTDLASSGSLARILQHFHSESKPICAVGHGVAALCCATNEDRSWVFDSYSLTGPSVCELVRAPGFARLPLVVEDFVKDSGACFSGAAASCPKADRHWQHFPVEEIFLACGFKVAGLGAAPGWGRGGKQEDRPPEEQRRAGEDFPIYQCVFIYP

SEQ ID NO: 5811 - protein, 120 aa, Homo sapiens
MASERLPNRPACLLVASGAAEGVSAQSFLHCFTMASTAFNLQVATPGGKAMEFVDVTESNARWVQDFRLKAYASPAKLESIDGARYHALLIPSCPGALTDLASSGSLARILQHFHSESSR

SEQ ID NO: 5812 - protein, 162 aa, Homo sapiens
WVQDFRLKAYASPAKLESIDGARYHALLIPSCPGALTDLASSGSLARILQHFHSESKPICAVGHGVAALCCATNEDRSWVFDSYSLTGPSVCELVRAPGFARLPLVVEDFVKDSGACFSGQGLGQHQAGAEEESKRTDLQKSSGGRVRISPYTSVCSSTHEE

SEQ ID NO: 5813 - protein, 87 aa, Homo sapiens
  VARIANT 1: note = misc_feature - Xaa can be any naturally occurring amino acid
XPSVCELVRAPGFARLPLVVEDFVKDSGACFSASEPDAVHVVLDRHLVTGQNASSTVPAVQNLLFLCGSRSSSLLPQGRPALAALSC

SEQ ID NO: 5814 - protein, 487 aa, Homo sapiens
MEFSSPSREECPKPLSRVSIMAGSLTGLLLLQAVSWASGARPCIPKSFGYSSVVCVCNATYCDSFDPPTFPALGTFSRYESTRSGRRMELSMGPIQANHTGTGIGYNIIRVPMASCDFSIRTYTYADTPDDFQLHNFSLPEEDTKLKIPLIHRALQLAQRPVSLLASPWTSPTWLKTNGAVNGKGSLKGQPGDIYHQTWARYFVKFLDAYAEHKLQFWAVTAENEPSAGLLSGYPFQCLGFTPEHQRDFIARDLGPTLANSTHHNVRLLMLDDQRLLLPHWAKVVLTDPEAAKYVHGIAVHWYLDFLAPAKATLGETHRLFPNTMLFASEACVGSKFWEQSVRLGSWDRGMQYSHSIITNLLYHVVGWTDWNLALNPEGGPNWVRNFVDSPIIVDITKDTFYKQPMFYHLGHFSKFIPEGSQRVGLVASQKNDLDAVALMHPDGSAVVVVLNRSSKDVPLTIKDPAVGFLETISPGYSIHTYLWRRQ

SEQ ID NO: 5815 - protein, 536 aa, Homo sapiens
MEFSSPSREECPKPLSRVSIMAGSLTGLLLLQAVSWASGARPCIPKSFGYSSVVCVCNATYCDSFDPPTFPALGTFSRYESTRSGRRMELSMGPIQANHTGTGLLLTLQPEQKFQKVKGFGGAMTDAAALNILALSPPAQNLLLKSYFSEEGIGYNIIRVPMASCDFSIRTYTYADTPDDFQLHNFSLPEEDTKLKIPLIHRALQLAQRPVSLLASPWTSPTWLKTNGAVNGKGSLKGQPGDIYHQTWARYFVKFLDAYAEHKLQFWAVTAENEPSAGLLSGYPFQCLGFTPEHQRDFIARDLGPTLANSTHHNVRLLMLDDQRLLLPHWAKVVLTDPEAAKYVHGIAVHWYLDFLAPAKATLGETHRLFPNTMLFASEACVGSKFWEQSVRLGSWDRGMQYSHSIITNLLYHVVGWTDWNLALNPEGGPNWVRNFVDSPIIVDITKDTFYKQPMFYHLGHFSKFIPEGSQRVGLVASQKNDLDAVALMHPDGSAVVVVLNRSSKDVPLTIKDPAVGFLETISPGYSIHTYLWRRQ

SEQ ID NO: 5816 - protein, 536 aa, Homo sapiens; identical to SEQ ID NO: 5815

SEQ ID NO: 5817 - protein, 449 aa, Homo sapiens
MELSMGPIQANHTGTGLLLTLQPEQKFQKVKGFGGAMTDAAALNILALSPPAQNLLLKSYFSEEGIGYNIIRVPMASCDFSIRTYTYADTPDDFQLHNFSLPEEDTKLKIPLIHRALQLAQRPVSLLASPWTSPTWLKTNGAVNGKGSLKGQPGDIYHQTWARYFVKFLDAYAEHKLQFWAVTAENEPSAGLLSGYPFQCLGFTPEHQRDFIARDLGPTLANSTHHNVRLLMLDDQRLLLPHWAKVVLTDPEAAKYVHGIAVHWYLDFLAPAKATLGETHRLFPNTMLFASEACVGSKFWEQSVRLGSWDRGMQYSHSIITNLLYHVVGWTDWNLALNPEGGPNWVRNFVDSPIIVDITKDTFYKQPMFYHLGHFSKFIPEGSQRVGLVASQKNDLDAVALMHPDGSAVVVVLNRSSKDVPLTIKDPAVGFLETISPGYSIHTYLWRRQ

SEQ ID NO: 5818 - protein, 54 aa, Homo sapiens
MHRRRLALGLGFCLLAGTSLSVLWVYLENWLPVSYVPYYLPCPEIFILAAPCMV

SEQ ID NO: 5819 - protein, 160 aa, Homo sapiens
MHRRRLALGLGFCLLAGTSLSVLWVYLENWLPVSYVPYYLPCPEIFNMKLHYKREKPLQPVVWSQYPQPKLLEHRGGSQCPRPPCCQAHTAADTHTLVGAHRLRGNLQPRASAAHLPATEPDHWGHGVCRGEVHSFHPVLPGVSRGVLHAWVPGALLHLH

SEQ ID NO: 5820 - protein, 120 aa, Homo sapiens
MHRRRLALGLGFCLLAGTSLSVLWVYLENWLPVSYVPYYLPCPEIFNMKLHYKREKPLQPVVWSQYPQPKLLEHRPTQLLTLTPWLAPIVSEGTFNPELLQHIYQPLNLTIGVTVFAVGK

SEQ ID NO: 5821 - protein, 347 aa, Homo sapiens
MHRRRLALGLGFCLLAGTSLSVLWVYLENWLPVSYVPYYLPCPEIFNMKLHYKREKPLQPVVWSQYPQPKLLEHRPTQLLTLTPWLAPIVSEGTFNPELLQHIYQPLNLTIGVTVFAVGKYTHFIQSFLESAEEFFMRGYRVHYYIFTDNPAAVPGVPLGPHRLLSSIPIQGHSHWEETSMRRMETISQHIAKRAHREVDYLFCLDVDMVFRNPWGPETLGDLVAAIHPSYYAVPRQQFPYERRRVSTAFVADSEGDFYYGGAVFGGQVARVYEFTRGCHMAILADKANGIMAAWREESHLNRHFISNKPSKVLSPEYLWDDRKPQPPSLKLIRFSTLDKDISCLRS

SEQ ID NO: 5822 - protein, 294 aa, Homo sapiens
MHRRRLALGLGFCLLAGTSLSVLWVYLENWLPVSYVPYYLPCPEIFNMKLHYKREKPLQPVVWSQYPQPKLLEHRPTQLLTLTPWLAPIVSEGTFNPELLQHIYQPLNLTIGVTVFAVGNPSWSQPRSSSCVGTGCTTTSSLTTLQPFPGSRWVPTGFSAPSPSRVTPTGRRHPCAGWRPSASTLLRGLTGRWTTSSALMWTWCFGTRGALRPWETWWLPFTQATTPFPASSSPMSAGVFPLPLWQTAKGTSIMVGQSSGGRWPGYMSLLGAATWPSWRTRPMASWLPGGRKAT

SEQ ID NO: 5823 - protein, 72 aa, Homo sapiens
MHRRRLALGLGFCLLAGTSLSVLWVYLENWLPVSYVPYYLPCPEILLEYRGVISAHCNLHLPGSSNCHASAT

SEQ ID NO: 5824 - protein, 72 aa, Homo sapiens; identical to SEQ ID NO: 5823

SEQ ID NO: 5825 - protein, 160 aa, Homo sapiens
MHRRRLALGLGFCLLAGTSLSVLWVYLENWLPVSYVPYYLPCPEILPMMMALSCLCHQQHEAALQEGEATPARGMVTVPSAQAAGAQAHTAADTHTLVGAHRLRGNLQPRASAAHLPATEPDHWGHGVCRGEVHSFHPVLPGVSRGVLHAWVPGALLHLH

SEQ ID NO: 5826 - protein, 330 aa, Homo sapiens
MHRRRLALGLGFCLLAGTSLSVLWVYLENWLPVSYVPYYLPCPEILSQYPQPKLLEHRPTQLLTLTPWLAPIVSEGTFNPELLQHIYQPLNLTIGVTVFAVGKYTHFIQSFLESAEEFFMRGYRVHYYIFTDNPAAVPGVPLGPHRLLSSIPIQGHSHWEETSMRRMETISQHIAKRAHREVDYLFCLDVDMVFRNPWGPETLGDLVAAIHPSYYAVPRQQFPYERRRVSTAFVADSEGDFYYGGAVFGGQVARVYEFTRGCHMAILADKANGIMAAWREESHLNRHFISNKPSKVLSPEYLWDDRKPQPPSLKLIRFSTLDKDISCLRS

SEQ ID NO: 5827 - protein, 145 aa, Homo sapiens
MKRVLVLLLAVAFGHALERGRDYEKNKVCKEFSHLGKEDFTSLSLVLYSRKFPSGTFEQVSQLVKEVVSLTEACCAEGADPDCYDTRTSALSAKSCESNSPFPVHPGTAECCTKEGLERKLCMAALKHQPQEFPTYVEPTNDEIC

SEQ ID NO: 5828 - protein, 474 aa, Homo sapiens
MKRVLVLLLAVAFGHALERGRDYEKNKVCKEFSHLGKEDFTSLSLVLYSRKFPSGTFEQVSQLVKEVVSLTEACCAEGADPDCYDTRTSALSAKSCESNSPFPVHPGTAECCTKEGLERKLCMAALKHQPQEFPTYVEPTNDEICEAFRKDPKEYANQFMWEYSTNYGQAPLSLLVSYTKSYLSMVGSCCTSASPTVCFLKERLQLKHLSLLTTLSNRVCSQYAAYGEKKSRLSNLIKLAQKVPTADLEDVLPLAEDITNILSKCCESASEDCMAKELPEHTVKLCDNLSTKNSKFEDCCQEKTAMDVFVCTYFMPAAQLPELPDVELPTNKDVCDPGNTKVMDKYTFELSRRTHLPEVFLSKVLEPTLKSLGECCDVEDSTTCFNAKGPLLKKELSSFIDKGQELCADYSENTFTEYKKKLAERLKAKLPDATPTELAKLVNKHSDFASNCCSINSPPLYCDSEIDAELKNIL

SEQ ID NO: 5829 - protein, 348 aa, Homo sapiens
MKRVLVLLLAVAFGHALERGRDYEKNKVCKEFSHLGKEDFTSLSLVLYSRKFPSGTFEQVSQLVKEVVSLTEACCAEGADPDCYDTRTSALSAKSCESNSPFPVHPGTAECCTKEGLERKLCMAALKHQPQEFPTYVEPTNDEICEAFRKDPKEYANQFMWEYSTNYGQAPLSLLVSYTKSYLSMVGSCCTSASPTVCFLKERLQLKHLSLLTTLSNRVCSQYAAYGEKKSRLSNLIKLAQKVPTADLEDVLPLAEDITNILSKCCESASEDCMAKELPEHTVKLCDNLSTKNSKFEDCCQEKTAMDVFVCTYFMPAAQLPELPDVELPTNKDVCDPGNTKVMDKALY

SEQ ID NO: 5830 - protein, 476 aa, Homo sapiens
MKRVLVLLLAVAFGHALERGRDYEKNKVCKEFSHLGKEDFTSLSLVLYSRKFPSGTFEQVSQLVKEVVSLTEACCAEGADPDCYDTRTSALSAKSCESNSPFPVHPGTAECCTKEGLERKLCMAALKHQPQEFPTYVEPTNDEICEAFRKDPKEYANQFMWEYSTNYGQAPLSLLVSYTKSYLSMVGSCCTSASPTVCFLKERLQLKHLSLLTTLSNRVCSQYAAYGEKKSRLSNLIKLAQKVPTADLEDVLPLAEDITNILSKCCESASEDCMAKELPEHTVKLCDNLSTKNSKFEDCCQEKTAMDVFVCTYFMPAAQLPELPDVELPTNKDVCDPGNTKVMDKYTFELSRRTHLPEVFLSKVLEPTLKSLGECCDVEDSTTCFNAKGPLLKKELSSFIDKGQELCADYSENTFTEYKKKLAERLKAKLPDATPTELAKLVNKHSDFASNCCSINSPPLYCDSETRVGATQGNDL

SEQ ID NO: 5831 - protein, 493 aa, Homo sapiens
MLWSWSEERGGAARLSGRKMKRVLVLLLAVAFGHALERGRDYEKNKVCKEFSHLGKEDFTSLSLVLYSRKFPSGTFEQVSQLVKEVVSLTEACCAEGADPDCYDTRTSALSAKSCESNSPFPVHPGTAECCTKEGLERKLCMAALKHQPQEFPTYVEPTNDEICEAFRKDPKEYANQFMWEYSTNYGQAPLSLLVSYTKSYLSMVGSCCTSASPTVCFLKERLQLKHLSLLTTLSNRVCSQYAAYGEKKSRLSNLIKLAQKVPTADLEDVLPLAEDITNILSKCCESASEDCMAKELPEHTVKLCDNLSTKNSKFEDCCQEKTAMDVFVCTYFMPAAQLPELPDVELPTNKDVCDPGNTKVMDKYTFELSRRTHLPEVFLSKVLEPTLKSLGECCDVEDSTTCFNAKGPLLKKELSSFIDKGQELCADYSENTFTEYKKKLAERLKAKLPDATPTELAKLVNKHSDFASNCCSINSPPLYCDSEIDAELKNIL

SEQ ID NO: 5832 - protein, 180 aa, Homo sapiens
MKSIYFVAGLFVMLVQGSWQRSLQDTEEKSRSFSASQADPLSDPDQMNEDKRHSQGTFTSDYSKYLDSRRAQDFVQWLMNTKRNRNNIAKRHDEFERHAEGTFTSDVSSYLEGQAAKEFIAWLVKGRGRRDFPEEVAIVEELGRRHADGSFSDEMNTILDNLAARDFINWLIQTKITDRK

SEQ ID NO: 5833 - protein, 180 aa, Homo sapiens; identical to SEQ ID NO: 5832

SEQ ID NO: 5834 - protein, 80 aa, Homo sapiens
MPPCQPQRPLLLLLLLLACQPQVPSAQVMDFLFEKWKLYGDQCHHNLSLLPPPTELVCNRTFDKYSCWPDTPANTTANIS

SEQ ID NO: 5835 - protein, 477 aa, Homo sapiens
MPPCQPQRPLLLLLLLLACQPQVPSAQVMDFLFEKWKLYGDQCHHNLSLLPPPTELVCNRTFDKYSCWPDTPANTTANISCPWYLPWHHKVQHRFVFKRCGPDGQWVRGPRGQPWRDASQCQMDGEEIEVQKEVAKMYSSFQVMYTVGYSLSLGALLLALAILGGLSKLHCTRNAIHANLFASFVLKASSVLVIDGLLRTRYSQKIGDDLSVSTWLSDGAVAGCRVAAVFMQYGIVANYCWLLVEGLYLHNLLGLATLPERSFFSLYLGIGWGAPMLFVVPWAVVKCLFENVQCWTSNDNMGFWWILRFPVFLAILINFFIFVRIVQLLVAKLRARQMHHTDYKFRLAKSTLTLIPLLGVHEVVFAFVTDEHAQGTLRSAKLFFDLFLSSFQGLLVAVLYCFLNKEVQSELRRRWHRWRLGKVLWEERNTSNHRASSSPGHGPPSKELQFGRGGGSQDSSAETPLAGGLPRLAESPF

SEQ ID NO: 5836 - protein, 523 aa, Homo sapiens
MPPCQPQRPLLLLLLLLACQPQVPSAQVMDFLFEKWKLYGDQCHHNLSLLPPPTELVCNRTFDKYSCWPDTPANTTANISCPWYLPWHHKVQHRFVFKRCGPDGQWVRGPRGQPWRDASQCQMDGEEIEVQKEVAKMYSSFQVMYTVGYSLSLGALLLALAILGGLSKLHCTRNAIHANLFASFVLKASSVLVIDGLLRTRYSQKIGDDLSVSTWLSDGVSPPRRPQAGGWVGSQAGGHVAALTLHLYQAVAGCRVAAVFMQYGIVANYCWLLVEGLYLHNLLGLATLPERSFFSLYLGIGWGAPMLFVVPWAVVKCLFENVQCWTSNDNMGFWWILRFPVFLAILINFFIFVRIVQLLVAKLRARQMHHTDYKFRLAKSTLTLIPLLGVHEVVFAFVTDEHAQGTLRSAKLFFDLFLSSFQVPARPPAPPPGAQCATPDHPVSPGPAGGCPLLLPQQGGAVGAAAALAPLAPGQSAMGGAEHQQPQGLIFARPRPSQQGAAVWEGWWQPGFICGDPLGWWPP

SEQ ID NO: 5837 - protein, 308 aa, Homo sapiens
MFVQLLRAIYVPQNVYCIHVDEKAPMKYKTAVQTLVNCFENVFISSKTEKVAYAGFTRLQADINCMKVLVHSKFQWNYVINLCGQDFPIKTNREIIHYIRSKWSDKNITPGVIQPLHIKSKTSQSHLEFVPKGSIYAPPNNRFKDKPPHNLTIYFGSAYYVLTRKFVEFILTDIHAKDMLQWSKDIRSPEQHYWVTLNRLKDAPGATPNAGWEGNVRAIKRKSEEGNVHDGCKGRYVEDICVYGPGDLPWLIQSPSLFANKFEPSTDPLVVTCLERRHRLQVLRQAEVPIEPHWHFQQQSHFNMRLNR

SEQ ID NO: 5838 - protein, 429 aa, Homo sapiens
MSQLRATKSGLVVRAVICIFIFLYLRNPTPAESEEEPAQPEVVECGFYPDELCSALFEGKGAAPIAKFCKTPHKSEIHAHLHTPGNCSRISRGLHFITRPLSAEEGDFSLAYIITIHKELAMFVQLLRAIYVPQNVYCIHVDEKAPMKYKTAVQTLVNCFENVFISSKTEKVAYAGFTRLQADINCMKVLVHSKFQWNYVINLCGQDFPIKTNREIIHYIRSKWSDKNITPGVIQPLHIKSKTSQSHLEFVPKGSIYAPPNNRFKDKPPHNLTIYFGSAYYVLTRKFVEFILTDIHAKDMLQWSKDIRSPEQHYWVTLNRLKDAPGATPNAGWEGNVRAIKRKSEEGNVHDGCKGRYVEDICVYGPGDLPWLIQSPSLFANKFEPSTDPLVVTCLERRHRLQVLRQAEVPIEPHWHFQQQSHFNMRLNR

SEQ ID NO: 5839 - protein, 50 aa, Homo sapiens
MALRVVRSVRALLCTLRAVPSPAAPCPPRPWQLGVGAVRTLRTGPALLSG

SEQ ID NO: 5840 - protein, 58 aa, Homo sapiens
MALRVVRSVRALLCTLRAVPSPAAPCPPRPWQLGVGAVRTLRTGPALLSGSVGRCCLL

SEQ ID NO: 5841 - protein, 162 aa, Homo sapiens
MALRVVRSVRALLCTLRAVPSPAAPCPPRPWQLGVGAVRTLRTGPALLSVRKFTEKHEWVTTENGIGTVGISNFAQEALGDVVYCSLPEVGTKLNKQDEFGALESVKAASELYSPLSGEVTEINEALAENPGLVNKSCYEDGKLLLEISQGITTTVNILSRI

SEQ ID NO: 5842 - protein, 173 aa, Homo sapiens
MALRVVRSVRALLCTLRAVPSPAAPCPPRPWQLGVGAVRTLRTGPALLSVRKFTEKHEWVTTENGIGTVGISNFAQEALGDVVYCSLPEVGTKLNKQDEFGALESVKAASELYSPLSGEVTEINEALAENPGLVNKSCYEDGWLIKMTLSNPSELDELMSEEAYEKYIKSIEE

SEQ ID NO: 5843 - protein, 118 aa, Homo sapiens
SVRALLCTLRAVPSPAAPCPPRPWQLGVGAVRTLRTGPALLSDEFGALESVKAASELYSPLSGEVTEINEALAENPGLVNKSCYEDGWLIKMTLSNPSELDELMSEEAYEKYIKSIEE

SEQ ID NO: 5844 - protein, 66 aa, Homo sapiens
  VARIANT 1: note = misc_feature - Xaa can be any naturally occurring amino acid
XCTLRAVPSPAAPCPPRPWQLGVGAVRTLRTGPALLSVRKFTEKHEWVTTENGIGTVGISNFAQVG

SEQ ID NO: 5845 - protein, 100 aa, Homo sapiens
  VARIANT 1: note = misc_feature - Xaa can be any naturally occurring amino acid
XEKHEWVTTENGIGTVGISNFAQEALGDVVYCSLPEVGTKLNKQGEVTEINEALAENPGLVNKSCYEDGWLIKMTLSNPSELDELMSEEAYEKYIKSIEE

SEQ ID NO: 5846 - protein, 105 aa, Homo sapiens
  VARIANT 1: note = misc_feature - Xaa can be any naturally occurring amino acid
XTLRTGPALLSVRKFTEKHEWVTTENGIGTVGISNFAQEALGDVVYCSLPEVGTKLNKQDEFGALESVKAASELYSPLSGEVTEINEALAENPGLVNKSCYEDVS

SEQ ID NO: 5847 - protein, 80 aa, Homo sapiens
  VARIANT 1: note = misc_feature - Xaa can be any naturally occurring amino acid
XVRSVRALLCTLRAVPSPAAPCPPRPWQLGVGAVRTLRTGPALLSVRKFTEKHEWVTTENGIGTVGISNFAQMSLVLWKV

SEQ ID NO: 5848 - protein, 372 aa, Homo sapiens; identical to SEQ ID NO: 2630

SEQ ID NO: 5849 - protein, 478 aa, Homo sapiens
MAHVPARTSPGPGPQLLLLLLPLFLLLLRDVAGSHRAPAWSALPAAADGLQGDRDLQRHPGDAAATLGPSAQDMVAVHMHRLYEKYSRQGARPGGGNTVRSFRARLEVVDQKAVYFFNLTSMQDSEMILTATFHFYSEPPRWPRALEVLCKPRAKNASGRPLPLGPPTRQHLLFRSLSQNTATQGLLRGAMALAPPPRGLWQAKDISPIVKAARRDGELLLSAQLDSEERDPGVPRPSPYAPYILVYANDLAISEPNSVAVTLQRYDPFPAGDPEPRAAPNNSADPRVRRAAQATGPLQDNELPGLDERPPRAHAQHFHKHQLWPSPFRALKPRPGRKDRRKKGQEVFMAASQVLDFDEKTMQKARRKQWDEPRVCSRRYLKVDFADIGWNEWIISPKSFDAYYCAGACEFPMPKIVRPSNHATIQSIVRAVGIIPGIPEPCCVPDKMNSLGVLFLDENRNVVLKVYPNMSVDTCACR

SEQ ID NO: 5850 - protein, 407 aa, Homo sapiens
MVLAAPLLLGFLLLALELRPRGEAAEGPAAAAAAAAAAAAAGVGGERSSRPAPSVAPEPDGCPVCVWRQHSRELRLESIKSQILSKLRLKEAPNISREVVKQLLPKAPPLQQILDLHDFQGDALQPEDFLEEDEYHATTETVISMAQETDPAVQTDGSPLCCHFHFSPKVMFTKVLKAQLWVYLRPVPRPATVYLQILRLKPLTGEGTAGGGGGGRRHIRIRSLKIELHSRSGHWQSIDFKQVLHSWFRQPQSNWGIEINAFDPSGTDLAVTSLGPGAEGLHPFMELRVLENTKRSRRNLGLDCDEHSSESRCCRYPLTVDFEAFGWDWIIAPKRYKANYCSGQCEYMFMQKYPHTHLVQQANPRGSAGPCCTPTKMSPINMLYFNDKQQIIYGKIPGMVVDRCGCS

SEQ ID NO: 5851 - protein, 380 aa, Homo sapiens
  VARIANT 1: note = misc_feature - Xaa can be any naturally occurring amino acid
XAAAAAAAAAAAAAGVGGERSSRPAPSVAPEPDGCPVCVWRQHSRELRLESIKSQILSKLRLKEAPNISREVVKQLLPKAPPLQQILDLHDFQGDALQPEDFLEEDEYHATTETVISMAQETDPAVQTDGSPLCCHFHFSPKVMFTKVLKAQLWVYLRPVPRPATVYLQILRLKPLTGEGTAGGGGGGRRHIRIRSLKIELHSRSGHWQSIDFKQVLHSWFRQPQSNWGIEINAFDPSGTDLAVTSLGPGAEGLHPFMELRVLENTKRSRRNLGLDCDEHSSESRCCRYPLTVDFEAFGWDWIIAPKRYKANYCSGQCEYMFMQKYPHTHLVQQANPRGSAGPCCTPTKMSPINMLYFNDKQQIIYGKIPGMVVDRCGCS

SEQ ID NO: 5852 - protein, 6 aa, Homo sapiens
MPGQEL

SEQ ID NO: 5853 - protein, 113 aa, Homo sapiens
MPGQELRTVNGSQMLLVLLVLSWLPHGGALSLAEASRASFPGPSELHSEDSRFRELRKRYEDLLTRLRANQSWEDSNTDLVPAPAVRILTPEVRLGSGGHLHLRISRAALPEG

SEQ ID NO: 5854 - protein, 308 aa, Homo sapiens
MPGQELRTVNGSQMLLVLLVLSWLPHGGALSLAEASRASFPGPSELHSEDSRFRELRKRYEDLLTRLRANQSWEDSNTDLVPAPAVRILTPEVRLGSGGHLHLRISRAALPEGLPEASRLHRALFRLSPTASRSWDVTRPLRRQLSLARPQAPALHLRLSPPPSQSDQLLAESSSARPQLELHLRPQAARGRRRARARNGDHCPLGPGRCCRLHTVRASLEDLGWADWVLSPREVQVTMCIGACPSQFRAANMHAQIKTSLHRLKPDTVPAPCCVPASYNPMVLIQKTDTGVSLQTYDDLLAKDCHCI

SEQ ID NO: 5855 - protein, 429 aa, Homo sapiens
MCPGALWVALPLLSLLAGSLQGKPLQSWGRGSAGGNAHSPLGVPGGGLPEHTFNLKMFLENVKVDFLRSLNLSGVPSQDKTRVEPPQYMIDLYNRYTSDKSTTPASNIVRSFSMEDAISITATEDFPFQKHILLFNISIPRHEQITRAELRLYVSCQNHVDPSHDLKGSVVIYDVLDGTDAWDSATETKTFLVSQDIQDEGWETLEVSSAVKRWVRSDSTKSKNKLEVTVESHRKGCDTLDISVPPGSRNLPFFVVFSNDHSSGTKETRLELREMISHEQESVLKKLSKDGSTEAGESSHEEDTDGHVAAGSTLARRKRSAGAGSHCQKTSLRVNFEDIGWDSWIIAPKEYEAYECKGGCFFPLADDVTPTKHAIVQTLVHLKFPTKVGKACCVPTKLSPISVLYKDDMGVPTLKYHYEGMSVAECGCR

SEQ ID NO: 5856 - protein, 364 aa, Homo sapiens
MLRFLPDLAFSFLLILALGQAVQFQEYVFLQFLGLDKAPSPQKFQPVPYILKKIFQDREAAATTGVSRDLCYVKELGVRGNVLRFLPDQGFFLYPKKISQASSCLQKLLYFNLSAIKEREQLTLAQLGLDLGPNSYYNLGPELELALFLVQEPHVWGQTTPKPGKMFVLRSVPWPQGAVHFNLLDVAKDWNDNPRKNFGLFLEILVKEDRDSGVNFQPEDTCARLRCSLHASLLVVTLNPDQCHPSRKRRAAIPVPKLSCKNLCHRHQLFINFRDLGWHKWIIAPKGFMANYCHGECPFSLTISLNSSNYAFMQALMHAVDPEIPQAVCIPTKLSPISMLYQDNNDNVILRHYEDMVVDECGCG

SEQ ID NO: 5857 - protein, 501 aa, Homo sapiens
MRLPKLLTFLLWYLAWLDLEFICTVLGAPDLGQRPQGTRPGLAKAEAKERPPLARNVFRPGGHSYGGGATNANARAKGGTGQTGGLTQPKKDEPKKLPPRPGGPEPKPGHPPQTRQATARTVTPKGQLPGGKAPPKAGSVPSSFLLKKAREPGPPREPKEPFRPPPITPHEYMLSLYRTLSDADRKGGNSSVKLEAGLANTITSFIDKGQDDRGPVVRKQRYVFDISALEKDGLLGAELRILRKKPSDTAKPAAPGGGRAAQLKLSSCPSGRQPAALLDVRSVPGLDGSGWEVFDIWKLFRNFKNSAQLCLELEAWERGRAVDLRGLGFDRAARQVHEKALFLVFGRTKKRDLFFNEIKARSGQDDKTVYEYLFSQRRKRRAPLATRQGKRPSKNLKARCSRKALHVNFKDMGWDDWIIAPLEYEAFHCEGLCEFPLRSHLEPTNHAVIQTLMNSMDPESTPPTCCVPTRLSPISILFIDSANNVVYKQYEDMVVESCGCR

SEQ ID NO: 5858 - protein, 501 aa, Homo sapiens; identical to SEQ ID NO: 5857

SEQ ID NO: 5859 - protein, 271 aa, Homo sapiens [sequence omitted]

SEQ ID NO: 5860 - protein, 455 aa, Homo sapiens
MDTPRVLLSAVFLISFLWDLPGFQQASISSSSSSAELGSTKGMRSRKEGKMQRAPRDSDAGREGQEPQPRPQDEPRAQQPRAQEPPGRGPRVVPHEYMLSIYRTYSIAEKLGINASFFQSSKSANTITSFVDRGLDDLSHTPLRRQKYLFDVSMLSDKEELVGAELRLFRQAPSAPWGPPAGPLHVQLFPCLSPLLLDARTLDPQGAPPAGWEVFDVWQGLRHQPWKQLCLELRAAWGELDAGEAEARARGPQQPPPPDLRSLGFGRRVRPPQERALLVVFTRSQRKNLFAEMREQLGSAEAAGPGAGAEGSWPPPSGAPDARPWLPSPGRRRRRTAFASRHGKRHGKKSRLRCSKKPLHVNFKELGWDDWIIAPLEYEAYHCEGVCDFPLRSHLEPTNHAIIQTLMNSMDPGSTPPSCCVPTKLTPISILYIDAGNNVVYKQYEDMVVESCGCR

SEQ ID NO: 5861 - protein, 353 aa, Homo sapiens [sequence omitted]

SEQ ID NO: 5862 - protein, 450 aa, Homo sapiens
MDLSAAAALCLWLLSACRPRDGLEAAAVLRAAGAGPVRSPGGGGGGGGGGRTLAQAAGAAAVPAAAVPRARAARRAAGSGFRNGSVVPHHFMMSLYRSLAGRAPAGAAAVSASGHGRADTITGFTDQATQDESAAETGQSFLFDVSSLNDADEVVGAELRVLRRGSPESGPGSWTSPPLLLLSTCPGAARAPRLLYSRAAEPLVGQRWEAFDVADAMRRHRREPRPPRAFCLLLRAVAGPVPSPLALRRLGFGWPGGGGSAAEERAVLVVSSRTQRKESLFREIRAQARALGAALASEPLPDPGTGTASPRAVIGGRRRRRTALAGTRTAQGSGGGAGRGHGRRGRSRCSRKPLHVDFKELGWDDWIIAPLDYEAYHCEGLCDFPLRSHLEPTNHAIIQTLLNSMAPDAAPASCCVPARLSPISILYIDAANNVVYKQYEDMVVEACGCR

SEQ ID NO: 5863 - protein, 454 aa, Homo sapiens
MARPNKFLLWFCCFAWLCFPISLGSQASGGEAQIAASAELESGAMPWSLLQHIDERDRAGLLPALFKVLSVGRGGSPRLQPDSRALHYMKKLYKTYATKEGIPKSNRSHLYNTVRLFTPCTRHKQAPGDQVTGILPSVELLFNLDRITTVEHLLKSVLLYNINNSVSFSSAVKCVCNLMIKEPKSSSRTLGRAPYSFTFNSQFEFGKKHKWIQIDVTSLLQPLVASNKRSIHMSINFTCMKDQLEHPSAQNGLFNMTLVSPSLILYLNDTSAQAYHSWYSLHYKRRPSQGPDQERSLSAYPVGEEAAEDGRSSHHRHRRGQETVSSELKKPLGPASFNLSEYFRQFLLPQNECELHDFRLSFSQLKWDNWIVAPHRYNPRYCKGDCPRAVGHRYGSPVHTMVQNIIYEKLDSSVPRPSCVPAKYSPLSVLTIEPDGSIAYKEYEDMIATKCTCR

SEQ ID NO: 5864 - protein, 366 aa, Homo sapiens
MKKLYKTYATKEGIPKSNRSHLYNTVRLFTPCTRHKQAPGDQVTGILPSVELLFNLDRITTVEHLLKSVLLYNINNSVSFSSAVKCVCNLMIKEPKSSSRTLGRAPYSFTFNSQFEFGKKHKWIQIDVTSLLQPLVASNKRSIHMSINFTCMKDQLEHPSAQNGLFNMTLVSPSLILYLNDTSAQAYHSWYSLHYKRRPSQGPDQERSLSAYPVGEEAAEDGRSSHHRHRRGQETVSSELKKPLGPASFNLSEYFRQFLLPQNECELHDFRLSFSQLKWDNWIVAPHRYNPRYCKGDCPRAVGHRYGSPVHTMVQNIIYEKLDSSVPRPSCVPAKYSPLSVLTIEPDGSIAYKEYEDMIATKCTCR

SEQ ID NO: 5865 - protein, 366 aa, Homo sapiens; identical to SEQ ID NO: 5864

SEQ ID NO: 5866 - protein, 366 aa, Homo sapiens; identical to SEQ ID NO: 5864

SEQ ID NO: 5867 - protein, 366 aa, Homo sapiens; identical to SEQ ID NO: 5864

SEQ ID NO: 5868 - protein, 61 aa, Homo sapiens
MKLWDVVAVCLVLLHTASAFPLPAANMPEDYPDQFDDVMDFIQATIKRLKRSPDKQMAVLP

SEQ ID NO: 5869 - protein, 61 aa, Homo sapiens; identical to SEQ ID NO: 5868

SEQ ID NO: 5870 - protein, 185 aa, Homo sapiens
MKLWDVVAVCLVLLHTASAFPLPAANMPEDYPDQFDDVMDFIQATIKRLKRSPDKQMAVLPRRERNRQAAAANPENSRGKGRRGQRGKNRGCVLTAIHLNVTDLGLGYETKEELIFRYCSGSCDAAETTYDKILKNLSRNRRLVSDKVGQACCRPIAFDDDLSFLDDNLVYHILRKHSAKRCGCI

SEQ ID NO: 5871 - protein, 185 aa, Homo sapiens; identical to SEQ ID NO: 5870

SEQ ID NO: 5872 - protein, 211 aa, Homo sapiens
MKLWDVVAVCLVLLHTASAFPLPAGKRPPEAPAEDRSLGRRRAPFALSSDSNMPEDYPDQFDDVMDFIQATIKRLKRSPDKQMAVLPRRERNRQAAAANPENSRGKGRRGQRGKNRGCVLTAIHLNVTDLGLGYETKEELIFRYCSGSCDAAETTYDKILKNLSRNRRLVSDKVGQACCRPIAFDDDLSFLDDNLVYHILRKHSAKRCGCI

SEQ ID NO: 5873 - protein, 159 aa, Homo sapiens
MPEDYPDQFDDVMDFIQATIKRLKRSPDKQMAVLPRRERNRQAAAANPENSRGKGRRGQRGKNRGCVLTAIHLNVTDLGLGYETKEELIFRYCSGSCDAAETTYDKILKNLSRNRRLVSDKVGQACCRPIAFDDDLSFLDDNLVYHILRKHSAKRCGCI

SEQ ID NO: 5874 - protein, 202 aa, Homo sapiens
MQSLPNSNGAAAGRDFKMKLWDVVAVCLVLLHTASAFPLPAANMPEDYPDQFDDVMDFIQATIKRLKRSPDKQMAVLPRRERNRQAAAANPENSRGKGRRGQRGKNRGCVLTAIHLNVTDLGLGYETKEELIFRYCSGSCDAAETTYDKILKNLSRNRRLVSDKVGQACCRPIAFDDDLSFLDDNLVYHILRKHSAKRCGCI

SEQ ID NO: 5875 - protein, 228 aa, Homo sapiens
MQSLPNSNGAAAGRDFKMKLWDVVAVCLVLLHTASAFPLPAGKRPPEAPAEDRSLGRRRAPFALSSDSNMPEDYPDQFDDVMDFIQATIKRLKRSPDKQMAVLPRRERNRQAAAANPENSRGKGRRGQRGKNRGCVLTAIHLNVTDLGLGYETKEELIFRYCSGSCDAAETTYDKILKNLSRNRRLVSDKVGQACCRPIAFDDDLSFLDDNLVYHILRKHSAKRCGCI

SEQ ID NO: 5876 - protein, 90 aa, Homo sapiens
MKMLPGVGVFGTGSSARVLVPLLRAEGFTVEALWGKTEEEAKQLAEEMNIAFYTSRTDDILLHQDVDLVCISIPPPLTRQISVKALESSL

SEQ ID NO: 5877 - protein, 385 aa, Homo sapiens
MKMLPGVGVFGTGSSARVLVPLLRAEGFTVEALWGKTEEEAKQLAEEMNIAFYTSRTDDILLHQDVDLVCISIPPPLTRQISVKALGIGKNVVCEKAATSVDAFRMVTASRYYPQLMSLVGNVLRFLPAFVRMKQLISEHYVGAVMICDARIYSGSLLSPSYGWICDELMGGGGLHTMGTYIVDLLTHLTGRRAEKVHGLLKTFVRQNAAIRGIRHVTSDDFCFFQMLMGGGVCSTVTLNFNMPGAFVHEVMVVGSAGRLVARGADLYGQKNSATQEELLLRDSLAVGAGLPEQGPQDVPLLYLKGMVYMVQALRQSFQGQGDRRTWDRTPVSMAASFEDGLYMQSVVDAIKRSSRSGEWEAVEVLTEEPDTNQNLCEALQRNNL

SEQ ID NO: 5878 - protein, 112 aa, Homo sapiens
MKMLPGVGVFGTGSSARVLVPLLRAEGFTVEALWGKTEEEAKQLAEEMNIAFYTSRTDDILLHQDVDLVCISIPPPLTRQISVKALGTPGRPQQGQIMSLPLGSPLRVTPLL

SEQ ID NO: 5879 - protein, 112 aa, Homo sapiens; identical to SEQ ID NO: 5878

SEQ ID NO: 5880 - protein, 88 aa, Homo sapiens
MKMLPGVGVFGTGSSARVLVPLLRAEGFTVEALWGKTEEEAKQLAEEMNIAFYTSRTDDILLHQDVDLVLGRMWFARRQQHRWMPSGW

SEQ ID NO: 5881 - protein, 103 aa, Homo sapiens
  VARIANT 1: note = misc_feature - Xaa can be any naturally occurring amino acid
XKTEEEAKQLAEEMNIAFYTSRTDDILLHQDVDLVCISIPPPLTRQISVKALGSTCGVPEWSLDGCGGEAQVHTLPRWASTRRVLGRMWFARRQQHRWMPSGW

SEQ ID NO: 5882 - protein, 682 aa, Homo sapiens
MCGIFAYMNYRVPRTRKEIFETLIKGLQRLEYRGYDSAGVAIDGNNHEVKERHIQLVKKRGKVKALDEELYKQDSMDLKVEFETHFGIAHTRWATHGVPSAVNSHPQRSDKGNEFVVIHNGIITNYKDLRKFLESKGYEFESETDTETIAKLIKYVFDNRETEDITFSTLVERVIQQLEGAFALVFKSVHYPGEAVATRRGSPLLIGVRSKYKLSTEQIPILYRTCTLENVKNICKTRMKRLDSSACLHAVGDKAVEFFFASDASAIIEHTNRVIFLEDDDIAAVADGKLSIHRVKRSASDDPSRAIQTLQMELQQIMKGNFSAFMQKEIFEQPESVFNTMRGRVNFETNTVLLGGLKDHLKEIRRCRRLIVIGCGTSYHAAVATRQVLEELTELPVMVELASDFLDRNTPVFRDDVCFFISQSGETADTLLALRYCKDRGALTVGVTNTVGSSISRETDCGVHINAGPEIGVASTKAYTSQFISLVMFGLMMSEDRISLQNRRQEIIRGLRSLPELIKEVLSLEEKIHDLALELYTQRSLLVMGRGYNYATCLEGALKIKEITYMHSEGILAGELKHGPLALIDKQMPVIMVIMKDPCFAKCQNALQQVTARQGRPIILCSKDDTESSKFAYKTIELPHTVDCLQGILSVIPLQLLSFHLAVLRGYDVDFPRNLAKSVTVE

SEQ ID NO: 5883 - protein, 216 aa, Homo sapiens
MNLLLNSISLLTFLSEFVVIHNGIITNYKDLRKFLESKGYEFESETDTETIAKLIKYVFDNRETEDITFSTLVERVIQQLEGAFALVFKSVHYPGEAVATRRGSPLLIGVRSKYKLSTEQIPILYRTCTLENVKNICKTRMKRLDSSACLHAVGDKAVEFFFASDASAIIEHTNRVIFLEDDDIAAVADGKLSIHRVKRSASDDPSRAIQTLQMEL

SEQ ID NO: 5884 - protein, 179 aa, Homo sapiens [sequence omitted]

SEQ ID NO: 5885 - protein, 464 aa, Homo sapiens
MILANVFCLFFFLDETLRSLASPSSLQGPELHGWRPPVDCVRANELCAAESNCSSRYRTLRQCLAGRDRNTMLANKECQAALEVLQESPLYDCRCKRGMKKELQCLQIYWSIHLGLTEGEEFYEASPYEPVTSRLSDIFRLASIFSGTGADPVVSAKSNHCLDAAKACNLNDNCKKLRSSYISICNREISPTERCNRRKCHKALRQFFDRVPSEYTYRMLFCSCQDQACAERRRQTILPSCSYEDKEKPNCLDLRGVCRTDHLCRSRLADFHANCRASYQTVTSCPADNYQACLGSYAGMIGFDMTPNYVDSSPTGIVVSPWCSCRGSGNMEEECEKFLRDFTENPCLRNAIQAFGNGTDVNVSPKGPSFQATQAPRVEKTPSLPDDLSDSTSLGTSVITTCTSVQEQGLKANNSKELSMCFTELTTNIIPGSNKVIKPNSGPSRARPSAALTVLSVLMLKLAL

SEQ ID NO: 5886 - protein, 265 aa, Homo sapiens
MILANVFCLFFFLDETLRSLASPSSLQGPELHGWRPPVDCVRANELCAAESNCSSRYRTLRQCLAGRDRNTMLANKECQAALEVLQESPLYDCRCKRGMKKELQCLQIYWSIHLGLTEGEEFYEASPYEPVTSRLSDIFRLASIFSGTGADPVVSAKSNHCLDAAKACNLNDNCKKLRSSYISICNREISPTERCNRRKCHKALRQFFDRVPSEYTYRMLFCSCQDQACAERRRQTILPSCSYEDKEKPNCLDLRGVCRTDHLCR

SEQ ID NO: 5887 - protein, 464 aa, Homo sapiens; identical to SEQ ID NO: 5885

SEQ ID NO: 5888 - protein, 359 aa, Homo sapiens
MILANVFCLFFFLGEEFYEASPYEPVTSRLSDIFRLASIFSGTGADPVVSAKSNHCLDAAKACNLNDNCKKLRSSYISICNREISPTERCNRRKCHKALRQFFDRVPSEYTYRMLFCSCQDQACAERRRQTILPSCSYEDKEKPNCLDLRGVCRTDHLCRSRLADFHANCRASYQTVTSCPADNYQACLGSYAGMIGFDMTPNYVDSSPTGIVVSPWCSCRGSGNMEEECEKFLRDFTENPCLRNAIQAFGNGTDVNVSPKGPSFQATQAPRVEKTPSLPDDLSDSTSLGTSVITTCTSVQEQGLKANNSKELSMCFTELTTNIIPGSNKVIKPNSGPSRARPSAALTVLSVLMLKLAL

SEQ ID NO: 5889 - protein, 62 aa, Homo sapiens
MILANVFCLFFFLGPGPLLRRNGVQREKTCSYIQGRMMPEFSLGYEEGCPTESPWCALAKWV

SEQ ID NO: 5890 - protein, 331 aa, Homo sapiens
MILANVFCLFFFLGTGADPVVSAKSNHCLDAAKACNLNDNCKKLRSSYISICNREISPTERCNRRKCHKALRQFFDRVPSEYTYRMLFCSCQDQACAERRRQTILPSCSYEDKEKPNCLDLRGVCRTDHLCRSRLADFHANCRASYQTVTSCPADNYQACLGSYAGMIGFDMTPNYVDSSPTGIVVSPWCSCRGSGNMEEECEKFLRDFTENPCLRNAIQAFGNGTDVNVSPKGPSFQATQAPRVEKTPSLPDDLSDSTSLGTSVITTCTSVQEQGLKANNSKELSMCFTELTTNIIPGSNKVIKPNSGPSRARPSAALTVLSVLMLKLAL

SEQ ID NO: 5891 - protein, 74 aa, Homo sapiens
MLANKECQAALEVLQESPLYDCRCKRGMKKELQCLQIYWSIHLGLTEGEEFYEASPYEPVTSRLSDIFRLASIF

SEQ ID NO: 5892 - protein, 299 aa, Homo sapiens
MVRCLGPALLLLLLLGSASSVGGNRCVDAAEACTADARCQRLRSEYVAQCLGRAAQGGCPRARCRRALRRFFARGPPALTHALLFCPCAGPACAERRRQTFVPSCAFSGPGPAPPSCLEPLNFCERSRVCRCARAAAGPWRGWGRGLSPAHRPPAAQASPPGLSGLVHPSAQRPRRLPAGPGRPLPARLRGPRGVPAGTAVTPNYVDNVSARVAPWCDCGASGNRREDCEAFRGLFTRNRCLDGAIQAFASGWPPVLLDQLNPQGDPEHSLLQVSSTGRALERRSLLSILPVLALPALL

SEQ ID NO: 5893 - protein, 182 aa, Homo sapiens
MVRCLGPALLLLLLLGSASSVGGNRCVDAAEACTADARCQRLRSEYVAQCLGRAAQGGCPRARCRRALRRFFARGPPALTHALLFCPCAGPACAERRRQTFVPSCAFSGPGPAPPSCLEPLNFCERSRVCRPRLLAFQVSCTPAPSAPDGCLLDQGARCLRAYAGLVGSPQAPPSPLTTWTT

SEQ ID NO: 5894 - protein, 269 aa, Homo sapiens
MVRCLGPALLLLLLLGSASSVGGNRCVDAAEACTADARCQRLRSEYVAQCLGRAAQGGCPRARCRRALRRFFARGPPALTHALLFCPCAGPACAERRRQTFVPSCAFSGPGPAPPSCLEPLNFCERSRVCRPRLLAFQVSCTPAPSAPDGCLLDQGARCLRAYAGLVGTAVTPNYVDNVSARVAPWCDCGASGNRREDCEAFRGLFTRNRCLDGAIQAFASGWPPVLLDQLNPQGDPEHSLLQVSSTGRALERRSLLSILPVLALPALL

SEQ ID NO: 5895 - protein, 59 aa, Homo sapiens
MAATAVAAAVAGTESAQGPPGPAASLELWLNKATDPSMSEQDWSAIQNFCEQVNTDPNG

SEQ ID NO: 5896 - protein, 59 aa, Homo sapiens; identical to SEQ ID NO: 5895

SEQ ID NO: 5897 - protein, 59 aa, Homo sapiens; identical to SEQ ID NO: 5895

SEQ ID NO: 5898 - protein, 117 aa, Homo sapiens
MAATAVAAAVAGTESAQGPPGPAASLELWLNKATDPSMSEQDWSAIQNFCEQVNTDPNGPTHAPWLLAHKIQSPQEKEALYALTPGGEPGTTGFPPSPGGPVSVQVLEMCMNHCGEK

SEQ ID NO: 5899 - protein, 613 aa, Homo sapiens
MAATAVAAAVAGTESAQGPPGPAASLELWLNKATDPSMSEQDWSAIQNFCEQVNTDPNGPTHAPWLLAHKIQSPQEKEALYALTVLEMCMNHCGEKFHSEVAKFRFLNELIKVLSPKYLGSWATGKVKGRVIEILFSWTVWFPEDIKIRDAYQMLKKQGIIKQDPKLPVDKILPPPSPWPKSSIFDADEEKSKLLTRLLKSNHPEDLQAANRLIKNLVKEEQEKSEKVSKRVSAVEEVRSHVKVLQEMLSMYRRPGQAPPDQEALQVVYERCEKLRPTLFRLASDTTDDDDALAEILQANDLLTQGVLLYKQVMEGRVTFGNRVTSSLGDIPVSRVFQNPAGCMKTCPLIDLEVDNGPAQMGTVVPSLLHQDLAALGISDAPVTGMVSGQNCCEEKRNPSSSTLPGGGVQNPSADRNLLDLLSAQPAPCPLNYVSQKSVPKEVPPGTKSSPGWSWEAGPLAPSPSSQNTPLAQVFVPLESVKPSSLPPLIVYDRNGFRILLHFSQTGAPGHPEVQVLLLTMMSTAPQPVWDIMFQVAVPKSMRVKLQPASSSKLPAFSPLMPPAVISQMLLLDNPHKEPIRLRYKLTFNQGGQPFSEVGEVKDFPDLAVLGAA

SEQ ID NO: 5900 - protein, 223 aa, Homo sapiens
MAATAVAAAVAGTESAQGPPGPAASLELWLNKATDPSMSEQDWSAIQNFCEQVNTDPNGPTHAPWLLAHKIQSPQEKEALYALTVLEMCMNHCGEKFHSEVAKFRFLNELIKVLSPKYLGSWATGKVKGRVIEILFSWTVWFPEDIKIRDAYQMLKKQGIIKQDPKLPVDKILPPPSPWPKSSIFDADEEKSKLLTRLLKSNHPEDLQAAVLKVAVVYGITPF

SEQ ID NO: 5901 - protein, 49 aa, Homo sapiens
MAATAVAAAVAGTESAQGPPGPAASLELWLSDHRPKHVGTGLVSYPEFL

SEQ ID NO: 5902 - protein, 125 aa, Homo sapiens
MVKLPFSLSLQLANSCPSPEDKATDPSMSEQDWSAIQNFCEQVNTDPNGPTHAPWLLAHKIQSPQEKEALYALTVLEMCMNHCGEKFHSEVAKFRFLNELIKVLSPKYLGSWATGKVKGRVIEIL

SEQ ID NO: 5903 - protein, 129 aa, Homo sapiens
  VARIANT 1: note = misc_feature - Xaa can be any naturally occurring amino acid
XAVAGTESAQGPPGPAASLELWLNKATDPSMSEQDWSAIQNFCEQVNTDPNGPTHAPWLLAHKIQSPQEKEALYALTCPHRLEAGLALVPAQSPASDYQPGGEPGTTGFPPSPGGPVSVQVLEMCMNHC

SEQ ID NO: 5904 - protein, 318 aa, Homo sapiens
MASPGCLLCVLGLLLCGAASLELSRPHGDTAKKPIIGILMQKCRNKVMKNYGRYYIAASYVKYLESAGARVVPVRLDLTEKDYEILFKSINGILFPGGSVDLRRSDYAKVAKIFYNLSIQSFDDGDYFPVWGTCLGFEELSLLISGECLLTATDTVDVAMPLNFTGGQLHSRMFQNFPTELLLSLAVEPLTANFHKWSLSVKNFTMNEKLKKFFNVLTTNTDGKIEFISTMEGYKYPVYGVQWHPEKAPYEWKNLDGISHAPNAVKTAFYLAEFFVNEARKNNHHFKSESEEEKALIYQFSPIYTGNISSFQQCYIFD

SEQ ID NO: 5905 - protein, 30 aa, Homo sapiens
MKKKLVVLGLLAVVLVLVIVGLCLWLPSAS

SEQ ID NO: 5906 - protein, 37 aa, Homo sapiens
MKKKLVVLGLLAVVLVLVIVGLCLWLPSASKEPDNHV

SEQ ID NO: 5907 - protein, 68 aa, Homo sapiens
MKKKLVVLGLLAVVLVLVIVGLCLWLPSASKEPDNHVYTRAAVAADAKQCSKIGRDALRDGGSAVDAA

SEQ ID NO: 5908 - protein, 80 aa, Homo sapiens
MKKKLVVLGLLAVVLVLVIVGLCLWLPSASKEPDNHVYTRAAVAADAKQCSKIGRDALRDGGSAVDAAIAALLCVGLMNA

SEQ ID NO: 5909 - protein, 98 aa, Homo sapiens
MKKKLVVLGLLAVVLVLVIVGLCLWLPSASKEPDNHVYTRAAVAADAKQCSKIGRDALRDGGSAVDAAIAALLCVGLMNAHSMGIGGGLFLTIYNSTT

SEQ ID NO: 5910 - protein, 109 aa, Homo sapiens
MKKKLVVLGLLAVVLVLVIVGLCLWLPSASKEPDNHVYTRAAVAADAKQCSKIGRDALRDGGSAVDAAIAALLCVGLMNAHSMGIGGGLFLTIYNSTTRKAEVINAREV

SEQ ID NO: 5911 - protein, 111 aa, Homo sapiens
MKKKLVVLGLLAVVLVLVIVGLCLWLPSASKEPDNHVYTRAAVAADAKQCSKIGRDALRDGGSAVDAAIAALLCVGLMNAHSMGIGGGLFLTIYNSTTRKAEVINAREVAP

SEQ ID NO: 5912 - protein, 116 aa, Homo sapiens
MKKKLVVLGLLAVVLVLVIVGLCLWLPSASKEPDNHVYTRAAVAADAKQCSKIGRDALRDGGSAVDAAIAALLCVGLMNAHSMGIGGGLFLTIYNSTTRKAEVINAREVAPRLAFA

SEQ ID NO: 5913 - protein, 120 aa, Homo sapiens
MKKKLVVLGLLAVVLVLVIVGLCLWLPSASKEPDNHVYTRAAVAADAKQCSKIGRDALRDGGSAVDAAIAALLCVGLMNAHSMGIGGGLFLTIYNSTTRKAEVINAREVAPRLAFATMFN

SEQ ID NO: 5914 - protein, 126 aa, Homo sapiens
MKKKLVVLGLLAVVLVLVIVGLCLWLPSASKEPDNHVYTRAAVAADAKQCSKIGRDALRDGGSAVDAAIAALLCVGLMNAHSMGIGGGLFLTIYNSTTRKAEVINAREVAPRLAFATMFNSSEQSQ

SEQ ID NO: 5915 - protein, 126 aa, Homo sapiens; identical to SEQ ID NO: 5914

SEQ ID NO: 5916 - protein, 127 aa, Homo sapiens
MKKKLVVLGLLAVVLVLVIVGLCLWLPSASKEPDNHVYTRAAVAADAKQCSKIGRDALRDGGSAVDAAIAALLCVGLMNAHSMGIGGGLFLTIYNSTTRKAEVINAREVAPRLAFATMFNSSEQSQK

SEQ ID NO: 5917 - protein, 174 aa, Homo sapiens
MKKKLVVLGLLAVVLVLVIVGLCLWLPSASKEPDNHVYTRAAVAADAKQCSKIGRDALRDGGSAVDAAIAALLCVGLMNAHSMGIGGGLFLTIYNSTTRKAEVINAREVAPRLAFATMFNSSEQSQKGGLSVAVPGEIRGYELAHQRHGRLPWARLFQPSIQLARQGFPVGKGL

SEQ ID NO: 5918 - protein, 569 aa, Homo sapiens
MKKKLVVLGLLAVVLVLVIVGLCLWLPSASKEPDNHVYTRAAVAADAKQCSKIGRDALRDGGSAVDAAIAALLCVGLMNAHSMGIGGGLFLTIYNSTTRKAEVINAREVAPRLAFATMFNSSEQSQKGGLSVAVPGEIRGYELAHQRHGRLPWARLFQPSIQLARQGFPVGKGLAAALENKRTVIEQQPVLCEVFCRDRKVLREGERLTLPQLADTYETLAIEGAQAFYNGSLTAQIVKDIQAAGGIVTAEDLNNYRAELIEHPLNISLGDVVLYMPSAPLSGPVLALILNILKGYNFSRESVESPEQKGLTYHRIVEAFRFAYAKRTLLGDPKFVDVTEVVRNMTSEFFAAQLRAQISDDTTHPISYYKPEFYTPDDGGTAHLSVVAEDGSAVSATSTINLYFGSKVRSPVSGILFNNEMDDFSSPSITNEFGVPPSPANFIQPGKQPLSSMCPTIMVGQDGQVRMVVGAAGGTQITTATALAIIYNLWFGYDVKRAVEEPRLHNQLLPNVTTVERNIDQAVTAALETRHHHTQIASTFIAVVQAIVRTAGGWAAASDSRKGGEPAGY

SEQ ID NO: 5919 - protein, 366 aa, Homo sapiens
MKKKLVVLGLLAVVLVLVIVGLCLWLPSASKEPDNHVYTRAAVAADAKQCSKIGRDALRDGGSAVDAAIAALLCVGLMNAHSMGIGGGLFLTIYNSTTRKAEVINAREVAPRLAFATMFNSSEQSQKGGLSVAVPGEIRGYELAHQRHGRLPWARLFQPSIQLARQGFPVGKGLAAALENKRTVIEQQPVLCEVFCRDRKVLREGERLTLPQLADTYETLAIEGAQAFYNGSLTAQIVKDIQAAGGIVTAEDLNNYRAELIEHPLNISLGDVVLYMPSAPLSGPVLALILNILKGYNFSRESVESPEQKGLTYHRIVEAFRFAYAKRTLLGDPKFVDVTEASSGVSAGGPQHDLRVLRCPAPGPDL

SEQ ID NO: 5920 - protein, 463 aa, Homo sapiens
MKKKLVVLGLLAVVLVLVIVGLCLWLPSASKEPDNHVYTRAAVAADAKQCSKIGRDALRDGGSAVDAAIAALLCVGLMNAHSMGIGGGLFLTIYNSTTRKAEVINAREVAPRLAFATMFNSSEQSQKGGLSVAVPGEIRGYELAHQRHGRLPWARLFQPSIQLARQGFPVGKGLAAALENKRTVIEQQPVLCEVFCRDRKVLREGERLTLPQLADTYETLAIEGAQAFYNGSLTAQIVKDIQAAGGIVTAEDLNNYRAELIEHPLNISLGDVVLYMPSAPLSGPVLALILNILKGYNFSRESVESPEQKGLTYHRIVEAFRFAYAKRTLLGDPKFVDVTEVVRNMTSEFFAAQLRAQISDDTTHPISYYKPEFYTPDDGGTAHLSVVAEDGSAVSATSTINLYFGSKVRSPVSGILFNNEMDDFSSPSITNEFGVPPSPANFIQPGKQPLSSMCPTIMVGQDG

SEQ ID NO: 5921 - protein, 569 aa, Homo sapiens; identical to SEQ ID NO: 5918

SEQ ID NO: 5922 - protein, 569 aa, Homo sapiens; identical to SEQ ID NO: 5918

SEQ ID NO: 5923 - protein, 218 aa, Homo sapiens
MTSEFFAAQLRAQISDDTTHPISYYKPEFYTPDDGGTAHLSVVAEDGSAVSATSTINLYFGSKVRSPVSGILFNNEMDDFSSPSITNEFGVPPSPANFIQPGKQPLSSMCPTIMVGQDGQPPSHADHTPMPQAIIYNLWFGYDVKRAVEEPRLHNQLLPNVTTVERNIDQAVTAALETRHHHTQIASTFIAVVQAIVRTAGGWAAASDSRKGGEPAGY

SEQ ID NO: 5924 - protein, 225 aa, Homo sapiens
MTSEFFAAQLRAQISDDTTHPISYYKPEFYTPDDGGTAHLSVVAEDGSAVSATSTINLYFGSKVRSPVSGILFNNEMDDFSSPSITNEFGVPPSPANFIQPGKQPLSSMCPTIMVGQDGQVRMVVGAAGGTQITTATALAIIYNLWFGYDVKRAVEEPRLHNQLLPNVTTVERNIDQAVTAALETRHHHTQIASTFIAVVQAIVRTAGGWAAASDSRKGGEPAGY

SEQ ID NO: 5925 - protein, 225 aa, Homo sapiens; identical to SEQ ID NO: 5924

SEQ ID NO: 5926 - protein, 225 aa, Homo sapiens; identical to SEQ ID NO: 5924

SEQ ID NO: 5927 - protein, 252 aa, Homo sapiens
MTSEFFAAQLRAQISDDTTHPISYYKPEFYTPDDGGTAHLSVVAEDGSAVSATSTINLYFGSKVRSPVSGILFNNEMDDFSSPSITNEFGVPPSPANFIQPGKQPLSSMCPTIMVGQDGQVRMVVGAAGGTQITTATALVCVTPFLPGRAHPAQPPSHADHTPMPQAIIYNLWFGYDVKRAVEEPRLHNQLLPNVTTVERNIDQAVTAALETRHHHTQIASTFIAVVQAIVRTAGGWAAASDSRKGGEPAGY

SEQ ID NO: 5928 - protein, 554 aa, Homo sapiens
MARGYGATVSLVLLGLGLALAVIVLAVVLSRHQAPCGPQAFAHAAVAADSKVCSDIGRAILQQQGSPVDATIAALVCTSVVNPQSMGLGGGVIFTIYNVTTGAQWIGVPGELRGYAEAHRRHGRLPWAQLFQPTIALLRGGHVVAPVLSRFLHNSILRPSLQASTLRQLFFNGTEPLRPQDPLPWPALATTLETVATEGVEVFYTGRLGQMLVEDIAKEGSQLTLQDLAKFQPEVVDALEVPLGDYTLYSPPPPAGGAILSFILNVLRGFNFSTESMARPEGRVNVYHHLVETLKFAKGQRWRLGDPRSHPKLQNASRDLLGETLAQLIRQQIDGRGDHQLSHYSLAEAWGHGTGTSHVSVLGEDGSAVAATSTINTPFGAMVYSPRTGIILNNELLDLCERCPRGSGTTPSPVSGDRVGGAPGRCWPPVPGERSPSSMVPSILINKAQGSKLVIGGAGGELIISAVAQAIMSKLWLGFDLRAAIAAPILHVNSKGCVEYEPNFSQEVQRGLQDRGQNQTQRPFFLNVVQAVSQEGACVYAVSDLRKSGEAAGY

SEQ ID NO: 5929 - protein, 586 aa, Homo sapiens
MARGYGATVSLVLLGLGLALAVIVLAVVLSRHQAPCGPQAFAHAAVAADSKVCSDIGRAILQQQGSPVDATIAALVCTSVVNPQSMGLGGGVIFTIYNVTTGKVEVINARETVPASHAPSLLDQCAQALPLGTGAQWIGVPGELRGYAEAHRRHGRLPWAQLFQPTIALLRGGHVVAPVLSRFLHNSILRPSLQASTLRQLFFNGTEPLRPQDPLPWPALATTLETVATEGVEVFYTGRLGQMLVEDIAKEGSQLTLQDLAKFQPEVVDALEVPLGDYTLYSPPPPAGGAILSFILNVLRGFNFSTESMARPEGRVNVYHHLVETLKFAKGQRWRLGDPRSHPKLQNASRDLLGETLAQLIRQQIDGRGDHQLSHYSLAEAWGHGTGTSHVSVLGEDGSAVAATSTINTPFGAMVYSPRTGIILNNELLDLCERCPRGSGTTPSPVSGDRVGGAPGRCWPPVPGERSPSSMVPSILINKAQGSKLVIGGAGGELIISAVAQAIMSKLWLGFDLRAAIAAPILHVNSKGCVEYEPNFSQEVQRGLQDRGQNQTQRPFFLNVVQAVSQEGACVYAVSDLRKSGEAAGY

SEQ ID NO: 5930 - protein, 587 aa, Homo sapiens
MARGYGATVSLVLLGLGLALAVIVLAVVLSRHQAPCGPQAFAHAAVAADSKVCSDIGRAILQQQGSPVDATIAALVCTSVVNPQSMGLGGGVIFTIYNVTTGKVEVINARETVPASHAPSLLDQCAQALPLGTGAQWIGVPGELRGYAEAHRRHGRLPWAQLFQPTIALLRGGHVVAPVLSRFLHNSILRPSLQASTLRQLFFNGTEPLRPQDPLPWPALATTLETVATEGVEVFYTGRLGQMLVEDIAKEGSQLTLQDLAKFQPEVVDALEVPLGDYTLYSPPPPAGGAILSFILNVLRGFNFSTESMARPEGRVNVYHHLVETLKFAKGQRWRLGDPRSHPKLQNASRDLLGETLAQLIRQQIDGRGDHQLSHYSLAEAWGHGTGTSHVSVLGEDGSAVAATSTINTPFGAMVYSPRTGIILNNELLDLCERCPRGSGTTPSPAVSGDRVGGAPGRCWPPVPGERSPSSMVPSILINKAQGSKLVIGGAGGELIISAVAQAIMSKLWLGFDLRAAIAAPILHVNSKGCVEYEPNFSQEVQRGLQDRGQNQTQRPFFLNVVQAVSQEGACVYAVSDLRKSGEAAGY

SEQ ID NO: 5931 - protein, 73 aa, Homo sapiens
MARGYGATVSLVLLGLGLALAVIVLAVVLSRHQAPCGPQAFAHAAVAADSKVCSDIGRGPVDRGARGAPWLCR

SEQ ID NO: 5932 - protein, 220 aa, Homo sapiens
  VARIANT 1: note = misc_feature - Xaa can be any naturally occurring amino acid
XSAVAATSTINTPFGAMVYSPRTGIILNNELLDLCERCPRGSGTTPSPVSGDRVGGAPGRCWPPVPGERSPSSMVPSILINKAQGSKLVIGGAGGELIISAVAQAIMSKLWLGFDLRAAIAAPILHVNSKGCVEYEPNFSQKQDLAALPRLVSNSWPQVILLPQPPKLLALQEVQRGLQDRGQNQTQRPFFLNVVQAVSQEGACVYAVSDLRKSGEAAGY

SEQ ID NO: 5933 - protein, 30 aa, Homo sapiens
MATEAGRWQPPDWADLQADLQQVRHKLTQR

SEQ ID NO: 5934 - protein, 217 aa, Homo sapiens
MATGSRTSLLLAFGLLCLPWLQEGSAFPTIPLSRLFDNAMLRAHRLHQLAFDTYQEFEEAYIPKEQKYSFLQNPQTSLCFSESIPTPSNREETQQKSNLELLRISLLLIQSWLEPVQFLRSVFANSLVYGASDSNVYDLLKDLEEGIQTLMGRLEDGSPRTGQIFKQTYSKFDTNSHNDDALLKNYGLLYCFRKDMDKVETFLRIVQCRSVEGSCGF

SEQ ID NO: 5935 - protein, 177 aa, Homo sapiens
MATGSRTSLLLAFGLLCLPWLQEGSAFPTIPLSRLFDNAMLRAHRLHQLAFDTYQEFNLELLRISLLLIQSWLEPVQFLRSVFANSLVYGASDSNVYDLLKDLEEGIQTLMGRLEDGSPRTGQIFKQTYSKFDTNSHNDDALLKNYGLLYCFRKDMDKVETFLRIVQCRSVEGSCGF

SEQ ID NO: 5936 - protein, 202 aa, Homo sapiens
MATGSRTSLLLAFGLLCLPWLQEGSAFPTIPLSRLFDNAMLRAHRLHQLAFDTYQEFNPQTSLCFSESIPTPSNREETQQKSNLELLRISLLLIQSWLEPVQFLRSVFANSLVYGASDSNVYDLLKDLEEGIQTLMGRLEDGSPRTGQIFKQTYSKFDTNSHNDDALLKNYGLLYCFRKDMDKVETFLRIVQCRSVEGSCGF

SEQ ID NO: 5937 - protein, 122 aa, Homo sapiens
MATGSRTSLLLAFGLLCLPWLQEGSAFPTIPLSRLFDNAMLRAHRLHQLAFDTYQEFRLEDGSPRTGQIFKQTYSKFDTNSHNDDALLKNYGLLYCFRKDMDKVETFLRIVQCRSVEGSCGF

SEQ ID NO: 5938 - protein, 245 aa, Homo sapiens
MAAGSRTSLLLAFGLLCLSWLQEGSAFPTIPLSRLFDNAMLRARRLYQLAYDTYQEFEEAYILKEQKYSFLQNPQTSLCFSESIPTPSNRVKTQQKSNLELLRISLLLIQSWLEPVQLLRSVFANSLVYGASDSNVYRHLKDLEEGIQTLIGWKMAAPGLGRSSISPTASLTQNRTTMTHCSRTTGCSTASGRTWTRSRHSCASCSAALWRAAVASSCPGGIPVTPPQCLSWSWKVLLQCPPALS

SEQ ID NO: 5939 - protein, 217 aa, Homo sapiens
MAAGSRTSLLLAFGLLCLSWLQEGSAFPTIPLSRLFDNAMLRARRLYQLAYDTYQEFEEAYILKEQKYSFLQNPQTSLCFSESIPTPSNRVKTQQKSNLELLRISLLLIQSWLEPVQLLRSVFANSLVYGASDSNVYRHLKDLEEGIQTLMWRLEDGSPRTGQIFNQSYSKFDTKSHNDDALLKNYGLLYCFRKDMDKVETFLRIVQCRSVEGSCGF

SEQ ID NO: 5940 - protein, 256 aa, Homo sapiens
MAAGSRTSLLLAFGLLCLSWLQEGSAFPTIPLSRLFDNAMLRARRLYQLAYDTYQEFEEAYILKEQKYSFLQNPQTSLCFSESIPTPSNRVKTQQKSNLELLRISLLLIQSWLEPVQLLRSVFANSLVYGASDSNVYRHLKDLEEGIQTLMWVRVAPGIPNPGAPLASRDWGEKHCCPLFSSQALTQENSPYSSFPLVNPPGLSLQPGGEGGKWMNERGREQCPSAWPLLLFLHFAEAGRWQPPDWADLQSVLQQV

SEQ ID NO: 5941 - protein, 177 aa, Homo sapiens
MAAGSRTSLLLAFGLLCLSWLQEGSAFPTIPLSRLFDNAMLRARRLYQLAYDTYQEFNLELLRISLLLIQSWLEPVQLLRSVFANSLVYGASDSNVYRHLKDLEEGIQTLMWRLEDGSPRTGQIFNQSYSKFDTKSHNDDALLKNYGLLYCFRKDMDKVETFLRIVQCRSVEGSCGF

SEQ ID NO: 5942 - protein, 202 aa, Homo sapiens
MAAGSRTSLLLAFGLLCLSWLQEGSAFPTIPLSRLFDNAMLRARRLYQLAYDTYQEFNPQTSLCFSESIPTPSNRVKTQQKSNLELLRISLLLIQSWLEPVQLLRSVFANSLVYGASDSNVYRHLKDLEEGIQTLMWRLEDGSPRTGQIFNQSYSKFDTKSHNDDALLKNYGLLYCFRKDMDKVETFLRIVQCRSVEGSCGF

SEQ ID NO: 5943 - protein, 130 aa, Homo sapiens
MLLWPLLLLLLLLPTLALLRQQRSQDARLSWLAGLQHRVAWGALVWAATWQRRRLEQSTLHVHQSQQQALRWCLQGAQRPHCSLRRSTDISTFRNHLPLTKASQTQQEDSGEQPLPPTSNQDLGEASLQA

SEQ ID NO: 5944 - protein, 146 aa, Homo sapiens
MLLWPLLLLLLLLPTLALLRQQRSQDARLSWLAGLQHRVAWGALVWAATWQRRRLEQSTLHVHQSQQQALRWCLQGAQRPHCSLRRSTDISTFRNHLPLTKASQTQQEDSGEQPLPPTSNQDLGEASLQATLLGLAALNKAYPEVL

SEQ ID NO: 5945 - protein, 530 aa, Homo sapiens
MLLWPLLLLLLLLPTLALLRQQRSQDARLSWLAGLQHRVAWGALVWAATWQRRRLEQSTLHVHQSQQQALRWCLQGAQRPHCSLRRSTDISTFRNHLPLTKASQTQQEDSGEQPLPPTSNQDLGEASLQATLLGLAALNKAYPEVLAQGRTARVTLTSPWPRPLPWPGNTLGQVGTPGTKDPRALLLDALRSPGLRALEAGTAVELLDVFLGLETDGEELAGAIAAGNPGAPLRERAAELREALEQGPRGLALRLWPKLQVVVTLDAGGQAEAVAALGALWCQGLAFFSPAYAASGGVLGLNLQPEQPHGLYLLPPGAPFIELLPVKEGTQEEAASTLLLAEAQQGKEYELVLTDRASLTRCRLGDVVRVVGAYNQCPVVRFICRLDQTLSVRGEDIGEDLFSEALGRAVGQWAGAKLLDHGCVESSILDSSAGSAPHYEVFVALRGLRNLSEENRDKLDHCLQEASPRYKSLRFWGSVGPARVHLVGQGAFRALRAALAACPSSPFPPAMPRVLRHRHLAQCLQERVVS

SEQ ID NO: 5946 - protein, 474 aa, Homo sapiens
MLLWPLLLLLLLLPTLALLRQQRSQDARLSWLAGLQHRVAWGALVWAATWQRRRLEQSTLHVHQSQQQALRWCLQGAQRPHCSLRRSTDISTFRNHLPLTKASQTQQEDSGEQPLPPTSNQDLGEASLQATLLGLAALNKAYPEVLAQGRTARVTLTSPWPRPLPWPGNTLGQVGTPGTKDPRALLLDALRSPGLRALEAGTAVELLDVFLGLETDGEELAGAIAAGNPGAPLRERAAELREALEQGPRGLALRLWPKLQVVVTLDAGGQAEAVAALGALWCQGLAFFSPAYAASGGVLGLNLQPEQPHGLYLLPPGAPFIELLPVKEGTQEEAASTLLLAEAQQGKEYELVLTDRASLTRCRLGDVVRVVGAYNQCPVVRFICRLDQTLSVRGEDIGEDLFSEALGRAVGQWAGAKLLDHGCVESSILEWGRTDRAEDTRLGSCPFTGSMCAHGVYSQIPLRALLPTTRCLWR

SEQ ID NO: 5947 - protein, 474 aa, Homo sapiens; identical to SEQ ID NO: 5946

SEQ ID NO: 5948 - protein, 530 aa, Homo sapiens; identical to SEQ ID NO: 5945

SEQ ID NO: 5949 - protein, 479 aa, Homo sapiens
MLLWPLLLLLLLLPTLALLRQQRSQDARLSWLAGLQHRVAWGALVWAATWQRRRLEQSTLHVHQSQQQALRWCLQGAQRPHCSLRRSTDISTFRNHLPLTKASQTQQEDSGEQPLPPTSNQDLGEASLQATLLGLAALNKAYPEVLAQGRTARVTLTSPWPRPLPWPGNTLGQVGTPGTKDPRALLLDALRSPGLRALEAGTAVELLDVFLGLETDGEELAGAIAAGNPGAPLRERAAELREALEQGPRGLALRLWPKLQVVVTLDAGGQAEAVAALGALWCQGLAFFSPAYAASGGVLGLNLQPEQPHGLYLLPPGAPFIELLPVKEGTQEEAASTLLLAEAQQGKEYELVLTDRASLTRCRLGDVVRVVGAYNQCPVVRFICRLDQTLSVRGEDIGEDLFSEALGRAVGQWAGAKLLDHGCVESSILDSSAGSAPHYEVFVALRGLRNLSEENRDKILASGSALGKREWTPAQPFPH

SEQ ID NO: 5950 - protein, 112 aa, Homo sapiens
MLLWPLLLLLLLLPTLALLRQQRSQDARLSWLAGLQHRVAWGALVWAATWQRRRLEQSTLHVHQSQQQALRWCLQGAQRPHCSLRRSTGSHQSCLKLLGNWLPEAFLLSLGL

SEQ ID NO: 5951 - protein, 107 aa, Homo sapiens
MPLWVFFFVILTLSNSSHCSPPPPLTLRMRRYADAIFTNSYRKVLGQLSARKLLQDIMSRQQGESNQERGARARLGRQVDSMWAEQKQMELESILVALLQKHRNSQG

SEQ ID NO: 5952 - protein, 108 aa, Homo sapiens
MPLWVFFFVILTLSNSSHCSPPPPLTLRMRRYADAIFTNSYRKVLGQLSARKLLQDIMSRQQGESNQERGARARLGRQVDSMWAEQKQMELESILVALLQKHSRNSQG

SEQ ID NO: 5953 - protein, 108 aa, Homo sapiens; identical to SEQ ID NO: 5952

SEQ ID NO: 5954 - protein, 207 aa, Homo sapiens
MAMGEGAGQVGERGGSMQGLCGRLPFRHHDQLQLAVGRSRLPELPPGLHLPQLKESLLVAGSRWLGAARALHWHVGELQTGLRGHRVLGPGRHLPLLVDHQRAHCPLGRGELWAFSQYYPHPGEETGASSGQPPYPVSVLASLQVDTFPDPTLWNSLHHLQLPARQCWPGHPPPPGAGTGFLPGIRRLGLRCRFLGRSFDCQPPRGS

SEQ ID NO: 5955 - protein, 423 aa, Homo sapiens
MDRRMWGAHVFCVLSPLPTVLGHMHPECDFITQLREDESACLQAAEEMPNTTLGCPATWDGLLCWPTAGSGEWVTLPCPDFFSHFSSESGAVKRDCTITGWSEPFPPYPVACPVPLELLAEEESYFSTVKIIYTVGHSISIVALFVAITILVALRRLHCPRNYVHTQLFTTFILKAGAVFLKDAALFHSDDTDHCSFSTVLCKVSVAASHFATMTNFSWLLAEAVYLNCLLASTSPSSRRAFWWLVLAGWGLPVLFTGTWVSCKLAFEDIACWDLDDTSPYWWIIKGPIVLSVGVNFGLFLNIIRILVRKLEPAQGSLHTQSQYWRLSKSTLFLIPLFGIHYIIFNFLPDNAGLGIRLPLELGLGSFQGFIVAILYCFLNQEVRTEISRKWHGHDPELLPAWRTRAKWTTPSRSAAKVLTSMC

SEQ ID NO: 5956 - protein, 151 aa, Homo sapiens
MLPFSTATTLTTAASPLAARALHWHVGELQTGLRGHRVLGPGRHLPLLVDHQRAHCPLGRGELWAFSQYYPHPGEETGASSGQPPYPVSVLASLQVDTFPDPTLWNSLHHLQLPARQCWPGHPPPPGAGTGFLPGLHCCHPLLLPQPRGED

SEQ ID NO: 5957 - protein, 145 aa, Homo sapiens
MVPGTPSPLLGRGKELWLESLACLPGAVKRDCTITGWSEPFPPYPVACPVPLELLAEEESYFSTVKIIYTVGHSISIVALFVAITILVALRRLHCPRNYVHTQLFTTFILKAGAVFLKDAALFHSDDTDHCSFSTGCPCSSLARG

SEQ ID NO: 5958 - protein, 359 aa, Homo sapiens
MVPGTPSPLLGRGKELWLESLACLPGAVKRDCTITGWSEPFPPYPVACPVPLELLAEEESYFSTVKIIYTVGHSISIVALFVAITILVALRRLHCPRNYVHTQLFTTFILKAGAVFLKDAALFHSDDTDHCSFSTVLCKVSVAASHFATMTNFSWLLAEAVYLNCLLASTSPSSRRAFWWLVLAGWGLPVLFTGTWVSCKLAFEDIACWDLDDTSPYWWIIKGPIVLSVGVNFGLFLNIIRILVRKLEPAQGSLHTQSQYWRLSKSTLFLIPLFGIHYIIFNFLPDNAGLGIRLPLELGLGSFQGFIVAILYCFLNQEVRTEISRKWHGHDPELLPAWRTRAKWTTPSRSAAKVLTSMC

SEQ ID NO: 5959 - protein, 68 aa, Homo sapiens
MVPGTPSPLLGRGKELWLESLACLPGAVKRDCTITGWSEPFPPYPVACPVPLELLAEEGCPCSSLARG

SEQ ID NO: 5960 - protein, 66 aa, Homo sapiens
MFTCWWSYLRSTLAAVPGEASRVQFNAPFDVGIKLSGVQYQQHSQALGKFLQDILWEEAKEAPADK

SEQ ID NO: 5961 - protein, 105 aa, Homo sapiens
MFTCWWSYLRSTLAAVPGEASRVQQRKESKKPPAKLQPRALAGWLRPEDGGQAEGAEDELEVRFNAPFDVGIKLSGVQYQQHSQALGKFLQDILWEEAKEAPADK

SEQ ID NO: 5962 - protein, 104 aa, Homo sapiens
MFTCWWSYLRSTLAAVPGEASRVQRKESKKPPAKLQPRALAGWLRPEDGGQAEGAEDELEVRFNAPFDVGIKLSGVQYQQHSQALGKFLQDILWEEAKEAPADK

SEQ ID NO: 5963 - protein, 40 aa, Homo sapiens
MFTCWWSYLRSTLAAVPGEASRVQRPQPTSDRPQALLTSL

SEQ ID NO: 5964 - protein, 33 aa, Homo sapiens
MPSPGTVCSLLLLGMLWLDLAMAGSSFLSPEHQ

SEQ ID NO: 5965 - protein, 117 aa, Homo sapiens
MPSPGTVCSLLLLGMLWLDLAMAGSSFLSPEHQRVQQRKESKKPPAKLQPRALAGWLRPEDGGQAEGAEDELEVRFNAPFDVGIKLSGVQYQQHSQALGKFLQDILWEEAKEAPADK

SEQ ID NO: 5966 - protein, 117 aa, Homo sapiens; identical to SEQ ID NO: 5965

SEQ ID NO: 5967 - protein, 117 aa, Homo sapiens; identical to SEQ ID NO: 5965

SEQ ID NO: 5968 - protein, 91 aa, Homo sapiens
MPSPGTVCSLLLLGMLWLDLAMAGSSFLSPEHQRVQQRKESKKPPAKLQPRALAGWLRPEDGGQAEGAEDELEVRRPQPTSDRPQALLTSL

SEQ ID NO: 5969 - protein, 116 aa, Homo sapiens
MPSPGTVCSLLLLGMLWLDLAMAGSSFLSPEHQRVQRKESKKPPAKLQPRALAGWLRPEDGGQAEGAEDELEVRFNAPFDVGIKLSGVQYQQHSQALGKFLQDILWEEAKEAPADK

SEQ ID NO: 5970 - protein, 116 aa, Homo sapiens; identical to SEQ ID NO: 5969

SEQ ID NO: 5971 - protein, 48 aa, Homo sapiens
MAWFALYLLSLLWATAGTSTQTQSSCCEYDVFPRRSGKQLPWGRGCDL

SEQ ID NO: 5972 - protein, 417 aa, Homo sapiens
MAWFALYLLSLLWATAGTSTQTQSSCSVPSAQEPLVNGIQVLMENSVTSSAYPNPSILIAMNLAGAYNLKAQKLLTYQLMSSDNNDLTIGQLGLTIMALTSSCRDPGDKVSILQRQMENWAPSSPNAEASAFYGPSLAILALCQKNSEATLPIAVRFAKTLLANSSPFNVDTGAMATLALTCMYNKIPVGSEEGYRSLFGQVLKDIVEKISMKIKDNGIIGDIYSTGLAMQALSVTPEPSKKEWNCKKTTDMILNEIKQGKFHNPMSIAQILPSLKGKTYLDVPQVTCSPDHEVQPTLPSNPGPGPTSASNITVIYTINNQLRGVELLFNETINVSVKSGSVLLVVLEEAQRKNPMFKFETTMTSWGLVVSSINNIAENVNHKTYWQFLSGVTPLNEGVADYIPFNHEHITANFTQY

SEQ ID NO: 5973 - protein, 153 aa, Homo sapiens
MVATKTFALLLLSLFLAVGLGEKKEGHFSALPSLPVGSHAKVSSPQPRGPRYAEGTFISDYSIAMDKIHQQDFVNWLLAQKGKKNDWKHNITQREARALELASQANRKEEEAVEPQSSPAKNPSDEDLLRDLLIQELLACLLDQTNLCRLRSR

SEQ ID NO: 5974 - protein, 199 aa, Homo sapiens
MLAYSSVHCFREDKMKFTIVFAGLLGVFLAPALANYNINVNDDNNNAGSGQQSVSVNNEHNVANVDNNNGWDSWNSIWDYGNGFAATRLFQKKTCIVHKMNKEVMPSIQSLDALVKEKKLQGKGPGGPPPKGLMYSVNPNKVDDLSKFGKNIANMCRGIPTYMAEEMQEASLFFYSGTCYTTSVLWIVDISFCGDTVEN

SEQ ID NO: 5975 - protein, 184 aa, Homo sapiens
MKILVAFLVVLTIFGIQSHGYEVFNIISPSNNGGNVQETVTIDNEKNTAIINIHAGSCSSTTIFDYKHGYIASRVLSRRACFILKMDHQNIPPLNNLQWYIYEKQALDNMFSSKYTWVKYNPLESLIKDVDWFLLGSPIEKLCKHIPLYKGEVVENTHNVGAGGCAKAGLLGILGISICADIHV

SEQ ID NO: 5976 - protein, 161 aa, Homo sapiens
MKILVAFLVVLTIFGIQSHGYEVFNIISPSNNGGNVQETVTIDNEKNTAIINIHAGSCSSTTIFDYKHGYIASRVLSRRACFILKMDHQNIPPLNNLQWYIYEKQALDNMFSSKYTWVKYNPLESLIKDVDWFLLGSPIEKLCKHIPLYKGEVVENTREYQ

SEQ ID NO: 5977 - protein, 429 aa, Homo sapiens
MQLRNPELHLGCALALRFLALVSWDIPGARALDNGLARTPTMGWLHWERFMCNLDCQEEPDSCISEKLFMEMAELMVSEGWKDAGYEYLCIDDCWMAPQRDSEGRLQADPQRFPHGIRQLANYVHSKGLKLGIYADVGNKTCAGFPGSFGYYDIDAQTFADWGVDLLKFDGCYCDSLENLADGYKHMSLALNRTGRSIVYSCEWPLYMWPFQKPNYTEIRQYCNHWRNFADIDDSWKSIKSILDWTSFNQERIVDVAGPGGWNDPDMLVIGNFGLSWNQQVTQMALWAIMAAPLFMSNDLRHISPQAKALLQDKDVIAINQDPLGKQGYQLRQGDNFEVWERPLSGLAWAVAMINRQEIGGPRSYTIAVASLGKGVACNPACFITQLLPVKRKLGFYEWTSRLRSHINPTGTVLLQLENTMQMSLKDLL

SEQ ID NO: 5978 - protein, 222 aa, Homo sapiens
MQLRNPELHLGCALALRFLALVSWDIPGARALDNGLARTPTMGWLHWERFMCNLDCQEEPDSCISEKLFMEMAELMVSEGWKDAGYEYLCIDDCWMAPQRDSEGRLQADPQRFPHGIRQLANYVHSKGLKLGIYADVGNKTCAGFPGSFGYYDIDAQTFADWGVDLLKFDGCYCDSLENLADGYKHMSLALNRTGRSIVYSCEWPLYMWPFQKSSTLFGSIC

SEQ ID NO: 5979 - protein, 84 aa, Homo sapiens
MFEIDYSRDSFLKDGQPFRYISGSIHYSRVPRFYWKDRLLKMKMAGLNAIQTLPGSCGQVVGSPSAQDEASPLSEWRASYNSAG

SEQ ID NO: 5980 - protein, 102 aa, Homo sapiens
MFEIDYSRDSFLKDGQPFRYISGSIHYSRVPRFYWKDRLLKMKMAGLNAIQTYVPWNFHEPWPGQYQFSEDHDVEYFLRLAHELGLLVILRPGPYICAEWEM

SEQ ID NO: 5981 - protein, 647 aa, Homo sapiens
MFEIDYSRDSFLKDGQPFRYISGSIHYSRVPRFYWKDRLLKMKMAGLNAIQTYVPWNFHEPWPGQYQFSEDHDVEYFLRLAHELGLLVILRPGPYICAEWEMGGLPAWLLEKESILLRSSDPDYLAAVDKWLGVLLPKMKPLLYQNGGPVITVQVENEYGSYFACDFDYLRFLQKRFRHHLGDDVVLFTTDGAHKTFLKCGALQGLYTTVDFGTGSNITDAFLSQRKCEPKGPLINSEFYTGWLDHWGQPHSTIKTEAVASSLYDILARGASVNLYMFIGGTNFAYWNGANSPYAAQPTSYDYDAPLSEAGDLTEKYFALRNIIQKFEKVPEGPIPPSTPKFAYGKVTLEKLKTVGAALDILCPSGPIKSLYPLTFIQVKQHYGFVLYRTTLPQDCSNPAPLSSPLNGVHDRAYVAVDGIPQGVLERNNVITLNITGKAGATLDLLVENMGRVNYGAYINDFKGLVSNLTLSSNILTDWTIFPLDTEDAVCSHLGGWGHRDSGHHDEAWAHNSSNYTLPAFYMGNFSIPSGIPDLPQDTFIQFPGWTKGQVWINGFNLGRYWPARGPQLTLFVPQHILMTSAPNTITVLELEWAPCSSDDPELCAVTFVDRPVIGSSVTYDHPSKPVEKRLMPPPPQKNKDSWLDHV

SEQ ID NO: 5982 - protein, 114 aa, Homo sapiens
MGGLPAWLLEKESILLRSSDPDYLAAVDKWLGVLLPKMKPLLYQNGGPVITVQVENEYGSYFACDFDYLRFLQKRFRHHLGDDVVLFTTDGAHKTFLKCGALQGLYTTVDFGTG

SEQ ID NO: 5983 - protein, 41 aa, Homo sapiens
MPGFLVRILPLLLVLLLLGPTRGLRITWQLWTSGWESFCPR

SEQ ID NO: 5984 - protein, 546 aa, Homo sapiens
MPGFLVRILPLLLVLLLLGPTRGLRNATQRMFEIDYSRDSFLKDGQPFRYISGSIHYSRVPRFYWKDRLLKMKMAGLNAIQTLPGSCGQVVGSPSAQDEASPLSEWRASYNSAGSNITDAFLSQRKCEPKGPLINSEFYTGWLDHWGQPHSTIKTEAVASSLYDILARGASVNLYMFIGGTNFAYWNGANSPYAAQPTSYDYDAPLSEAGDLTEKYFALRNIIQKFEKVPEGPIPPSTPKFAYGKVTLEKLKTVGAALDILCPSGPIKSLYPLTFIQVKQHYGFVLYRTTLPQDCSNPAPLSSPLNGVHDRAYVAVDGIPQGVLERNNVITLNITGKAGATLDLLVENMGRVNYGAYINDFKGLVSNLTLSSNILTDWTIFPLDTEDAVCSHLGGWGHRDSGHHDEAWAHNSSNYTLPAFYMGNFSIPSGIPDLPQDTFIQFPGWTKGQVWINGFNLGRYWPARGPQLTLFVPQHILMTSAPNTITVLELEWAPCSSDDPELCAVTFVDRPVIGSSVTYDHPSKPVEKRLMPPPPQKNKDSWLDHV

SEQ ID NO: 5985 - protein, 677 aa, Homo sapiens
MPGFLVRILPLLLVLLLLGPTRGLRNATQRMFEIDYSRDSFLKDGQPFRYISGSIHYSRVPRFYWKDRLLKMKMAGLNAIQTYVPWNFHEPWPGQYQFSEDHDVEYFLRLAHELGLLVILRPGPYICAEWEMGGLPAWLLEKESILLRSSDPDYLAAVDKWLGVLLPKMKPLLYQNGGPVITVQVENEYGSYFACDFDYLRFLQKRFRHHLGDDVVLFTTDGAHKTFLKCGALQGLYTTVDFGTGSNITDAFLSQRKCEPKGPLINSEFYTGWLDHWGQPHSTIKTEAVASSLYDILARGASVNLYMFIGGTNFAYWNGANSPYAAQPTSYDYDAPLSEAGDLTEKYFALRNIIQKFEKVPEGPIPPSTPKFAYGKVTLEKLKTVGAALDILCPSGPIKSLYPLTFIQVKQHYGFVLYRTTLPQDCSNPAPLSSPLNGVHDRAYVAVDGIPQGVLERNNVITLNITGKAGATLDLLVENMGRVNYGAYINDFKGLVSNLTLSSNILTDWTIFPLDTEDAVCSHLGGWGHRDSGHHDEAWAHNSSNYTLPAFYMGNFSIPSGIPDLPQDTFIQFPGWTKGQVWINGFNLGRYWPARGPQLTLFVPQHILMTSAPNTITVLELEWAPCSSDDPELCAVTFVDRPVIGSSVTYDHPSKPVEKRLMPPPPQKNKDSWLDHV

SEQ ID NO: 5986 - protein, 147 aa, Homo sapiens
MPGFLVRILPLLLVLLLLGPTRGLRSRFLPWAFHLPRQAPKSQLPLHKRGTKTAPNEHASSNRSGRRRRRQQWNATQRMFEIDYSRDSFLKDGQPFRYISGSIHYSRVPRFYWKDRLLKMKMAGLNAIQTYVPWNFHEPWPGQYQFS

SEQ ID NO: 5987 - protein, 185 aa, Homo sapiens
MPGFLVRILPLLLVLLLLGPTRGLRVENEYGSYFACDFDYLRFLQKRFRHHLGDDVVLFTTDGAHKTFLKCGALQGLYTTVDFGTGSNITDAFLSQRKCEPKGPLINSEFYTGWLDHWGQPHSTIKTEAVASSLYDILARGASVNLYMFIGGTNFAYWNGANSPYAAQPTSYDYDAPLSEAGDLT

SEQ ID NO: 5988 - protein, 9 aa, Homo sapiens
MAPKKLSCL

SEQ ID NO: 5989 - protein, 26 aa, Homo sapiens
MAPKKLSCLRSLLLPLSLTLLLPQAD

SEQ ID NO: 5990 - protein, 114 aa, Homo sapiens
MAPKKLSCLRSLLLPLSLTLLLPQADTRSFVVDRGHDRFLLDGAPFRYVSGSLHYFRVPRVLWADRLLKMRWSGLNAIQFYVPWNYHEPQPGVYNFNGSRDLIAFLNEAALANL

SEQ ID NO: 5991 - protein, 564 aa, Homo sapiens
MAPKKLSCLRSLLLPLSLTLLLPQADTRSFVVDRGHDRFLLDGAPFRYVSGSLHYFRVPRVLWADRLLKMRWSGLNAIQFYVPWNYHEPQPGVYNFNGSRDLIAFLNEAALANLLVILRPGPYICAEWEMGGLPSWLLRKPEIHLRTSDPADNMTKIFTLLRKYEPHGPLVNSEYYTGWLDYWGQNHSTRSVSAVTKGLENMLKLGASVNMYMFHGGTNFGYWNGADKKGRFLPITTSYDYDAPISEAGDPTPKLFALRDVISKFQEVPLGPLPPPSPKMMLGPVTLHLVGHLLAFLDLLCPRGPIHSILPMTFEAVKQDHGFMLYRTYMTHTIFEPTPFWVPNNGVHDRAYVMVDGVFQGVVERNMRDKLFLTGKLGSKLDILVENMGRLSFGSNSSDFKGLLKPPILGQTILTQWMMFPLKIDNLVKWWFPLQLPKWPYPQAPSGPTFYSKTFPILGSVGDTFLYLPGWTKGQVWINGFNLGRYWTKQGPQQTLYVPRFLLFPRGALNKITLLELEDVPLQPQVQFLDKPILNSTSTLHRTHINSLSADTLSASEPMELSGH

SEQ ID NO: 5992 - protein, 654 aa, Homo sapiens
MAPKKLSCLRSLLLPLSLTLLLPQADTRSFVVDRGHDRFLLDGAPFRYVSGSLHYFRVPRVLWADRLLKMRWSGLNAIQFYVPWNYHEPQPGVYNFNGSRDLIAFLNEAALANLLVILRPGPYICAEWEMGGLPSWLLRKPEIHLRTSDPDFLAAVDSWFKVLLPKIYPWLYHNGGNIISIQVENEYGSYRACDFSYMRHLAGLFRALLGEKILLFTTDGPEGLKCGSLRGLYTTVDFGPADNMTKIFTLLRKYEPHGPLVNSEYYTGWLDYWGQNHSTRSVSAVTKGLENMLKLGASVNMYMFHGGTNFGYWNGADKKGRFLPITTSYDYDAPISEAGDPTPKLFALRDVISKFQEVPLGPLPPPSPKMMLGPVTLHLVGHLLAFLDLLCPRGPIHSILPMTFEAVKQDHGFMLYRTYMTHTIFEPTPFWVPNNGVHDRAYVMVDGVFQGVVERNMRDKLFLTGKLGSKLDILVENMGRLSFGSNSSDFKGLLKPPILGQTILTQWMMFPLKIDNLVKWWFPLQLPKWPYPQAPSGPTFYSKTFPILGSVGDTFLYLPGWTKGQVWINGFNLGRYWTKQGPQQTLYVPRFLLFPRGALNKITLLELEDVPLQPQVQFLDKPILNSTSTLHRTHINSLSADTLSASEPMELSGH

SEQ ID NO: 5993 - protein, 654 aa, Homo sapiens; identical to SEQ ID NO: 5992

SEQ ID NO: 5994 - protein, 50 aa, Homo sapiens
MAPKKLSCLRSLLLPLSLTLLLPQTGPRSAMCLAACTTFGYRGCFGPTGF

SEQ ID NO: 5995 - protein, 185 aa, Homo sapiens
  VARIANT 1: note = misc_feature - Xaa can be any naturally occurring amino acid
XKMRWSGLNAIQFYVPWNYHEPQPGVYNFNGSRDLIAFLNEAALANLLVILRPGPYICAEWEMGGLPSWLLRKPEIHLRTSDPDFLAAVDSWFKVLLPKIYPWLYHNGGNIISIQVENEYGSYRACDFSYMRHLAGLFRALLGEKILLFTTDGPEGLKCGSLRGLYTTVDFGPGLKQGLGVESGE

SEQ ID NO: 5996 - protein, 636 aa, Homo sapiens
MTTWSLRRRPARTLGLLLLVVLGFLVLRRLDWSTLVPLRLRHRQLGLQAKGWNFMLEDSTFWIFGGSIHYFRVPREYWRDRLLKMKACGLNTLTTYVPWNLHEPERGKFDFSGNLDLEAFVLMAAEIGLWVILRPGPYICSEMDLGGLPSWLLQDPGMRLRTTYKGFTEAVDLYFDHLMSRVVPLQYKRGGPIIAVQVENEYGSYNKDPAYMPYVKKALEDRGIVELLLTSDNKDGLSKGIVQGVLATINLQSTHELQLLTTFLFNVQGTQPKMVMEYWTGWFDSWGGPHNILDSSEVLKTVSAIVDAGSSINLYMFHGGTNFGFMNGAMHFHDYKSDVTSYDYDAVLTEAGDYTAKYMKLRDFFGSISGIPLPPPPDLLPKMPYEPLTPVLYLSLWDALKYLGEPIKSEKPINMENLPVNGGNGQSFGYILYETSITSSGILSGHVHDRGQVFVNTVSIGFLDYKTTKIAVPLIQGYTVLRILVENRGRVNYGENIDDQRKGLIGNLYLNDSPLKNFRIYSLDMKKSFFQRFGLDKWSSLPETPTLPAFFLGSLSISSTPCDTFLKLEGWEKGVVFINGQNLGRYWNIGPQKTLYLPGPWLSSGINQVIVFEETMAGPALQFTETPHLGRNQYIK

SEQ ID NO: 5997 - protein, 636 aa, Homo sapiens; identical to SEQ ID NO: 5996

SEQ ID NO: 5998 - protein, 553 aa, Homo sapiens
MNHVAKQQSEEAFPQEQQKAPPVVGGFNSNVGSKVLGLKYEEIDCLINDEHTIKGRREGNEVFLPFTWVEKYFDVYGKVVQYDGYDRFEFSHSYSKVYAQRAPYHPDGVFMSFEGYNVEVRDRVKCISGVEGVPLSTQWGPQGYFYPIQIAQYGLSHYSKNLTEKPPHIEVYETAEDRDKNKPNDWTVPKGCFMANVADKSRFTNVKQFIAPETSEGVSLQLGNTKDFIISFDLKFLTNGSVSVVLETTEKNQLFTIHYVSNAQLIAFKERDIYYGIGPRTSWSTVTRDLVTDLRKGVGLSNTKAVKPTKIMPKKVVRLIAKGKGFLDNITISTTAHMAAFFAASDWLVRNQDEKGGWPIMVTRKLGEGFKSLEPGWYSAMAQGQAISTLVRAYLLTKDHIFLNSALRATAPYKFLSEQHGVKAVFMNKHDWYEEYPTTPSSFVLNGFMYSLIGLYDLKETAGEKLGKEARSLYERGMESLKAMLPLYDTGSGTIYDLRHFMLGIAPNLARWDYHTTHINQLQLLSTIDESPVFKEFVKRWKSYLKGSRAKHN

SEQ ID NO: 5999 - protein, 617 aa, Homo sapiens
MRCLAARVNYKTLIIICALFTLVTVLLWNKCSSDKAIQFPRRSSSGFRVDGFEKRAAASESNNYMNHVAKQQSEEAFPQEQQKAPPVVGGFNSNVGSKVLGLKYEEIDCLINDEHTIKGRREGNEVFLPFTWVEKYFDVYGKVVQYDGYDRFEFSHSYSKVYAQRAPYHPDGVFMSFEGYNVEVRDRVKCISGVEGVPLSTQWGPQGYFYPIQIAQYGLSHYSKNLTEKPPHIEVYETAEDRDKNKPNDWTVPKGCFMANVADKSRFTNVKQFIAPETSEGVSLQLGNTKDFIISFDLKFLTNGSVSVVLETTEKNQLFTIHYVSNAQLIAFKERDIYYGIGPRTSWSTVTRDLVTDLRKGVGLSNTKAVKPTKIMPKKVVRLIAKGKGFLDNITISTTAHMAAFFAASDWLVRNQDEKGGWPIMVTRKLGEGFKSLEPGWYSAMAQGQAISTLVRAYLLTKDHIFLNSALRATAPYKFLSEQHGVKAVFMNKHDWYEEYPTTPSSFVLNGFMYSLIGLYDLKETAGEKLGKEARSLYERGMESLKAMLPLYDTGSGTIYDLRHFMLGIAPNLARWDYHTTHINQLQLLSTIDESPVFKEFVKRWKSYLKGSRAKHN

SEQ ID NO: 6000 - protein, 1192 aa, Homo sapiens
MAACGRVRRMFRLSAALHLLLLFAAGAEKLPGQGVHSQGQGPGANFVSFVGQAGGGGPAGQQLPQLPQSSQLQQQQQQQQQQQQPQPPQPPFPAGGPPARRGGAGAGGGWKLAEEESCREDVTRVCPKHTWSNNLAVLECLQDVRELLWNYKLNLTTDPKFESVAREVCKSTITEIKECADEPVGKGYMVSCLVDHRGNITEYQCHQYITKMTAIIFSDYRLICGFMDDCKNDINILKCGSIRLGEKDAHSQGEVVSCLEKGLVKEAEEREPKIQVSELCKKAILRVAELSSDDFHLDRHLYFACRDDRERFCENTQAGEGRVYKCLFNHKFEESMSEKCREALTTRQKLIAQDYKVSYSLAKSCKSDLKKYRCNVENLPRSREARLSYLLMCLESAVHRGRQVSSECQGEMLDYRRMLMEDFSLSPEIILSCRGEIEHHCSGLHRKGRTLHCLMKVVRGEKGNLGMNCQQALQTLIQETDPGADYRIDRALNEACESVIQTACKHIRSGDPMILSCLMEHLYTEKMVEDCEHRLLELQYFISRDWKLDPVLYRKCQGDASRLCHTHGWNETSEFMPQGAVFSCLYRHAYRTEEQGRRLSRECRAEVQRILHQRAMDVKLDPALQDKCLIDLGKWCSEKTETGQELECLQDHLDDLVVECRDIVGNLTELESEDIQIEALLMRACEPIIQNFCHDVADNQIDSGDLMECLIQNKHQKDMNEKCAIGVTHFQLVQMKDFRFSYKFKMACKEDVLKLCPNIKKKVDVVICLSTTVRNDTLQEAKEHRVSLKCRRQLRVEELEMTEDIRLEPDLYEACKSDIKNFCSAVQYGNAQIIECLKENKKQLSTRCHQKVFKLQETEMMDPELDYTLMRVCKQMIKRFCPEADSKTMLQCLKQNKNSELMDPKCKQMITKRQITQNTDYRLNPMLRKACKADIPKFCHGILTKAKDDSELEGQVISCLKLRYADQRLSSDCEDQIRIIIQESALDYRLDPQLQLHCSDEISSLCAEEAAAQEQTGQVEECLKVNLLKIKTELCKKEVLNMLKESKADIFVDPVLHTACALDIKHHCAAITPGRGRQMSCLMEALEDKRVRLQPECKKRLNDRIEMWSYAAKVAPADGFSDLAMQVMTSPSKNYILSVISGSICILFLIGLMCGRITKRVTRELKDRLQYRSETMAYKGLVWSQDVTGSPA

SEQ ID NO: 6001 - protein, 1203 aa, Homo sapiens
MAACGRVRRMFRLSAALHLLLLFAAGAEKLPGQGVHSQGQGPGANFVSFVGQAGGGGPAGQQLPQLPQSSQLQQQQQQQQQQQQPQPPQPPFPAGGPPARRGGAGAGGGWKLAEEESCREDVTRVCPKHTWSNNLAVLECLQDVREPENEISSDCNHLLWNYKLNLTTDPKFESVAREVCKSTITEIKECADEPVGKGYMVSCLVDHRGNITEYQCHQYITKMTAIIFSDYRLICGFMDDCKNDINILKCGSIRLGEKDAHSQGEVVSCLEKGLVKEAEEREPKIQVSELCKKAILRVAELSSDDFHLDRHLYFACRDDRERFCENTQAGEGRVYKCLFNHKFEESMSEKCREALTTRQKLIAQDYKVSYSLAKSCKSDLKKYRCNVENLPRSREARLSYLLMCLESAVHRGRQVSSECQGEMLDYRRMLMEDFSLSPEIILSCRGEIEHHCSGLHRKGRTLHCLMKVVRGEKGNLGMNCQQALQTLIQETDPGADYRIDRALNEACESVIQTACKHIRSGDPMILSCLMEHLYTEKMVEDCEHRLLELQYFISRDWKLDPVLYRKCQGDASRLCHTHGWNETSEFMPQGAVFSCLYRHAYRTEEQGRRLSRECRAEVQRILHQRAMDVKLDPALQDKCLIDLGKWCSEKTETGQELECLQDHLDDLVVECRDIVGNLTELESEDIQIEALLMRACEPIIQNFCHDVADNQIDSGDLMECLIQNKHQKDMNEKCAIGVTHFQLVQMKDFRFSYKFKMACKEDVLKLCPNIKKKVDVVICLSTTVRNDTLQEAKEHRVSLKCRRQLRVEELEMTEDIRLEPDLYEACKSDIKNFCSAVQYGNAQIIECLKENKKQLSTRCHQKVFKLQETEMMDPELDYTLMRVCKQMIKRFCPEADSKTMLQCLKQNKNSELMDPKCKQMITKRQITQNTDYRLNPMLRKACKADIPKFCHGILTKAKDDSELEGQVISCLKLRYADQRLSSDCEDQIRIIIQESALDYRLDPQLQLHCSDEISSLCAEEAAAQEQTGQVEECLKVNLLKIKTELCKKEVLNMLKESKADIFVDPVLHTACALDIKHHCAAITPGRGRQMSCLMEALEDKRVRLQPECKKRLNDRIEMWSYAAKVAPADGFSDLAMQVMTSPSKNYILSVISGSICILFLIGLMCGRITKRVTRELKDRLQYRSETMAYKGLVWSQDVTGSPA

SEQ ID NO: 6002 - protein, 1179 aa, Homo sapiens
MAACGRVRRMFRLSAALHLLLLFAAGAEKLPGQGVHSQGQGPGANFVSFVGQAGGGGPAGQQLPQLPQSSQLQQQQQQQQQQQQPQPPQPPFPAGGPPARRGGAGAGGGWKLAEEESCREDVTRVCPKHTWSNNLAVLECLQDVREPENEISSDCNHLLWNYKLNLTTDPKFESVAREVCKSTITEIKECADEPVGKGYMVSCLVDHRGNITEYQCHQYITKMTAIIFSDYRLICGFMDDCKNDINILKCGSIRLGEKDAHSQGEVVSCLEKGLVKEAEEREPKIQVSELCKKAILRVAELSSDDFHLDRHLYFACRDDRERFCENTQAGEGRVYKCLFNHKFEESMSEKCREALTTRQKLIAQDYKVSYSLAKSCKSDLKKYRCNVENLPRSREARLSYLLMCLESAVHRGRQVSSECQGEMLDYRRMLMEDFSLSPEIILSCRGEIEHHCSGLHRKGRTLHCLMKVVRGEKGNLGMNCQQALQTLIQETDPGADYRIDRALNEACESVIQTACKHIRSGDPMILSCLMEHLYTEKMVEDCEHRLLELQYFISRDWKLDPVLYRKCQGDASRLCHTHGWNETSEFMPQGAVFSCLYRHAYRTEEQGRRLSRECRAEVQRILHQRAMDVKLDPALQDKCLIDLGKWCSEKTETGQELECLQDHLDDLVVECRDIVGNLTELESEDIQIEALLMRACEPIIQNFCHDVADNQIDSGDLMECLIQNKHQKDMNEKCAIGVTHFQLVQMKDFRFSYKFKMACKEDVLKLCPNIKKKVDVVICLSTTVRNDTLQEAKEHRVSLKCRRQLRVEELEMTEDIRLEPDLYEACKSDIKNFCSAVQYGNAQIIECLKENKKQLSTRCHQKVFKLQETEMMDPELDYTLMRVCKQMIKRFCPEADSKTMLQCLKQNKNSELMDPKCKQMITKRQITQNTDYRLNPMLRKACKADIPKFCHGILTKAKDDSELEGQVISCLKLRYADQRLSSDCEDQIRIIIQESALDYRLDPQLQLHCSDEISSLCAEEAAAQEQTGQVEECLKVNLLKIKTELCKKEVLNMLKESKADIFVDPVLHTACALDIKHHCAAITPGRGRQMSCLMEALEDKRVRLQPECKKRLNDRIEMWSYAAKVAPADGFSDLAMQVMTSPSKNYILSVISGSICILFLIGLMCGRITKRVTRELKDR

SEQ ID NO: 6003 - protein, 698 aa, Homo sapiens
MAACGRVRRMFRLSAALHLLLLFAAGAEKLPGQGVHSQGQGPGANFVSFVGQAGGGGPAGQQLPQLPQSSQLQQQQQQQQQQQQPQPPQPPFPAGGPPARRGGAGAGGGWKLAEEESCREDVTRVCPKHTWSNNLAVLECLQDVREPENEISSDCNHLLWNYKLNLTTDPKFESVAREVCKSTITEIKECADEPVGKGYMVSCLVDHRGNITEYQCHQYITKMTAIIFSDYRLICGFMDDCKNDINILKCGSIRLGEKDAHSQGEVVSCLEKGLVKEAEEREPKIQVSELCKKAILRVAELSSDDFHLDRHLYFACRDDRERFCENTQAGEGRVYKCLFNHKFEESMSEKCREALTTRQKLIAQDYKVSYSLAKSCKSDLKKYRCNVENLPRSREARLSYLLMCLESAVHRGRQVSSECQGEMLDYRRMLMEDFSLSPEIILSCRGEIEHHCSGLHRKGRTLHCLMKVVRGEKGNLGMNCQQALQTLIQETDPGADYRIDRALNEACESVIQTACKHIRSGDPMILSCLMEHLYTEKMVEDCEHRLLELQYFISRDWKLDPVLYRKCQGDASRLCHTHGWNETSEFMPQGAVFSCLYRHAYRTEEQGRRLSRECRAEVQRILHQRAMDVKLDPALQDKCLIDLGKWCSEKTETGQELECLQDHLDDLVVECRDIVGNLTELESEAEREYVFKNLPFKV

SEQ ID NO: 6004 - protein, 305 aa, Homo sapiens
MAACGRVRRMFRLSAALHLLLLFAAGAEKLPGQGVHSQGQGPGANFVSFVGQAGGGGPAGQQLPQLPQSSQLQQQQQQQQQQQQPQPPQPPFPAGGPPARRGGAGAGGGWKLAEEESCREDVTRVCPKHTWSNNLAVLECLQDVREPENEISSDCNHLLWNYKLNLTTDPKFESVAREVCKSTITEIKECADEPVGKGYMVSCLVDHRGNITEYQCHQYITKMTAIIFSDYRLICGFMDDCKNDINILKCGSIRLGEKDAHSQDTPTALRNREGGSHGSAELKSKGSYTSVPWMSSWILPSRISA

SEQ ID NO: 6005 - protein, 698 aa, Homo sapiens; identical to SEQ ID NO: 6003

SEQ ID NO: 6006 - protein, 152 aa, Homo sapiens
MAACGRVRRMFRLSAALHLLLLFAAGAEKLPGQGVHSQGQGPGANFVSFVGQPPFPAGGPPARRGGAGAGGGWKLAEEESCREDVTRVCPKHTWSNNLAVLECLQDVREPENEISSDCNHLLWNYKLNLTTDPKFESVAREVCKSTITEIKE

SEQ ID NO: 6007 - protein, 74 aa, Homo sapiens
MVSCLVDHRGNITEYQCHQYITKMTAIIFSDYRLICGFMDDCKNDINILKCGSIRLGEKDAHSQGEVVSCLEKG

SEQ ID NO: 6008 - protein, 148 aa, Homo sapiens
MRVTLATIAWMVSFVSNYSHTANILPDIENEDFIKDCVRIHNKFRSEVKPTASDMLYMTWDPALAQIAKAWASNCQFSHNTRLKPPHKLHPNFTSLGENIWTGSVPIFSVSSAITNWYDEIQDYDFKTRICKKVCGHYTQRELPNLAI

SEQ ID NO: 6009 - protein, 238 aa, Homo sapiens
MRVTLATIAWMVSFVSNYSHTANILPDIENEDFIKDCVRIHNKFRSEVKPTASDMLYMTWDPALAQIAKAWASNCQFSHNTRLKPPHKLHPNFTSLGENIWTGSVPIFSVSSAITNWYDEIQDYDFKTRICKKVCGHYTQVSQERGRDPNPKRGFLNLARENPGLFGQIVTKLAAQFNFALKFLALTLFPMEHILYATTDQEGITQLGHIREEPPAVPAPIMTSVWTISVLTDSETKS

SEQ ID NO: 6010 - protein, 266 aa, Homo sapiens
MRVTLATIAWMVSFVSNYSHTANILPDIENEDFIKDCVRIHNKFRSEVKPTASDMLYMTWDPALAQIAKAWASNCQFSHNTRLKPPHKLHPNFTSLGENIWTGSVPIFSVSSAITNWYDEIQDYDFKTRICKKVCGHYTQVVWADSYKVGCAVQFCPKVSGFDALSNGAHFICNYGPGGNYPTWPYKRGATCSACPNNDKCLDNLCVNRQRDQVKRYYSVVYPGWPIYPRNRYTSLFLIVNSVILILSVIITILVQHKYPNLVLLD

SEQ ID NO: 6011 - protein, 89 aa, Homo sapiens
MTKSRTMTSRLGYAKKSVATTLRLFGQIVTKLAAQFNFALKFLALTLFPMEHILYATTDQEGITQLGHIREEPPAVPAPIMTSVWTISV

SEQ ID NO: 6012 - protein, 233 aa, Homo sapiens
MALKNKFSCLWILGLCLVATTSSKIPSITDPHFIDNCIEAHNEWRGKVNPPAADMKYMIWDKGLAKMAKAWANQCKFEHNDCLDKSYKCYAAFEYVGENIWLGGIKSFTPRHAITAWYNETQFYDFDSLSCSRVCGHYTQLVWANSFYVGCAVAMCPNLGGASTAIFVCNYGPAGNFANMPPYVRGESCSLCSKEEKCVKNLCKNPFLKPTGRAPQQTAFNPFSLGFLLLRIF

SEQ ID NO: 6013 - protein, 242 aa, Homo sapiens
MALKNKFSCLWILGLCLVATTSSKIPSITDPHFIDNCIEAHNEWRGKVNPPAADMKYMIWDKGLAKMAKAWANQCKFEHNDCLDKSYKCYAAFEYVGENIWLGGIKSFTPRHAITAWYNETQFYDFDSLSCSRVCGHYTQLVWANSFYVGCAVAMCPNLGGASTAIFVCNYGPAGNFANMPPYVRGESCSLCSKEEKCVKNLCRTPQLIIPNQNPFLKPTGRAPQQTAFNPFSLGFLLLRIF

SEQ ID NO: 6014 - protein, 57 aa, Homo sapiens
MSLLKLILLRVPCRATACQKGLTTQTFPLSPQSPKGQLAACSNKMSFLFRAEEKIHF

SEQ ID NO: 6015 - protein, 39 aa, Homo sapiens
  VARIANT 1: note = misc_feature - Xaa can be any naturally occurring amino acid
XLSPQSPKGQLAACSNKMSFLFRAEEGLHNLLYLTKIHF

SEQ ID NO: 6016 - protein, 56 aa, Homo sapiens
MMVQRLGLISPPASQVSTACNQISPSLQRAMNAANLNIPPSDTRKCGKHGKVPSTK

SEQ ID NO: 6017 - protein, 89 aa, Homo sapiens
MMVQRLGLISPPASQVSTACNQISPSLQRAMNAANLNIPPSDTRSLISRESLASTTLSLTESQSASSMKQEWSQGYRALPSLSNHGSQN

SEQ ID NO: 6018 - protein, 89 aa, Homo sapiens; identical to SEQ ID NO: 6017

SEQ ID NO: 6019 - protein, 89 aa, Homo sapiens; identical to SEQ ID NO: 6017

SEQ ID NO: 6020 - protein, 775 aa, Homo sapiens
MMVQRLGLISPPASQVSTACNQISPSLQRAMNAANLNIPPSDTRSLISRESLASTTLSLTESQSASSMKQEWSQGYRALPSLSNHGSQNGLDLGDLLSLPPGTSMSSNSVSNSLPSYLFGTESSHSPYPSPRHSSTRSHSARSKKRALSLSPLSDGIGIDFNTIIRTSPTSLVAYINGSRASPANLSPQPEVYGHFLGVRGSCIPQPRPVPGSQKGVLVAPGGLALPAYGEDGALEHERMQQLEHGGLQPGLVNHMVVQHGLPGPDSQSAGLFKTERLEEFPGSTVDLPPAPPLPPLPPPPGPPPPYHAHAHLHHPELGPHAQQLALPQATLDDDGEMDGIGGKHCCRWIDCSALYDQQEELVRHIEKVHIDQRKGEDFTCFWAGCPRRYKPFNARYKLLIHMRVHSGEKPNKCTFEGCEKAFSRLENLKIHLRSHTGEKPYLCQHPGCQKAFSNSSDRAKHQRTHLDTKPYACQIPGCTKRYTDPSSLRKHVKAHSSKEQQARKKLRSSTELHPDLLTDCLTVQSLQPATSPRDAAAEGTVGRSPGPGPDLYSAPIFSSNYSSRSGTAAGAVPPPHPVSHPSPGHNVQGSPHNPSSQLPPLTAVDAGAERFAPSAPSPHHISPRRVPAPSSILQRTQPPYTQQPSGSHLKSYQPETNSSFQPNGIHVHGFYGQLQKFCPPHYPDSQRIVPPVSSCSVVPSFEDCLVPTSMGQASFDVFHRAFSTHSGITVYDLPSSSSSLFGESLRSGAEDATFLQISTVDRCPSQLSSVYTEG

SEQ ID NO: 6021 - protein, 244 aa, Homo sapiens
MNGRSCSMSLHRTSGTPQGPRMVSGHHIPAIRAHSGTPGPSPCGSTSSPTMASLANNLHLKMPSGGGMAPQNNVAESRIHLPALSPRRQMLTNGKPRFQVTQAGGMSGSHTLKPKQQEFGSPFPPNPGKGALGFGPQCKSIGKGSCNNLVVTSSPMMVQRLGLISPPASQVSTACNQISPSLQRAMNAANLNIPPSDTRSLISRESLASTTLSLTESQSASSMKQEWSQGYRALPSLSNHGSQN

SEQ ID NO: 6022 - protein, 244 aa, Homo sapiens; identical to SEQ ID NO: 6021

SEQ ID NO: 6023 - protein, 930 aa, Homo sapiens
MNGRSCSMSLHRTSGTPQGPRMVSGHHIPAIRAHSGTPGPSPCGSTSSPTMASLANNLHLKMPSGGGMAPQNNVAESRIHLPALSPRRQMLTNGKPRFQVTQAGGMSGSHTLKPKQQEFGSPFPPNPGKGALGFGPQCKSIGKGSCNNLVVTSSPMMVQRLGLISPPASQVSTACNQISPSLQRAMNAANLNIPPSDTRSLISRESLASTTLSLTESQSASSMKQEWSQGYRALPSLSNHGSQNGLDLGDLLSLPPGTSMSSNSVSNSLPSYLFGTESSHSPYPSPRHSSTRSHSARSKKRALSLSPLSDGIGIDFNTIIRTSPTSLVAYINGSRASPANLSPQPEVYGHFLGVRGSCIPQPRPVPGSQKGVLVAPGGLALPAYGEDGALEHERMQQLEHGGLQPGLVNHMVVQHGLPGPDSQSAGLFKTERLEEFPGSTVDLPPAPPLPPLPPPPGPPPPYHAHAHLHHPELGPHAQQLALPQATLDDDGEMDGIGGKHCCRWIDCSALYDQQEELVRHIEKVHIDQRKGEDFTCFWAGCPRRYKPFNARYKLLIHMRVHSGEKPNKCTFEGCEKAFSRLENLKIHLRSHTGEKPYLCQHPGCQKAFSNSSDRAKHQRTHLDTKPYACQIPGCTKRYTDPSSLRKHVKAHSSKEQQARKKLRSSTELHPDLLTDCLTVQSLQPATSPRDAAAEGTVGRSPGPGPDLYSAPIFSSNYSSRSGTAAGAVPPPHPVSHPSPGHNVQGSPHNPSSQLPPLTAVDAGAERFAPSAPSPHHISPRRVPAPSSILQRTQPPYTQQPSGSHLKSYQPETNSSFQPNGIHVHGFYGQLQKFCPPHYPDSQRIVPPVSSCSVVPSFEDCLVPTSMGQASFDVFHRAFSTHSGITVYDLPSSSSSLFGESLRSGAEDATFLQISTVDRCPSQLSSVYTEG

SEQ ID NO: 6024 - protein, 142 aa, Homo sapiens
MNGRSCSMSLHRTSGTPQGPRMVSGHHIPAIRAHSGTPGPSPCGSTSSPTMASLANNLHLKMPSGGGMAPQNNVAESRIHLPALSPRRQMLTNGKPRFQVTQAGGMSGSHTLKPKQQEFGSPFPPNPGKGPLFRVSLWRPRP

SEQ ID NO: 6025 - protein, 75 aa, Homo sapiens
FNLTFGASTGPGYWDQHYLSWSMLLGVGFPPVDGLSPLVLGIMAVALGAPGLMLLGGGLVLLLHHKKYSEYQSIN

SEQ ID NO: 6026 - protein, 320 aa, Homo sapiens
MRGSVECTWGWGHCAPSPLLLWTLLLFAAPFGLLGEKTRQLLEFDSTNVSDTAAKPLGRPYPPYSLADFSWNNITDSLDPATLSATFQGHPMNDPTRTFANGSLAFRVQAFSRSSRPAQPPRLLHTADTCQLEVALIGASPRGNRSLFGLEVATLGQGPDCPSMQEQHSIDDEYAPAVFQLDQLLWGSLPSGFAQWRPVAYSQKPGGRESALPCQASPLHPALAYSLPQSPIVRAFFGSQNNFCAFNLTFGASTGPGYWDQHYLSWSMLLGVGFPPVDGLSPLVLGIMAVALGAPGLMLLGGGLVLLLHHKKYSEYQSIN

SEQ ID NO: 6027 - protein, 183 aa, Homo sapiens [sequence omitted]

SEQ ID NO: 6028 - protein, 89 aa, Homo sapiens
MRGSVECTWGWGHCAPSPLLLWTLLLFAAPFGLLGEKTRQVRRLGENQGEECRGESSSQLEGGTKDWGKAFGKTISSILLGRFLLEQHH

SEQ ID NO: 6029 - protein, 130 aa, Homo sapiens
MRGSVECTWGWGHCAPSPLLLWTLLLFAAPFGLLGEKTRQVSLEVIPNWLGPLQNLLHIRAVGTNSTLHYVWSSLGPLAVVMVATNTPHSTLSVNWSLLLSPEPDGGLMVLPKDSIQFSSALVFTRGSCC

SEQ ID NO: 6030 - protein, 406 aa, Homo sapiens
MRGSVECTWGWGHCAPSPLLLWTLLLFAAPFGLLGEKTRQVSLEVIPNWLGPLQNLLHIRAVGTNSTLHYVWSSLGPLAVVMVATNTPHSTLSVNWSLLLSPEPDGGLMVLPKDSIQFSSALVFTRLLEFDSTNVSDTAAKPLGRPYPPYSLADFSWNNITDSLDPATLSATFQGHPMNDPTRTFANGSLAFRVQAFSRSSRPAQPPRLLHTADTCQLEVALIGASPRGNRSLFGLEVATLGQGPDCPSMQEQHSIDDEYAPAVFQLDQLLWGSLPSGFAQWRPVAYSQKPGGRESALPCQASPLHPALAYSLPQSPIVRAFFGSQNNFCAFNLTFGASTGPGYWDQHYLSWSMLLGVGFPPVDGLSPLVLGIMAVALGAPGLMLLGGGLVLLLHHKKYSEYQSIN

SEQ ID NO: 6031 - protein, 331 aa, Homo sapiens
MRGSVECTWGWGHCAPSPLLLWTLLLFAAPFGLLGEKTRQVSLEVIPNWLGPLQNLLHIRAVGTNSTLHYVWSSLGPLAVVMVATNTPHSTLSVNWSLLLSPEPDGGLMVLPKDSIQFSSALVFTRLLEFDSTNVSDTAAKPLGRPYPPYSLADFSWNNITDSLDPATLSATFQGHPMNDPTRTFANGSLAFRVQAFSRSSRPAQPPRLLHTADTCQLEVALIGASPRGNRSLFGLEVATLGQGPDCPSMQEQHSIDDEYAPAVFQVDAPGCGLPSSGRLVPTSPGHHGSGPGCPRAHAARGRLGSAAAPQEVLRVPVHKLRPALWREGHY

SEQ ID NO: 6032 - protein, 325 aa, Homo sapiens
MVATNTPHSTLSVNWSLLLSPEPDGGLMVLPKDSIQFSSALVFTRLLEFDSTNVSDTAAKPLGRPYPPYSLADFSWNNITDSLDPATLSATFQGHPMNDPTRTFANGSLAFRVQAFSRSSRPAQPPRLLHTADTCQLEVALIGASPRGNRSLFGLEVATLGQGPDCPSMQEQHSIDDEYAPAVFQLDQLLWGSLPSGFAQWRPVAYSQKPGGRESALPCQASPLHPALAYSLPQSPIVRAFFGSQNNFCAFNLTFGASTGPGYWDQHYLSWSMLLGVGFPPVDGLSPLVLGIMAVALGAPGLMLLGGGLVLLLHHKKYSEYQSIN

SEQ ID NO: 6033 - protein, 111 aa, Homo sapiens
  VARIANT 1: note = misc_feature - Xaa can be any naturally occurring amino acid
XPSMQEQHSIDDEYAPAVFQSPIVRAFFGSQNNFCAFNLTFGASTGPGYWDQHYLSWSMLLGVGFPPVDGLSPLVLGIMAVALGAPGLMLLGGGLVLLLHHKKYSEYQSIN

SEQ ID NO: 6034 - protein, 46 aa, Homo sapiens
MKFLLTTAFLILISLWVEEAYSKEKSSKKGKGKKKQYLCPSERLYH

SEQ ID NO: 6035 - protein, 46 aa, Homo sapiens; identical to SEQ ID NO: 6034

SEQ ID NO: 6036 - protein, 56 aa, Homo sapiens
MKFLLTTAFLILISLWVEEAYSKEKSSKKGKGKKKQYLCPSLVRPDAKKFVLLSLI

SEQ ID NO: 6037 - protein, 497 aa, Homo sapiens
MKFLLTTAFLILISLWVEEAYSKEKSSKKGKGKKKQYLCPSQQSAEDLARVPANSTSNILNRLLVSYDPRIRPNFKGIPVDVVVNIFINSFGSIQETTMDYRVNIFLRQKWNDPRLKLPSDFRGSDALTVDPTMYKCLWKPDLFFANEKSANFHDVTQENILLFIFRDGDVLVSMRLSITLSCPLDLTLFPMDTQRCKMQLESFGYTTDDLRFIWQSGDPVQLEKIALPQFDIKKEDIEYGNCTKYYKGTGYYTCVEVIFTLRRQVGFYMMGVYAPTLLIVVLSWLSFWINPDASAARVPLGIFSVLSLASECTTLAAELPKVSYVKALDVWLIACLLFGFASLVEYAVVQVMLNNPKRVEAEKARIAKAEQADGKGGNVAKKNTVNGTGTPVHISTLQVGETRCKKVCTSKSDLRSNDFSIVGSLPRDFELSNYDCYGKPIEVNNGLGKSQAKNNKKPPPAKPVIPTAAKRIDLYARALFPFCFLFFNVIYWSIYL

SEQ ID NO: 6038 - protein, 497 aa, Homo sapiens; identical to SEQ ID NO: 6037

SEQ ID NO: 6039 - protein, 303 aa, Homo sapiens
MKFLLTTAFLILISLWVEEAYSKEKSSKKGKGKKKQYLCPSQQSAEDLARVPANSTSNILNRLLVSYDPRIRPNFKGIPVDVVVNIFINSFGSIQETTMDYRVNIFLRQKWNDPRLKLPSDFRGSDALTVDPTMYKCLWKPDLFFANEKSANFHDVTQENILLFIFRDGDVLVSMRLSITLSCPLDLTLFPMDTQRCKMQLESFGYTTDDLRFIWQSGDPVQLEKIALPQFDIKKEDIEYGNCTKYYKGTGYYTCVEVIFTLRRQVGFYMMGVYAPTLLIVVLSWLSFWINPDASAARVPLGW

SEQ ID NO: 6040 - protein, 182 aa, Homo sapiens
AKSGVAGGILLVVPNVMGMMCWSPPLDKMGNSVKGIHFCHDLVSLCNFHNYDNLRHFAKKLDPRREGGDQRVKSVINLLFAAYTGDVSALRRFALSAMDMEQRDYDSRTALHVAAAEGGITLPWMKHCTLDTMMYLKFSKNTKSSTHLKEILTTGRKIKPSIRILMDCCNGLKSQDLNHLPI

SEQ ID NO: 6041 - protein, 114 aa, Homo sapiens
ESAKKQSGGKVADYIPQLAKFSPDLWGVSVCTVDGQRHSTGDTKVPFCLQSCVKPLKYAIAVNDLGTEYVHRYVGKEPSGLRFNKLFLNEDDKPHNPMVNAGAIVVTSLIKDWW

SEQ ID NO: 6042 - protein, 169 aa, Homo sapiens
MAATLANGGFCPITGERVLSPEAVRNTLSLMHSCGMYDFSGQFAFHVGLPAKSGVAGGILLVVPNVMGMMCWSPPLDKMGNSVKGIHFCHDLVSLCNFHNYDNLRHFAKKLDPRREGGDQRHSFGPLDYESLQQELALKETVWKKVSPESNEDISTTVVYRMESLGEKS

SEQ ID NO: 6043 - protein, 164 aa, Homo sapiens
MAATLANGGFCPITGERVLSPEAVRNTLSLMHSCGMYDFSGQFAFHVGLPAKSGVAGGILLVVPNVMGMMCWSPPLDKMGNSVKGIHFCHDLVSLCNFHNYDNLRHFAKKLDPRREGGDQRVKSVINLLFAAYTGDVSALRRFALSAMDMEQRDYDSRTALHVA

SEQ ID NO: 6044 - protein, 103 aa, Homo sapiens
MGMMCWSPPLDKMGNSVKGIHFCHDLVSLCNFHNYDNLRHFAKKLDPRREGGDQRHSFGPLDYESLQQELALKETVWKKVSPESNEDISTTVVYRMESLGEKS

SEQ ID NO: 6045 - protein, 174 aa, Homo sapiens
MGMMCWSPPLDKMGNSVKGIHFCHDLVSLCNFHNYDNLRHFAKKLDPRREGGDQRVKSVINLLFAAYTGDVSALRRFALSAMDMEQRDYDSRTALHVAAAEGHVEVVKFLLEACKVNPFPKDRWNNTPMDEALHFGHHDVFKILQEYQVQYTPQGDSDNGKENQTVHKNLDGLL

SEQ ID NO: 6046 - protein, 669 aa, Homo sapiens
MMRLRGSGMLRDLLLRSPAGVSATLRRAQPLVTLCRRPRGGGRPAAGPAAAARLHPWWGGGGWPAEPLARGLSSSPSEILQELGKGSTHPQPGVSPPAAPAAPGPKDGPGETDAFGNSEGKELVASGENKIKQGLLPSLEDLLFYTIAEGQEKIPVHKFITALKSTGLRTSDPRLKECMDMLRLTLQTTSDGVMLDKDLFKKCVQSNIVLLTQAFRRKFVIPDFMSFTSHIDELYESAKKQSGGKVADYIPQLAKFSPDLWGVSVCTVDGQRHSTGDTKVPFCLQSCVKPLKYAIAVNDLGTEYVHRYVGKEPSGLRFNKLFLNEDDKPHNPMVNAGAIVVTSLIKQGVNNAEKFDYVMQFLNKMAGNEYVGFSNATFQSERESGDRNFAIGYYLKEKKCFPEGTDMVGILDFYFQLCSIEVTCESASVMAATLANGGFCPITGERVLSPEAVRNTLSLMHSCGMYDFSGQFAFHVGLPAKSGVAGGILLVVPNVMGMMCWSPPLDKMGNSVKGIHFCHDLVSLCNFHNYDNLRHFAKKLDPRREGGDQRVKSVINLLFAAYTGDVSALRRFALSAMDMEQRDYDSRTALHVAAAEGHVEVVKFLLEACKVNPFPKDRWNNTPMDEALHFGHHDVFKILQEYQVQYTPQGDSDNGKENQTVHKNLDGLL

SEQ ID NO: 6047 - protein, 598 aa, Homo sapiens
MMRLRGSGMLRDLLLRSPAGVSATLRRAQPLVTLCRRPRGGGRPAAGPAAAARLHPWWGGGGWPAEPLARGLSSSPSEILQELGKGSTHPQPGVSPPAAPAAPGPKDGPGETDAFGNSEGKELVASGENKIKQGLLPSLEDLLFYTIAEGQEKIPVHKFITALKSTGLRTSDPRLKECMDMLRLTLQTTSDGVMLDKDLFKKCVQSNIVLLTQAFRRKFVIPDFMSFTSHIDELYESAKKQSGGKVADYIPQLAKFSPDLWGVSVCTVDGQRHSTGDTKVPFCLQSCVKPLKYAIAVNDLGTEYVHRYVGKEPSGLRFNKLFLNEDDKPHNPMVNAGAIVVTSLIKQGVNNAEKFDYVMQFLNKMAGNEYVGFSNATFQSERESGDRNFAIGYYLKEKKCFPEGTDMVGILDFYFQLCSIEVTCESASVMAATLANGGFCPITGERVLSPEAVRNTLSLMHSCGMYDFSGQFAFHVGLPAKSGVAGGILLVVPNVMGMMCWSPPLDKMGNSVKGIHFCHDLVSLCNFHNYDNLRHFAKKLDPRREGGDQRHSFGPLDYESLQQELALKETVWKKVSPESNEDISTTVVYRMESLGEKS

SEQ ID NO: 6048 - protein, 276 aa, Homo sapiens
MNSKRMLLLVLFAFSLMLVERYFRNHQVEELRLSDWFHPRKRPDVITKTDWLAPVLWEGTFDRRVLEKHYRRRNITVGLAVFATGRFAEEYLRPFLHSANKHFMTGYRVIFYIMVDAFFKLPDIEPSPLRTFKAFKVGTERWWLDGPLVHVKSLGEHIASHIQDEVDFLFSMAANQVFQNEFGVETLGPLVAQLHAWWYFRNTKNFPYERRPTSAACIPFGQGDFYYGNLMVGGTPHNILDFIKEYLNGVIHDIKNGLNSTYEKHLNKYFYLNKPT

SEQ ID NO: 6049 - protein, 307 aa, Homo sapiens
MNSKRMLLLVLFAFSLMLVERYFRNHQVEELRLSDWFHPRKRPDVITKTDWLAPVLWEGTFDRRVLEKHYRRRNITVGLAVFATGRFAEEYLRPFLHSANKHFMTGYRVIFYIMVDAFFKLPDIEPSPLRTFKAFKVGTERWWLDGPLVHVKSLGEHIASHIQDEVDFLFSMAANQVFQNEFGVETLGPLVAQLHAWWYFRNTKNFPYERRPTSAACIPFGQGDFYYGNLMVGGTPHNILDFIKEYLNGVIHDIKNGLNSTYEKHLNKYFYLNKPTLLSPAYSWDLAFSPPPQIQYVKVAHDSQRKL

SEQ ID NO: 6050 - protein, 291 aa, Homo sapiens
MGVAARPPALRHWFSHSIPLAIFALLLLYLSVRSLGARSGCGPRAQPCVPGETAPFQVRQESGTLEAPERKQPPCLGPRGMLGRMMRRFHASLKPEGDVGLSPYLAGWRALVEFLTPLGSVFAFATREAFTKVTDLEARVHGPDAEHYWSLVAMAAWERRAGLLEQPGAAPRDPTRSSGSRTLLLLHRALRWSQLCLHRVATGALGGPDAGVQCSDAYRAALGPHHPWLVRQTARLAFLAFPGRRRLLELACPGATEAEARAALVRAAGTLEDVYNRTQSLLAERGLLQLA

SEQ ID NO: 6051 - protein, 558 aa, Homo sapiens
MYRYLGEALLLSRAGPAALGSASADSAALLGWARGQPAAAPQPGLALAARRHYSEAVADREDDPNFFKMVEGFFDRGASIVEDKLVEDLRTRESEEQKRNRVRGILRIIKPCNHVLSLSFPIRRDDGSWEVIEGYRAQHSQHRTPCKGGIRYSTDVSVDEVKALASLMTYKCAVVDVPFGGAKAGVKINPKNYTDNELEKITRRFTMELAKKGFIGPGIDVPAPDMSTGEREMSWIADTYASTIGHYDINAHACVTGKPISQGGIHGRISATGRGVFHGIENFINEASYMSILGMTPGFGDKTFVVQGFGNVGLHSMRYLHRFGAKCIAVGESDGSIWNPDGIDPKELEDFKLQHGSILGFPKAKPYEGSILEADCDILIPAASEKQLTKSNAPRVKAKIIAEGANGPTTPEADKIFLERNIMVIPDLYLNAGGVTVSYFEWLKNLNHVSYGRLTFKYERDSNYHLLMSVQESLERKFGKHGGTIPIVPTAEFQDRISGASEKDIVHSGLAYTMERSARQIMRTAMKYNLGLDLRTAAYVNAIEKVFKVYNEAGVTFT

SEQ ID NO: 6052 - protein, 193 aa, Homo sapiens
MQSLMQAPLLIALGLLLAAPAQAHLKKPSQLSSFSWDNCDEGKDPAVIRSLTLEPDPIIVPGNVTLSVMGSTSVPLSSPLKVDLVLEKEVAGLWIKIPCTDYIGSCTFEHFCDVLDMLIPTGEPCPEPLRTYGLPCHCPFKEGTYSLPKSEFVVPDLELPSWLTTGNYRIESVLSSSGKRLGCIKIAASLKGI

SEQ ID NO: 6053 - protein, 146 aa, Homo sapiens
MSWVEAAGVSSTALEDRIVAKHEEVPEVSVQYEEKFQNHHKLPSQLSSFSWDNCDEGKDPAVIRSLTLEPDPIIVPGNVTLSVMGSTSVPLSSPLKVDLVLEKEVAGLWIKIPCTDYIGSCTFEHFCDVLDMLIPTGEPCPEPLRT

SEQ ID NO: 6054 - protein, 104 aa, Homo sapiens
  VARIANT 1: note = misc_feature - Xaa can be any naturally occurring amino acid
XKDPAVIRSLTLEPDPIIVPGNVTLSVMGSTSVPLSSPLKVDLVLEKEVAGLWIKIPCTDYIGSCTFEHFCDVLDMLIPTGEPCPEPLRTYGLPCHCPFKEVST

SEQ ID NO: 6055 - protein, 118 aa, Homo sapiens
MLLFALLLAMELPLVAASATMRAQWTYSLRCHDCAVINDFNCPNIRVCPYHIRRCMTISIQLSSGDRAAVCPGPHPTFFQPGAWIPTQVTDSKHQPLPAHLTRRHPLHGPGNILPSAI

SEQ ID NO: 6056 - protein, 158 aa, Homo sapiens
MLLFALLLAMELPLVAASATMRAQWTYSLRCHDCAVINDFNCPNIRVCPYHIRRCMTISIRINSRELLVYKNCTNNCTFVYAAEQPPEAPGKIFKTNSFYWVCCCNSMVCNAGGPTNLERDMLPDEVTEEELPEGTVRLGVSKLLLSFASIIVSNILP

SEQ ID NO: 6057 - protein, 625 aa, Homo sapiens
MARPVDPQRSPDPTFRSSTRHSGKLEPMEATAHLLRKQCPSRLNSPAWEASGLHWSSLDSPVGSMQALRPSAQHSWSPEPSVVPDQAWEDTALHQKKLCPLSLTSLPREAAVNFSYRSQTLLQEAQVLQGSPELLPRSPKPSGLQRLAPEEATALPLRRLCHLSLMEKDLGTTAHPRGFPELSHKSTAAASSRQSRPRVRSASLPPRTRLPSGSQAPSAAHPKRLSDLLLTSRAAAPGWRSPDPRSRLAAPPLGSTTLPSTWTAPQSRLTARPSRSPEPQIRESEQRDPQLRRKQQRWKEPLMPRREEKYPLRGTDPLPPGQPQRIPLPGQPLQPQPILTPGQPQKIPTPGQHQPILTPGHSQPIPTPGQPLPPQPIPTPGRPLTPQPIPTPGRPLTPQPIQMPGRPLRLPPPLRLLRPGQPMSPQLRQTQGLPLPQPLLPPGQPKSAGRPLQPLPPGPDARSISDPPAPRSRLPIRLLRGLLARLPGGASPRAAAAAACTTMKGWPAATMTPAETSPTMGPPDASAGFSIGEIAAAESPSATYSATFSCKPSGAASVDLRVPSPKPRALSRSRRYPWRRSADRCAKKPWRSGPRSAQRRNAVSSSTNNSRTKRWATCVRTACCF

SEQ ID NO: 6058 - protein, 245 aa, Homo sapiens
MDRRSRAQQWRRARHNYNDLCPPIGRRAATALLWLSCSIALLRALATSNARAQQRAAAQQRRSFLNAHHRSGAQVFPESPESESDHEHEEADLELSLPECLEYEEEFDYETESETESEIESETDFETEPETAPTTEPETEPEDDRGPVVPKHSTFGQSLTQRLHALKLRSPDASPSRAPPSTQEPQSPREGEELKPEDKDPRDPEESKEPKEEKQRRRCKPKKPTRRDASPESPSKKGPIPIRRH

SEQ ID NO: 6059 - protein, 245 aa, Homo sapiens; identical to SEQ ID NO: 6058

SEQ ID NO: 6060 - protein, 245 aa, Homo sapiens; identical to SEQ ID NO: 6058

SEQ ID NO: 6061 - protein, 158 aa, Homo sapiens
MGCLGNSKTEDQRNEEKAQREANKKIEKQLQEALNLFKSIWNNRWLRTISVILFLNKQDLLAEKVLAGKSKIEDYFPEFARYTTPEDATPEPGEDPRVTRAKYFIRDEFLRISTASGDGRHYCYPHFTCAVDTENIRRVFNDCRDIIQRMHLRQYELL

SEQ ID NO: 6062 - protein, 379 aa, Homo sapiens
MGCLGNSKTEDQRNEEKAQREANKKIEKQLQKDKQVYRATHRLLLLGAGESGKSTIVKQMRILHVNGFNGDEKATKVQDIKNNLKEAIETIVAAMSNLVPPVELANPENQFRVDYILSVMNVPDFDFPPEFYEHAKALWEDEGVRACYERSNEYQLIDCAQYFLDKIDVIKQADYVPSDQDLLRCRVLTSGIFETKFQVDKVNFHMFDVGGQRDERRKWIQCFNDVTAIIFVVASSSYNMVIREDNQTNRLQEALNLFKSIWNNRWLRTISVILFLNKQDLLAEKVLAGKSKIEDYFPEFARYTTPEDATPEPGEDPRVTRAKYFIRDEFLRISTASGDGRHYCYPHFTCAVDTENIRRVFNDCRDIIQRMHLRQYELL

SEQ ID NO: 6063 - protein, 380 aa, Homo sapiens
MGCLGNSKTEDQRNEEKAQREANKKIEKQLQKDKQVYRATHRLLLLGAGESGKSTIVKQMRILHVNGFNGDSEKATKVQDIKNNLKEAIETIVAAMSNLVPPVELANPENQFRVDYILSVMNVPDFDFPPEFYEHAKALWEDEGVRACYERSNEYQLIDCAQYFLDKIDVIKQADYVPSDQDLLRCRVLTSGIFETKFQVDKVNFHMFDVGGQRDERRKWIQCFNDVTAIIFVVASSSYNMVIREDNQTNRLQEALNLFKSIWNNRWLRTISVILFLNKQDLLAEKVLAGKSKIEDYFPEFARYTTPEDATPEPGEDPRVTRAKYFIRDEFLRISTASGDGRHYCYPHFTCAVDTENIRRVFNDCRDIIQRMHLRQYELL

SEQ ID NO: 6064 - protein, 394 aa, Homo sapiens
MGCLGNSKTEDQRNEEKAQREANKKIEKQLQKDKQVYRATHRLLLLGAGESGKSTIVKQMRILHVNGFNGEGGEEDPQAARSNSDGEKATKVQDIKNNLKEAIETIVAAMSNLVPPVELANPENQFRVDYILSVMNVPDFDFPPEFYEHAKALWEDEGVRACYERSNEYQLIDCAQYFLDKIDVIKQADYVPSDQDLLRCRVLTSGIFETKFQVDKVNFHMFDVGGQRDERRKWIQCFNDVTAIIFVVASSSYNMVIREDNQTNRLQEALNLFKSIWNNRWLRTISVILFLNKQDLLAEKVLAGKSKIEDYFPEFARYTTPEDATPEPGEDPRVTRAKYFIRDEFLRISTASGDGRHYCYPHFTCAVDTENIRRVFNDCRDIIQRMHLRQYELL

SEQ ID NO: 6065 - protein, 87 aa, Homo sapiens
MGCLGNSKTEDQRNEEKAQREANKKIEKQLQKDKQVYRATHRLLLLGAGESGKSTIVKQMRILHVNGFNGEGGEEDPQAARSNSDGI

SEQ ID NO: 6066 - protein, 395 aa, Homo sapiens
MGCLGNSKTEDQRNEEKAQREANKKIEKQLQKDKQVYRATHRLLLLGAGESGKSTIVKQMRILHVNGFNGEGGEEDPQAARSNSDGSEKATKVQDIKNNLKEAIETIVAAMSNLVPPVELANPENQFRVDYILSVMNVPDFDFPPEFYEHAKALWEDEGVRACYERSNEYQLIDCAQYFLDKIDVIKQADYVPSDQDLLRCRVLTSGIFETKFQVDKVNFHMFDVGGQRDERRKWIQCFNDVTAIIFVVASSSYNMVIREDNQTNRLQEALNLFKSIWNNRWLRTISVILFLNKQDLLAEKVLAGKSKIEDYFPEFARYTTPEDATPEPGEDPRVTRAKYFIRDEFLRISTASGDGRHYCYPHFTCAVDTENIRRVFNDCRDIIQRMHLRQYELL

SEQ ID NO: 6067 - protein, 1023 aa, Homo sapiens
MGVRNCLYGNNMSGQRDIPPEIGEQPEQPPLEAPGAAAPGAGPSPAEEMETEPPHNEPIPVENDGEACGPPEVSRPNFQVLNPAFREAGAHGSYSPPPEEAMPFEAEQPSLGGFWPTLEQPGFPSGVHAGLEAFGPALMEPGAFSGARPGLGGYSPPPEEAMPFEFDQPAQRGCSQLLLQVPDLAPGGPGAAGVPGAPPEEPQALRPAKAGSRGGYSPPPEETMPFELDGEGFGDDSPPPGLSRVIAQVDGSSQFAAVAASSAVRLTPAANAPPLWVPGAIGSPSQEAVRPPSNFTGSSPWMEISGPPFEIGSAPAGVDDTPVNMDSPPIALDGPPIKVSGAPDKRERAERPPVEEEAAEMEGAADAAEGGKVPSPGYGSPAAGAASADTAARAAPAAPADPDSGATPEDPDSGTAPADPDSGAFAADPDSGAAPAAPADPDSGAAPDAPADPDSGAAPDAPADPDAGAAPEAPAAPAAAETRAAHVAPAAPDAGAPTAPAASATRAAQVRRAASAAPASGARRKIHLRPPSPEIQAADPPTPRPTRASAWRGKSESSRGRRVYYDEGVASSDDDSSGDESDDGTSGCLRWFQHRRNRRRRKPQRNLLRNFLVQAFGGCFGRSESPQPKASRSLKVKKVPLAEKRRQMRKEALEKRAQKRAEKKRSKLIDKQLQDEKMGYMCTHRLLLLGAGESGKSTIVKQMRILHVNGFNGDSEKATKVQDIKNNLKEAIETIVAAMSNLVPPVELANPENQFRVDYILSVMNVPDFDFPPEFYEHAKALWEDEGVRACYERSNEYQLIDCAQYFLDKIDVIKQADYVPSDQDLLRCRVLTSGIFETKFQVDKVNFHMFDVGGQRDERRKWIQCFNDVTAIIFVVASSSYNMVIREDNQTNRLQEALNLFKSIWNNRWLRTISVILFLNKQDLLAEKVLAGKSKIEDYFPEFARYTTPEDATPEPGEDPRVTRAKYFIRDEFLRISTASGDGRHYCYPHFTCAVDTENIRRVFNDCRDIIQRMHLRQYELL

SEQ ID NO: 6068 - protein, 720 aa, Homo sapiens [sequence omitted]

SEQ ID NO: 6069 - protein, 1037 aa, Homo sapiens
MGVRNCLYGNNMSGQRDIPPEIGEQPEQPPLEAPGAAAPGAGPSPAEEMETEPPHNEPIPVENDGEACGPPEVSRPNFQVLNPAFREAGAHGSYSPPPEEAMPFEAEQPSLGGFWPTLEQPGFPSGVHAGLEAFGPALMEPGAFSGARPGLGGYSPPPEEAMPFEFDQPAQRGCSQLLLQVPDLAPGGPGAAGVPGAPPEEPQALRPAKAGSRGGYSPPPEETMPFELDGEGFGDDSPPPGLSRVIAQVDGSSQFAAVAASSAVRLTPAANAPPLWVPGAIGSPSQEAVRPPSNFTGSSPWMEISGPPFEIGSAPAGVDDTPVNMDSPPIALDGPPIKVSGAPDKRERAERPPVEEEAAEMEGAADAAEGGKVPSPGYGSPAAGAASADTAARAAPAAPADPDSGATPEDPDSGTAPADPDSGAFAADPDSGAAPAAPADPDSGAAPDAPADPDSGAAPDAPADPDAGAAPEAPAAPAAAETRAAHVAPAAPDAGAPTAPAASATRAAQVRRAASAAPASGARRKIHLRPPSPEIQAADPPTPRPTRASAWRGKSESSRGRRVYYDEGVASSDDDSSGDESDDGTSGCLRWFQHRRNRRRRKPQRNLLRNFLVQAFGGCFGRSESPQPKASRSLKVKKVPLAEKRRQMRKEALEKRAQKRAEKKRSKLIDKQLQDEKMGYMCTHRLLLLGAGESGKSTIVKQMRILHVNGFNGEGGEEDPQAARSNSDGEKATKVQDIKNNLKEAIETIVAAMSNLVPPVELANPENQFRVDYILSVMNVPDFDFPPEFYEHAKALWEDEGVRACYERSNEYQLIDCAQYFLDKIDVIKQADYVPSDQDLLRCRVLTSGIFETKFQVDKVNFHMFDVGGQRDERRKWIQCFNDVTAIIFVVASSSYNMVIREDNQTNRLQEALNLFKSIWNNRWLRTISVILFLNKQDLLAEKVLAGKSKIEDYFPEFARYTTPEDATPEPGEDPRVTRAKYFIRDEFLRISTASGDGRHYCYPHFTCAVDTENIRRVFNDCRDIIQRMHLRQYELL

SEQ ID NO: 6070 - protein, 120 aa, Homo sapiens
MRILHVNGFNGEGGEEDPQAARSNSDGEKATKVQDIKNNLKEAIETIVAAMSNLVPPVELANPENQFRVDYILSVMNVPDFDFPPEFYEHAKALWEDEGVRACYERSNEYQLIDCAQYFL

SEQ ID NO: 6071 - protein, 160 aa, Homo sapiens
MRILHVNGFNGEGGEEDPQAARSNSDGEKATKVQDIKNNLKEAIETIVAAMSNLVPPVELANPENQFRVDYILSVMNVPDFDFPPEFYEHAKALWEDEGVRACYERSNEYQLIDCAQYFLDKIDVIKQADYVPSDQDLLRCRVLTSGIFETKFQVDKVNF

SEQ ID NO: 6072 - protein, 166 aa, Homo sapiens
PESESDHEHEEADLELSLPECLEYEEEFDYETESETESEIESETDFETEPETAPTTEPETEPEDDRGPVVPKHSTFGQSLTQRLHALKLRSPDASPSRAPPSTQEPQSPREGEELKPEDKDPRDPEESKEPKEEKQRRRCKPKKPTRRDASPESPSKKGPIPIRRH

SEQ ID NO: 6073 - protein, 193 aa, Homo sapiens
PKASRSLKVKKVPLAEKRRQMRKEALEKRAQKRAEKKRSKLIDKQLQDEKMGYMCTHRLLLLGAGESGKSTIVKQMRILHVNGFNGEGGEEDPQAARSNSDGSEKATKVQDIKNNLKEAIETIVAAMSNLVPPVELANPENQFRVDYILSVMNVPDFDFPPEFYEHAKALWEDEGVRACYERSNEYQLIDCAQ

SEQ ID NO: 6074 - protein, 61 aa, Homo sapiens
QRNEEKAQREANKKIEKQLQKDKQVYRATHRLLLLGAGESGKSTIVKQMRILHVNGFNGEI

SEQ ID NO: 6075 - protein, 199 aa, Homo sapiens
  VARIANT 1: note = misc_feature - Xaa can be any naturally occurring amino acid
XAFGGCFGRSESPQPKASRSLKVKKVPLAEKRRQMRKEALEKRAQKRAEKKRSKLIDKQLQDEKMGYMCTHRLLLLGAGESGKSTIVKQMRILHVNGFNGDEKATKVQDIKNNLKEAIETIVAAMSNLVPPVELANPENQFRVDYILSVMNVPDFDFPPEFYEHAKALWEDEGVRACYERSNEYQLIDCAQYFLDKIDV

SEQ ID NO: 6076 - protein, 184 aa, Homo sapiens
  VARIANT 1: note = misc_feature - Xaa can be any naturally occurring amino acid
XGRRVYYDEGVASSDDDSSGDESDDGTSGCLRWFQHRRNRRRRKPQRNLLRNFLVQAFGGCFGRSESPQPKASRSLKVKKVPLAEKRRQMRKEALEKRAQKRAEKKRSKLIDKQLQDEKMGYMCTHRLLLLGRKVVPSDTEGRFRLDRPAPATVSWTGRGFSVSSLLIRSPNPPAFTVEKPDTQ

SEQ ID NO: 6077 - protein, 113 aa, Homo sapiens
  VARIANT 1: note = misc_feature - Xaa can be any naturally occurring amino acid
XTTEPETEPEDDRGPVVPKHSTFGQSLTQRLHALKLRSPDASPSRAPPSTQEPQSPREGEELKPEDKDPRDPEESKEPKEEKQRRRCKPKKPTRRDASPESPSKKGPIPIRRH

SEQ ID NO: 6078 - protein, 93 aa, Homo sapiens
  VARIANT 1: note = misc_feature - Xaa can be any naturally occurring amino acid
XVPLAEKRRQMRKEALEKRAQKRAEKKRSKLIDKQLQDEKMGYMCTHRLLLLGAGESGKSTIVKQMRILHVNGFNGEGGEEDPQAARSNSDGI

SEQ ID NO: 6079 - protein, 172 aa, Homo sapiens
MATWALLLLAAMLLGNPGLEVSVSPKGKNTSGRESGFGWAIWMEGLVFSRLSPEYYDLARAHLRDEEKSCPCLAQEGPQGDLLTKTQELGRDYRTCLTIVQKLKKMVDKPTQRSVSNAATRVCRTGRSRWRDVCRNFMRRYQSRVTQGLVAGETAQQICEDLRLCIPSTGPL

SEQ ID NO: 6080 - protein, 145 aa, Homo sapiens
MATWALLLLAAMLLGNPGLVFSRLSPEYYDLARAHLRDEEKSCPCLAQEGPQGDLLTKTQELGRDYRTCLTIVQKLKKMVDKPTQRSVSNAATRVCRTGRSRWRDVCRNFMRRYQSRVTQGLVAGETAQQICEDLRLCIPSTGPL

SEQ ID NO: 6081 - protein, 130 aa, Homo sapiens
MEGLVFSRLSPEYYDLARAHLRDEEKSCPCLAQEGPQGDLLTKTQELGRDYRTCLTIVQKLKKMVDKPTQRSVSNAATRVCRTGRSRWRDVCRNFMRRYQSRVTQGLVAGETAQQICEDLRLCIPSTGPL

SEQ ID NO: 6082 - protein, 187 aa, Homo sapiens
  VARIANT 1: note = misc_feature - Xaa can be any naturally occurring amino acid
XHLRDEEKSCPCLAQEGPQGDLLTKTQELGRDYRTCLTIVQKLKKMVDKPTQRSVSNAATRVCRTGRSRWRDVCRNFMRRYQSRVTQGLVAGETAQQICEDLRLCIPSTGPTTCSGCRLASRMCLWVPSEPSHLVLWKKHRLLSSDPGNLSNLCRLLASSIQNPLSSLPPLTPSAVLPSHENKVSSK

SEQ ID NO: 6083 - protein, 76 aa, Homo sapiens
MAAGLARLLLLLGLSAGGPAPAGAAKMKVVEEPNAFGVNNPFLPQASRLQAKRDPSPVSETGFHRVSQDGLDLLTS

SEQ ID NO: 6084 - protein, 76 aa, Homo sapiens; identical to SEQ ID NO: 6083

SEQ ID NO: 6085 - protein, 61 aa, Homo sapiens
MAAGLARLLLLLGLSAGGPAPAGAAKMKVVEEPNAFGVNNPFLPQASRLQAKRDPSPVSGE

SEQ ID NO: 6086 - protein, 305 aa, Homo sapiens
MAAGLARLLLLLGLSAGGPAPAGAAKMKVVEEPNAFGVNNPFLPQASRLQAKRDPSPVSGPVHLFRLSGKCFSLVESTYKYEFCPFHNVTQHEQTFRWNAYSGILGIWHEWEIANNTFTGMWMRDGDACRSRSRQSKVELACGKSNRLAHVSEPSTCVYALTFETPLVCHPHALLVYPTLPEALQRQWDQVEQDLADELITPQGHEKLLRTLFEDAGYLKTPEENEPTQLEGGPDSLGFETLENCRKAHKELSKEIKRLKGLLTQHGIPYTRPTETSNLEHLGHETPRAKSPEQLRGDPGLRGSL

SEQ ID NO: 6087 - protein, 185 aa, Homo sapiens
  VARIANT 1: note = misc_feature - Xaa can be any naturally occurring amino acid
XRLLLLLGLSAGGEWPGRPRPQAPRALCTPASPLTVSLPVGPAPAGAAKMKVVEEPNAFGVNNPFLPQASRLQAKRDPSPVSGPVHLFRLSGKCFSLVESTYKYEFCPFHNVTQHEQTFRWNAYSGILGIWHEWEIANNTFTGMWMRDGDACRSRSRQSKVELACGKSNRLAHVSEPSTCVYALT

SEQ ID NO: 6088 - protein, 92 aa, Homo sapiens
MKPIQKLLAGLILLTWCVEGCSSQHWSYGLRPGGKRDAENLIDSFQEIVKEVGQLAETQRFECTTHQPRSPLRDLKGALESLIEEETGQKKI

SEQ ID NO: 6089 - protein, 92 aa, Homo sapiens; identical to SEQ ID NO: 6088

SEQ ID NO: 6090 - protein, 113 aa, Homo sapiens
MASSRRGLLLLLLLTAHLGPSEAQHWSHGWYPGGKRALSSAQDPQNALRPPAGSPVQTAHGLPSDALAPLDDSMPWEGRTTAQWSLHRKRHLARTLLTAAREPRPAPPSSNKV

SEQ ID NO: 6091 - protein, 113 aa, Homo sapiens; identical to SEQ ID NO: 6090

SEQ ID NO: 6092 - protein, 120 aa, Homo sapiens
MASSRRGLLLLLLLTAHLGPSEAQHWSHGWYPGGKRALSSAQDPQNALRPPGRALDTAAGSPVQTAHGLPSDALAPLDDSMPWEGRTTAQWSLHRKRHLARTLLTAAREPRPAPPSSNKV

SEQ ID NO: 6093 - protein, 112 aa, Homo sapiens
MASSRRGLLLLLLLTAHLGPSEAQHWSHGWYPGGKRALSSAQDPQNALRPPGSPVQTAHGLPSDALAPLDDSMPWEGRTTAQWSLHRKRHLARTLLTAAREPRPAPPSSNKV

SEQ ID NO: 6094 - protein, 496 aa, Homo sapiens
MDNYLLLQTPLKKTKALIGEMGMTFSSAYVPSALCCPSRASILTGKYPHNHHVVNNTLEGNCSSKSWQKIQEPNTFPAILRSMCGYQTFFAGKYLNEYGAPDAGGLEHVPLGWSYWYALEKNSKYYNYTLSINGKARKHGENYSVDYLTDVLANVSLDFLDYKSNFEPFFMMIATPAPHSPWTAAPQYQKAFQNVFAPRNKNFNIHGTNKHWLIRQAKTPMTNSSIQFLDNAFRKRWQTLLSVDDLVEKLVKRLEFTGELNNTYIFYTSDNGYHTGQFSLPIDKRQLYEFDIKVPLLVRGPGIKPNQTSKMLVANIDLGPTILDIAGYDLNKTQMDGMSLLPILRGASNLTWRSDVLVEYQGEGRNVTDPTCPSLSPGVSQCFPDCVCEDAYNNTYACVRTMSALWNLQYCEFDDQEVFVEVYNLTADPDQITNIAKTIDPELLGKMNYRLMMLQSCSGPTCRTPGVFDPGYRFDPRLMFSNRGSVRTRRFSKHLL

SEQ ID NO: 6095 - protein, 248 aa, Homo sapiens
MGMTFSSAYVPSALCCPSRASILTGKYPHNHHVVNNTLEGNCSSKSWQKIQEPNTFPAILRSMCGYQTFFAGKYLNEYGAPDAGGLEHVPLGWSYWYALEKNSKYYNYTLSINGKARKHGENYSVDYLTDVLANVSLDFLDYKSNFEPFFMMIATPAPHSPWTAAPQYQKAFQNVFAPRNKNFNIHGTNKHWLIRQAKTPMTNSSIQFLDNAFRKRWQTLLSVDDLVEKLVKRLEFTGELNNTYIFYT

SEQ ID NO: 6096 - protein, 584 aa, Homo sapiens
MRLLPLAPGRLRRGSPRHLPSCSPALLLLVLGGCLGVFGVAAGTRRPNVVLLLTDDQDEVLGGMAFSEYSTTNCQTGLQGEELGQEHLRTYLEPSRTPLKKTKALIGEMGMTFSSAYVPSALCCPSRASILTGKYPHNHHVVNNTLEGNCSSKSWQKIQEPNTFPAILRSMCGYQTFFAGKYLNEYGAPDAGGLEHVPLGWSYWYALEKNSKYYNYTLSINGKARKHGENYSVDYLTDVLANVSLDFLDYKSNFEPFFMMIATPAPHSPWTAAPQYQKAFQNVFAPRNKNFNIHGTNKHWLIRQAKTPMTNSSIQFLDNAFRKRWQTLLSVDDLVEKLVKRLEFTGELNNTYIFYTSDNGYHTGQFSLPIDKRQLYEFDIKVPLLVRGPGIKPNQTSKMLVANIDLGPTILDIAGYDLNKTQMDGMSLLPILRGASNLTWRSDVLVEYQGEGRNVTDPTCPSLSPGVSQCFPDCVCEDAYNNTYACVRTMSALWNLQYCEFDDQEVFVEVYNLTADPDQITNIAKTIDPELLGKMNYRLMMLQSCSGPTCRTPGVFDPGYRFDPRLMFSNRGSVRTRRFSKHLL

SEQ ID NO: 6097 - protein, 552 aa, Homo sapiens
MRLLPLAPGRLRRGSPRHLPSCSPALLLLVLGGCLGVFGVAAGTRRPNVVLLLTDDQDEVLGGMTPLKKTKALIGEMGMTFSSAYVPSALCCPSRASILTGKYPHNHHVVNNTLEGNCSSKSWQKIQEPNTFPAILRSMCGYQTFFAGKYLNEYGAPDAGGLEHVPLGWSYWYALEKNSKYYNYTLSINGKARKHGENYSVDYLTDVLANVSLDFLDYKSNFEPFFMMIATPAPHSPWTAAPQYQKAFQNVFAPRNKNFNIHGTNKHWLIRQAKTPMTNSSIQFLDNAFRKRWQTLLSVDDLVEKLVKRLEFTGELNNTYIFYTSDNGYHTGQFSLPIDKRQLYEFDIKVPLLVRGPGIKPNQTSKMLVANIDLGPTILDIAGYDLNKTQMDGMSLLPILRGASNLTWRSDVLVEYQGEGRNVTDPTCPSLSPGVSQCFPDCVCEDAYNNTYACVRTMSALWNLQYCEFDDQEVFVEVYNLTADPDQITNIAKTIDPELLGKMNYRLMMLQSCSGPTCRTPGVFDPGYRFDPRLMFSNRGSVRTRRFSKHLL

SEQ ID NO: 6098 - protein, 532 aa, Homo sapiens
MRLLPLAPGRLRRGSPRHLPSCSPALLLLVLGGCLGVFGVAAGTRRPNVVLLLTDDQDEVLGGMYVPSALCCPSRASILTGKYPHNHHVVNNTLEGNCSSKSWQKIQEPNTFPAILRSMCGYQTFFAGKYLNEYGAPDAGGLEHVPLGWSYWYALEKNSKYYNYTLSINGKARKHGENYSVDYLTDVLANVSLDFLDYKSNFEPFFMMIATPAPHSPWTAAPQYQKAFQNVFAPRNKNFNIHGTNKHWLIRQAKTPMTNSSIQFLDNAFRKRWQTLLSVDDLVEKLVKRLEFTGELNNTYIFYTSDNGYHTGQFSLPIDKRQLYEFDIKVPLLVRGPGIKPNQTSKMLVANIDLGPTILDIAGYDLNKTQMDGMSLLPILRGASNLTWRSDVLVEYQGEGRNVTDPTCPSLSPGVSQCFPDCVCEDAYNNTYACVRTMSALWNLQYCEFDDQEVFVEVYNLTADPDQITNIAKTIDPELLGKMNYRLMMLQSCSGPTCRTPGVFDPGYRFDPRLMFSNRGSVRTRRFSKHLL

SEQ ID NO: 6099 - protein, 303 aa, Homo sapiens
  VARIANT 1: note = misc_feature - Xaa can be any naturally occurring amino acid
XYNYTLSINGKARKHGENYSVDYLTDVLANVSLDFLDYKSNFEPFFMMIATPAPHSPWTAAPQYQKAFQNVFAPRNKNFNIHGTNKHWLIRQAKTPMTNSSIQFLDNAFRKRWQTLLSVDDLVEKLVKRLEFTGELNNTYIFYTSDNGYHTGQFSLPIDKRQLYEFDIKVPLLVRGPGIKPNQTSKRGASNLTWRSDVLVEYQGEGRNVTDPTCPSLSPGVSQCFPDCVCEDAYNNTYACVRTMSALWNLQYCEFDDQEVFVEVYNLTADPDQITNIAKTIDPELLGKMNYRLMMLQSCSGPT

SEQ ID NO: 6100 - protein, 80 aa, Homo sapiens
MMGLGNGRRSMKSPPLVLAALVACIIVLGFNYWIASSRSVDLQTRIMELEGRVRRAAAERGAVELKKNEFQGELEKQREQ

SEQ ID NO: 6101 - protein, 121 aa, Homo sapiens
MMGLGNGRRSMKSPPLVLAALVACIIVLGFNYWIASSRSVDLQTRIMELEGRVRRAAAERGAVELKKNEFQGELEKQREQLDKIQSSHNFQLESVNKLYQDEKAVLVNNITTGERLIRVLQ

SEQ ID NO: 6102 - protein, 401 aa, Homo sapiens
MMGLGNGRRSMKSPPLVLAALVACIIVLGFNYWIASSRSVDLQTRIMELEGRVRRAAAERGAVELKKNEFQGELEKQREQLDKIQSSHNFQLESVNKLYQDEKAVLVNNITTGERLIRVLQDQLKTLQRNYGRLQQDVLQFQKNQTNLERKFSYDLSQCINQMKEVKEQCEERIEEVTKKGNEAVASRDLSENNDQRQQLQALSEPQPRLQAAGLPHTEVPQGKGNVLGNSKSQTPAPSSEVVLDSKRQVEKEETNEIQVVNEEPQRDRLPQEPGREQVVEDRPVGGRGFGGAGELGQTPQVQAALSVSQENPEMEGPERDQLVIPDGQEEEQEAAGEGRNQQKLRGEDDYNMDENEAESETDKQAALAGNDRNIDVFNVEDQKRDTINLLDQREKRNHTL

SEQ ID NO: 6103 - protein, 401 aa, Homo sapiens; identical to SEQ ID NO: 6102

SEQ ID NO: 6104 - protein, 105 aa, Homo sapiens
MMGLGNGRRSMKSPPLVLAALVACIIVLGFNYWIASSRSVDLQTRIMELEGRVRRAAAERGAVELKKNEFQGELEKQREQLDKIQSSHNFQLESVNKLYQDEKTS

SEQ ID NO: 6105 - protein, 246 aa, Homo sapiens
MSWAAVLAVAAARFGHFWGCRWPGPMAQGWAGFSEEELRRLKQTKDPFEPQRRLPAKKSRQQLQREKALVEQSQKLGLQDGSTSLLPEQLLSAPKQRVNVQKPPFSSPTLPSHFTLTSPVGDGQPQGIESQPKELGLENSHDGHNNVEILPPKPDCKLEKKKVELQEKSRWEVLQQEQRLMEEKNKRKKALLAKAIAERSKRTQAETMKLKRIQKELQALDDMVSADIGILRNRIDQASLDYSYAR

SEQ ID NO: 6106 - protein, 394 aa, Homo sapiens
MSWAAVLAVAAARFGHFWGCRWPGPMAQGWAGFSEEELRRLKQTKDPFEPQRRLPAKKSRQQLQREKALVEQSQKLGLQDGSTSLLPEQLLSAPKQRVNVQKPPFSSPTLPSHFTLTSPVGDGQPQGIESQPKELGLENSHDGHNNVEILPPKPDCKLEKKKVELQEKSRWEVLQQEQRLMEEKNKRKKALLAKAIAERSKRTQAETMKLKRIQKELQALDDMVSADIGILRNRIDQASLDYSYARKRFDRAEAEYIAAKLDIQRKTEIKEQLTEHLCTIIQQNELRKAKKLEELMQQLDVEADEETLELEVEVERLLHEQEVESRRPVVRLERPFQPAEESVTLEFAKENRKCQEQAVSPKVDDQCGNSSSIPFLSPNCPNQEGNDISAALAT

SEQ ID NO: 6107 - protein, 126 aa, Homo sapiens
  VARIANT 1: note = misc_feature - Xaa can be any naturally occurring amino acid
XSWAAVLAVAAARFGHFWGCRWPGPMAQGWAGFSEEELRRLKQTKGYKCPGLWSDSSRLMRRQTTKLCDSRYCKNLLQRQEEPHSAGDWMELGKISQSLCVSRGAFSRTKEKSTKDMNRYFLEKEI

SEQ ID NO: 6108 - protein, 59 aa, Homo sapiens
MALLHSGRVLPGIAAAFHPGLAAAASARARQRPRLPQKIWTRNTCPLGDWLNFARHLQN

SEQ ID NO: 6109 - protein, 430 aa, Homo sapiens
MALLHSGRVLPGIAAAFHPGLAAAASARASSWWTHVEMGPPDPILGVTEAFKRDTNSKKMNLGVGAYRDDNGKPYVLPSVRKAEAQIAAKNLDKEYLPIGGLAEFCKASAELALGENSEVLKSGRFVTVQTISGTGALRIGASFLQRFFKFSRDVFLPKPTWGNHTPIFRDAGMQLQGYRYYDPKTCGFDFTGAVEDISKIPEQSVLLLHACAHNPTGVDPRPEQWKEIATVVKKRNLFAFFDMAYQGFASGDGDKDAWAVRHFIEQGINVCLCQSYAKNMGLYGERVGAFTMVCKDADEAKRVESQLKILIRPMYSNPPLNGARIAAAILNTPDLRKQWLQEVKVMADRIIGMRTQLVSNLKKEGSTHNWQHITDQIGMFCFTGLKPEQVERLIKEFSIYMTKDGRISVAGVTSSNVGYLAHAIHQVTK

SEQ ID NO: 6110 - protein, 387 aa, Homo sapiens
MALLHSGRVLPGIAAAFHPGLAAAASARASSWWTHVEMGPPDPILGVTEAFKRDTNSKKMNLGVGAYRDDNGKPYVLPSVRKFVTVQTISGTGALRIGASFLQRFFKFSRDVFLPKPTWGNHTPIFRDAGMQLQGYRYYDPKTCGFDFTGAVEDISKIPEQSVLLLHACAHNPTGVDPRPEQWKEIATVVKKRNLFAFFDMAYQGFASGDGDKDAWAVRHFIEQGINVCLCQSYAKNMGLYGERVGAFTMVCKDADEAKRVESQLKILIRPMYSNPPLNGARIAAAILNTPDLRKQWLQEVKVMADRIIGMRTQLVSNLKKEGSTHNWQHITDQIGMFCFTGLKPEQVERLIKEFSIYMTKDGRISVAGVTSSNVGYLAHAIHQVTK

SEQ ID NO: 6111 - protein, 145 aa, Homo sapiens
MPHLMERMVGSGLLWLALVSCILTQASAVQRDPSTVEDKCEKACRPEEECLALNSTWGCFCRQDLNSSDVHSLQPQLDCGPREIKVKVDKCLLGGLGLGEEVIAYLRDPNCSSILQTEERNWVSVTSPVQASACRNILERNQTHA

SEQ ID NO: 6112 - protein, 387 aa, Homo sapiens
MPHLMERMVGSGLLWLALVSCILTQASAVQRDPSTVEDKCEKACRPEEECLALNSTWGCFCRQDLNSSDVHSLQPQLDCGPREIKVKVDKCLLGGLGLGEEVIAYLRDPNCSSILQTEERNWVSVTSPVQASACRNILERNQTHAIYKNTLSLVNDFIIRDTILNINFQCAYPLDMKVSLQAALQPIVSSLNVSVDGNGEFIVRMALFQDQNYTNPYEGDAVELSVESVLYVGAILEQGDTSRFNLVLRNCYATPTEDKADLVKYFIIRNSCSNQRDSTIHVEENGQSSESRFSVQMFMFAGHYDLVFLHCEIHLCDSLNEQCQPSCSRSQVRSEVPAIDLARVLDLGPITRRGAQSPGVMNGTPSTAGFLVAWPMVLLTVLLAWLF

SEQ ID NO: 6113 - protein, 163 aa, Homo sapiens
MPHLMERMVGSGLLWLALVSCILTQASAVQRGEGGVRMSETCVQVHRCQTDAPMWLNGTHPALGDGITNHTACAHWSGNCCFWKTEVLVKACPGGYHVYRLEGTPWCNLRYCTDPSTVEDKCEKACRPEEECLALNSTWGCFCRQDLNSSDVHSLQPQLDCGP

SEQ ID NO: 6114 - protein, 128 aa, Homo sapiens
MPHLMERMVGSGLLWLALVSCILTQASAVQRGYGNPIEASSYGLDLDCGAPGTPEAHVCFDPCQNYTLLDEPFRSTENSAGSQGCDKNMSGWYRFVGEGGVRMSETCVQVHRCQTDAPMWLNGTHPAL

SEQ ID NO: 6115 - protein, 534 aa, Homo sapiens
MPHLMERMVGSGLLWLALVSCILTQASAVQRGYGNPIEASSYGLDLDCGAPGTPEAHVCFDPCQNYTLLDEPFRSTENSAGSQGCDKNMSGWYRFVGEGGVRMSETCVQVHRCQTDAPMWLNGTHPALGDGITNHTACAHWSGNCCFWKTEVLVKACPGGYHVYRLEGTPWCNLRYCTDPSTVEDKCEKACRPEEECLALNSTWGCFCRQDLNSSDVHSLQPQLDCGPREIKVKVDKCLLGGLGLGEEVIAYLRDPNCSSILQTEERNWVSVTSPVQASACRNILERNQTHAIYKNTLSLVNDFIIRDTILNINFQCAYPLDMKVSLQAALQPIVSSLNVSVDGNGEFIVRMALFQDQNYTNPYEGDAVELSVESVLYVGAILEQGDTSRFNLVLRNCYATPTEDKADLVKYFIIRNSCSNQRDSTIHVEENGQSSESRFSVQMFMFAGHYDLVFLHCEIHLCDSLNEQCQPSCSRSQVRSEVPAIDLARVLDLGPITRRGAQSPGVMNGTPSTAGFLVAWPMVLLTVLLAWLF

SEQ ID NO: 6116 - protein, 537 aa, Homo sapiens
MPHLMERMVGSGLLWLALVSCILTQASAVQRGYGNPIEASSYGLDLDCGAPGTPEAHVCFDPCQNYTLLDEPFRSTENSAGSQGCDKNMSGWYRFVGEGGVRMSETCVQVHRCQTDAPMWLNGTHPALGDGITNHTACAHWSGNCCFWKTEVLVKACPGGYHVYRLEGTPWCNLRYCTVPRDPSTVEDKCEKACRPEEECLALNSTWGCFCRQDLNSSDVHSLQPQLDCGPREIKVKVDKCLLGGLGLGEEVIAYLRDPNCSSILQTEERNWVSVTSPVQASACRNILERNQTHAIYKNTLSLVNDFIIRDTILNINFQCAYPLDMKVSLQAALQPIVSSLNVSVDGNGEFIVRMALFQDQNYTNPYEGDAVELSVESVLYVGAILEQGDTSRFNLVLRNCYATPTEDKADLVKYFIIRNSCSNQRDSTIHVEENGQSSESRFSVQMFMFAGHYDLVFLHCEIHLCDSLNEQCQPSCSRSQVRSEVPAIDLARVLDLGPITRRGAQSPGVMNGTPSTAGFLVAWPMVLLTVLLAWLF

SEQ ID NO: 6117 - protein, 390 aa, Homo sapiens
MPHLMERMVGSGLLWLALVSCILTQASAVQRVPRDPSTVEDKCEKACRPEEECLALNSTWGCFCRQDLNSSDVHSLQPQLDCGPREIKVKVDKCLLGGLGLGEEVIAYLRDPNCSSILQTEERNWVSVTSPVQASACRNILERNQTHAIYKNTLSLVNDFIIRDTILNINFQCAYPLDMKVSLQAALQPIVSSLNVSVDGNGEFIVRMALFQDQNYTNPYEGDAVELSVESVLYVGAILEQGDTSRFNLVLRNCYATPTEDKADLVKYFIIRNSCSNQRDSTIHVEENGQSSESRFSVQMFMFAGHYDLVFLHCEIHLCDSLNEQCQPSCSRSQVRSEVPAIDLARVLDLGPITRRGAQSPGVMNGTPSTAGFLVAWPMVLLTVLLAWLF

SEQ ID NO: 6118 - protein, 141 aa, Homo sapiens
MSGWYRFVGEGGVRMSETCVQVHRCQTDAPMWLNGTHPALGDGITNHTACAHWSGNCCFWKTEVLVKACPGGYHVYRLEGTPWCNLRYCTDPSTVEDKCEKACRPEEECLALNSTWGCFCRQDLNSSDVHSLQPQLDCGPR

SEQ ID NO: 6119 - protein, 42 aa, Homo sapiens
  VARIANT 1: note = misc_feature - Xaa can be any naturally occurring amino acid
XERMVGSGLLWLALVSCILTQASAVQRGKYSAHLASQMSRKT

SEQ ID NO: 6120 - protein, 117 aa, Homo sapiens
MKRSLAGRYRCSYQNGSLWSLPSDQLELVATGVFAKPSLSAQPGPAVSSGGDVTLQCQTRYGFDQFALYKEGDPAPYKNPERWYRASFPIITVTAAHSGTYRCYSFSSRDPYLWSAP

SEQ ID NO: 6121 - protein, 321 aa, Homo sapiens
MSPSPTALFCLGLCLGRVPAQSGPLPKPSLQALPSSLVPLEKPVTLRCQGPPGVDLYRLEKLSSSRYQDQAVLFIPAMKRSLAGRYRCSYQNGSLWSLPSDQLELVATGVFAKPSLSAQPGPAVSSGGDVTLQCQTRYGFDQFALYKEGDPAPYKNPERWYRASFPIITVTAAHSGTYRCYSFSSRDPYLWSAPSDPLELVVTEFSEATAELTVSFTNEVFTTETSRSITASPKESDSPAGPARQYYTKGNLVRICLGAVILIILAGFLAEDWHSRRKRLRHRGRAVQRPLPPLPPLPLTRKSNGGQDGGRQDVHSRGLCS

SEQ ID NO: 6122 - protein, 620 aa, Homo sapiens
MSPSPTALFCLGLCLGRVPAQSGPLPKPSLQALPSSLVPLEKPVTLRCQGPPGVDLYRLEKLSSSRYQDQAVLFIPAMKRSLAGRYRCSYQNGSLWSLPSDQLELVATGVFAKPSLSAQPGPAVSSGGDVTLQCQTRYGFDQFALYKEGDPAPYKNPERWYRASFPIITVTAAHSGTYRCYSFSSRDPYLWSAPSDPLELVVTGTSVTPSRLPTEPPSPVAEFSEATAELTVSFTNEVFTTETSRSITASPKESDSPAGESCPPVLHQGQPGPDMPRGCDPNNPGGVSGRGLAQPEEAPAAQGQGCAEAASAPPAPPADPEIKRGSGWRPTGCSQPRVMFMTAEPQARSYPREGSWHGRRLKDWRVWSVEAGGQRLQLWKRGHAASSWCSIREPFGQCLSVCLPLCLRAPSIWDGRNLWRPHPPPCTLWMTWYPGWTTYWPLSSTSLIWAPDGSLRFPALRVDSVPSSVQNPPVLPFGPLCSCLVFPRNSHPHSISHCGLTNLLSSLRTGLAGSLGMSFIFLSVKLARCPLPFTLENKISLCNMVKPHLYQQNKKTQKLARCGGASLYSQQLRGLRWENGLSLGGRGCSELRSHHCTLARVTKPDFVSKNTGMNMSITLI

SEQ ID NO: 6123 - protein, 339 aa, Homo sapiens
MSPSPTALFCLGLCLGRVPAQSGPLPKPSLQALPSSLVPLEKPVTLRCQGPPGVDLYRLEKLSSSRYQDQAVLFIPAMKRSLAGRYRCSYQNGSLWSLPSDQLELVATGVFAKPSLSAQPGPAVSSGGDVTLQCQTRYGFDQFALYKEGDPAPYKNPERWYRASFPIITVTAAHSGTYRCYSFSSRDPYLWSAPSDPLELVVTGTSVTPSRLPTEPPSPVAEFSEATAELTVSFTNEVFTTETSRSITASPKESDSPAGPARQYYTKGNLVRICLGAVILIILAGFLAEDWHSRRKRLRHRGRAVQRPLPPLPPLPLTRKSNGGQDGGRQDVHSRGLCS

SEQ ID NO: 6124 - protein, 134 aa, Homo sapiens
MSALRPLLLLLLPLCPGPGPGPGSEAKVTRSCAETRQVLGARGYSLNLIPPALISGEHLRVCPQEYTCCSSETEQRLIRETEATFRGLVEDSGSFLVHTLAARHRKFDDNPDPGGCPSLCAGPGDWKKCGQRSA

SEQ ID NO: 6125 - protein, 579 aa, Homo sapiens
MSALRPLLLLLLPLCPGPGPGPGSEAKVTRSCAETRQVLGARGYSLNLIPPALISGEHLRVCPQEYTCCSSETEQRLIRETEATFRGLVEDSGSFLVHTLAARHRKFDEFFLEMLSVAQHSLTQLFSHSYGRLYAQHALIFNGLFSRLRDFYGESGEGLDDTLADFWAQLLERVFPLLHPQYSFPPDYLLCLSRLASSTDGSLQPFGDSPRRLRLQITRTLVAARAFVQGLETGRNVVSEALKVPVSEGCSQALMRLIGCPLCRGVPSLMPCQGFCLNVVRGCLSSRGLEPDWGNYLDGLLILADKLQGPFSFELTAESIGVKISEGLMYLQENSAKVSAQVFQECGPPDPVPARNRRAPPPREEAGRLWSMVTEEERPTTAAGTNLHRLVWELRERLARMRGFWARLSLTVCGDSRMAADASLEAAPCWTGAGRGRYLPPVVGGSPAEQVNNPELKVDASGPDVPTRRRRLQLRAATARMKTAALGHDLDGQDADEDASGSGGGQQYADDWMAGAVAPPARPPRPPYPPRRDGSGGKGGGGSARYNQGRSRSGGASIGFHTQTILILSLSALALLGPR

SEQ ID NO: 6126 - protein, 320 aa, Homo sapiens [sequence omitted]

SEQ ID NO: 6127 - protein, 572 aa, Homo sapiens
MDAQTWPVGFRCLLLLALVGSARSEGVQTCEEVRKLFQWRLLGAVRGLPDSPRAGPDLQVCISKKPTCCTRKMEERYQIAARQDMQQFLQTSSSTLKFLISRNAAAFQETLETLIKQAENYTSILFCSTYRNMALEAAASVQEFFTDVGLYLFGADVNPEEFVNRFFDSLFPLVYNHLINPGVTDSSLEYSECIRMARRDVSPFGNIPQRVMGQMGRSLLPSRTFLQALNLGIEVINTTDYLHFSKECSRALLKMQYCPHCQGLALTKPCMGYCLNVMRGCLAHMAELNPHWHAYIRSLEELSDAMHGTYDIGHVLLNFHLLVNDAVLQAHLNGQKLLEQVNRICGRPVRTPTQSPRCSFDQSKEKHGMKTTTRNSEETLANRRKEFINSLRLYRSFYGGLADQLCANELAAADGLPCWNGEDIVKSYTQRVVGNGIKAQSGNPEVKVKGIDPVINQIIDKLKHVVQLLQGRSPKPDKWELLQLGSGGGMVEQVSGDCDDEDGCGGSGSGEVKRTLKITDWMPDDMNFSDVKQIHQTDTGSTLDTTGAGCAVATESMTFTLISVVMLLPGIW

SEQ ID NO: 6128 - protein, 51 aa, Homo sapiens
  VARIANT 1: note = misc_feature - Xaa can be any naturally occurring amino acid
XMPDDMNFSDVKQIHQTDTGSTLDTTGAGCAVATESMTFTLISVVMLLPGI

SEQ ID NO: 6129 - protein, 263 aa, Homo sapiens
DAMLLVAERLEGPFNIESVMDPIDVKISEAIMNMQENSMQVSAKVFQGCGQPKPAPALRSARSAPENFNTRFRPYNPEERPTTAAGTSLDRLVTDIKEKLKLSKKVWSALPYTICKDESVTAGTSNEEECWNGHSKARYLPEIMNDGLTNQINNPEVDVDITRPDTFIRQQIMALRVMTNKLKNAYNGNDVNFQDTSDESSGSGSGSGCMDDVCPTEFEFVTTEAPAVDPDRREVDSSAAQRGHSLLSWSLTCIVLALQRLCR

SEQ ID NO: 6130 - protein, 555 aa, Homo sapiens
MPSWIGAVILPLLGLLLSLPAGADVKARSCGEVRQAYGAKGFSLADIPYQEIAGEHLRICPQEYTCCTTEMEDKLSQQSKLEFENLVEETSHFVRTTFVSRHKKFDEFFRELLENAEKSLNDMFVRTYGMLYMQNSEVFQDLFTELKRYYTGGNVNLEEMLNDFWARLLERMFQLINPQYHFSEDYLECVSKYTDQLKPFGDVPRKLKIQVTRAFIAARTFVQGLTVGREVANRVSKVSPTPGCIRALMKMLYCPYCRGLPTVRPCNNYCLNVMKGCLANQADLDTEWNLFIDAMLLVAERLEGPFNIESVMDPIDVKISEAIMNMQENSMQVSAKVFQGCGQPKPAPALRSARSAPENFNTRFRPYNPEERPTTAAGTSLDRLVTDIKEKLKLSKKVWSALPYTICKDESVTAGTSNEEECWNGHSKARYLPEIMNDGLTNQINNPEVDVDITRPDTFIRQQIMALRVMTNKLKNAYNGNDVNFQDTSDESSGSGSGSGCMDDVCPTEFEFVTTEAPAVDPDRREVDSSAAQRGHSLLSWSLTCIVLALQRLCR

SEQ ID NO: 6131 - protein, 109 aa, Homo sapiens
MAFQKAVKGTILVGGGALATVLGLSQFAHYRRKQMNLAYVKAADCISEPVNREPPSREAQLLTLQNTSEFDILVIGGGATGSGCALDAVTRGLKTALVERDDFSSGTSS

SEQ ID NO: 6132 - protein, 727 aa, Homo sapiens
MAFQKAVKGTILVGGGALATVLGLSQFAHYRRKQMNLAYVKAADCISEPVNREPPSREAQLLTLQNTSEFDILVIGGGATGSGCALDAVTRGLKTALVERDDFSSGTSSRSTKLIHGGVRYLQKAIMKLDIEQYRMVKEALHERANLLEIAPHLSAPLPIMLPVYKWWQLPYYWVGIKLYDLVAGSNCLKSSYVLSKSRALEHFPMLQKDKLVGAIVYYDGQHNDARMNLAIALTAARYGAATANYMEVVSLLKKTDPQTGKVRVSGARCKDVLTGQEFDVRAKCVINATGPFTDSVRKMDDKDAAAICQPSAGVHIVMPGYYSPESMGLLDPATSDGRVIFFLPWQKMTIAGTTDTPTDVTHHPIPSEEDINFILNEVRNYLSCDVEVRRGDVLAAWSGIRPLVTDPKSADTQSISRNHVVDISESGLITIAGGKWTTYRSMAEDTINAAVKTHNLKAGPSRTVGLFLQGGKDWSPTLYIRLVQDYGLESEVAQHLAATYGDKAFEVAKMASVTGKRWPIVGVRLVSEFPYIEAEVKYGIKEYACTAVDMISRRTRLAFLNVQAAEEALPRIVELMGRELNWDDYKKQEQLETARKFLYYEMGYKSRSEQLTDRSEISLLPSDIDRYKKRFHKFDADQKGFITIVDVQRVLESINVQMDENTLHEILNEVDLNKNGQVELNEFLQLMSAIQKGRVSGSRLAILMKTAEENLDRRVPIPVDRSCGGL

SEQ ID NO: 6133 - protein, 727 aa, Homo sapiens; identical to SEQ ID NO: 6132

SEQ ID NO: 6134 - protein, 727 aa, Homo sapiens; identical to SEQ ID NO: 6132

SEQ ID NO: 6135 - protein, 727 aa, Homo sapiens; identical to SEQ ID NO: 6132

SEQ ID NO: 6136 - protein, 379 aa, Homo sapiens
MAFQKAVKGTILVGGGALATVLGLSQFAHYRRKQMNLAYVKAADCISEPVNREPPSREAQLLTLQNTSEFDILVIGGGATGSGCALDAVTRGLKTALVERDDFSSGTSSRSTKLIHGGVRYLQKAIMKLDIEQYRMVKEALHERANLLEIAPHLSAPLPIMLPVYKWWQLPYYWVGIKLYDLVAGSNCLKSSYVLSKSRALEHFPMLQKDKLVGAIVYYDGQHNDARMNLAIALTAARYGAATANYMEVVSLLKKTDPQTGKVRVSGARCKDVLTGQEFDVRAKCVINATGPFTDSVRKMDDKDAAAICQPSAGVHIVMPGYYSPESMGLLDPATSDGRVIFFLPWQKMTIAGTTDTPTDVTHHPIPSEEDINFILNEV

SEQ ID NO: 6137 - protein, 56 aa, Homo sapiens
MAFQKAVKGTILVGGGALATVLGLSQFAHYRRKQNIVLSGELRNEECILLRKCGKT

SEQ ID NO: 6138 - protein, 56 aa, Homo sapiens; identical to SEQ ID NO: 6137

SEQ ID NO: 6139 - protein, 601 aa, Homo sapiens
MKLDIEQYRMVKEALHERANLLEIAPHLSAPLPIMLPVYKWWQLPYYWVGIKLYDLVAGSNCLKSSYVLSKSRALEHFPMLQKDKLVGAIVYYDGQHNDARMNLAIALTAARYGAATANYMEVVSLLKKTDPQTGKVRVSGARCKDVLTGQEFDVRAKCVINATGPFTDSVRKMDDKDAAAICQPSAGVHIVMPGYYSPESMGLLDPATSDGRVIFFLPWQKMTIAGTTDTPTDVTHHPIPSEEDINFILNEVRNYLSCDVEVRRGDVLAAWSGIRPLVTDPKSADTQSISRNHVVDISESGLITIAGGKWTTYRSMAEDTINAAVKTHNLKAGPSRTVGLFLQGGKDWSPTLYIRLVQDYGLESEVAQHLAATYGDKAFEVAKMASVTGKRWPIVGVRLVSEFPYIEAEVKYGIKEYACTAVDMISRRTRLAFLNVQAAEEALPRIVELMGRELNWDDYKKQEQLETARKFLYYEMGYKSRSEQLTDRSEISLLPSDIDRYKKRFHKFDADQKGFITIVDVQRVLESINVQMDENTLHEILNEVDLNKNGQVELNEFLQLMSAIQKGRVSGSRLAILMKTAEENLDRRVPIPVDRSCGGL

SEQ ID NO: 6140 - protein, 73 aa, Homo sapiens
MDVTSQARGVGLEMYPGTAQPAAPNTTSPELNLSHPLLGTALANGTGELSEHQQYVIGLFLSCLYTIFLFPIG

SEQ ID NO: 6141 - protein, 375 aa, Homo sapiens
MDVTSQARGVGLEMYPGTAQPAAPNTTSPELNLSHPLLGTALANGTGELSEHQQYVIGLFLSCLYTIFLFPIGFVGNILILVVNISFREKMTIPDLYFINLAVADLILVADSLIEVFNLHERYYDIAVLCTFMSLFLQVNMYSSVFFLTWMSFDRYIALARAMRCSLFRTKHHARLSCGLIWMASVSATLVPFTAVHLQHTDEACFCFADVREVQWLEVTLGFIVPFAIIGLCYSLIVRVLVRAHRHRGLRPRRQKALRMILAVVLVFFVCWLPENVFISVHLLQRTQPGAAPCKQSFRHAHPLTGHIVNLAAFSNSCLNPLIYSFLGETFRDKLRLYIEQKTNLPALNRFCHAALKAVIPDSTEQSDVRFSSAV

SEQ ID NO: 6142 - protein, 375 aa, Homo sapiens; identical to SEQ ID NO: 6141

SEQ ID NO: 6143 - protein, 375 aa, Homo sapiens; identical to SEQ ID NO: 6141

SEQ ID NO: 6144 - protein, 375 aa, Homo sapiens; identical to SEQ ID NO: 6141

SEQ ID NO: 6145 - protein, 408 aa, Homo sapiens
MDVTSQARGVGLEMYPGTAQPAAPNTTSPELNLSHPLLGTALANGTGELSEHQQYVIGLFLSCLYTIFLFPIGFVGNILILVVNISFREKMTIPDLYFINLAVADLILVADSLIEVFNLHERYYDIAVLCTFMSLFLQVNMYSSVFFLTWMSFDRYIALARAMRCSLFRTKHHARLSCGLIWMASVSATLVPFTAVHLQHTDEACFCFADVREVQWLEVTLGFIVPFAIIGLCYSLIVRVLVRAHRHRGLRPRRQKALRMILAVVLVFFVCWLPENVFISVHLLQRTQPGAAPCKQSFRHAHPLTHGHVMSLNCGQMWLLAPRGLARVTLAWSPWGCLGNLTTGHLALLTQNCYNPKALAPQGPKASGDQPVTQLLPANPACRCTCLPLQETFLTPSTRKATRRGHCG

SEQ ID NO: 6146 - protein, 176 aa, Homo sapiens
MSLNCGQMWLLAPRGLARVTLAWSPWGCLGNLTTGHLALLTQNCYNPKALAPQGPKASGDQPVTQLLPANPACRCTCLPLQETFLSVLHLPGWQQWRCAASPGPRGAAALGPEQQEGPSVERPPSAPGWFSHCLLTSTWQLHSCGLGPCELPCGLVGCQDNEILQHLWLTNLFLQK

SEQ ID NO: 6147 - protein, 129 aa, Homo sapiens
MPMASPQTLVLYLLVLAVTEAWGQEAVIPGCHLHPFNVTVRSDRQGTCQGSHVAQACVGHCESSAFPSRYSVLVASGYRHNITSVSQCCTISGLKKVKVQLQCVGSRREELEIFTARACQCDMCRLSRY

SEQ ID NO: 6148 - protein, 129 aa, Homo sapiens; identical to SEQ ID NO: 6147

SEQ ID NO: 6149 - protein, 118 aa, Homo sapiens
MPMASPQTLVLYLLVLAVTEAWGQEAVIPGCHLHPFNVTVRSDRQGTCQGSHVAQACVGHCESSAFPSRYSVLVASGYRHNITSVSQCCTISGLKKVRRARARWMDAGVAGRPERWRS

SEQ ID NO: 6150 - protein, 130 aa, Homo sapiens
MKLAFLFLGPMALLLLAGYGCVLGASSGNLRTFVGCAVREFTFLAKKPGCRGLRITTDACWGRCETWEKPILEPPYIEAHHRVCTYNETKQVTVKLPNCAPGVDPFYTYPVAIRCDCGACSTATTECETI

SEQ ID NO: 6151 - protein, 130 aa, Homo sapiens; identical to SEQ ID NO: 6150

SEQ ID NO: 6152 - protein, 184 aa, Homo sapiens
MKALGAVLLALLLFGRPGRGQTQQEEEEEDEDHGPDDYDEEDEDEVEEEETNRLPGGRSRVLLRCYTCKSLPRDERCNLTQNCSHGQTCTTLIAHGNTESGLLTTHSTWCTDSCQPITKTVEGTQVTMTCCQSSLCNVPPWQSSRVQDPTGKGAGGPRGSSETVGAALLLNLLAGLGAMGARRP

SEQ ID NO: 6153 - protein, 840 aa, Homo sapiens
MSAFRLWPGLLIMLGSLCHRGSPCGLSTHVEIGHRALEFLQLHNGRVNYRELLLEHQDAYQAGIVFPDCFYPSICKGGKFHDVSESTHWTPFLNASVHYIRENYPLPWEKDTEKLVAFLFGITSHMAADVSWHSLGLEQGFLRTMGAIDFHGSYSEAHSAGDFGGDVLSQFEFNFNYLARRWYVPVKDLLGIYEKLYGRKVITENVIVDCSHIQFLEMYGEMLAVSKLYPTYSTKSPFLVEQFQEYFLGGLDDMAFWSTNIYHLTSFMLENGTSDCNLPENPLFIACGGQQNHTQGSKMQKNDFHRNLTTSLTESVDRNINYTERGVFFSVNSWTPDSMSFIYKALERNIRTMFIGGSQLSQKHVSSPLASYFLSFPYARLGWAMTSADLNQDGHGDLVVGAPGYSRPGHIHIGRVYLIYGNDLGLPPVDLDLDKEAHRILEGFQPSGRFGSALAVLDFNVDGVPDLAVGAPSVGSEQLTYKGAVYVYFGSKQGGMSSSPNITISCQDIYCNLGWTLLAADVNGDSEPDLVIGSPFAPGGGKQKGIVAAFYSGPSLSDKEKLNVEAANWTVRGEEDFSWFGYSLHGVTVDNRTLLLVGSPTWKNASRLGHLLHIRDEKKSLGRVYGYFPPNGQSWFTISGDKAMGKLGTSLSSGHVLMNGTLKQVLLVGAPTYDDVSKVAFLTVTLHQGGATRMYALTSDAQPLLLSTFSGDRRFSRFGGVLHLSDLDDDGLDEIIMAAPLRIADVTSGLIGGEDGRVYVYNGKETTLGDMTGKCKSWITPCPEEKAQYVLISPEASSRFGSSLITVRSKAKNQVVIAAGRSSLGARLSGALHVYSLGSD

SEQ ID NO: 6154 - protein, 560 aa, Homo sapiens
MECLYYFLGFLLLAARLPLDAAKRFHDVLGNERPSAYMREHNQLNGWSSDENDWNEKLYPVWKRGDMRWKNSWKGGRVQAVLTSDSPALVGSNITFAVNLIFPRCQKEDANGNIVYEKNCRNEAGLSADPYVYNWTAWSEDSDGENGTGQSHHNVFPDGKPFPHHPGWRRWNFIYVFHTLGQYFQKLGRCSVRVSVNTANVTLGPQLMEVTVYRRHGRAYVPIAQVKDVYVVTDQIPVFVTMFQKNDRNSSDETFLKDLPIMFDVLIHDPSHFLNYSTINYKWSFGDNTGLFVSTNHTVNHTYVLNGTFSLNLTVKAAAPGPCPPPPPPPRPSKPTPSLGPAGDNPLELSRIPDENCQINRYGHFQATITIVEGILEVNIIQMTDVLMPVPWPESSLIDFVVTCQGSIPTEVCTIISDPTCEITQNTVCSPVDVDEMCLLTVRRTFNGSGTYCVNLTLGDDTSLALTSTLISVPDRDPASPLRMANSALISVGCLAIFVTVISLLVYKKHKEYNPIENSPGNVVRSKGLSVFLNRAKAVFFPGNQEKDPLLKNQEFKGVS

SEQ ID NO: 6155 - protein, 572 aa, Homo sapiens
MECLYYFLGFLLLAARLPLDAAKRFHDVLGNERPSAYMREHNQLNGWSSDENDWNEKLYPVWKRGDMRWKNSWKGGRVQAVLTSDSPALVGSNITFAVNLIFPRCQKEDANGNIVYEKNCRNEAGLSADPYVYNWTAWSEDSDGENGTGQSHHNVFPDGKPFPHHPGWRRWNFIYVFHTLGQYFQKLGRCSVRVSVNTANVTLGPQLMEVTVYRRHGRAYVPIAQVKDVYVVTDQIPVFVTMFQKNDRNSSDETFLKDLPIMFDVLIHDPSHFLNYSTINYKWSFGDNTGLFVSTNHTVNHTYVLNGTFSLNLTVKAAAPGPCPPPPPPPRPSKPTPSLATTLKSYDSNTPGPAGDNPLELSRIPDENCQINRYGHFQATITIVEGILEVNIIQMTDVLMPVPWPESSLIDFVVTCQGSIPTEVCTIISDPTCEITQNTVCSPVDVDEMCLLTVRRTFNGSGTYCVNLTLGDDTSLALTSTLISVPDRDPASPLRMANSALISVGCLAIFVTVISLLVYKKHKEYNPIENSPGNVVRSKGLSVFLNRAKAVFFPGNQEKDPLLKNQEFKGVS

SEQ ID NO: 6156 - protein, 206 aa, Homo sapiens
MECLYYFLGFLLLAARLPLDAAKRFHDVLGNERPSAYMREHNQLNGWSSDENDWNEKLYPVWKRGDMRWKNSWKGGRVQAVLTSDSPALVGSNITFAVNLIFPRCQKEDANGNIVYEKNCRNEAGLSADPYVYNWTAWSEDSDGENGTGQSHHNVFPDGKPFPHHPGWRRWNFIYVFHTLGWLLQTPKLLLYLSLKFQPSLFLLYN

SEQ ID NO: 6157 - protein, 588 aa, Homo sapiens
MARGGAGAEEASLRSNALSWLACGLLALLANAWIILSISAKQQKHKPLELLLCFLAGTHILMAAVPLTTFAVVQLRRQASSDYDWNESICKVFVSTYYTLALATCFTVASLSYHRMWMVRWPVNYRLSNAKKQALHAVMGIWMVSFILSTLPSIGWHNNGERYYARGCQFIVSKIGLGFGVCFSLLLLGGIVMGLVCVAITFYQTLWARPRRARQARRVGGGGGTKAGGPGALGTRPAFEVPAIVVEDARGKRRSSLDGSESAKTSLQVTNLVSAIVFLYDSLTGVPILVVSFFSLKSDSAPPWMVLAVLWCSMAQTLLLPSFIWSCERYRADVRTVWEQCVAIMSEEDGDDDGGCDDYAEGRVCKVRFDANGATGPGSRDPAQVKLLPGRHMLFPPLERVHYLQVPLSRRLSHDETNIFSTPREPGSFLHKWSSSDDIRVLPAQSRALGGPPEYLGQRHRLEDEEDEEEAEGGGLASLRQFLESGVLGSGGGPPRGPGFFREEITTFIDETPLPSPTASPGHSPRRPRPLGLSPRRLSLGSPESRAVGLPLGLSAGRRCSLTGGEESARAWGGSWGPGNPIFPQLTL

SEQ ID NO: 6158 - protein, 304 aa, Homo sapiens
MLSTGVVSFFSLKSDSAPPWMVLAVLWCSMAQTLLLPSFIWSCERYRADVRTVWEQCVAIMSEEDGDDDGGCDDYAEGRVCKVRFDANGATGPGSRDPAQVKLLPGRHMLFPPLERVHYLQVPLSRRLSHDETNIFSTPREPGSFLHKWSSSDDIRVLPAQSRALGGPPEYLGQRHRLEDEEDEEEAEGGGLASLRQFLESGVLGSGGGPPRGPGFFREEITTFIDETPLPSPTASPGHSPRRPRPLGLSPRRLSLGSPESRAVGLPLGLSAGRRCSLTGGEESARAWGGSWGPGNPIFPQLTL

SEQ ID NO: 6159 - protein, 284 aa, Homo sapiens
MVLAVLWCSMAQTLLLPSFIWSCERYRADVRTVWEQCVAIMSEEDGDDDGGCDDYAEGRVCKVRFDANGATGPGSRDPAQVKLLPGRHMLFPPLERVHYLQVPLSRRLSHDETNIFSTPREPGSFLHKWSSSDDIRVLPAQSRALGGPPEYLGQRHRLEDEEDEEEAEGGGLASLRQFLESGVLGSGGGPPRGPGFFREEITTFIDETPLPSPTASPGHSPRRPRPLGLSPRRLSLGSPESRAVGLPLGLSAGRRCSLTGGEESARAWGGSWGPGNPIFPQLTL

SEQ ID NO: 6160 - protein, 228 aa, Homo sapiens
  VARIANT 1: note = misc_feature - Xaa can be any naturally occurring amino acid
XITFYQTLWARPRRARQARRVGGGGGTKAGGPGALGTRPAFEVPAIVVEDARGKRRSSLDGSESAKTSLQVTNLVVSFFSLKSDSAPPWMVLAVLWCSMAQTLLLPSFIWSCERYRADVRTVWEQCVAIMSEEDGDDDGGCDDYAEGRVCKVRFDANGATGPGSRDPAQVKLLPGRHMLFPPLERVHYLQLKKLDLAAAAAHTFFVANPMHLQMREDMAKYRRMSGVR

SEQ ID NO: 6161 - protein, 138 aa, Homo sapiens
MARLLQASCLLSLLLAGFVSQSRGQEKSKAPRQMGNPQMDCHGGISGTIYEYGALTIDGEEYIPFKQYAGKYVLFVNVASYGLTGQYIELNALQEELAPFGLVILGFPCNQFGKQEPGENSEILPTLKYVRPGGGFVP

SEQ ID NO: 6162 - protein, 62 aa, Homo sapiens
MARLLQASCLLSLLLAGFVSQSRGQEKSKAPRQMGNPQVRETSTPFAAPSAAGTPPPTVVVS

SEQ ID NO: 6163 - protein, 72 aa, Homo sapiens
MARLLQASCLLSLLLAGFVSQSRGQEKSKMDCHGGISGTIYEYGALTIDGEEYIPFKQYAGKYVLFVNVASY

SEQ ID NO: 6164 - protein, 225 aa, Homo sapiens
MARLLQASCLLSLLLAGFVSQSRGQEKSKMDCHGGISGTIYEYGALTIDGEEYIPFKQYAGKYVLFVNVASYGLTGQYIELNALQEELAPFGLVILGFPCNQFGKQEPGENSEILPTLKYVRPGGGFVPNFQLFEKGDVNGEKEQKFYTFLKNSCPPTSELLGTSDRLFWEPMKVHDIRWNFEKFLVGPDGIPIMRWHHRTTVSNVKMDILSYMRRQAALGVKRK

SEQ ID NO: 6165 - protein, 225 aa, Homo sapiens; identical to SEQ ID NO: 6164

SEQ ID NO: 6166 - protein, 99 aa, Homo sapiens
MARLLQASCLLSLLLAGFVSQSRGQEKSKNMHYRKSLHHSVWSFWAFPATNLENRNQERTQRSFLPSSMSDQVEALSLISSSLRKGMSMERKSRNSTLS

SEQ ID NO: 6167 - protein, 170 aa, Homo sapiens
  VARIANT 1: note = misc_feature - Xaa can be any naturally occurring amino acid
XCHGGISGTIYEYGALTIDGEEYIPFKQYAGKYVLFVNVASYGLTGQYIELNALQEELAPFGLVILGFPCNQFGKQEPGENSEILPTLKTPVLPPRSSWVHLTASSGNPRFTTSAGTLRSSWWGQMVYPSCAGTTGPRSATSRWTSCPTGGRQPWGSRGSNRPSHPMSTM

SEQ ID NO: 6168 - protein, 79 aa, Homo sapiens
  VARIANT 1: note = misc_feature - Xaa can be any naturally occurring amino acid
XFGKQEPGENSEILPTLKYVRPGGGFVPNFQLFEKGDVNGEKEQKFYTFLKGQAIPQEGLGRKRVRGPQARLTLLLSLL

SEQ ID NO: 6169 - protein, 174 aa, Homo sapiens
MCASRDDWRCARSMHEFSAKDIDGHMVNLDKYRGFVCIVTNVASQGKTEVNYTQLVDLHARYAECGLRILAFPCNQFGKQEPGSNEEIKEFAAGYNVKFDMFSKICVNGDDAHPLWKWMKIQPKGKGILGKTAWGLWGAAGDAHVHVLLFQCHQVELHQVPHRQERLRGEALRT

SEQ ID NO: 6170 - protein, 240 aa, Homo sapiens
MCASRDDWRCARSMHEFSAKDIDGHMVNLDKYRGFVCIVTNVASQGKTEVNYTQLVDLHARYAECGLRILAFPCNQFGKQEPGSNEEIKEFAAGYNVKFDMFSKICVNGDDAHPLWKWMKIQPKGKGILGNAIKWNFTKFGHRLSTVPHRQERLRGEALRTHGGAPGDREGPAPLFLAPQVCGPARAPAHALGAFHRHSRPACKPAGGADPKIQRAPRRRKVPWPAGLGSAPPPLATLWE

SEQ ID NO: 6171 - protein, 169 aa, Homo sapiens
MCASRDDWRCARSMHEFSAKDIDGHMVNLDKYRGFVCIVTNVASQGKTEVNYTQLVDLHARYAECGLRILAFPCNQFGKQEPGSNEEIKEFAAGYNVKFDMFSKICVNGDDAHPLWKWMKIQPKGKGILGNAIKWNFTKFLIDKNGCVVKRYGPMEEPLVIEKDLPHYF

SEQ ID NO: 6172 - protein, 133 aa, Homo sapiens
MGRAGAGSPGRRRQRCQSRGRRRPRAPRRRKAPACRRRRARRRRKKPCPRSLRPEIHECPKSQDPCASRDDWRCARSMHEFSAKDIDGHMVNLDKGFVCIVTNVASQGKTEVNYTQLVDLHARYAECGLRILA

SEQ ID NO: 6173 - protein, 233 aa, Homo sapiens
MGRAGAGSPGRRRQRCQSRGRRRPRAPRRRKAPACRRRRARRRRKKPCPRSLRPEIHECPKSQDPCASRDDWRCARSMHEFSAKDIDGHMVNLDKYRGFVCIVTNVASQGKTEVNYTQLVDLHARYAECGLRILAFPCNQFGKQEPGSNEEIKEFAAGYNVKFDMFSKICVNGDDAHPLWKWMKIQPKGKGILGNAIKWNFTKFLIDKNGCVVKRYGPMEEPLVIEKDLPHYF

SEQ ID NO: 6174 - protein, 179 aa, Homo sapiens
MGRAGAGSPGRRRQRCQSRGRRRPRAPRRRKAPACRRRRARRRRKKPCPRSLRPEIHECPKSQDPCASRDDWRCARSMHEFSAKDIDGHMVNLDKYRGFVCIVTNVASQGKTEVNYTQLVDLHARYAECGLRILAFPCNQFGKQEPGSNEEIKEFAAGYNVKFDMFSKICVNGDDAHPL

SEQ ID NO: 6175 - protein, 154 aa, Homo sapiens
MHEFSAKDIDGHMVNLDKYRGFVCIVTNVASQGKTEVNYTQLVDLHARYAECGLRILAFPCNQFGKQEPGSNEEIKEFAAGYNVKFDMFSKICVNGDDAHPLWKWMKIQPKGKGILGNAIKWNFTKFLIDKNGCVVKRYGPMEEPLVIEKDLPH

SEQ ID NO: 6176 - protein, 196 aa, Homo sapiens
MSLGRLCRLLKPALLCGALAAPGLAGTMCASRDDWRCARSMHEFSAKDIDGHMVNLDKYRGFVCIVTNVASQGKTEVNYTQLVDLHARYAECGLRILAFPCNQFGKQEPGSNEEIKEFAAGYNVKFDMFSKICVNGDDAHPLWKWMKIQPKGKGILGNAIKWNFTKFLIDKNGCVVKRYGPMEEPLVIEKDLPHYF

SEQ ID NO: 6177 - protein, 196 aa, Homo sapiens; identical to SEQ ID NO: 6176

SEQ ID NO: 6178 - protein, 177 aa, Homo sapiens
MSLGRLCRLLKPALLCGALAAPGLAGTMCASRDDWRCARSMHEFSAKDIDGHMVNLDKYRGFVCIVTNVASQGKTEVNYTQLVDLHARYAECGLRILAFPCNQFGKQEPGSNEEIKEFAAGYNVKFDMFSKICVNGDDAHPLWKWMKIQPKGKGILGNSSSTRTAAWSATDPWRSPW

SEQ ID NO: 6179 - protein, 166 aa, Homo sapiens
YAECGLRILAFPCNQFGKQEPGSNEEIKEFAAGYNVKFDMFSKICVNGDDAHPLWKWMKIQPKGKGILGNAIKWNFTKFLIDKNGCVVKRYGPMEEPLLHKCVAPPEPLPTPLEPSTGTHDGLPANLLVGQTRKSSVHPAGGRSHGLLGLARRPHPWLPCGNKQTN

SEQ ID NO: 6180 - protein, 221 aa, Homo sapiens
MTTQLRVVHLLPLLLACFVQTSPKQEKMKMDCHKDEKGTIYDYEAIALNKNEYVSFKQYVGKHILFVNVATYCGLTAQYPELNALQEELKPYGLVVLGFPCNQFGKQEPGDNKEILPGLKYVRPGGGFVPSFQLFEKGDVNGEKEQKVFSFLKHSCPHPSEILGTFKSISWDPVKVHDIRWNFEKFLVGPDGIPVMRWSHRATVSSVKTDILAYLKQFKTK

SEQ ID NO: 6181 - protein, 100 aa, Homo sapiens
MTTQLRVVHLLPLLLACFVQTSPKQEKMKMDCHKDEKGTIYDYEAIALNKNEYVSFKQYVGKHILFVNVATYCGLTAQYPGMSVQGEDLYLVSSFLRKGM

SEQ ID NO: 6182 - protein, 220 aa, Homo sapiens
MFQQFQASCLVLFFLVGFAQQTLKPQNRKVDCNKGVTGTIYEYGALTLNGEEYIQFKQFAGKHVLFVNVAAYGLAAQYPELNALQEELKNFGVIVLAFPCNQFGKQEPGTNSEILLGLKYVCPGSGFVPSFQLFEKGDVNGEKEQKVFTFLKNSCPPTSDLLGSSSQLFWEPMKVHDIRWNFEKFLVGPDGVPVMHWFHQAPVSTVKSDILEYLKQFNTH

SEQ ID NO: 6183 - protein, 179 aa, Homo sapiens
MFQQFQASCLVLFFLVGFAQQTLKPQNRKVDCNKGVTGTIYEYGALTLNGEEYIQFKQFAGKHVLFVNVAAYGLAAQYPELNALQEELKNFGVIVLAFPCNQFGKQEPGTNSEILLGLKTPALRPLIFWAHQANSSGSPRSMISAGTLRNFWWGPMESLSCIGSTRLQSAQSSQTSWST

SEQ ID NO: 6184 - protein, 220 aa, Homo sapiens; identical to SEQ ID NO: 6182

SEQ ID NO: 6185 - protein, 187 aa, Homo sapiens
MVAATVAAAWLLLWAAACAQQEQDFYDFKAVNIRGKLVSLEKYRGSVSLVVNVASECGFTDQHYRALQQLQRDLGPHHFNVLAFPCNQFGQQEPDSNKEIESFARRTYSVSFPMFSKIAVTGTGAHPAFKYLAQTSGKEPTWNFWKYLVAPDGKVVGAWDPTVSVEEVRPQITALVRKLILLKREDL

SEQ ID NO: 6186 - protein, 42 aa, Homo sapiens
MSRTAYTVGALLLLLGTLLPAAEGKKKGSQGAIPPPAKRPCM

SEQ ID NO: 6187 - protein, 143 aa, Homo sapiens
MSRTAYTVGALLLLLGTLLPAAEGKKKGSQGAIPPPDKALHVTERKYLKRDWCKTQPLKQTIHEEGCNSRTIINRFCYGQCNSFYIPRHIRKEEGSFQSCSFCKPKKFTTMMVTLNCPELQPPTKKKRVTRVKQCRCISIDLD

SEQ ID NO: 6188 - protein, 184 aa, Homo sapiens
MSRTAYTVGALLLLLGTLLPAAEGKKKGSQGAIPPPDKAQHNDSEQTQSPQQPGSRNRGRGQGRGTAMPGEEVLESSQEALHVTERKYLKRDWCKTQPLKQTIHEEGCNSRTIINRFCYGQCNSFYIPRHIRKEEGSFQSCSFCKPKKFTTMMVTLNCPELQPPTKKKRVTRVKQCRCISIDLD

SEQ ID NO: 6189 - protein, 168 aa, Homo sapiens
MFWKLSLSLFLVAVLVKVAEARKNRPAGAIPSPYKDGSSNNSERWQHQIKEVLASSQEALVVTERKYLKSDWCKTQPLRQTVSEEGCRSRTILNRFCYGQCNSFYIPRHVKKEEESFQSCAFCKPQRVTSVLVELECPGLDPPFRLKKIQKVKQCRCMSVNLSDSDKQ

SEQ ID NO: 6190 - protein, 81 aa, Homo sapiens
MMRVNGDDDSVAALSFLYDYYMGPKEKRILSSSTGGRNDQGKRYYHGMEYETDLTPLESPTHLMKFLTENVSGTPEYPDLL

SEQ ID NO: 6191 - protein, 556 aa, Homo sapiens
MMRVNGDDDSVAALSFLYDYYMGPKEKRILSSSTGGRNDQGKRYYHGMEYETDLTPLESPTHLMKFLTENVSGTPEYPDLLKKNNLMSLEGALPTPGKAAPLPAGPSKLEAGSVDSYLLPTTDMYDNGSLNSLFESIHGVPPTQRWQPDSTFKDDPQESMLFPDILKTSPEPPCPEDYPSLKSDFEYTLGSPKAIHIKSGESPMAYLNKGQFYPVTLRTPAGGKGLALSSNKVKSVVMVVFDNEKVPVEQLRFWKHWHSRQPTAKQRVIDVADCKENFNTVEHIEEVAYNALSFVWNVNEEAKVFIGVNCLSTDFSSQKGVKGVPLNLQIDTYDCGLGTERLVHRAVCQIKIFCDKGAERKMRDDERKQFRRKVKCPDSSNSGVKGCLLSGFRGNETTYLRPETDLETPPVLFIPNVHFSSLQRSGGAAPSAGPSSSNRLPLKRTCSPFTEEFEPLPSKQAKEGDLQRVLLYVRRETEEVFDALMLKTPDLKGLRNAISEKYGFPEENIYKVYKKCKRGILVNMDNNIIQHYSNHVAFLLDMGELDGKIQIILKEL

SEQ ID NO: 6192 - protein, 626 aa, Homo sapiens
MSNELDFRSVRLLKNDPVNLQKFSYTSEDEAWKTYLENPLTAATKAMMRVNGDDDSVAALSFLYDYYMGPKEKRILSSSTGGRNDQGKRYYHGMEYETDLTPLESPTHLMKFLTENVSGTPEYPDLLKKNNLMSLEGALPTPGKAAPLPAGPSKLEAGSVDSYLLPTTDMYDNGSLNSLFESIHGVPPTQRWQPDSTFKDDPQESMLFPDILKTSPEPPCPEDYPSLKSDFEYTLGSPKAIHIKSGESPMAYLNKGQFYPVTLRTPAGGKGLALSSNKVKSVVMVVFDNEKVPVEQLRFWKHWHSRQPTAKQRVIDVADCKENFNTVEHIEEVAYNALSFVWNVNEEAKVFIGVNCLSTDFSSQKGVKGVPLNLQIDTYDCGLGTERLVHRAVCQIKIFCDKGAERKMRDDERKQFRRKVKCPDSSNSGVKGCLLSGFRGNETTYLRPETDLETPPVLFIPNVHFSSLQRSGGAAPSAGPSSSNRLPLKRTCSPFTEEFEPLPSKQAKEGDLQRVLLYVRRETEEVFDALMLKTPDLKGLRNAISEKYGFPEENIYKVYKKCKRGETSLLHPRLSRHPPPDCLECSHPVTQVRNMGFGDGFWRQRDLDSNPSPTTVNSLHFTVNSE

SEQ ID NO: 6193 - protein, 602 aa, Homo sapiens
MSNELDFRSVRLLKNDPVNLQKFSYTSEDEAWKTYLENPLTAATKAMMRVNGDDDSVAALSFLYDYYMGPKEKRILSSSTGGRNDQGKRYYHGMEYETDLTPLESPTHLMKFLTENVSGTPEYPDLLKKNNLMSLEGALPTPGKAAPLPAGPSKLEAGSVDSYLLPTTDMYDNGSLNSLFESIHGVPPTQRWQPDSTFKDDPQESMLFPDILKTSPEPPCPEDYPSLKSDFEYTLGSPKAIHIKSGESPMAYLNKGQFYPVTLRTPAGGKGLALSSNKVKSVVMVVFDNEKVPVEQLRFWKHWHSRQPTAKQRVIDVADCKENFNTVEHIEEVAYNALSFVWNVNEEAKVFIGVNCLSTDFSSQKGVKGVPLNLQIDTYDCGLGTERLVHRAVCQIKIFCDKGAERKMRDDERKQFRRKVKCPDSSNSGVKGCLLSGFRGNETTYLRPETDLETPPVLFIPNVHFSSLQRSGGAAPSAGPSSSNRLPLKRTCSPFTEEFEPLPSKQAKEGDLQRVLLYVRRETEEVFDALMLKTPDLKGLRNAISEKYGFPEENIYKVYKKCKRGILVNMDNNIIQHYSNHVAFLLDMGELDGKIQIILKEL

SEQ ID NO: 6194 - protein, 607 aa, Homo sapiens
MWMNSILPIFLFRSVRLLKNDPVNLQKFSYTSEDEAWKTYLENPLTAATKAMMRVNGDDDSVAALSFLYDYYMGPKEKRILSSSTGGRNDQGKRYYHGMEYETDLTPLESPTHLMKFLTENVSGTPEYPDLLKKNNLMSLEGALPTPGKAAPLPAGPSKLEAGSVDSYLLPTTDMYDNGSLNSLFESIHGVPPTQRWQPDSTFKDDPQESMLFPDILKTSPEPPCPEDYPSLKSDFEYTLGSPKAIHIKSGESPMAYLNKGQFYPVTLRTPAGGKGLALSSNKVKSVVMVVFDNEKVPVEQLRFWKHWHSRQPTAKQRVIDVADCKENFNTVEHIEEVAYNALSFVWNVNEEAKVFIGVNCLSTDFSSQKGVKGVPLNLQIDTYDCGLGTERLVHRAVCQIKIFCDKGAERKMRDDERKQFRRKVKCPDSSNSGVKGCLLSGFRGNETTYLRPETDLETPPVLFIPNVHFSSLQRSGGAAPSAGPSSSNRLPLKRTCSPFTEEFEPLPSKQAKEGDLQRVLLYVRRETEEVFDALMLKTPDLKGLRNAISEKYGFPEENIYKVYKKCKRGILVNMDNNIIQHYSNHVAFLLDMGELDGKIQIILKEL

SEQ ID NO: 6195 - protein, 52 aa, Homo sapiens
MWMNSILPIFLVPRRSGYCPPALGAGMTKERGTTMAWNMRRTSLPLKAPHTS

SEQ ID NO: 6196 - protein, 48 aa, Homo sapiens
MQKIMHISVLLSPVLWGLIFGVSSNSIQIGGLFPRGADQEYSAFRVGM

SEQ ID NO: 6197 - protein, 125 aa, Homo sapiens
MQKIMHISVLLSPVLWGLIFGVSSNSIQIGGLFPRGADQEYSAFRVGMVQFSTSEFRLTPHIDNLEVANSFAVTNAFCSQFSRGVYAIFGFYDKKSVNTITSFCGTLHVSFITPSFPTDGTHPFV

SEQ ID NO: 6198 - protein, 883 aa, Homo sapiens
MQKIMHISVLLSPVLWGLIFGVSSNSIQIGGLFPRGADQEYSAFRVGMVQFSTSEFRLTPHIDNLEVANSFAVTNAFCSQFSRGVYAIFGFYDKKSVNTITSFCGTLHVSFITPSFPTDGTHPFVIQMRPDLKGALLSLIEYYQWDKFAYLYDSDRGLSTLQAVLDSAAEKKWQVTAINVGNINNDKKDEMYRSLFQDLELKKERRVILDCERDKVNDIVDQVITIGKHVKGYHYIIANLGFTDGDLLKIQFGGANVSGFQIVDYDDSLVSKFIERWSTLEEKEYPGAHTTTIKYTSALTYDAVQVMTEAFRNLRKQRIEISRRGNAGDCLANPAVPWGQGVEIERALKQVQVEGLSGNIKFDQNGKRINYTINIMELKTNGPRKIGYWSEVDKMVVTLTELPSGNDTSGLENKTVVVTTILESPYVMMKKNHEMLEGNERYEGYCVDLAAEIAKHCGFKYKLTIVGDGKYGARDADTKIWNGMVGELVYGKADIAIAPLTITLVREEVIDFSKPFMSLGISIMIKKPQKSKPGVFSFLDPLAYEIWMCIVFAYIGVSVVLFLVSRFSPYEWHTEEFEDGRETQSSESTNEFGIFNSLWFSLGAFMQQGCDISPRSLSGRIVGGVWWFFTLIIISSYTANLAAFLTVERMVSPIESAEDLSKQTEIAYGTLDSGSTKEFFRRSKIAVFDKMWTYMRSAEPSVFVRTTAEGVARVRKSKGKYAYLLESTMNEYIEQRKPCDTMKVGGNLDSKGYGIATPKGSSLRNAVNLAVLKLNEQGLLDKLKNKWWYDKGECGSGGGDSKEKTSALSLSNVAGVFYILVGGLGLAMLVALIEFCYKSRAEAKRMKVAKNAQNINPSSSQNSQNFATYKEGYNVYGIESVKI

SEQ ID NO: 6199 - protein, 883 aa, Homo sapiens
MQKIMHISVLLSPVLWGLIFGVSSNSIQIGGLFPRGADQEYSAFRVGMVQFSTSEFRLTPHIDNLEVANSFAVTNAFCSQFSRGVYAIFGFYDKKSVNTITSFCGTLHVSFITPSFPTDGTHPFVIQMRPDLKGALLSLIEYYQWDKFAYLYDSDRGLSTLQAVLDSAAEKKWQVTAINVGNINNDKKDEMYRSLFQDLELKKERRVILDCERDKVNDIVDQVITIGKHVKGYHYIIANLGFTDGDLLKIQFGGANVSGFQIVDYDDSLVSKFIERWSTLEEKEYPGAHTTTIKYTSALTYDAVQVMTEAFRNLRKQRIEISRRGNAGDCLANPAVPWGQGVEIERALKQVQVEGLSGNIKFDQNGKRINYTINIMELKTNGPRKIGYWSEVDKMVVTLTELPSGNDTSGLENKTVVVTTILESPYVMMKKNHEMLEGNERYEGYCVDLAAEIAKHCGFKYKLTIVGDGKYGARDADTKIWNGMVGELVYGKADIAIAPLTITLVREEVIDFSKPFMSLGISIMIKKPQKSKPGVFSFLDPLAYEIWMCIVFAYIGVSVVLFLVSRFSPYEWHTEEFEDGRETQSSESTNEFGIFNSLWFSLGAFMQQGCDISPRSLSGRIVGGVWWFFTLIIISSYTANLAAFLTVERMVSPIESAEDLSKQTEIAYGTLDSGSTKEFFRRSKIAVFDKMWTYMRSAEPSVFVRTTAEGVARVRKSKGKYAYLLESTMNEYIEQRKPCDTMKVGGNLDSKGYGIATPKGSSLRTPVNLAVLKLSEQGVLDKLKNKWWYDKGECGAKDSGSKEKTSALSLSNVAGVFYILVGGLGLAMLVALIEFCYKSRAEAKRMKVAKNAQNINPSSSQNSQNFATYKEGYNVYGIESVKI

SEQ ID NO: 6200 - protein, 901 aa, Homo sapiens
MQKIMHISVLLSPVLWGLIFGVSSNSIQIGGLFPRGADQEYSAFRVGMVQFSTSEFRLTPHIDNLEVANSFAVTNAFCSQFSRGVYAIFGFYDKKSVNTITSFCGTLHVSFITPSFPTDGTHPFVIQMRPDLKGALLSLIEYYQWDKFAYLYDSDRGLSTLQAVLDSAAEKKWQVTAINVGNINNDKKDEMYRSLFQDLELKKERRVILDCERDKVNDIVDQVITIGKHVKGYHYIIANLGFTDGDLLKIQFGGANVSGFQIVDYDDSLVSKFIERWSTLEEKEYPGAHTTTIKYTSALTYDAVQVMTEAFRNLRKQRIEISRRGNAGDCLANPAVPWGQGVEIERALKQVQVEGLSGNIKFDQNGKRINYTINIMELKTNGPRKIGYWSEVDKMVVTLTELPSGNDTSGLENKTVVVTTILESPYVMMKKNHEMLEGNERYEGYCVDLAAEIAKHCGFKYKLTIVGDGKYGARDADTKIWNGMVGELVYGKADIAIAPLTITLVREEVIDFSKPFMSLGISIMIKKPQKSKPGVFSFLDPLAYEIWMCIVFAYIGVSVVLFLVSRFSPYEWHTEEFEDGRETQSSESTNEFGIFNSLWFSLGAFMQQGCDISPRSLSGRIVGGVWWFFTLIIISSYTANLAAFLTVERMVSPIESAEDLSKQTEIAYGTLDSGSTKEFFRRSKIAVFDKMWTYMRSAEPSVFVRTTAEGVARVRKSKGKYAYLLESTMNEYIEQRKPCDTMKVGGNLDSKGYGIATPKGSSLRNAVNLAVLKLNEQGLLDKLKNKWWYDKGECGSGGGDSKEKTSALSLSNVAGVFYILVGGLGLAMLVALIEFCYKSRAEAKRMKMTLNDAMRNKARLSITGSTGENGRVMTPEFPKAVHAVPYVSPGMGMNVSVTDLS

SEQ ID NO: 6201 - protein, 105 aa, Homo sapiens
MRPDLKGALLSLIEYYQWDKFAYLYDSDRGLSTLQAVLDSAAEKKWQVTAINVGNINNDKKDEMYRSLFQDLELKKERRVILDCERDKVNDIVDQVITIGKHVKG

SEQ ID NO: 6202 - protein, 57 aa, Homo sapiens
MVQFSTSEFRLTPHIDNLEVANSFAVTNAFCSQFSRGVYAIFGFYDKKSVNTITSFC

SEQ ID NO: 6203 - protein, 145 aa, Homo sapiens
MVQFSTSEFRLTPHIDNLEVANSFAVTNAFCSQFSRGVYAIFGFYDKKSVNTITSFCGTLHVSFITPSFPTDGTHPFVIQMRPDLKGALLSLIEYYQWDKFAYLYDSDRGLSTLQAVLDSAAEKKWQVTAINVGNINNDKKDEMY

SEQ ID NO: 6204 - protein, 730 aa, Homo sapiens
MVQFSTSEFRLTPHIDNLEVANSFAVTNAFCSQFSRGVYAIFGFYDKKSVNTITSFCGTLHVSFITPSFPTDGTHPFVIQMRPDLKGALLSLIEYYQWDKFAYLYDSDRGLSTLQAVLDSAAEKKWQVTAINVGNINNDKKDEMYRSLFQDLELKKERRVILDCERDKVNDIVDQVITIGKHVKGYHYIIANLGFTDGDLLKIQFGGANVSGFQIVDYDDSLVSKFIERWSTLEEKEYPGAHTTTIKYTSALTYDAVQVMTEAFRNLRKQRIEISRRGNAGDCLANPAVPWGQGVEIERALKQVQVEGLSGNIKFDQNGKRINYTINIMELKTNGPRKIGYWSEVDKMVVTLTELPSGNDTSGLENKTVVVTTILESPYVMMKKNHEMLEGNERYEGYCVDLAAEIAKHCGFKYKLTIVGDGKYGARDADTKIWNGMVGELVYGKADIAIAPLTITLVREEVIDFSKPFMSLGISIMIKKPQKSKPGVFSFLDPLAYEIWMCIVFAYIGVSVVLFLVSRFSPYEWHTEEFEDGRETQSSESTNEFGIFNSLWFSLGAFMQQGCDISPRSLSGRIVGGVWWFFTLIIISSYTANLAAFLTVERMVSPIESAEDLSKQTEIAYGTLDSGSTKEFFRRSKIAVFDKMWTYMRSAEPSVFVRTTAEGVARVRKSKGKYAYLLESTMNEYIEQRKPCDTMKVGGNLDSKGYGIATPKGSSLSGVTFKTLLFVCCG

SEQ ID NO: 6205 - protein, 836 aa, Homo sapiens
MVQFSTSEFRLTPHIDNLEVANSFAVTNAFCSQFSRGVYAIFGFYDKKSVNTITSFCGTLHVSFITPSFPTDGTHPFVIQMRPDLKGALLSLIEYYQWDKFAYLYDSDRGLSTLQAVLDSAAEKKWQVTAINVGNINNDKKDEMYRSLFQDLELKKERRVILDCERDKVNDIVDQVITIGKHVKGYHYIIANLGFTDGDLLKIQFGGANVSGFQIVDYDDSLVSKFIERWSTLEEKEYPGAHTTTIKYTSALTYDAVQVMTEAFRNLRKQRIEISRRGNAGDCLANPAVPWGQGVEIERALKQVQVEGLSGNIKFDQNGKRINYTINIMELKTNGPRKIGYWSEVDKMVVTLTELPSGNDTSGLENKTVVVTTILESPYVMMKKNHEMLEGNERYEGYCVDLAAEIAKHCGFKYKLTIVGDGKYGARDADTKIWNGMVGELVYGKADIAIAPLTITLVREEVIDFSKPFMSLGISIMIKKPQKSKPGVFSFLDPLAYEIWMCIVFAYIGVSVVLFLVSRFSPYEWHTEEFEDGRETQSSESTNEFGIFNSLWFSLGAFMQQGCDISPRSLSGRIVGGVWWFFTLIIISSYTANLAAFLTVERMVSPIESAEDLSKQTEIAYGTLDSGSTKEFFRRSKIAVFDKMWTYMRSAEPSVFVRTTAEGVARVRKSKGKYAYLLESTMNEYIEQRKPCDTMKVGGNLDSKGYGIATPKGSSLRTPVNLAVLKLSEQGVLDKLKNKWWYDKGECGAKDSGSKEKTSALSLSNVAGVFYILVGGLGLAMLVALIEFCYKSRAEAKRMKVAKNAQNINPSSSQNSQNFATYKEGYNVYGIESVKI

SEQ ID NO: 6206 - protein, 836 aa, Homo sapiens; identical to SEQ ID NO: 6205

SEQ ID NO: 6207 - protein, 214 aa, Homo sapiens
  VARIANT 1: note = misc_feature - Xaa can be any naturally occurring amino acid
XLDSGSTKEFFRRSKIAVFDKMWTYMRSAEPSVFVRTTAEGVARVRKSKGKYAYLLESTMNEYIEQRKPCDTMKVGGNLDSKGYGIATPKGSSLRTPVNLAVLKLSEQGVLDKLKNKWWYDKGECGAKDSGSKEKTSALSLSNVAGVFYILVGGLGLAMLVALIEFCYKSRAEAKRMKVAKNAQNINPSSSQNSQNFATYKEGYNVYGIESVKI

SEQ ID NO: 6208 - protein, 144 aa, Homo sapiens
MARQKKMGQSVLRAVFFLVLGLLGHSHGGFPNTISIGGLFMRNTVQEHSAFRFAVQLYNTNQNTTEKPFHLNYHVDHLDSSNSFSVTNACPAERDYLPWPGSIRENNWTALPCCKDHGLLHLKCSPGGARQNWAYCIWGVTGEL

SEQ ID NO: 6209 - protein, 144 aa, Homo sapiens; identical to SEQ ID NO: 6208

SEQ ID NO: 6210 - protein, 894 aa, Homo sapiens
MARQKKMGQSVLRAVFFLVLGLLGHSHGGFPNTISIGGLFMRNTVQEHSAFRFAVQLYNTNQNTTEKPFHLNYHVDHLDSSNSFSVTNAFCSQFSRGVYAIFGFYDQMSMNTLTSFCGALHTSFVTPSFPTDADVQFVIQMRPALKGAILSLLGHYKWEKFVYLYDTERGFSILQAIMEAAVQNNWQVTARSVGNIKDVQEFRRIIEEMDRRQEKRYLIDCEVERINTILEQVVILGKHSRGYHYMLANLGFTDILLERVMHGGANITGFQIVNNENPMVQQFIQRWVRLDEREFPEAKNAPLKYTSALTHDAILVIAEAFRYLRRQRVDVSRRGSAGDCLANPAVPWSQGIDIERALKMVQVQGMTGNIQFDTYGRRTNYTIDVYEMKVSGSRKAGYWNEYERFVPFSDQQISNDSASSENRTIVVTTILESPYVMYKKNHEQLEGNERYEGYCVDLAYEIAKHVRIKYKLSIVGDGKYGARDPETKIWNGMVGELVYGRADIAVAPLTITLVREEVIDFSKPFMSLGISIMIKKPQKSKPGVFSFLDPLAYEIWMCIVFAYIGVSVVLFLVSRFSPYEWHLEDNNEEPRDPQSPPDPPNEFGIFNSLWFSLGAFMQQGCDISPRSLSGRIVGGVWWFFTLIIISSYTANLAAFLTVERMVSPIESAEDLAKQTEIAYGTLDSGSTKEFFRRSKIAVYEKMWSYMKSAEPSVFTKTTADGVARVRKSKGKFAFLLESTMNEYIEQRKPCDTMKVGGNLDSKGYGVATPKGSALRTPVNLAVLKLSEQGILDKLKNKWWYDKGECGAKDSGSKDKTSALSLSNVAGVFYILVGGLGLAMMVALIEFCYKSRAESKRMKLTKNTQNFKPAPATNTQNYATYREGYNVYGTESVKI

SEQ ID NO: 6211 - protein, 824 aa, Homo sapiens
MARQKKMGQSVLRAVFFLVLGLLGHSHGGFPNTISIGGLFMRNTVQEHSAFRFAVQLYNTNQNTTEKPFHLNYHVDHLDSSNSFSVTNAFCSQFSRGVYAIFGFYDQMSMNTLTSFCGALHTSFVTPSFPTDADVQFVIQMRPALKGAILSLLGHYKWEKFVYLYDTERGFSILQAIMEAAVQNNWQVTARSVGNIKDVQEFRRIIEEMDRRQEKRYLIDCEVERINTILEQVVILGKHSRGYHYMLANLGFTDILLERVMHGGANITGFQIVNNENPMVQQFIQRWVRLDEREFPEAKNAPLKYTSALTHDAILVIAEAFRYLRRQRVDVSRRGSAGDCLANPAVPWSQGIDIERALKMVQVQGMTGNIQFDTYGRRTNYTIDVYEMKVSGSRKAGYWNEYERFVPFSDQQISNDSASSENRTIVVTTILESPYVMYKKNHEQLEGNERYEGYCVDLAYEIAKHVRIKYKLSIVGDGKYGARDPETKIWNGMVGELVYGRADIAVAPLTITLVREEVIDFSKPFMSLGISIMIKKPQKSKPGVFSFLDPLAYEIWMCIVFAYIGVSVVLFLVSRFSPYEWHLEDNNEEPRDPQSPPDPPNEFGIFNSLWFSLGAFMQQGCDISPRSLSGRIVGGVWWFFTLIIISSYTANLAAFLTVERMVSPIESAEDLAKQTEIAYGTLDSGSTKEFFRRSKIAVYEKMWSYMKSAEPSVFTKTTADGVARVRKSKGKFAFLLESTMNEYIEQRKPCDTMKVGGNLDSKGYGVATPKGSALRNAVNLAVLKLNEQGLLDKLKNKWWYDKGECGSGGGDSKNACKPCSIETQ

SEQ ID NO: 6212 - protein, 894 aa, Homo sapiens
MARQKKMGQSVLRAVFFLVLGLLGHSHGGFPNTISIGGLFMRNTVQEHSAFRFAVQLYNTNQNTTEKPFHLNYHVDHLDSSNSFSVTNAFCSQFSRGVYAIFGFYDQMSMNTLTSFCGALHTSFVTPSFPTDADVQFVIQMRPALKGAILSLLGHYKWEKFVYLYDTERGFSILQAIMEAAVQNNWQVTARSVGNIKDVQEFRRIIEEMDRRQEKRYLIDCEVERINTILEQVVILGKHSRGYHYMLANLGFTDILLERVMHGGANITGFQIVNNENPMVQQFIQRWVRLDEREFPEAKNAPLKYTSALTHDAILVIAEAFRYLRRQRVDVSRRGSAGDCLANPAVPWSQGIDIERALKMVQVQGMTGNIQFDTYGRRTNYTIDVYEMKVSGSRKAGYWNEYERFVPFSDQQISNDSASSENRTIVVTTILESPYVMYKKNHEQLEGNERYEGYCVDLAYEIAKHVRIKYKLSIVGDGKYGARDPETKIWNGMVGELVYGRADIAVAPLTITLVREEVIDFSKPFMSLGISIMIKKPQKSKPGVFSFLDPLAYEIWMCIVFAYIGVSVVLFLVSRFSPYEWHLEDNNEEPRDPQSPPDPPNEFGIFNSLWFSLGAFMQQGCDISPRSLSGRIVGGVWWFFTLIIISSYTANLAAFLTVERMVSPIESAEDLAKQTEIAYGTLDSGSTKEFFRRSKIAVYEKMWSYMKSAEPSVFTKTTADGVARVRKSKGKFAFLLESTMNEYIEQRKPCDTMKVGGNLDSKGYGVATPKGSALRNAVNLAVLKLNEQGLLDKLKNKWWYDKGECGSGGGDSKDKTSALSLSNVAGVFYILVGGLGLAMMVALIEFCYKSRAESKRMKLTKNTQNFKPAPATNTQNYATYREGYNVYGTESVKI

SEQ ID NO: 6213 - protein, 894 aa, Homo sapiens; identical to SEQ ID NO: 6212

SEQ ID NO: 6214 - protein, 82 aa, Homo sapiens
MRIISRQIVLLFSGFWGLAMGAFPSSVQIGGLFIRNTDQEYTAFRLAIFLHNTSPNASEAPFNLVPHVDNIETANSFAVTNA

SEQ ID NO: 6215 - protein, 82 aa, Homo sapiens; identical to SEQ ID NO: 6214

SEQ ID NO: 6216 - protein, 82 aa, Homo sapiens; identical to SEQ ID NO: 6214

SEQ ID NO: 6217 - protein, 84 aa, Homo sapiens
MRIISRQIVLLFSGFWGLAMGAFPSSVQIGGLFIRNTDQEYTAFRLAIFLHNTSPNASEAPFNLVPHVDNIETANSFAVTNACK

SEQ ID NO: 6218 - protein, 225 aa, Homo sapiens
MRIISRQIVLLFSGFWGLAMGAFPSSVQIGGLFIRNTDQEYTAFRLAIFLHNTSPNASEAPFNLVPHVDNIETANSFAVTNAFCSQYSRGVFAIFGLYDKRSVHTLTSFCSALHISLITPSFPTEGESQFVLQLRPSLRGALLSLLDHYEWNCFVFLYDTDRGLVISTTPLASNCMPSSVVHSWLYVLYNKSINSITACLLGPSTELNVFNYLIADSNLNNGNYI

SEQ ID NO: 6219 - protein, 902 aa, Homo sapiens
MRIISRQIVLLFSGFWGLAMGAFPSSVQIGGLFIRNTDQEYTAFRLAIFLHNTSPNASEAPFNLVPHVDNIETANSFAVTNAFCSQYSRGVFAIFGLYDKRSVHTLTSFCSALHISLITPSFPTEGESQFVLQLRPSLRGALLSLLDHYEWNCFVFLYDTDRGYSILQAIMEKAGQNGWHVSAICVENFNDVSYRQLLEELDRRQEKKFVIDCEIERLQNILEQIVSVGKHVKGYHYIIANLGFKDISLERFIHGGANVTGFQLVDFNTPMVIKLMDRWKKLDQREYPGSETPPKYTSALTYDGVLVMAETFRSLRRQKIDISRRGNAGDCLANPAAPWGQGIDMERTLKQVRIQGLTGNVQFDHYGRRVNYTMDVFELKSTGPRKVGYWNDMDKLVLIQDVPTLGNDTAAIENRTVVVTTIMESPYVMYKKNHEMFEGNDKYEGYCVDLASEIAKHIGIKYKIAIVPDGKYGARDADTKIWNGMVGELVYGKAEIAIAPLTITLVREEVIDFSKPFMSLGISIMIKKPQKSKPGVFSFLDPLAYEIWMCIVFAYIGVSVVLFLVSRFSPYEWHTEEPEDGKEGPSDQPPNEFGIFNSLWFSLGAFMQQGCDISPRSLSGRIVGGVWWFFTLIIISSYTANLAAFLTVERMVSPIESAEDLAKQTEIAYGTLDSGSTKEFFRRSKIAVYEKMWTYMRSAEPSVFTRTTAEGVARVRKSKGKFAFLLESTMNEYIEQRKPCDTMKVGGNLDSKGYGVATPKGSSLRTPVNLAVLKLSEAGVLDKLKNKWWYDKGECGPKDSGSKDKTSALSLSNVAGVFYILVGGLGLAMLVALIEFCYKSRAEAKRMKLTFSEAIRNKARLSITGSVGENGRVLTPDCPKAVHTGTAIRQSSGLAVIASDLP

SEQ ID NO: 6220 - protein, 433 aa, Homo sapiens
MRIISRQIVLLFSGFWGLAMGAFPSSVQIGGLFIRNTDQEYTAFRLAIFLHNTSPNASEAPFNLVPHVDNIETANSFAVTNAFCSQYSRGVFAIFGLYDKRSVHTLTSFCSALHISLITPSFPTEGESQFVLQLRPSLRGALLSLLDHYEWNCFVFLYDTDRGYSILQAIMEKAGQNGWHVSAICVENFNDVSYRQLLEELDRRQEKKFVIDCEIERLQNILEQIVSVGKHVKGYHYIIANLGFKDISLERFIHGGANVTGFQLVDFNTPMVIKLMDRWKKLDQREYPGSETPPKYTSALTYDGVLVMAETFRSLRRQKIDISRRGNAGDCLANPAAPWGQGIDMERTLKQVRIQGLTGNVQFDHYGRRVNYTMDVFELKSTGPRKVGYWNDMDKLVLIQDVPTLGNDTAAIENRTVVVTTIMPLMKNPILRN

SEQ ID NO: 6221 - protein, 884 aa, Homo sapiens
MRIISRQIVLLFSGFWGLAMGAFPSSVQIGGLFIRNTDQEYTAFRLAIFLHNTSPNASEAPFNLVPHVDNIETANSFAVTNAFCSQYSRGVFAIFGLYDKRSVHTLTSFCSALHISLITPSFPTEGESQFVLQLRPSLRGALLSLLDHYEWNCFVFLYDTDRGYSILQAIMEKAGQNGWHVSAICVENFNDVSYRQLLEELDRRQEKKFVIDCEIERLQNILEQIVSVGKHVKGYHYIIANLGFKDISLERFIHGGANVTGFQLVDFNTPMVIKLMDRWKKLDQREYPGSETPPKYTSALTYDGVLVMAETFRSLRRQKIDISRRGNAGDCLANPAAPWGQGIDMERTLKQVRIQGLTGNVQFDHYGRRVNYTMDVFELKSTGPRKVGYWNDMDKLVLIQDVPTLGNDTAAIENRTVVVTTIMESPYVMYKKNHEMFEGNDKYEGYCVDLASEIAKHIGIKYKIAIVPDGKYGARDADTKIWNGMVGELVYGKAEIAIAPLTITLVREEVIDFSKPFMSLGISIMIKKPQKSKPGVFSFLDPLAYEIWMCIVFAYIGVSVVLFLVSRFSPYEWHTEEPEDGKEGPSDQPPNEFGIFNSLWFSLGAFMQQGCDISPRSLSGRIVGGVWWFFTLIIISSYTANLAAFLTVERMVSPIESAEDLAKQTEIAYGTLDSGSTKEFFRRSKIAVYEKMWTYMRSAEPSVFTRTTAEGVARVRKSKGKFAFLLESTMNEYIEQRKPCDTMKVGGNLDSKGYGVATPKGSSLRNAVNLAVLKLNEQGLLDKLKNKWWYDKGECGSGGGDSKDKTSALSLSNVAGVFYILVGGLGLAMLVALIEFCYKSRAEAKRMKVAKSAQTFNPTSSQNTQNLATYREGYNVYGTESIKI

SEQ ID NO: 6222 - protein, 433 aa, Homo sapiens; identical to SEQ ID NO: 6220

SEQ ID NO: 6223 - protein, 902 aa, Homo sapiens; identical to SEQ ID NO: 6219

SEQ ID NO: 6224 - protein, 884 aa, Homo sapiens; identical to SEQ ID NO: 6221

SEQ ID NO: 6225 - protein, 104 aa, Homo sapiens
  VARIANT 1: note = misc_feature - Xaa can be any naturally occurring amino acid
XVARVRKSKGKFAFLLESTMNEYIEQRKPCDTMKVGGNLDSKGYGVATPKGSSLRNAVNLAVLKLNEQGLLDKLKNKWWYDKGECGSGGGDSKNSCKPCRFETQ

SEQ ID NO: 6226 - protein, 180 aa, Homo sapiens
CSHEMAAGILKQALAMGMMTEYYHYIFTTLTDAALMYDAVHVVSVAVQQFPQMTVSSLQCNRHKPWRFGTRFMSLIKEAHWEGLTGRITFNKTNGLRTDFDLDVISLKEEGLEKIGTWDPASGLNMTESQKGKPANITDSLSNRSLIVTTILEEPYVLFKKSDKPLYGNDRFEGYCIDLL

SEQ ID NO: 6227 - protein, 854 aa, Homo sapiens
GGIFEYVESGPMGAEELAFRFAVNTINRNRTLLPNTTLTYDTQKINLYDSFEASKKACDQLSLGVAAIFGPSHSSSANAVQSICNALGVPHIQTRWKHQVSDNKDSFYVSLYPDFSSLSRAILDLVQFFKWKTVTVVYDDSTGLIRLQELIKAPSRYNLRLKIRQLPADTKDAKPLLKEMKRGKEFHVIFDCSHEMAAGILKQALAMGMMTEYYHYIFTTLDLFALDVEPYRYSGVNMTGFRILNTENTQVSSIIEKWSMERLQAPPKPDSGLLDGFMTTDAALMYDAVHVVSVAVQQFPQMTVSSLQCNRHKPWRFGTRFMSLIKEAHWEGLTGRITFNKTNGLRTDFDLDVISLKEEGLEKIGTWDPASGLNMTESQKGKPANITDSLSNRSLIVTTILEEPYVLFKKSDKPLYGNDRFEGYCIDLLRELSTILGFTYEIRLVEDGKYGAQDDANGQWNGMVRELIDHKADLAVAPLAITYVREKVIDFSKPFMTLGISILYRKPNGTNPGVFSFLNPLSPDIWMYILLAYLGVSCVLFVIARFSPYEWYNPHPCNPDSDVVENNFTLLNSFWFGVGALMQQGSELMPKALSTRIVGGIWWFFTLIIISSYTANLAAFLTVERMESPIDSADDLAKQTKIEYGAVEDGATMTFFKKSKISTYDKMWAFMSSRRQSVLVKSNEEGIQRVLTSDYAFLMESTTIEFVTQRNCNLTQIGGLIDSKGYGVGTPMGSPYRDKITIAILQLQEEGKLHMMKEKWWRGNGCPEEESKEASALGVQNIGGIFIVLAAGLVLSVFVAVGEFLYKSKKNAQLEKRAKTKLPQDYVFLPILESVSISTVLSSSPSSSSLSSCS

SEQ ID NO: 6228 - protein, 870 aa, Homo sapiens
GGIFEYVESGPMGAEELAFRFAVNTINRNRTLLPNTTLTYDTQKINLYDSFEASKKACDQLSLGVAAIFGPSHSSSANAVQSICNALGVPHIQTRWKHQVSDNKDSFYVSLYPDFSSLSRAILDLVQFFKWKTVTVVYDDSTGLIRLQELIKAPSRYNLRLKIRQLPADTKDAKPLLKEMKRGKEFHVIFDCSHEMAAGILKQALAMGMMTEYYHYIFTTLDLFALDVEPYRYSGVNMTGFRILNTENTQVSSIIEKWSMERLQAPPKPDSGLLDGFMTTDAALMYDAVHVVSVAVQQFPQMTVSSLQCNRHKPWRFGTRFMSLIKEAHWEGLTGRITFNKTNGLRTDFDLDVISLKEEGLEKIGTWDPASGLNMTESQKGKPANITDSLSNRSLIVTTILEEPYVLFKKSDKPLYGNDRFEGYCIDLLRELSTILGFTYEIRLVEDGKYGAQDDANGQWNGMVRELIDHKADLAVAPLAITYVREKVIDFSKPFMTLGISILYRKPNGTNPGVFSFLNPLSPDIWMYILLAYLGVSCVLFVIARFSPYEWYNPHPCNPDSDVVENNFTLLNSFWFGVGALMQQGSELMPKALSTRIVGGIWWFFTLIIISSYTANLAAFLTVERMESPIDSADDLAKQTKIEYGAVEDGATMTFFKKSKISTYDKMWAFMSSRRQSVLVKSNEEGIQRVLTSDYAFLMESTTIEFVTQRNCNLTQIGGLIDSKGYGVGTPMGSPYRDKITIAILQLQEEGKLHMMKEKWWRGNGCPEEESKEASALGVQNIGGIFIVLAAGLVLSVFVAVGEFLYKSKKNAQLEKRSFCSAMVEELRMSLKCQRRLKHKPQAPVIVKTEEVINMHTFNDRRLPGKETMA

SEQ ID NO: 6229 - protein, 831 aa, Homo sapiens
GGIFEYVESGPMGAEELAFRFAVNTINRNRTLLPNTTLTYDTQKINLYDSFEASKKACDQLSLGVAAIFGPSHSSSANAVQSICNALGVPHIQTRWKHQVSDNKDSFYVSLYPDFSSLSRAILDLVQFFKWKTVTVVYDDSTGLIRLQELIKAPSRYNLRLKIRQLPADTKDAKPLLKEMKRGKEFHVIFDCSHEMAAGILKQALAMGMMTEYYHYIFTTLDLFALDVEPYRYSGVNMTGFRILNTENTQVSSIIEKWSMERLQAPPKPDSGLLDGFMTTDAALMYDAVHVVSVAVQQFPQMTVSSLQCNRHKPWRFGTRFMSLIKEAHWEGLTGRITFNKTNGLRTDFDLDVISLKEEGLEKIGTWDPASGLNMTESQKGKPANITDSLSNRSLIVTTILEEPYVLFKKSDKPLYGNDRFEGYCIDLLRELSTILGFTYEIRLVEDGKYGAQDDANGQWNGMVRELIDHKADLAVAPLAITYVREKVIDFSKPFMTLGISILYRKPNGTNPGVFSFLNPLSPDIWMYILLAYLGVSCVLFVIARFSPYEWYNPHPCNPDSDVVENNFTLLNSFWFGVGALMQQGSELMPKALSTRIVGGIWWFFTLIIISSYTANLAAFLTVERMESPIDSADDLAKQTKIEYGAVEDGATMTFFKKSKISTYDKMWAFMSSRRQSVLVKSNEEGIQRVLTSDYAFLMESTTIEFVTQRNCNLTQIGGLIDSKGYGVGTPMGSPYRDKITIAILQLQEEGKLHMMKEKWWRGNGCPEEESKEASALGVQNIGGIFIVLAAGLVLSVFVAVGEFLYKSKKNAQLEKESSIWLVPPYHPDTV

SEQ ID NO: 6230 - protein, 182 aa, Homo sapiens
IGTWDPASGLNMTESQKGKPANITDSLSNRSLIVTTILEEPYVLFKKSDKPLYGNDRFEGYCIDLLRELSTILGFTYEIRLVEDGKYGAQDDANGQWNGMVRELIDHKADLAVAPLAITYVREKVIDFSKPFMTLGISILYRKPNGTNPGVFSFLNPLSPDIWMYILLAYLGVSCVLFVIAR

SEQ ID NO: 6231 - protein, 892 aa, Homo sapiens
MKIIFPILSNPVFRRTVKLLLCLLWIGYSQGTTHVLRFGGIFEYVESGPMGAEELAFRFAVNTINRNRTLLPNTTLTYDTQKINLYDSFEASKKACDQLSLGVAAIFGPSHSSSANAVQSICNALGVPHIQTRWKHQVSDNKDSFYVSLYPDFSSLSRAILDLVQFFKWKTVTVVYDDSTGLIRLQELIKAPSRYNLRLKIRQLPADTKDAKPLLKEMKRGKEFHVIFDCSHEMAAGILKQALAMGMMTEYYHYIFTTLDLFALDVEPYRYSGVNMTGFRILNTENTQVSSIIEKWSMERLQAPPKPDSGLLDGFMTTDAALMYDAVHVVSVAVQQFPQMTVSSLQCNRHKPWRFGTRFMSLIKEAHWEGLTGRITFNKTNGLRTDFDLDVISLKEEGLEKIGTWDPASGLNMTESQKGKPANITDSLSNRSLIVTTILEEPYVLFKKSDKPLYGNDRFEGYCIDLLRELSTILGFTYEIRLVEDGKYGAQDDANGQWNGMVRELIDHKADLAVAPLAITYVREKVIDFSKPFMTLGISILYRKPNGTNPGVFSFLNPLSPDIWMYILLAYLGVSCVLFVIARFSPYEWYNPHPCNPDSDVVENNFTLLNSFWFGVGALMQQGSELMPKALSTRIVGGIWWFFTLIIISSYTANLAAFLTVERMESPIDSADDLAKQTKIEYGAVEDGATMTFFKKSKISTYDKMWAFMSSRRQSVLVKSNEEGIQRVLTSDYAFLMESTTIEFVTQRNCNLTQIGGLIDSKGYGVGTPMGSPYRDKITIAILQLQEEGKLHMMKEKWWRGNGCPEEESKEASALGVQNIGGIFIVLAAGLVLSVFVAVGEFLYKSKKNAQLEKRAKTKLPQDYVFLPILESVSISTVLSSSPSSSSLSSCS

SEQ ID NO: 6232 - protein, 353 aa, Homo sapiens
MKIIFPILSNPVFRRTVKLLLCLLWIGYSQGTTHVLRFGGIFEYVESGPMGAEELAFRFAVNTINRNRTLLPNTTLTYDTQKINLYDSFEASKKACDQLSLGVAAIFGPSHSSSANAVQSICNALGVPHIQTRWKHQVSDNKDSFYVSLYPDFSSLSRAILDLVQFFKWKTVTVVYDDSTGLIRLQELIKAPSRYNLRLKIRQLPADTKDAKPLLKEMKRGKEFHVIFDCSHEMAAGILKQALAMGMMTEYYHYIFTTLDLFALDVEPYRYSGVNMTGFRILNTENTQVSSIIEKWSMERLQAPPKPDSGLLDGFMTMEFHSCCPGWSAMARSQLTATSASWVQAILLPQPPE

SEQ ID NO: 6233 - protein, 869 aa, Homo sapiens
MKIIFPILSNPVFRRTVKLLLCLLWIGYSQGTTHVLRFGGIFEYVESGPMGAEELAFRFAVNTINRNRTLLPNTTLTYDTQKINLYDSFEASKKACDQLSLGVAAIFGPSHSSSANAVQSICNALGVPHIQTRWKHQVSDNKDSFYVSLYPDFSSLSRAILDLVQFFKWKTVTVVYDDSTGLIRLQELIKAPSRYNLRLKIRQLPADTKDAKPLLKEMKRGKEFHVIFDCSHEMAAGILKQALAMGMMTEYYHYIFTTLDLFALDVEPYRYSGVNMTGFRILNTENTQVSSIIEKWSMERLQAPPKPDSGLLDGFMTTDAALMYDAVHVVSVAVQQFPQMTVSSLQCNRHKPWRFGTRFMSLIKEAHWEGLTGRITFNKTNGLRTDFDLDVISLKEEGLEKIGTWDPASGLNMTESQKGKPANITDSLSNRSLIVTTILEEPYVLFKKSDKPLYGNDRFEGYCIDLLRELSTILGFTYEIRLVEDGKYGAQDDANGQWNGMVRELIDHKADLAVAPLAITYVREKVIDFSKPFMTLGISILYRKPNGTNPGVFSFLNPLSPDIWMYILLAYLGVSCVLFVIARFSPYEWYNPHPCNPDSDVVENNFTLLNSFWFGVGALMQQGSELMPKALSTRIVGGIWWFFTLIIISSYTANLAAFLTVERMESPIDSADDLAKQTKIEYGAVEDGATMTFFKKSKISTYDKMWAFMSSRRQSVLVKSNEEGIQRVLTSDYAFLMESTTIEFVTQRNCNLTQIGGLIDSKGYGVGTPMGSPYRDKITIAILQLQEEGKLHMMKEKWWRGNGCPEEESKEASALGVQNIGGIFIVLAAGLVLSVFVAVGEFLYKSKKNAQLEKESSIWLVPPYHPDTV

SEQ ID NO: 6234 - protein, 908 aa, Homo sapiens
MKIIFPILSNPVFRRTVKLLLCLLWIGYSQGTTHVLRFGGIFEYVESGPMGAEELAFRFAVNTINRNRTLLPNTTLTYDTQKINLYDSFEASKKACDQLSLGVAAIFGPSHSSSANAVQSICNALGVPHIQTRWKHQVSDNKDSFYVSLYPDFSSLSRAILDLVQFFKWKTVTVVYDDSTGLIRLQELIKAPSRYNLRLKIRQLPADTKDAKPLLKEMKRGKEFHVIFDCSHEMAAGILKQALAMGMMTEYYHYIFTTLDLFALDVEPYRYSGVNMTGFRILNTENTQVSSIIEKWSMERLQAPPKPDSGLLDGFMTTDAALMYDAVHVVSVAVQQFPQMTVSSLQCNRHKPWRFGTRFMSLIKEAHWEGLTGRITFNKTNGLRTDFDLDVISLKEEGLEKIGTWDPASGLNMTESQKGKPANITDSLSNRSLIVTTILEEPYVLFKKSDKPLYGNDRFEGYCIDLLRELSTILGFTYEIRLVEDGKYGAQDDANGQWNGMVRELIDHKADLAVAPLAITYVREKVIDFSKPFMTLGISILYRKPNGTNPGVFSFLNPLSPDIWMYILLAYLGVSCVLFVIARFSPYEWYNPHPCNPDSDVVENNFTLLNSFWFGVGALMQQGSELMPKALSTRIVGGIWWFFTLIIISSYTANLAAFLTVERMESPIDSADDLAKQTKIEYGAVEDGATMTFFKKSKISTYDKMWAFMSSRRQSVLVKSNEEGIQRVLTSDYAFLMESTTIEFVTQRNCNLTQIGGLIDSKGYGVGTPMGSPYRDKITIAILQLQEEGKLHMMKEKWWRGNGCPEEESKEASALGVQNIGGIFIVLAAGLVLSVFVAVGEFLYKSKKNAQLEKRSFCSAMVEELRMSLKCQRRLKHKPQAPVIVKTEEVINMHTFNDRRLPGKETMA

SEQ ID NO: 6235 - protein, 46 aa, Homo sapiens
ANLAAFMIQEEYVDQVSGLSDKKMRTLRLRRSIFPKVTKLVTEPGF

SEQ ID NO: 6236 - protein, 35 aa, Homo sapiens
MKPRAECCSPKFWLVLAVLAVSGSRARSQKSPPSI

SEQ ID NO: 6237 - protein, 35 aa, Homo sapiens; identical to SEQ ID NO: 6236

SEQ ID NO: 6238 - protein, 1484 aa, Homo sapiens [sequence omitted]

SEQ ID NO: 6239 - protein, 70 aa, Homo sapiens [sequence omitted]

SEQ ID NO: 6240 - protein, 435 aa, Homo sapiens
MGSLLALLALLLLWGAVAEGPAKKVLTLEGDLVLGGLFPVHQKGGPAEDCGPVNEHRGIQRLEAMLFALDRINRDPHLLPGVRLGAHILDSCSKDTHALEQALDFVRASLSRGADGSRHICPDGSYATHGDAPTAITGVIGGSYSDVSIQVANLLRLFQIPQISYASTSAKLSDKSRYDYFARTVPPDFFQAKAMAEILRFFNWTYVSTVASEGDYGETGIEAFELEARARNICVATSEKVGRAMSRAAFEGVVRALLQKPSARVAVLFTRSEDARELLAASQRLNASFTWVASDGWGALESVVAGSEGAAEGAITIELASYPISDFASYFQSLDPWNNSRNPWFREFWEQRFRCSFRQRDCAAHSLRAVPFEQESKIMFVVNAVYAMAHALHNMHRALCPNTTRLCDAMRPVNGRRLYKDFVLNVKFDGDLKVS

SEQ ID NO: 6241 - protein, 872 aa, Homo sapiens [sequence omitted]

SEQ ID NO: 6242 - protein, 594 aa, Homo sapiens
MGSLLALLALLLLWGAVAEGPAKKVLTLEGDLVLGGLFPVHQKGGPAEDCGPVNEHRGIQRLEAMLFALDRINRDPHLLPGVRLGAHILDSCSKDTHALEQALDFVRASLSRGADGSRHICPDGSYATHGDAPTAITGVIGGSYSDVSIQVANLLRLFQIPQISYASTSAKLSDKSRYDYFARTVPPDFFQAKAMAEILRFFNWTYVSTVASEGDYGETGIEAFELEARARNICVATSEKVGRAMSRAAFEGVVRALLQKPSARVAVLFTRSEDARELLAASQRLNASFTWVASDGWGALESVVAGSEGAAEGAITIELASYPISDFASYFQSLDPWNNSRNPWFREFWEQRFRCSFRQRDCAAHSLRAVPFEQESKIMFVVNAVYAMAHALHNMHRALCPNTTRLCDAMRPVNGRRLYKDFVLNVKFDAPFRPADTHNEVRFDRFGDGIGRYNIFTYLRAGSGRYRYQKTRKCPENFNEAKFIGFTMYTTCIIWLAFLPIFYVTSSDYRVQTTTMCVSVSLSGSVVLGCLFAPKLHIILFQPQKNVVSHRAPTSRFGSAAARASSSLGQGSGSQFVPTVCNGREVVDSTTSSL

SEQ ID NO: 6243 - protein, 81 aa, Homo sapiens
MKMLTRLQVLTLALFSKGFLLSLGDHNFLRREIKIEGDLVLGGLFPINEKGTGTEECGRINEDRGIQRLEAMLFAIDEINK

SEQ ID NO: 6244 - protein, 87 aa, Homo sapiens
MKMLTRLQVLTLALFSKGFLLSLGDHNFLRREIKIEGDLVLGGLFPINEKGTGTEECGRINEDRGIQRLEAMLFAIDEINKDDYLLP

SEQ ID NO: 6245 - protein, 879 aa, Homo sapiens
MKMLTRLQVLTLALFSKGFLLSLGDHNFLRREIKIEGDLVLGGLFPINEKGTGTEECGRINEDRGIQRLEAMLFAIDEINKDDYLLPGVKLGVHILDTCSRDTYALEQSLEFVRASLTKVDEAEYMCPDGSYAIQENIPLLIAGVIGGSYSSVSIQVANLLRLFQIPQISYASTSAKLSDKSRYDYFARTVPPDFYQAKAMAEILRFFNWTYVSTVASEGDYGETGIEAFEQEARLRNICIATAEKVGRSNIRKSYDSVIRELLQKPNARVVVLFMRSDDSRELIAAASRANASFTWVASDGWGAQESIIKGSEHVAYGAITLELASQPVRQFDRYFQSLNPYNNHRNPWFRDFWEQKFQCSLQNKRNHRRVCDKHLAIDSSNYEQESKIMFVVNAVYAMAHALHKMQRTLCPNTTKLCDAMKILDGKKLYKDYLLKINFTAPFNPNKDADSIVKFDTFGDGMGRYNVFNFQNVGGKYSYLKVGHWAETLSLDVNSIHWSRNSVPTSQCSDPCAPNEMKNMQPGDVCCWICIPCEPYEYLADEFTCMDCGSGQWPTADLTGCYDLPEDYIRWEDAWAIGPVTIACLGFMCTCMVVTVFIKHNNTPLVKASGRELCYILLFGVGLSYCMTFFFIAKPSPVICALRRLGLGSSFAICYSALLTKTNCIARIFDGVKNGAQRPKFISPSSQVFICLGLILVQIVMVSVWLILEAPGTRRYTLAEKRETVILKCNVKDSSMLISLTYDVILVILCTVYAFKTRKCPENFNEAKFIGFTMYTTCIIWLAFLPIFYVTSSDYRVQTTTMCISVSLSGFVVLGCLFAPKVHIILFQPQKNVVTHRLHLNRFSVSGTGTTYSQSSASTYVPTVCNGREVLDSTTSSL

SEQ ID NO: 6246 - protein, 537 aa, Homo sapiens
MKMLTRLQVLTLALFSKGFLLSLGDHNFLRREIKIEGDLVLGGLFPINEKGTGTEECGRINEDRGIQRLEAMLFAIDEINKDDYLLPGVKLGVHILDTCSRDTYALEQSLEFVRASLTKVDEAEYMCPDGSYAIQENIPLLIAGVIGGSYSSVSIQVANLLRLFQIPQISYASTSAKLSDKSRYDYFARTVPPDFYQAKAMAEILRFFNWTYVSTVASEGDYGETGIEAFEQEARLRNICIATAEKVGRSNIRKSYDSVIRELLQKPNARVVVLFMRSDDSRELIAAASRANASFTWVASDGWGAQESIIKGSEHVAYGAITLELASQPVRQFDRYFQSLNPYNNHRNPWFRDFWEQKFQCSLQNKRNHRRVCDKHLAIDSSNYEQESKIMFVVNAVYAMAHALHKMQRTLCPNTTKLCDAMKILDGKKLYKDYLLKINFTGADDNHVHLCQPEWLCGLGLFVCTQGSHHPVSTPEECCHTQTAPQQVQCQWNWDHILSVLCKHVCANGVQWAGSPRLHHLISVIVNCSSVLVFLDC

SEQ ID NO: 6247 - protein, 171 aa, Homo sapiens
MSQSPGAGSPPPLPPRSAPVPARSCRCEVANLLRLFQIPQISYASTSAKLSDKSRYDYFARTVPPDFYQAKAMAEILRFFNWTYVSTVASEGDYGETGIEAFEQEARLRNICIATAEKVGRSNIRKSYDSVIRELLQKPNARVVVLFMRSDDSRELIAAASRANASFTWVA

SEQ ID NO: 6248 - protein, 1212 aa, Homo sapiens
MVLLLILSVLLLKEDVRGSAQSSERRVVAHMPGDIIIGALFSVHHQPTVDKVHERKCGAVREQYGIQRVEAMLHTLERINSDPTLLPNITLGCEIRDSCWHSAVALEQSIEFIRDSLISSEEEEGLVRCVDGSSSSFRSKKPIVGVIGPGSSSVAIQVQNLLQLFNIPQIAYSATSMDLSDKTLFKYFMRVVPSDAQQARAMVDIVKRYNWTYVSAVHTEGNYGESGMEAFKDMSAKEGICIAHSYKIYSNAGEQSFDKLLKKLTSHLPKARVVACFCEGMTVRGLLMAMRRLGLAGEFLLLGSDGWADRYDVTDGYQREAVGGITIKLQSPDVKWFDDYYLKLRPETNHRNPWFQEFWQHRFQCRLEGFPQENSKYNKTCNSSLTLKTHHVQDSKMGFVINAIYSMAYGLHNMQMSLCPGYAGLCDAMKPIDGRKLLESLMKTNFTGVSGDTILFDENGDSPGRYEIMNFKEMGKDYFDYINVGSWDNGELKMDDDEVWSKKSNIIRSVCSEPCEKGQIKVIRKGEVSCCWTCTPCKENEYVFDEYTCKACQLGSWPTDDLTGCDLIPVQYLRWGDPEPIAAVVFACLGLLATLFVTVVFIIYRDTPVVKSSSRELCYIILAGICLGYLCTFCLIAKPKQIYCYLQRIGIGLSPAMSYSALVTKTNRIARILAGSKKKICTKKPRFMSACAQLVIAFILICIQLGIIVALFIMEPPDIMHDYPSIREVYLICNTTNLGVVTPLGYNGLLILSCTFYAFKTRNVPANFNEAKYIAFTMYTTCIIWLAFVPIYFGSNYKIITMCFSVSLSATVALGCMFVPKVYIILAKPERNVRSAFTTSTVVRMHVGDGKSSSAASRSSSLVNLWKRRGSSGETLRYKDRRLAQHKSEIECFTPKGSMGNGGRATMSSSNGKSVTWAQNEKSSRGQHLWQRLSIHINKKENPNQTAVIKPFPKSTESRGLGAGAGAGGSAGGVGATGGAGCAGAGPGGPESPDAGPKALYDVAEAEEHFPAPARPRSPSPISTLSHRAGSASRTDDDVPSLHSEPVARSSSSQGSLMEQISSVVTRFTANISELNSMMLSTAAPSPGVGAPLCSSYLIPKEIQLPTTMTTFAEIQPLPAIEVTGGAQPAAGAQAAGDAARESPAAGPEAAAAKPDLEELVALTPPSPFRDSVDSGSTTPNSPVSESALCIPSSPKYDTLIIRDYTQSSSSL

SEQ ID NO: 6249 - protein, 1180 aa, Homo sapiens
MVLLLILSVLLLKEDVRGSAQSSERRVVAHMPGDIIIGALFSVHHQPTVDKVHERKCGAVREQYGIQRVEAMLHTLERINSDPTLLPNITLGCEIRDSCWHSAVALEQSIEFIRDSLISSEEEEGLVRCVDGSSSSFRSKKPIVGVIGPGSSSVAIQVQNLLQLFNIPQIAYSATSMDLSDKTLFKYFMRVVPSDAQQARAMVDIVKRYNWTYVSAVHTEGNYGESGMEAFKDMSAKEGICIAHSYKIYSNAGEQSFDKLLKKLTSHLPKARVVACFCEGMTVRGLLMAMRRLGLAGEFLLLGSDGWADRYDVTDGYQREAVGGITIKLQSPDVKWFDDYYLKLRPETNHRNPWFQEFWQHRFQCRLEGFPQENSKYNKTCNSSLTLKTHHVQDSKMGFVINAIYSMAYGLHNMQMSLCPGYAGLCDAMKPIDGRKLLESLMKTNFTGVSGDTILFDENGDSPGRYEIMNFKEMGKDYFDYINVGSWDNGELKMDDDEVWSKKSNIIRSVCSEPCEKGQIKVIRKGEVSCCWTCTPCKENEYVFDEYTCKACQLGSWPTDDLTGCDLIPVQYLRWGDPEPIAAVVFACLGLLATLFVTVVFIIYRDTPVVKSSSRELCYIILAGICLGYLCTFCLIAKPKQIYCYLQRIGIGLSPAMSYSALVTKTNRIARILAGSKKKICTKKPRFMSACAQLVIAFILICIQLGIIVALFIMEPPDIMHDYPSIREVYLICNTTNLGVVTPLGYNGLLILSCTFYAFKTRNVPANFNEAKYIAFTMYTTCIIWLAFVPIYFGSNYKIITMCFSVSLSATVALGCMFVPKVYIILAKPERNVRSAFTTSTVVRMHVGDGKSSSAASRSSSLVNLWKRRGSSGETLSSNGKSVTWAQNEKSSRGQHLWQRLSIHINKKENPNQTAVIKPFPKSTESRGLGAGAGAGGSAGGVGATGGAGCAGAGPGGPESPDAGPKALYDVAEAEEHFPAPARPRSPSPISTLSHRAGSASRTDDDVPSLHSEPVARSSSSQGSLMEQISSVVTRFTANISELNSMMLSTAAPSPGVGAPLCSSYLIPKEIQLPTTMTTFAEIQPLPAIEVTGGAQPAAGAQAAGDAARESPAAGPEAAAAKPDLEELVALTPPSPFRDSVDSGSTTPNSPVSESALCIPSSPKYDTLIIRDYTQSSSSL

SEQ ID NO: 6250 - protein, 1180 aa, Homo sapiens; identical to SEQ ID NO: 6249

SEQ ID NO: 6251 - protein, 298 aa, Homo sapiens
MVLLLILSVLLLKEDVRGSAQSSERRVVAHMPGDIIIGALFSVHHQPTVDKVHERKCGAVREQYGIQRVEAMLHTLERINSDPTLLPNITLGCEIRDSCWHSAVALEQSIEFIRDSLISSEEEEGLVRCVDGSSSSFRSKKPIVGVIGPGSSSVAIQVQNLLQLFNIPQIAYSATSMDLSDKTLFKYFMRVVPSDAQQARAMVDIVKRYNWTYVSAVHTEGRGTKKEEMRKRDQTLMLSFMRCVFLRFEEIRWNDSLVYDALENENIQVLSLCFPSSAVIQINTFLSPIALINRLNVT

SEQ ID NO: 6252 - protein, 87 aa, Homo sapiens
  VARIANT 1: note = misc_feature - Xaa can be any naturally occurring amino acid
XQIAYSATSMDLSDKTLFKYFMRVVPSDAQQARAMVDIVKRYNWTYVSAVHTEGRGTKKEEMRKRDQTLMLSFMRFKLFSCLSLQRS

SEQ ID NO: 6253 - protein, 37 aa, Homo sapiens
MWTLVSWVALTAGLVAGTRCPDGQFCPVACCLDPGGA

SEQ ID NO: 6254 - protein, 62 aa, Homo sapiens
MWTLVSWVALTAGLVAGTRCPDGQFCPVACCLDPGGASYSCCRPLLDKWPTTLSRHLGGPCQ

SEQ ID NO: 6255 - protein, 172 aa, Homo sapiens
MWTLVSWVALTAGLVAGTRCPDGQFCPVACCLDPGGASYSCCRPLLDKWPTTLSRHLGGPCQVDAHCSAGHSCIFTVSGTSSCCPFPEASCCEDRVHCCPHGAFCDLVHTRCITPTGTHPLAKKLPAQRTNRAVALSSSVMCPDARSRCPDGSTCCELPSGKYGCCPMPNAT

SEQ ID NO: 6256 - protein, 111 aa, Homo sapiens
MWTLVSWVALTAGLVAGTRCPDGQFCPVACCLDPGGASYSCCRPLLDKWPTTLSRHLGGPCQVDAHCSAGHSCIFTVSGTSSCCPFPEAVACGDGHHCCPRGFHCSADGRS

SEQ ID NO: 6257 - protein, 135 aa, Homo sapiens
MWTLVSWVALTAGLVAGTRCPDGQFCPVACCLDPGGASYSCCRPLLDKWPTTLSRHLGGPCQVDAHCSAGHSCIFTVSGTSSCCPFPEAVACGDGHHCCPRGFHCSADGRSCFQRSGNNSVGAIQCPDSQFECPD

SEQ ID NO: 6258 - protein, 136 aa, Homo sapiens
MWTLVSWVALTAGLVAGTRCPDGQFCPVACCLDPGGASYSCCRPLLDKWPTTLSRHLGGPCQVDAHCSAGHSCIFTVSGTSSCCPFPEAVACGDGHHCCPRGFHCSADGRSCFQRSGNNSVGAIQCPDSQFECPDF

SEQ ID NO: 6259 - protein, 142 aa, Homo sapiens
MWTLVSWVALTAGLVAGTRCPDGQFCPVACCLDPGGASYSCCRPLLDKWPTTLSRHLGGPCQVDAHCSAGHSCIFTVSGTSSCCPFPEAVACGDGHHCCPRGFHCSADGRSCFQRSGNNSVGAIQCPDSQFECPDFSTCCVM

SEQ ID NO: 6260 - protein, 149 aa, Homo sapiens
MWTLVSWVALTAGLVAGTRCPDGQFCPVACCLDPGGASYSCCRPLLDKWPTTLSRHLGGPCQVDAHCSAGHSCIFTVSGTSSCCPFPEAVACGDGHHCCPRGFHCSADGRSCFQRSGNNSVGAIQCPDSQFECPDFSTCCVMVDGSWGC

SEQ ID NO: 6261 - protein, 163 aa, Homo sapiens
MWTLVSWVALTAGLVAGTRCPDGQFCPVACCLDPGGASYSCCRPLLDKWPTTLSRHLGGPCQVDAHCSAGHSCIFTVSGTSSCCPFPEAVACGDGHHCCPRGFHCSADGRSCFQRSGNNSVGAIQCPDSQFECPDFSTCCVMVDGSWGCCPMPQASCCEDRVH

SEQ ID NO: 6262 - protein, 593 aa, Homo sapiens
MWTLVSWVALTAGLVAGTRCPDGQFCPVACCLDPGGASYSCCRPLLDKWPTTLSRHLGGPCQVDAHCSAGHSCIFTVSGTSSCCPFPEAVACGDGHHCCPRGFHCSADGRSCFQRSGNNSVGAIQCPDSQFECPDFSTCCVMVDGSWGCCPMPQASCCEDRVHCCPHGAFCDLVHTRCITPTGTHPLAKKLPAQRTNRAVALSSSVMCPDARSRCPDGSTCCELPSGKYGCCPMPNATCCSDHLHCCPQDTVCDLIQSKCLSKENATTDLLTKLPAHTVGDVKCDMEVSCPDGYTCCRLQSGAWGCCPFTQAVCCEDHIHCCPAGFTCDTQKGTCEQGPHQVPWMEKAPAHLSLPDPQALKRDVPCDNVSSCPSSDTCCQLTSGEWGCCPIPEAVCCSDHQHCCPQGYTCVAEGQCQRGSEIVAGLEKMPARRASLSHPRDIGCDQHTSCPVGQTCCPSLGGSWACCQLPHAVCCEDRQHCCPAGYTCNVKARSCEKEVVSAQPATFLARSPHVGVKDVECGEGHFCHDNQTCCRDNRQGWACCPYRQGVCCADRRHCCPAGFRCAARGTKCLRREAPRWDAPLRDPALRQLL

SEQ ID NO: 6263 - protein, 438 aa, Homo sapiens
MWTLVSWVALTAGLVAGTRCPDGQFCPVACCLDPGGASYSCCRPLLDKWPTTLSRHLGGPCQVDAHCSAGHSCIFTVSGTSSCCPFPEAVACGDGHHCCPRGFHCSADGRSCFQRSGNNSVGAIQCPDSQFECPDFSTCCVMVDGSWGCCPMPQASCCEDRVHCCPHGAFCDLVHTRCITPTGTHPLAKKLPAQRTNRAVALSSSVMCPDARSRCPDGSTCCELPSGKYGCCPMPNATCCSDHLHCCPQDTVCDLIQSKCLSKENATTDLLTKLPAHTVGDVKCDMEVSCPDGYTCCRLQSGAWGCCPFTQAVCCEDHIHCCPAGFTCDTQKGTCEQGPHQVPWMEKAPAHLSLPDPQALKRDVPCDNVSSCPSSDTCCRDNRQGWACCPYRQGVCCADRRHCCPAGFRCAARGTKCLRREAPRWDAPLRDPALRQLL

SEQ ID NO: 6264 - protein, 436 aa, Homo sapiens
MWTLVSWVALTAGLVAGTRCPDGQFCPVACCLDPGGASYSCCRPLLDKWPTTLSRHLGGPCQVDAHCSAGHSCIFTVSGTSSCCPFPEAVACGDGHHCCPRGFHCSADGRSCFQRSGNNSVGAIQCPDSQFECPDFSTCCVMVDGSWGCCPMPQAVCCEDHIHCCPAGFTCDTQKGTCEQGPHQVPWMEKAPAHLSLPDPQALKRDVPCDNVSSCPSSDTCCQLTSGEWGCCPIPEAVCCSDHQHCCPQGYTCVAEGQCQRGSEIVAGLEKMPARRASLSHPRDIGCDQHTSCPVGQTCCPSLGGSWACCQLPHAVCCEDRQHCCPAGYTCNVKARSCEKEVVSAQPATFLARSPHVGVKDVECGEGHFCHDNQTCCRDNRQGWACCPYRQGVCCADRRHCCPAGFRCAARGTKCLRREAPRWDAPLRDPALRQLL

SEQ ID NO: 6265 - protein, 189 aa, Homo sapiens
MWTLVSWVALTAGLVAGTRCPDGQFCPVACCLDPGGASYSCCRPLLDKWPTTLSRHLGGPCQVDAHCSAGHSCIFTVSGTSSCCPFPEAVACGDGHHCCPRGFHCSADGRSCFQRSGNNSVGAIQCPDSQFECPDFSTCCVMVDGSWGCCPMPQGALLSARCLLRPGSHPLHHTHGHPPPGKEAPCPED

SEQ ID NO: 6266 - protein, 191 aa, Homo sapiens
MWTLVSWVALTAGLVAGTRCPDGQFCPVACCLDPGGASYSCCRPLLDKWPTTLSRHLGGPCQVDAHCSAGHSCIFTVSGTSSCCPFPEIKGPCQCRFLCVPQAVACGDGHHCCPRGFHCSADGRSCFQRSGNNSVGAIQCPDSQFECPDFSTCCVMVDGSWGCCPMPQASCCEDRVHCCPHGAFCDLVHTR

SEQ ID NO: 6267 - protein, 388 aa, Homo sapiens
  VARIANT 1: note = misc_feature - Xaa can be any naturally occurring amino acid
XAKKLPAQRTNRAVALSSSVMCPDARSRCPDGSTCCELPSGKYGCCPMPNATCCSDHLHCCPQDTVCDLIQSKCLSKENATTDLLTKLPAHTVGDVKCDMEVSCPDGYTCCRLQSGAWGCCPFTQAVCCEDHIHCCPAGFTCDTQKGTCEQGPHQVPWMEKAPAHLSLPDPQALKRDVPCDNVSSCPSSDTCCQLTSGEWGCCPIPEAVCCSDHQHCCPQGYTCVAEGQCQRGSEIVAGLEKMPARRASLSHPRDIGCDQHTSCPVGQTCCPSLGGSWACCQLPHAVCCEDRQHCCPAGYTCNVKARSCEKEVVSAQPATFLARSPHVGVKDVECGEGHFCHDNQTCCRDNRQGWACCPYRQVSANPHPGAGYGQGPGPTSSNPLAPL

SEQ ID NO: 6268 - protein, 110 aa, Homo sapiens
  VARIANT 1: note = misc_feature - Xaa can be any naturally occurring amino acid
XCPSLGGSWACCQLPHAVCCEDRQHCCPAGYTCNVKARSCEKEVVSAQPATFLARSPHVGVKDVECGEGHFCHDNQTCCRDNRQGWACCPYRQPGVPSVCAGRPRAGTPL

SEQ ID NO: 6269 - protein, 138 aa, Homo sapiens
MRGRELPLVLLALVLCLAPRGRAVPLPAGGGTVLTKMYPRGNHWAVGHLMGKKSTGESSSVSERGSLKQQLREYIRWEEAARNLLGLIEAKENRNHQPPQPKALGNQQPSWDSEDSSNFKDLVDSLLQVLNVKEGTPS

SEQ ID NO: 6270 - protein, 141 aa, Homo sapiens
MRGRELPLVLLALVLCLAPRGRAVPLPAGGGTVLTKMYPRGNHWAVGHLMGKKSTGESSSVSERGSLKQQLREYIRWEEAARNLLGLIEAKENRNHQPPQPKALGNQQPSWDSEDSSNFKDVGSKGKGSQREGRNPQLNQQ

SEQ ID NO: 6271 - protein, 148 aa, Homo sapiens
MRGRELPLVLLALVLCLAPRGRAVPLPAGGGTVLTKMYPRGNHWAVGHLMGKKSTGESSSVSERGSLKQQLREYIRWEEAARNLLGLIEAKENRNHQPPQPKALGNQQPSWDSEDSSNFKDVGSKGKVGRLSAPGSQREGRNPQLNQQ

SEQ ID NO: 6272 - protein, 96 aa, Homo sapiens
  VARIANT 1: note = misc_feature - Xaa can be any naturally occurring amino acid
XHLMGKKSTGESSSVSERGSLKQQLREYIRWEEAARNLLGLIEAKENRNHQPPQPKALGNQQPSWDSEDSSNFKDVGSKGKDSLLQVLNVKEGTPS

SEQ ID NO: 6273 - protein, 35 aa, Homo sapiens
  VARIANT 1: note = misc_feature - Xaa can be any naturally occurring amino acid
XISSLRGIQRIAATSKILSAPGSQREGRNPQLNQQ

SEQ ID NO: 6274 - protein, 496 aa, Homo sapiens
MFAKATRNFLREVDADGDLIAVSNLNDSDKLQLLSLVTKKKRFWCWQRPKYQFLSLTLGDVLIEDQFPSPVVVESDFVKYEGKFANHVSGTLETALGKVKLNLGGSSRVESQSSFGTLRKQEVDLQQLIRDSAERTINLRNPVLQQVLEGRNEVLCVLTQKITTMQKCVISEHMQVEEKCGGIVGIQTKTVQVSATEDGNVTKDSNVVLEIPAATTIAYGVIELYVKLDGQFEFCLLRGKQGGFENKKRIDSVYLDPLVFREFAFIDMPDAAHGISSQDGPLSVLKQATLLLERNFHPFAELPEPQQTALSDIFQAVLFDDELLMVLEPVCDDLVSGLSPTVAVLGELKPRQQQDLVAFLQLVGCSLQGGCPGPEDAGSKQLFMTAYFLVSALAEMPDSAAALLGTCCKLQIIPTLCHLLRALSDDGVSDLEDPTLTPLKDTERFGIVQRLFASADISLERLKSSVKAVILKDSKVFPLLLCITLNGLCALGREHS

SEQ ID NO: 6275 - protein, 356 aa, Homo sapiens
MFAKATRNFLREVDADGDLIAVSNLNDSDKLQLLSLVTKKKRFWCWQRPKYQFLSLTLGDVLIEDQFPSPVVVESDFVKYEGKFANHVSGTLETALGKVKLNLGGSSRVESQSSFGTLRKQEVDLQQLIRDSAERTINLRNPVLQQVLEGRNEVLCVLTQKITTMQKCVISEHMQVEEKCGGIVGIQTKTVQVSATEDGNVTKDSNVVLEIPAATTIAYGVIELYVKLDGQFEFCLLRGKQGGFENKKRIDSVYLDPLVFREFAFIDMPDAAHGISSQDGPLSVLKQATLLLERNFHPFAELPEPQQTALSDIFQAVLFDDELLMVLEPVVSPETSQGSVFTGVFWNRGGGRMELC

SEQ ID NO: 6276 - protein, 496 aa, Homo sapiens; identical to SEQ ID NO: 6274

SEQ ID NO: 6277 - protein, 496 aa, Homo sapiens; identical to SEQ ID NO: 6274

SEQ ID NO: 6278 - protein, 332 aa, Homo sapiens
MQKCVISEHMQVEEKCGGIVGIQTKTVQVSATEDGNVTKDSNVVLEIPAATTIAYGVIELYVKLDGQFEFCLLRGKQGGFENKKRIDSVYLDPLVFREFAFIDMPDAAHGISSQDGPLSVLKQATLLLERNFHPFAELPEPQQTALSDIFQAVLFDDELLMVLEPVCDDLVSGLSPTVAVLGELKPRQQQDLVAFLQLVGCSLQGGCPGPEDAGSKQLFMTAYFLVSALAEMPDSAAALLGTCCKLQIIPTLCHLLRALSDDGVSDLEDPTLTPLKDTERFGIVQRLFASADISLERLKSSVKAVILKDSKVFPLLLCITLNGLCALGREHS

SEQ ID NO: 6279 - protein, 332 aa, Homo sapiens; identical to SEQ ID NO: 6278

SEQ ID NO: 6280 - protein, 55 aa, Homo sapiens
QLFMTAYFLVSALAEMPDSAAALLGTCCKLQIIPTLCHLVSNLPGGTLEWIGMGK

SEQ ID NO: 6281 - protein, 155 aa, Homo sapiens
  VARIANT 1: note = misc_feature - Xaa can be any naturally occurring amino acid
XAATTIAYGVIELYVKLDGQFEFCLLRGKQGGFENKKRIDSVYLDPLVFREFAFIDMPDAAHGISSQDGPLSVLKQATLLLERNFHPFAELPEPQQTALSDIFQAVLFDDELLMVLEPVKDILGRSSSLTLSCTNGESHTSCQPSSHPDSVSSLS

SEQ ID NO: 6282 - protein, 192 aa, Homo sapiens
  VARIANT 1: note = misc_feature - Xaa can be any naturally occurring amino acid
XEEKCGGIVGIQTKTVQVSATEDGNVTKDSNVVLEIPAATTIAYGVIELYVKLDGQFEFCLLRGKQGGFENKKRIDSVYLDPLVFREFAFIDMPDAAHGISSQDGPLSVLKQATLLLERNFHPFAELPEPQQTALSDIFQAVLFDDELLMVLEPVQKDILGRSSSLTLSCTNGESHTSCQPSSHPDSVSSLS

SEQ ID NO: 6283 - protein, 211 aa, Homo sapiens
MAKMELSKAFSGQRTLLSAILSMLSLSFSTTSLLSNYWFVGTQKVPKPLCEKGLAAKCFDMPVSLDGDTNTSTQEVVQYNWETGDDRFSFRSFRSGMWLSCEETVEEPAKSEMEEELKKCVYLHLYLLLCHLALLHPQSWKQFRALRSSGTAAAKGERCRSFIELTPPAKRGEKGLLEFATLQGPCHPTLRFGGKRLMEKASLPSPPLGLC

SEQ ID NO: 6284 - protein, 298 aa, Homo sapiens
MAKMELSKAFSGQRTLLSAILSMLSLSFSTTSLLSNYWFVGTQKVPKPLCEKGLAAKCFDMPVSLDGDTNTSTQEVVQYNWETGDDRFSFRSFRSGMWLSCEETVEEPALLHPQSWKQFRALRSSGTAAAKGERCRSFIELTPPAKRGLLGMVAHMMYSQVFQATVNLGPEDWRPHVWNYGWAFYMAWLSFTCCMASAVTTFNTYTRMVLEFKCKHSKSFKENPNCLPHHHQCFPRRLSSAAPTVGPLTSYHQYHNQPIHSVSEGVDFYSELRNKGFQRGASQELKEAVRSSVEEEQC

SEQ ID NO: 6285 - protein, 326 aa, Homo sapiens
MAKMELSKAFSGQRTLLSAILSMLSLSFSTTSLLSNYWFVGTQKVPKPLCEKGLAAKCFDMPVSLDGDTNTSTQEVVQYNWETGDDRFSFRSFRSGMWLSCEETVEEPGERCRSFIELTPPAKREILWLSLGTQITYIGLQFISFLLLLTDLLLTGNPACGLKLSAFAAVSSVLSGLLGMVAHMMYSQVFQATVNLGPEDWRPHVWNYGWAFYMAWLSFTCCMASAVTTFNTYTRMVLEFKCKHSKSFKENPNCLPHHHQCFPRRLSSAAPTVGPLTSYHQYHNQPIHSVSEGVDFYSELRNKGFQRGASQELKEAVRSSVEEEQC

SEQ ID NO: 6286 - protein, 285 aa, Homo sapiens
MAKMELSKAFSGQRTLLSAILSMLSLSFSTTSLLSNYWFVGTQKVPKPLCEKGLAAKCFDMPVSLDGDTNTSTQEVVQYNWETGDDRFSFRSFRSGMWLSCEETVEEPGERCRSFIELTPPAKRGEKGLLEFATLQGPCHPTLRFGGKRLMEKASLPSPPLGLCGKNPMVIPGNADHLHRTSIHQLPPATNRLATHWEPCLWAQTERLCCCFLCPVRSPGDGGPHDVFTSLPSDCQLGSRRLETTCLELWLGLLHGLALLHLLHGVGCHHLQHVHQDGAGVQVQA

SEQ ID NO: 6287 - protein, 275 aa, Homo sapiens
MAKMELSKAFSGQRTLLSAILSMLSLSFSTTSLLSNYWFVGTQKVPKPLCEKGLAAKCFDMPVSLDGDTNTSTQEVVQYNWETGDDRFSFRSFRSGMWLSCEETVEEPGERCRSFIELTPPAKRGLLGMVAHMMYSQVFQATVNLGPEDWRPHVWNYGWAFYMAWLSFTCCMASAVTTFNTYTRMVLEFKCKHSKSFKENPNCLPHHHQCFPRRLSSAAPTVGPLTSYHQYHNQPIHSVSEGVDFYSELRNKGFQRGASQELKEAVRSSVEEEQC

SEQ ID NO: 6288 - protein, 220 aa, Homo sapiens
MSDPSQLTQNVCLTQEMELSKAFSGQRTLLSAILSMLSLSFSTTSLLSNYWFVGTQKVPKPLCEKGLAAKCFDMPVSLDGDTNTSTQEVVQYNWETGDDRFSFRSFRSGMWLSCEETVEEPAKSEMEEELKKCVYLHLYLLLCHLALLHPQSWKQFRALRSSGTAAAKGERCRSFIELTPPAKREILWLSLGTQITYIGLQFISFLLLLTDLLLTGNPAC

SEQ ID NO: 6289 - protein, 321 aa, Homo sapiens
MSDPSQLTQNVCLTQEMELSKAFSGQRTLLSAILSMLSLSFSTTSLLSNYWFVGTQKVPKPLCEKGLAAKCFDMPVSLDGDTNTSTQEVVQYNWETGDDRFSFRSFRSGMWLSCEETVEEPALLHPQSWKQFRALRSSGTAAAKGERCRSFIELTPPAKRGEKGLLEFATLQGPCHPTLRFGGKRLMEKASLPSPPLGLCGKNPMVIPGNADHLHRTSIHQLPPATNRLATHWEPCLWAQTERLCCCFLCPVRSPGDGGPHDVFTSLPSDCQLGSRRLETTCLELWLGLLHGLALLHLLHGVGCHHLQHVHQDGAGVQVQA

SEQ ID NO: 6290 - protein, 339 aa, Homo sapiens
MSDPSQLTQNVCLTQEMELSKAFSGQRTLLSAILSMLSLSFSTTSLLSNYWFVGTQKVPKPLCEKGLAAKCFDMPVSLDGDTNTSTQEVVQYNWETGDDRFSFRSFRSGMWLSCEETVEEPGERCRSFIELTPPAKREILWLSLGTQITYIGLQFISFLLLLTDLLLTGNPACGLKLSAFAAVSSVLSGLLGMVAHMMYSQVFQATVNLGPEDWRPHVWNYGWAFYMAWLSFTCCMASAVTTFNTYTRMVLEFKCKHSKSFKENPNCLPHHHQCFPRRLSSAAPTVGPLTSYHQYHNQPIHSVSEGVDFYSELRNKGFQRGASQELKEAVRSSVEEEQC

SEQ ID NO: 6291 - protein, 236 aa, Homo sapiens
MSDPSQLTQNVCLTQEMELSKAFSGQRTLLSAILSMLSLSFSTTSLLSNYWFVGTQKVPKPLCEKGLAAKCFDMPVSLDGDTNTSTQEVVQYNWETGDDRFSFRSFRSGMWLSCEETVEEPGERCRSFIELTPPAKRGEKGLLEFATLQGPCHPTLRFGGKRLMEKASLPSPPLGLCGKNPMVIPGNADHLHRTSIHQLPPATNRLATHWEPCLWAQTERLCCCFLCPVRSPGDGG

SEQ ID NO: 6292 - protein, 748 aa, Homo sapiens
MAEEEALRGNSDPWPNSMVVEHPEFLKAGKEPGLQIWRVEKFDLVPVPTNLYGDFFTGDAYVILKTVQLRNGNLQYDLHYWLGNECSQDESGAAAIFTVQLDDYLNGRAVQHREVQGFESATFLGYFKSGLKYKKGGVASGFKHVVPNEVVVQRLFQVKGRRVVRATEVPVSWESFNNGDCFILDLGNNIHQWCGSNSNRYERLKATQVSKGIRDNERSGRARVHVSEEGTEPEAMLQVLGPKPALPAGTEDTAKEDAANRKLAKLYKVSNGAGTMSVSLVADENPFAQGALKSEDCFILDHGKDGKIFVWKGKQANTEERKAALKTASDFITKMDYPKQTQVSVLPEGGETPLFKQFFKNWRDPDQTDGLGLSYLSSHIANVERVPFDAATLHTSTAMAAQHGMDDDGTGQKQIWRIEGSNKVPVDPATYGQFYGGDSYIILYNYRHGGRQGQIIYNWQGAQSTQDEVAASAILTAQLDEELGGTPVQSRVVQGKEPAHLMSLFGGKPMIIYKGGTSREGGQTAPASTRLFQVRANSAGATRAVEVLPKAGALNSNDAFVLKTPSAAYLWVGTGASEAEKTGAQELLRVLRAQPVQVAEGSEPDGFWEALGGKAAYRTSPRLKDKKMDAHPPRLFACSNKIGRFVIEEVPGELMQEDLATDDVMLLDTWDQVFVWVGKDSQEEEKTEALTSAKRYIETDPANRDRRTPITVVKQGFEPPSFVGWFLGWDDDYWSVDPLDRAMAELAA

SEQ ID NO: 6293 - protein, 782 aa, Homo sapiens
MAPHRPAPALLCALSLALCALSLPVRAATASRGASQAGAPQGRVPEARPNSMVVEHPEFLKAGKEPGLQIWRVEKFDLVPVPTNLYGDFFTGDAYVILKTVQLRNGNLQYDLHYWLGNECSQDESGAAAIFTVQLDDYLNGRAVQHREVQGFESATFLGYFKSGLKYKKGGVASGFKHVVPNEVVVQRLFQVKGRRVVRATEVPVSWESFNNGDCFILDLGNNIHQWCGSNSNRYERLKATQVSKGIRDNERSGRARVHVSEEGTEPEAMLQVLGPKPALPAGTEDTAKEDAANRKLAKLYKVSNGAGTMSVSLVADENPFAQGALKSEDCFILDHGKDGKIFVWKGKQANTEERKAALKTASDFITKMDYPKQTQVSVLPEGGETPLFKQFFKNWRDPDQTDGLGLSYLSSHIANVERVPFDAATLHTSTAMAAQHGMDDDGTGQKQIWRIEGSNKVPVDPATYGQFYGGDSYIILYNYRHGGRQGQIIYNWQGAQSTQDEVAASAILTAQLDEELGGTPVQSRVVQGKEPAHLMSLFGGKPMIIYKGGTSREGGQTAPASTRLFQVRANSAGATRAVEVLPKAGALNSNDAFVLKTPSAAYLWVGTGASEAEKTGAQELLRVLRAQPVQVAEGSEPDGFWEALGGKAAYRTSPRLKDKKMDAHPPRLFACSNKIGRFVIEEVPGELMQEDLATDDVMLLDTWDQVFVWVGKDSQEEEKTEALTSAKRYIETDPANRDRRTPITVVKQGFEPPSFVGWFLGWDDDYWSVDPLDRAMAELAA

SEQ ID NO: 6294 - protein, 232 aa, Homo sapiens
MEKLFCCFPNSMVVEHPEFLKAGKEPGLQIWRVEKFDLVPVPTNLYGDFFTGDAYVILKTVQLRNGNLQYDLHYWLGNECSQDESGAAAIFTVQLDDYLNGRAVQHREVQGFESATFLGYFKSGLKYKKGGVASGFKHVVPNEVVVQRLFQVKGRRVVRATEVPVSWESFNNGDCFILDLGNNIHQWCGSNSNRYERLKATQVSKGIRDNERSGRARVHVSEEGTEPEAMLQ

SEQ ID NO: 6295 - protein, 742 aa, Homo sapiens
MEKLFCCFPNSMVVEHPEFLKAGKEPGLQIWRVEKFDLVPVPTNLYGDFFTGDAYVILKTVQLRNGNLQYDLHYWLGNECSQDESGAAAIFTVQLDDYLNGRAVQHREVQGFESATFLGYFKSGLKYKKGGVASGFKHVVPNEVVVQRLFQVKGRRVVRATEVPVSWESFNNGDCFILDLGNNIHQWCGSNSNRYERLKATQVSKGIRDNERSGRARVHVSEEGTEPEAMLQVLGPKPALPAGTEDTAKEDAANRKLAKLYKVSNGAGTMSVSLVADENPFAQGALKSEDCFILDHGKDGKIFVWKGKQANTEERKAALKTASDFITKMDYPKQTQVSVLPEGGETPLFKQFFKNWRDPDQTDGLGLSYLSSHIANVERVPFDAATLHTSTAMAAQHGMDDDGTGQKQIWRIEGSNKVPVDPATYGQFYGGDSYIILYNYRHGGRQGQIIYNWQGAQSTQDEVAASAILTAQLDEELGGTPVQSRVVQGKEPAHLMSLFGGKPMIIYKGGTSREGGQTAPASTRLFQVRANSAGATRAVEVLPKAGALNSNDAFVLKTPSAAYLWVGTGASEAEKTGAQELLRVLRAQPVQVAEGSEPDGFWEALGGKAAYRTSPRLKDKKMDAHPPRLFACSNKIGRFVIEEVPGELMQEDLATDDVMLLDTWDQVFVWVGKDSQEEEKTEALTSAKRYIETDPANRDRRTPITVVKQGFEPPSFVGWFLGWDDDYWSVDPLDRAMAELAA

SEQ ID NO: 6296 - protein, 767 aa, Homo sapiens
MNTGLTRLLWPSWLPDGDMSHPQPELFLFPKAQPNSMVVEHPEFLKAGKEPGLQIWRVEKFDLVPVPTNLYGDFFTGDAYVILKTVQLRNGNLQYDLHYWLGNECSQDESGAAAIFTVQLDDYLNGRAVQHREVQGFESATFLGYFKSGLKYKKGGVASGFKHVVPNEVVVQRLFQVKGRRVVRATEVPVSWESFNNGDCFILDLGNNIHQWCGSNSNRYERLKATQVSKGIRDNERSGRARVHVSEEGTEPEAMLQVLGPKPALPAGTEDTAKEDAANRKLAKLYKVSNGAGTMSVSLVADENPFAQGALKSEDCFILDHGKDGKIFVWKGKQANTEERKAALKTASDFITKMDYPKQTQVSVLPEGGETPLFKQFFKNWRDPDQTDGLGLSYLSSHIANVERVPFDAATLHTSTAMAAQHGMDDDGTGQKQIWRIEGSNKVPVDPATYGQFYGGDSYIILYNYRHGGRQGQIIYNWQGAQSTQDEVAASAILTAQLDEELGGTPVQSRVVQGKEPAHLMSLFGGKPMIIYKGGTSREGGQTAPASTRLFQVRANSAGATRAVEVLPKAGALNSNDAFVLKTPSAAYLWVGTGASEAEKTGAQELLRVLRAQPVQVAEGSEPDGFWEALGGKAAYRTSPRLKDKKMDAHPPRLFACSNKIGRFVIEEVPGELMQEDLATDDVMLLDTWDQVFVWVGKDSQEEEKTEALTSAKRYIETDPANRDRRTPITVVKQGFEPPSFVGWFLGWDDDYWSVDPLDRAMAELAA

SEQ ID NO: 6297 - protein, 739 aa, Homo sapiens
MPLCTPNSMVVEHPEFLKAGKEPGLQIWRVEKFDLVPVPTNLYGDFFTGDAYVILKTVQLRNGNLQYDLHYWLGNECSQDESGAAAIFTVQLDDYLNGRAVQHREVQGFESATFLGYFKSGLKYKKGGVASGFKHVVPNEVVVQRLFQVKGRRVVRATEVPVSWESFNNGDCFILDLGNNIHQWCGSNSNRYERLKATQVSKGIRDNERSGRARVHVSEEGTEPEAMLQVLGPKPALPAGTEDTAKEDAANRKLAKLYKVSNGAGTMSVSLVADENPFAQGALKSEDCFILDHGKDGKIFVWKGKQANTEERKAALKTASDFITKMDYPKQTQVSVLPEGGETPLFKQFFKNWRDPDQTDGLGLSYLSSHIANVERVPFDAATLHTSTAMAAQHGMDDDGTGQKQIWRIEGSNKVPVDPATYGQFYGGDSYIILYNYRHGGRQGQIIYNWQGAQSTQDEVAASAILTAQLDEELGGTPVQSRVVQGKEPAHLMSLFGGKPMIIYKGGTSREGGQTAPASTRLFQVRANSAGATRAVEVLPKAGALNSNDAFVLKTPSAAYLWVGTGASEAEKTGAQELLRVLRAQPVQVAEGSEPDGFWEALGGKAAYRTSPRLKDKKMDAHPPRLFACSNKIGRFVIEEVPGELMQEDLATDDVMLLDTWDQVFVWVGKDSQEEEKTEALTSAKRYIETDPANRDRRTPITVVKQGFEPPSFVGWFLGWDDDYWSVDPLDRAMAELAA

SEQ ID NO: 6298 - protein, 731 aa, Homo sapiens
MVVEHPEFLKAGKEPGLQIWRVEKFDLVPVPTNLYGDFFTGDAYVILKTVQLRNGNLQYDLHYWLGNECSQDESGAAAIFTVQLDDYLNGRAVQHREVQGFESATFLGYFKSGLKYKKGGVASGFKHVVPNEVVVQRLFQVKGRRVVRATEVPVSWESFNNGDCFILDLGNNIHQWCGSNSNRYERLKATQVSKGIRDNERSGRARVHVSEEGTEPEAMLQVLGPKPALPAGTEDTAKEDAANRKLAKLYKVSNGAGTMSVSLVADENPFAQGALKSEDCFILDHGKDGKIFVWKGKQANTEERKAALKTASDFITKMDYPKQTQVSVLPEGGETPLFKQFFKNWRDPDQTDGLGLSYLSSHIANVERVPFDAATLHTSTAMAAQHGMDDDGTGQKQIWRIEGSNKVPVDPATYGQFYGGDSYIILYNYRHGGRQGQIIYNWQGAQSTQDEVAASAILTAQLDEELGGTPVQSRVVQGKEPAHLMSLFGGKPMIIYKGGTSREGGQTAPASTRLFQVRANSAGATRAVEVLPKAGALNSNDAFVLKTPSAAYLWVGTGASEAEKTGAQELLRVLRAQPVQVAEGSEPDGFWEALGGKAAYRTSPRLKDKKMDAHPPRLFACSNKIGRFVIEEVPGELMQEDLATDDVMLLDTWDQVFVWVGKDSQEEEKTEALTSAKRYIETDPANRDRRTPITVVKQGFEPPSFVGWFLGWDDDYWSVDPLDRAMAELAA

SEQ ID NO: 6299 - protein, 260 aa, Homo sapiens
MVVEHPEFLKAGKEPGLQIWRVEKFDLVPVPTNLYGDFFTGDAYVILKTVQLRNGNLQYDLHYWLGNECSQDESGAAAIFTVQLDDYLNGRAVQHREVQGFESATFLGYFKSGLKYKKGGVASGFKHVVPNEVVVQRLFQVKGRRVVRATEVPVSWESFNNGDCFILDLGNNIHQWCGSNSNRYERLKATQVSKGIRDNERSGRARVHVSEEGTEPEAMLQVLGPKPALPAGTEDTAKEDAANRKLAKLYKVSNGAGTMS

SEQ ID NO: 6300 - protein, 67 aa, Homo sapiens
  VARIANT 1: note = misc_feature - Xaa can be any naturally occurring amino acid
XKGGTSREGGQTAPASTRLFQVRANSAGATRAVEVISRSWNTEGIGLPETSQLNDQISRHRNGGRGW

SEQ ID NO: 6301 - protein, 329 aa, Homo sapiens
MESFLTSMGKFMKLIPDHRPKDLESIIRPKCQVIYFPIRFPDVSRFMPKHKTTHLKKMLGLKGNGGAVLSMALPFQPEQRDSEDLLKNFNSECDTHCGLDTARQEYLGNSLRQESDLKKSTSSDNSSSHHGENKQNLTVDPCDILGGVDNQQRLLHIVWPHRWEHDKDPESFFKVLMHLKDLGLNFHVSVLGETFTDVPDIFSEAKKALGSSVLHWGYLPSKDDYFQVLCMADVVISTAKHEFFGVAMLEAVYCGCYPLCPKDLVYPEIFPAEYLYSTPEQLSKRLQNFCKRPDIIRKHLYKGEIAPFSWAALHGKFRSLLTTEPREDL

SEQ ID NO: 6302 - protein, 426 aa, Homo sapiens
MLTLHVWIWFGFMPCPNLMQNYNHQCCRTLFASSVLNLTELAALRPDLGKLKKILYFHENQLIYPVKKCQERDFQYGYNQILSCLVADVVVFNSVFNMESFLTSMGKFMKLIPDHRPKDLESIIRPKCQVIYFPIRFPDVSRFMPKHKTTHLKKMLGLKGNGGAVLSMALPFQPEQRDSEDLLKNFNSECDTHCGLDTARQEYLGNSLRQESDLKKSTSSDNSSSHHGENKQNLTVDPCDILGGVDNQQRLLHIVWPHRWEHDKDPESFFKVLMHLKDLGLNFHVSVLGETFTDVPDIFSEAKKALGSSVLHWGYLPSKDDYFQVLCMADVVISTAKHEFFGVAMLEAVYCGCYPLCPKDLVYPEIFPAEYLYSTPEQLSKRLQNFCKRPDIIRKHLYKGEIAPFSWAALHGKFRSLLTTEPREDL

SEQ ID NO: 6303 - protein, 66 aa, Homo sapiens
MSILIIEAFYGGSHKQLVDLLQEELGDCVVYTLPAKKWHWRARTSALYFSQTIPISEHYRQSEITN

SEQ ID NO: 6304 - protein, 66 aa, Homo sapiens; identical to SEQ ID NO: 6303

SEQ ID NO: 6305 - protein, 99 aa, Homo sapiens
MSILIIEAFYGGSHKQLVDLLQEELGDCVVYTLPAKKWHWRARTSALYFSQTIPISEHYRTLFASSVLNLTELAALRPDLGKLKKILYFHENQLIYPVK

SEQ ID NO: 6306 - protein, 173 aa, Homo sapiens
MSILIIEAFYGGSHKQLVDLLQEELGDCVVYTLPAKKWHWRARTSALYFSQTIPISEHYRTLFASSVLNLTELAALRPDLGKLKKILYFHENQLIYPVKKCQERDFQYGYNQILSCLVADVVVFNSVFNMESFLTSMGKFMKLIPDHRPKDLESIIRPKCQVIYFPIRFPDVS

SEQ ID NO: 6307 - protein, 340 aa, Homo sapiens
MSILIIEAFYGGSHKQLVDLLQEELGDCVVYTLPAKKWHWRARTSALYFSQTIPISEHYRTLFASSVLNLTELAALRPDLGKLKKILYFHENQLIYPVKKCQERDFQYGYNQILSCLVADVVVFNSVFNMESFLTSMGKFMKLIPDHRPKDLESIIRPKCQVIYFPIRFPDVSREHDKDPESFFKVLMHLKDLGLNFHVSVLGETFTDVPDIFSEAKKALGSSVLHWGYLPSKDDYFQVLCMADVVISTAKHEFFGVAMLEAVYCGCYPLCPKDLVYPEIFPAEYLYSTPEQLSKRLQNFCKRPDIIRKHLYKGEIAPFSWAALHGKFRSLLTTEPREDL

SEQ ID NO: 6308 - protein, 376 aa, Homo sapiens
MSILIIEAFYGGSHKQLVDLLQEELGDCVVYTLPAKKWHWRARTSALYFSQTIPISEHYRTLFASSVLNLTELAALRPDLGKLKKILYFHENQLIYPVKKCQERDFQYGYNQILSCLVADVVVFNSVFNMESFLTSMGKFMKLIPDHRPKDLESIIRPKCQVIYFPIRFPDVSRFMPKHKTTHLKKMLGLKGNGGAVLSMALPFQPEQRDSEDLLKNFNSECDTHCGLDTARQEYLGNSLRQESDLKKSTSSDNSSSHHGENKQNLTVDPCDILGGVDNQQRLLHIVWPHRWEHDKDPESFFKVLMHLKDLGLNFHVSVLGETFTDVPGWKLCTVGVTHFVLKIWFIPKYFQLNICILHLNSFQKGSRISARDQIL

SEQ ID NO: 6309 - protein, 458 aa, Homo sapiens
MSILIIEAFYGGSHKQLVDLLQEELGDCVVYTLPAKKWHWRARTSALYFSQTIPISEHYRTLFASSVLNLTELAALRPDLGKLKKILYFHENQLIYPVKKCQERDFQYGYNQILSCLVADVVVFNSVFNMESFLTSMGKFMKLIPDHRPKDLESIIRPKCQVIYFPIRFPDVSRFMPKHKTTHLKKMLGLKGNGGAVLSMALPFQPEQRDSEDLLKNFNSECDTHCGLDTARQEYLGNSLRQESDLKKSTSSDNSSSHHGENKQNLTVDPCDILGGVDNQQRLLHIVWPHRWEHDKDPESFFKVLMHLKDLGLNFHVSVLGETFTDVPDIFSEAKKALGSSVLHWGYLPSKDDYFQVLCMADVVISTAKHEFFGVAMLEAVYCGCYPLCPKDLVYPEIFPAEYLYSTPEQLSKRLQNFCKRPDIIRKHLYKGEIAPFSWAALHGKFRSLLTTEPREDL

SEQ ID NO: 6310 - protein, 373 aa, Homo sapiens
MSILIIEAFYGGSHKQLVDLLQEELGDCVVYTLPAKKWHWRARTSALYFSQTIPISEHYRTLFASSVLNLTELAALRPDLGKLKKILYFHENQLIYPVKKCQERDFQYGYNQILSCLVADVVVFNSVFNMESFLTSMGKFMKLIPDHRPKDLESIIRPKCQVIYFPIRFPDVSRFMPKHKTTHLKKMLGLKGNGGAVLSMALPFQPEQRDSEDLLKNFNSECDTHCGLDTARQEYLGNSLRQESDLKKSTSSDNSSSHHGENKQNLTVDPCDILGGVDNQQRLLHIVWPHRWLEAVYCGCYPLCPKDLVYPEIFPAEYLYSTPEQLSKRLQNFCKRPDIIRKHLYKGEIAPFSWAALHGKFRSLLTTEPREDL

SEQ ID NO: 6311 - protein, 376 aa, Homo sapiens; identical to SEQ ID NO: 6308

SEQ ID NO: 6312 - protein, 458 aa, Homo sapiens; identical to SEQ ID NO: 6309

SEQ ID NO: 6313 - protein, 458 aa, Homo sapiens; identical to SEQ ID NO: 6309

SEQ ID NO: 6314 - protein, 458 aa, Homo sapiens; identical to SEQ ID NO: 6309

SEQ ID NO: 6315 - protein, 236 aa, Homo sapiens
MRTVSLCHPDWSALASSWLTAASTSWAQYGNFIDKLRLFTRGGSGGMGYPRLGGEGGKGGDVWVVAQNRMTLKQLKDRYPRKRFVAGVGANSKISALKGSKGKDCEIPVPVGISVTDENGKIIGELNKENDRILVAQGGLGGKLLTNFLPLKGQKRIIHLDLKLIADVGLVGFPNAGKSSLLSCVSHAKPAIADYAFTTLKPELGKIMYSDFKQISVADLPGLIEGAHMNKGMGHK

SEQ ID NO: 6316 - protein, 107 aa, Homo sapiens
MRYGNFIDKLRLFTRGGSGGMGYPRLGGEGGKGGDVWVVAQNRMTLKQLKDRYPRKRFVAGVGANSKISALKGSKGKDCEIPVPVGISVTDENGKIIDSQMLENPLC

SEQ ID NO: 6317 - protein, 210 aa, Homo sapiens
MRYGNFIDKLRLFTRGGSGGMGYPRLGGEGGKGGDVWVVAQNRMTLKQLKDRYPRKRFVAGVGANSKISALKGSKGKDCEIPVPVGISVTDENGKIIGELNKENDRILVAQGGLGGKLLTNFLPLKGQKRIIHLDLKLIADVGLVGFPNAGKSSLLSCVSHAKPAIADYAFTTLKPELGKIMYSDFKQISVADLPGLIEGAHMNKGMGHK

SEQ ID NO: 6318 - protein, 70 aa, Homo sapiens
MRYGNFIDKLRLFTRGGSGGMGYPRLGGEGGKGGDVWVVAQNRMTLKQLKDRYPRKRFVAGVGANSKRTQ

SEQ ID NO: 6319 - protein, 308 aa, Homo sapiens
MVHCSCVLFRKYGNFIDKLRLFTRGGSGGMGYPRLGGEGGKGGDVWVVAQNRMTLKQLKDRYPRKRFVAGVGANSKFPNAGKSSLLSCVSHAKPAIADYAFTTLKPELGKIMYSDFKQISVADLPGLIEGAHMNKGMGHKFLKHIERTRQLLFVVDISGFQLSSHTQYRTAFETIILLTKELELYKEELQTKPALLAVNKMDLPDAQDKFHELMSQLQNPKDFLHLFEKNMIPERTVEFQHIIPISAVTGEGIEELKNCIRKSLDEQANQENDALHKKQLLNLWISDTMSSTEPPSKHAVTTSKMDII

SEQ ID NO: 6320 - protein, 116 aa, Homo sapiens
MVHCSCVLFRKYGNFIDKLRLFTRGGSGGMGYPRLGGEGGKGGDVWVVAQNRMTLKQLKDRYPRKRFVAGVGANSKISALKGSKGKDCEIPVPVGISVTDENGKIIDSQMLENPLC

SEQ ID NO: 6321 - protein, 387 aa, Homo sapiens
MVHCSCVLFRKYGNFIDKLRLFTRGGSGGMGYPRLGGEGGKGGDVWVVAQNRMTLKQLKDRYPRKRFVAGVGANSKISALKGSKGKDCEIPVPVGISVTDENGKIIGELNKENDRILVAQGGLGGKLLTNFLPLKGQKRIIHLDLKLIADVGLVGFPNAGKSSLLSCVSHAKPAIADYAFTTLKPELGKIMYSDFKQISVADLPGLIEGAHMNKGMGHKFLKHIERTRQLLFVVDISGFQLSSHTQYRTAFETIILLTKELELYKEELQTKPALLAVNKMDLPDAQDKFHELMSQLQNPKDFLHLFEKNMIPERTVEFQHIIPISAVTGEGIEELKNCIRKSLDEQANQENDALHKKQLLNLWISDTMSSTEPPSKHAVTTSKMDII

SEQ ID NO: 6322 - protein, 243 aa, Homo sapiens
MVHCSCVLFRKYGNFIDKLRLFTRGGSGGMGYPRLGGEGGKGGDVWVVAQNRMTLKQLKDRYPRKRFVAGVGANSKISALKGSKGKDCEIPVPVGISVTDENGKIIVTTLKPELGKIMYSDFKQISVADLPGLIEGAHMNKGMGHKFLKHIERTRQLLFVVDISGFQLSSHTQYRTAFETIILLTKELELYKEELQTKPALLAVNKMDLPDAQDKFHELMSQLQNPKDFLHLFEKNMIPERTV

SEQ ID NO: 6323 - protein, 79 aa, Homo sapiens
MVHCSCVLFRKYGNFIDKLRLFTRGGSGGMGYPRLGGEGGKGGDVWVVAQNRMTLKQLKDRYPRKRFVAGVGANSKRTQ

SEQ ID NO: 6324 - protein, 115 aa, Homo sapiens
MNAFLLSALCLLGAWAALAGGVTVQDGNFSFSLESVKKLKDLQEPQEPRVGKLRNFAPIPGEPVVPILCSNPNFPEELKPLCKEPNAQEILQRLEEIAEDPGTCEICAYAACTGC

SEQ ID NO: 6325 - protein, 112 aa, Homo sapiens
MGCRAASGLLPGVAVVLLLLLQSTQSVYIQYQGFRVQLESMKKLSDLEAQWAPSPRLQAQSLLPAVCHHPALPQDLQPVCASQEASSIFKTLRTIANDDCELCVNVACTGCL

SEQ ID NO: 6326 - protein, 134 aa, Homo sapiens
MARGSAVAWAALGPLLWGCALGLQGGMLYPQESPSRECKELDGLWSFRADFSDNRRRGFEEQWYRRPLWESGPTVDMPVPSSFNDISQDWRLRHFVGWVWYEREVILPERWTQDLRTRVVLRIGSAHSYAIVGW

SEQ ID NO: 6327 - protein, 144 aa, Homo sapiens
MARGSAVAWAALGPLLWGCALGLQGGMLYPQESPSRECKELDGLWSFRADFSDNRRRGFEEQWYRRPLWESGPTVDMPVPSSFNDISQDWRLRHFVGWVWYEREVILPERWTQDLRTRVVLRIGSAHSYAIVVSQGLLCPEHIF

SEQ ID NO: 6328 - protein, 144 aa, Homo sapiens; identical to SEQ ID NO: 6327

SEQ ID NO: 6329 - protein, 651 aa, Homo sapiens
MARGSAVAWAALGPLLWGCALGLQGGMLYPQESPSRECKELDGLWSFRADFSDNRRRGFEEQWYRRPLWESGPTVDMPVPSSFNDISQDWRLRHFVGWVWYEREVILPERWTQDLRTRVVLRIGSAHSYAIVWVNGVDTLEHEGGYLPFEADISNLVQVGPLPSRLRITIAINNTLTPTTLPPGTIQYLTDTSKYPKGYFVQNTYFDFFNYAGLQRSVLLYTTPTTYIDDITVTTSVEQDSGLVNYQISVKGSNLFKLEVRLLDAENKVVANGTGTQGQLKVPGVSLWWPYLMHERPAYLYSLEVQLTAQTSLGPVSDFYTLPVGIRTVAVTKSQFLINGKPFYFHGVNKHEDADIRGKGFDWPLLVKDFNLLRWLGANAFRTSHYPYAEEVMQMCDRYGIVVIDECPGVGLALPQFFNNVSLHHHMQVMEEVVRRDKNHPAVVMWSVANEPASHLESAGYYLKMVIAHTKSLDPSRPVTFVSNSNYAADKGAPYVDVICLNSYYSWYHDYGHLELIQLQLATQFENWYKKYQKPIIQSEYGAETIAGFHQDPPLMFTEEYQKSLLEQYHLGLDQKRRKYVVGELIWNFADFMTEQSPTRVLGNKKGIFTRQRQPKSAAFLLRERYWKIANETRYPHSVAKSQCLENSLFT

SEQ ID NO: 6330 - protein, 505 aa, Homo sapiens
MARGSAVAWAALGPLLWGCALGLQGGMLYPQESPSRECKELDGLWSFRADFSDNRRRGFEEQWYRRPLWESGPTVDMPVPSSFNDISQDWRLRHFVGWVWYEREVILPERWTQDLRTRVVLRIGSAHSYAIVWVNGVDTLEHEGGYLPFEADISNLVQVQLTAQTSLGPVSDFYTLPVGIRTVAVTKSQFLINGKPFYFHGVNKHEDADIRGKGFDWPLLVKDFNLLRWLGANAFRTSHYPYAEEVMQMCDRYGIVVIDECPGVGLALPQFFNNVSLHHHMQVMEEVVRRDKNHPAVVMWSVANEPASHLESAGYYLKMVIAHTKSLDPSRPVTFVSNSNYAADKGAPYVDVICLNSYYSWYHDYGHLELIQLQLATQFENWYKKYQKPIIQSEYGAETIAGFHQDPPLMFTEEYQKSLLEQYHLGLDQKRRKYVVGELIWNFADFMTEQSPTRVLGNKKGIFTRQRQPKSAAFLLRERYWKIANETRYPHSVAKSQCLENSLFT

SEQ ID NO: 6331 - protein, 195 aa, Homo sapiens; identical to SEQ ID NO: 73

SEQ ID NO: 6332 - protein, 440 aa, Homo sapiens
MRRYLRVVVLCVACGFCSLLYAFSQLAVSLEEGTGGGGGKPQAAVASWLAGGGRGAVRGAGVAGPAAHPGVSDRCKDFSLCYWNPYWMLPSDVCGMNCFWEAAFRYSLKIQPVEKMHLAVVACGERLEETMTMLKSAIIFSIKPLQFHIFAEDQLHHSFKGRLDNWSFLQTFNYTLYPITFPSENAAEWKKLFKPCASQRLFLPLILKEVDSLLYVDTDILFLRPVDDIWSLLKKFNSTQIAAMAPEHEEPRIGWYNRFARHPYYGKTGVNSGVMLMNMTRMRRKYFKNDMTTVRLQWGDILMPLLKKYKLNITWGDQDLLNIVFFHNPESLFVFPCQWNYRPDHCIYGSNCQEAEEGGIFILHGNRGVYHDDKQPAFRAVYEALRNCSFEDDNIRSLLKPLELELQKTVHTYCGKIYKIFIKQLAKSVRDRYARSPKEK

SEQ ID NO: 6333 - protein, 409 aa, Homo sapiens
MRRYLRVVVLCVACGFCSLLYAFSQLAVSLEEGTGGGGGKPQAAVASWLAGGGRGAVRGAGVAGPAAHPGVSDRYSLKIQPVEKMHLAVVACGERLEETMTMLKSAIIFSIKPLQFHIFAEDQLHHSFKGRLDNWSFLQTFNYTLYPITFPSENAAEWKKLFKPCASQRLFLPLILKEVDSLLYVDTDILFLRPVDDIWSLLKKFNSTQIAAMAPEHEEPRIGWYNRFARHPYYGKTGVNSGVMLMNMTRMRRKYFKNDMTTVRLQWGDILMPLLKKYKLNITWGDQDLLNIVFFHNPESLFVFPCQWNYRPDHCIYGSNCQEAEEGGIFILHGNRGVYHDDKQPAFRAVYEALRNCSFEDDNIRSLLKPLELELQKTVHTYCGKIYKIFIKQLAKSVRDRYARSPKEK

SEQ ID NO: 6334 - protein, 164 aa, Homo sapiens
MAPEHEIPKIGWYSRFARHPFYGSAGVNSGVMLMNLTRIRSTQFKNSMIPTGLAWEDMLYPLYQKYKNAITWGDQDLLNIIFYFNPECLYVFPCQWNYRPDHCMYGSNCREAEHEGVSVLHGNRGVYHDDKQPTFRALYEAIRDILRRGGKRKFVLSWISFFVM

SEQ ID NO: 6335 - protein, 443 aa, Homo sapiens
MKLRSKAAALLLLALAALLLALLSLRAGRAEPPALPARPASAPQRHPAPVPARWPGPGALPGASPGVRRRRPPRPRPRAGRRGAARLEKLARRPGEPRSFQAVLPPELWIHLAVVACGNRLEETLVMLKSAVLFSHRKIQFHIFTEDSLKPEFDKQLRQWPDSYTKKFEHRIYPITFSVGNPQEWKKLFKPCAAQRLFLPVILKDVDSLLYVDTDVLFLRPVDDIWKLLRLFNSTQLAAMAPEHEIPKIGWYSRFARHPFYGSAGVNSGVMLMNLTRIRSTQFKNSMIPTGLAWEDMLYPLYQKYKNAITWGDQDLLNIIFYFNPECLYVFPCQWNYRPDHCMYGSNCREAEHEGVSVLHGNRGVYHDDKQPTFRALYEAIRDFPFQDNLFQSMYYPLQLKFLETVHTLCGRIPQVFLKQIEKTMKRAYEKHVIIHVGPNQMH

SEQ ID NO: 6336 - protein, 102 aa, Homo sapiens
MLKSAVLFSHRKIQFHIFTEDSLKPEFDKQLRQWPDSYTKKFEHRIYPITFSVGNPQEWKKLFKPCAAQRLFLPVILKDVDSLLYVDTDVLFLRPVDDIWKL

SEQ ID NO: 6337 - protein, 65 aa, Homo sapiens
MHTSTSSSVTKSYISSQTNGETGQLVHRFTVPAPVVIILIILCVMAGIIGTILLISYSIRRLIKA

SEQ ID NO: 6338 - protein, 121 aa, Homo sapiens
MYGKIIFVLLLSEIVSISALSTTEVAMHTSTSSSVTKSYISSQTNDKHKRDTCPAHTANEVSEISVTTVSPPEKKNGETGQLVHRFTVPAPVVIILIILCVMAGIIGTILLISYSIRRLIK

SEQ ID NO: 6339 - protein, 91 aa, Homo sapiens
MYGKIIFVLLLSEIVSISALSTTEVAMHTSTSSSVTKSYISSQTNGETGQLVHRFTVPAPVVIILIILCVMAGIIGTILLISYSIRRLIKA

SEQ ID NO: 6340 - protein, 62 aa, Homo sapiens
MYGKIIFVLLLSEIVSISALSTTEVAMHTSTSSSVTKSYISSQTNGETGQLVHRFTVPVFAD

SEQ ID NO: 6341 - protein, 42 aa, Homo sapiens
MYGKIIFVLLLSGDGANPENSGRRGQKAEGRARAKILKQEKL

SEQ ID NO: 6342 - protein, 58 aa, Homo sapiens
MYGKIIFVLLLSGETGQLVHRFTVPAPVVIILIILCVMAGIIGTILLISYSIRRLIKA

SEQ ID NO: 6343 - protein, 45 aa, Homo sapiens
MYGKIIFVLLLSGNFEHSAEGPSWLPLRRSPSTSTPLHLGAIPLI

SEQ ID NO: 6344 - protein, 45 aa, Homo sapiens; identical to SEQ ID NO: 6343

SEQ ID NO: 6345 - protein, 45 aa, Homo sapiens; identical to SEQ ID NO: 6343

SEQ ID NO: 6346 - protein, 262 aa, Homo sapiens
MRNSYRFLASSLSVVVSLLLIPEDVCEKIIGGNEVTPHSRPYMVLLSLDRKTICAGALIAKDWVLTAAHCNLNKRSQVILGAHSITREEPTKQIMLVKKEFPYPCYDPATREGDLKLLQLMEKAKINKYVTILHLPKKGDDVKPGTMCQVAGWGRTHNSASWSDTLREVNITIIDRKVCNDRNHYNFNPVIGMNMVCAGSLRGGRDSCNGDSGSPLLCEGVFRGVTSFGLENKCGDPRGPGVYILLSKKHLNWIIMTIKGAV

SEQ ID NO: 6347 - protein, 44 aa, Homo sapiens
MQECSELQLPFYQDPPSVMLDKLSAGMAEQQAILKKSQGDHRGT

SEQ ID NO: 6348 - protein, 35 aa, Homo sapiens
MQPILLLLAFLLLPRADAAGEKGQADQSCAAPQAT

SEQ ID NO: 6349 - protein, 202 aa, Homo sapiens
MQPILLLLAFLLLPRADAGEIIGGHEAKPHSRPYMAYLMIWDQKSLKRCGGFLIRDDFVLTAAHCWGRLERKAKRTRAVQPLRLPSNKAQVKPGQTCSVAGWGQTAPLGKHSHTLQEVKMTVQEDRKCESDLRHYYDSTIELCVGDPEIKKTSFKGDSGGPLVCNKVAQGIVSYGRNNGMPPRACTKVSSFVHWIKKTMKRY

SEQ ID NO: 6350 - protein, 202 aa, Homo sapiens; identical to SEQ ID NO: 6349

SEQ ID NO: 6351 - protein, 247 aa, Homo sapiens
MQPILLLLAFLLLPRADAGEIIGGHEAKPHSRPYMAYLMIWDQKSLKRCGGFLIRDDFVLTAAHCWGSSINVTLGAHNIKEQEPTQQFIPVKRPIPHPAYNPKNFSNDIMLLQLERKAKRTRAVQPLRLPSNKAQVKPGQTCSVAGWGQTAPLGKHSHTLQEVKMTVQEDRKCESDLRHYYDSTIELCVGDPEIKKTSFKGDSGGPLVCNKVAQGIVSYGRNNGMPPRACTKVSSFVHWIKKTMKRY

SEQ ID NO: 6352 - protein, 90 aa, Homo sapiens
MQPILLLLAFLLLPRADAGEIIGGHEAKPHSRPYMAYLMIWDQKSLKRCGGFLIRDDFVLTAAHCWGSWRERPSGPELCSPSGYLATRPR

SEQ ID NO: 6353 - protein, 90 aa, Homo sapiens; identical to SEQ ID NO: 6352

SEQ ID NO: 6354 - protein, 152 aa, Homo sapiens
MQPILLLLAFLLLPRADQLERKAKRTRAVQPLRLPSNKAQVKPGQTCSVAGWGQTAPLGKHSHTLQEVKMTVQEDRKCESDLRHYYDSTIELCVGDPEIKKTSFKGDSGGPLVCNKVAQGIVSYGRNNGMPPRACTKVSSFVHWIKKTMKRY

SEQ ID NO: 6355 - protein, 235 aa, Homo sapiens
MQTFPSGEIIGGHEAKPHSRPYMAYLMIWDQKSLKRCGGFLIRDDFVLTAAHCWGSSINVTLGAHNIKEQEPTQQFIPVKRPIPHPAYNPKNFSNDIMLLQLERKAKRTRAVQPLRLPSNKAQVKPGQTCSVAGWGQTAPLGKHSHTLQEVKMTVQEDRKCESDLRHYYDSTIELCVGDPEIKKTSFKGDSGGPLVCNKVAQGIVSYGRNNGMPPRACTKVSSFVHWIKKTMKRY

SEQ ID NO: 6356 - protein, 115 aa, Homo sapiens
MQPFLLLLAFLLTPGAGTEEIIGGHEAKPHSRPYMAFVQFLQEKSRKRCGGILVRKDFVLTAAHCQGRGDSGGPLVCKDVAQGILSYGNKKGTPPGVYIKVSHFLPWIKRTMKRL

SEQ ID NO: 6357 - protein, 160 aa, Homo sapiens
MQPFLLLLAFLLTPGAGTEEIIGGHEAKPHSRPYMAFVQFLQEKSRKRCGGILVRKDFVLTAAHCQGSSINVTLGAHNIKEQERTQQFIPVKRPIPHPAYNPKNFSNDIMLLQGDSGGPLVCKDVAQGILSYGNKKGTPPGVYIKVSHFLPWIKRTMKRL

SEQ ID NO: 6358 - protein, 246 aa, Homo sapiens
MQPFLLLLAFLLTPGAGTEEIIGGHEAKPHSRPYMAFVQFLQEKSRKRCGGILVRKDFVLTAAHCQGSSINVTLGAHNIKEQERTQQFIPVKRPIPHPAYNPKNFSNDIMLLQLERKAKWTTAVRPLRLPSSKAQVKPGQLCSVAGWGYVSMSTLATTLQEVLLTVQKDCQCERLFHGNYSRATEICVGDPKKTQTGFKGDSGGPLVCKDVAQGILSYGNKKGTPPGVYIKVSHFLPWIKRTMKRL

SEQ ID NO: 6359 - protein, 264 aa, Homo sapiens
MTKFSSFSLFFLIVGAYMTHVCFNMEIIGGKEVSPHSRPFMASIQYGGHHVCGGVLIDPQWVLTAAHCQYRFTKGQSPTVVLGAHSLSKNEASKQTLEIKKFIPFSRVTSDPQSNDIMLVKLQTAAKLNKHVKMLHIRSKTSLRSGTKCKVTGWGATDPDSLRPSDTLREVTVTVLSRKLCNSQSYYNGDPFITKDMVCAGDAKGQKDSCKGDSGGPLICKGVFHAIVSGGHECGVATKPGIYTLLTKKYQTWIKSNLVPPHTN

SEQ ID NO: 6360 - protein, 218 aa, Homo sapiens
MASLQRNGSHLCGGVLVHPKWVLTAAHCLAQRMAQLRLVLGLHTLDSPGLTFHIKAAIQHPRYKPVPALENDLALLQLDGKVKPSRTIRPLALPSKRQVVAAGTRCSMAGWGLTHQGGRLSRVLRELDLQVLDTRMCNNSRFWNGSLSPSMVCLAADSKDQAPCKGDSGGPLVCGKGRVLARVLSFSSRVCTDIFKPPVATAVAPYVSWIRKVTGRSA

SEQ ID NO: 6361 - protein, 257 aa, Homo sapiens
MEACVSSLLVLALGALSVGSSFGTQIIGGREVIPHSRPYMASLQRNGSHLCGGVLVHPKWVLTAAHCLAQRMAQLRLVLGLHTLDSPGLTFHIKAAIQHPRYKPVPALENDLALLQLDGKVKPSRTIRPLALPSKRQVVAAGTRCSMAGWGLTHQGGRLSRVLRELDLQVLDTRMCNNSRFWNGSLSPSMVCLAADSKDQAPCKGDSGGPLVCGKGRVLARVLSFSSRVCTDIFKPPVATAVAPYVSWIRKVTGRSA

SEQ ID NO: 6362 - protein, 802 aa, Homo sapiens
MLAEPFNWHPGMWNMLIVAMCLALLGCLQAQELQGHVSIILLGATGDLAKKYLWQGLFQLYLDEAGRGHSFSFHGAALTAPKQGQELMAKALESLSCPKDMAPSHCAEHKDQFLQLSQYRQLKTAEDYQALNKDIEAQLQHAGLREAGRIFYFSVPPFAYEDIARNINSSCRPGPGAWLRVVLEKPFGHDHFSAQQLATELGTFFQEEEMYRVDHYLGKQAVAQILPFRDQNRKALDGLWNRHHVERVEIIMKETVDAEGRTSFYEEYGVIRDVLQNHLTEVLTLVAMELPHNVSSAEAVLRHKLQVFQALRGLQRGSAVVGQYQSYSEQVRRELQKPDSFHSLTPTFAAVLVHIDNLRWEGVPFILMSGKALDERVGYARILFKNQACCVQSEKHWAAAQSQCLPRQLVFHIGHGDLGSPAVLVSRNLFRPSLPSSWKEMEGPPGLRLFGSPLSDYYAYSPVRERDAHSVLLSHIFHGRKNFFITTENLLASWNFWTPLLESLAHKAPRLYPGGAENGRLLDFEFSSGRLFFSQQQPEQLVPGPGPAPMPSDFQVLRAKYRESPLVSAWSEELISKLANDIEATAVRAVRRFGQFHLALSGGSSPVALFQQLATAHYGFPWAHTHLWLVDERCVPLSDPESNFQGLQAHLLQHVRIPYYNIHPMPVHLQQRLCAEEDQGAQIYAREISALVANSSFDLVLLGMGADGHTASLFPQSPTGLDGEQLVVLTTSPSQPHRRMSLSLPLINRAKKVAVLVMGRMKREITTLVSRVGHEPKKWPISGVLPHSGQLVWYMDYDAFLG

SEQ ID NO: 6363 - protein, 791 aa, Homo sapiens
MWNMLIVAMCLALLGCLQAQELQGHVSIILLGATGDLAKKYLWQGLFQLYLDEAGRGHSFSFHGAALTAPKQGQELMAKALESLSCPKDMAPSHCAEHKDQFLQLSQYRQLKTAEDYQALNKDIEAQLQHAGLREAGRIFYFSVPPFAYEDIARNINSSCRPGPGAWLRVVLEKPFGHDHFSAQQLATELGTFFQEEEMYRVDHYLGKQAVAQILPFRDQNRKALDGLWNRHHVERVEIIMKETVDAEGRTSFYEEYGVIRDVLQNHLTEVLTLVAMELPHNVSSAEAVLRHKLQVFQALRGLQRGSAVVGQYQSYSEQVRRELQKPDSFHSLTPTFAAVLVHIDNLRWEGVPFILMSGKALDERVGYARILFKNQACCVQSEKHWAAAQSQCLPRQLVFHIGHGDLGSPAVLVSRNLFRPSLPSSWKEMEGPPGLRLFGSPLSDYYAYSPVRERDAHSVLLSHIFHGRKNFFITTENLLASWNFWTPLLESLAHKAPRLYPGGAENGRLLDFEFSSGRLFFSQQQPEQLVPGPGPAPMPSDFQVLRAKYRESPLVSAWSEELISKLANDIEATAVRAVRRFGQFHLALSGGSSPVALFQQLATAHYGFPWAHTHLWLVDERCVPLSDPESNFQGLQAHLLQHVRIPYYNIHPMPVHLQQRLCAEEDQGAQIYAREISALVANSSFDLVLLGMGADGHTASLFPQSPTGLDGEQLVVLTTSPSQPHRRMSLSLPLINRAKKVAVLVMGRMKREITTLVSRVGHEPKKWPISGVLPHSGQLVWYMDYDAFLG

SEQ ID NO: 6364 - protein, 560 aa, Homo sapiens
MFARMSDLHVLLLMALVGKTACGFSLMSLLESLDPDWTPDQYDYSYEDYNQEENTSSTLTHAENPDWYYTEDQADPCQPNPCEHGGDCLVHGSTFTCSCLAPFSGNKCQKVQNTCKDNPCGRGQCLITQSPPYYRCVCKHPYTGPSCSQVVPVCRPNPCQNGATCSRHKRRSKFTCACPDQFKGKFCEIGSDDCYVGDGYSYRGKMNRTVNQHACLYWNSHLLLQENYNMFMEDAETHGIGEHNFCRNPDADEKPWCFIKVTNDKVKWEYCDVSACSAQDVAYPEESPTEPSTKLPGFDSCGKTEIAERKIKRIYGGFKSTAGKHPWQASLQSSLPLTISMPQGHFCGGALIHPCWVLTAAHCTDIKTRHLKVVLGDQDLKKEEFHEQSFRVEKIFKYSHYNERDEIPHNDIALLKLKPVDGHCALESKYVKTVCLPDGSFPSGSECHISGWGVTETGKGSRQLLDAKVKLIANTLCNSRQLYDHMIDDSMICAGNLQKPGQDTCQGDSGGPLTCEKDGTYYVYGIVSWGLECGKRPGVYTQVTKFLNWIKATIKSESGF

SEQ ID NO: 6365 - protein, 534 aa, Homo sapiens
MSLLESLDPDWTPDQYDYSYEDYNQEENTSSTLTHAENPDWYYTEDQADPCQPNPCEHGGDCLVHGSTFTCSCLAPFSGNKCQKVQNTCKDNPCGRGQCLITQSPPYYRCVCKHPYTGPSCSQVVPVCRPNPCQNGATCSRHKRRSKFTCACPDQFKGKFCEIGSDDCYVGDGYSYRGKMNRTVNQHACLYWNSHLLLQENYNMFMEDAETHGIGEHNFCRNPDADEKPWCFIKVTNDKVKWEYCDVSACSAQDVAYPEESPTEPSTKLPGFDSCGKTEIAERKIKRIYGGFKSTAGKHPWQASLQSSLPLTISMPQGHFCGGALIHPCWVLTAAHCTDIKTRHLKVVLGDQDLKKEEFHEQSFRVEKIFKYSHYNERDEIPHNDIALLKLKPVDGHCALESKYVKTVCLPDGSFPSGSECHISGWGVTETGKGSRQLLDAKVKLIANTLCNSRQLYDHMIDDSMICAGNLQKPGQDTCQGDSGGPLTCEKDGTYYVYGIVSWGLECGKRPGVYTQVTKFLNWIKATIKSESGF

SEQ ID NO: 6366 - protein, 459 aa, Homo sapiens
MTILTYPFKNLPTASKWALRFSIRPLSCSSQLRAAPAVQTKTKKTLAKPNIRNVVVVDGVRTPFLLSGTSGLLHRTSVPKEVVDYIIFGTVIQEVKTSNVAREAALGAGFSDKTPAHTVTMACISANQAMTTGVGLIASGQCDVIVAGGVELMSDVPIRHSRKMRKLMLDLNKAKSMGQRLSLISKFRFNFLAPELPAVSEFSTSETMGHSADRLAAAFAVSRLEQDEYALRSHSLAKKAQDEGLLSDVVPFKVPGKDTVTKDNGIRPSSLEQMAKLKPAFIKPYGTVTAANSSFLTDGASAMLIMAEEKALAMGYKPKAYLRDFMYVSQDPKDQLLLGPTYATPKVLEKAGLTMNDIDAFEFHEAFSGQILANFKAMDSDWFAENYMGRKTKVGLPPLEKFNNWGGSLSLGHPFGATGCRLVMAAANRLRKEGGQYGLVAACAAGGQGHAMIVEAYPK

SEQ ID NO: 6367 - protein, 85 aa, Homo sapiens
MTILTYPFKNLPTASKWALRFSIRPLSCSSQLRAAPAVQTKTKKTLAKPNIRNVVVVDGVRTPFLLSGTSYKDLMPHDLARAALT

SEQ ID NO: 6368 - protein, 351 aa, Homo sapiens
MTILTYPFKNLPTASKWALRFSIRPLSCSSQLRAAPAVQTKTKKTLAKPNIRNVVVVDGVRTPFLLSGTSYKDLMPHDLARAALTGLLHRTSVPKEVVDYIIFGTVIQEVKTSNVAREAALGAGFSDKTPAHTVTMACISANQAMTTGKDTVTKDNGIRPSSLEQMAKLKPAFIKPYGTVTAANSSFLTDGASAMLIMAEEKALAMGYKPKAYLRDFMYVSQDPKDQLLLGPTYATPKVLEKAGLTMNDIDAFEFHEAFSGQILANFKAMDSDWFAENYMGRKTKVGLPPLEKFNNWGGSLSLGHPFGATGCRLVMAAANRLRKEGGQYGLVAACAAGGQGHAMIVEAYPK

SEQ ID NO: 6369 - protein, 150 aa, Homo sapiens
MTILTYPFKNLPTASKWALRFSIRPLSCSSQLRAAPAVQTKTKKTLAKPNIRNVVVVDGVRTPFLLSGTSYKDLMPHDLARAALTGLLHRTSVPKEVVDYIIFGTVIQEVKTSNVAREAALGAGFSDKTPAHTVTMACISANQAMTTGVG

SEQ ID NO: 6370 - protein, 176 aa, Homo sapiens
MTILTYPFKNLPTASKWALRFSIRPLSCSSQLRAAPAVQTKTKKTLAKPNIRNVVVVDGVRTPFLLSGTSYKDLMPHDLARAALTGLLHRTSVPKEVVDYIIFGTVIQEVKTSNVAREAALGAGFSDKTPAHTVTMACISANQAMTTGVGLIASGQCDVIVAGGVELMSDVPIRHS

SEQ ID NO: 6371 - protein, 474 aa, Homo sapiens
MTILTYPFKNLPTASKWALRFSIRPLSCSSQLRAAPAVQTKTKKTLAKPNIRNVVVVDGVRTPFLLSGTSYKDLMPHDLARAALTGLLHRTSVPKEVVDYIIFGTVIQEVKTSNVAREAALGAGFSDKTPAHTVTMACISANQAMTTGVGLIASGQCDVIVAGGVELMSDVPIRHSRKMRKLMLDLNKAKSMGQRLSLISKFRFNFLAPELPAVSEFSTSETMGHSADRLAAAFAVSRLEQDEYALRSHSLAKKAQDEGLLSDVVPFKVPGKDTVTKDNGIRPSSLEQMAKLKPAFIKPYGTVTAANSSFLTDGASAMLIMAEEKALAMGYKPKAYLRDFMYVSQDPKDQLLLGPTYATPKVLEKAGLTMNDIDAFEFHEAFSGQILANFKAMDSDWFAENYMGRKTKVGLPPLEKFNNWGGSLSLGHPFGATGCRLVMAAANRLRKEGGQYGLVAACAAGGQGHAMIVEAYPK

SEQ ID NO: 6372 - protein, 452 aa, Homo sapiens
MTLVSGWLLYGWIIAVQTKTKKTLAKPNIRNVVVVDGVRTPFLLSGTSYKDLMPHDLARAALTGLLHRTSVPKEVVDYIIFGTVIQEVKTSNVAREAALGAGFSDKTPAHTVTMACISANQAMTTGVGLIASGQCDVIVAGGVELMSDVPIRHSRKMRKLMLDLNKAKSMGQRLSLISKFRFNFLAPELPAVSEFSTSETMGHSADRLAAAFAVSRLEQDEYALRSHSLAKKAQDEGLLSDVVPFKVPGKDTVTKDNGIRPSSLEQMAKLKPAFIKPYGTVTAANSSFLTDGASAMLIMAEEKALAMGYKPKAYLRDFMYVSQDPKDQLLLGPTYATPKVLEKAGLTMNDIDAFEFHEAFSGQILANFKAMDSDWFAENYMGRKTKVGLPPLEKFNNWGGSLSLGHPFGATGCRLVMAAANRLRKEGGQYGLVAACAAGGQGHAMIVEAYPK

SEQ ID NO: 6373 - protein, 84 aa, Homo sapiens
MALSSQIWAACLLLLLLLASLTSGSVFPQQTGQLAELQPQDRAGARASWMPMFQRRRRRDTHFPICIFCCGCCHRSKCGMCCKT

SEQ ID NO: 6374 - protein, 84 aa, Homo sapiens; identical to SEQ ID NO: 6373

SEQ ID NO: 6375 - protein, 153 aa, Homo sapiens
MKSLLLLVLISICWADHLSDNYTLDHDRAIHIQAENGPHLLVEAEQAKVFSHRGGNVTLPCKFYRDPTAFGSGIHKIRIKWTKLTSDYLKEVDVFVSMGYHKKTYGGYQGRVFLKGGSDSDASLVITDLTLEDYGRYKCEVIEGLEDDTVVVA

SEQ ID NO: 6376 - protein, 161 aa, Homo sapiens
MKSLLLLVLISICWADHLSDNYTLDHDRAIHIQAENGPHLLVEAEQAKVFSHRGGNVTLPCKFYRDPTAFGSGIHKIRIKWTKLTSDYLKEVDVFVSMGYHKKTYGGYQGRVFLKGGSDSDASLVITDLTLEDYGRYKCEVIEGLEDDTVVVALDLQGMYL

SEQ ID NO: 6377 - protein, 169 aa, Homo sapiens
MKSLLLLVLISICWADHLSDNYTLDHDRAIHIQAENGPHLLVEAEQAKVFSHRGGNVTLPCKFYRDPTAFGSGIHKIRIKWTKLTSDYLKEVDVFVSMGYHKKTYGGYQGRVFLKGGSDSDASLVITDLTLEDYGRYKCEVIEGLEDDTVVVALDLQGVVFPYFPRLGR

SEQ ID NO: 6378 - protein, 199 aa, Homo sapiens
MKSLLLLVLISICWADHLSDNYTLDHDRAIHIQAENGPHLLVEAEQAKVFSHRGGNVTLPCKFYRDPTAFGSGIHKIRIKWTKLTSDYLKEVDVFVSMGYHKKTYGGYQGRVFLKGGSDSDASLVITDLTLEDYGRYKCEVIEGLEDDTVVVALDLQGVVFPYFPRLGRYNLNFHEAQQACLDQDAVIASFDQLYDAWR

SEQ ID NO: 6379 - protein, 354 aa, Homo sapiens
MKSLLLLVLISICWADHLSDNYTLDHDRAIHIQAENGPHLLVEAEQAKVFSHRGGNVTLPCKFYRDPTAFGSGIHKIRIKWTKLTSDYLKEVDVFVSMGYHKKTYGGYQGRVFLKGGSDSDASLVITDLTLEDYGRYKCEVIEGLEDDTVVVALDLQGVVFPYFPRLGRYNLNFHEAQQACLDQDAVIASFDQLYDAWRGGLDWCNAGWLSDGSVQYPITKPREPCGGQNTVPGVRNYGFWDKDKSRYDVFCFTSNFNGRFYYLIHPTKLTYDEAVQACLNDGAQIAKVGQIFAAWKILGYDRCDAGWLADGSVRYPISRPRRRCSPTEAAVRFVGFPDKKHKLYGVYCFRAYN

SEQ ID NO: 6380 - protein, 258 aa, Homo sapiens
MKSLLLLVLISICWADHLSDNYTLDHDRAIHIQAENGPHLLVEAEQAKVFSHRGGNVTLPCKFYRDPTAFGSGIHKIRIKWTKLTSDYLKEVDVFVSMGYHKKTYGGYQGRVFLKGGSDSDASLVITDLTLEDYGRYKCEVIEGLEDDTVVVALDLQGVVFPYFPRLGRYNLNFHEAQQACLDQDAVIASFDQLYDAWRGGLDWCNAGWLSDGSVQYPITKPREPCGGQNTVPGVRNYGFWDKDKSRYDVFCFTSNFN

SEQ ID NO: 6381 - protein, 182 aa, Homo sapiens
MKSLLLLVLISICWADHLSDNYTLDHDRAIHIQENGPHLLVEAEQAKVFSHRGGNVTLPCKFYRDPTAFGSGIHKIRIKWTKLTSDYLKEVDVFVSMGYHKKTYGGYQGRVFLKGGSDSDASLVITDLTLEDYGRYKCEVIEGLEDDTVVVALDLQGVVFPYFPRLGRYNLNFHEAQQACLD

SEQ ID NO: 6382 - protein, 185 aa, Homo sapiens
MPGWLTLPTLCRFLLWAFTIFHKAQGDPASHPGPHYLLPPIHEVIHSHRGATATLPCVLGTTPPSYKVRWSKVEPGELRETLILITNGLHARGYGPLGGRARMRRGHRLDASLVIAGVRLEDEGRYRCELINGIEDESVALTLSLEGVVFPYQPSRGRYQFNYYEAKQACEEQDGRLATYSQLYQ

SEQ ID NO: 6383 - protein, 340 aa, Homo sapiens
MPGWLTLPTLCRFLLWAFTIFHKAQGDPASHPGPHYLLPPIHEVIHSHRGATATLPCVLGTTPPSYKVRWSKVEPGELRETLILITNGLHARGYGPLGGRARMRRGHRLDASLVIAGVRLEDEGRYRCELINGIEDESVALTLSLEGVVFPYQPSRGRYQFNYYEAKQACEEQDGRLATYSQLYQAWTEGLDWCNAGWLLEGSVRYPVLTARAPCGGRGRPGIRSYGPRDRMRDRYDAFCFTSALAGQVFFVPGRLTLSEAHAACRRRGAVVAKVGHLYAAWKFSGLDQCDGGWLADGSVRFPITTPRPRCGGLPDPGVRSFGFPRPQQAAYGTYCYAEN

SEQ ID NO: 6384 - protein, 226 aa, Homo sapiens
MGLLLLVPLLLLPGSYGLPFYNGFYYSNSANDQNLGNGHGKDLLNGVKLVVETPEETLFTYQGASVILPCRYRYEPALVSPRRVRVKWWKLSENGAPEKDVLVAIGLRHRSFGDYQGRVHLRQDKEHDVSLEIQDLRLEDYGRYRCEVIDGLEDESGLVELELRAESQERGGNGQEVWSFLTSPPTGATSSTSTRASRSVQSRLRWWPPLSSSSGPGRRAWTGATR

SEQ ID NO: 6385 - protein, 360 aa, Homo sapiens
MGLLLLVPLLLLPGSYGLPFYNGFYYSNSANDQNLGNGHGKDLLNGVKLVVETPEETLFTYQGASVILPCRYRYEPALVSPRRVRVKWWKLSENGAPEKDVLVAIGLRHRSFGDYQGRVHLRQDKEHDVSLEIQDLRLEDYGRYRCEVIDGLEDESGLVELELRGVVFPYQSPNGRYQFNFHEGQQVCAEQAAVVASFEQLFRAWEEGLDWCNAGWLQDATVQYPIMLPRQPCGGPGLAPGVRSYGPRHRRLHRYDVFCFATALKGRVYYLEHPEKLTLTEAREACQEDDATIAKVGQLFAAWKFHGLDRCDAGWLADGSVRYPVVHPHPNCGPPEPGVRSFGFPDPQSRLYGVYCYRQH

SEQ ID NO: 6386 - protein, 186 aa, Homo sapiens
MGLLLLVPLLLLPGSYGLPFYNGFYYSNSANDQNLGNGHGKDLLNGVKLVVETPEETLFTYQGASVILPCRYRYEPALVSPRRVRVKWWKLSENGAPEKDVLVAIGLRHRSFGDYQGRVHLRQDKEHDVSLEIQDLRLEDYGRYRCEVIDGLEDESGLVELELRGWGCVSSHLSHMLGRQFGDRGR

SEQ ID NO: 6387 - protein, 422 aa, Homo sapiens
MRKWRHREVNLPEVTQQDAVCPAPIPSPGLSAQTGLQKIWGTIHCQVCPGAPAWPGSPWHEEMGLLLLVPLLLLPGSYGLPFYNGFYYSNSANDQNLGNGHGKDLLNGVKLVVETPEETLFTYQGASVILPCRYRYEPALVSPRRVRVKWWKLSENGAPEKDVLVAIGLRHRSFGDYQGRVHLRQDKEHDVSLEIQDLRLEDYGRYRCEVIDGLEDESGLVELELRGVVFPYQSPNGRYQFNFHEGQQVCAEQAAVVASFEQLFRAWEEGLDWCNAGWLQDATVQYPIMLPRQPCGGPGLAPGVRSYGPRHRRLHRYDVFCFATALKGRVYYLEHPEKLTLTEAREACQEDDATIAKVGQLFAAWKFHGLDRCDAGWLADGSVRYPVVHPHPNCGPPEPGVRSFGFPDPQSRLYGVYCYRQH

SEQ ID NO: 6388 - protein, 402 aa, Homo sapiens
MVCARAALGPGALWAAAWGVLLLTAPAGAQRGRKKVVHVLEGESGSVVVQTAPGQVVSHRGGTIVLPCRYHYEAAAHGHDGVRLKWTKVVDPLAFTDVFVALGPQHRAFGSYRGRAELQGDGPGDASLVLRNVTLQDYGRYECEVTNELEDDAGMVKLDLEGVVFPYHPRGGRYKLTFAEAQRACAEQDGILASAEQLHAAWRDGLDWCNAGWLRDGSVQYPVNRPREPCGGLGGTGSAGGGGDANGGLRNYGYRHNAEERYDAFCFTSNLPGRVFFLKPLRPVPFSGAARACAARGAAVAKVGQLFAAWKLQLLDRCTAGWLADGSARYPIVNPRARCGGRRPGVRSLGFPDATRRLFGVYCYRAPGAPDPAPGGWGWGWAGGGGWAGGARDPAAWTPLHV

SEQ ID NO: 6389 - protein, 334 aa, Homo sapiens
MPLLGLLPRRAWASLLSQLLRPPCASCTGAVRCQSQDFDIAGQFDPMIPDAECLKIMCEILSGLQLGDFLIKMAWKDVRHEMVVKKGLAPEVADRIGDYVQCHGGVSLVEQMFQDPRLSQNKQALEGLGDLKLLFEYLTLFGIADKISFDLSLARGLDYYTGVIYEAVLLQTPTQAGEEPLNVGSVAAGGRYDGLVGMFDPKGHKVPCVGLSIGVERIFYIVEQRMKTKGEKVRTTETQVFVATPQKNFLQERLKLIAELWDSGIKAEMLYKNNPKLLTQLHYCESTGIPLVVIIGEQELKEGVIKIRSVASREEVAIKRENFVAEIQKRLSES

SEQ ID NO: 6390 - protein, 512 aa, Homo sapiens
MPLLGLLPRRAWASLLSQLLRPPCASCTGAVRCQSQGEESLQVAEAVLTSQLKAHQEKPNFIIKTPKGTRDLSPQHMVVREKILDLVISCFKRHGAKGMDTPAFELKETLTEKYGEDSGLMYDLKDQGGELLSLRYDLTVPFARYLAMNKVKKMKRYHVGKVWRRESPTIVQGRYREFCQCDFDIAGQFDPMIPDAECLKIMCEILSGLQLGDFLIKVNDRRIVDGMFAVCGVPESKFRAICSSIDKLDKMAWKDVRHEMVVKKGLAPEVADRIGDYVQCHGGVSLVEQMFQDPRLSQNKQALEGLGDLKLLFEYLTLFGIADKISFDLSLARGLDYYTGVIYEAVLLQTPTQAGEEPLNVGSVAAGGRYDGLVGMFDPKGHKVPCVGLSIGVERIFYIVEQRMKTKGEKVRTTETQVFVATPQKNFLQERLKLIAELWDSGIKAEMLYKNNPKLLTQLHYCESTGIPLVVIIGEQELKEGVIKIRSVASREEVAIKRENFVAEIQKRLSES

SEQ ID NO: 6391 - protein, 512 aa, Homo sapiens; identical to SEQ ID NO: 6390

SEQ ID NO: 6392 - protein, 99 aa, Homo sapiens
MPLLGLLPRRAWASLLSQLLRPPCASCTGAVRCQSQGEESLQVGGQQGQRCHRSGQCPEKPHLTFILLPGCRGSVNIPTESTSRETKFYYQDPKGYQGS

SEQ ID NO: 6393 - protein, 99 aa, Homo sapiens; identical to SEQ ID NO: 6392

SEQ ID NO: 6394 - protein, 481 aa, Homo sapiens
MPLLGLLPRRAWASLLSQLLRPPCASCTGAVRCQSQGTRDLSPQHMVVREKILDLVISCFKRHGAKGMDTPAFELKETLTEKYGEDSGLMYDLKDQGGELLSLRYDLTVPFARYLAMNKVKKMKRYHVGKVWRRESPTIVQGRYREFCQCDFDIAGQFDPMIPDAECLKIMCEILSGLQLGDFLIKVNDRRIVDGMFAVCGVPESKFRAICSSIDKLDKMAWKDVRHEMVVKKGLAPEVADRIGDYVQCHGGVSLVEQMFQDPRLSQNKQALEGLGDLKLLFEYLTLFGIADKISFDLSLARGLDYYTGVIYEAVLLQTPTQAGEEPLNVGSVAAGGRYDGLVGMFDPKGHKVPCVGLSIGVERIFYIVEQRMKTKGEKVRTTETQVFVATPQKNFLQERLKLIAELWDSGIKAEMLYKNNPKLLTQLHYCESTGIPLVVIIGEQELKEGVIKIRSVASREEVAIKRENFVAEIQKRLSES

SEQ ID NO: 6395 - protein, 399 aa, Homo sapiens
MPLLGLLPRRAWASLLSQLLRPPCASCTGAVRCQSQVAEAVLTSQLKAHQEKPNFIIKTPKGTRDLSPQHMVVREKILDLVISCFKRHGAKGMDTPAFELKDFDIAGQFDPMIPDAECLKIMCEILSGLQLGDFLIKMAWKDVRHEMVVKKGLAPEVADRIGDYVQCHGGVSLVEQMFQDPRLSQNKQALEGLGDLKLLFEYLTLFGIADKISFDLSLARGLDYYTGVIYEAVLLQTPTQAGEEPLNVGSVAAGGRYDGLVGMFDPKGHKVPCVGLSIGVERIFYIVEQRMKTKGEKVRTTETQVFVATPQKNFLQERLKLIAELWDSGIKAEMLYKNNPKLLTQLHYCESTGIPLVVIIGEQELKEGVIKIRSVASREEVAIKRENFVAEIQKRLSES

SEQ ID NO: 6396 - protein, 473 aa, Homo sapiens
MPLLGLLPRRAWASLLSQLLRPPCASCTGAVRCQSQVAEAVLTSQLKAHQEKPNFIIKTPKGTRDLSPQHMVVREKILDLVISCFKRHGAKGMDTPAFELKETLTEKYGEDSGLMYDLKDQGGELLSLRYDLTVPFARYLAMNKVKKMKRYHVGKVWRRESPTIVQGRYREFCQCDFDIAGQFDPMIPDAECLKIMCEILSGLQLGDFLIKMAWKDVRHEMVVKKGLAPEVADRIGDYVQCHGGVSLVEQMFQDPRLSQNKQALEGLGDLKLLFEYLTLFGIADKISFDLSLARGLDYYTGVIYEAVLLQTPTQAGEEPLNVGSVAAGGRYDGLVGMFDPKGHKVPCVGLSIGVERIFYIVEQRMKTKGEKVRTTETQVFVATPQKNFLQERLKLIAELWDSGIKAEMLYKNNPKLLTQLHYCESTGIPLVVIIGEQELKEGVIKIRSVASREEVAIKRENFVAEIQKRLSES

SEQ ID NO: 6397 - protein, 506 aa, Homo sapiens
MPLLGLLPRRAWASLLSQLLRPPCASCTGAVRCQSQVAEAVLTSQLKAHQEKPNFIIKTPKGTRDLSPQHMVVREKILDLVISCFKRHGAKGMDTPAFELKETLTEKYGEDSGLMYDLKDQGGELLSLRYDLTVPFARYLAMNKVKKMKRYHVGKVWRRESPTIVQGRYREFCQCDFDIAGQFDPMIPDAECLKIMCEILSGLQLGDFLIKVNDRRIVDGMFAVCGVPESKFRAICSSIDKLDKMAWKDVRHEMVVKKGLAPEVADRIGDYVQCHGGVSLVEQMFQDPRLSQNKQALEGLGDLKLLFEYLTLFGIADKISFDLSLARGLDYYTGVIYEAVLLQTPTQAGEEPLNVGSVAAGGRYDGLVGMFDPKGHKVPCVGLSIGVERIFYIVEQRMKTKGEKVRTTETQVFVATPQKNFLQERLKLIAELWDSGIKAEMLYKNNPKLLTQLHYCESTGIPLVVIIGEQELKEGVIKIRSVASREEVAIKRENFVAEIQKRLSES

SEQ ID NO: 6398 - protein, 506 aa, Homo sapiens; identical to SEQ ID NO: 6397

SEQ ID NO: 6399 - protein, 506 aa, Homo sapiens; identical to SEQ ID NO: 6397

SEQ ID NO: 6400 - protein, 160 aa, Homo sapiens
MVVREKILDLVISCFKRHGAKGMDTPAFELKETLTEKYGEDSGLMYDLKDQGGELLSLRYDLTVPFARYLAMNKVKKMKRYHVGKVWRRESPTIVQGRYREFCQCDFDIAGQFDPMIPDAECLKIMCEILSGLQLGDFLIKESRYCHCFEWKGIDKHLGH

SEQ ID NO: 6401 - protein, 436 aa, Homo sapiens
MVVREKILDLVISCFKRHGAKGMDTPAFELKETLTEKYGEDSGLMYDLKDQGGELLSLRYDLTVPFARYLAMNKVKKMKRYHVGKVWRRESPTIVQGRYREFCQCDFDIAGQFDPMIPDAECLKIMCEILSGLQLGDFLIKVNDRRIVDGMFAVCGVPESKFRAICSSIDKLDKMAWKDVRHEMVVKKGLAPEVADRIGDYVQCHGGVSLVEQMFQDPRLSQNKQALEGLGDLKLLFEYLTLFGIADKISFDLSLARGLDYYTGVIYEAVLLQTPTQAGEEPLNVGSVAAGGRYDGLVGMFDPKGHKVPCVGLSIGVERIFYIVEQRMKTKGEKVRTTETQVFVATPQKNFLQERLKLIAELWDSGIKAEMLYKNNPKLLTQLHYCESTGIPLVVIIGEQELKEGVIKIRSVASREEVAIKRENFVAEIQKRLSES

SEQ ID NO: 6402 - protein, 293 aa, Homo sapiens
MVVREKILDLVISCFKRHGAKGMDTPAFELKETLTEKYGEDSGLMYDLKDQGGELLSLRYDLTVPFARYLAMNKVKKMKRYHVGKVWRRESPTIVQGRYREFCQCDFDIAGQFDPMIPDAECLKIMCEILSGLQLGDFLIKVNDRRIVDGMFAVCGVPESKFRAICSSIDKLDKMAWKDVRHEMVVKKGLAPEVADRIGDYVQCHGGVSLVEQMFQDPRLSQNKQALEGLGDLKLLFEYLTLFGIADKISFDLSLARGLDYYTGVIYEAVLLQTPTQAGEEPLNVGSVAAGGR

SEQ ID NO: 6403 - protein, 436 aa, Homo sapiens; identical to SEQ ID NO: 6401

SEQ ID NO: 6404 - protein, 219 aa, Homo sapiens
  VARIANT 1: note = misc_feature - Xaa can be any naturally occurring amino acid
XASLLSQLLRPPCASCTGAVRCQSQVAEAVLTSQLKAHQEKPNFIIKTPKGTRDLSPQHMVVREKILDLVISCFKRHGAKGMDTPAFELKETLTEKYGEDSGLMYDLKDQGGELLSLRYDLTVPFARYLAMNKVKKMKRYHVGKVWRRESPTIVQGRYREFCQCDFDIAGQFDPMIPDAECLKIMCEILSGLQLGDFLIKESRYCHCFEWKGIDKHLGH

SEQ ID NO: 6405 - protein, 223 aa, Homo sapiens
MHPQVVILSLILHLADSVAGSVKVGGEAGPSVTLPCHYSGAVTSMCWNRGSCSLFTCQNGIVWTNGTHVTYRKDTRYKLLGDLSRRDVSLTIENTAVSDSGVYCCRVEHRGWFNDMKITVSLEIVPPKVTTTPIVTTVPTVTTVRTSTTVPTTTTVPMTTVPTTTVPTTMSIPTTTTVLTTMTVSTTTSVPTTTSIPTTTSVPVTTTVSTFVPPMPLPRQNHE

SEQ ID NO: 6406 - protein, 364 aa, Homo sapiens
MHPQVVILSLILHLADSVAGSVKVGGEAGPSVTLPCHYSGAVTSMCWNRGSCSLFTCQNGIVWTNGTHVTYRKDTRYKLLGDLSRRDVSLTIENTAVSDSGVYCCRVEHRGWFNDMKITVSLEIVPPKVTTTPIVTTVPTVTTVRTSTTVPTTTTVPMTTVPTTTVPTTMSIPTTTTVLTTMTVSTTTSVPTTTSIPTTTSVPVTTTVSTFVPPMPLPRQNHEPVATSPSSPQPAETHPTTLQGAIRREPTSSPLYSYTTDGNDTVTESSDGLWNNNQTQLFLEHSLLTANTTKGIYAGVCISVLVLLALLGVIIAKKYFFKKEVQQLSVSFSSLQIKALQNAVEKEVQAEDNIYIENSLYATD

SEQ ID NO: 6407 - protein, 401 aa, Homo sapiens
MHPQVVILSLILHLADSVAGSVKVGGEAGPSVTLPCHYSGAVTSMCWNRGSCSLFTCQNGIVWTNGTHVTYRKDTRYKLLGDLSRRDVSLTIENTAVSDSGVYCCRVEHRGWFNDMKITVSLEIVPPKVTTTPIVTTVPTVTTVRTSTTVPTTTTVPMTTVPTTTVPTTMSIPTTTTVLTTMTVSTTTSVPTTTSIPTTTSVPVTTTVSTFVPPMPLPRQNHEPVATSPSSPQPAETHPTTLQGAIRREPTSSPLYSYTTDGNDTVTESSDGLWNNNQTQLFLEHSLLTANTTKGIYAGVCISVLVLLALLGVIIAKMFHLAAFKLKLCKMQLKRKSKQKTISTLRIVFMPRTKTQWCSLRVYAHECRRLNRHQHIRRLLDPKTIFLFQFHLAFQHVSDTG

SEQ ID NO: 6408 - protein, 364 aa, Homo sapiens; identical to SEQ ID NO: 6406

SEQ ID NO: 6409 - protein, 401 aa, Homo sapiens; identical to SEQ ID NO: 6407

SEQ ID NO: 6410 - protein, 268 aa, Homo sapiens
MGLSPSAPAVAVQASNASASPPSGCPMHEGKMKGCPVNTEPSGPTCEKKTYSVPAHQERAYEYVECPIRGTAAENKENLDPSNLMPPPNQTPAPDQPFALSTVREESSIPRADSEKKWVYPSEQMFWNAMLKKGWKWKDEDISQKDMYNIIRIHNQNNEQAWKEILKWEALHAAECPCGPSLIRFGGKAKEYSPRARIRSWMGYELPFDRHDWIINRCGTEVRYVIDYYDGGEVNKDYQFTILDVRPALDSLSAVWDRMKVAWWRWTS

SEQ ID NO: 6411 - protein, 268 aa, Homo sapiens; identical to SEQ ID NO: 6410

SEQ ID NO: 6412 - protein, 268 aa, Homo sapiens; identical to SEQ ID NO: 6410

SEQ ID NO: 6413 - protein, 131 aa, Homo sapiens
MNLPSTKVSWAAVTLLLLLLLLPPALLSSGAAAQPLPDCCRQKTCSCRLYELLHGAGNHAAGILTLGKRRSGPPGLQGRLQRLLQASGNHAAGILTMGRRAGAEPAPRPCLGRRCSAPAAASVAPGGQSGI

SEQ ID NO: 6414 - protein, 223 aa, Homo sapiens
MAAWGCVAALGAARGLCWRAARAAAGLQGRPARRCYAVGPAQPLPRNDFPRIEGVLLLGEPVRWETSLQLIMDVLLSNGSPGAGLATPPYPHLPVLASNMDLLWMAEAKMPSDNPMSDVYGANLFHQYLQKATHDGAPELGAGGTRQQQPSASQSCISILVCTGVYNPRNPQSTEPVLGGGEPPFHGHRDLCFSPGLMEASHVVNDVNEAVQLVFRKEGWALE

SEQ ID NO: 6415 - protein, 423 aa, Homo sapiens
MAAWGCVAALGAARGLCWRAARAAAGLQGRPARRCYAVGPAQSPPTFGFLLDIDGVLVRGHRVIPAALKAFRRLVNSQGQLRVPVVFVTNAGNILQHSKAQELSALLGCEVDADQVILSHSPMKLFSEYHEKRMLVSGQGPVMENAQGLGFRNVVTVDELRMAFPLLDMVDLERRLKTTPLPRNDFPRIEGVLLLGEPVRWETSLQLIMDVLLSNGSPGAGLATPPYPHLPVLASNMDLLWMAEAKMPRFGHGTFLLCLETIYQKVTGKELRYEGLMGKPSILTYQYAEDLIRRQAERRGWAAPIRKLYAVGDNPMSDVYGANLFHQYLQKATHDGAPELGAGGTRQQQPSASQSCISILVCTGVYNPRNPQSTEPVLGGGEPPFHGHRDLCFSPGLMEASHVVNDVNEAVQLVFRKEGWALE

SEQ ID NO: 6416 - protein, 393 aa, Homo sapiens
MYAWFFLPSFSQSPPTFGFLLDIDGVLVRGHRVIPAALKAFRRLVNSQGQLRVPVVFVTNAGNILQHSKAQELSALLGCEVDADQVILSHSPMKLFSEYHEKRMLVSGQGPVMENAQGLGFRNVVTVDELRMAFPLLDMVDLERRLKTTPLPRNDFPRIEGVLLLGEPVRWETSLQLIMDVLLSNGSPGAGLATPPYPHLPVLASNMDLLWMAEAKMPRFGHGTFLLCLETIYQKVTGKELRYEGLMGKPSILTYQYAEDLIRRQAERRGWAAPIRKLYAVGDNPMSDVYGANLFHQYLQKATHDGAPELGAGGTRQQQPSASQSCISILVCTGVYNPRNPQSTEPVLGGGEPPFHGHRDLCFSPGLMEASHVVNDVNEAVQLVFRKEGWALE

SEQ ID NO: 6417 - protein, 87 aa, Homo sapiens
MELAHSLLLNEEAYNQLGEVQKAEFIFEWLRYLEKLLLATSRNDVREKQKTLVEQLLSLLNSSPGPPTRKLLAKNLAILYSIGDTFS

SEQ ID NO: 6418 - protein, 113 aa, Homo sapiens
MELAHSLLLNEEAYNQLGEVQKAEFIFEWLRYLEKLLLATSRNDVREKQKTLVEQLLSLLNSSPGPPTRKLLAKNLAILYSIGDTFSVHEAIDKCNDLIRSKDDSPSYLPTKL

SEQ ID NO: 6419 - protein, 2046 aa, Homo sapiens
MELAHSLLLNEEAYNQLGEVQKAEFIFEWLRYLEKLLLATSRNDVREKQKTLVEQLLSLLNSSPGPPTRKLLAKNLAILYSIGDTFSVHEAIDKCNDLIRSKDDSPSYLPTKLAAVVCLGSLYKKLGRILGNTFTDTVGNILKAMKSAESQGRYEIMLSLQNILNGLGAAAAPCHRDVYKAARSCLTDRSMAVRCAAAKCLLELQNEAIFMWSTDLDSVATLCFKSFEGSNYDVRISVSKLLGIILAKAVISKHPGTAASRQSIRRVSLEEVLELLGTGFLRGSSGFLRASGDMLKGTSSVSRDVRVGVTQAYVVFVSTLGGAWLEKNFAAFFSHILSLASPSHPKATQTQIDAVCCRRCVSFILRTTIGGLLGEKAQLAAVKDICQAIWKLKKVMDAVMSDGNLETRLGSTDVAASQHMLVCALQELGNLIHNLGTTAAPLLQDSSTGLLDSILSVILHPSISVRLAAAWCLHCIAVALPSYLTPLLDRCLERLTGHKSSPEAVTGFSFAVAALLGAVKHCPLGIPHGKGKIIMTLAEDLLCSAAQNSRLSAQRTQAGWLLISALMTLGPAVVSHHLARVLLLWKCVFPASPKDLETEKSRGDSFTWQVTLEGRAGALCAIKSFVSHCGDLLTEEVTQRLLPPLPCAVDLLTQLSSILKMYGSPLKTPSVVYRQRLYELLILLPPETYEGNLCAILRELAADLTAPDIQVAASTFLLPPLCHQDDLLILSPFLQETDHRFIEEQLLLGNGVACGSLEYDPYSIYEKDVEGDSVPKPLPPALSVISSASKLFGVVCAHVGETQRLLILEQLLDSIKHTKGARQQVVQLHVVSSVSSFLKYVAGSKGCLGPEEMKRFALTLVMGALESPNPLLRCAAAESWARLAQVVDDGAFTAGLAQVSFDKLKSARDVVTRTGHSLALGSLHRYLGGISSSQHLNSCIGILYTLAQDSTSPDVQTWALHSLSLIIDSAGPLYYVHVEPTLSLIIMLLLNVPPTHAEVHQSLGRCLNALITTLGPELQGNSTSISTLRTSCLLGCAVMQDNPDCLVQAQAISCLQQLHMFAPRHVNLSSLVSCLCVNLCSPYLLLRRAVLACLRQLVQREAAEVSEHAVMLAKDSREELTPDANIREVGLEGALLILLDKETDERLCHDIKETLNYMLTSMAVEKLSLWLKLCKDVLAASADFTAVTCVDTMQEEEGDKGDDASVLTTRRDEKSHPFTNPRWATRVFAAECVCRIINQCENANSAHFDIALAQEMKKRDSRNDFLVLHLADLIRMAFMAATDHSDQLRLSGLEMLLVVIRRFATVPEPEFPGHVILEQYQANVGAALRPAFTSETPPDVTAKACQVCSAWIASGVVSDLNDLRRVHQLLVSSLTKIQAGKEALSHLYNESASTMEILAVLKAWAEVYIIAVQRHKNHRQPLKTTTCLEDGIRNGSCSSDGLLDLVYADLGTLSRLWLAALQDFALLTLPSEFASQLPAEGGAFYTAETSENAKLHYYNSWALILHATALWLTSTGFVVADPDEGASNLSRPVTPTSMCQGSSSGATIKSPEDVYTDRFHLILGISVEFLCSLRSDATMESITACLHALQALLDVPWPRSKIGSDQDLGIELLNVLHRVILTRESPSIQLASLEVVRQIICAAQEHVKEKRRSAEVDDGAAEKETLPEFGEGKDTGGLVPGKSLVFATLELCVCILVRQLPELNPKLTGSPGVKATKPQILLEDGSRLVSAALVILSELPAVCSPEGSISILPTILYLTIGVLRETAVKLPGGQLSSTVAASLQALKGILSSPMARAEKSRTAWTDLLRSALTTILDCWDPVDETHQELDEVSLLTAITVFILSTSPEVTTIPCLQKRCIDKFKATLEIKDPVVQIKTYQLLHSIFQYPNPAVSYPYIYSLASCIMEKLQEIDKRKPENTAELEIFQEGIKVLETLVTVAEEHHRAQLVACLLPILISFLLDENSLGSATSIMRNLHDFALQNLMQIGPQYSSVFKSLVASSPALKARLEAAIKGNQESVKVKIPTSKYTKSPGKNSSIQLKTSFL

SEQ ID NO: 6420 - protein, 1599 aa, Homo sapiens
  VARIANT 1: note = misc_feature - Xaa can be any naturally occurring amino acid
XGEKAQLAAVKDICQAIWKLKKVMDAVMSDGNLETRLGSTDVAASQHMLVCALQELGNLIHNLGTTAAPLLQDSSTGLLDSILSVILHPSISVRLAAAWCLHCIAVALPSYLTPLLDRCLERLTGHKSSPEAVTGFSFAVAALLGAVKHCPLGIPHGKGKIIMTLAEDLLCSAAQNSRLSAQRTQAGWLLISALMTLGPAVVSHHLARVLLLWKCVFPASPKDLETEKSRGDSFTWQVTLEGRAGALCAIKSFVSHCGDLLTEEVTQRLLPPLPCAVDLLTQLSSILKMYGSPLKTPSVVYRQRLYELLILLPPETYEGNLCAILRELAADLTAPDIQVAASTFLLPPLCHQDDLLILSPFLQETDHRFIEEQLLLGNGVACGSLEYDPYSIYEKDVEGDSVPKPLPPALSVISSASKLFGVVCAHVGETQRLLILEQLLDSIKHTKGARQQVVQLHVVSSVSSFLKYVAGSKGCLGPEEMKRFALTLVMGALESPNPLLRCAAAESWARLAQVVDDGAFTAGLAQVSFDKLKSARDVVTRTGHSLALGSLHRYLGGISSSQHLNSCIGILYTLAQDSTSPDVQTWALHSLSLIIDSAGPLYYVHVEPTLSLIIMLLLNVPPTHAEVHQSLGRCLNALITTLGPELQGNSTSISTLRTSCLLGCAVMQDNPDCLVQAQAISCLQQLHMFAPRHVNLSSLVSCLCVNLCSPYLLLRRAVLACLRQLVQREAAEVSEHAVMLAKDSREELTPDANIREVGLEGALLILLDKETDERLCHDIKETLNYMLTSMAVEKLSLWLKLCKDVLAASADFTAVTCVDTMQEEEGDKGDDASVLTTRRDEKSHPFTNPRWATRVFAAECVCRIINQCENANSAHFDIALAQEMKKRDSRNDFLVLHLADLIRMAFMAATDHSDQLRLSGLEMLLVVIRRFATVPEPEFPGHVILEQYQANVGAALRPAFTSETPPDVTAKACQVCSAWIASGVVSDLNDLRRVHQLLVSSLTKIQAGKEALSHLYNESASTMEILAVLKAWAEVYIIAVQRHKNHRQPLKTTTCLEDGIRNGSCSSDGLLDLVYADLGTLSRLWLAALQDFALLTLPSEFASQLPAEGGAFYTAETSENAKLHYYNSWALILHATALWLTSTGFVVADPDEGASNLSRPVTPTSMCQGSSSGATIKSPEDVYTDRFHLILGISVEFLCSLRSDATMESITACLHALQALLDVPWPRSKIGSDQDLGIELLNVLHRVILTRESPSIQLASLEVVRQIICAAQEHVKEKRRSAEVDDGAAEKETLPEFGEGKDTGGLVPGKSLVFATLELCVCILVRQLPELNPKLTGSPGVKATKPQILLEDGSRLVSAALVILSELPAVCSPEVDETHQELDEVSLLTAITVFILSTSPEVTTIPCLQKRCIDKFKATLEIKDPVVQIKTYQLLHSIFQYPNPAVSYPYIYSLASCIMEKLQEIDKRKPENTAELEIFQEGIKVLETLVTVAEEHHRAQLVACLLPILISFLLDENSLGSATSIMRNLHDFALQNLMQIGPQYSSVFKSLVASSPALKARLEAAIKGNQESVKVKIPTSKYTKSPGKNSSIQLKTSFL

SEQ ID NO: 6421 - protein, 124 aa, Homo sapiens
  VARIANT 1: note = misc_feature - Xaa can be any naturally occurring amino acid
XLLLRRAVLACLRQLVQREAAEVSEHAVMLAKDSREELTPDANIREVGLEGALLILLDKETDERLCHDIKETLNYMLTSMAVEKLSLWLKLCKDVLAASAGKYWTLSVKIIKLKFETLHKIVYH

SEQ ID NO: 6422 - protein, 896 aa, Homo sapiens
  VARIANT 1: note = misc_feature - Xaa can be any naturally occurring amino acid
XSHPKATQTQIDAVCCRRCVSFILRTTIGGLLGEKAQLAAVKDICQAIWKLKKVMDVAASQHMLVCALQELGNLIHNLGTTAAPLLQDSSTGLLDSILSVILHPSISVRLAAAWCLHCIAVALPSYLTPLLDRCLERLTGHKSSPEAVTGFSFAVAALLGAVKHCPLGIPHGKGKIIMTLAEDLLCSAAQNSRLSAQRTQAGWLLISALMTLGPAVVSHHLARVLLLWKCVFPASPKDLETEKSRGDSFTWQVTLEGRAGALCAIKSFVSHCGDLLTEEVTQRLLPPLPCAVDLLTQLSSILKMYGSPLKTPSVVYRQRLYELLILLPPETYEGNLCAILRELAADLTAPDIQVAASTFLLPPLCHQDDLLILSPFLQETDHRFIEEQLLLGNGVACGSLEYDPYSIYEKDVEGDSVPKPLPPALSVISSASKLFGVVCAHVGETQRLLILEQLLDSIKHTKGARQQVVQLHVVSSVSSFLKYVAGSKGCLGPEEMKRFALTLVMGALESPNPLLRCAAAESWARLAQVVDDGAFTAGLAQVSFDKLKSARDVVTRTGHSLALGSLHRYLGGISSSQHLNSCIGILYTLAQDSTSPDVQTWALHSLSLIIDSAGPLYYVHVEPTLSLIIMLLLNVPPTHAEVHQSLGRCLNALITTLGPELQGNSTSISTLRTSCLLGCAVMQDNPDCLVQAQAISCLQQLHMFAPRHVNLSSLVSCLCVNLCSPYLLLRRAVLACLRQLVQREAAEVSEHAVMLAKDSREELTPDANIREVGLEGALLILLDKETDERLCHDIKETLNYMLTSMAVEKLSLWLKLCKDVLAASADFTAVTCVDTMQEEEGDKGDDASVLTTRRDEKSHPFTNPRWATRVFAAECVCRIINQCENANSAHFDIALA

SEQ ID NO: 6423 - protein, 199 aa, Homo sapiens
  VARIANT 1: note = misc_feature - Xaa can be any naturally occurring amino acid
XSLIIMLLLNVPPTHAEVHQSLGRCLNALITTLGPELQGNSTSISTLRTSCLLGCAVMQDNPDCLVQAQAISCLQQLHMFAPRHVNLSSLVSCLCEILLDNSVLVNLCSPYLLLRRAVLACLRQLVQREAAEVSEHAVMLAKDSREELTPDANIREVGLEGALLILLDKETDERLCHDIKETLNYMLTSMAVEKLSLWL

SEQ ID NO: 6424 - protein, 208 aa, Homo sapiens
MESGHLLWALLFMQSLWPQLTDGATRVYYLGIRDVQWNYAPKGRNVITNQPLDSDIVASSFLKSDKNRIGGTYKKTIYKEYKDDSYTDEVAQPAWLGFLGPVLQAEVGDVILIHLKNFATRPYTIHPHGVFYEKDSEGSLYPDGSSGPLKADDSVPPGGSHIYNWTIPEGHAPTDADPACLTWIYHSHVDAPRDIATGLIGPLITCKR

SEQ ID NO: 6425 - protein, 1158 aa, Homo sapiens
MESGHLLWALLFMQSLWPQLTDGATRVYYLGIRDVQWNYAPKGRNVITNQPLDSDIVASSFLKSDKNRIGGTYKKTIYKEYKDDSYTDEVAQPAWLGFLGPVLQAEVGDVILIHLKNFATRPYTIHPHGVFYEKDSEGSLYPDGSSGPLKADDSVPPGGSHIYNWTIPEGHAPTDADPACLTWIYHSHVDAPRDIATGLIGPLITCKRGALDGNSPPQRQDVDHDFFLLFSVVDENLSWHLNENIATYCSDPASVDKEDETFQESNRMHAINGFVFGNLPELNMCAQKRVAWHLFGMGNEIDVHTAFFHGQMLTTRGHHTDVANIFPATFVTAEMVPWEPGTWLISCQVNSHFRDGMQALYKVKSCSMAPPVDLLTGKVRQYFIEAHEIQWDYGPMGHDGSTGKNLREPGSISDKFFQKSSSRIGGTYWKVRYEAFQDETFQEKMHLEEDRHLGILGPVIRAEVGDTIQVVFYNRASQPFSMQPHGVFYEKDYEGTVYNDGSSYPGLVAKPFEKVTYRWTVPPHAGPTAQDPACLTWMYFSAADPIRDTNSGLVGPLLVCRAGALGADGKQKGVDKEFFLLFTVLDENKSWYSNANQAAAMLDFRLLSEDIEGFQDSNRMHAINGFLFSNLPRLDMCKGDTVAWHLLGLGTETDVHGVMFQGNTVQLQGMRKGAAMLFPHTFVMAIMQPDNLGTFEIYCQAGSHREAGMRAIYNVSQCPGHQATPRQRYQAARIYYIMAEEVEWDYCPDRSWEREWHNQSEKDSYGYIFLSNKDGLLGSRYKKAVFREYTDGTFRIPRPRTGPEEHLGILGPLIKGEVGDILTVVFKNNASRPYSVHAHGVLESTTVWPLAAEPGEVVTYQWNIPERSGPGPNDSACVSWIYYSAVDPIKDMYSGLVGPLAICQKGILEPHGGRSDMDREFALLFLIFDENKSWYLEENVATHGSQDPGSINLQDETFLESNKMHAINGKLYANLRGLTMYQGERVAWYMLAMGQDVDLHTIHFHAESFLYRNGENYRADVVDLFPGTFEVVEMVASNPGTWLMHCHVTDHVHAGMETLFTVFSRTEHLSPLTVITKETEKAVPPRDIEEGNVKMLGMQIPIKNVEMLASVLVAISVTLLLVVLALGGVVWYQHRQRKLRRNRRSILDDSFKLLSFKQ

SEQ ID NO: 6426 - protein, 811 aa, Homo sapiens
MESGHLLWALLFMQSLWPQLTDGATRVYYLGIRDVQWNYAPKGRNVITNQPLDSDIVASSFLKSDKNRIGGTYKKTIYKEYKDDSYTDEVAQPAWLGFLGPVLQAEVGDVILIHLKNFATRPYTIHPHGVFYEKDSEGSLYPDGSSGPLKADDSVPPGGSHIYNWTIPEGHAPTDADPACLTWIYHSHVDAPRDIATGLIGPLITCKRGALDGNSPPQRQDVDHDFFLLFSVVDENLSWHLNENIATYCSDPASVDKEDETFQESNRMHAINGFVFGNLPELNMCAQKRVAWHLFGMGNEIDVHTAFFHGQMLTTRGHHTDVANIFPATFVTAEMVPWEPGTWLISCQVNSHFRDGMQALYKVKSCSMAPPVDLLTGKVRQYFIEAHEIQWDYGPMGHDGSTGKNLREPGSISDKFFQKSSSRIGGTYWKVRYEAFQDETFQEKMHLEEDRHLGILGPVIRAEVGDTIQVVFYNRASQPFSMQPHGVFYEKDYEGTVYNDDPIRDTNSGLVGPLLVCRAGALGADGKQKGVDKEFFLLFTVLDENKSWYSNANQAAAMLDFRLLSEDIEGFQDSNRMHAINGFLFSNLPRLDMCKGDTVAWHLLGLGTETDVHGVMFQGNTVQLQGMRKGAAMLFPHTFVMAIMQPDNLGTFEIYCQAGSHREAGMRAIYNVSQCPGHQATPRQRYQAARIYYIMAEEVEWDYCPDRSWEREWHNQSEKDSYGYIFLSNKDGLLGSRYKKAVFREYTDGTFRIPRPRTGPEEHLGILGPLIKGEVGDILTVVFKNNASRPYSVHAHGVLESTTVWPLAAEP

SEQ ID NO: 6427 - protein, 891 aa, Homo sapiens
MHAINGFVFGNLPELNMCAQKRVAWHLFGMGNEIDVHTAFFHGQMLTTRGHHTDVANIFPATFVTAEMVPWEPGTWLISCQVNSHFRDGMQALYKVKSCSMAPPVDLLTGKVRQYFIEAHEIQWDYGPMGHDGSTGKNLREPGSISDKFFQKSSSRIGGTYWKVRYEAFQDETFQEKMHLEEDRHLGILGPVIRAEVGDTIQVVFYNRASQPFSMQPHGVFYEKDYEGTVYNDGSSYPGLVAKPFEKVTYRWTVPPHAGPTAQDPACLTWMYFSAADPIRDTNSGLVGPLLVCRAGALGADGKQKGVDKEFFLLFTVLDENKSWYSNANQAAAMLDFRLLSEDIEGFQDSNRMHAINGFLFSNLPRLDMCKGDTVAWHLLGLGTETDVHGVMFQGNTVQLQGMRKGAAMLFPHTFVMAIMQPDNLGTFEIYCQAGSHREAGMRAIYNVSQCPGHQATPRQRYQAARIYYIMAEEVEWDYCPDRSWEREWHNQSEKDSYGYIFLSNKDGLLGSRYKKAVFREYTDGTFRIPRPRTGPEEHLGILGPLIKGEVGDILTVVFKNNASRPYSVHAHGVLESTTVWPLAAEPGEVVTYQWNIPERSGPGPNDSACVSWIYYSAVDPIKDMYSGLVGPLAICQKGILEPHGGRSDMDREFALLFLIFDENKSWYLEENVATHGSQDPGSINLQDETFLESNKMHAINGKLYANLRGLTMYQGERVAWYMLAMGQDVDLHTIHFHAESFLYRNGENYRADVVDLFPGTFEVVEMVASNPGTWLMHCHVTDHVHAGMETLFTVFSRTEHLSPLTVITKETEKAVPPRDIEEGNVKMLGMQIPIKNVEMLASVLVAISVTLLLVVLALGGVVWYQHRQRKLRRNRRSILDDSFKLLSFKQ

SEQ ID NO: 6428 - protein, 1212 aa, Homo sapiens
MTQTLPYHLSLLNVLFPGPCSRHFKFRRGKCAQPAWRKVSAPSQDLLITKVMWAMESGHLLWALLFMQSLWPQLTDGATRVYYLGIRDVQWNYAPKGRNVITNQPLDSDIVASSFLKSDKNRIGGTYKKTIYKEYKDDSYTDEVAQPAWLGFLGPVLQAEVGDVILIHLKNFATRPYTIHPHGVFYEKDSEGSLYPDGSSGPLKADDSVPPGGSHIYNWTIPEGHAPTDADPACLTWIYHSHVDAPRDIATGLIGPLITCKRGALDGNSPPQRQDVDHDFFLLFSVVDENLSWHLNENIATYCSDPASVDKEDETFQESNRMHAINGFVFGNLPELNMCAQKRVAWHLFGMGNEIDVHTAFFHGQMLTTRGHHTDVANIFPATFVTAEMVPWEPGTWLISCQVNSHFRDGMQALYKVKSCSMAPPVDLLTGKVRQYFIEAHEIQWDYGPMGHDGSTGKNLREPGSISDKFFQKSSSRIGGTYWKVRYEAFQDETFQEKMHLEEDRHLGILGPVIRAEVGDTIQVVFYNRASQPFSMQPHGVFYEKDYEGTVYNDGSSYPGLVAKPFEKVTYRWTVPPHAGPTAQDPACLTWMYFSAADPIRDTNSGLVGPLLVCRAGALGADGKQKGVDKEFFLLFTVLDENKSWYSNANQAAAMLDFRLLSEDIEGFQDSNRMHAINGFLFSNLPRLDMCKGDTVAWHLLGLGTETDVHGVMFQGNTVQLQGMRKGAAMLFPHTFVMAIMQPDNLGTFEIYCQAGSHREAGMRAIYNVSQCPGHQATPRQRYQAARIYYIMAEEVEWDYCPDRSWEREWHNQSEKDSYGYIFLSNKDGLLGSRYKKAVFREYTDGTFRIPRPRTGPEEHLGILGPLIKGEVGDILTVVFKNNASRPYSVHAHGVLESTTVWPLAAEPGEVVTYQWNIPERSGPGPNDSACVSWIYYSAVDPIKDMYSGLVGPLAICQKGILEPHGGRSDMDREFALLFLIFDENKSWYLEENVATHGSQDPGSINLQDETFLESNKMHAINGKLYANLRGLTMYQGERVAWYMLAMGQDVDLHTIHFHAESFLYRNGENYRADVVDLFPGTFEVVEMVASNPGTWLMHCHVTDHVHAGMETLFTVFSRTEHLSPLTVITKETEKAVPPRDIEEGNVKMLGMQIPIKNVEMLASVLVAISVTLLLVVLALGGVVWYQHRQRKLRRNRRSILDDSFKLLSFKQ

SEQ ID NO: 6429 - protein, 1160 aa, Homo sapiens
MWAMESGHLLWALLFMQSLWPQLTDGATRVYYLGIRDVQWNYAPKGRNVITNQPLDSDIVASSFLKSDKNRIGGTYKKTIYKEYKDDSYTDEVAQPAWLGFLGPVLQAEVGDVILIHLKNFATRPYTIHPHGVFYEKDSEGSLYPDGSSGPLKADDSVPPGGSHIYNWTIPEGHAPTDADPACLTWIYHSHVDAPRDIATGLIGPLITCKRGALDGNSPPQRQDVDHDFFLLFSVVDENLSWHLNENIATYCSDPASVDKEDETFQESNRMHAINGFVFGNLPELNMCAQKRVAWHLFGMGNEIDVHTAFFHGQMLTTRGHHTDVANIFPATFVTAEMVPWEPGTWLISCQVNSHFRDGMQALYKVKSCSMAPPVDLLTGKVRQYFIEAHEIQWDYGPMGHDGSTGKNLREPGSISDKFFQKSSSRIGGTYWKVRYEAFQDETFQEKMHLEEDRHLGILGPVIRAEVGDTIQVVFYNRASQPFSMQPHGVFYEKDYEGTVYNDGSSYPGLVAKPFEKVTYRWTVPPHAGPTAQDPACLTWMYFSAADPIRDTNSGLVGPLLVCRAGALGADGKQKGVDKEFFLLFTVLDENKSWYSNANQAAAMLDFRLLSEDIEGFQDSNRMHAINGFLFSNLPRLDMCKGDTVAWHLLGLGTETDVHGVMFQGNTVQLQGMRKGAAMLFPHTFVMAIMQPDNLGTFEIYCQAGSHREAGMRAIYNVSQCPGHQATPRQRYQAARIYYIMAEEVEWDYCPDRSWEREWHNQSEKDSYGYIFLSNKDGLLGSRYKKAVFREYTDGTFRIPRPRTGPEEHLGILGPLIKGEVGDILTVVFKNNASRPYSVHAHGVLESTTVWPLAAEPGEVVTYQWNIPERSGPGPNDSACVSWIYYSAVDPIKDMYSGLVGPLAICQKGILEPHGGRSDMDREFALLFLIFDENKSWYLEENVATHGSQDPGSINLQDETFLESNKMHAINGKLYANLRGLTMYQGERVAWYMLAMGQDVDLHTIHFHAESFLYRNGENYRADVVDLFPGTFEVVEMVASNPGTWLMHCHVTDHVHAGMETLFTVFSRTEHLSPLTVITKETEKVPPRDIEEGNVKMLGMQIPIKNVEMLASVLVAISVTLLLVVLALGGVVWYQHRQRKLRRNRRSILDDSFKLLSFKQ

SEQ ID NO: 6430 - protein, 969 aa, Homo sapiens
MWAMESGHLLWALLFMQSLWPQLTDGATRVYYLGIRDVQWNYAPKGRNVITNQPLDSDIVASSFLKSDKNRIGGTYKKTIYKEYKDDSYTDEVAQPAWLGFLGPVLQAEVGDVILIHLKNFATRPYTIHPHGVFYEKDSEGSLYPDGSSGPLKADDSVPPGGSHIYNWTIPEGHAPTDADPACLTWIYHSHVDAPRDIATGLIGPLITCKRGALDGNSPPQRQDVDHDFFLLFSVVDENLSWHLNENIATYCSDPASVDKEDETFQESNRMHAINGFVFGNLPELNMCAQKRVAWHLFGMGNEIDVHTAFFHGQMLTTRGHHTDVANIFPATFVTAEMVPWEPGTWLISCQVNSHFRDGMQALYKVKSCSMAPPVDLLTGKVRQYFIEAHEIQWDYGPMGHDGSTGKNLREPGSISDKFFQKSSSRIGGTYWKVRYEAFQDETFQEKMHLEEDRHLGILGPVIRAEVGDTIQVVFYNRASQPFSMQPHGVFYEKDYEGTVYNDGTFEIYCQAGSHREAGMRAIYNVSQCPGHQATPRQRYQAARIYYIMAEEVEWDYCPDRSWEREWHNQSEKDSYGYIFLSNKDGLLGSRYKKAVFREYTDGTFRIPRPRTGPEEHLGILGPLIKGEVGDILTVVFKNNASRPYSVHAHGVLESTTVWPLAAEPGEVVTYQWNIPERSGPGPNDSACVSWIYYSAVDPIKDMYSGLVGPLAICQKGILEPHGGRSDMDREFALLFLIFDENKSWYLEENVATHGSQDPGSINLQDETFLESNKMHAINGKLYANLRGLTMYQGERVAWYMLAMGQDVDLHTIHFHAESFLYRNGENYRADVVDLFPGTFEVVEMVASNPGTWLMHCHVTDHVHAGMETLFTVFSRTEHLSPLTVITKETEKAVPPRDIEEGNVKMLGMQIPIKNVEMLASVLVAISVTLLLVVLALGGVVWYQHRQRKLRRNRRSILDDSFKLLSFKQ

SEQ ID NO: 6431 - protein, 63 aa, Homo sapiens
MWAMESGHLLWALLFMQSLWPQLTDGATRVYYLGIRDVQWNYAPKGRNVITNQPLDSDIYVKM

SEQ ID NO: 6432 - protein, 88 aa, Homo sapiens
MTSSRLWFSLLLAAAFAGRATALWPWPQNFQTSDQRYVLYPNNFQFQYDVSSAAQPGCSVLDEAFQRYRDLLFGSGSWPRPYLTANMY

SEQ ID NO: 6433 - protein, 143 aa, Homo sapiens
MTSSRLWFSLLLAAAFAGRATALWPWPQNFQTSDQRYVLYPNNFQFQYDVSSAAQPGCSVLDEAFQRYRDLLFGSGSWPRPYLTGKRHTLEKNVLVVSVVTPGCNQLPTLESVENYTLTINDDQCLLLSETVWGALRGCHGVQ

SEQ ID NO: 6434 - protein, 529 aa, Homo sapiens
MTSSRLWFSLLLAAAFAGRATALWPWPQNFQTSDQRYVLYPNNFQFQYDVSSAAQPGCSVLDEAFQRYRDLLFGSGSWPRPYLTGKRHTLEKNVLVVSVVTPGCNQLPTLESVENYTLTINDDQCLLLSETVWGALRGLETFSQLVWKSAEGTFFINKTEIEDFPRFPHRGLLLDTSRHYLPLSSILDTLDVMAYNKLNVFHWHLVDDPSFPYESFTFPELMRKGSYNPVTHIYTAQDVKEVIEYARLRGIRVLAEFDTPGHTLSWGPGIPGLLTPCYSGSEPSGTFGPVNPSLNNTYEFMSTFFLEVSSVFPDFYLHLGGDEVDFTCWKSNPEIQDFMRKKGFGEDFKQLESFYIQTLLDIVSSYGKGYVVWQEVFDNKVKIQPDTIIQVWREDIPVNYMKELELVTKAGFRALLSAPWYLNRISYGPDWKDFYIVEPLAFEGTPEQKALVIGGEACMWGEYVDNTNLVPRLWPRAGAVAERLWSNKLTSDLTFAYERLSHFRCELLRRGVQAQPLNVGFCEQEFEQT

SEQ ID NO: 6435 - protein, 509 aa, Homo sapiens
MTSSRLWFSLLLAAAFAGRATALWPWPQNFQTSDQRYVLYPNNFQFQYDVSSAAQPGCSVLDEAFQRYRDLLFGSGSWPRPYLTGKRHTLEKNVLVVSVVTPGCNQLPTLESVENYTLTINDDQCLLLSETVWGALRGLETFSQLVWKSAEGTFFINKTEIEDFPRFPHRGLLLDTSRHYLPLSSILDTLDVMAYNKLNVFHWHLVDDPSFPYESFTFPELMRKGSYNPVTHIYTAQDVKEVIEYARLRGIRVLAEFDTPGHTLSWGPGIPGLLTPCYSGSEPSGTFGPVNPSLNNTYEFMSTFFLEVSSVFPDFYLHLGGDEVDFTCWKSNPEIQDFMRKKGFGEDFKQLESFYIQTLLDIVSSYGKGYVVWQEVFDNKVKIQPDTIIQVWREDIPVNYMKELELVTKAGFRALLSAPWYLNRISYGPDWKDFYIVEPLAFEGTPEQKALVIGGEACMWGEYVDNTNLVPRLWPRAGAVAERLWSNKLTSDLTFAYERLSHFRCELLR

SEQ ID NO: 6436 - protein, 373 aa, Homo sapiens
MTSSRLWFSLLLAAAFAGRATALWPWPQNFQTSDQRYVLYPNNFQFQYDVSSAAQPGCSVLDEAFQRYRDLLFGSGSWPRPYLTGKRHTLEKNVLVVSVVTPGCNQLPTLESVENYTLTINDDQCLLLSETVWGALRGLETFSQLVWKSAEGTFFINKTEIEDFPRFPHRGLLLDTSRHYLPLSSILDTLDVMAYNKLNVFHWHLVDDPSFPYESFTFPELMRKGSYNPVTHIYTAQDVKEVIEYARLRGIRVLAEFDTPGHTLSWGPGIPGLLTPCYSGSEPSGTFGPVNPSLNNTYEFMSTFFLEVSSVFPDFYLHLGGDEVDFTCWKSNPEIQDFMRKKGFGEDFKQLESFYIQTFSQTQSYRCGERIFQ

SEQ ID NO: 6437 - protein, 143 aa, Homo sapiens
MTSSRLWFSLLLAAAFAGRATALWPWPQNFQTSDQRYVLYPNNFQFQYDVSSAAQPGCSVLDEAFQRYRDLLFGSGSWPRPYLTGKRHTLEKNVLVVSVVTPGCNQLPTLESVENYTLTINDDQCLLLSETVWGALRVLYQQD

SEQ ID NO: 6438 - protein, 119 aa, Homo sapiens
MTSSRLWFSLLLAAAFAGRATALWPWPQNFQTSDQRYVLYPNNFQFQYDVSSAAQPGCSVLDEAFQRYRDLLFGSGSWPRPYLTGLSLSFRLECSGVITAYSNLELQDSSSLPASLMSS

SEQ ID NO: 6439 - protein, 540 aa, Homo sapiens
MTSSRLWFSLLLAAAFAGRATALWPWPQNFQTSDQRYVLYPNNFQFQYDVSSAAQPGCSVLDEAFQRYRDLLFGSGSWPRPYLTGWPHQAYPVFLGKRHTLEKNVLVVSVVTPGCNQLPTLESVENYTLTINDDQCLLLSETVWGALRGLETFSQLVWKSAEGTFFINKTEIEDFPRFPHRGLLLDTSRHYLPLSSILDTLDVMAYNKLNVFHWHLVDDPSFPYESFTFPELMRKGSYNPVTHIYTAQDVKEVIEYARLRGIRVLAEFDTPGHTLSWGPGIPGLLTPCYSGSEPSGTFGPVNPSLNNTYEFMSTFFLEVSSVFPDFYLHLGGDEVDFTCWKSNPEIQDFMRKKGFGEDFKQLESFYIQTLLDIVSSYGKGYVVWQEVFDNKVKIQPDTIIQVWREDIPVNYMKELELVTKAGFRALLSAPWYLNRISYGPDWKDFYIVEPLAFEGTPEQKALVIGGEACMWGEYVDNTNLVPRLWPRAGAVAERLWSNKLTSDLTFAYERLSHFRCELLRRGVQAQPLNVGFCEQEFEQT

SEQ ID NO: 6440 - protein, 318 aa, Homo sapiens
  VARIANT 1: note = misc_feature - Xaa can be any naturally occurring amino acid
XFQFQYDVSSAAQPGCSVLDEAFQRYRDLLFGSGSWPRPYLTGKRHTLEKNVLVVSVVTPGCNQLPTLESVENYTLTINDDQCLLLSETVWGALRGLETFSQLVWKSAEGTFFINKTEIEDFPRFPHRGLLLDTSRHYLPLSSILDTLDVMAYNKLNVFHWHLVDDPSFPYESFTFPELMRKGSYNPVTHIYTAQDVKEVIEYARLRGIRVLAEFDTPGHTLSWGPGIPGLLTPCYSGSEPSGTFGPVNPSLNNTYEFMSTFFLEVSSVFPDFYLHLGGDEVDFTCWKSNPEIQDFMRKKGFGEDFKQLESFYIQTYP

SEQ ID NO: 6441 - protein, 128 aa, Homo sapiens
  VARIANT 1: note = misc_feature - Xaa can be any naturally occurring amino acid
XFSLLLAAAFAGRATALWPWPQNFQTSDQRYVLYPNNFQFQYDVSSAAQPGCSVLDEAFQRYRDLLFGSGSWPRPYLTGKRHTLEKNVLVVSVVTPGCNQLPTLESVENCIPVPFARRRLLSSFCCGN

SEQ ID NO: 6442 - protein, 331 aa, Homo sapiens
MAFNKFNVLHWHIVDDQSFPYQSITFPELSNKGSYSLSHVYTPNDVRMVIEYARLRGIRVLPEFDTPGHTLSWGKGQKDLLTPCYSRQNKLDSFGPINPTLNTTYSFLTTFFKEISEVFPDQFIHLGGDEVEFKCWESNPKIQDFMRQKGFGTDFKKLESFYIQKVLDIIATINKGSIVWQEVFDDKAKLAPGTIVEVWKDSAYPEELSRVTASGFPVILSAPWYLDLISYGQDWRKYYKVEPLDFGGTQKQKQLFIGGEACLWGEYVDATNLTPRLWPRASAVGERLWSSKDVRDMDDAYDRLTRHRCRMVERGIAAQPLYAGYCNHENM

SEQ ID NO: 6443 - protein, 35 aa, Homo sapiens
MDDAYDRLTRHRCRMVERGIAAQPLYAGYCNHENM

SEQ ID NO: 6444 - protein, 556 aa, Homo sapiens
MELCGLGLPRPPMLLALLLATLLAAMLALLTQVALVVQVAEAARAPSVSAKPGPALWPLPLLVKMTPNLLHLAPENFYISHSPNSTAGPSCTLLEEAFRRYHGYIFGFYKWHHEPAEFQAKTQVQQLLVSITLQSECDAFPNISSDESYTLLVKEPVAVLKANRVWGALRGLETFSQLVYQDSYGTFTINESTIIDSPRFSHRGILIDTSRHYLPVKIILKTLDAMAFNKFNVLHWHIVDDQSFPYQSITFPELSNKGSYSLSHVYTPNDVRMVIEYARLRGIRVLPEFDTPGHTLSWGKGQKDLLTPCYSRQNKLDSFGPINPTLNTTYSFLTTFFKEISEVFPDQFIHLGGDEVEFKCWESNPKIQDFMRQKGFGTDFKKLESFYIQKVLDIIATINKGSIVWQEVFDDKAKLAPGTIVEVWKDSAYPEELSRVTASGFPVILSAPWYLDLISYGQDWRKYYKVEPLDFGGTQKQKQLFIGGEACLWGEYVDATNLTPRLWPRASAVGERLWSSKDVRDMDDAYDRLTRHRCRMVERGIAAQPLYAGYCNHENM

SEQ ID NO: 6445 - protein, 52 aa, Homo sapiens
  VARIANT 1: note = misc_feature - Xaa can be any naturally occurring amino acid
XDATNLTPRLWPRASAVGERLWSSKDVRDMDDAYDRLTRHRCRMVEGLASFL

SEQ ID NO: 6446 - protein, 170 aa, Homo sapiens
  VARIANT 1: note = misc_feature - Xaa can be any naturally occurring amino acid
XFGTDFKKLESFYIQKVLDIIATINKGSIVWQEVFDDKAKLAPGTIVEVWKDSAYPEELSRVTASGFPVILSAPWYLDLISYGQDWRKYYKVEPLDFGGTQKQKQLFIGGEACLWGEYVDATNLTPRLWPRASAVGERLWSSKDVRDMDDAYDRLTRHRCRMVEGLASFL

SEQ ID NO: 6447 - protein, 202 aa, Homo sapiens
  VARIANT 1: note = misc_feature - Xaa can be any naturally occurring amino acid
XNTTYSFLTTFFKEISEVFPDQFIHLGGDEVEFKCWVLDIIATINKGSIVWQEVFDDKAKLAPGTIVEVWKDSAYPEELSRVTASGFPVILSAPWYLDLISYGQDWRKYYKVEPLDFGGTQKQKQLFIGGEACLWGEYVDATNLTPRLWPRASAVGERLWSSKDVRDMDDAYDRLTRHRCRMVERGIAAQPLYAGYCNHENM

SEQ ID NO: 6448 - protein, 70 aa, Homo sapiens
MGEPGQSPSPRSSHGSPPTLSTLTLLLLLCGHAHSQCKILRCNADSPSYLRTCRNALIRRCIRLRWIIFL

SEQ ID NO: 6449 - protein, 93 aa, Homo sapiens
MGEPGQSPSPRSSHGSPPTLSTLTLLLLLCGHAHSQCKILRCNAEYVSSTLSLRGGGSSGALRGGGGGGRGGGVGSGGLCRALRSYALCTRRT

SEQ ID NO: 6450 - protein, 426 aa, Homo sapiens
MGEPGQSPSPRSSHGSPPTLSTLTLLLLLCGHAHSQCKILRCNAEYVSSTLSLRGGGSSGALRGGGGGGRGGGVGSGGLCRALRSYALCTRRTARTCRGDLAFHSAVHGIEDLMIQHNCSRQGPTAPPPPRGPALPGAGSGLPAPDPCDYEGRFSRLHGRPPGFLHCASFGDPHVRSFHHHFHTCRVQGAWPLLDNDFLFVQATSSPMALGANATATRKLTIIFKNMQECIDQKVYQAEVDNLPVAFEDGSINGGDRPGGSSLSIQTANPGNHVEIQAAYIGTTIIIRQTAGQLSFSIKVAEDVAMAFSAEQDLQLCVGGCPPSQRLSRSERNRRGAITIDTARRLCKEGLPVEDAYFHSCVFDVLISGDPNFTVAAQAALEDARAFLPDLEKLHLFPSDAGVPLSSATLLAPLLSGLFVLWLCIQ

SEQ ID NO: 6451 - protein, 313 aa, Homo sapiens
MIQHNCSRQGPTAPPPPRGPALPGAGSGLPAPDPCDYEGRFSRLHGRPPGFLHCASFGDPHVRSFHHHFHTCRVQGAWPLLDNDFLFVQATSSPMALGANATATRKLTIIFKNMQECIDQKVYQAEVDNLPVAFEDGSINGGDRPGGSSLSIQTANPGNHVEIQAAYIGTTIIIRQTAGQLSFSIKVAEDVAMAFSAEQDLQLCVGGCPPSQRLSRSERNRRGAITIDTARRLCKEGLPVEDAYFHSCVFDVLISGDPNFTVAAQAALEDARAFLPDLEKLHLFPSDAGVPLSSATLLAPLLSGLFVLWLCIQ

SEQ ID NO: 6452 - protein, 200 aa, Homo sapiens
MQECIDQKVYQAEVDNLPVAFEDGSINGGDRPGGSSLSIQTANPGNHVEIQAAYIGTTIIIRQTAGQLSFSIKVAEDVAMAFSAEQDLQLCVGGCPPSQRLSRSERNRRGAITIDTARRLCKEGLPVEDAYFHSCVFDVLISGDPNFTVAAQAALEDARAFLPDLEKLHLFPSDAGVPLSSATLLAPLLSGLFVLWLCIQ

SEQ ID NO: 6453 - protein, 200 aa, Homo sapiens; identical to SEQ ID NO: 6452

SEQ ID NO: 6454 - protein, 200 aa, Homo sapiens; identical to SEQ ID NO: 6452

SEQ ID NO: 6455 - protein, 118 aa, Homo sapiens
MWVTKLLPALLLQHVLLHLLLLPIAIPYAEGQRKRRNTIHEFKKSAKTTLIKIDPALKIKTKKVNTADQCANRCTRNKGLPFTCKAFVFDKARKQCLWFPFNSMSSGVKKEFGHEFDL

SEQ ID NO: 6456 - protein, 141 aa, Homo sapiens
MWVTKLLPALLLQHVLLHLLLLPIAIPYAEGQRKRRNTIHEFKKSAKTTLIKIDPALKIKTKKVNTADQCANRCTRNKGLPFTCKAFVFDKARKQCLWFPFNSMSSGVKKEFGHEFDLYENKDYIRNCIIGKGRSYKGTVS

SEQ ID NO: 6457 - protein, 161 aa, Homo sapiens
MWVTKLLPALLLQHVLLHLLLLPIAIPYAEGQRKRRNTIHEFKKSAKTTLIKIDPALKIKTKKVNTADQCANRCTRNKGLPFTCKAFVFDKARKQCLWFPFNSMSSGVKKEFGHEFDLYENKDYIRNCIIGKGRSYKGTVSITKSGIKCQPWSSMIPHEHR

SEQ ID NO: 6458 - protein, 210 aa, Homo sapiens
MWVTKLLPALLLQHVLLHLLLLPIAIPYAEGQRKRRNTIHEFKKSAKTTLIKIDPALKIKTKKVNTADQCANRCTRNKGLPFTCKAFVFDKARKQCLWFPFNSMSSGVKKEFGHEFDLYENKDYIRNCIIGKGRSYKGTVSITKSGIKCQPWSSMIPHEHSFLPSSYRGKDLQENYCRNPRGEEGGPWCFTSNPEVRYEVCDIPQCSEGK

SEQ ID NO: 6459 - protein, 728 aa, Homo sapiens
MWVTKLLPALLLQHVLLHLLLLPIAIPYAEGQRKRRNTIHEFKKSAKTTLIKIDPALKIKTKKVNTADQCANRCTRNKGLPFTCKAFVFDKARKQCLWFPFNSMSSGVKKEFGHEFDLYENKDYIRNCIIGKGRSYKGTVSITKSGIKCQPWSSMIPHEHSFLPSSYRGKDLQENYCRNPRGEEGGPWCFTSNPEVRYEVCDIPQCSEVECMTCNGESYRGLMDHTESGKICQRWDHQTPHRHKFLPERYPDKGFDDNYCRNPDGQPRPWCYTLDPHTRWEYCAIKTCADNTMNDTDVPLETTECIQGQGEGYRGTVNTIWNGIPCQRWDSQYPHEHDMTPENFKCKDLRENYCRNPDGSESPWCFTTDPNIRVGYCSQIPNCDMSHGQDCYRGNGKNYMGNLSQTRSGLTCSMWDKNMEDLHRHIFWEPDASKLNENYCRNPDDDAHGPWCYTGNPLIPWDYCPISRCEGDTTPTIVNLDHPVISCAKTKQLRVVNGIPTRTNIGWMVSLRYRNKHICGGSLIKESWVLTARQCFPSRDLKDYEAWLGIHDVHGRGDEKCKQVLNVSQLVYGPEGSDLVLMKLARPAVLDDFVSTIDLPNYGCTIPEKTSCSVYGWGYTGLINYDGLLRVAHLYIMGNEKCSQHHRGKVTLNESEICAGAEKIGSGPCEGDYGGPLVCEQHKMRMVLGVIVPGRGCAIPNRPGIFVRVAYYAKWIHKIILTYKVPQS

SEQ ID NO: 6460 - protein, 290 aa, Homo sapiens
MWVTKLLPALLLQHVLLHLLLLPIAIPYAEGQRKRRNTIHEFKKSAKTTLIKIDPALKIKTKKVNTADQCANRCTRNKGLPFTCKAFVFDKARKQCLWFPFNSMSSGVKKEFGHEFDLYENKDYIRNCIIGKGRSYKGTVSITKSGIKCQPWSSMIPHEHSFLPSSYRGKDLQENYCRNPRGEEGGPWCFTSNPEVRYEVCDIPQCSEVECMTCNGESYRGLMDHTESGKICQRWDHQTPHRHKFLPERYPDKGFDDNYCRNPDGQPRPWCYTLDPHTRWEYCAIKTCET

SEQ ID NO: 6461 - protein, 728 aa, Homo sapiens; identical to SEQ ID NO: 6459

SEQ ID NO: 6462 - protein, 184 aa, Homo sapiens
MWVTKLLPALLLQHVLLHLLLLPIAIPYAEGQRKRRNTIHEFKKSAKTTLIKIDPALKIKTKKVNTADQCANRCTRNKGLPFTCKAFVFDKARKQCLWFPFNSMSSGVKKEFGHEFDLYENKDYIRNCIIGKGRSYKGTVSITKSGIKCQPWSSMIPHEHSGGDDCLVESTFYSIPFWGHNSAR

SEQ ID NO: 6463 - protein, 205 aa, Homo sapiens
MWVTKLLPALLLQHVLLHLLLLPIAIPYAEGQRKRRNTIHEFKKSAKTTLIKIDPALKIKTKKVNTADQCANRCTRNKGLPFTCKAFVFDKARKQCLWFPFNSMSSGVKKEFGHEFDLYENKDYIRNCIIGKGRSYKGTVSITKSGIKCQPWSSMIPHEHSYRGKDLQENYCRNPRGEEGGPWCFTSNPEVRYEVCDIPQCSEGK

SEQ ID NO: 6464 - protein, 285 aa, Homo sapiens
MWVTKLLPALLLQHVLLHLLLLPIAIPYAEGQRKRRNTIHEFKKSAKTTLIKIDPALKIKTKKVNTADQCANRCTRNKGLPFTCKAFVFDKARKQCLWFPFNSMSSGVKKEFGHEFDLYENKDYIRNCIIGKGRSYKGTVSITKSGIKCQPWSSMIPHEHSYRGKDLQENYCRNPRGEEGGPWCFTSNPEVRYEVCDIPQCSEVECMTCNGESYRGLMDHTESGKICQRWDHQTPHRHKFLPERYPDKGFDDNYCRNPDGQPRPWCYTLDPHTRWEYCAIKTCET

SEQ ID NO: 6465 - protein, 723 aa, Homo sapiens
MWVTKLLPALLLQHVLLHLLLLPIAIPYAEGQRKRRNTIHEFKKSAKTTLIKIDPALKIKTKKVNTADQCANRCTRNKGLPFTCKAFVFDKARKQCLWFPFNSMSSGVKKEFGHEFDLYENKDYIRNCIIGKGRSYKGTVSITKSGIKCQPWSSMIPHEHSYRGKDLQENYCRNPRGEEGGPWCFTSNPEVRYEVCDIPQCSEVECMTCNGESYRGLMDHTESGKICQRWDHQTPHRHKFLPERYPDKGFDDNYCRNPDGQPRPWCYTLDPHTRWEYCAIKTCADNTMNDTDVPLETTECIQGQGEGYRGTVNTIWNGIPCQRWDSQYPHEHDMTPENFKCKDLRENYCRNPDGSESPWCFTTDPNIRVGYCSQIPNCDMSHGQDCYRGNGKNYMGNLSQTRSGLTCSMWDKNMEDLHRHIFWEPDASKLNENYCRNPDDDAHGPWCYTGNPLIPWDYCPISRCEGDTTPTIVNLDHPVISCAKTKQLRVVNGIPTRTNIGWMVSLRYRNKHICGGSLIKESWVLTARQCFPSRDLKDYEAWLGIHDVHGRGDEKCKQVLNVSQLVYGPEGSDLVLMKLARPAVLDDFVSTIDLPNYGCTIPEKTSCSVYGWGYTGLINYDGLLRVAHLYIMGNEKCSQHHRGKVTLNESEICAGAEKIGSGPCEGDYGGPLVCEQHKMRMVLGVIVPGRGCAIPNRPGIFVRVAYYAKWIHKIILTYKVPQS

SEQ ID NO: 6466 - protein, 655 aa, Homo sapiens
MGRWAWVPSPWPPPGLGPFLLLLLLLLLLPRGFQPQPGGNRTESPEPNATATPAIPTILVTSVTSETPATSAPEAEGPQSGGLPPPPRAVPSSSSPQAQALTEDGRPCRFPFRYGGRMLHACTSEGSAHRKWCATTHNYDRDRAWGYCVEATPPPGGPAALDPCASGPCLNGGSCSNTQDPQSYHCSCPRAFTGKDCGTEKCFDETRYEYLEGGDRWARVRQGHVEQCECFGGRTWCEGTRHTACLSSPCLNGGTCHLIVATGTTVCACPPGFAGRLCNIEPDERCFLGNGTGYRGVASTSASGLSCLAWNSDLLYQELHVDSVGAAALLGLGPHAYCRNPDNDERPWCYVVKDSALSWEYCRLEACESLTRVQLSPDLLATLPEPASPGRQACGRRHKKRTFLRPRIIGGSSSLPGSHPWLAAIYIGDSFCAGSLVHTCWVVSAAHCFSHSPPRDSVSVVLGQHFFNRTTDVTQTFGIEKYIPYTLYSVFNPSDHDLVLIRLKKKGDRCATRSQFVQPICLPEPGSTFPAGHKCQIAGWGHLDENVSGYSSSLREALVPLVADHKCSSPEVYGADISPNMLCAGYFDCKSDACQGDSGGPLACEKNGVAYLYGIISWGDGCGRLHKPGVYTRVANYVDWINDRIRPPRRLVAPS

SEQ ID NO: 6467 - protein, 662 aa, Homo sapiens
MGRWAWVPSPWPPPGLGPFLLLLLLLLLLPRGFQPQPGGNRTESPEPNATATPAIPTILVTSVTSETPATSAPEAEGPQSGGLPPPPRAVPSSSSPQAQALTEDGRPCRFPFRYGGRMLHACTSEGSAHRKWCATTHNYDRDRAWGYCVEATPPPGGPAALDPCASGPCLNGGSCSNTQDPQSYHCSCPRAFTGKDCGTEKCFDETRYEYLEGGDRWARVRQGHVEQCECFGGRTWCEGTRHTACLSSPCLNGGTCHLIVATGTTVCACPPGFAGRLCNIEPDERCFLGNGTGYRGVASTSASGLSCLAWNSDLLYQELHVDSVGAAALLGLGPHAYCRNPDNDERPWCYVVKDSALSWEYCRLEACDLETEGRESLTRVQLSPDLLATLPEPASPGRQACGRRHKKRTFLRPRIIGGSSSLPGSHPWLAAIYIGDSFCAGSLVHTCWVVSAAHCFSHSPPRDSVSVVLGQHFFNRTTDVTQTFGIEKYIPYTLYSVFNPSDHDLVLIRLKKKGDRCATRSQFVQPICLPEPGSTFPAGHKCQIAGWGHLDENVSGYSSSLREALVPLVADHKCSSPEVYGADISPNMLCAGYFDCKSDACQGDSGGPLACEKNGVAYLYGIISWGDGCGRLHKPGVYTRVANYVDWINDRIRPPRRLVAPS

SEQ ID NO: 6468 - protein, 700 aa, Homo sapiens
MLKMLSFKLLLLAVALGFFEGDAKFGERNEGSGARRRRCLNGNPPKRLKRRDRRMMSQLELLSGGEMLCGGFYPRLSCCLRSDSPGLGRLENKIFSVTNNTECGKLLEEIKCALCSPHSQSLFHSPEREVLERDLVLPLLCKDYCKEFFYTCRGHIPGFLQTTADEFCFYYARKDGGLCFPDFPRKQVRGPASNYLDQMEEYDKVEEISRKHKHNCFCIQEVVSGLRQPVGALHSGDGSQRLFILEKEGYVKILTPEGEIFKEPYLDIHKLVQSGIKGGDERGLLSLAFHPNYKKNGKLYVSYTTNQERWAIGPHDHILRVVEYTVSRKNPHQVDLRTARVFLEVAELHRKHLGGQLLFGPDGFLYIILGDGMITLDDMEEMDGLSDFTGSVLRLDVDTDMCNVPYSIPRSNPHFNSTNQPPEVFAHGLHDPGRCAVDRHPTDININLTILCSDSNGKNRSSARILQIIKGKDYESEPSLLEFKPFSNGPLVGGFVYRGCQSERLYGSYVFGDRNGNFLTLQQSPVTKQWQEKPLCLGTSGSCRGYFSGHILGFGEDELGEVYILSSSKSMTQTHNGKLYKIVDPKRPLMPEECRATVQPAQTLTSECSRLCRNGYCTPTGKCCCSPGWEGDFCRTAKCEPACRHGGVCVRPNKCLCKKGYLGPQCEQVDRNIRRVTRAGILDQIIDMTSYLLDLTSYIV

SEQ ID NO: 6469 - protein, 320 aa, Homo sapiens
MLKMLSFKLLLLAVALGFFEGDAKFGERNEGSGARRRRCLNGNPPKRLKRRDRRMMSQLELLSGGEMLCGGFYPRLSCCLRSDSPGLGRLENKIFSVTNNTECGKLLEEIKCALCSPHSQSLFHSPEREVLERDLVLPLLCKDYCKEFFYTCRGHIPGFLQTTADEFCFYYARKDGGLCFPDFPRKQVRGPASNYLDQMEEYDKVEEISRKHKHNCFCIQEVVSGLRQPVGALHSGDGSQRLFILEKEGYVKILTPEGEIFKEPYLDIHKLVQSGIKVGFLNFIYFCAGYVNFILVLPSSLKVFLCNKRKNLAGENKGAT

SEQ ID NO: 6470 - protein, 782 aa, Homo sapiens
MARARAGALLALWVLGAAAHPQCLDFRPPFRPTQPLRLCAQYSDFGCCDEGRDAELTRRFWALASRVDAAEWAACAGYARDLLCQECSPYAAHLYDAEDPFTPLRTVPGLCQDYCLDMWHKCRGLFRHLSTDQELWALEGNLARFCRYLSLDDTDYCFPYLLVNKNLNSNLGHVVADAKGCLQLCLEEVANGLRNPVAMVHARDGTHRFFVAEQVGLVWAYLPDRSRLGKPFLNISRVVLTSPWEGDERGFLGIAFHPSFQHNRRLYVYYSVGIRSSEWIRISEFRVSEDDENAVDHSSERIILEVKEPASNHNGGQLLFGDDGYLYIFTGDGGMAGDPFGTFGNAQNKSALLGKVLRIDVDRKERGLPYGIPPDNPFVGDPAAQPEVYALGVRNMWRCSFDRGDPSSGTGRGRLFCGDVGQNKFEEVDVVERGGNYGWRAREGFECYDRSLCANTSLNDLLPIFAYPHTVGKSVTGGYVYRGCEYPNLNGLYIFGDFMSGRLMSLQENPGTGQWQYSEICMGHGQTCEFPGLINNYYPYIISFGEDEAGELYFMSTGEPSATAPRGVVYKIIDASRRAPPGKCQIQPAQVKIRSRLIPFVPKEKFIPKTRSTPRPTARAPTRAPRRGRPTAAPPAPTPRPARPTQQPGSRRGGGRRRGRLNSASRAFRDGEVRLVRPAGLSSGSGRVEVFVGGRWGTVCDDSWNISGAAVVCRQLGFAYAVRAVKRAEFGQGGSLPILLDDVRCAGWERNLLECQHNGVGTHNCEHDEDAGVVCSHQNPDL

SEQ ID NO: 6471 - protein, 608 aa, Homo sapiens
MARARAGALLALWVLGAAAHPQCLDFRPPFRPTQPLRLCAQYSDFGCCDEGRDAELTRRFWALASRVDAAEWAACAGYARDLLCQECSPYAAHLYDAEDPFTPLRTVPGLCQDYCLDMWHKCRGLFRHLSTDQELWALEGNLARFCRYLSLDDTDYCFPYLLVNKNLNSNLGHVVADAKGCLQLCLEEVANGLRNPVAMVHARDGTHRFFVAEQVGLVWAYLPDRSRLGKPFLNISRVVLTSPWEGDERGFLGIAFHPSFQHNRRLYVYYSVGIRSSEWIRISEFRVSEDDENAVDHSSERIILEVKEPASNHNGGQLLFGDDGYLYIFTGDGGMAGDPFGTFGNAQNKSALLGKVLRIDVDRKERGLPYGIPPDNPFVGDPAAQPEVYALGVRNMWRCSFDRGDPSSGTGRGRLFCGDVGQNKFEEVDVVERGGNYGWRAREGFECYDRSLCANTSLNDLLPIFAYPHTVGKSVTGGYVYRGCEYPNLNGLYIFGDFMSGRLMSLQENPGTGQWQYSEICMGHGQTCEFPGLINNYYPYIISFGEDEAGELYFMSTGEPSATAPRGVVYKIIDASSCKARSAMPGYVPAPSVCSSLTSQPFILQWWK

SEQ ID NO: 6472 - protein, 724 aa, Homo sapiens
MLRTSTPNLCGGLHCRAPWLSSGILCLCLIFLLGQVGLLQGHPQCLDYGPPFQPPLHLEFCSDYESFGCCDQHKDRRIAARYWDIMEYFDLKRHELCGDYIKDILCQECSPYAAHLYDAENTQTPLRNLPGLCSDYCSAFHSNCHSAISLLTNDRGLQESHGRDGTRFCHLLDLPDKDYCFPNVLRNDYLNRHLGMVAQDPQGCLQLCLSEVANGLRNPVSMVHAGDGTHRFFVAEQVGVVWVYLPDGSRLEQPFLDLKNIVLTTPWIGDERGFLGLAFHPKFRHNRKFYIYYSCLDKKKVEKIRISEMKVSRADPNKADLKSERVILEIEEPASNHNGGQLLFGLDGYMYIFTGDGGQAGDPFGLFGNAQNKSSLLGKVLRIDVNRAGSHGKRYRVPSDNPFVSEPGAHPAIYAYGIRNMWRCAVDRGDPITRQGRGRIFCGDVGQNRFEEVDLILKGGNYGWRAKEGFACYDKKLCHNASLDDVLPIYAYGHAVGKSVTGGYVYRGCESPNLNGLYIFGDFMSGRLMALQEDRKNKKWKKQDLCLGSTTSCAFPGLISTHSKFIISFAEDEAGELYFLATSYPSAYAPRGSIYKFVDPSRRAPPGKCKYKPVPVRTKSKRIPFRPLAKTVLDLLKEQSEKAARKSSSATLASGPAQGLSEKGSSKKLASPTSSKNTLRGPGTKKKARVGPHVRQGKRRKSLKSHSGRMRPSAEQKRAGRSLP

SEQ ID NO: 6473 - protein, 543 aa, Homo sapiens
MLGFLSRGPSMKLCMGLACVLSLWNTVSGIKGEAKKEKGMTFLPTTGKWVIRAPFQLTCLEIKMLRRKKMGHSRAALNPDLLLSGLREEERKEKGVAFLATTELPARSIDLSALNLTELVNGMLSRALKDSKKFFSLLSVTSYSSFAFHKFSVAVYNISNLKTVDPAKFPTRYCYCLNNRTNDLSDFTALLVDIIGNSTSYLTEIFKSTSILSVNQSNESDCIFICVMTGKSGRNLSDFWEIEEKYPIINYTFTSGLSGVLGAATRGTARTSKPTTKSQKTLPSTSPGHWTQSTPWASALRSSPWTETAAPSETEETLNTGRPPELPARATATWFSASHTLPALATRRVARTQWLTADRQTWASISSVPWAQTISEKKPGGSLWETRSSPPTTAGTEEAMNTTSLLAPAAEIMATPGSPSQASPTLGAFTHGTQTPSPTKATAPRYPQTGDLSAEWPFTAGEEPVLVPRPHQVSRCPQPLFKVGAMAAAPLTLAIQRLNPCLMELCQFFQQCLCMSQRSPRTEDMSSFINPYQSSTSKISWKT

SEQ ID NO: 6474 - protein, 531 aa, Homo sapiens
MLGFLSRGPSMKLCMGLACVLSLWNTVSGIKGEAKKEKGMTFLPTTVSGLREEERKEKGVAFLATTELPARSIDLSALNLTELVNGMLSRALKDSKKFFSLLSVTSYSSFAFHKFSVAVYNISNLKTVDPAKFPTRYCYCLNNRTNDLSDFTALLVDIIGNSTSYLTEIFKSTSILSVNQSNESDCIFICVMTGKSGRNLSDFWEIEEKYPIINYTFTSGLSGVLGAATRGTARTSKPTTKSQKTLPSTSPGHWTQSTPWASALRSSPWTETAAPSETEETLNTGRPPELPARATATWFSASHTLPALATRRVARTQWLTADRQTWASISSVPWAQTISEKKPGGSLWETRSSPPTTAGTEEAMNTTSLLAPAAEIMATPGSPSQASPTLGAFTHGTQTPSPTKATAPRYPQTGDLSAEWPFTAGEEPVLVPRPHQVSRCPQPLFKVGAMAAAPLTLAIQRLNPCLMELCQFFQQCLCMSQRSPRTEDMRYCLEYYSWFLKNATYICQRVKRVSHSHTLKQKCLENICKSV

SEQ ID NO: 6475 - protein, 97 aa, Homo sapiens
MKAQTALSFFLILITSLSGSQGIFPLAFFIYVPMNEQIVIGRLDEDIILPSSFERGSEVVIHWKYQDSYKVHSYYKGSDHLESQDPRYANRTSLFYN

SEQ ID NO: 6476 - protein, 136 aa, Homo sapiens
MKAQTALSFFLILITSLSGSQGIFPLAFFIYVPMNEQIVIGRLDEDIILPSSFERGSEVVIHWKYQDSYKVHSYYKGSDHLESQDPRYANRTSLFYNEIQNGNASLFFRRVSLLDEGIYTCYVGTAIQVITNKVVL

SEQ ID NO: 6477 - protein, 145 aa, Homo sapiens
MKAQTALSFFLILITSLSGSQGIFPLAFFIYVPMNEQIVIGRLDEDIILPSSFERGSEVVIHWKYQDSYKVHSYYKGSDHLESQDPRYANRTSLFYNEIQNGNASLFFRRVSLLDEGIYTCYVGTAIQVITNKVVLKVGVFLTPV

SEQ ID NO: 6478 - protein, 414 aa, Homo sapiens
MKAQTALSFFLILITSLSGSQGIFPLAFFIYVPMNEQIVIGRLDEDIILPSSFERGSEVVIHWKYQDSYKVHSYYKGSDHLESQDPRYANRTSLFYNEIQNGNASLFFRRVSLLDEGIYTCYVGTAIQVITNKVVLKVGVFLTPVMKYEKRNTNSFLICSVLSVYPRPIITWKMDNTPISENNMEETGSLDSFSINSPLNITGSNSSYECTIENSLLKQTWTGRWTMKDGLHKMQSEHVSLSCQPVNDYFSPNQDFKVTWSRMKSGTFSVLAYYLSSSQNTIINESRFSWNKELINQSDFSMNLMDLNLSDSGEYLCNISSDEYTLLTIHTVHVEPSQETASHNKGLWILVPSAILAAFLLIWSVKCCRAQLEARRSRHPADGAQQERCCVPPGERCPSAPDNGEENVPLSGKV

SEQ ID NO: 6479 - protein, 414 aa, Homo sapiens; identical to SEQ ID NO: 6478

SEQ ID NO: 6480 - protein, 397 aa, Homo sapiens
MKAQTALSFFLILITSLSGSQGIFPLAFFIYVPMNEQIVIGRLDEDIILPSSFERGSEVVIHWKYQDSYKVHSYYKGSDHLESQDPRYANRTSLFYNEIQNGNASLFFRRVSLLDEGIYTCYVGTAIQVITNKVVLKVGVFLTPVMKYEKRNTNSFLICSVLSVYPRPIITWKMDNTPISENNMEETGSLDSFSINSPLNITGSNSSYECTIENSLLKQTWTGRWTMKDGLHKMQSEHVSLSCQPVNDYFSPNQDFKVTWSRMKSGTFSVLAYYLSSSQNTIINESRFSWNKELINQSDFSMNLMDLNLSDSGEYLCNISSDEYTLLTIHTVHVEPSQETASHNKGLWILVPSAILAAFLLIWSVKCCRERCCVPPGERCPSAPDNGEENVPLSGKV

SEQ ID NO: 6481 - protein, 414 aa, Homo sapiens; identical to SEQ ID NO: 6478

SEQ ID NO: 6482 - protein, 414 aa, Homo sapiens; identical to SEQ ID NO: 6478

SEQ ID NO: 6483 - protein, 128 aa, Homo sapiens
MNEQIVIGRLDEDIILPSSFERGSEVVIHWKYQDSYKVHSYYKGSDHLESQDPRYANRTSLFYNEIQNGNASLFFRRVSLLDEGIYTCYVGTAIQVITNKVVLKVGVFLTPVMKYEKRNTNSFLICSV

SEQ ID NO: 6484 - protein, 350 aa, Homo sapiens
MVMWNILKPRTHLLCMTNMFCTRHEGTDSTVFLPHSHNISEWISRRVSLLDEGIYTCYVGTAIQVITNKVVLKVGVFLTPVMKYEKRNTNSFLICSVLSVYPRPIITWKMDNTPISENNMEETGSLDSFSINSPLNITGSNSSYECTIENSLLKQTWTGRWTMKDGLHKMQSEHVSLSCQPVNDYFSPNQDFKVTWSRMKSGTFSVLAYYLSSSQNTIINESRFSWNKELINQSDFSMNLMDLNLSDSGEYLCNISSDEYTLLTIHTVHVEPSQETASHNKGLWILVPSAILAAFLLIWSVKCCRAQLEARRSRHPADGAQQERCCVPPGERCPSAPDNGEENVPLSGKV

SEQ ID NO: 6485 - protein, 328 aa, Homo sapiens
  VARIANT 1: note = misc_feature - Xaa can be any naturally occurring amino acid
XIQNGNASLFFRRVSLLDEGIYTCYVGTAIQVITNKVVLKVGVFLTPVMKYEKRNTNSFLICSVLSVYPRPIITWKMDNTPISENNMEETGSLDSFSINSPLNITGSNSSYECTIENSLLKQTWTGRWTMKDGLHKMQSEHVSLSCQPVNDYFSPNQDFKVTWSRMKSGTFSVLAYYLSSSQNTIINESRFSWNKELINQSDFSMNLMDLNLSDSGEYLCNISSDEYTLLTIHTVHVEPSQETASHNKGLWILVPSAILAAFLLIWSVKCCRAQLEARRSRHPADGAQQERCCVPPGERCPSAPDNGEENVVRHYFLYQTIYSIKMLL

SEQ ID NO: 6486 - protein, 39 aa, Homo sapiens
MAASLRLLGAASGLRYWSRRLRPAAGSFAAGSIFPSRCC

SEQ ID NO: 6487 - protein, 336 aa, Homo sapiens
MAASLRLLGAASGLRYWSRRLRPAAGSFAAVCSRSVASKTPVGFIGLGNMGNPMAKNLMKHGYPLIIYDVFPDACKEFQDAGEQVVSSPADVAEKADRIITMLPTSINAIEAYSGANGILKKVKKGSLLIDSSTIDPAVSKELAKEVEKMGAVFMDAPVSGGVGAARSGNLTFMVGGVEDEFAAAQELLGCMGSNVVYCGAVGTGQAAKICNNMLLAISMIGTAEAMNLGIRLGLDPKLLAKILNMSSGRCWSSDTYNPVPGVMDGVPSANNYQGGFGTTLMAKDLGLAQDSATSTKSPILLGSLAHQIYRMMCAKGYSKKDFSSVFQFLREEETF

SEQ ID NO: 6488 - protein, 206 aa, Homo sapiens
  VARIANT 1: note = misc_feature - Xaa can be any naturally occurring amino acid
XELPHTLKLPGLPLFPNKFLISLVLLILVSSPADVAEKADRIITMLPTSINAIEAYSGANGILKKVKKGSLLIDSSTIDPAVSKELAKEVEKMGAVFMDAPVSGGVGAARSGNLTFMVGGVEDEFAAAQELLGCMGSNVVYCGAVGTGQAAKICNNMLLAISMIGTAEAMNLGIRLGLDPKLLAKILNMSSGRCWSSDTYNPVPGV

SEQ ID NO: 6489 - protein, 163 aa, Homo sapiens
MAAAVVLAAGLRAARRAVAATGVRGGQVRGAAGVTDGNEVAKAQQATPGGAAPTIFSRILDKSLPADILYEDQQCLVFRDVAPQAPVHFLVIPKKPIPRISQAEEEDQQLLGHLLLVAKQTAKAEGLGDGYRLVINDGKLGAQSVYHLHIHVLGGRQLQWPPG

SEQ ID NO: 6490 - protein, 365 aa, Homo sapiens
MAVMAPRTLLLLLSGALALTQTWAGSHSMRYFFTSVSRPGRGEPRFIAVGYVDDTQFVRFDSDAASQRMEPRAPWIEQEGPEYWDQETRNVKAQSQTDRVDLGTLRGYYNQSEAGSHTIQIMYGCDVGSDGRFLRGYRQDAYDGKDYIALNEDLRSWTAADMAAQITKRKWEAAHEAEQLRAYLDGTCVEWLRRYLENGKETLQRTDPPKTHMTHHPISDHEATLRCWALGFYPAEITLTWQRDGEDQTQDTELVETRPAGDGTFQKWAAVVVPSGEEQRYTCHVQHEGLPKPLTLRWELSSQPTIPIVGIIAGLVLLGAVITGAVVAAVMWRRKSSDRKGGSYTQAASSDSAQGSDVSLTACKV

SEQ ID NO: 6491 - protein, 299 aa, Homo sapiens
MAVMAPRTLLLLLSGALALTQTWAGSHSMRYFFTSVSRPGRGEPRFIAVGYVDDTQFVRFDSDAASQRMEPRAPWIEQEGPEYWDQETRNVKAQSQTDRVDLGTLRGYYNQSEAGSHTIQIMYGCDVGSDGRFLRGYRQDAYDGKDYIALNEDLRSWTAADMAAQITKRKWEAAHEAEQLRAYLDGTCVEWLRRYLENGKETLQRTDPPKTHMTHHPISDHEATLRCWALGFYPAEITLTWQRDGEDQTQDTELVETRPAGDGTFQKWAAVVVPSGEEQRYTCHVQHEGLPKPLTLRWV

SEQ ID NO: 6492 - protein, 365 aa, Homo sapiens; identical to SEQ ID NO: 6490

SEQ ID NO: 6493 - protein, 371 aa, Homo sapiens
MAVMAPRTLLLLLSGALALTQTWAGSHSMRYFFTSVSRPGRGEPRFIAVGYVDDTQFVRFDSDAASQRMEPRAPWIEQEGPEYWDQETRNVKAQSQTDRVDLGTLRGYYNQSEAGSHTIQIMYGCDVGSDGRFLRGYRQDAYDGKDYIALNEDLRSWTAADMAAQITKRKWEAAHEAEQLRAYLDGTCVEWLRRYLENGKETLQRTDPPKTHMTHHPISDHEATLRCWALGFYPAEITLTWQRDGEDQTQDTELVETRPAGDGTFQKWAAVVVPSGEEQRYTCHVQHEGLPKPLTLRWELSSQPTIPIVGIIAGLVLLGAVITGAVVAAVMWRRKSSGGEGVKDRKGGSYTQAASSDSAQGSDVSLTACKV

SEQ ID NO: 6494 - protein, 325 aa, Homo sapiens
MAVMAPRTLLLLLSGALALTQTWAGSHSMRYFFTSVSRPGRGEPRFIAVGYVDDTQFVRFDSDAASQRMEPRAPWIEQEGPEYWDQETRNVKAQSQTDRVDLGTLRGYYNQSEAGSHTIQIMYGCDVGSDGRFLRGYRQDAYDGKDYIALNEDLRSWTAADMAAQITKRKWEAAHEAEQLRAYLDGTCVEWLRRYLENGKETLQRTDPPKTHMTHHPISDHEATLRCWALGFYPAEITLTWQRDGEDQTQDTELVETRPAGDGTFQKWAAVVVPSGEEQRYTCHVQHEGLPKPLTLRWDRKGGSYTQAASSDSAQGSDVSLTACK

SEQ ID NO: 6495 - protein, 131 aa, Homo sapiens
MRVMAPRALLLLLSGGLALTETWACSHSMRYFDTAVSRPGRGEPRFISVGYVDDTQFVRFDSDAASPRGEPRAPWVEQEGPEYWDRETQKYKRQAQADRVSLRNLRGYYNQSEDEDVWLRPGARRAPPPRV

SEQ ID NO: 6496 - protein, 366 aa, Homo sapiens
MRVMAPRALLLLLSGGLALTETWACSHSMRYFDTAVSRPGRGEPRFISVGYVDDTQFVRFDSDAASPRGEPRAPWVEQEGPEYWDRETQKYKRQAQADRVSLRNLRGYYNQSEDGSHTLQRMSGCDLGPDGRLLRGYDQSAYDGKDYIALNEDLRSWTAADTAAQITQRKLEAARAAEQLRAYLEGTCVEWLRRYLENGKETLQRAEPPKTHVTHHPLSDHEATLRCWALGFYPAEITLTWQRDGEDQTQDTELVETRPAGDGTFQKWAAVVVPSGQEQRYTCHMQHEGLQEPLTLSWEPSSQPTIPIMGIVAGLAVLVVLAVLGAVVTAMMCRRKSSGGKGGSCSQAACSNSAQGSDESLITCKA

SEQ ID NO: 6497 - protein, 372 aa, Homo sapiens
MRVMAPRALLLLLSGGLALTETWACSHSMRYFDTAVSRPGRGEPRFISVGYVDDTQFVRFDSDAASPRGEPRAPWVEQEGPEYWDRETQKYKRQAQADRVSLRNLRGYYNQSEDGSHTLQRMSGCDLGPDGRLLRGYDQSAYDGKDYIALNEDLRSWTAADTAAQITQRKLEAARAAEQLRAYLEGTCVEWLRRYLENGKETLQRAEPPKTHVTHHPLSDHEATLRCWALGFYPAEITLTWQRDGEDQTQDTELVETRPAGDGTFQKWAAVVVPSGQEQRYTCHMQHEGLQEPLTLSWEPSSQPTIPIMGIVAGLAVLVVLAVLGAVVTAMMCRRKSSGHFLPTGGKGGSCSQAACSNSAQGSDESLITCKA

SEQ ID NO: 6498 - protein, 244 aa, Homo sapiens
MSGCDLGPDGRLLRGYDQSAYDGKDYIALNEDLRSWTAADTAAQITQRKLEAARAAEQLRAYLEGTCVEWLRRYLENGKETLQRAEPPKTHVTHHPLSDHEATLRCWALGFYPAEITLTWQRDGEDQTQDTELVETRPAGDGTFQKWAAVVVPSGQEQRYTCHMQHEGLQEPLTLSWEPSSQPTIPIMGIVAGLAVLVVLAVLGAVVTAMMCRRKSSGGKGGSCSQAACSNSAQGSDESLITCK

SEQ ID NO: 6499 - protein, 261 aa, Homo sapiens
  VARIANT 1: note = misc_feature - Xaa can be any naturally occurring amino acid
XRVMAPRALLLLLSGGLALTETWACSHSMRYFDTAVSRPGRGEPRFISVGYVDDTQFVRFDSDAASPRGEPRAPWVEQEGPEYWDRETQKYKRQAQADRVSLRNLRGYYNQSEDGSHTLQRMSGCDLGPDGRLLRGYDQSAYDGKDYIALNEDLRSWTAADTAAQITQRKLEAARAAEQLRAYLEGTCVEWLRRYLENGKETLQRAEPPKTHVTHHPLSDHEASRRWNLPEVGSCGGAFWTRAEIHVPYAARGAARAPHPE

SEQ ID NO: 6500 - protein, 250 aa, Homo sapiens
MALRAGLVLGFHTLMTLLSPQEAGATKADHMGSYGPAFYQSYGASGQFTHEFDEEQLFSVDLKKSEAVWRLPEFGDFARFDPQGGLAGIAAIKAHLDILVERSNRSRAINVPPRVTVLPKSRVELGQPNILICIVDNIFPPVINITWLRNGQTVTEGVAQTSFYSQPDHLFRKFHYLPFVPSAEDVYDCQVEHWGLDAPLLRHWELQVPIPPPDAMETLVCALGLAIGLVGFLVGTVLIIMGTYVSSVPR

SEQ ID NO: 6501 - protein, 86 aa, Homo sapiens
MALRAGLVLGFHTLMTLLSPQEAGATKGRAGRHRRNQSPSGHPGGALQPQQSHQRASTGDRAPQVSGGAGPAQHPHLHRGQHLPPC

SEQ ID NO: 6502 - protein, 23 aa, Homo sapiens
MRPEDRMFHIRAVILRALSLAFL

SEQ ID NO: 6503 - protein, 209 aa, Homo sapiens
MRPEDRMFHIRAVILRALSLAFLLSLRGAGAIKADHVSTYAAFVQTHRPTGEFMFEFDEDEMFYVDLDKKETVWHLEEFGQAFSFEAQGGLANIAILNNNLNTLIQRSNHTQATNDPPEVTVFPKEPVELGQPNTLICHIDKFFPPVLNVTWLCNGELVTEGVAESLFLPRTDYSFHKFHYLTFVPSAEDFYDCRVEHWGLDQPLLKHW

SEQ ID NO: 6504 - protein, 260 aa, Homo sapiens
MRPEDRMFHIRAVILRALSLAFLLSLRGAGAIKADHVSTYAAFVQTHRPTGEFMFEFDEDEMFYVDLDKKETVWHLEEFGQAFSFEAQGGLANIAILNNNLNTLIQRSNHTQATNDPPEVTVFPKEPVELGQPNTLICHIDKFFPPVLNVTWLCNGELVTEGVAESLFLPRTDYSFHKFHYLTFVPSAEDFYDCRVEHWGLDQPLLKHWEAQEPIQMPETTETVLCALGLVLGLVGIIVGTVLIIKSLRSGHDPRAQGTL

SEQ ID NO: 6505 - protein, 128 aa, Homo sapiens
  VARIANT 1: note = misc_feature - Xaa can be any naturally occurring amino acid
XNTLICHIDKFFPPVLNVTWLCNGELVTEGVAESLFLPRTDYSFHKFHYLTFVPSAEDFYDCRVEHWGLDQPLLKHWEAQEPIQMPETTETVLCALGLVLGLVGIIVGTVLIIKSLRSGHDPRAQGTL

SEQ ID NO: 6506 - protein, 24 aa, Homo sapiens
MILNKALLLGALALTTVMSPCGGE

SEQ ID NO: 6507 - protein, 255 aa, Homo sapiens
MILNKALLLGALALTTVMSPCGGEDIVADHVASCGVNLYQFYGPSGQYTHEFDGDEQFYVDLERKETAWRWPEFSKFGGFDPQGALRNMAVAKHNLNIMIKRYNSTAATNEVPEVTVFSKSPVTLGQPNTLICLVDNIFPPVVNITWLSNGQSVTEGVSETSFLSKSDHSFFKISYLTFLPSADEIYDCKVEHWGLDQPLLKHWEPEIPAPMSELTETVVCALGLSVGLMGIVVGTVFIIQGLRSVGASRHQGPL

SEQ ID NO: 6508 - protein, 255 aa, Homo sapiens; identical to SEQ ID NO: 6507

SEQ ID NO: 6509 - protein, 255 aa, Homo sapiens; identical to SEQ ID NO: 6507

SEQ ID NO: 6510 - protein, 214 aa, Homo sapiens
MILNKALLLGALALTTVMSPCGGEDIVADHVASCGVNLYQFYGPSGQYTHEFDGDEQFYVDLERKETAWRWPEFSKFGGFDPQGALRNMAVAKHNLNIMIKRYNSTAATNEVPEVTVFSKSPVTLGQPNTLICLVDNIFPPVVNITWLSNGQSVTEGVSETSFLSKSDHSFFKISYLTFLPSADEIYDCKVEHWGLDQPLLKHWGASPSTGAEE

SEQ ID NO: 6511 - protein, 53 aa, Homo sapiens
MILNKALLLGALALTTVMSPCGGEDIVGSISDSLLLYRDGQWVCKTKVEKSDS

SEQ ID NO: 6512 - protein, 136 aa, Homo sapiens
MSWKKALRIPGDLRVATVTLMLAMLSSLLAEGRDSPEDFVFQFKGMCYFTNGTERVRLVTRYIYNREEYARFDSDVGVYRAVTPQGRPDAEYWNSQKEVLEGTRAELDTVCRHNYEVAFRGILQRRGMVTGLSRSW

SEQ ID NO: 6513 - protein, 269 aa, Homo sapiens
MSWKKALRIPGDLRVATVTLMLAMLSSLLAEGRDSPEDFVFQFKGMCYFTNGTERVRLVTRYIYNREEYARFDSDVGVYRAVTPQGRPDAEYWNSQKEVLEGTRAELDTVCRHNYEVAFRGILQRRVEPTVTISPSRTEALNHHNLLVCSVTDFYPGQIKVRWFRNDQEETAGVVSTPLIRNGDWTFQILVMLEMTPQRGDVYTCHVEHPSLQSPITVEWRAQSESAQSKMLSGVGGFVLGLIFLGLGLIIRQRSQKGPQGPPPAGLLH

SEQ ID NO: 6514 - protein, 261 aa, Homo sapiens
MSWKKALRIPGDLRVATVTLMLAMLSSLLAEGRDSPEDFVFQFKGMCYFTNGTERVRLVTRYIYNREEYARFDSDVGVYRAVTPQGRPDAEYWNSQKEVLEGTRAELDTVCRHNYEVAFRGILQRRVEPTVTISPSRTEALNHHNLLVCSVTDFYPGQIKVRWFRNDQEETAGVVSTPLIRNGDWTFQILVMLEMTPQRGDVYTCHVEHPSLQSPITVEWRAQSESAQSKMLSGVGGFVLGLIFLGLGLIIRQRSQKGLLH

SEQ ID NO: 6515 - protein, 261 aa, Homo sapiens; identical to SEQ ID NO: 6514

SEQ ID NO: 6516 - protein, 224 aa, Homo sapiens
MSWKKALRIPGDLRVATVTLMLAMLSSLLAEGRDSPEDFVFQFKGMCYFTNGTERVRLVTRYIYNREEYARFDSDVGVYRAVTPQGRPDAEYWNSQKEVLEGTRAELDTVCRHNYEVAFRGILQRRVEPTVTISPSRTEALNHHNLLVCSVTDFYPGQIKVRWFRNDQEETAGVVSTPLIRNGDWTFQILVMLEMTPQRGDVYTCHVEHPSLQSPITVEWRLLH

SEQ ID NO: 6517 - protein, 134 aa, Homo sapiens
MSWKKALRIPGDLRVATVTLMLAMLSSLLAEGRDSPVEPTVTISPSRTEALNHHNLLVCSVTDFYPGQIKVRWFRNDQEETAGVVSTPLIRNGDWTFQILVMLEMTPQRGDVYTCHVEHPSLQSPITVEWRLLH

SEQ ID NO: 6518 - protein, 275 aa, Homo sapiens
MALQIPGGFWAAAVTVMLVMLSTPVAEARDFPKDFLVQFKGMCYFTNGTERVRGVARYIYNREEYGRFDSDVGEFQAVTELGRSIEDWNNYKDFLEQERAAVDKVCRHNYEAELRTTLQRQVEPTVTISPSRTEALNHHNLLVCSVTDFYPAQIKVRWFRNDQEETAGVVSTSLIRNGDWTFQILVMLEITPQRGDIYTCQVEHPSLQSPITVEWRAQSESAQSKMLSGIGGFVLGLIFLGLGLIIRHRGQKGPRGPPPAGNISAMIQSGERAQA

SEQ ID NO: 6519 - protein, 264 aa, Homo sapiens
MALQIPGGFWAAAVTVMLVMLSTPVAEARDFPKDFLVQFKGMCYFTNGTERVRGVARYIYNREEYGRFDSDVGEFQAVTELGRSIEDWNNYKDFLEQERAAVDKVCRHNYEAELRTTLQRQVEPTVTISPSRTEALNHHNLLVCSVTDFYPAQIKVRWFRNDQEETAGVVSTSLIRNGDWTFQILVMLEITPQRGDIYTCQVEHPSLQSPITVEWRAQSESAQSKMLSGIGGFVLGLIFLGLGLIIRHRGQKGPRGPPPAGLLH

SEQ ID NO: 6520 - protein, 227 aa, Homo sapiens
MALQIPGGFWAAAVTVMLVMLSTPVAEARDFPKDFLVQFKGMCYFTNGTERVRGVARYIYNREEYGRFDSDVGEFQAVTELGRSIEDWNNYKDFLEQERAAVDKVCRHNYEAELRTTLQRQVEPTVTISPSRTEALNHHNLLVCSVTDFYPAQIKVRWFRNDQEETAGVVSTSLIRNGDWTFQILVMLEITPQRGDIYTCQVEHPSLQSPITVEWRPRGPPPAGLLH

SEQ ID NO: 6521 - protein, 218 aa, Homo sapiens
  VARIANT 1: note = misc_feature - Xaa can be any naturally occurring amino acid
XLQIPGGFWAAAVTVMLVMLSTPVAEARDFPKDFLVQFKGMCYFTNGTERVRGVARYIYNREEYGRFDSDVGEFQAVTELGRSIEDWNNYKDFLEQERAAVDKVCRHNYEAELRTTLQRQVEPTVTISPSRTEALNHHNLLVCSVTDFYPAQIKVRWFRNDQEETAGVVSTSLIRNGDWTFQILVMLEITPQRGDIYTCQVEHPSLQSPITVEWRLLH

SEQ ID NO: 6522 - protein, 240 aa, Homo sapiens
AIGSFHCGCEPGYQLKGRKCMDVNECRQNVCRPDQHCKNTRGGYKCIDLCPNGMTKAENGTCIDIDECKDGTHQCRYNQICENTRGSYRCVCPRGYRSQGVGRPCMDIDECENTDACQHECKNTFGSYQCICPPGYQLTHNGKTCQDIDECLEQNVHCGPNRMCFNMRGSYQCIDTPCPPNYQRDPVSGFCLKNCPPNDLECALSPYALEYKLVSLPFGIATNQDLIRLVAYTQDGVMHP

SEQ ID NO: 6523 - protein, 5635 aa, Homo sapiens
MISWEVVHTVFLFALLYSSLAQDASPQSEIRAEEIPEGASTLAFVFDVTGSMYDDLVQVIEGASKILETSLKRPKRPLFNFALVPFHDPEIGPVTITTDPKKFQYELRELYVQGGGDCPEMSIGAIKIALEISLPGSFIYVFTDARSKDYRLTHEVLQLIQQKQSQVVFVLTGDCDDRTHIGYKVYEEIASTSSGQVFHLDKKQVNEVLKWVEEAVQASKVHLLSTDHLEQAVNTWRIPFDPSLKEVTVSLSGPSPMIEIRNPLGKLIKKGFGLHELLNIHNSAKVVNVKEPEAGMWTVKTSSSGRHSVRITGLSTIDFRAGFSRKPTLDFKKTVSRPVQGIPTYVLLNTSGISTPARIDLLELLSISGSSLKTIPVKYYPHRKPYGIWNISDFVPPNEAFFLKVTGYDKDDYLFQRVSSVSFSSIVPDAPKVTMPEKTPGYYLQPGQIPCSVDSLLPFTLSFVRNGVTLGVDQYLKESASVNLDIAKVTLSDEGFYECIAVSSAGTGRAQTFFDVSEPPPVIQVPNNVTVTPGERAVLTCLIISAVDYNLTWQRNDRDVRLAEPARIRTLANLSLELKSVKFNDAGEYHCMVSSEGGSSAASVFLTVQEPPKVTVMPKNQSFTGGSEVSIMCSATGYPKPKIAWTVNDMFIVGSHRYRMTSDGTLFIKNAAPKDAGIYGCLASNSAGTDKQNSTLRYIEAPKLMVVQSELLVALGDITVMECKTSGIPPPQVKWFKGDLELRPSTFLIIDPLLGLLKIQETQDLDAGDYTCVAINEAGRATGKITLDVGSPPVFIQEPADVSMEIGSNVTLPCYVQGYPEPTIKWRRLDNMPIFSRPFSVSSISQLRTGALFILNLWASDKGTYICEAENQFGKIQSETTVTVTGLVAPLIGISPSVANVIEGQQLTLPCTLLAGNPIPERRWIKNSAMLLQNPYITVRSDGSLHIERVQLQDGGEYTCVASNVAGTNNKTTSVVVHVLPTIQHGQQILSTIEGIPVTLPCKASGNPKPSVIWSKKGELISTSSAKFSAGADGSLYVVSPGGEESGEYVCTATNTAGYAKRKVQLTVYVRPRVFGDQRGLSQDKPVEISVLAGEEVTLPCEVKSLPPPIITWAKETQLISPFSPRHTFLPSGSMKITETRTSDSGMYLCVATNIAGNVTQAVKLNVHVPPKIQRGPKHLKVQVGQRVDIPCNAQGTPLPVITWSKGGSTMLVDGEHHVSNPDGTLSIDQATPSDAGIYTCVATNIAGTDETEITLHVQEPPTVEDLEPPYNTTFQERVANQRIEFPCPAKGTPKPTIKWLHNGRELTGREPGISILEDGTLLVIASVTPYDNGEYICVAVNEAGTTERKYNLKVHVPPVIKDKEQVTNVSVLLNQLTNLFCEVEGTPSPIIMWYKDNVQVTESSTIQTVNNGKILKLFRATPEDAGRYSCKAINIAGTSQKYFNIDVLVPPTIIGTNFPNEVSVVLNRDVALECQVKGTPFPDIHWFKDGKPLFLGDPNVELLDRGQVLHLKNARRNDKGRYQCTVSNAAGKQAKDIKLTIYIPPSIKGGNVTTDISVLINSLIKLECETRGLPMPAITWYKDGQPIMSSSQALYIDKGQYLHIPRAQVSDSATYTCHVANVAGTAEKSFHVDVYVPPMIEGNLATPLNKQVVIAHSLTLECKAAGNPSPILTWLKDGVPVKANDNIRIEAGGKKLEIMSAQEIDRGQYICVATSVAGEKEIKYEVDVLVPPAIEGGDETSYFIVMVNNLLELDCHVTGSPPPTIMWLKDGQLIDERDGFKILLNGRKLVIAQAQVSNTGLYRCMAANTAGDHKKEFEVTVHVPPTIKSSGLSERVVVKYKPVALQCIANGIPNPSITWLKDDQPVNTAQGNLKIQSSGRVLQIAKTLLEDAGRYTCVATNAAGETQQHIQLHVHEPPSLEDAGKMLNETVLVSNPVQLECKAAGNPVPVITWYKDNRLLSGSTSMTFLNRGQIIDIESAQISDAGIYKCVAINSAGATELFYSLQVHVAPSISGSNNMVAVVVNNPVRLECEARGIPAPSLTWLKDGSPVSSFSNGLQVLSGGRILALTSAQISDTGRYTCVAVNAAGEKQRDIDLRVYVPPNIMGEEQNVSVLISQAVELLCQSDAIPPPTLTWLKDGHPLLKKPGLSISENRSVLKIEDAQVQDTGRYTCEATNVAGKTEKNYNVNIWVPPNIGGSDELTQLTVIEGNLISLLCESSGIPPPNLIWKKKGSPVLTDSMGRVRILSGGRQLQISIAEKSDAALYSCVASNVAGTAKKEYNLQVYIRPTITNSGSHPTEIIVTRGKSISLECEVQGIPPPTVTWMKDGHPLIKAKGVEILDEGHILQLKNIHVSDTGRYVCVAVNVAGMTDKKYDLSVHAPPSIIGNHRSPENISVVEKNSVSLTCEASGIPLPSITWFKDGWPVSLSNSVRILSGGRMLRLMQTTMEDAGQYTCVVRNAAGEERKIFGLSVLVPPHIVGENTLEDVKVKEKQSVTLTCEVTGNPVPEITWHKDGQPLQEDEAHHIISGGRFLQITNVQVPHTGRYTCLASSPAGHKSRSFSLNVFVSPTIAGVGSDGNPEDVTVILNSPTSLVCEAYSYPPATITWFKDGTPLESNRNIRILPGGRTLQILNAQEDNAGRYSCVATNEAGEMIKHYEVKVYIPPIINKGDLWGPGLSPKEVKIKVNNTLTLECEAYAIPSASLSWYKDGQPLKSDDHVNIAANGHTLQIKEAQISDTGRYTCVASNIAGEDELDFDVNIQVPPSFQKLWEIGNMLDTGRNGEAKDVIINNPISLYCETNAAPPPTLTWYKDGHPLTSSDKVLILPGGRVLQIPRAKVEDAGRYTCVAVNEAGEDSLQYDVRVLVPPIIKGANSDLPEEVTVLVNKSALIECLSSGSPAPRNSWQKDGQPLLEDDHHKFLSNGRILQILNTQITDIGRYVCVAENTAGSAKKYFNLNVHVPPSVIGPKSENLTVVVNNFISLTCEVSGFPPPDLSWLKNEQPIKLNTNTLIVPGGRTLQIIRAKVSDGGEYTCIAINQAGESKKKFSLTVYVPPSIKDHDSESLSVVNVREGTSVSLECESNAVPPPVITWYKNGRMITESTHVEILADGQMLHIKKAEVSDTGQYVCRAINVAGRDDKNFHLNVYVPPSIEGPEREVIVETISNPVTLTCDATGIPPPTIAWLKNHKRIENSDSLEVRILSGGSKLQIARSQHSDSGNYTCIASNMEGKAQKYYFLSIQVPPSVAGAEIPSDVSVLLGENVELVCNANGIPTPLIQWLKDGKPIASGETERIRVSANGSTLNIYGALTSDTGKYTCVATNPAGEEDRIFNLNVYVTPTIRGNKDEAEKLMTLVDTSINIECRATGTPPPQINWLKNGLPLPLSSHIRLLAAGQVIRIVRAQVSDVAVYTCVASNRAGVDNKHYNLQVFAPPNMDNSMGTEEITVLKGSSTSMACITDGTPAPSMAWLRDGQPLGLDAHLTVSTHGMVLQLLKAETEDSGKYTCIASNEAGEVSKHFILKVLEPPHINGSEEHEEISVIVNNPLELTCIASGIPAPKMTWMKDGRPLPQTDQVQTLGGGEVLRISTAQVEDTGRYTCLASSPAGDDDKEYLVRVHVPPNIAGTDEPRDITVLRNRQVTLECKSDAVPPPVITWLRNGERLQATPRVRILSGGRYLQINNADLGDTANYTCVASNIAGKTTREFILTVNVPPNIKGGPQSLVILLNKSTVLECIAEGVPTPRITWRKDGAVLAGNHARYSILENGFLHIQSAHVTDTGRYLCMATNAAGTDRRRIDLQVHVPPSIAPGPTNMTVIVNVQTTLACEATGIPKPSINWRKNGHLLNVDQNQNSYRLLSSGSLVIISPSVDDTATYECTVTNGAGDDKRTVDLTVQVPPSIADEPTDFLVTKHAPAVITCTASGVPFPSIHWTKNGIRLLPRGDGYRILSSGAIEILATQLNHAGRYTCVARNAAGSAHRHVTLHVHEPPVIQPQPSELHVILNNPILLPCEATGTPSPFITWQKEGINVNTSGRNHAVLPSGGLQISRAVREDAGTYMCVAQNPAGTALGKIKLNVQVPPVISPHLKEYVIAVDKPITLSCEADGLPPPDITWHKDGRAIVESIRQRVLSSGSLQIAFVQPGDAGHYTCMAANVAGSSSTSTKLTVHVPPRIRSTEGHYTVNENSQAILPCVADGIPTPAINWKKDNVLLANLLGKYTAEPYGELILENVVLEDSGFYTCVANNAAGEDTHTVSLTVHVLPTFTELPGDVSLNKGEQLRLSCKATGIPLPKLTWTFNNNIIPAHFDSVNGHSELVIERVSKEDSGTYVCTAENSVGFVKAIGFVYVKEPPVFKGDYPSNWIEPLGGNAILNCEVKGDPTPTIQWNRKGVDIEISHRIRQLGNGSLAIYGTVNEDAGDYTCVATNEAGVVERSMSLTLQSPPIITLEPVETVINAGGKIILNCQATGEPQPTITWSRQGHSISWDDRVNVLSNNSLYIADAQKEDTSEFECVARNLMGSVLVRVPVIVQVHGGFSQWSAWRACSVTCGKGIQKRSRLCNQPLPANGGKPCQGSDLEMRNCQNKPCPVDGSWSEWSLWEECTRSCGRGNQTRTRTCNNPSVQHGGRPCEGNAVEIIMCNIRPCPVHGAWSAWQPWGTCSESCGKGTQTRARLCNNPPPAFGGSYCDGAETQMQVCNERNCPIHGKWATWASWSACSVSCGGGARQRTRGCSDPVPQYGGRKCEGSDVQSDFCNSDPCPTHGNWSPWSGWGTCSRTCNGGQMRRYRTCDNPPPSNGGRACGGPDSQIQRCNTDMCPVDGSWGSWHSWSQCSASCGGGEKTRKRLCDHPVPVKGGRPCPGDTTQVTRCNVQACPGGPQRARGSVIGNINDVEFGIAFLNATITDSPNSDTRIIRAKITNVPRSLGSAMRKIVSILNPIYWTTAKEIGEAVNGFTLTNAVFKRETQVEFATGEILQMSHIARGLDSDGSLLLDIVVSGYVLQLQSPAEVTVKDYTEDYIQTGPGQLYAYSTRLFTIDGISIPYTWNHTVFYDQAQGRMPFLVETLHASSVESDYNQIEETLGFKIHASISKGDRSNQCPSGFTLDSVGPFCADEDECAAGNPCSHSCHNAMGTYYCSCPKGLTIAADGRTCQDIDECALGRHTCHAGQDCDNTIGSYRCVVRCGSGFRRTSDGLSCQDINECQESSPCHQRCFNAIGSFHCGCEPGYQLKGRKCMDVNECRQNVCRPDQHCKNTRGGYKCIDLCPNGMTKAENGTCIDIDECKDGTHQCRYNQICENTRGSYRCVCPRGYRSQGVGRPCMDINECEQVPKPCAHQCSNTPGSFKCICPPGQHLLGDGKSCAGLERLPNYGTQYSSYNLARFSPVRNNYQPQQHYRQYSHLYSSYSEYRNSRTSLSRTRRTIRKTCPEGSEASHDTCVDIDECENTDACQHECKNTFGSYQCICPPGYQLTHNGKTCQDIDECLEQNVHCGPNRMCFNMRGSYQCIDTPCPPNYQRDPVSGFCLKNCPPNDLECALSPYALEYKLVSLPFGIATNQDLIRLVAYTQDGVMHPRTTFLMVDEEQTVPFALRDENLKGVVYTTRPLREAETYRMRVRASSYSANGTIEYQTTFIVYIAVSAYPY

SEQ ID NO: 6524 - protein, 595 aa, Homo sapiens
MILAPEGSSSGKLRIPAAQERDAGTYTCRAVNELGDASAEIQLAVGHAPQLTELPRDVTVELGRSALLACRATGRPPPTVTWRRGDGQPLGLRLGAGRGSRSRQPDSGVLFFESVAPEDQAPYVCEARNVFGKVQAEARLIVTGHAPPQIASSAPTVRVLEGQPVSLPCIVLAGRPLPERHWLKDGRPLPPGSRHSIRADGSLHLDRALQEHAGRYSCVATNTAGSQHRDVELVVQVPPRIHPTATHHITNEGVAASLPCVASGVPAPTITWTKETNALTSRGPHYNVSKEGTLLIAQPSAQDAGAYVCTATNTVGFSSQEMRLSVNTKPRIHMNGSRNADVPLQVTAKAGEEVTLDCEAKGSPPPLVTWTKDSRPVPPITNRYGLLPSGSLRLAQVQVGDSGHYECTASNPAGSASHRYVLGVQGRTSWQPQSLPVPHHPACLSGLSVPLLQPTPRSVRLCHLSLRAPLPPPFATPTSCLSQACLSSSTLSLHLSPYPLRGPGDAVQRPPTTQGRAQWGLGFGRTGVRGEPMKVGLRGSLPGTRGPAGSPGCGDGKRPVRCHRAPPAGSILMPPRGPSEPLLPPLPSTRHFVHL

SEQ ID NO: 6525 - protein, 5059 aa, Homo sapiens
MPGAPLLRLLTAVSAAVAVAVAGAPGTVMPPTTGDATLAFVFDVTGSMWDELMQVIDGASRILERSLSRRSQAIANYALVPFHDPDIGPVTLTADPTVFQRELRELYVQGGGDCPEMSVGAIKAAVEVANPGSFIYVFSDARAKDYHKKEELLRLLQLKQSQVVFVLTGDCGDRTHPGYLAYEEIAATSSGQVFHLDKQQVTEVLKWVESAIQASKVHLLSTDHEEEGEHTWRLPFDPSLKEVTISLSGPGPEIEVQDPLGRILQEDEGLNVLLNIPDSAKVVAFKPEHPGLWSIKVYSSGRHSVRITGVSNIDFRAGFSTQPLLDLNHTLEWPLQGVPISLVINSTGLKAPGRLDSVELAQSSGKPLLTLPTKPLSNGSTHQLWGGPPFHTPKERFYLKVKGKDHEGNPLLRVSGVSYSGVAPGAPLVSMAPRIHGYLHQPLLVSCSVHSALPFRLQLRRGEARLGEERHFQESGNSSWEILRASKAEEGTYECTAVSRAGTGRAKAQIVVTDPPPQLVPAPNVTVSPGETAVLSCRVLGEAPYNLTWVRDWRVLPASTGRVAQLADLSLEISGIIPTDGGRYQCVASNANGVTRASVWLLVREAPQVSIHTSSQHFSQGVEVKVSCSASGYPTPHISWSRESQALQEDSRIHVDAQGTLIIQGVAPEDAGNYSCQATNEVGTDQETVTLYYTDPPSVSAVNAVVLVAVGEEAVLVCEASGVPPPRVIWYRGGLEMILAPEGSSSGKLRIPAAQERDAGTYTCRAVNELGDASAEIQLAVGHAPQLTELPRDVTVELGRSALLACRATGRPPPTVTWRRGDGQPLGLRLGAGRGSRSRQPDSGVLFFESVAPEDQAPYVCEARNVFGKVQAEARLIVTGHAPPQIASSAPTVRVLEGQPVSLPCIVLAGRPLPERHWLKDGRPLPPGSRHSIRADGSLHLDRALQEHAGRYSCVATNTAGSQHRDVELVVQVPPRIHPTATHHITNEGVAASLPCVASGVPAPTITWTKETNALTSRGPHYNVSKEGTLLIAQPSAQDAGAYVCTATNTVGFSSQEMRLSVNTKPRIHMNGSRNADVPLQVTAKAGEEVTLDCEAKGSPPPLVTWTKDSRPVPPITNRYGLLPSGSLRLAQVQVGDSGHYECTASNPAGSASHRYVLGVQVPPQVQPGPRVLKVLVGEALDLNCVAEGNPEPQLSWSKDGVVLQGRGPQGSVHFAAIRTSDAGRYRCEASNSAGVDAWEVELRVLEPPHWGADETSGLLERVAGENASLPCPARGTPKPQVTWRKGPSSEPLHGQPGVAVLEEGSLFLASVSPADSGDYECQATNEVGSTSRRAKLVVYVPPSIREDGRKANVSGMAGQSLTLECDANGFPVPEIVWLKDAQLIPKVGGHRLLDEGQSLHFPRIQEGDSGLYSCRAENQAGTAQRDFHLLVLTPPSVLGAGAAQEVLGLAGADVELQCWTSGVPTPQVEWTKDRQPVLPGGPHLQVQEDGQVLRITGSHVGDEGRYQCVAFSPAGQQARDFQLRVHAPPTIWGSNETGEVAVMEDHLVQLLCEARGVPTPNITWFKDGALLPTSTKVVYTRGGRQLQLGRAQSSDAGVYTCKASNAVGAAEKATRLDVYVPPTIEGAGGRPYVVKAVAGRPVALECVARGHPSPTLSWHHEGLPVAESNESRLETDGSVLRLESPGEASSGLYSCVASSPAGEAVLQYSVEVQVPPQLLVAEGLGQVTTIVGQPLELPCQASGSPVPTIQWLQNGRPAEELAGVQVASQGTTLHIDHVELDHSGLFACQATNEAGTAGAEVEVSVHEFPSVSIIGGENITAPFLQPVTLQCIGDGVPTPSLRWWKDGVALAAFGGNLQIEKVDLRDEGIYTCAATNLAGESKREVALKVLVPPNIEPGPVNKAVLENASVTLECLASGVPPPDVSWFKGHQPVSSWMGVTVSVDGRVLRIEQAQLSDAGSYRCVASNVAGSTELRYGLRVNVPPRITLPPSLPGPVLVNTPVRLTCNATGAPSPTLMWLKDGNPVSPAGTPGLQVFPGGRVLTLASARASDSGRYSCVAVSAVGEDRQDVVLQVHMPPSILGEELNVSVVANESVALECQSHAMPPPVLSWWKDGRPLEPRPGVHLSADKALLQVDRADVWDAGHYTCEALNQAGHSEKHYNLNVWVAPVFPLRESHTLTVREGHPTRLSCECRGVPFPKISWRKDGQPLPGEGAGLQHVSAVGRLLYLGQAQLAQEGTYTCECSNVVGNSSQDLQLEVHVPPQIAGPREPPTQVSVVQDGVATLECNATGKPPPTVTWERDGQPVGAELGLQLQNQGQSLHVERAQAAHTGRYSCVAENLAGRAERKFELSVLVPPELIGDLDPLTNITAALHSPLTLLCEAMGIPPPAIRWFRGEEPVSPGEDTYLLAGGWMLKMTQTQEQDSGLYSCLASNEAGEARRNFSVEVLVPPSIENEDLEEVIKVLDGQTAHLMCNVTGHPQPKLTWFKDGRPLARGDAHHISPDGVLLQVLQANLSSAGHYSCIAANAVGEKTKHFQLSVLLAPTILGGAEDSADEEVTVTVNNPISLICEALAFPSPNITWMKDGAPFEASRNIQLLPGTHGLQILNAQKEDAGQYTCVVTNELGEAVKNYHVEVLIPPSISKDDPLAEVGVKEVKTKVNSTLTLECESWAVPPPTIRWYKDGQPVTPSSRLQVLGEGRLLQIQPTQVSDSGRYLCVATNVAGEDDQDFNVLIQVPPMFQKVGDFSAAFEILSREEEARGGVTEYREIVENNPAYLYCDTNAIPPPDLTWYREDQPLSAGDEVSVLQGGRVLQIPLVRAENAGRYSCKASNEVGEDWLHYELLVLTPPVILGDTEELVEEVTVNASSTVSLQCPALGNPVPTISWLQNGLPFSPSPRLQVLEDGQVLQVSTAEVADAASYMCVAENQAGSAEKLFTLRVQVPPRIAGLDLEQVTAILNSSVSLPCDVHAHPNPEVTWYKDSQALSLGEEVFLLPGTHTLQLGRARLSDSGMYTCEALNAAGRDQKLVQLSVLVPPAFRQAPRGPQDAVLVRVGDKAVLSCETDALPEPTVTWYKDGQPLVLAQRTQALRGGQRLEIQEAQVSDKGLYSCKVSNVAGEAVRTFTLTVQVPPTFENPKTETVSQVAGSPLVLTCDVSGVPAPTVTWLKDRMPVESSAVHGVVSRGGRLQLSRLQPAQAGTYTCVAENTQAEARKDFVVAVLVAPRIRSSGVAREHHVLEGQEVRLDCEADGQPPPDVAWLKDGSPLGQDMGPHLRFYLDGGSLVLKGLRASDAGAYTCVAHNPAGEDARLHTVNVLVPPTIKQGADGSGTLVSRPGELVTMVCPVRGSPPIHVSWLKDGLPLPLSQRTLLHGSGHTLRISKVQLADAGIFTCVAASPAGVADRNFTLQVQVPPVLEPVEFQNDVVVVRGSLVELPCEARGVPLPLVSWMKDGEPLLSQSLEQGPSLQLEAVGAGDSGTYSCVAVSEAGEARRHFQLTVMEPPHIEDSGQPTELSLTPGAPMELLCDAQGTPQPNITWHKDGQALTRLENNSRATRVLRVENVQVRDAGLYTCLAESPAGAIEKSFRVRVQAPPNIVGPRGPRFVVGLAPGQLVLECSVEAEPAPKITWHRDGIVLQEDAHTQFPERGRFLQLQALSTADSGDYSCTARNAAGSTSVAFRVEIHTVPTIRSGPPAVNVSVNQTALLPCQADGVPAPLVSWRKDRVPLDPRSPRFEILPEGSLRIQPVLAQDAGHYLCLASNSAGSDRQGRDLRVLALLPCEASGSPKPLVVWWKDGQKLDFRLQQGAYRLLPSNALLLTAPGPQDSAQFECVVSNEVGEAHRLYQVTVHVPPTIADDQTDFTVTMMAPVVLTCHSTGIPAPTVSWSKAGAQLGARGSGYRVSPSGALEIGQALPIHAGRYTCSARNSAGVAHKHVFLTVQASPVVKPLPSVVRAVAEEEVLLPCEASGIPRPTITWQKEGLNVATGVSTQVLPGGQLRIAHASPEDAGNYLCIAKNSAGSAMGKTRLVVQVPPVIENGLPDLSTTEGSHAFLPCKARGSPEPNITWDKDGQPVSGAEGKFTIQPSGELLVKNLEGQDAGTYTCTAENAVGRARRRVHLTILVLPVFTTLPGDRSLRLGDRLWLRCAARGSPTPRIGWTVNDRPVTEGVSEQDGGSTLQRAAVSREDSGTYVCWAENRVGRTQAVSFVHVKEAPVLQGEAFSYLVEPVGGSIQLDCVVRGDPVPDIHWIKDGLPLRGSHLRHQLQNGSLTIRRTERDDAGRYQCLAENEMGVAKKVVILVLQSAPVFQVEPQDMTVRSGDDVALRCQATGEPTPTIEWLQAGQPLRASRRLRTLPDGSLWLENVETGDAGTYDCVAHNLLGSATARAFLVVRGEPQGSWGSMTGVINGRKFGVATLNTSVMQEAHSGVSSIHSSIRHVPANVGPLMRVLVVTIAPIYWALARESGEALNGHSLTGGRFRQESHVEFATGELLTMTQVARGLDPDGLLLLDVVVNGVVPESLADADLQVQDFEEHYVQTGPGQLFVGSTQRFFQGGLPSFLRCNHSIQYNAARGPQPQLVQHLRASAISSAFDPEAEALRFQLATALQAEENEVGCPEGFELDSQGAFCVDRDECSGGPSPCSHACLNAPGRFSCTCPTGFALAWDDRNCRDVDECAWDAHLCREGQRCVNLLGSYRCLPDCGPGFRVADGAGCEDVDECLEGLDDCHYNQLCENTPGGHRCSCPRGYRMQGPSLPCLDVNECLQLPKACAYQCHNLQGSYRCLCPPGQTLLRDGKACTSLERNGQNVTTVSHRGPLLPWLRPWASIPGTSYHAWVSLRPGPMALSSVGRAWCPPGFIRQNGVCTDLDECRVRNLCQHACRNTEGSYQCLCPAGYRLLPSGKNCQDINECEEESIECGPGQMCFNTRGSYQCVDTPCPATYRQGPSPGTCFRRCSQDCGTGGPSTLQYRLLPLPLGVRAHHDVARLTAFSEVGVPANRTELSMLEPDPRSPFALRPLRAGLGAVYTRRALTRAGLYRLTVRAAAPRHQSVFVLLIAVSPYPY

SEQ ID NO: 6526 - protein, 309 aa, Homo sapiens
  VARIANT 1: note = misc_feature - Xaa can be any naturally occurring amino acid
XPGQLFVGSTQRFFQGGLPSFLRCNHSIQYNAARGPQPQLVQHLRASAISSAFDPEAEALRFQLATALQAEENEVGCPEGFELDSQGAFCVDVDECAWDAHLCREGQRCVNLLGSYRCLPDCGPGFRVADGAGCEDVDECLEGLDDCHYNQLCENTPGGHRCSCPRGYRMQGPSLPCLDVNECLQLPKACAYQCHNLQGSYRCLCPPGQTLLRDGKACTSLERNGQNVTTVSHRGPLLPWLRPWASIPGTSYHAWVSLRPGPMALSSVGRAWCPPGFIRQNGVCTDLDECRVRNLCQHACRNTEGSYQC

SEQ ID NO: 6527 - protein, 479 aa, Homo sapiens
  VARIANT 1: note = misc_feature - Xaa can be any naturally occurring amino acid
XVHAHPNPEVTWYKDSQALSLGEEVFLLPGTHTLQLGRARLSDSGMYTCEALNAAGRDQKLVQLSVLVPPAFRQAPRGPQDAVLVRVGDKAVLSCETDALPEPTVTWYKDGQPLVLAQRTQALRGGQRLEIQEAQVSDKGLYSCKVSNVAGEAVRTFTLTVQVPPTFENPKTETVSQVAGSPLVLTCDVSGVPAPTVTWLKDRMPVESSAVHGVVSRGGRLQLSRLQPAQAGTYTCVAENTQAEARKDFVVAVLVAPRIRSSGVAREHHVLEGQEVRLDCEADGQPPPDVAWLKDGSPLGQDMGPHLRFYLDGGSLVLKGLRASDAGAYTCVAHNPAGEDARLHTVNVLVPPTIKQGADGSGTLVSRPGELVTMVCPVRGSPPIHVSWLKDGLPLPLSQRTLLHGSGHTLRISKVQLADAGIFTCVAASPAGVADRNFTLQCPLSWSRWSSRMTWWWFVAPWWNSRARPGAFPCLSCRG

SEQ ID NO: 6528 - protein, 325 aa, Homo sapiens
MAAMRKALPRRLVGLASLRAVSTSSMGTLPKRVKIVEVGPRDGLQNEKNIVSTPVKIKLIDMLSEAGLSVIETTSFVSPKWVPQMGDHTEVLKGIQKFPGINYPVLTPNLKGFEAAVAAGAKEVVIFGAASELFTKKNINCSIEESFQRFDAILKAAQSANISVRGYVSCALGCPYEGKISPAKVAEVTKKFYSMGCYEISLGDTIGVGTPGIMKDMLSAVMQEVPLAALAVHCHDTYGQALANTLMALQMGVSVVDSSVAGLGGCPYAQGASGNLATEDLVYMLEGLGIHTGVNLQKLLEAGNFICQALNRKTSSKVAQATCKL

SEQ ID NO: 6529 - protein, 254 aa, Homo sapiens
MAAMRKALPRRLVGLASLRAVSTSSMGTLPKRVKIVEVGPRDGLQNEKNIVSTPVKIKLIDMLSEAGLSVIETTSFVSPKWVPQMGDHTEVLKGIQKFPGINYPVLTPNLKGFEAAVTKKFYSMGCYEISLGDTIGVGTPGIMKDMLSAVMQEVPLAALAVHCHDTYGQALANTLMALQMGVSVVDSSVAGLGGCPYAQGASGNLATEDLVYMLEGLGIHTGVNLQKLLEAGNFICQALNRKTSSKVAQATCKL

SEQ ID NO: 6530 - protein, 77 aa, Homo sapiens
MLEARREWSRKVFPWSGATQQPGTPFHSPSQTLRRSAGQRPAGVPVPADVLLWTSSRLCVPPLMCSSPCPATCVSAC

SEQ ID NO: 6531 - protein, 182 aa, Homo sapiens
  VARIANT 1: note = misc_feature - Xaa can be any naturally occurring amino acid
XKALPRRLVGLASLRAVSTSSMGTLPKRVKIVEVGPRDGLQNEKVTKKFYSMGCYEISLGDTIGVGTPGIMKDMLSAVMQEVPLAALAVHCHDTYGQALANTLMALQMGVSVVDSSVAGLGGCPYAQGASGNLATEDLVYMLEGLGIHTGVNLQKLLEAGNFICQALNRKTSSKVAQATCKL

SEQ ID NO: 6532 - protein, 53 aa, Homo sapiens
MEIFIEVFSHFLLQLTELTLNMCLELPTGSLEKSLMISSQVLQIPVANSTKQR

SEQ ID NO: 6533 - protein, 139 aa, Homo sapiens
MSISSALAMVFMGAKGNTAAQMSQALCFSKIGGEDGDIHRGFQSLLVAINRTDTEYVLRTANGLFGEKSYDFLTGFTDSCGKFYQATIKQLDFVNDTEKSTTRVNSWVADKTKGENILLFYFDNILNSFIVSSLQNCQI

SEQ ID NO: 6534 - protein, 442 aa, Homo sapiens
MSALGAVIALLLWGQLFAVDSGNDVTDIADDGCPKPPEIAHGYVEHSVRYQCKNYYKLRTEGDGVYTLNDKKQWINKAVGDKLPECEADDGCPKPPEIAHGYVEHSVRYQCKNYYKLRTEGDGEAMPCSLPHVNLRVTFTSPADVGKEGMLMMMSPSPRVYTLNNEKQWINKAVGDKLPECEAVCGKPKNPANPVQRILGGHLDAKGSFPWQAKMVSHHNLTTGATLINEQWLLTTAKNLFLNHSENATAKDIAPTLTLYVGKKQLVEIEKVVLHPNYSQVDIGLIKLKQKVSVNERVMPICLPSKDYAEVGRVGYVSGWGRNANFKFTDHLKYVMLPVADQDQCIRHYEGSTVPEKKTPKSPVGVQPILNEHTFCAGMSKYQEDTCYGDAGSAFAVHDLEEDTWYATGILSFDKSCAVAEYGVYVKVTSIQDWVQKTIAEN

SEQ ID NO: 6535 - protein, 406 aa, Homo sapiens
MSALGAVIALLLWGQLFAVDSGNDVTDIADDGCPKPPEIAHGYVEHSVRYQCKNYYKLRTEGDGVYTLNDKKQWINKAVGDKLPECEADDGCPKPPEIAHGYVEHSVRYQCKNYYKLRTEGDGVYTLNNEKQWINKAVGDKLPECEAVCGKPKNPANPVQRILGGHLDAKGSFPWQAKMVSHHNLTTGATLINEQWLLTTAKNLFLNHSENATAKDIAPTLTLYVGKKQLVEIEKVVLHPNYSQVDIGLIKLKQKVSVNERVMPICLPSKDYAEVGRVGYVSGWGRNANFKFTDHLKYVMLPVADQDQCIRHYEGSTVPEKKTPKSPVGVQPILNEHTFCAGMSKYQEDTCYGDAGSAFAVHDLEEDTWYATGILSFDKSCAVAEYGVYVKVTSIQDWVQKTIAEN

SEQ ID NO: 6536 - protein, 347 aa, Homo sapiens
MSALGAVIALLLWGQLFAVDSGNDVTDIADDGCPKPPEIAHGYVEHSVRYQCKNYYKLRTEGDGVYTLNDKKQWINKAVGDKLPECEAVCGKPKNPANPVQRILGGHLDAKGSFPWQAKMVSHHNLTTGATLINEQWLLTTAKNLFLNHSENATAKDIAPTLTLYVGKKQLVEIEKVVLHPNYSQVDIGLIKLKQKVSVNERVMPICLPSKDYAEVGRVGYVSGWGRNANFKFTDHLKYVMLPVADQDQCIRHYEGSTVPEKKTPKSPVGVQPILNEHTFCAGMSKYQEDTCYGDAGSAFAVHDLEEDTWYATGILSFDKSCAVAEYGVYVKVTSIQDWVQKTIAEN

SEQ ID NO: 6537 - protein, 88 aa, Homo sapiens
MSALGAVIALLLWGQLFAVDSGNDVTDIADDGCPKPPEIAHGYVEHSVRYQCKNYYKLRTEGDGVYTLNNEKQWINKAVGDKLPECEA

SEQ ID NO: 6538 - protein, 92 aa, Homo sapiens
MSALGAVIALLLWGQLFAVDSGNDVTDIADDGCPKPPEIAHGYVEHSVRYQCKNYYKLRTEGDGVYTLNNEKQWINKAVGDKLPECEAAHTE

SEQ ID NO: 6539 - protein, 222 aa, Homo sapiens
MSALGAVIALLLWGQLFAVDSGNDVTDIADDGCPKPPEIAHGYVEHSVRYQCKNYYKLRTEGDGVYTLNNEKQWINKAVGDKLPECEAGATLINEQWLLTTAKNLFLNHSENATAKDIAPTLTLYVGKKQLVEIEKVVLHPNYSQVDIGLIKLKQKVSVNERVMPICLPSKDYAEVGRVGYVSGWGRNANFKFTDHLKYVMLPVADQDQCIRHYEGSTVPEK

SEQ ID NO: 6540 - protein, 91 aa, Homo sapiens
MSALGAVIALLLWGQLFAVDSGNDVTDIADDGCPKPPEIAHGYVEHSVRYQCKNYYKLRTEGDGVYTLNNEKQWINKAVGDKLPECEAGGC

SEQ ID NO: 6541 - protein, 347 aa, Homo sapiens
MSALGAVIALLLWGQLFAVDSGNDVTDIADDGCPKPPEIAHGYVEHSVRYQCKNYYKLRTEGDGVYTLNNEKQWINKAVGDKLPECEAVCGKPKNPANPVQRILGGHLDAKGSFPWQAKMVSHHNLTTGATLINEQWLLTTAKNLFLNHSENATAKDIAPTLTLYVGKKQLVEIEKVVLHPNYSQVDIGLIKLKQKVSVNERVMPICLPSKDYAEVGRVGYVSGWGRNANFKFTDHLKYVMLPVADQDQCIRHYEGSTVPEKKTPKSPVGVQPILNEHTFCAGMSKYQEDTCYGDAGSAFAVHDLEEDTWYATGILSFDKSCAVAEYGVYVKVTSIQDWVQKTIAEN

SEQ ID NO: 6542 - protein, 347 aa, Homo sapiens; identical to SEQ ID NO: 6541

SEQ ID NO: 6543 - protein, 281 aa, Homo sapiens
MSRISQMTAARSPPRLHMAMWSTRFATSVRTNPVQRILGGHLDAKGSFPWQAKMVSHHNLTTGATLINEQWLLTTAKNLFLNHSENATAKDIAPTLTLYVGKKQLVEIEKVVLHPNYSQVDIGLIKLKQKVSVNERVMPICLPSKDYAEVGRVGYVSGWGRNANFKFTDHLKYVMLPVADQDQCIRHYEGSTVPEKKTPKSPVGVQPILNEHTFCAGMSKYQEDTCYGDAGSAFAVHDLEEDTWYATGILSFDKSCAVAEYGVYVKVTSIQDWVQKTIAEN

SEQ ID NO: 6544 - protein, 281 aa, Homo sapiens; identical to SEQ ID NO: 6543

SEQ ID NO: 6545 - protein, 365 aa, Homo sapiens
  VARIANT 1: note = misc_feature - Xaa can be any naturally occurring amino acid
XALGAVIALLLWGQLFAVDSGNDVTDIADDGCPKPPEIAHGYVEHSVRYQCKNYYKLRTEGDGVYTLNDKKQWINKAVGDKLPECEADDGCPKPPEIAHGYVEHSVRYQCKNYYKLRTEGDGVYTLNNEKQWINKAVGDKLPECEAGATLINEQWLLTTAKNLFLNHSENATAKDIAPTLTLYVGKKQLVEIEKVVLHPNYSQVDIGLIKLKQKVSVNERVMPICLPSKDYAEVGRVGYVSGWGRNANFKFTDHLKYVMLPVADQDQCIRHYEGSTVPEKKTPKSPVGVQPILNEHTFCAGMSKYQEDTCYGDAGSAFAVHDLEEDTWYATGILSFDKSCAVAEYGVYVKVTSIQDWVQKTIAEN

SEQ ID NO: 6546 - protein, 149 aa, Homo sapiens
  VARIANT 1: note = misc_feature - Xaa can be any naturally occurring amino acid
XALGAVIALLLWGQLFAVDSGNDVTDIADDGCPKPPEIAHGYVEHSVRYQCKNYYKLRTEGDGVYTLNDKKQWINKAVGDKLPECEADDGCPKPPEIAHGYVEHSVRYQCKNYYKLRTEGDGVYTLNNEKQWINKAVGDKLPECEAGGC

SEQ ID NO: 6547 - protein, 404 aa, Homo sapiens
  VARIANT 1: note = misc_feature - Xaa can be any naturally occurring amino acid
XALGAVIALLLWGQLFAVDSGNDVTDIADDGCPKPPEIAHGYVEHSVRYQCKNYYKLRTEGDGVYTLNDKKQWINKAVGDKLPECEADDGCPKPPEIAHGYVEHSVRYQCKNYYKLRTEGDVYTLNNEKQWINKAVGDKLPECEAVCGKPKNPANPVQRILGGHLDAKGSFPWQAKMVSHHNLTTGATLINEQWLLTTAKNLFLNHSENATAKDIAPTLTLYVGKKQLVEIEKVVLHPNYSQVDIGLIKLKQKVSVNERVMPICLPSKDYAEVGRVGYVSGWGRNANFKFTDHLKYVMLPVADQDQCIRHYEGSTVPEKKTPKSPVGVQPILNEHTFCAGMSKYQEDTCYGDAGSAFAVHDLEEDTWYATGILSFDKSCAVAEYGVYVKVTSIQDWVQKTIAEN

SEQ ID NO: 6548 - protein, 348 aa, Homo sapiens
MSDLGAVISLLLWGRQLFALYSGNDVTDISDDRFPKPPEIANGYVEHLFRYQCKNYYRLRTEGDGVYTLNDKKQWINKAVGDKLPECEAVCGKPKNPANPVQRILGGHLDAKGSFPWQAKMVSHHNLTTGATLINEQWLLTTAKNLFLNHSENATAKDIAPTLTLYVGKKQLVEIEKVVLHPNYHQVDIGLIKLKQKVLVNERVMPICLPSKNYAEVGRVGYVSGWGQSDNFKLTDHLKYVMLPVADQYDCITHYEGSTCPKWKAPKSPVGVQPILNEHTFCVGMSKYQEDTCYGDAGSAFAVHDLEEDTWYAAGILSFDKSCAVAEYGVYVKVTSIQHWVQKTIAEN

SEQ ID NO: 6549 - protein, 117 aa, Homo sapiens
MSDLGAVISLLLWGRQLFALYSGNDVTDISDDRFPKPPEIANGYVEHLFRYQCKNYYRLRTEGDGVYTLNDKKQWINKAVGDKLPECEAVCGKPKNPANPVQRILGGHLVRGWDPKL

SEQ ID NO: 6550 - protein, 281 aa, Homo sapiens
MSRIFQMTASRSPLRLQMAMWSTCFATSVRTNPVQRILGGHLDAKGSFPWQAKMVSHHNLTTGATLINEQWLLTTAKNLFLNHSENATAKDIAPTLTLYVGKKQLVEIEKVVLHPNYHQVDIGLIKLKQKVLVNERVMPICLPSKNYAEVGRVGYVSGWGQSDNFKLTDHLKYVMLPVADQYDCITHYEGSTCPKWKAPKSPVGVQPILNEHTFCVGMSKYQEDTCYGDAGSAFAVHDLEEDTWYAAGILSFDKSCAVAEYGVYVKVTSIQHWVQKTIAEN

SEQ ID NO: 6551 - protein, 485 aa, Homo sapiens
MLLRSKPALPPPLMLLLLGPLGPLSPGALPRPAQAQDVVDLDFFTQEPLHLVSPSFLSVTIDANLATDPRFLILLGSPKLRTLARGLSPAYLRFGGTKTDFLIFDPKKESTFEERSYWQSQVNQDICKYGSIPPDVEEKLRLEWPYQEQLLLREHYQKKFKNSTYSKPNSFLKKADIFINGSQLGEDFIQLHKLLRKSTFKNAKLYGPDVGQPRRKTAKMLKSFLKAGGEVIDSVTWHHYYLNGRTATKEDFLNPDVLDIFISSVQKVFQVVESTRPGKKVWLGETSSAYGGGAPLLSDTFAAGFMWLDKLGLSARMGIEVVMRQVFFGAGNYHLVDENFDPLPDYWLSLLFKKLVGTKVLMASVQGSKRRKLRVYLHCTNTDNPRYKEGDLTLYAINLHNVTKYLRLPYPFSNKQVDKYLLRPLGPHGLLSKSVQLNGLTLKMVDDQTLPPLMEKPLRPGSSLGLPAFSYSFFVIRNAKVAACI

SEQ ID NO: 6552 - protein, 226 aa, Homo sapiens
MLLRSKPALPPPLMLLLLGPLGPLSPGALPRPAQAQDVVDLDFFTQEPLHLVSPSFLSVTIDANLATDPRFLILLGSPKLRTLARGLSPAYLRFGGTKTDFLIFDPKKESTFEERSYWQSQVNQDICKYGSIPPDVEEKLRLEWPYQEQLLLREHYQKKFKNSTYSRSSVDVLYTFANCSGLDLIFGLNALLRTADLQWNSSNAQLLLDYCSSKGYNISWELGNAS

SEQ ID NO: 6553 - protein, 543 aa, Homo sapiens
MLLRSKPALPPPLMLLLLGPLGPLSPGALPRPAQAQDVVDLDFFTQEPLHLVSPSFLSVTIDANLATDPRFLILLGSPKLRTLARGLSPAYLRFGGTKTDFLIFDPKKESTFEERSYWQSQVNQDICKYGSIPPDVEEKLRLEWPYQEQLLLREHYQKKFKNSTYSRSSVDVLYTFANCSGLDLIFGLNALLRTADLQWNSSNAQLLLDYCSSKGYNISWELGNEPNSFLKKADIFINGSQLGEDFIQLHKLLRKSTFKNAKLYGPDVGQPRRKTAKMLKSFLKAGGEVIDSVTWHHYYLNGRTATKEDFLNPDVLDIFISSVQKVFQVVESTRPGKKVWLGETSSAYGGGAPLLSDTFAAGFMWLDKLGLSARMGIEVVMRQVFFGAGNYHLVDENFDPLPDYWLSLLFKKLVGTKVLMASVQGSKRRKLRVYLHCTNTDNPRYKEGDLTLYAINLHNVTKYLRLPYPFSNKQVDKYLLRPLGPHGLLSKSVQLNGLTLKMVDDQTLPPLMEKPLRPGSSLGLPAFSYSFFVIRNAKVAACI

SEQ ID NO: 6554 - protein, 543 aa, Homo sapiens; identical to SEQ ID NO: 6553

SEQ ID NO: 6555 - protein, 380 aa, Homo sapiens
MLLRSKPALPPPLMLLLLGPLGPLSPGALPRPAQAQDVVDLDFFTQEPLHLVSPSFLSVTIDANLATDPRFLILLGSPKLRTLARGLSPAYLRFGGTKTDFLIFDPKKESTFEERSYWQSQVNQDICKYGSIPPDVEEKLRLEWPYQEQLLLREHYQKKFKNSTYSRSSVDVLYTFANCSGLDLIFGLNALLRTADLQWNSSNAQLLLDYCSSKGYNISWELGNEPNSFLKKADIFINGSQLGEDFIQLHKLLRKSTFKNAKLYGPDVGQPRRKTAKMLKSFLKAGGEVIDSVTWHHYYLNGRTATKEDFLNPDVLDIFISSVQKVFQVVESTRPGKKVWLGETSSAYGGGAPLLSDTFAAGFMIIGYLFCSRNWWAPRC

SEQ ID NO: 6556 - protein, 469 aa, Homo sapiens
MLLRSKPALPPPLMLLLLGPLGPLSPGALPRPAQAQDVVDLDFFTQEPLHLVSPSFLSVTIDANLATDPRFLILLGSPKLRTLARGLSPAYLRFGGTKTDFLIFDPKKESTFEERSYWQSQVNQDICKYGSIPPDVEEKLRLEWPYQEQLLLREHYQKKFKNSTYSRSSVDVLYTFANCSGLDLIFGLNALLRTADLQWNSSNAQLLLDYCSSKGYNISWELGNEPNSFLKKADIFINGSQLGEDFIQLHKLLRKSTFKNAKLYGPDVGQPRRKTAKMLKSFLKAGGEVIDSVTWHHYYLNGRTATKEDFLNPDVLDIFISSVQKVFQDYWLSLLFKKLVGTKVLMASVQGSKRRKLRVYLHCTNTDNPRYKEGDLTLYAINLHNVTKYLRLPYPFSNKQVDKYLLRPLGPHGLLSKSVQLNGLTLKMVDDQTLPPLMEKPLRPGSSLGLPAFSYSFFVIRNAKVAACI

SEQ ID NO: 6557 - protein, 168 aa, Homo sapiens
MLLRSKPALPPPLMLLLLGPLGPLSPGALPRPAQAQDVVDLDFFTQEPLHLVSPSFLSVTIDANLATDPRFLILLGSPKLRTLARGLSPAYLRFGGTKTDFLIFDPKKESTFEERSYWQSQVNQDICKYGSIPPDVEEKLRLEWPYQEQLLLREHYQKKFKNSTYSTS

SEQ ID NO: 6558 - protein, 389 aa, Homo sapiens
ARSLDKLYNFADCSGLHLIFALNALRRNPNNSWNSSSALSLLKYSASKKYNISWELGNEPNNYRTMHGRAVNGSQLGKDYIQLKSLLQPIRIYSRASLYGPNIGRPRKNVIALLDGFMKVAGSTVDAVTWQHCYIDGRVVKVMDFLKTRLLDTLSDQIRKIQKVVNTYTPGKKIWLEGVVTTSAGGTNNLSDSYAAGFLWLNTLGMLANQGIDVVIRHSFFDHGYNHLVDQNFNPLPDYWLSLLYKRLIGPKVLAVHVAGLQRKPRPGRVIRDKLRIYAHCTNHHNHNYVRGSITLFIINLHRSRKKIKLAGTLRDKLVHQYLLQPYGQEGLKSKSVQLNGQPLVMVDDGTLPELKPRPLRAGRTLVIPPVTMGFYVVKNVNALACRYR

SEQ ID NO: 6559 - protein, 149 aa, Homo sapiens
MRVLCAFPEAMPSSNSRPPACLAPGALYLALLLHLSLSSQAGDRRPLPVDRAAGLKEKTLILLDVSTKNPVRTVNENFLSLQLDPSIIHDGWLDFLSSKRLVTLARGLSPAFLRFGGKRTDFLQFQNLRNPAKSRGGPGPDYYLKNYED

SEQ ID NO: 6560 - protein, 592 aa, Homo sapiens
MRVLCAFPEAMPSSNSRPPACLAPGALYLALLLHLSLSSQAGDRRPLPVDRAAGLKEKTLILLDVSTKNPVRTVNENFLSLQLDPSIIHDGWLDFLSSKRLVTLARGLSPAFLRFGGKRTDFLQFQNLRNPAKSRGGPGPDYYLKNYEDDIVRSDVALDKQKGCKIAQHPDVMLELQREKAAQMHLVLLKEQFSNTYSNLILTARSLDKLYNFADCSGLHLIFALNALRRNPNNSWNSSSALSLLKYSASKKYNISWELGNEPNNYRTMHGRAVNGSQLGKDYIQLKSLLQPIRIYSRASLYGPNIGRPRKNVIALLDGFMKVAGSTVDAVTWQHCYIDGRVVKVMDFLKTRLLDTLSDQIRKIQKVVNTYTPGKKIWLEGVVTTSAGGTNNLSDSYAAGFLWLNTLGMLANQGIDVVIRHSFFDHGYNHLVDQNFNPLPDYWLSLLYKRLIGPKVLAVHVAGLQRKPRPGRVIRDKLRIYAHCTNHHNHNYVRGSITLFIINLHRSRKKIKLAGTLRDKLVHQYLLQPYGQEGLKSKSVQLNGQPLVMVDDGTLPELKPRPLRAGRTLVIPPVTMGFYVVKNVNALACRYR

SEQ ID NO: 6561 - protein, 548 aa, Homo sapiens
MRVLCAFPEAMPSSNSRPPACLAPGALYLALLLHLSLSSQAGDRRPLPVDRAAGLKEKTLILLDVSTKNPVRTVNENFLSLQLDPSIIHDGWLDFLSSKRLVTLARGLSPAFLRFGGKRTDFLQFQNLRNPAKSRGGPGPDYYLKNYEDDIVRSDVALDKQKGCKIAQHPDVMLELQREKAAQMHLVLLKEQFSNTYSNLILTARSLDKLYNFADCSGLHLIFALNALRRNPNNSWNSSSALSLLKYSASKKYNISWELGNEPNNYRTMHGRAVNGSQLGKDYIQLKSLLQPIRIYSRASLYGPNIGRPRKNVIALLDGFMKVAGSTVDAVTWQHCYIDGRVVKVMDFLKTRLLDTLSDQIRKIQKVVNTYTPGKKIWLEGVVTTSAGGTNNLSDSYAAGFLWLNTLGMLANQGIDVVIRHSFFDHGYNHLVDQNFNPLPDYWLSLLYKRLIGPKVLAVHVAGLQRKPRPGRVIRDKLRIYAHCTNHHNHNYVRGSITLFIINLHRSRKKIKLAGTLRDKLVHQYLLQPYGQEGLKSKTQRCQYCGII

SEQ ID NO: 6562 - protein, 534 aa, Homo sapiens
MRVLCAFPEAMPSSNSRPPACLAPGALYLALLLHLSLSSQAGDRRPLPVDRAAGLKEKTLILLDVSTKNPVRTVNENFLSLQLDPSIIHDGWLDFLSSKRLVTLARGLSPAFLRFGGKRTDFLQFQNLRNPAKSRGGPGPDYYLKNYEDDIVRSDVALDKQKGCKIAQHPDVMLELQREKAAQMHLVLLKEQFSNTYSNLILTEPNNYRTMHGRAVNGSQLGKDYIQLKSLLQPIRIYSRASLYGPNIGRPRKNVIALLDGFMKVAGSTVDAVTWQHCYIDGRVVKVMDFLKTRLLDTLSDQIRKIQKVVNTYTPGKKIWLEGVVTTSAGGTNNLSDSYAAGFLWLNTLGMLANQGIDVVIRHSFFDHGYNHLVDQNFNPLPDYWLSLLYKRLIGPKVLAVHVAGLQRKPRPGRVIRDKLRIYAHCTNHHNHNYVRGSITLFIINLHRSRKKIKLAGTLRDKLVHQYLLQPYGQEGLKSKSVQLNGQPLVMVDDGTLPELKPRPLRAGRTLVIPPVTMGFYVVKNVNALACRYR

SEQ ID NO: 6563 - protein, 480 aa, Homo sapiens
MRVLCAFPEAMPSSNSRPPACLAPGALYLALLLHLSLSSQAGDRRPLPVDRAAGLKEKTLILLDVSTKNPVRTVNENFLSLQLDPSIIHDGWLDFLSSKRLVTLARGLSPAFLRFGGKRTDFLQFQNLRNPAKSRGGPGPDYYLKNYEDEPNNYRTMHGRAVNGSQLGKDYIQLKSLLQPIRIYSRASLYGPNIGRPRKNVIALLDGFMKVAGSTVDAVTWQHCYIDGRVVKVMDFLKTRLLDTLSDQIRKIQKVVNTYTPGKKIWLEGVVTTSAGGTNNLSDSYAAGFLWLNTLGMLANQGIDVVIRHSFFDHGYNHLVDQNFNPLPDYWLSLLYKRLIGPKVLAVHVAGLQRKPRPGRVIRDKLRIYAHCTNHHNHNYVRGSITLFIINLHRSRKKIKLAGTLRDKLVHQYLLQPYGQEGLKSKSVQLNGQPLVMVDDGTLPELKPRPLRAGRTLVIPPVTMGFYVVKNVNALACRYR

SEQ ID NO: 6564 - protein, 254 aa, Homo sapiens [sequence omitted]

SEQ ID NO: 6565 - protein, 462 aa, Homo sapiens
MARVLGAPVALGLWSLCWSLAIATPLPPTSAHGNVAEGETKPDPDVTERCSDGWSFDATTLDDNGTMLFFKGEFVWKSHKWDRELISERWKNFPSPVDAAFRQGHNSVFLIKGDKVWVYPPEKKEKGYPKLLQDEFPGIPSPLDAAVECHRGECQAEGVLFFQGDREWFWDLATGTMKERSWPAVGNCSSALRWLGRYYCFQGNQFLRFDPVRGEVPPRYPRDVRDYFMPCPGRGHGHRNGTGHGNSTHHGPEYMRCSPHLVLSALTSDNHGATYAFSGTHYWRLDTSRDGWHSWPIAHQWPQGPSAVDAAFSWEEKLYLVQGTQVYVFLTKGGYTLVSGYPKRLEKEVGTPHGIILDSVDAAFICPGSSRLHIMAGRRLWWLDLKSGAQATWTELPWPHEKVDGALCMEKSLGPNSCSANGPGLYLIHGPNLYCYSDVEKLNAAKALPQPQNVTSLLGCTH

SEQ ID NO: 6566 - protein, 699 aa, Homo sapiens
MGHHRPWLHASVLWAGVASLLLPPAMTQQLRGDGLGFRNRNNSTGVAGLSEEASAELRHHLHSPRDHPDENKDVSTENGHHFWSHPDREKEDEDVSKEYGHLLPGHRSQDHKVGDEGVSGEEVFAEHGGQARGHRGHGSEDTEDSAEHRHHLPSHRSHSHQDEDEDEVVSSEHHHHILRHGHRGHDGEDDEGEEEEEEEEEEEEASTEYGHQAHRHRGHGSEEDEDVSDGHHHHGPSHRHQGHEEDDDDDDDDDDDDDDDDVSIEYRHQAHRHQGHGIEEDEDVSDGHHHRDPSHRHRSHEEDDNDDDDVSTEYGHQAHRHQDHRKEEVEAVSGEHHHHVPDHRHQGHRDEEEDEDVSTERWHQGPQHVHHGLVDEEEEEEEITVQFGHYVASHQPRGHKSDEEDFQDEYKTEVPHHHHHRVPREEDEEVSAELGHQAPSHRQSHQDEETGHGQRGSIKEMSHHPPGHTVVKDRSHLRKDDSEEEKEKEEDPGSHEEDDESSEQGEKGTHHGSRDQEDEEDEEEGHGLSLNQEEEEEEDKEEEEEEEDEERREERAEVGAPLSPDHSEEEEEEEEGLEEDEPRFTIIPNPLDRREEAGGASSEEESGEDTGPQDAQEYGNYQPGSLCGYCSFCNRCTECESCHCDEENMGEHCDQCQHCQFCYLCPLVCETVCAPGSYVDYFSSSLYQALADMLETPEP

SEQ ID NO: 6567 - protein, 676 aa, Homo sapiens
MGHHRPWLHASVLWAGVASLLLPPAMTQQLRGDGLGFRNRNNSTGVAGLSEEASAELRHHLHSPRDHPDENKDVSTENGHHFWSHPDREKEDEDVSKEYGHLLPGHRSQDHKVGDEGVSGEEVFAEHGGQARGHRGHGSEDTEDSAEHRHHLPSHRSHSHQDEDEDEVVSSEHHHHILRHGHRGHDGEDDEGEEEEEEEEEEEEASTEYGHQAHRHRGHGSEEDEDVSDGHHHHGPSHRHQGHEEDDDDDDDDDDDDDDDDVSIEYRHQAHRHQGHGIEEDEDVSDGHHHRDPSHRHRSHEEDDNDDDDVSTEYGHQAHRHQDHRKEEVEAVSGEHHHHVPDHRHQGHRDEEEDEDVSTERWHQGPQHVHHGLVDEEEEEEEITVQFGHYVASHQPRGHKSDEEDFQDEYKTEVPHHHHHRVPREEDEEVSAELGHQAPSHRQSHQDEETGHGQRGSIKEMSHHPPGHTVVKDRSHLRKDDSEEEKEKEEDPGSHEEDDESSEQGEKGTHHGSRDQEDEEDEEEGHGLSLNQEEEEEEDKEEEEEEEDEERREERAEVGAPLSPDHSEEEEEEEEGLEEDEPRFTIIPNPLDRREEAGGASSEEESGEDTGPQDAQEYGNYQPGSLCGYCSFCNHCQFCYLCPLVCETVCAPGSYVDYFSSSLYQALADMLETPEP

SEQ ID NO: 6568 - protein, 96 aa, Homo sapiens
  VARIANT 1: note = misc_feature - Xaa can be any naturally occurring amino acid
XSEEESGEDTGPQDAQEYGNYQPGSLCGYCSFCNRCTECESCHCDEENMGEHCDQCQGPGRHAGNAGTLTQSLDCDAGVPPPAFQPLSTSYIYFSE

SEQ ID NO: 6569 - protein, 525 aa, Homo sapiens
MKALIAALLLITLQYSCAVSPTDCSAVEPEAEKALDLINKRRRDGYLFQLLRIADAHLDRVENTTVYYLVLDVQESDCSVLSRKYWNDCEPPDSRRPSEIVIGQCKVIATRHSHESQDLRVIDFNCTTSSVSSALANTKDSPVLIDFFEDTERYRKQANKALEKYKEENDDFASFRVDRIERVARVRGGEGTGYFVDFSVRNCPRHHFPRHPNVFGFCRADLFYDVEALDLESPKNLVINCEVFDPQEHENINGVPPHLGHPFHWGGHERSSTTKPPFKPHGSRDHHHPHKPHEHGPPPPPDERDHSHGPPLPQGPPPLLPMSCSSCQHATFGTNGAQRHSHNNNSSDLHPHKHHSHEQHPHGHHPHAHHPHEHDTHRQHPHGHHPHGHHPHGHHPHGHHPHGHHPHCHDFQDYGPCDPPPHNQGHCCHGHGPPPGHLRRRGPGKGPRPFHCRQIGSVYRLPPLRKGEVLPLPEANFPSFPLPHHKHPLKPDNQPFPQSVSESCPGKFKSGFPQVSMFFTHTFPK

SEQ ID NO: 6570 - protein, 111 aa, Homo sapiens
MDGPRQDATLDEEEDMVIIYNRVPKTASTSFTNIAYDLCAKNKYHVLHINTTKNNPVMSLQDQVRFVKNITSWKEMKPGFYHGHVSYLDFAKFGVKKKPIYINVIRDPIER

SEQ ID NO: 6571 - protein, 229 aa, Homo sapiens
MGLLRIMMPPKLQLLAVVAFAVAMLFLENQIQKLEESRSKLERAIARHEVREIEQRHTMDGPRQDATLDEEEDMVIIYNRVPKTASTSFTNIAYDLCAKNKYHVLHINTTKNNPVMSLQDQVRFVKNITSWKEMKPGFYHGHVSYLDFAKFGVKKKPIYINVIRDPIERLVSYYYFLRFGDDYRPGLRRRKQGDKKTFDECVAEGGSDCAPEKLWLQIPFFCGHSSECW

SEQ ID NO: 6572 - protein, 356 aa, Homo sapiens
MGLLRIMMPPKLQLLAVVAFAVAMLFLENQIQKLEESRSKLERAIARHEVREIEQRHTMDGPRQDATLDEEEDMVIIYNRVPKTASTSFTNIAYDLCAKNKYHVLHINTTKNNPVMSLQDQVRFVKNITSWKEMKPGFYHGHVSYLDFAKFGVKKKPIYINVIRDPIERLVSYYYFLRFGDDYRPGLRRRKQGDKKTFDECVAEGGSDCAPEKLWLQIPFFCGHSSECWNVGSRWAMDQAKYNLINEYFLVGVTEELEDFIMLLEAALPRFFRGATELYRTGKKSHLRKTTEKKLPTKQTIAKLQQSDIWKMENEFYEFALEQFQFIRAHAVREKDGDLYILAQNFFYEKIYPKSN

SEQ ID NO: 6573 - protein, 83 aa, Homo sapiens
MAALLLGAVLLVAQPQLVPSRPAELGQQELLRKAGTLQDDVRDGVAPNGSAQQLPQTIIIGVRKGGTRALLEMLSLHPDVAAA

SEQ ID NO: 6574 - protein, 83 aa, Homo sapiens; identical to SEQ ID NO: 6573

SEQ ID NO: 6575 - protein, 307 aa, Homo sapiens
MAALLLGAVLLVAQPQLVPSRPAELGQQELLRKAGTLQDDVRDGVAPNGSAQQLPQTIIIGVRKGGTRALLEMLSLHPDVAAAENEVHFFDWEEHYSHGLGWYLSQMPFSWPHQLTVEKTPAYFTSPKVPERVYSMNPSIRLLLILRDPSERVLSDYTQVFYNHMQKHKPYPSIEEFLVRDGRLNVDYKALNRSLYHVHMQNWLRFFPLRHIHIVDGDRLIRDPFPEIQKVERFLKLSPQINASNFYFNKTKGFYCLRDSGRDRCLHESKGRAHPQVDPKLLNKLHEYFHEPNKKFFELVGRTFDWH

SEQ ID NO: 6576 - protein, 411 aa, Homo sapiens
MRRRRAGGRTMVERASKFVLVVAGSVCFMLILYQYAGPGLSLGAPGGRAPPDDLDLFPTPDPHYEKKYYFPVRELERSLRFDMKGDDVIVFLHIQKTGGTTFGRHLVQNVRLEVPCDCRPGQKKCTCYRPNRRETWLFSRFSTGWSCGLHADWTELTNCVPGVLDRRDSAALRTPRKFYYITLLRDPVSRYLSEWRHVQRGATWKTSLHMCDGRTPTPEELPPCYEGTDWSGCTLQEFMDCPYNLANNRQVRMLADLSLVGCYNLSFIPEGKRAQLLLESAKKNLRGMAFFGLTEFQRKTQYLFERTFNLKFIRPFMQYNSTRAGGVEVDEDTIRRIEELNDLDMQLYDYAKDLFQQRYQYKRQLERREQRLRSREERLLHRAKEALPREDADEPGRVPTEDYMSHIIEKW

SEQ ID NO: 6577 - protein, 471 aa, Homo sapiens
MDERFNKWLLTPVLTLLFVVIMYQYVSPSCTSSCTNFGEQPRAGEAGPPAVPGPARRAQAPPEEWERRPQLPPPPRGPPEGPRGAAAPEEEDEEPGDPREGEEEEEEDEPDPEAPENGSLPRFVPRFNFSLKDLTRFVDFNIKGRDVIVFLHIQKTGGTTFGRHLVKNIRLEQPCSCKAGQKKCTCHRPGKKETWLFSRFSTGWSCGLHADWTELTNCVPAIMEKKDCPRNHSHTRNFYYITMLRDPVSRYLSEWKHVQRGATWKTSLHMCDGRSPTPDELPTCYPGDDWSGVSLREFMDCTYNLANNRQVRMLADLSLVGCYNLTFMNESERNTILLQSAKNNLKNMAFFGLTEFQRKTQFLFERTFNLKFISPFTQFNITRASNVEINEGARQRIEDLNFLDMQLYEYAKDLFQQRYHHTKQLEHQRDRQKRREERRLQREHRDHQWPKEDGAAEGTVTEDYNSQVVRW

SEQ ID NO: 6578 - protein, 236 aa, Homo sapiens
RNFYYITMLRDPVSRYLSEWKHVQRGATWKTSLHMCDGRSPTPDELPTCYPGDDWSGVSLREFMDCTYNLANNRQVRMLADLSLVGCYNLTFMNESERNTILLQSAKNNLKNMAFFGLTEFQRKTQFLFERTFNLKFISPFTQFNITRASNVEINEGARQRIEDLNFLDMQLYEYAKDLFQQRYHHTKQLEHQRDRQKRREERRLQREHRDHQWPKEDGAAEGTVTEDYNSQVVRW

SEQ ID NO: 6579 - protein, 333 aa, Homo sapiens
MANLGTLQLLPPRFKRFSCLSLPNIWITGMPVPATSVPCPSAGPHRTMKVLLLTGLGALFFAYYWDDNFDPASLQGARVLLTGANAGVGEELAYHYARLGSHLVLTAHTEALLQKVVGNCRKLGAPKVFYIAADMASPEAPESVVQFALDKLGGLDYLVLNHIGGAPAGTRARSPQATRWLMQVNFVSYVQLTSRALPSLTDSKGSLVVVSSLLGRVPTSFSTPYSAAKFALDGFFGSLRRELDVQDVNVAITMCVLGLRDRASAAEAVRGVTRVKAAPGPKAALAVIRGGATRAAGVFYPWRFRLLCLLRRWLPRPRAWFIRQELNVTAAAA

SEQ ID NO: 6580 - protein, 199 aa, Homo sapiens
MASPEAPESVVQFALDKLGGLDYLVLNHIGGAPAGTRARSPQATRWLMQVNFVSYVQLTSRALPSLTDSKGSLVVVSSLLGRVPTSFSTPYSAAKFALDGFFGSLRRELDVQDVNVAITMCVLGLRDRASAAEAVRGVTRVKAAPGPKAALAVIRGGATRAAGVFYPWRFRLLCLLRRWLPRPRAWFIRQELNVTAAAA

SEQ ID NO: 6581 - protein, 75 aa, Homo sapiens
MKVLLLTGLGALFFAYYWDDNFDPASLQGARVLLTGANAGVGEELAYHYARLGSHLVLTAHTEALLQKAGWTTSC

SEQ ID NO: 6582 - protein, 75 aa, Homo sapiens; identical to SEQ ID NO: 6581

SEQ ID NO: 6583 - protein, 87 aa, Homo sapiens
MKVLLLTGLGALFFAYYWDDNFDPASLQGARVLLTGANAGVGEELAYHYARLGSHLVLTAHTEALLQKARWLTLVVSTLGGRGKWIT

SEQ ID NO: 6584 - protein, 143 aa, Homo sapiens
MKVLLLTGLGALFFAYYWDDNFDPASLQGARVLLTGANAGVGEELAYHYARLGSHLVLTAHTEALLQKVVGNCRKLGAPKVFYIAADMASPEAPESVVQFALDKLGGLDYLVLNHIGGAPAGTRARSPQATRWLMQVNFVSYV

SEQ ID NO: 6585 - protein, 286 aa, Homo sapiens
MKVLLLTGLGALFFAYYWDDNFDPASLQGARVLLTGANAGVGEELAYHYARLGSHLVLTAHTEALLQKVVGNCRKLGAPKVFYIAADMASPEAPESVVQFALDKLGGLDYLVLNHIGGAPAGTRARSPQATRWLMQVNFVSYVQLTSRALPSLTDSKGSLVVVSSLLGRVPTSFSTPYSAAKFALDGFFGSLRRELDVQDVNVAITMCVLGLRDRASAAEAVRGVTRVKAAPGPKAALAVIRGGATRAAGVFYPWRFRLLCLLRRWLPRPRAWFIRQELNVTAAAA

SEQ ID NO: 6586 - protein, 286 aa, Homo sapiens; identical to SEQ ID NO: 6585

SEQ ID NO: 6587 - protein, 286 aa, Homo sapiens; identical to SEQ ID NO: 6585

SEQ ID NO: 6588 - protein, 315 aa, Homo sapiens
MKVLLLTGLGALFFAYYWDDNFDPASLQGARVLLTGANAGVGEELAYHYARLGSHLVLTAHTEALLQKVVGNCRKLGAPKVFYIAADMASPEAPESVVQFALDKLGGLDYLVLNHIGGAPAGTRARSPQATRWLMQVNFVSYVQLTSRALPSLTDSKGSLVVVSSLLGRVPTSFSTPYSAAKFALDGFFGSLRRELDVQDVNVAITMCVLGLRDRASAAEAVRSSTSRPRQPEHRGVPLQSQTAMFLPPTVPGARTLTETPLRGWPQPKMKSSRQKSKTEKNDGHLEPVTAWEVQVPRVRRLCRGLARPHLFGHD

SEQ ID NO: 6589 - protein, 32 aa, Homo sapiens
MKVLLLTGLGALFFAYYWDDNFDPASRERECC

SEQ ID NO: 6590 - protein, 205 aa, Homo sapiens
MKVLLLTGLGALFFAYYWDDNFDPGGLDYLVLNHIGGAPAGTRARSPQATRWLMQVNFVSYVQLTSRALPSLTDSKGSLVVVSSLLGRVPTSFSTPYSAAKFALDGFFGSLRRELDVQDVNVAITMCVLGLRDRASAAEAVRGVTRVKAAPGPKAALAVIRGGATRAAGVFYPWRFRLLCLLRRWLPRPRAWFIRQELNVTAAAA

SEQ ID NO: 6591 - protein, 234 aa, Homo sapiens
MKVLLLTGLGALFFAYYWDDNFDPGGLDYLVLNHIGGAPAGTRARSPQATRWLMQVNFVSYVQLTSRALPSLTDSKGSLVVVSSLLGRVPTSFSTPYSAAKFALDGFFGSLRRELDVQDVNVAITMCVLGLRDRASAAEAVRSSTSRPRQPEHRGVPLQSQTAMFLPPTVPGARTLTETPLRGWPQPKMKSSRQKSKTEKNDGHLEPVTAWEVQVPRVRRLCRGLARPHLFGHD

SEQ ID NO: 6592 - protein, 47 aa, Homo sapiens
MKVLLLTGLGALFFAYYWDDNFDPGGRELPEAGRPQGLLHRGGHGLP

SEQ ID NO: 6593 - protein, 189 aa, Homo sapiens
MKVLLLTGLGALFFAYYWDDNFDPGKLCELRATDVAGAAQPDGQQGLPGGGVLAARPRAHVVLHSLLGGQVCAGRLLRLPAAGAGRAGRERGHHHVRPGPPRSRLRRRGSQGSHEGQGGPGAQGSPGRDPRRRHARGRRLLPVAFPPAVLAPALATAPAGLVYPPGAQRHGRGSLSTGGCPSSPRRQCS

SEQ ID NO: 6594 - protein, 152 aa, Homo sapiens
MQVNFVSYVQLTSRALPSLTDSKGSLVVVSSLLGRVPTSFSTPYSAAKFALDGFFGSLRRELDVQDVNVAITMCVLGLRDRASAAEAVRGVTRVKAAPGPKAALAVIRGGATRAAGVFYPWRFRLLCLLRRWLPRPRAWFIRQELNVTAAAA

SEQ ID NO: 6595 - protein, 152 aa, Homo sapiens; identical to SEQ ID NO: 6594

SEQ ID NO: 6596 - protein, 181 aa, Homo sapiens
MQVNFVSYVQLTSRALPSLTDSKGSLVVVSSLLGRVPTSFSTPYSAAKFALDGFFGSLRRELDVQDVNVAITMCVLGLRDRASAAEAVRSSTSRPRQPEHRGVPLQSQTAMFLPPTVPGARTLTETPLRGWPQPKMKSSRQKSKTEKNDGHLEPVTAWEVQVPRVRRLCRGLARPHLFGHD

SEQ ID NO: 6597 - protein, 135 aa, Homo sapiens
  VARIANT 1: note = misc_feature - Xaa can be any naturally occurring amino acid
XLGALFFAYYWDDNFDPGGLDYLVLNHIGGAPAGTRARSPQATRWLMQVNFVSYVQLTSRALPSLTDSKGSLVVVSSLLGRVPTSFSTPYSAAKFALDGFFGSLRRELDVQDVNVAITMCVLGLRDRASAAEAVR

SEQ ID NO: 6598 - protein, 256 aa, Homo sapiens
MKFLLDILLLLPLLIVCSLESFVKLFIPKRRKSVTGEIVLITGAGHGIGRLTAYEFAKLKSKLVLWDINKHGLEETAAKCKGLGAKVHTFVVDCSNREDIYSSAKKTTKAFLPAMTKNNHGHIVTVASAAGHVSVPFLLAYCSSKFAAVGFHKTLTDELAALQITGVKTTCLCPNFVNTGFIKNPSTSLGPTLEPEEVVNRLMHGILTEQKMIFIPSSIAFLTTLERILPERFLAVLKRKISVKFDAVIGYKMKAQ

SEQ ID NO: 6599 - protein, 300 aa, Homo sapiens
MKFLLDILLLLPLLIVCSLESFVKLFIPKRRKSVTGEIVLITGAGHGIGRLTAYEFAKLKSKLVLWDINKHGLEETAAKCKGLGAKVHTFVVDCSNREDIYSSAKKVKAEIGDVSILVNNAGVVYTSDLFATQDPQIEKTFEVNVLAHFWTTKAFLPAMTKNNHGHIVTVASAAGHVSVPFLLAYCSSKFAAVGFHKTLTDELAALQITGVKTTCLCPNFVNTGFIKNPSTSLGPTLEPEEVVNRLMHGILTEQKMIFIPSSIAFLTTLERILPERFLAVLKRKISVKFDAVIGYKMKAQ

SEQ ID NO: 6600 - protein, 341 aa, Homo sapiens
MRKVVLITGASSGIGLALCKRLLAEDDELHLCLACRNMSKAEAVCAALLASHPTAEVTIVQVDVSNLQSVFRASKELKQRFQRLDCIYLNAGIMPNPQLNIKALFFGLFSRKVIHMFSTAEGLLTQGDKITADGLQEVFETNVFGHFILIRELEPLLCHSDNPSQLIWTSSRSARKSNFSLEDFQHSKGKEPYSSSKYATDLLSVALNRNFNQQGLYSNVACPGTALTNLTYGILPPFIWTLLMPAILLLRFFANAFTLTPYNGTEALVWLFHQKPESLNPLIKYLSATTGFGRNYIMTQKMDLDEDTAEKFYQKLLELEKHIRVTIQKTDNQARLSGSCL

SEQ ID NO: 6601 - protein, 111 aa, Homo sapiens
MRKVVLITGASSGIGLALCKRLLAEDDELHLCLACRNMSKAEAVCAALLASHPTAEVTIVQVDVSNLQSVFRASKELKQRFQRLDCIYLNAGIMPNPQLNIKALFFGLFSS

SEQ ID NO: 6602 - protein, 109 aa, Homo sapiens
MRKVVLITGASSGIGLALCKRLLAEDDELHLCLACRNMSKAEAVCAALLASHPTAEVTIVQVDVSNLQSVFRASKELKQRMIKKWLYVICVEDHVSEIRLYISKCWDHA

SEQ ID NO: 6603 - protein, 84 aa, Homo sapiens
MRKVVLITGASSGIGLALCKRLLAEDDELHLCLACRNMSKAEAVCAALLASHPTAEVTIVQVDVSNLQSVFRASKELKQRYISC

SEQ ID NO: 6604 - protein, 62 aa, Homo sapiens
  VARIANT 1: note = misc_feature - Xaa can be any naturally occurring amino acid
XSLEDFQHSKGKEPYSSSKYATDLLSVALNRNFNQQVLYSSVYVIKYLPHYMEVGLSITIFR

SEQ ID NO: 6605 - protein, 49 aa, Homo sapiens
MMKLIINSLYKNKEIFLRELISNASDALDKIRLISLTDENALSGNEELT

SEQ ID NO: 6606 - protein, 803 aa, Homo sapiens
MRALWVLGLCCVLLTFGSVRADDEVDVDGTVEEDLGKSREGSRTDDEVVQREEEAIQLDGLNASQIRELREKSEKFAFQAEVNRMMKLIINSLYKNKEIFLRELISNASDALDKIRLISLTDENALSGNEELTVKIKCDKEKNLLHVTDTGVGMTREELVKNLGTIAKSGTSEFLNKMTEAQEDGQSTSELIGQFGVGFYSAFLVADKVIVTSKHNNDTQHIWESDSNEFSVIADPRGNTLGRGTTITLVLKEEASDYLELDTIKNLVKKYSQFINFPIYVWSSKTETVEEPMEEEEAAKEEKEESDDEAAVEEEEEEKKPKTKKVEKTVWDWELMNDIKPIWQRPSKEVEEDEYKAFYKSFSKESDDPMAYIHFTAEGEVTFKSILFVPTSAPRGLFDEYGSKKSDYIKLYVRRVFITDDFHDMMPKYLNFVKGVVDSDDLPLNVSRETLQQHKLLKVIRKKLVRKTLDMIKKIADDKYNDTFWKEFGTNIKLGVIEDHSNRTRLAKLLRFQSSHHPTDITSLDQYVERMKEKQDKIYFMAGSSRKEAESSPFVERLLKKGYEVIYLTEPVDEYCIQALPEFDGKRFQNVAKEGVKFDESEKTKESREAVEKEFEPLLNWMKDKALKDKIEKAVVSQRLTESPCALVASQYGWSGNMERIMKAQAYQTGKDISTNYYASQKKTFEINPRHPLIRDMLRRIKEDEDDKTVLDLAVVLFETATLRSGYLLPDTKAYGDRIERMLRLSLNIDPDAKVEEEPEEEPEETAEDTTEDTEQDEDEEMDVGTDEEEETAKESTAEKDEL

SEQ ID NO: 6607 - protein, 315 aa, Homo sapiens [sequence omitted]

SEQ ID NO: 6608 - protein, 315 aa, Homo sapiens [sequence omitted]

SEQ ID NO: 6609 - protein, 53 aa, Homo sapiens
MRALWVLGLCCVLLTFGSVRADDEVDVDGTVEEDLGKSREGSRTDDEVVQRSR

SEQ ID NO: 6610 - protein, 147 aa, Homo sapiens
  VARIANT 1: note = misc_feature - Xaa can be any naturally occurring amino acid
XQYGWSGNMERIMKAQAYQTGKDISTNYYASQKKTFEINPRHPLIRDMLRRIKEDEDDKTVLDLAVVLFETATLRSGYLLPDTKAYGDRIERMLRLSLNIDPDAKVEEEPEEEPEETAEDTTEDTEQDEDEEMDVGTDEEEETAKMS

SEQ ID NO: 6611 - protein, 471 aa, Homo sapiens
MAREMTILGSAVLTLLLAGYLAQQYLPLPTPKVIGIDLGTTYCSVGVFFPGTGKVKVIPDENGHISIPSMVSFTDNDVYVGYESVELADSNPQNTIYDAKRFIGKIFTAEELEAEIGRYPFKVLNKNGMVEFSVTSNETITVSPEYVGSRLLLKLKEMAEAYLGMPVANAVISVPAEFDLKQRNSTIEAANLAGLKILRVINEPTAAAMAYGLHKADVFHVLVIDLGGGTLDVSLLNKQGGMFLTRAMSGNNKLGGQDFNQRLLQYLYKQIYQTYGFVPSRKEEIHRLRQAVEMVKLNLTLHQSAQLSVLLTVEEQDRKEPHSSDTELPKDKLSSADDHRVNSGFGRGLSDKKSGESQVLFETEISRKLFDTLNEDLFQKILVPIQQVLKEGHLEKTEIDEVVLVGGSTRIPRIRQVIQEFFGKDPNTSVDPDLAVVTGVAIQAGIDGGSWPLQVSALEIPNKHLQKTNFN

SEQ ID NO: 6612 - protein, 654 aa, Homo sapiens
MKLSLVAAMLLLLSAARAEEEDKKEDVGTVVGIDLGTTYSCVGVFKNGRVEIIANDQGNRITPSYVAFTPEGERLIGDAAKNQLTSNPENTVFDAKRLIGRTWNDPSVQQDIKFLPFKVVEKKTKPYIQVDIGGGQTKTFAPEEISAMVLTKMKETAEAYLGKKVTHAVVTVPAYFNDAQRQATKDAGTIAGLNVMRIINEPTAAAIAYGLDKREGEKNILVFDLGGGTFDVSLLTIDNGVFEVVATNGDTHLGGEDFDQRVMEHFIKLYKKKTGKDVRKDNRAVQKLRREVEKAKRALSSQHQARIEIESFYEGEDFSETLTRAKFEELNMDLFRSTMKPVQKVLEDSDLKKSDIDEIVLVGGSTRIPKIQQLVKEFFNGKEPSRGINPDEAVAYGAAVQAGVLSGDQDTGDLVLLDVCPLTLGIETVGGVMTKLIPRNTVVPTKKSQIFSTASDNQPTVTIKVYEGERPLTKDNHLLGTFDLTGIPPAPRGVPQIEVTFEIDVNGILRVTAEDKGTGNKNKITITNDQNRLTPEEIERMVNDAEKFAEEDKKLKERIDTRNELESYAYSLKNQIGDKEKLGGKLSSEDKETMEKAVEEKIEWLESHQDADIEDFKAKKKELEEIVQPIISKLYGSAGPPPTGEEDTAEKDEL

SEQ ID NO: 6613 - protein, 236 aa, Homo sapiens
ISTHFAPGDFQGFALVNPQRNSRLTGEFTVEPVPEGAQLSFGNFAQLGHESFYWQLPETYQGDKGEAYFARMRRAHQNRTSLSEEQLRAAVTAGRIPEPPEGRDWAQRASQVDEAQRRMDAEIWQLLSSFAAQPQPPPQGLSPHPQPAAALRAAPPPSSSSSSSSSSASLSFSPGSQFSLSYEGFSLLPGSLYYWQLPRAFLGDKVAAYGGKLRYTLSYTAGPQGSPLSDPDVQIT

SEQ ID NO: 6614 - protein, 4391 aa, Homo sapiens
MGWRAAGALLLALLLHGRLLAVTHGLRAYDGLSLPEDIETVTASQMRWTHSYLSDDEDMLADSISGDDLGSGDLGSGDFQMVYFRALVNFTRSIEYSPQLEDAGSREFREVSEAVVDTLESEYLKIPGDQVVSVVFIKELDGWVFVELDVGSEGNADGAQIQEMLLRVISSGSVASYVTSPQGFQFRRLGTVPQFPRACTEAEFACHSYNECVALEYRCDRRPDCRDMSDELNCEEPVLGISPTFSLLVETTSLPPRPETTIMRQPPVTHAPQPLLPGSVRPLPCGPQEAACRNGHCIPRDYLCDGQEDCEDGSDELDCGPPPPCEPNEFPCGNGHCALKLWRCDGDFDCEDRTDEANCPTKRPEEVCGPTQFRCVSTNMCIPASFHCDEESDCPDRSDEFGCMPPQVVTPPRESIQASRGQTVTFTCVAIGVPTPIINWRLNWGHIPSHPRVTVTSEGGRGTLIIRDVKESDQGAYTCEAMNARGMVFGIPDGVLELVPQRGPCPDGHFYLEHSAACLPCFCFGITSVCQSTRRFRDQIRLRFDQPDDFKGVNVTMPAQPGTPPLSSTQLQIDPSLHEFQLVDLSRRFLVHDSFWALPEQFLGNKVDSYGGSLRYNVRYELARGMLEPVQRPDVVLMGAGYRLLSRGHTPTQPGALNQRQVQFSEEHWVHESGRPVQRAELLQVLQSLEAVLIQTVYNTKMASVGLSDIAMDTTVTHATSHGRAHSVEECRCPIGYSGLSCESCDAHFTRVPGGPYLGTCSGCNCNGHASSCDPVYGHCLNCQHNTEGPQCNKCKAGFFGDAMKATATSCRPCPCPYIDASRRFSDTCFLDTDGQATCDACAPGYTGRRCESCAPGYEGNPIQPGGKCRPVNQEIVRCDERGSMGTSGEACRCKNNVVGRLCNECADGSFHLSTRNPDGCLKCFCMGVSRHCTSSSWSRAQLHGASEEPGHFSLTNAASTHTTNEGIFSPTPGELGFSSFHRLLSGPYFWSLPSRFLGDKVTSYGGELRFTVTQRSQPGSTPLHGQPLVVLQGNNIILEHHVAQEPSPGQPSTFIVPFREQAWQRPDGQPATREHLLMALAGIDTLLIRASYAQQPAESRVSGISMDVAVPEETGQDPALEVEQCSCPPGYRGPSCQDCDTGYTRTPSGLYLGTCERCSCHGHSEACEPETGACQGCQHHTEGPRCEQCQPGYYGDAQRGTPQDCQLCPCYGDPAAGQAAHTCFLDTDGHPTCDACSPGHSGRHCERCAPGYYGNPSQGQPCQRDSQVPGPIGCNCDPQGSVSSQCDAAGQCQCKAQVEGLTCSHCRPHHFHLSASNPDGCLPCFCMGITQQCASSAYTRHLISTHFAPGDFQGFALVNPQRNSRLTGEFTVEPVPEGAQLSFGNFAQLGHESFYWQLPETYQGDKVAAYGGKLRYTLSYTAGPQGSPLSDPDVQITGNNIMLVASQPALQGPERRSYEIMFREEFWRRPDGQPATREHLLMALADLDELLIRATFSSVPLAASISAVSLEVAQPGPSNRPRALEVEECRCPPGYIGLSCQDCAPGYTRTGSGLYLGHCELCECNGHSDLCHPETGACSQCQHNAAGEFCELCAPGYYGDATAGTPEDCQPCACPLTNPENMFSRTCESLGAGGYRCTACEPGYTGQYCEQCGPGYVGNPSVQGGQCLPETNQAPLVVEVHPARSIVPQGGSHSLRCQVSGSPPHYFYWSREDGRPVPSGTQQRHQGSELHFPSVQPSDAGVYICTCRNLHQSNTSRAELLVTEAPSKPITVTVEEQRSQSVRPGADVTFICTAKSKSPAYTLVWTRLHNGKLPTRAMDFNGILTIRNVQLSDAGTYVCTGSNMFAMDQGTATLHVQASGTLSAPVVSIHPPQLTVQPGQLAEFRCSATGSPTPTLEWTGGPGGQLPAKAQIHGGILRLPAVEPTDQAQYLCRAHSSAGQQVARAVLHVHGGGGPRVQVSPERTQVHAGRTVRLYCRAAGVPSATITWRKEGGSLPPQARSERTDIATLLIPAITTADAGFYLCVATSPAGTAQARIQVVVLSASDASPPPVKIESSSPSVTEGQTLDLNCVVAGSAHAQVTWYRRGGSLPPHTQVHGSRLRLPQVSPADSGEYVCRVENGSGPKEASITVSVLHGTHSGPSYTPVPGSTRPIRIEPSSSHVAEGQTLDLNCVVPGQAHAQVTWHKRGGSLPARHQTHGSLLRLHQVTPADSGEYVCHVVGTSGPLEASVLVTIEASVIPGPIPPVRIESSSSTVAEGQTLDLSCVVAGQAHAQVTWYKRGGSLPARHQVRGSRLYIFQASPADAGQYVCRASNGMEASITVTVTGTQGANLAYPAGSTQPIRIEPSSSQVAEGQTLDLNCVVPGQSHAQVTWHKRGGSLPVRHQTHGSLLRLYQASPADSGEYVCRVLGSSVPLEASVLVTIEPAGSVPALGVTPTVRIESSSSQVAEGQTLDLNCLVAGQAHAQVTWHKRGGSLPARHQVHGSRLRLLQVTPADSGEYVCRVVGSSGTQEASVLVTIQQRLSGSHSQGVAYPVRIESSSASLANGHTLDLNCLVASQAPHTITWYKRGGSLPSRHQIVGSRLRIPQVTPADSGEYVCHVSNGAGSRETSLIVTIQGSGSSHVPSVSPPIRIESSSPTVVEGQTLDLNCVVARQPQAIITWYKRGGSLPSRHQTHGSHLRLHQMSVADSGEYVCRANNNIDALEASIVISVSPSAGSPSAPGSSMPIRIESSSSHVAEGETLDLNCVVPGQAHAQVTWHKRGGSLPSHHQTRGSRLRLHHVSPADSGEYVCRVMGSSGPLEASVLVTIEASGSSAVHVPAPGGAPPIRIEPSSSRVAEGQTLDLKCVVPGQAHAQVTWHKRGGNLPARHQVHGPLLRLNQVSPADSGEYSCQVTGSSGTLEASVLVTIEPSSPGPIPAPGLAQPIYIEASSSHVTEGQTLDLNCVVPGQAHAQVTWYKRGGSLPARHQTHGSQLRLHLVSPADSGEYVCRAASGPGPEQEASFTVTVPPSEGSSYRLRSPVISIDPPSSTVQQGQDASFKCLIHDGAAPISLEWKTRNQELEDNVHISPNGSIITIVGTRPSNHGTYRCVASNAYGVAQSVVNLSVHGPPTVSVLPEGPVWVKVGKAVTLECVSAGEPRSSARWTRISSTPAKLEQRTYGLMDSHAVLQISSAKPSDAGTYVCLAQNALGTAQKQVEVIVDTGAMAPGAPQVQAEEAELTVEAGHTATLRCSATGSPAPTIHWSKLRSPLPWQHRLEGDTLIIPRVAQQDSGQYICNATSPAGHAEATIILHVESPPYATTVPEHASVQAGETVQLQCLAHGTPPLTFQWSRVGSSLPGRATARNELLHFERAAPEDSGRYRCRVTNKVGSAEAFAQLLVQGPPGSLPATSIPAGSTPTVQVTPQLETKSIGASVEFHCAVPSDRGTQLRWFKEGGQLPPGHSVQDGVLRIQNLDQSCQGTYICQAHGPWGKAQASAQLVIQALPSVLINIRTSVQTVVVGHAVEFECLALGDPKPQVTWSKVGGHLRPGIVQSGGVVRIAHVELADAGQYRCTATNAAGTTQSHVLLLVQALPQISMPQEVRVPAGSAAVFPCIASGYPTPDISWSKLDGSLPPDSRLENNMLMLPSVRPQDAGTYVCTATNRQGKVKAFAHLQVPERVVPYFTQTPYSFLPLPTIKDAYRKFEIKITFRPDSADGMLLYNGQKRVPGSPTNLANRQPDFISFGLVGGRPEFRFDAGSGMATIRHPTPLALGHFHTVTLLRSLTQGSLIVGDLAPVNGTSQGKFQGLDLNEELYLGGYPDYGAIPKAGLSSGFIGCVRELRIQGEEIVFHDLNLTAHGISHCPTCRDRPCQNGGQCHDSESSSYVCVCPAGFTGSRCEHSQALHCHPEACGPDATCVNRPDGRGYTCRCHLGRSGLRCEEGVTVTTPSLSGAGSYLALPALTNTHHELRLDVEFKPLAPDGVLLFSGGKSGPVEDFVSLAMVGGHLEFRYELGSGLAVLRSAEPLALGRWHRVSAERLNKDGSLRVNGGRPVLRSSPGKSQGLNLHTLLYLGGVEPSVPLSPATNMSAHFRGCVGEVSVNGKRLDLTYSFLGSQGIGQCYDSSPCERQPCQHGATCMPAGEYEFQCLCRDGFKGDLCEHEENPCQLREPCLHGGTCQGTRCLCLPGFSGPRCQQGSGHGIAESDWHLEGSGGNDAPGQYGAYFHDDGFLAFPGHVFSRSLPEVPETIELEVRTSTASGLLLWQGVEVGEAGQGKDFISLGLQDGHLVFRYQLGSGEARLVSEDPINDGEWHRVTALREGRRGSIQVDGEELVSGRSPGPNVAVNAKGSVYIGGAPDVATLTGGRFSSGITGCVKNLVLHSARPGAPPPQPLDLQHRAQAGANTRPCPS

SEQ ID NO: 6615 - protein, 109 aa, Homo sapiens
  VARIANT 1: note = misc_feature - Xaa can be any naturally occurring amino acid
XGTPPLTFQWSRVGSSLPGRATARNELLHFERAAPEDSGRYRCRVTNKVGSAEAFAQLLVQESRTWTRAAKGRIYARPMDLGGRPRPVPSWLSKVGGWLQASAKSREQR

SEQ ID NO: 6616 - protein, 307 aa, Homo sapiens
  VARIANT 1: note = misc_feature - Xaa can be any naturally occurring amino acid
XNMLMLPSVRPQDAGTYVCTATNRQGKVKAFAHLQVPERVVPYFTQTPYSFLPLPTIKDAYRKFEIKITFRPDSADGLLLYSGMLLYNGQKRVPGSPTNLANRQPDFISFGLVGGRPEFRFDAGSGMATIRHPTPLALGHFHTVTLLRSLTQGSLIVGDLAPVNGTSQGKFQGLDLNEELYLGGYPDYGAIPKAGLSSGFIGCVRELRIQGEEIVFHDLNLTAHGISHCPTCRDRPCQNGGQCHDSESSSYVCVCPAGFTGSRCEHSQALHCHPEACGPDATCVNRPDGRGYTCRCHLGRSGLRCEE

SEQ ID NO: 6617 - protein, 197 aa, Homo sapiens
  VARIANT 1: note = misc_feature - Xaa can be any naturally occurring amino acid
XTPSGLYLGTCERCSCHGHSEACEPETGACQGCQHHTEGPRCEQCQPGYYGDAQRGTPQDCQLCPCYGDPAAGQAAHTCFLDTDGHPTCDACSPGHSGRHCERCAPGYYGNPSQGQPCQRDSQVPGPIGCNCDPQGSVSSQCDAAGQCQCKVSPNPCPCGACSAPLPRPCGEIRQHLVEAETWAWGAGHGGQGRGCP

SEQ ID NO: 6618 - protein, 242 aa, Homo sapiens
MAETEALSKLREDFRMQNKSVFILGASGETGRVLLKEILEQGLFSKVTLIGRRKLTFDEEAYKNVNQEVVDFEKLDDYASAFQGHDVGFCCLGTTRGKAGAEGFVRVDRDYVLKSAELAKAGGCKHFNLLSSKGADKSSNFLYLQVKGEVEAKVEELKFDRYSVFRPGVLLCDRQESRPGEWLVRKFFGSLPDSWASGHSVPVVTVVRAMLNNVVRPRDKQMELLENKAIHDLGKAHGSLKP

SEQ ID NO: 6619 - protein, 242 aa, Homo sapiens; identical to SEQ ID NO: 6618

SEQ ID NO: 6620 - protein, 242 aa, Homo sapiens; identical to SEQ ID NO: 6618

SEQ ID NO: 6621 - protein, 196 aa, Homo sapiens
MAETEALSKLREDFRMQNKSVFILGASGETGRVLLKEILEQGLFSKVTLIGRRKLTFDEEAYKNVNQEVVDFEKLDDYASAFQGHDVGFCCLGTTRGKAGAGEVEAKVEELKFDRYSVFRPGVLLCDRQESRPGEWLVRKFFGSLPDSWASGHSVPVVTVVRAMLNNVVRPRDKQMELLENKAIHDLGKAHGSLKP

SEQ ID NO: 6622 - protein, 133 aa, Homo sapiens
MAETEALSKLREDFRMQNKSVFILGASGETGRVLLKEILEQGLFSKVTLIGRRKLTFDEEAYKNVNQEVVDFEKLDDYASAFQGHDVGFCCLGTTRGKAGAVRKAYALFPFCWPVISRILFLLTLFLCACCNA

SEQ ID NO: 6623 - protein, 133 aa, Homo sapiens; identical to SEQ ID NO: 6622

SEQ ID NO: 6624 - protein, 133 aa, Homo sapiens; identical to SEQ ID NO: 6622

SEQ ID NO: 6625 - protein, 276 aa, Homo sapiens
MAGPAALSAAAAAALAAALLLLRREDPGPGAGPSMAETEALSKLREDFRMQNKSVFILGASGETGRVLLKEILEQGLFSKVTLIGRRKLTFDEEAYKNVNQEVVDFEKLDDYASAFQGHDVGFCCLGTTRGKAGAEGFVRVDRDYVLKSAELAKAGGCKHFNLLSSKGADKSSNFLYLQVKGEVEAKVEELKFDRYSVFRPGVLLCDRQESRPGEWLVRKFFGSLPDSWASGHSVPVVTVVRAMLNNVVRPRDKQMELLENKAIHDLGKAHGSLKP

SEQ ID NO: 6626 - protein, 57 aa, Homo sapiens
MKFFVFALVLALMISMISADSHEKRHHGYRRKFHEKHHSHREFPFYGDYGSNYLYDN

SEQ ID NO: 6627 - protein, 57 aa, Homo sapiens; identical to SEQ ID NO: 6626

SEQ ID NO: 6628 - protein, 57 aa, Homo sapiens; identical to SEQ ID NO: 6626

SEQ ID NO: 6629 - protein, 41 aa, Homo sapiens
MKFFVFALILALMLSMTGADSHAKEKHHSHRGYRSNYLYDN

SEQ ID NO: 6630 - protein, 51 aa, Homo sapiens
MKFFVFALILALMLSMTGADSHAKRHHGYKRKFHEKHHSHRGYRSNYLYDN

SEQ ID NO: 6631 - protein, 51 aa, Homo sapiens; identical to SEQ ID NO: 6630

SEQ ID NO: 6632 - protein, 221 aa, Homo sapiens
GKLPVLLLGRSSELRPGEFVVAIGSPFSLQNTVTTGIVSTTQRGGKELGLRNSDMDYIQTDAIINYGNSGGPLVNLDGEVIGINTLKVTAGISFAIPSDKIKKFLTESHDRQAKGKAITKKKYIGIRMMSLTSSKAKELKDRHRDFPDVISGAYIIEVIPDTPAEAGGLKENDVIISINGQSVVSANDVSDVIKRESTLNMVVRRGNEDIMITVIPEEIDP

SEQ ID NO: 6633 - protein, 480 aa, Homo sapiens
MQIPRAALLPLLLLLLAAPASAQLSRAGRSAPLAAGCPDRCEPARCPPQPEHCEGGRARDACGCCEVCGAPEGAACGLQEGPCGEGLQCVVPFGVPASATVRRRAQAGLCVCASSEPVCGSDANTYANLCQLRAASRRSERLHRPPVIVLQRGACGQGQEDPNSLRHKYNFIADVVEKIAPAVVHIELFRKLPFSKREVPVASGSGFIVSEDGLIVTNAHVVTNKHRVKVELKNGATYEAKIKDVDEKADIALIKIDHQGKLPVLLLGRSSELRPGEFVVAIGSPFSLQNTVTTGIVSTTQRGGKELGLRNSDMDYIQTDAIINYGNSGGPLVNLDGEVIGINTLKVTAGISFAIPSDKIKKFLTESHDRQAKGKAITKKKYIGIRMMSLTSSKAKELKDRHRDFPDVISGAYIIEVIPDTPAEAGGLKENDVIISINGQSVVSANDVSDVIKRESTLNMVVRRGNEDIMITVIPEEIDP

SEQ ID NO: 6634 - protein, 453 aa, Homo sapiens
MQARALLLAALAALALAREPPAAPCPARCDVSRCPSPRCPGGYVPDLCNCCLVCAASEGEPCGGPLDSPCGESLECVRGLCRCRWSHAVCGTDGHTYANVCALQAASRRALQLSGTPVRQLQKGACPLGLHQLSSPRYKFNFIADVVEKIAPAVVHIELFLRHPLFGRNVPLSSGSGFIMSEAGLIITNAHVVSSNSAAPGRQQLKVQLQNGDSYEATIKDIDKKSDIATIKIHPKKKLPVLLLGHSADLRPGEFVVAIGSPFALQNTVTTGIVSTAQREGRELGLRDSDMDYIQTDAIINYGNSGGPLVNLDGEVIGINTLKVTAGISFAIPSDRITRFLTEFQDKQIKDWKKRFIGIRMRTITPSLVDELKASNPDFPEVSSGIYVQEVAPNSPSQRGGIQDGDIIVKVNGRPLVDSSELQEAVLTESPLLLEVRRGNDDLLFSIAPEVVM

SEQ ID NO: 6635 - protein, 357 aa, Homo sapiens
MQARALLLAALAALALAREPPAAPCPARCDVSRCPSPRCPGGYVPDLCNCCLVCAASEGEPCGGPLDSPCGESLECVRGLCRCRWSHAVCGTDGHTYANVCALQAASRRALQLSGTPVRQLQKGACPLGLHQLSSPRYKFNFIADVVEKIAPAVVHIELFLRHPLFGRNVPLSSGSGFIMSEAGLIITNAHVVSSNSAAPGRQQLKVQLQNGDSYEATIKDIDKKSDIATIKIHPKKKLPVLLLGHSADLRPGEFVVAIGSPFALQNTVTTGIVSTAQREGRELGLRDSDMDYIQTDAIINYGNSGGPLVNLDGEVIGINTLKVTAGISFAIPSDRITRFLTEFQDKQIKAPSLAVH

SEQ ID NO: 6636 - protein, 476 aa, Homo sapiens
MIRPQLRTAGLGRCLLPGLLLLLVPVLWAGAEKLHTQPSCPAVCQPTRCPALPTCALGTTPVFDLCRCCRVCPAAEREVCGGAQGQPCAPGLQCLQPLRPGFPSTCGCPTLGGAVCGSDRRTYPSMCALRAENRAARRLGKVPAVPVQWGNCGDTGTRSAGPLRRNYNFIAAVVEKVAPSVVHVQLWGRLLHGSRLVPVYSGSGFIVSEDGLIITNAHVVRNQQWIEVVLQNGARYEAVVKDIDLKLDLAVIKIESNAELPVLMLGRSSDLRAGEFVVALGSPFSLQNTATAGIVSTKQRGGKELGMKDSDMDYVQIDATINYGNSGGPLVNLDGDVIGVNSLRVTDGISFAIPSDRVRQFLAEYHEHQMKGKAFSNKKYLGLQMLSLTVPLSEELKMHYPDFPDVSSGVYVCKVVEGTAAQSSGLRDHDVIVNINGKPITTTTDVVKALDSDSLSMAVLRGKDNLLLTVIPETIN

SEQ ID NO: 6637 - protein, 69 aa, Homo sapiens
MAAHLLPICALFLTLLDMAQGFRGPLLPNRPFTTVWNANTQWCLERHGVDVDVSVFDVVANPGQTFRGP

SEQ ID NO: 6638 - protein, 103 aa, Homo sapiens
MAAHLLPICALFLTLLDMAQGFRGPLLPNRPFTTVWNANTQWCLERHGVDVDVSVFDVVANPGQTFRGPDMTIFYSSQLGTYPYYTPTGEPVFGGLPQNASLI

SEQ ID NO: 6639 - protein, 435 aa, Homo sapiens
MAAHLLPICALFLTLLDMAQGFRGPLLPNRPFTTVWNANTQWCLERHGVDVDVSVFDVVANPGQTFRGPDMTIFYSSQLGTYPYYTPTGEPVFGGLPQNASLIAHLARTFQDILAAIPAPDFSGLAVIDWEAWRPRWAFNWDTKDIYRQRSRALVQAQHPDWPAPQVEAVAQDQFQGAARAWMAGTLQLGRALRPRGLWGFYGFPDCYNYDFLSPNYTGQCPSGIRAQNDQLGWLWGQSRALYPSIYMPAVLEGTGKSQMYVQHRVAEAFRVAVAAGDPNLPVLPYVQIFYDTTNHFLPLDELEHSLGESAAQGAAGVVLWVSWENTRTKESCQAIKEYMDTTLGPFILNVTSGALLCSQALCSGHGRCVRRTSHPKALLLLNPASFSIQLTPGGGPLSLRGALSLEDQAQMAVEFKCRCYPGWQAPWCERKSMW

SEQ ID NO: 6640 - protein, 435 aa, Homo sapiens; identical to SEQ ID NO: 6639

SEQ ID NO: 6641 - protein, 405 aa, Homo sapiens
MAAHLLPICALFLTLLDMAQGFRGPLLPNRPFTTVWNANTQWCLERHGVDVDVSVFDVVANPGQTFRGPDMTIFYSSQLGTYPYYTPTGEPVFGGLPQNASLIAHLARTFQDILAAIPAPDFSGLAVIDWEAWRPRWAFNWDTKDIYRQRSRALVQAQHPDWPAPQVEAVAQDQFQGAARAWMAGTLQLGRALRPRGLWGFYGFPDCYNYDFLSPNYTGQCPSGIRAQNDQLGWLWGQSRALYPSIYMPAVLEGTGKSQMYVQHRVAEAFRVAVAAGDPNLPVLPYVQIFYDTTNHFLPLESCQAIKEYMDTTLGPFILNVTSGALLCSQALCSGHGRCVRRTSHPKALLLLNPASFSIQLTPGGGPLSLRGALSLEDQAQMAVEFKCRCYPGWQAPWCERKSMW

SEQ ID NO: 6642 - protein, 435 aa, Homo sapiens; identical to SEQ ID NO: 6639

SEQ ID NO: 6643 - protein, 435 aa, Homo sapiens; identical to SEQ ID NO: 6639

SEQ ID NO: 6644 - protein, 253 aa, Homo sapiens
MAGTLQLGRALRPRGLWGFYGFPDCYNYDFLSPNYTGQCPSGIRAQNDQLGWLWGQSRALYPSIYMPAVLEGTGKSQMYVQHRVAEAFRVAVAAGDPNLPVLPYVQIFYDTTNHFLPLDELEHSLGESAAQGAAGVVLWVSWENTRTKESCQAIKEYMDTTLGPFILNVTSGALLCSQALCSGHGRCVRRTSHPKALLLLNPASFSIQLTPGGGPLSLRGALSLEDQAQMAVEFKCRCYPGWQAPWCERKSMW

SEQ ID NO: 6645 - protein, 176 aa, Homo sapiens
MYVQHRVAEAFRVAVAAGDPNLPVLPYVQIFYDTTNHFLPLDELEHSLGESAAQGAAGVVLWVSWENTRTKESCQAIKEYMDTTLGPFILNVTSGALLCSQALCSGHGRCVRRTSHPKALLLLNPASFSIQLTPGGGPLSLRGALSLEDQAQMAVEFKCRCYPGWQAPWCERKSMW

SEQ ID NO: 6646 - protein, 48 aa, Homo sapiens
MRAGPGPTVTLALVLAVSWAMELKPTAPPIFTGRPFVVAWDVPTQDCG

SEQ ID NO: 6647 - protein, 76 aa, Homo sapiens
MRAGPGPTVTLALVLAVSWAMELKPTAPPIFTGRPFVVAWDVPTQDCGPRLKVPLDLNAFDVQASPNEGFVNQNIT

SEQ ID NO: 6648 - protein, 81 aa, Homo sapiens
MRAGPGPTVTLALVLAVSWAMELKPTAPPIFTGRPFVVAWDVPTQDCGPRLKVPLDLNAFDVQASPNEGFVNQNITIFYRD

SEQ ID NO: 6649 - protein, 117 aa, Homo sapiens
MRAGPGPTVTLALVLAVSWAMELKPTAPPIFTGRPFVVAWDVPTQDCGPRLKVPLDLNAFDVQASPNEGFVNQNITIFYRDRLGLYPRFDSAGRSVHGGVPQNVSLWAHRKMLQKRV

SEQ ID NO: 6650 - protein, 121 aa, Homo sapiens
MRAGPGPTVTLALVLAVSWAMELKPTAPPIFTGRPFVVAWDVPTQDCGPRLKVPLDLNAFDVQASPNEGFVNQNITIFYRDRLGLYPRFDSAGRSVHGGVPQNVSLWAHRKMLQKRVEHYI

SEQ ID NO: 6651 - protein, 473 aa, Homo sapiens
MRAGPGPTVTLALVLAVSWAMELKPTAPPIFTGRPFVVAWDVPTQDCGPRLKVPLDLNAFDVQASPNEGFVNQNITIFYRDRLGLYPRFDSAGRSVHGGVPQNVSLWAHRKMLQKRVEHYIRTQESAGLAVIDWEDWRPVWVRNWQDKDVYRRLSRQLVASRHPDWPPDRIVKQAQYEFEFAAQQFMLETLRYVKAVRPRHLWGFYLFPDCYNHDYVQNWESYTGRCPDVEVARNDQLAWLWAESTALFPSVYLDETLASSRHGRNFVSFRVQEALRVARTHHANHALPVYVFTRPTYSRRLTGLSEMDLISTIGESAALGAAGVILWGDAGYTTSTETCQYLKDYLTRLLVPYVVNVSWATQYCSRAQCHGHGRCVRRNPSASTFLHLSTNSFRLVPGHAPGEPQLRPVGELSWADIDHLQTHFRCQCYLGWSGEQCQWDHRQAAGGASEAWAGSHLTSLLALAALAFTWTL

SEQ ID NO: 6652 - protein, 473 aa, Homo sapiens; identical to SEQ ID NO: 6651

SEQ ID NO: 6653 - protein, 473 aa, Homo sapiens; identical to SEQ ID NO: 6651

SEQ ID NO: 6654 - protein, 473 aa, Homo sapiens; identical to SEQ ID NO: 6651

SEQ ID NO: 6655 - protein, 168 aa, Homo sapiens
MLPPAHHQAFVRHRLEEAFRVALVGHRHPLPVLAYVRLTHRRSGRFLSQDDLVQSIGVSAALGAAGVVLWGDLSLSSSEEECWHLHDYLVDTLGPYVINVTRAAMACSHQRCHGHGRCARRDPGQMEAFLHLWPDGSLGDWKSFSCHCYWGWAGPTCQEPRPGPKEAV

SEQ ID NO: 6656 - protein, 138 aa, Homo sapiens
MLPPAHHQAFVRHRLEEAFRVALVGHRHPLPVLAYVRLTHRRSGRFLSQEECWHLHDYLVDTLGPYVINVTRAAMACSHQRCHGHGRCARRDPGQMEAFLHLWPDGSLGDWKSFSCHCYWGWAGPTCQEPRPGPKEAV

SEQ ID NO: 6657 - protein, 160 aa, Homo sapiens
MTTQLGPALVLGVALCLGCGQPLPQVPERPFSVLWNVPSAHCEARFGVHLPLNALGIIANRGQHFHGQNMTIFYKNQLGLYPYFGPRGTAHNGGIPQALPLDRHLALAAYQIHHSLRPGFAGPAVLDWEEWCPLWAGNWGRRRAYQAASWAWAQQVFPDL

SEQ ID NO: 6658 - protein, 417 aa, Homo sapiens
MTTQLGPALVLGVALCLGCGQPLPQVPERPFSVLWNVPSAHCEARFGVHLPLNALGIIANRGQHFHGQNMTIFYKNQLGLYPYFGPRGTAHNGGIPQALPLDRHLALAAYQIHHSLRPGFAGPAVLDWEEWCPLWAGNWGRRRAYQAASWAWAQQVFPDLDPQEQLYKAYTGFEQAARALMEDTLRVAQALRPHGLWGFYHYPACGNGWHSMASNYTGRCHAATLARNTQLHWLWAASSALFPSIYLPPRLPPAHHQAFVRHRLEEAFRVALVGHRHPLPVLAYVRLTHRRSGRFLSQDDLVQSIGVSAALGAAGVVLWGDLSLSSSEEECWHLHDYLVDTLGPYVINVTRAAMACSHQRCHGHGRCARRDPGQMEAFLHLWPDGSLGDWKSFSCHCYWGWAGPTCQEPRPGPKEAV

SEQ ID NO: 6659 - protein, 387 aa, Homo sapiens
MTTQLGPALVLGVALCLGCGQPLPQVPERPFSVLWNVPSAHCEARFGVHLPLNALGIIANRGQHFHGQNMTIFYKNQLGLYPYFGPRGTAHNGGIPQALPLDRHLALAAYQIHHSLRPGFAGPAVLDWEEWCPLWAGNWGRRRAYQAASWAWAQQVFPDLDPQEQLYKAYTGFEQAARALMEDTLRVAQALRPHGLWGFYHYPACGNGWHSMASNYTGRCHAATLARNTQLHWLWAASSALFPSIYLPPRLPPAHHQAFVRHRLEEAFRVALVGHRHPLPVLAYVRLTHRRSGRFLSQEECWHLHDYLVDTLGPYVINVTRAAMACSHQRCHGHGRCARRDPGQMEAFLHLWPDGSLGDWKSFSCHCYWGWAGPTCQEPRPGPKEAV

SEQ ID NO: 6660 - protein, 387 aa, Homo sapiens; identical to SEQ ID NO: 6659

SEQ ID NO: 6661 - protein, 417 aa, Homo sapiens; identical to SEQ ID NO: 6658

SEQ ID NO: 6662 - protein, 92 aa, Homo sapiens
MADKVRRQRPRRRVCWALVAVLLADLLALSDTLAVMSVDLGSESMKVAIVKPGVPMEIVLNKESRRKTPVIVTLKENERFFGDSAASMAIKN

SEQ ID NO: 6663 - protein, 103 aa, Homo sapiens
MADKVRRQRPRRRVCWALVAVLLADLLALSDTLAVMSVDLGSESMKVAIVKPGVPMEIVLNKESRRKTPVIVTLKENERFFGDSAASMAIKNPKATLRYFQHL

SEQ ID NO: 6664 - protein, 149 aa, Homo sapiens
MADKVRRQRPRRRVCWALVAVLLADLLALSDTLAVMSVDLGSESMKVAIVKPGVPMEIVLNKESRRKTPVIVTLKENERFFGDSAASMAIKNPKATLRYFQHLLGKQADNPHVALYQARFPEHELTFDPQRQTVHFQISSQLQFSPEEV

SEQ ID NO: 6665 - protein, 154 aa, Homo sapiens
MADKVRRQRPRRRVCWALVAVLLADLLALSDTLAVMSVDLGSESMKVAIVKPGVPMEIVLNKESRRKTPVIVTLKENERFFGDSAASMAIKNPKATLRYFQHLLGKQADNPHVALYQARFPEHELTFDPQRQTVHFQISSQLQFSPEEVLGMVL

SEQ ID NO: 6666 - protein, 211 aa, Homo sapiens
MADKVRRQRPRRRVCWALVAVLLADLLALSDTLAVMSVDLGSESMKVAIVKPGVPMEIVLNKESRRKTPVIVTLKENERFFGDSAASMAIKNPKATLRYFQHLLGKQADNPHVALYQARFPEHELTFDPQRQTVHFQISSQLQFSPEEVLGMVLNYSRSLAEDFAEQPIKDAVITVPVFFNQAERRAVLQAARMAGLKVLQLINDNTATAL

SEQ ID NO: 6667 - protein, 224 aa, Homo sapiens
MADKVRRQRPRRRVCWALVAVLLADLLALSDTLAVMSVDLGSESMKVAIVKPGVPMEIVLNKESRRKTPVIVTLKENERFFGDSAASMAIKNPKATLRYFQHLLGKQADNPHVALYQARFPEHELTFDPQRQTVHFQISSQLQFSPEEVLGMVLNYSRSLAEDFAEQPIKDAVITVPVFFNQAERRAVLQAARMAGLKVLQLINDNTATALSYGVFRRKDINTT

SEQ ID NO: 6668 - protein, 656 aa, Homo sapiens
MADKVRRQRPRRRVCWALVAVLLADLLALSDTLAVMSVDLGSESMKVAIVKPGVPMEIVLNKESRRKTPVIVTLKENERFFGDSAASMAIKNPKATLRYFQHLLGKQADNPHVALYQARFPEHELTFDPQRQTVHFQISSQLQFSPEEVLGMVLNYSRSLAEDFAEQPIKDAVITVPVFFNQAERRAVLQAARMAGLKVLQLINDNTATALSYGVFRRKDINTTAQNIMFYDMGSGSTVCTIVTYQMVKTKEAGMQPQLQIRGVGFDRTLGGLEMELRLRERLAGLFNEQRKGQRAKDVRENPRAMAKLLREANRLKTVLSANADHMAQIEGLMDDVDFKAKVTRVEFEELCADLFERVPGPVQQALQSAEMSLDEIEQVILVGGATRVPRVQEVLLKAVGKEELGKNINADEAAAMGAVYQAAALSKAFKVKPFVVRDAVVYPILVEFTREVEEEPGIHSLKHNKRVLFSRMGPYPQRKVITFNRYSHDFNFHINYGDLGFLGPEDLRVFGSQNLTTVKLKGVGDSFKKYPDYESKGIKAHFNLDESGVLSLDRVESVFETLVEDSAEEESTLTKLGNTISSLFGGGTTPDAKENGTDTVQEEEESPAEGSKDEPGEQVELKEEAEAPVEDGSQPPPPEPKGDATPEGEKATEKE

SEQ ID NO: 6669 - protein, 937 aa, Homo sapiens
MADKVRRQRPRRRVCWALVAVLLADLLALSDTLAVMSVDLGSESMKVAIVKPGVPMEIVLNKESRRKTPVIVTLKENERFFGDSAASMAIKNPKATLRYFQHLLGKQADNPHVALYQARFPEHELTFDPQRQTVHFQISSQLQFSPEEVLGMVLNYSRSLAEDFAEQPIKDAVITVPVFFNQAERRAVLQAARMAGLKVLQLINDNTATALSYGVFRRKDINTTAQNIMFYDMGSGSTVCTIVTYQMVKTKEAGMQPQLQIRGVGFDRTLGGLEMELRLRERLAGLFNEQRKGQRAKDVRENPRAMAKLLREANRLKTVLSANADHMAQIEGLMDDVDFKAKVTRVEFEELCADLFERVPGPVQQALQSAEMSLDEIEQVILVGGATRVPRVQEVLLKAVGKEELGKNINADEAAAMGAVYQAAALSKAFKVKPFVVRDAVVYPILVEFTREVEEEPGIHSLKHNKRVLFSRMGPYPQRKVITFNRYSHDFNFHINYGDLGFLGPEDLRVFGSQNLTTVKLKGVGDSFKKYPDYESKGIKAHFNLDESGVLSLDRVESVFETLVEDSAEEESTLTKLGNTISSLFGGGTTPDAKENGTDTVQKPSEKAEAGPEGVAPAPEGEKKQKPARKRRMVEEIGVELVVLDLPDLPEDKLAQSVQKLQDLTLRDLEKQEREKAANSLEAFIFETQDKLYQPEYQEVSTEEQREEISGKLSAASTWLEDEGVGATTVMLKEKLAELRKLCQGLFFRVEERKKWPERLSALDNLLNHSSMFLKGARLIPEMDQIFTEVEMTTLEKVINETWAWKNATLAEQAKLPATEKPVLLSKDIEAKMMALDREVQYLLNKAKFTKPRPRPKDKNGTRAEPPLNASASDQGEKVIPPAGQTEDAEPISEPEKVETGSEPGDTEPLELGGPGAEPEQKEQSTGQKRPLKNDEL

SEQ ID NO: 6670 - protein, 678 aa, Homo sapiens
MADKVRRQRPRRRVCWALVAVLLADLLALSDTLAVMSVDLGSESMKVAIVKPGVPMEIVLNKESRRKTPVIVTLKENERFFGDSAASMAIKNPKATLRYFQHLLGKQADNPHVALYQARFPEHELTFDPQRQTVHFQISSQLQFSPEEVLGMVLNYSRSLAEDFAEQPIKDAVITVPVFFNQAERRAVLQAARMAGLKVLQLINDNTATALSYGVFRRKDINTTAQNIMFYDMGSGSTVCTIVTYQMVKTKEAGMQPQLQIRGVGFDRTLGGLEMELRLRERLAGLFNEQRKGQRAKDVRENPRAMAKLLREANRLKTVLSANADHMAQIEGLMDDVDFKAKVTRVEFEELCADLFERVPGPVQQALQSAEMSLDEIEQVILVGGATRVPRVQEVLLKAVGKEELGKNINADEAAAMGAVYQAAALSKAFKVKPFVVRDAVVYPILVEFTREVEEEPGIHSLKHNKRVLFSRMGPYPQRKVITFNRYSHDFNFHINYGDLGFLGPEDLRVFGSQNLTTVKLKGVGDSFKKYPDYESKGIKAHFNLDESGVLSLDRVESVFETLVEDSAEEESTLTKLGNTISSLFGGGTTPDAKENGTDTVQEEEESPAEGSKDEPGEQVELKEEAEAPVEDGSQPPPPEPKGDATPEGEKATEKENGDKSEAQKPVVCRASVTRFGF

SEQ ID NO: 6671 - protein, 677 aa, Homo sapiens
MADKVRRQRPRRRVCWALVAVLLADLLALSDTLAVMSVDLGSESMKVAIVKPGVPMEIVLNKESRRKTPVIVTLKENERFFGDSAASMAIKNPKATLRYFQHLLGKQADNPHVALYQARFPEHELTFDPQRQTVHFQISSQLQFSPEEVLGMVLNYSRSLAEDFAEQPIKDAVITVPVFFNQAERRAVLQAARMAGLKVLQLINDNTATALSYGVFRRKDINTTAQNIMFYDMGSGSTVCTIVTYQMVKTKEAGMQPQLQIRGVGFDRTLGGLEMELRLRERLAGLFNEQRKGQRAKDVRENPRAMAKLLREANRLKTVLSANADHMAQIEGLMDDVDFKAKVTRVEFEELCADLFERVPGPVQQALQSAEMSLDEIEQVILVGGATRVPRVQEVLLKAVGKEELGKNINADEAAAMGAVYQAAALSKAFKVKPFVVRDAVVYPILVEFTREVEEEPGIHSLKHNKRVLFSRMGPYPQRKVITFNRYSHDFNFHINYGDLGFLGPEDLRVFGSQNLTTVKLKGVGDSFKKYPDYESKGIKAHFNLDESGVLSLDRVESVFETLVEDSAEEESTLTKLGNTISSLFGGGTTPDAKENGTDTVQEEEESPAEGSKDEPGEQVELKEEAEAPVEDGSQPPPPEPKGDATPEGEKATEKENGDKSEAQASVCRASVTRFGF

SEQ ID NO: 6672 - protein, 999 aa, Homo sapiens
MADKVRRQRPRRRVCWALVAVLLADLLALSDTLAVMSVDLGSESMKVAIVKPGVPMEIVLNKESRRKTPVIVTLKENERFFGDSAASMAIKNPKATLRYFQHLLGKQADNPHVALYQARFPEHELTFDPQRQTVHFQISSQLQFSPEEVLGMVLNYSRSLAEDFAEQPIKDAVITVPVFFNQAERRAVLQAARMAGLKVLQLINDNTATALSYGVFRRKDINTTAQNIMFYDMGSGSTVCTIVTYQMVKTKEAGMQPQLQIRGVGFDRTLGGLEMELRLRERLAGLFNEQRKGQRAKDVRENPRAMAKLLREANRLKTVLSANADHMAQIEGLMDDVDFKAKVTRVEFEELCADLFERVPGPVQQALQSAEMSLDEIEQVILVGGATRVPRVQEVLLKAVGKEELGKNINADEAAAMGAVYQAAALSKAFKVKPFVVRDAVVYPILVEFTREVEEEPGIHSLKHNKRVLFSRMGPYPQRKVITFNRYSHDFNFHINYGDLGFLGPEDLRVFGSQNLTTVKLKGVGDSFKKYPDYESKGIKAHFNLDESGVLSLDRVESVFETLVEDSAEEESTLTKLGNTISSLFGGGTTPDAKENGTDTVQEEEESPAEGSKDEPGEQVELKEEAEAPVEDGSQPPPPEPKGDATPEGEKATEKENGDKSEAQKPSEKAEAGPEGVAPAPEGEKKQKPARKRRMVEEIGVELVVLDLPDLPEDKLAQSVQKLQDLTLRDLEKQEREKAANSLEAFIFETQDKLYQPEYQEVSTEEQREEISGKLSAASTWLEDEGVGATTVMLKEKLAELRKLCQGLFFRVEERKKWPERLSALDNLLNHSSMFLKGARLIPEMDQIFTEVEMTTLEKVINETWAWKNATLAEQAKLPATEKPVLLSKDIEAKMMALDREVQYLLNKAKFTKPRPRPKDKNGTRAEPPLNASASDQGEKVIPPAGQTEDAEPISEPEKVETGSEPGDTEPLELGGPGAEPEQKEQSTGQKRPLKNDEL

SEQ ID NO: 6673 - protein, 937 aa, Homo sapiens; identical to SEQ ID NO: 6669

SEQ ID NO: 6674 - protein, 147 aa, Homo sapiens
MADKVRRQRPRRRVCWALVAVLLADLLALSDTLAVMSVDLGSESMKVAIVKPGVPMEIVLNKESRRKTPVIVTLKENERFFGDSAASMAIKNPKATLRYFQHLLGKQADNPHVALYQARFPEHELTFDPQRQTVHFQISSQLQFSPL

SEQ ID NO: 6675 - protein, 38 aa, Homo sapiens
MADKVRRQRPRRRVCWALVAVLLADLLALSGNLGGKHR

SEQ ID NO: 6676 - protein, 38 aa, Homo sapiens; identical to SEQ ID NO: 6675

SEQ ID NO: 6677 - protein, 79 aa, Homo sapiens
MGILKLQVFLIVLSVALNHLKATPIERQEWIIPVLSRNILLELRGAKPEHEAGKKSKVIRWKSGNATLPHVQRSAWQIF

SEQ ID NO: 6678 - protein, 79 aa, Homo sapiens
MGILKLQVFLIVLSVALNHLKATPIESHQVEKRKCNTATCATQRLANFLVHSSNNFGAILSSTNVGSNTYGKRNAVEVL

SEQ ID NO: 6679 - protein, 89 aa, Homo sapiens
MGILKLQVFLIVLSVALNHLKATPIESHQVEKRKCNTATCATQRLANFLVHSSNNFGAILSSTNVGSNTYGKRNAVEVLKREPLNYLPL

SEQ ID NO: 6680 - protein, 89 aa, Homo sapiens; identical to SEQ ID NO: 6679

SEQ ID NO: 6681 - protein, 85 aa, Homo sapiens
  VARIANT 1: note = misc_feature - Xaa can be any naturally occurring amino acid
XLKATPIERCLDQIPIFTVFQENHQVEKRKCNTATCATQRLANFLVHSSNNFGAILSSTNVGSNTYGKRNAVEVLKREPLNYLPL

SEQ ID NO: 6682 - protein, 317 aa, Homo sapiens
MKTALILLSILGMACAFSMKNLHRRVKIEDSEENGVFKYRPRYYLYKHAYFYPHLKRFPVQGSSDSSEENGDDSSEEEEEEEETSNEGENNEESNEDEDSEAENTTLSATTLGYGEDATPGTGYTGLAAIQLPKKAGDITNKATKEKESDEEEEEEEEGNENEESEAEVDENEQGINGTSTNSTEAENGNGSSGGDNGEEGEEESVTGANAEDTTETGRQGKGTSKTTTSPNGGFEPTTPPQVYRTTSPPFGKTTTVEYEGEYEYTGANEYDNGYEIYESENGEPRGDNYRAYEDEYSYFKGQGYDGYDGQNYYHHQ

SEQ ID NO: 6683 - protein, 180 aa, Homo sapiens
MAPSSPRPALPALLVLLGALFPGPGNAQTSVSPSKVILPRGGSVLVTCSTSCDQPKLLGIETPLPKKELLLPGNNRKVYELSNVQEDSQPMCYSNCPDGQSTAKTFLTVYWTPERVEGGAPRANLTVVLLRGEKELKREPAVGEPAEVTTTVLVRRDHHGANFSCRTELDLRPQGLELFE

SEQ ID NO: 6684 - protein, 532 aa, Homo sapiens
MAPSSPRPALPALLVLLGALFPGPGNAQTSVSPSKVILPRGGSVLVTCSTSCDQPKLLGIETPLPKKELLLPGNNRKVYELSNVQEDSQPMCYSNCPDGQSTAKTFLTVYWTPERVELAPLPSWQPVGKNLTLRCQVEGGAPRANLTVVLLRGEKELKREPAVGEPAEVTTTVLVRRDHHGANFSCRTELDLRPQGLELFENTSAPYQLQTFVLPATPPQLVSPRVLEVDTQGTVVCSLDGLFPVSEAQVHLALGDQRLNPTVTYGNDSFSAKASVSVTAEDEGTQRLTCAVILGNQSQETLQTVTIYSFPAPNVILTKPEVSEGTEVTVKCEAHPRAKVTLNGVPAQPLGPRAQLLLKATPEDNGRSFSCSATLEVAGQLIHKNQTRELRVLYGPRLDERDCPGNWTWPENSQQTPMCQAWGNPLPELKCLKDGTFPLPIGESVTVTRDLEGTYLCRARSTQGEVTRKVTVNVLSPRYEIVIITVVAAAVIMGTAGLSTYLYNRQRKIKKYRLQQAQKGTPMKPNTQATPP

SEQ ID NO: 6685 - protein, 310 aa, Homo sapiens
MAPSSPRPALPALLVLLGALFPVSEAQVHLALGDQRLNPTVTYGNDSFSAKASVSVTAEDEGTQRLTCAVILGNQSQETLQTVTIYSFPAPNVILTKPEVSEGTEVTVKCEAHPRAKVTLNGVPAQPLGPRAQLLLKATPEDNGRSFSCSATLEVAGQLIHKNQTRELRVLYGPRLDERDCPGNWTWPENSQQTPMCQAWGNPLPELKCLKDGTFPLPIGESVTVTRDLEGTYLCRARSTQGEVTRKVTVNVLSPRYEIVIITVVAAAVIMGTAGLSTYLYNRQRKIKKYRLQQAQKGTPMKPNTQATPP

SEQ ID NO: 6686 - protein, 174 aa, Homo sapiens
MNSNVSVYQPPRQVILTLQPTLVAVGKSFTIECRVPTVEPLDSLTLFLFRGNETLHYETFGKAAPAPQEATATFNSTADREDGHRNFSCLAVLDLMSRGGNIFHKHSAPKMLEIYEPVSDSQMVIIVTVVSVLLSLFVTSVLLCFIFGQHLRQQRMGTYGVRAAWRRLPQAFRP

SEQ ID NO: 6687 - protein, 251 aa, Homo sapiens
MSSFGYRTLTVALFTLICCPGSDEKVFEVHVRPKKLATSLDKILLDEQAQWKHYLVSNISHDTVLQCHFTCSGKQESMNSNVSVYQPPRQVILTLQPTLVAVGKSFTIECRVPTVEPLDSLTLFLFRGNETLHYETFGKAAPAPQEATATFNSTADREDGHRNFSCLAVLDLMSRGGNIFHKHSAPKMLEIYEPVSDSQMVIIVTVVSVLLSLFVTSVLLCFIFGQHLRQQRMGTYGVRAAWRRLPQAFRP

SEQ ID NO: 6688 - protein, 167 aa, Homo sapiens
MSSFGYRTLTVALFTLICCPGSDEKVFEVHVRPKKLAVEPKGSLEVNCSTTCNQPEVGGLETSLDKILLDEQAQWKHYLVSNISHDTVLQCHFTCSGKQESMNSNVSVYQPPRQVILTLQPTLVAVGKSFTIECRVPTVEPLDSLTLFLFRGNETLHYETFGKAAPA

SEQ ID NO: 6689 - protein, 214 aa, Homo sapiens
MSSFGYRTLTVALFTLICCPGSDEKVFEVHVRPKKLAVEPKGSLEVNCSTTCNQPEVGGLETSLDKILLDEQAQWKHYLVSNISHDTVLQCHFTCSGKQESMNSNVSVYQPPRQVILTLQPTLVAVGKSFTIECRVPTVEPLDSLTLFLFRGNETLHYETFGKAAPAPQEATATFNSTADREDGHRNFSCLAVLDLMSRGGNIFHKHSAPKMLE

SEQ ID NO: 6690 - protein, 216 aa, Homo sapiens
MSSFGYRTLTVALFTLICCPGSDEKVFEVHVRPKKLAVEPKGSLEVNCSTTCNQPEVGGLETSLDKILLDEQAQWKHYLVSNISHDTVLQCHFTCSGKQESMNSNVSVYQPPRQVILTLQPTLVAVGKSFTIECRVPTVEPLDSLTLFLFRGNETLHYETFGKAAPAPQEATATFNSTADREDGHRNFSCLAVLDLMSRGGNIFHKHSAPKMLEIY

SEQ ID NO: 6691 - protein, 275 aa, Homo sapiens
MSSFGYRTLTVALFTLICCPGSDEKVFEVHVRPKKLAVEPKGSLEVNCSTTCNQPEVGGLETSLDKILLDEQAQWKHYLVSNISHDTVLQCHFTCSGKQESMNSNVSVYQPPRQVILTLQPTLVAVGKSFTIECRVPTVEPLDSLTLFLFRGNETLHYETFGKAAPAPQEATATFNSTADREDGHRNFSCLAVLDLMSRGGNIFHKHSAPKMLEIYEPVSDSQMVIIVTVVSVLLSLFVTSVLLCFIFGQHLRQQRMGTYGVRAAWRRLPQAFRP

SEQ ID NO: 6692 - protein, 275 aa, Homo sapiens; identical to SEQ ID NO: 6691

SEQ ID NO: 6693 - protein, 275 aa, Homo sapiens; identical to SEQ ID NO: 6691

SEQ ID NO: 6694 - protein, 275 aa, Homo sapiens; identical to SEQ ID NO: 6691

SEQ ID NO: 6695 - protein, 275 aa, Homo sapiens; identical to SEQ ID NO: 6691

SEQ ID NO: 6696 - protein, 53 aa, Homo sapiens
MSSFGYRTLTVALFTLICCPGVNEFQRQRVPASKAGHPDTATHFGGCGQVLHH

SEQ ID NO: 6697 - protein, 271 aa, Homo sapiens
MGSLFPLSLLFFLAAAYPGVGSALGRRTKRAQSPKGSPLAPSGTSVPFWVRMSPEFVAVQPGKSVQLNCSNSCPQPQNSSLRTPLRQGKTLRGPGWVSYQLLDVRAWSSLAHCLVTCAGKTRWATSRITAYKPPHSVILEPPVLKGRKYTLRCHVTQVFPVGYLVVTLRHGSRVIYSESLERFTGLDLANVTLTYEFAAGPRDFWQPVICHARLNLDGLVVRNSSAPITLMLAWSPAPTALASGSIAALVGILLTVGAAYLCKCLAMKSQA

SEQ ID NO: 6698 - protein, 237 aa, Homo sapiens
MGSLFPLSLLFFLAAAYPGVGSALGRRTKRAQSPKGSPLAPSGTSVPFWVRMSPEFVAVQPGKSVQLNCSNSCPQPQNSSLRTPLRQGKTLRGPGWVSYQLLDVRAWSSLAHCLVTCAGKTRWATSRITAYKPPHSVILEPPVLKGRKYTLRCHVTQVFPVGYLVVTLRHGSRVIYSESLERFTGLDLANVTLTYEFAAGPRDFWQPVICHARLNLDGLVVRNSSAPITLMLGEAPL

SEQ ID NO: 6699 - protein, 272 aa, Homo sapiens
MGSLFPLSLLFFLAAAYPGVGSALGRRTKRAQSPKGSPLAPSGTSVPFWVRMSPEFVAVQPGKSVQLNCSNSCPQPQNSSLRTPLRQGKTLRGPGWVSYQLLDVRAWSSLAHCLVTCAGKTRWATSRITAYSVPGGLLGGDPEAWKPGHLFRKPGALHRPGSGQRDLDLRVCCWTPRLLAARDLPRAPQSRRPGGPQQLGTHYTDARLEPRAHSFGLRFHRCPCRDPPHCGRCVPMQVPSYEVPGVKGDVLCRLSEKKRNMKQSGEMAIHGG

SEQ ID NO: 6700 - protein, 155 aa, Homo sapiens
MKVASGSTATAAAGPSCALKAGKTASGAGEVVRCLSEQSVAISRCAGGAGARLPALLDEQQVNVLLYDMNGCYSRLKELVPTLPQNRKVSKVEILQHVIDYIRDLQLELNSESEVGTPGGRGLPVRAPLSTLNGEISALTAEAACVPADDRILCR

SEQ ID NO: 6701 - protein, 149 aa, Homo sapiens
MKVASGSTATAAAGPSCALKAGKTASGAGEVVRCLSEQSVAISRCAGGAGARLPALLDEQQVNVLLYDMNGCYSRLKELVPTLPQNRKVSKVEILQHVIDYIRDLQLELNSESEVGTPGGRGLPVRAPLSTLNGEISALTAEVRSRSDH

SEQ ID NO: 6702 - protein, 257 aa, Homo sapiens
EFIIRGGRVPSHCLHFSRSFQKKTYSKMNNPAIKRIGNHITKSPEDKREYRGLELANGIKVLLISDPTTDKSSAALDVHIGSLSDPPNIAGLSHFCEHMLFLGTKKYPKENEYSQFLSEHAGSSNAFTSGEHTNYYFDVSHEHLEGALDRFAQFFLCPLFDESCKDREVNAVDSEHEKNVMNDAWRLFQLEKATGNPKHPFSKFGTGNKYTLETRPNQEGIDVRQELLKFHSAYYSSNLMAVCVLGRESLDDLTNLV

SEQ ID NO: 6703 - protein, 1019 aa, Homo sapiens [sequence omitted]

SEQ ID NO: 6704 - protein, 61 aa, Homo sapiens
MRYRLAWLLHPALPSTFRSVLGARLPPPERLCGNYQVVFQSSGTILHFHQQCVKIPISLYP

SEQ ID NO: 6705 - protein, 464 aa, Homo sapiens
MSKLWFKQDDKFFLPKACLNFEFFSPFAYVDPLHCNMAYLYLELLKDSLNEYAYAAELAGLSYDLQNTIYGMYLSVKGYNDKQPILLKKIIEKMATFEIDEKRFEIIKEAYMRSLNNFRAEQPHQHAMYYLRLLMTEVAWTKDELKEALDDVTLPRLKAFIPQLLSRLHIEALLHGNITKQAALGIMQMVEDTLIEHAHTKPLLPSQLVRYREVQLPDRGWFVYQQRNEVHNNCGIEIYYQTDMQSTSENMFLELFCQIISEPCFNTLRTKEQLGYIVFSGPRRANGIQGLRFIIQSEKPPHYLESRVEAFLITMEKSIEDMTEEAFQKHIQALAIRRLDKPKKLSAECAKYWGEIISQQYNFDRDNTEVAYLKTLTKEDIIKFYKEMLAVDAPRRHKVSVHVLAREMDSCPVVGEFPCQNDINLSQAPALPQPEVIQNMTEFKRGLPLFPLVKPHINFMAAKL

SEQ ID NO: 6706 - protein, 106 aa, Homo sapiens
MAAPGALLVMGTLTLSPRLEYSGVISAHCNLCLLSSSDCHASASGVTGVTGVHHHTQLSFVFLVETGFCHVGRASPELLASSDPPASASQSAGIIGVSQGLNLTWS

SEQ ID NO: 6707 - protein, 187 aa, Homo sapiens
MAAPGALLVMGVSGSGKSTVGALLASELGWKFYDADDYHPEENRRKMGKGIPLNDQDRIPWLCNLHDILLRDVASGQRVVLACSALKKTYRDILTQGKDGVALKCEESGKEAKQAEMQLLVVHLSGSFEVISGRLLKREGHFMPPELLQSQFETLEPPAAPENFIQISVDKNVSEIIATIMETLKMK

SEQ ID NO: 6708 - protein, 90 aa, Homo sapiens
MAAPGALLVMGVSGSGKSTVGALLASELGWKFYDADDYHPEENRRKMGKGIPLNDQRCSLGTACGSSLFSPEENVQRHINTRKRWCSSEV

SEQ ID NO: 6709 - protein, 59 aa, Homo sapiens
MAAPGALLVMGVSGSGNWDGNSMMLMIITRRKIEGRWEKAYRSMTRTGFHGSVTCMTFY

SEQ ID NO: 6710 - protein, 90 aa, Homo sapiens
MGKGIPLNDQDRIPWLCNLHDILLRDVASGQRVVLACSALKKTYRDILTQGKDGVALKCEESGKEAKQAEMQLLVVHLSGSFEVISGRLL

SEQ ID NO: 6711 - protein, 141 aa, Homo sapiens
MGKGIPLNDQDRIPWLCNLHDILLRDVASGQRVVLACSALKKTYRDILTQGKDGVALKCEESGKEAKQAEMQLLVVHLSGSFEVISGRLLKREGHFMPPELLQSQFETLEPPAAPENFIQISVDKNVSEIIATIMETLKMK

SEQ ID NO: 6712 - protein, 86 aa, Homo sapiens
MPPPRTGRGLLWLGLVLSSVCVALGSETQANSTTDALNVLLIIVDDLRPSLGCYGDKLVRSPNIDQLASHSLLFQNAFAQQAVCAP

SEQ ID NO: 6713 - protein, 550 aa, Homo sapiens
MPPPRTGRGLLWLGLVLSSVCVALGSETQANSTTDALNVLLIIVDDLRPSLGCYGDKLVRSPNIDQLASHSLLFQNAFAQQAVCAPSRVSFLTGRRPDTTRLYDFNSYWRVHAGNFSTIPQYFKENGYVTMSVGKVFHPGISSNHTDDSPYSWSFPPYHPSSEKYENTKTCRGPDGELHANLLCPVDVLDVPEGTLPDKQSTEQAIQLLEKMKTSASPFFLAVGYHKPHIPFRYPKEFQKLYPLENITLAPDPEVPDGLPPVAYNPWMDIRQREDVQALNISVPYGPIPVDFQRKIRQSYFASVSYLDTQVGRLLSALDDLQLANSTIIAFTSDHGWALGEHGEWAKYSNFDVATHVPLIFYVPGRTASLPEAGEKLFPYLDPFDSASQLMEPGRQSMDLVELVSLFPTLAGLAGLQVPPRCPVPSFHVELCREGKNLLKHFRFRDLEEDPYLPGNPRELIAYSQYPRPSDIPQWNSDKPSLKDIKIMGYSIRTIDYRYTVWVGFNPDEFLANFSDIHAGELYFVDSDPLQDHNMYNDSQGGDLFQLLMP

SEQ ID NO: 6714 - protein, 343 aa, Homo sapiens
MPPPRTGRGLLWLGLVLSSVCVALGSETQANSTTDALNVLLIIVDDLRPSLGCYGDKLVRSPNIDQLASHSLLFQNAFAQQAVCAPSRVSFLTGRRPDTTRLYDFNSYWRVHAGNFSTIPQYFKENGYVTMSVGKVFHPGISSNHTDDSPYSWSFPPYHPSSEKYENTKTCRGPDGELHANLLCPVDVLDVPEGTLPDKQSTEQAIQLLEKMKTSASPFFLAVGYHKPHIPFRYPKEFQKLYPLENITLAPDPEVPDGLPPVAYNPWMDIRQREDVQALNISVPYGPIPVDFQRKIRQSYFASVSYLDTQVGRLLSALDDLQLANSTIIAFTSDHGFLMRTNT

SEQ ID NO: 6715 - protein, 312 aa, Homo sapiens
MPPPRTGRGLLWLGLVLSSVCVALGSETQANSTTDALNVLLIIVDDLRPSLGCYGDKLVRSPNIDQLASHSLLFQNAFAQQAVCAPSRVSFLTGRRPDTTRLYDFNSYWRVHAGNFSTIPQYFKENGYVTMSVGKVFHPGISSNHTDDSPYSWSFPPYHPSSEKYENTKTCRGPDGELHANLLCPVDVLDVPEGTLPDKQSTEQAIQLLEKMKTSASPFFLAVGYHKPHIPFRYPKEFQKLYPLENITLAPDPEVPDGLPPVAYNPWMDIRQREDVQALNISVPYGPIPVDFQEDQSSTGFRLKTSSTRKYK

SEQ ID NO: 6716 - protein, 179 aa, Homo sapiens
MPPPRTGRGLLWLGLVLSSVCVALGSETQANSTTDALNVLLIIVDDLRPSLGCYGDKLVRSPNIDQLASHSLLFQNAFAQQAVCAPSRVSFLTGRRPDTTRLYDFNSYWRVHAGNFSTIPQYFKENGYVTMSVGKVFHPGTAPCPESGFSWFVVSESSIPILGMGLSLQSPLLAGRVPR

SEQ ID NO: 6717 - protein, 106 aa, Homo sapiens
RSPNIDQLASHSLLFQNAFAQQAVCAPSRVSFLTGRRPDTTRLYDFNSYWRVHAGNFSTIPQYFKENGYVTMSVGKVFHPALVGTHFSAESLFSRPFSVSIGPASR

SEQ ID NO: 6718 - protein, 232 aa, Homo sapiens
LAHPGPGIGAGPSPGSAGPSPLPGMDGRWALLDPESIVRGSTGRGLSYNFTHLDGYLDLLRENQLLPGFELMGSASGHFTDFEDKQQVFEWKDLVSSLARRYIGRYGLAHVSKWNFETWNEPDHHDFDNVSMTMQGFLNYYDACSEGLRAASPALRLGGPGDSFHTPPRSPLSWGLLRHCHDGTNFFTGEAGVRLDYISLHRKGARSSISILEQEKVVAQQIRQLFPKFADT

SEQ ID NO: 6719 - protein, 176 aa, Homo sapiens
MCLPSECHSHWTQVQASLSPAAPCPPPWLPRGSTGRGLSYNFTHLDGYLDLLRENQLLPGFELMGSASGHFTDFEDKQQVFEWKDLVSSLARRYIGRYGLAHVSKWNFETWNEPDHHDFDNVSMTMQGFLNYYDACSEGLRAASPALRLGGPGDSFHTPPRSPLSWGLLRHCHDGT

SEQ ID NO: 6720 - protein, 521 aa, Homo sapiens
MGSASGHFTDFEDKQQVFEWKDLVSSLARRYIGRYGLAHVSKWNFETWNEPDHHDFDNVSMTMQGFLNYYDACSEGLRAASPALRLGGPGDSFHTPPRSPLSWGLLRHCHDGTNFFTGEAGVRLDYISLHRKGARSSISILEQEKVVAQQIRQLFPKFADTPIYNDEADPLVGWSLPQPWRADVTYAAMVVKVIAQHQNLLLANTTSAFPYALLSNDNAFLSYHPHPFAQRTLTARFQVNNTRPPHVQLLRKPVLTAMGLLALLDEEQLWAEVSQAGTVLDSNHTVGVLASAHRPQGPADAWRAAVLIYASDDTRAHPNRSVAVTLRLRGVPPGPGLVYVTRYLDNGLCSPDGEWRRLGRPVFPTAEQFRRMRAAEDPVAAAPRPLPAGGRLTLRPALRLPSLLLVHVCARPEKPPGQVTRLRALPLTQGQLVLVWSDEHVGSKCLWTYEIQFSQDGKAYTPVSRKPSTFNLFVFSPDTGAVSGSYRVRALDYWARPGPFSDPVPYLEVPVPRGPPSPGNP

SEQ ID NO: 6721 - protein, 653 aa, Homo sapiens
MRPLRPRAALLALLASLLAAPPVAPAEAPHLVHVDAARALWPLRRFWRSTGFCPPLPHSQADQYVLSWDQQLNLAYVGAVPHRGIKQVRTHWLLELVTTRGSTGRGLSYNFTHLDGYLDLLRENQLLPGFELMGSASGHFTDFEDKQQVFEWKDLVSSLARRYIGRYGLAHVSKWNFETWNEPDHHDFDNVSMTMQGFLNYYDACSEGLRAASPALRLGGPGDSFHTPPRSPLSWGLLRHCHDGTNFFTGEAGVRLDYISLHRKGARSSISILEQEKVVAQQIRQLFPKFADTPIYNDEADPLVGWSLPQPWRADVTYAAMVVKVIAQHQNLLLANTTSAFPYALLSNDNAFLSYHPHPFAQRTLTARFQVNNTRPPHVQLLRKPVLTAMGLLALLDEEQLWAEVSQAGTVLDSNHTVGVLASAHRPQGPADAWRAAVLIYASDDTRAHPNRSVAVTLRLRGVPPGPGLVYVTRYLDNGLCSPDGEWRRLGRPVFPTAEQFRRMRAAEDPVAAAPRPLPAGGRLTLRPALRLPSLLLVHVCARPEKPPGQVTRLRALPLTQGQLVLVWSDEHVGSKCLWTYEIQFSQDGKAYTPVSRKPSTFNLFVFSPDTGAVSGSYRVRALDYWARPGPFSDPVPYLEVPVPRGPPSPGNP

SEQ ID NO: 6722 - protein, 224 aa, Homo sapiens
MRPLRPRAALLALLASLLAAPPVAPAEAPHLVHVDAARALWPLRRFWRSTGFWGSTGRGLSYNFTHLDGYLDLLRENQLLPGFELMGSASGHFTDFEDKQQVFEWKDLVSSLARRYIGRYGLAHVSKWNFETWNEPDHHDFDNVSMTMQGFLNYYDACSEGLRAASPALRLGGPGDSFHTPPRSPLSWGLLRHCHDGTNFFTGEAGVRLDYISLHRKGARSSIS

SEQ ID NO: 6723 - protein, 196 aa, Homo sapiens
  VARIANT 1: note = misc_feature - Xaa can be any naturally occurring amino acid
XVPCAPAPRCWRSWPRSWPRPRWPRPRPRTWCMWTRPARCGPCGASGGAQASAPRCHTARLTSTSSAGTSSSTSPMWAPSLTAASSRGSTGRGLSYNFTHLDGYLDLLRENQLLPGFELMGSASGHFTDFEDKQQVFEWKDLVSSLARRYIGRYGLAHVSKWNFETWNEPDHHDFDNVSMTMQGFLNYYDACSEGL

SEQ ID NO: 6724 - protein, 105 aa, Homo sapiens
MGFTGAGIAASSIAAKMMSAAAIANGGGVSAGSLVATLQSVGAAGLSTSSNILLASVGSVLGACLGNSPSSSLPAEPEAKEDEARENVPQGEPPKPPLKSEKHEE

SEQ ID NO: 6725 - protein, 130 aa, Homo sapiens
MMKRAAAAAVGGALAVGAVPVVLSAMGFTGAGIAASSIAAKMMSAAAIANGGGVSAGSLVATLQSVGAAGLSTSSNILLASVGSVLGACLGNSPSSSLPAEPEAKEDEARENVPQGEPPKPPLKSEKHEE

SEQ ID NO: 6726 - protein, 105 aa, Homo sapiens
MTLSPLLLFLPPLLLLLDVPTAAVQASPLQALDFFGNGPPVNYKTGNLYLRGPLKKSNAPLVNVTLYYEALCGGCRAFLIRELFPTWLLVMEILNVTLVPYGNAQ

SEQ ID NO: 6727 - protein, 250 aa, Homo sapiens
MTLSPLLLFLPPLLLLLDVPTAAVQASPLQALDFFGNGPPVNYKTGNLYLRGPLKKSNAPLVNVTLYYEALCGGCRAFLIRELFPTWLLVMEILNVTLVPYGNAQEQNVSGRWEFKCQHGEEECKFNKVEACVLDELDMELAFLTIVCMEEFEDMERSLPLCLQLYAPGLSPDTIMECAMGDRGMQLMHANAQRTDALQPPHEYVPWVTVNGKPLEDQTQLLTLVCQLYQGKKPDVCPSSTSSLRSVCFK

SEQ ID NO: 6728 - protein, 189 aa, Homo sapiens
MASPFALLMVLVVLSCKSSCSLGCDLPETHSLDNRRTLMLLAQMSRISPSSCLMDRHDFGFPQEEFDGNQFQKAPAISVLHELIQQIFNLFTTKDSSAAWDEDLLDKFCTELYQQLNDLEACVMQEERVGETPLMNADSILAVKKYFRRITLYLTEKKYSPCAWEVVRAEIMRSLSLSTNLQERLRRKE

SEQ ID NO: 6729 - protein, 189 aa, Homo sapiens
MALSFSLLMAVLVLSYKSICSLGCDLPQTHSLGNRRALILLGQMGRISPFSCLKDRHDFRIPQEEFDGNQFQKAQAISVLHEMIQQTFNLFSTEDSSAAWEQSLLEKFSTELYQQLNDLEACVIQEVGVEETPLMNEDSILAVRKYFQRITLYLIERKYSPCAWEVVRAEIMRSLSFSTNLQKRLRRKD

SEQ ID NO: 6730 - protein, 189 aa, Homo sapiens
MASPFALLMALVVLSCKSSCSLGCDLPETHSLDNRRTLMLLAQMSRISPSSCLMDRHDFGFPQEEFDGNQFQKAPAISVLHELIQQIFNLFTTKDSSAAWDEDLLDKFCTELYQQLNDLEACVMQEERVGETPLMNADSILAVKKYFRRITLYLTEKKYSPCAWEVVRAEIMRSLSLSTNLQERLRRKE

SEQ ID NO: 6731 - protein, 190 aa, Homo sapiens
MMASPFALLMALVVLSCKSSCSLGCDLPETHSLDNRRTLMLLAQMSRISPSSCLMDRHDFGFPQEEFDGNQFQKAPAISVLHELIQQIFNLFTTKDSSAAWDEDLLDKFCTELYQQLNDLEACVMQEERVGETPLMNADSILAVKKYFRRITLYLTEKKYSPCAWEVVRAEIMRSLSLSTNLQERLRRKE

SEQ ID NO: 6732 - protein, 189 aa, Homo sapiens
MALPFALMMALVVLSCKSSCSLGCNLSQTHSLNNRRTLMLMAQMRRISPFSCLKDRHDFEFPQEEFDGNQFQKAQAISVLHEMMQQTFNLFSTKNSSAAWDETLLEKFYIELFQQMNDLEACVIQEVGVEETPLMNEDSILAVKKYFQRITLYLMEKKYSPCAWEVVRAEIMRSLSFSTNLQKRLRRKD

SEQ ID NO: 6733 - protein, 189 aa, Homo sapiens
MALSFSLLMAVLVLSYKSICSLGCDLPQTHSLGNRRALILLAQMGRISHFSCLKDRYDFGFPQEVFDGNQFQKAQAISAFHEMIQQTFNLFSTKDSSAAWDETLLDKFYIELFQQLNDLEACVTQEVGVEEIALMNEDSILAVRKYFQRITLYLMGKKYSPCAWEVVRAEIMRSFSFSTNLQKGLRRKD

SEQ ID NO: 6734 - protein, 189 aa, Homo sapiens
MALSFSLLMAVLVLSYKSICSLGCDLPQTHSLGNRRALILLAQMGRISPFSCLKDRHDFGLPQEEFDGNQFQKTQAISVLHEMIQQTFNLFSTEDSSAAWEQSLLEKFSTELYQQLNNLEACVIQEVGMEETPLMNEDSILAVRKYFQRITLYLTEKKYSPCAWEVVRAEIMRSLSFSTNLQKILRRKD

SEQ ID NO: 6735 - protein, 188 aa, Homo sapiens
MALTFALLVALLVLSCKSSCSVGCDLPQTHSLGSRRTLMLLAQMRRISLFSCLKDRHDFGFPQEEFGNQFQKAETIPVLHEMIQQIFNLFSTKDSSAAWDETLLDKFYTELYQQLNDLEACVIQGVGVTETPLMKEDSILAVRKYFQRITLYLKEKKYSPCAWEVVRAEIMRSFSLSTNLQESLRSKE

SEQ ID NO: 6736 - protein, 189 aa, Homo sapiens
MALSFSLLMAVLVLSYKSICSLGCDLPQTHSLGNRRALILLAQMGRISPFSCLKDRHDFGFPQEEFDGNQFQKAQAISVLHEMIQQTFNLFSTKDSSATWEQSLLEKFSTELNQQLNDLEACVIQEVGVEETPLMNVDSILAVKKYFQRITLYLTEKKYSPCAWEVVRAEIMRSFSLSKIFQERLRRKE

SEQ ID NO: 6737 - protein, 189 aa, Homo sapiens
MALSFSLLMAVLVLSYKSICSLGCDLPQTHSLGNRRALILLAQMGRISHFSCLKDRHDFGFPEEEFDGHQFQKAQAISVLHEMIQQTFNLFSTEDSSAAWEQSLLEKFSTELYQQLNDLEACVIQEVGVEETPLMNEDSILAVRKYFQRITLYLTEKKYSPCAWEVVRAEIMRSLSFSTNLQKRLRRKD

SEQ ID NO: 6738 - protein, 189 aa, Homo sapiens
MALPFVLLMALVVLNCKSICSLGCDLPQTHSLSNRRTLMIMAQMGRISPFSCLKDRHDFGFPQEEFDGNQFQKAQAISVLHEMIQQTFNLFSTKDSSATWDETLLDKFYTELYQQLNDLEACMMQEVGVEDTPLMNVDSILTVRKYFQRITLYLTEKKYSPCAWEVVRAEIMRSFSLSANLQERLRRKE

SEQ ID NO: 6739 - protein, 189 aa, Homo sapiens
MALPFALLMALVVLSCKSSCSLDCDLPQTHSLGHRRTMMLLAQMRRISLFSCLKDRHDFRFPQEEFDGNQFQKAEAISVLHEVIQQTFNLFSTKDSSVAWDERLLDKLYTELYQQLNDLEACVMQEVWVGGTPLMNEDSILAVRKYFQRITLYLTEKKYSPCAWEVVRAEIMRSFSSSRNLQERLRRKE

SEQ ID NO: 6740 - protein, 190 aa, Homo sapiens
TMALPFALLMALVVLSCKSSCSLDCDLPQTHSLGHRRTMMLLAQMRRISLFSCLKDRHDFRFPQEEFDGNQFQKAEAISVLHEVIQQTFNLFSTKDSSVAWDERLLDKLYTELYQQLNDLEACVMQEVWVGGTPLMNEDSILAVRKYFQRITLYLTEKKYSPCAWEVVRAEIMRSFSSSRNLQERLRRKE

SEQ ID NO: 6741 - protein, 189 aa, Homo sapiens
MARSFSLLMVVLVLSYKSICSLGCDLPQTHSLRNRRALILLAQMGRISPFSCLKDRHEFRFPEEEFDGHQFQKTQAISVLHEMIQQTFNLFSTEDSSAAWEQSLLEKFSTELYQQLNDLEACVIQEVGVEETPLMNEDFILAVRKYFQRITLYLMEKKYSPCAWEVVRAEIMRSFSFSTNLKKGLRRKD

SEQ ID NO: 6742 - protein, 189 aa, Homo sapiens
MALTFYLLVALVVLSYKSFSSLGCDLPQTHSLGNRRALILLAQMRRISPFSCLKDRHDFEFPQEEFDDKQFQKAQAISVLHEMIQQTFNLFSTKDSSAALDETLLDEFYIELDQQLNDLESCVMQEVGVIESPLMYEDSILAVRKYFQRITLYLTEKKYSSCAWEVVRAEIMRSFSLSINLQKRLKSKE

SEQ ID NO: 6743 - protein, 557 aa, Homo sapiens
MMVVLLGATTLVLVAVAPWVLSAAAGGKNLKSPQKVEVDIIDDNFILRWNRSDESVGNVTFSFDYQKTGMDNWIKLSGCQNITSTKCNFSSLKLNVYEEIKLRIRAEKENTSSWYEVDSFTPFRKAQIGPPEVHLEAEDKAIVIHISPGTKDSVMWALDGLSFTYSLVIWKNSSGVEERIENIYSRHKIYKLSPETTYCLKVKAALLTSWKIGVYSPVHCIKTTVENELPPPENIEVSVQNQNYVLKWDYTYANMTFQVQWLHAFLKRNPGNHLYKWKQIPDCENVKTTQCVFPQNVFQKGIYLLRVQASDGNNTSFWSEEIKFDTEIQAFLLPPVFNIRSLSDSFHIYIGAPKQSGNTPVIQDYPLIYEIIFWENTSNAERKIIEKKTDVTVPNLKPLTVYCVKARAHTMDEKLNKSSVFSDAVCEKTKPGNTSKIWLIVGICIALFALPFVIYAAKVFLRCINYVFFPSLKPSSSIDEYFSEQPLKNLLLSTSEEQIEKCFIIENISTIATVEETNQTDEDHKKYSSQTSQDSGNYSNEDESESKTSEELQQDFV

SEQ ID NO: 6744 - protein, 136 aa, Homo sapiens
MMVVLLGATTLVLVAVAPWVLSAAAGGKNLKSPQKVEVDIIDDNFILRWNRSDESVGNVTFSFDYQKTGMDNWIKLSGCQNITSTKCNFSSLKLNVYEEIKLRIRAEKENTSSWYEVDSFTPFRKVENELPPPENI

SEQ ID NO: 6745 - protein, 187 aa, Homo sapiens
MTNKCLLQIALLLCFSTTALSMSYNLLGFLQRSSNFQCQKLLWQLNGRLEYCLKDRMNFDIPEEIKQLQQFQKEDAALTIYEMLQNIFAIFRQDSSSTGWNETIVENLLANVYHQINHLKTVLEEKLEKEDFTRGKLMSSLHLKRYYGRILHYLKAKEYSHCAWTIVRVEILRNFYFINRLTGYLRN

SEQ ID NO: 6746 - protein, 208 aa, Homo sapiens
MIIKHFFGTVLVLLASTTIFSLDLKLIIFQQRQVNQESLKLLNKLQTLSIQQCLPHRKNFLLPQKSLSPQQYQKGHTLAILHEMLQQIFSLFRANISLDGWEENHTEKFLIQLHQQLEYLEALMGLEAEKLSGTLGSDNLRLQVKMYFRRIHDYLENQDYSTCAWAIVQVEISRCLFFVFSLTEKLSKQGRPLNDMKQELTTEFRSPR

SEQ ID NO: 6747 - protein, 166 aa, Homo sapiens
MKYTSYILAFQLCIVLGSLGCYCQDPYVKEAENLKKYFNAGHSDVADNGTLFLGILKNWKEESDRKIMQSQIVSFYFKLFKNFKDDQSIQKSVETIKEDMNVKFFNSNKKKRDDFEKLTNYSVTDLNVQRKAIHELIQVMAELSPAAKTGKRKRSQMLFRGRRASQ

SEQ ID NO: 6748 - protein, 30 aa, Homo sapiens
LLPLVMQGVSRAEMGTADLGPSSVLSTDVF

SEQ ID NO: 6749 - protein, 210 aa, Homo sapiens
MALLFLLPLVMQGVSRAEMGTADLGPSSVPTPTNVTIESYNMNPIVYWEYQIMPQVPVFTVEVKNYGVKARVGQKESAYAKSEEFAVCRDGKIGPPKLDIRKEEKQIMIDIFHPSVFVNGDEQEVDYDPETTCYIRVYNVYVRMNGSEIQYKILTQKEDDCDEIQCQLAIPVSSLNSQYCVSAEGVLHVWGVTTEKSKEVCITIFNSSIK

SEQ ID NO: 6750 - protein, 489 aa, Homo sapiens
MALLFLLPLVMQGVSRAEMGTADLGPSSVPTPTNVTIESYNMNPIVYWEYQIMPQVPVFTVEVKNYGVKNSEWIDACINISHHYCNISDHVGDPSNSLWVRVKARVGQKESAYAKSEEFAVCRDGKIGPPKLDIRKEEKQIMIDIFHPSVFVNGDEQEVDYDPETTCYIRVYNVYVRMNGSEIQYKILTQKEDDCDEIQCQLAIPVSSLNSQYCVSAEGVLHVWGVTTEKSKEVCITIFNSSIKGSLWIPVVAALLLFLVLSLVFICFYIKKINPLKEKSIILPKSLISVVRSATLETKPESKYVSLITSYQPFSLEKEVVCEEPLSPATVPGMHTEDNPGKVEHTEELSSITEVVTTEENIPDVVPGSHLTPIERESSSPLSSNQSEPGSIALNSYHSRNCSESDHSRNGFDTDSSCLESHSSLSDSEFPPNNKGEIKTEGQELITVIKAPTSFGYDKPHVLVDLLVDDSGKESLIGYRPTEDSKEFS

SEQ ID NO: 6751 - protein, 470 aa, Homo sapiens
MCGSIVQSLVPTPTNVTIESYNMNPIVYWEYQIMPQVPVFTVEVKNYGVKNSEWIDACINISHHYCNISDHVGDPSNSLWVRVKARVGQKESAYAKSEEFAVCRDGKIGPPKLDIRKEEKQIMIDIFHPSVFVNGDEQEVDYDPETTCYIRVYNVYVRMNGSEIQYKILTQKEDDCDEIQCQLAIPVSSLNSQYCVSAEGVLHVWGVTTEKSKEVCITIFNSSIKGSLWIPVVAALLLFLVLSLVFICFYIKKINPLKEKSIILPKSLISVVRSATLETKPESKYVSLITSYQPFSLEKEVVCEEPLSPATVPGMHTEDNPGKVEHTEELSSITEVVTTEENIPDVVPGSHLTPIERESSSPLSSNQSEPGSIALNSYHSRNCSESDHSRNGFDTDSSCLESHSSLSDSEFPPNNKGEIKTEGQELITVIKAPTSFGYDKPHVLVDLLVDDSGKESLIGYRPTEDSKEFS

SEQ ID NO: 6752 - protein, 161 aa, Homo sapiens
MLLKSPENSLLQFQFKYGVPTPTNVTIESYNMNPIVYWEYQIMPQVPVFTVEVKNYGVKNSEWIDACINISHHYCNISDHVGDPSNSLWVRVKARVGQKESAYAKSEEFAVCRDGKIGPPKLDIRKEEKQIMIDIFHPSVFVNGDEQEVDYDPETTCYIRV

SEQ ID NO: 6753 - protein, 479 aa, Homo sapiens
MLLKSPENSLLQFQFKYGVPTPTNVTIESYNMNPIVYWEYQIMPQVPVFTVEVKNYGVKNSEWIDACINISHHYCNISDHVGDPSNSLWVRVKARVGQKESAYAKSEEFAVCRDGKIGPPKLDIRKEEKQIMIDIFHPSVFVNGDEQEVDYDPETTCYIRVYNVYVRMNGSEIQYKILTQKEDDCDEIQCQLAIPVSSLNSQYCVSAEGVLHVWGVTTEKSKEVCITIFNSSIKGSLWIPVVAALLLFLVLSLVFICFYIKKINPLKEKSIILPKSLISVVRSATLETKPESKYVSLITSYQPFSLEKEVVCEEPLSPATVPGMHTEDNPGKVEHTEELSSITEVVTTEENIPDVVPGSHLTPIERESSSPLSSNQSEPGSIALNSYHSRNCSESDHSRNGFDTDSSCLESHSSLSDSEFPPNNKGEIKTEGQELITVIKAPTSFGYDKPHVLVDLLVDDSGKESLIGYRPTEDSKEFS

SEQ ID NO: 6754 - protein, 479 aa, Homo sapiens; identical to SEQ ID NO: 6753

SEQ ID NO: 6755 - protein, 448 aa, Homo sapiens
MNPIVYWEYQIMPQVPVFTVEVKNYGVKNSEWIDACINISHHYCNISDHVGDPSNSLWVRVKARVGQKESAYAKSEEFAVCRDGKIGPPKLDIRKEEKQIMIDIFHPSVFVNGDEQEVDYDPETTCYIRVYNVYVRMNGSEIQYKILTQKEDDCDEIQCQLAIPVSSLNSQYCVSAEGVLHVWGVTTEKSKEVCITIFNSSIKGSLWIPVVAALLLFLVLSLVFICFYIKKINPLKEKSIILPKSLISVVRSATLETKPESKYVSLITSYQPFSLEKEVVCEEPLSPATVPGMHTEDNPGKVEHTEELSSITEVVTTEENIPDVVPGSHLTPIERESSSPLSSNQSEPGSIALNSYHSRNCSESDHSRNGFDTDSSCLESHSSLSDSEFPPNNKGEIKTEGQELITVIKAPTSFGYDKPHVLVDLLVDDSGKESLIGYRPTEDSKEFS

SEQ ID NO: 6756 - protein, 448 aa, Homo sapiens; identical to SEQ ID NO: 6755

SEQ ID NO: 6757 - protein, 448 aa, Homo sapiens; identical to SEQ ID NO: 6755

SEQ ID NO: 6758 - protein, 27 aa, Homo sapiens
  VARIANT 1: note = misc_feature - Xaa can be any naturally occurring amino acid
XLLPLVMQGVSRAEMGTADLGPSSDVF

SEQ ID NO: 6759 - protein, 200 aa, Homo sapiens
MAAAWTVVLVTLVLGLAVAGPVPTSKPTTTGKGCHIGRFKSLSPQELASFKKARDALEESLKLKNWSCSSPVFPGNWDLRLLQVRERPVALEAELALTLKVLEAAAGPALEDVLDQPLHTLHHILSQLQACIQPQPTAGPRPRGRLHHWLHRLQEAPKKESAGCLEASVTFNLFRLLTRDLKYVADGNLCLRTSTHPEST

SEQ ID NO: 6760 - protein, 200 aa, Homo sapiens
MKLDMTGDCTPVLVLMAAVLTVTGAVPVARLHGALPDARGCHIAQFKSLSPQELQAFKRAKDALEESLLLKDCRCHSRLFPRTWDLRQLQVRERPMALEAELALTLKVLEATADTDPALVDVLDQPLHTLHHILSQFRACIQPQPTAGPRTRGRLHHWLYRLQEAPKKESPGCLEASVTFNLFRLLTRDLNCVASGDLCV

SEQ ID NO: 6761 - protein, 200 aa, Homo sapiens
MKLDMTGDCMPVLVLMAAVLTVTGAVPVARLRGALPDARGCHIAQFKSLSPQELQAFKRAKDALEESLLLKDCKCRSRLFPRTWDLRQLQVRERPVALEAELALTLKVLEATADTDPALGDVLDQPLHTLHHILSQLRACIQPQPTAGPRTRGRLHHWLHRLQEAPKKESPGCLEASVTFNLFRLLTRDLNCVASGDLCV

SEQ ID NO: 6762 - protein, 196 aa, Homo sapiens
MTGDCMPVLVLMAAVLTVTGAVPVARLRGALPDARGCHIAQFKSLSPQELQAFKRAKDALEESLLLKDCKCRSRLFPRTWDLRQLQVRERPVALEAELALTLKVLEATADTDPALGDVLDQPLHTLHHILSQLRACIQPQPTAGPRTRGRLHHWLHRLQEAPKKESPGCLEASVTFNLFRLLTRDLNCVASGDLCV

SEQ ID NO: 6763 - protein, 520 aa, Homo sapiens
MAGPERWGPLLLCLLQAAPGRPRLAPPQNVTLLSQNFSVYLTWLPGLGNPQDVTYFVAYQSSPTRRRWREVEECAGTKELLCSMMCLKKQDLYNKFKGRVRTVSPSSKSPWVESEYLDYLFEVEPAPPVLVLTQTEEILSANATYQLPPCMPPLDLKYEVAFWKEGAGNKTLFPVTPHGQPVQITLQPAASEHHCLSARTIYTFSVPKYSKFSKPTCFLLEVPEANWAFLVLPSLLILLLVIAAGGVIWKTLMGNPWFQRAKMPRALDFSGHTHPVATFQPSRPESVNDLFLCPQKELTRGVRPTPRVRAPATQQTRWKKDLAEDEEEEDEEDTEDGVSFQPYIEPPSFLGQEHQAPGHSEAGGVDSGRPRAPLVPSEGSSAWDSSDRSWASTVDSSWDRAGSSGYLAEKGPGQGPGGDGHQESLPPPEFSKDSGFLEELPEDNLSSWATWGTLPPEPNLVPGGPPVSLQTLTFCWESSPEEEEEARESEIEDSDAGSWGAESTQRTEDRGRTLGHYMAR

SEQ ID NO: 6764 - protein, 491 aa, Homo sapiens
MAGPERWGPLLLCLLQAAPGRPRLAPPQNVTLLSQNFSVYLTWLPGLGNPQDVTYFVAYQSSPTRRRWREVEECAGTKELLCSMMCLKKQDLYNKFKGRVRTVSPSSKSPWVESEYLDYLFEVEPAPPVLVLTQTEEILSANATYQLPPCMPPLDLKYEVAFWKEGAGNKTLFPVTPHGQPVQITLQPAASEHHCLSARTIYTFSVPKYSKFSKPTCFLLEVPEANWAFLVLPSLLILLLVIAAGGVIWKTLMGNPWFQRAKMPRALELTRGVRPTPRVRAPATQQTRWKKDLAEDEEEEDEEDTEDGVSFQPYIEPPSFLGQEHQAPGHSEAGGVDSGRPRAPLVPSEGSSAWDSSDRSWASTVDSSWDRAGSSGYLAEKGPGQGPGGDGHQESLPPPEFSKDSGFLEELPEDNLSSWATWGTLPPEPNLVPGGPPVSLQTLTFCWESSPEEEEEARESEIEDSDAGSWGAESTQRTEDRGRTLGHYMAR

SEQ ID NO: 6765 - protein, 244 aa, Homo sapiens
MAGPERWGPLLLCLLQAAPGRPRLAPPQNVTLLSQNFSVYLTWLPGLGNPQDVTYFVAYQSSPTRRRWREVEECAGTKELLCSMMCLKKQDLYNKFKGRVRTVSPSSKSPWVESEYLDYLFEVEPAPPVLVLTQTEEILSANATYQLPPCMPPLDLKYEVAFWKEGAGNKTLFPVTPHGQPVQITLQPAASEHHCLSARTIYTFSVPKYSKFSKPTCFLLEVPGLFWTHTPCGNLSAQQTRVRE

SEQ ID NO: 6766 - protein, 211 aa, Homo sapiens
MAGPERWGPLLLCLLQAAPGRPRLAPPQNVTLLSQNFSVYLTWLPGLGNPQDVTYFVAYQSSPTRRRWREVEECAGTKELLCSMMCLKKQDLYNKFKGRVRTVSPSSKSPWVESEYLDYLFEVEPAPPVLVLTQTEEILSANATYQLPPCMPPLDLKYEVAFWKEGAGNKVGSSFPAPRLGPLLHPFLLRFFSPSQPAPAPLLQEVFPVHS

SEQ ID NO: 6767 - protein, 185 aa, Homo sapiens
MMCLKKQDLYNKFKGRVRTVSPSSKSPWVESEYLDYLFEVEPAPPVLVLTQTEEILSANATYQLPPCMPPLDLKYEVAFWKEGAGNKTLFPVTPHGQPVQITLQPAASEHHCLSARTIYTFSVPKYSKFSKPTCFLLEVPEANWAFLVLPSLLILLLVIAAGGVIWKTLMGNPWFQRAKMPRALV

SEQ ID NO: 6768 - protein, 195 aa, Homo sapiens
MALLFPLLAALVMTSYSPVGSLGCDLPQNHGLLSRNTLVLLHQMRRISPFLCLKDRRDFRFPQEMVKGSQLQKAHVMSVLHEMLQQIFSLFHTERSSAAWNMTLLDQLHTGLHQQLQHLETCLLQVVGEGESAGAISSPALTLRRYFQGIRVYLKEKKYSDCAWEVVRMEIMKSLFLSTNMQERLRSKDRDLGSS

SEQ ID NO: 6769 - protein, 153 aa, Homo sapiens
MGKISSLPTQLFKCCFCDFLKVKMHTMSSSHLFYLALCLLTFTSSATAGPETLCGAELVDALQFVCGDRGFYFNKPTGYGSSSRRAPQTGIVDECCFRSCDLRRLEMYCAPLKPAKSARSVRAQRHTDMPKTQKEVHLKNASRGSAGNKNYRM

SEQ ID NO: 6770 - protein, 153 aa, Homo sapiens; identical to SEQ ID NO: 6769

SEQ ID NO: 6771 - protein, 158 aa, Homo sapiens
MGKISSLPTQLFKCCFCDFLKVKMHTMSSSHLFYLALCLLTFTSSATAGPETLCGAELVDALQFVCGDRGFYFNKPTGYGSSSRRAPQTGIVDECCFRSCDLRRLEMYCAPLKPAKSARSVRAQRHTDMPKTQKYQPPSTNKNTKSQRRKGSTFEERK

SEQ ID NO: 6772 - protein, 158 aa, Homo sapiens; identical to SEQ ID NO: 6771

SEQ ID NO: 6773 - protein, 195 aa, Homo sapiens
MGKISSLPTQLFKCCFCDFLKVKMHTMSSSHLFYLALCLLTFTSSATAGPETLCGAELVDALQFVCGDRGFYFNKPTGYGSSSRRAPQTGIVDECCFRSCDLRRLEMYCAPLKPAKSARSVRAQRHTDMPKTQKYQPPSTNKNTKSQRRKGWPKTHPGGEQKEGTEASLQIRGKKKEQRREIGSRNAECRGKKGK

SEQ ID NO: 6774 - protein, 137 aa, Homo sapiens
MITPTVKMHTMSSSHLFYLALCLLTFTSSATAGPETLCGAELVDALQFVCGDRGFYFNKPTGYGSSSRRAPQTGIVDECCFRSCDLRRLEMYCAPLKPAKSARSVRAQRHTDMPKTQKEVHLKNASRGSAGNKNYRM

SEQ ID NO: 6775 - protein, 183 aa, Homo sapiens
MGIPMGKSMLVLLTFLAFASCCIAAYRPSETLCGGELVDTLQFVCGDRGFYFRLPGRPASRVSRRSRGIVEECCFRSCDLALLETYCATPAKSERDVSTPPTVLPDNFPRYPVGKFFQYDTWKQSTQRLRRGLPALLRARRGHVLAKELEAFREAKRHRPLIALPTQDPAHGGAPPEMASNRK

SEQ ID NO: 6776 - protein, 183 aa, Homo sapiens; identical to SEQ ID NO: 6775

SEQ ID NO: 6777 - protein, 180 aa, Homo sapiens
MGIPMGKSMLVLLTFLAFASCCIAAYRPSETLCGGELVDTLQFVCGDRGFYFSRPASRVSRRSRGIVEECCFRSCDLALLETYCATPAKSERDVSTPPTVLPDNFPRYPVGKFFQYDTWKQSTQRLRRGLPALLRARRGHVLAKELEAFREAKRHRPLIALPTQDPAHGGAPPEMASNRK

SEQ ID NO: 6778 - protein, 180 aa, Homo sapiens; identical to SEQ ID NO: 6777

SEQ ID NO: 6779 - protein, 180 aa, Homo sapiens; identical to SEQ ID NO: 6777

SEQ ID NO: 6780 - protein, 180 aa, Homo sapiens; identical to SEQ ID NO: 6777

SEQ ID NO: 6781 - protein, 180 aa, Homo sapiens; identical to SEQ ID NO: 6777

SEQ ID NO: 6782 - protein, 236 aa, Homo sapiens
MVSPDPQIIVVAPETELASMQVQRTEDGVTIIQIFWVGRKGELLRRTPVSSAMQTPMGIPMGKSMLVLLTFLAFASCCIAAYRPSETLCGGELVDTLQFVCGDRGFYFSRPASRVSRRSRGIVEECCFRSCDLALLETYCATPAKSERDVSTPPTVLPDNFPRYPVGKFFQYDTWKQSTQRLRRGLPALLRARRGHVLAKELEAFREAKRHRPLIALPTQDPAHGGAPPEMASNRK

SEQ ID NO: 6783 - protein, 643 aa, Homo sapiens
MALRKAGDLEPQFTPERRFRLCWYQAHSGRALLGPPPQASPPAGGLALALLLLSWVALGPRSLEGADPGTPGEAEGPACPAACVCSYDDDADELSVFCSSRNLTRLPDGVPGGTQALWLDGNNLSSVPPAAFQNLSSLGFLNLQGGQLGSLEPQALLGLENLCHLHLERNQLRSLALGTFAHTPALASLGLSNNRLSRLEDGLFEGLGSLWDLNLGWNSLAVLPDAAFRGLGSLRELVLAGNRLAYLQPALFSGLAELRELDLSRNALRAIKANVFVQLPRLQKLYLDRNLIAAVAPGAFLGLKALRWLDLSHNRVAGLLEDTFPGLLGLRVLRLSHNAIASLRPRTFKDLHFLEELQLGHNRIRQLAERSFEGLGQLEVLTLDHNQLQEVKAGAFLGLTNVAVMNLSGNCLRNLPEQVFRGLGKLHSLHLEGSCLGRIRPHTFTGLSGLRRLFLKDNGLVGIEEQSLWGLAELLELDLTSNQLTHLPHRLFQGLGKLEYLLLSRNRLAELPADALGPLQRAFWLDVSHNRLEALPNSLLAPLGRLRYLSLRNNSLRTFTPQPPGLERLWLEGNPWDCGCPLKALRDFALQNPSAVPRFVQAICEGDDCQPPAYTYNNITCASPPEVVGLDLRDLSEAHFAPC

SEQ ID NO: 6784 - protein, 605 aa, Homo sapiens
MALRKGGLALALLLLSWVALGPRSLEGADPGTPGEAEGPACPAACVCSYDDDADELSVFCSSRNLTRLPDGVPGGTQALWLDGNNLSSVPPAAFQNLSSLGFLNLQGGQLGSLEPQALLGLENLCHLHLERNQLRSLALGTFAHTPALASLGLSNNRLSRLEDGLFEGLGSLWDLNLGWNSLAVLPDAAFRGLGSLRELVLAGNRLAYLQPALFSGLAELRELDLSRNALRAIKANVFVQLPRLQKLYLDRNLIAAVAPGAFLGLKALRWLDLSHNRVAGLLEDTFPGLLGLRVLRLSHNAIASLRPRTFKDLHFLEELQLGHNRIRQLAERSFEGLGQLEVLTLDHNQLQEVKAGAFLGLTNVAVMNLSGNCLRNLPEQVFRGLGKLHSLHLEGSCLGRIRPHTFTGLSGLRRLFLKDNGLVGIEEQSLWGLAELLELDLTSNQLTHLPHRLFQGLGKLEYLLLSRNRLAELPADALGPLQRAFWLDVSHNRLEALPNSLLAPLGRLRYLSLRNNSLRTFTPQPPGLERLWLEGNPWDCGCPLKALRDFALQNPSAVPRFVQAICEGDDCQPPAYTYNNITCASPPEVVGLDLRDLSEAHFAPC

SEQ ID NO: 6785 - protein, 131 aa, Homo sapiens
MTVGRRLPTALHGACQEAWPWRCCCCPGWHWAPAAWREQTPERRGKPRAQRARPPVSAATMTTRMSSASSAAPGTSRACLMESRAAPKPCGWTATTSRPSPRQPSRTSPAWASSTCRAASWAAWSHRRCWA

SEQ ID NO: 6786 - protein, 216 aa, Homo sapiens
MSEVPVARVWLVLLLLTVQVGVTAGAPWQCAPCSAEKLALCPPVSASCSEVTRSAGCGCCPMCALPLGAACGVATARCARGLSCRALPGEQQPLHALTRGQGACVQESDASAPHAAEAGSPESPESTEITEEELLDNFHLMAPSEEDHSILWDAISTYDGSKALHVTNIKKWKCETSMDGEAGLCWCVYPWNGKRIPGSPEIRGDPNCQIYFNVQN

SEQ ID NO: 6787 - protein, 259 aa, Homo sapiens
MSEVPVARVWLVLLLLTVQVGVTAGAPWQCAPCSAEKLALCPPVSASCSEVTRSAGCGCCPMCALPLGAACGVATARCARGLSCRALPGEQQPLHALTRGQGACVQESDASAPHAAEAGSPESPESTEITEEELLDNFHLMAPSEEDHSILWDAISTYDGSKALHVTNIKKWKEPCRIELYRVVESLAKAQETSGEEISKFYLPNCNKNGFYHSRQCETSMDGEAGLCWCVYPWNGKRIPGSPEIRGDPNCQIYFNVQN

SEQ ID NO: 6788 - protein, 257 aa, Homo sapiens
MSEVPVARVWLVLLLLTVQVGVTAGAPWQCAPCSAEKLALCPPVSASCSEVTRSAGCGCCPMCALPLGAACGVATARCARGLSCRALPGEQQPLHALTRGQGACVQESDASAPHAAEAGSPESPESTEITEEELLDNFHLMAPSEEDHSILWDAISTYDGSKALHVTNIKKWKEPCRIELYRVVESLAKAQETSGEEISKFYLPNCNKNGFYHSRQTSMDGEAGLCWCVYPWNGKRIPGSPEIRGDPNCQIYFNVQN

SEQ ID NO: 6789 - protein, 98 aa, Homo sapiens
KHHLGLEEPKKLRPPPARQLLAELASGACFVGLLSSLRASPAVCACRLPANRNWTRSWSGSPPCAFRMSGALWSTSTPCTSPTVTSMACTTSNSARCL

SEQ ID NO: 6790 - protein, 325 aa, Homo sapiens
MLPRVGCPALPLPPPPLLPLLLLLLGASGGGGGARAEVLFRCPPCTPERLAACGPPPVAPPAAVAAVAGGARMPCAELVREPGCGCCSVCARLEGEACGVYTPRCGQGLRCYPHPGSELPLQALVMGEGTCEKRRDAEYGASPEQVADNGDDHSEGGLVENHVDSTMNMLGGGGSAGRKPLKSGMKELAVFREKVTEQHRQMGKGGKHHLGLEEPKKLRPPPARTPCQQELDQVLERISTMRLPDERGPLEHLYSLHIPNCDKHGLYNLKQCKMSLNGQRGECWCVNPNTGKLIQGAPTIRGDPECHLFYNEQQEARGVHTQRMQ

SEQ ID NO: 6791 - protein, 78 aa, Homo sapiens
MNMLGGGGSAGRKPLKSGMKELAVFREKVTEQHRQMGKGGKHHLGLEEPKKLRPPPARTPCQQELDQVLERISTMRLP

SEQ ID NO: 6792 - protein, 181 aa, Homo sapiens
MPCNNGDDHSEGGLVENHVDSTMNMLGGGGSAGRKPLKSGMKELAVFREKVTEQHRQMGKGGKHHLGLEEPKKLRPPPARTPCQQELDQVLERISTMRLPDERGPLEHLYSLHIPNCDKHGLYNLKQCKMSLNGQRGECWCVNPNTGKLIQGAPTIRGDPECHLFYNEQQEARGVHTQRMQ

SEQ ID NO: 6793 - protein, 194 aa, Homo sapiens
MQRARPLQALLDGRGLCVNASAVSRLRAYLLPAPPAPGNASESEEDRSAGSVESPSVSSTHRVSDPKFHPLHSKIIIIKKGHAKDSQRYKVDYESQSTDTQNFSSESKRETEYGPCRREMEDTLNHLKFLNVLSPRGVHIPNCDKKGFYKKKQCRPSKGRKRGFCWCVDKYGQPLPGYTTKGKEDVHCYSMQSK

SEQ ID NO: 6794 - protein, 297 aa, Homo sapiens
MQRARPTLWAAALTLLVLLRGPPVARAGASSAGLGPVVRCEPCDARALAQCAPPPAVCAELVREPGCGCCLTCALSEGQPCGIYTERCGSGLRCQPSPDEARPLQALLDGRGLCVNASAVSRLRAYLLPAPPAPGEPPAPGNASESEEDRSAGSVESPSVSSTHRVSDPKFHPLHSKIIIIKKGHAKDSQRYKVDYESQSTDTQNFSSESKRETEYGPCRREMEDTLNHLKFLNVLSPRGVHIPNCDKKGFYKKKQCRPSKGRKRGFCWCVDKYGQPLPGYTTKGKEDVHCYSMQSK

SEQ ID NO: 6795 - protein, 291 aa, Homo sapiens
MQRARPTLWAAALTLLVLLRGPPVARAGASSAGLGPVVRCEPCDARALAQCAPPPAVCAELVREPGCGCCLTCALSEGQPCGIYTERCGSGLRCQPSPDEARPLQALLDGRGLCVNASAVSRLRAYLLPAPPAPGNASESEEDRSAGSVESPSVSSTHRVSDPKFHPLHSKIIIIKKGHAKDSQRYKVDYESQSTDTQNFSSESKRETEYGPCRREMEDTLNHLKFLNVLSPRGVHIPNCDKKGFYKKKQCRPSKGRKRGFCWCVDKYGQPLPGYTTKGKEDVHCYSMQSK

SEQ ID NO: 6796 - protein, 270 aa, Homo sapiens
MQRARPTLWAAALTLLVRCEPCDARALAQCAPPPAVCAELVREPGCGCCLTCALSEGQPCGIYTERCGSGLRCQPSPDEARPLQALLDGRGLCVNASAVSRLRAYLLPAPPAPGNASESEEDRSAGSVESPSVSSTHRVSDPKFHPLHSKIIIIKKGHAKDSQRYKVDYESQSTDTQNFSSESKRETEYGPCRREMEDTLNHLKFLNVLSPRGVHIPNCDKKGFYKKKQCRPSKGRKRGFCWCVDKYGQPLPGYTTKGKEDVHCYSMQSK

SEQ ID NO: 6797 - protein, 263 aa, Homo sapiens
MQRARPTLWAACEPCDARALAQCAPPPAVCAELVREPGCGCCLTCALSEGQPCGIYTERCGSGLRCQPSPDEARPLQALLDGRGLCVNASAVSRLRAYLLPAPPAPGNASESEEDRSAGSVESPSVSSTHRVSDPKFHPLHSKIIIIKKGHAKDSQRYKVDYESQSTDTQNFSSESKRETEYGPCRREMEDTLNHLKFLNVLSPRGVHIPNCDKKGFYKKKQCRPSKGRKRGFCWCVDKYGQPLPGYTTKGKEDVHCYSMQSK

SEQ ID NO: 6798 - protein, 132 aa, Homo sapiens
MRSAVCQFPRHRLAAGRPHPESGRGNASESEEDRSAGSVESPSVSSTHRVSDPKFHPLHSKIIIIKKGHAKDSQRYKVDYESQSTDTQNFSSESKRETEYGPCRREMEDTLNHLKFLNVLSPRGVHIPNCDK

SEQ ID NO: 6799 - protein, 143 aa, Homo sapiens
  VARIANT 1: note = misc_feature - Xaa can be any naturally occurring amino acid
XESPSVSSTHRVSDPKFHPLHSKIIIIKKGHAKDSQRYKVDYESQSTDTQNFSSESKRETEYGPCRREMEDTLNHLKFLNVLSPRGVHIPNCDKKGFYKKKQCRPSKGRKRGFCWCVDKYGQPLPGYTTKGKEDVHCYSMQSK

SEQ ID NO: 6800 - protein, 153 aa, Homo sapiens
  VARIANT 1: note = misc_feature - Xaa can be any naturally occurring amino acid
XSEEDRSAGSVESPSVSSTHRVSDPKFHPLHSKIIIIKKGHAKDSQRYKVDYESQSTDTQNFSSESKRETEYGPCRREMEDTLNHLKFLNVLSPRGVHIPNCDKKGFYKKKQCRPSKGRKRGFCWCVDKYGQPLPGYTTKGKEDVHCYSMQSK

SEQ ID NO: 6801 - protein, 258 aa, Homo sapiens
MLPLCLVAALLLAAGPGPSLGDEAIHCPPCSEEKLARCRPPVGCEELVREPGCGCCATCALGLGMPCGVYTPRCGSGLRCYPPRGVEKPLHTLMHGQGVCMELAEIEAIQESLQPSDKDEGDHPNNSFSPCSAHDRRCLQKHFAKIRDRSTSGGKMKVNGAPREDARPVPQGSCQSELHRALERLAASQSRTHEDLYIIPIPNCDRNGNFHPKQCHPALDGQRGKCWCVDRKTGVKLPGGLEPKGELDCHQLADSFRE

SEQ ID NO: 6802 - protein, 272 aa, Homo sapiens
MVLLTAVLLLLAAYAGPAQSLGSFVHCEPCDEKALSMCPPSPLGCELVKEPGCGCCMTCALAEGQSCGVYTERCAQGLRCLPRQDEEKPLHALLHGRGVCLNEKSYREQVKIERDSREHEEPTTSEMAEETYSPKIFRPKHTRISELKAEAVKKDRRKKLTQSKFVGGAENTAHPRIISAPEMRQESEQGPCRRHMEASLQELKASPRMVPRAVYLPNCDRKGFYKRKQCKPSRGRKRGICWCVDKYGMKLPGMEYVDGDFQCHTFDSSNVE

SEQ ID NO: 6803 - protein, 233 aa, Homo sapiens
MVLLTAVLLLLAAYAGPAQSLGSFVHCEPCDEKALSMCPPSPLGCELVKEPGCGCCMTCALAEGQSCGVYTERCAQGLRCLPRQDEEKPLHALLHGRGVCLNEKSYREQVKIGCAPGGQRHICFSLYYSPHPKLPSPGLWPCAPWPTGADPPAPSPAERDSREHEEPTTSEMAEETYSPKIFRPKHTRISELKAEAVKKDRRKKLTQSKFVGGAENTAHPRIISAPEMRQESE

SEQ ID NO: 6804 - protein, 238 aa, Homo sapiens
MTPHRLLPPLLLLLALLLAASPGGALARCPGCGQGVQAGCPGGCVEEEDGGSPAEGCAEAEGCLRREGQECGVYTPNCAPGLQCHPPKDDEAPLRALLLGRGRCLPARAPAEENPKESKPQAGTARPQDVNRRDQQRNPGTSTTPSQPNSAGVQDTEMGPCRRHLDSVLQQLQTEVYRGAQTLYVPNCDHRGFYRKRQCRSSQGQRRGPCWCVDRMGKSLPGSPDGNGSSSCPTGSSG

SEQ ID NO: 6805 - protein, 240 aa, Homo sapiens
MTPHRLLPPLLLLLALLLAASPGGALARCPGCGQGVQAGCPGGCVEEEDGGSPAEGCAEAEGCLRREGQECGVYTPNCAPGLQCHPPKDDEAPLRALLLGRGRCLPARAPAVAEENPKESKPQAGTARPQDVNRRDQQRNPGTSTTPSQPNSAGVQDTEMGPCRRHLDSVLQQLQTEVYRGAQTLYVPNCDHRGFYRKRQCRSSQGQRRGPCWCVDRMGKSLPGSPDGNGSSSCPTGSSG

SEQ ID NO: 6806 - protein, 136 aa, Homo sapiens
MTPHRLLPPLLLLLALLLAASPGGALARCPGCGQGVQAGCPGGCVEEEDGGSPAEGCAEAEGCLRREGQECGVYTPNCAPGLQCHPPKDDEAPLRALLLGRGRCLPARAPAVLSSPRTLRKLSPEPGATCSCRGES

SEQ ID NO: 6807 - protein, 282 aa, Homo sapiens
MERPSLRALLLGAAGLLLLLLPLSSSSSSDTCGPCEPASCPPLPPLGCLLGETRDACGCCPMCARGEGEPCGGGGAGRGYCAPGMECVKSRKRRKGKAGAAAGGPGVSGVCVCKSRYPVCGSDGTTYPSGCQLRAASQRAESRGEKAITQVSKGTCEQGPSIVTPPKDIWNVTGAQVYLSCEVIGIPTPVLIWNKVKRGHYGVQRTELLPGDRDNLAIQTRGGPEKHEVTGWVLVSPLSKEDAGEYECHASNSQGQASASAKITVVDALHEIPVKKGEGAEL

SEQ ID NO: 6808 - protein, 279 aa, Homo sapiens
MERPSLRALLLGAAGLLLLLLPLSSSSSSDTCGPCEPASCPPLPPLGCLLGETRDACGCCPMCARGEGEPCGGGGAGRGYCAPGMECVKSRKRRKGKAGAAAGGPGVSGVCVCKSRYPVCGSDGTTYPSGCQLRAASQRAESRGEKAITQVSKGTCEQGPSIVTPPKDIWNVTGAQVYLSCEVIGIPTPVLIWNKVKRGHYGVQRTELLPGDRDNLAIQTRGGPEKHEVTGWVLVSPLSKEDAGEYECHASNSQGQASASAKITVVDALHEIPVKKGTQ

SEQ ID NO: 6809 - protein, 278 aa, Homo sapiens
MPRLSLLLPLLLLLLLPLLPPLSPSLGIRDVGGRRPKCGPCRPEGCPAPAPCPAPGISALDECGCCARCLGAEGASCGGRAGGRCGPGLVCASQAAGAAPEGTGLCVCAQRGTVCGSDGRSYPSVCALRLRARHTPRAHPGHLHKARDGPCEFAPVVVVPPRSVHNVTGAQVGLSCEVRAVPTPVITWRKVTKSPEGTQALEELPGDHVNIAVQVRGGPSDHEATAWILINPLRKEDEGVYQCHAANMVGEAESHSTVTVLDLSKYRSFHFPAPDDRM

SEQ ID NO: 6810 - protein, 110 aa, Homo sapiens
MAPRGCIVAVFAIFCISRLLCSHGAPVAPMTPYLMLCQPHKRCGDKFYDPLQHCCYDDAVVPLARTQTCGNCTFRVCFEQCCPWTFMVKLINQNCDSARTSDDRLCRSVS

SEQ ID NO: 6811 - protein, 130 aa, Homo sapiens
MRFSVSGMRTDYPRSVLAPAYVSVCLLLLCPREVIAPAGSEPWLCQPAPRCGDKIYNPLEQCCYNDAIVSLSETRQCGPPCTFWPCFELCCLDSFGLTNDFVVKLKVQGVNSQCHSSPISSKCESRRRFP

SEQ ID NO: 6812 - protein, 119 aa, Homo sapiens
MVPRIFAPAYVSVCLLLLCPREVIAPAGSEPWLCQPAPRCGDKIYNPLEQCCYNDAIVSLSETRQCGPPCTFWPCFELCCLDSFGLTNDFVVKLKVQGVNSQCHSSPISSKCESRRRFP

SEQ ID NO: 6813 - protein, 84 aa, Homo sapiens
QPAPRCGDKIYNPLEQCCYNDAIVSLSETRQCGPPCTFWPCFELCCLDSFGLTNDFVVKLKVQGVNSQCHSSPISSKCERRRFP

SEQ ID NO: 6814 - protein, 125 aa, Homo sapiens
MRPRCCILALVCWITVFLLQCSKGTTDAPVGSGLWLCQPTPRCGNKIYNPSEQCCYDDAILSLKETRRCGSTCTFWPCFELCCPESFGPQQKFLVKLRVLGMKSQCHLSPISRSCTRNRRHVLYP

SEQ ID NO: 6815 - protein, 16 aa, Homo sapiens
MGPGRCLLTALLLLAL

SEQ ID NO: 6816 - protein, 132 aa, Homo sapiens
MGPGRCLLTALLLLALAPPPEASQYCGRLEYWNPDNKCCSSCLQRFGPPPCPDYEFRENCGLNDHGDFVTPPFRKCSSGQCNPDGAELCSPCGGGAVTPTPAAGGGRTPWRCREAGPCQGALPPHTWKPRRP

SEQ ID NO: 6817 - protein, 138 aa, Homo sapiens
MGPGRCLLTALLLLALAPPPEASQYCGRLEYWNPDNKCCSSCLQRFGPPPCPDYEFRENCGLNDHGDFVTPPFRKCSSGQCNPDGAELCSPCGGGAVTPTPAAGGGRTPWRCRERPVPAKGHCPLTPGNPGAPSSQER

SEQ ID NO: 6818 - protein, 355 aa, Homo sapiens
MGPGRCLLTALLLLALAPPPEASQYCGRLEYWNPDNKCCSSCLQRFGPPPCPDYEFRENCGLNDHGDFVTPPFRKCSSGQCNPDGAELCSPCGGGAVTPTPAAGGGRTPWRCRERPVPAKGHCPLTPGNPGAPSSQERSSPASSIAWRTPEPVPQQAWPNFLPLVVLVLLLTLAVIAILLFILLWHLCWPKEKADPYPYPGLVCGVPNTHTPSSSHLSSPGALETGDTWKEASLLPLLSRELSSLASQPLSRLLDELEVLEELIVLLDPEPGPGGGMAHGTTRHLAARYGLPAAWSTFAYSLRPSRSPLRALIEMVVAREPSASLGQLGTHLAQLGRADALRVLSKLGSSGVCWA

SEQ ID NO: 6819 - protein, 355 aa, Homo sapiens; identical to SEQ ID NO: 6818

SEQ ID NO: 6820 - protein, 167 aa, Homo sapiens
MGPGRCLLTALLLLALAPPPEASQYCGRLEYWNPDNKCCSSCLQRFGPPPCPELSSLASQPLSRLLDELEVLEELIVLLDPEPGPGGGMAHGTTRHLAARYGLPAAWSTFAYSLRPSRSPLRALIEMVVAREPSASLGQLGTHLAQLGRADALRVLSKLGSSGVCWA

SEQ ID NO: 6821 - protein, 187 aa, Homo sapiens
MGPGRCLLTALLLLALAPPPEASQYCGRLEYWNPDNKCCSSCLQRFGPPPCPGALETGDTWKEASLLPLLSRELSSLASQPLSRLLDELEVLEELIVLLDPEPGPGGGMAHGTTRHLAARYGLPAAWSTFAYSLRPSRSPLRALIEMVVAREPSASLGQLGTHLAQLGRADALRVLSKLGSSGVCWA

SEQ ID NO: 6822 - protein, 60 aa, Homo sapiens
  VARIANT 1: note = misc_feature - Xaa can be any naturally occurring amino acid
XGRLEYWNPDNKCCSSCLQRFGPPPCPGENPRPSLAWAELAEAGPCQGALPPHTWKPRRP

SEQ ID NO: 6823 - protein, 74 aa, Homo sapiens
  VARIANT 1: note = misc_feature - Xaa can be any naturally occurring amino acid
XNCGLNDHGDFVTPPFRKCSSGQCNPDGAELCSPCGGGAVTPTPAAGGGRTPWRCREAPWRQGTHGRRPHYFHS

SEQ ID NO: 6824 - protein, 53 aa, Homo sapiens
MCSYYHMKKRSVSGCNITIFAVMFSHLSAGKSPCGNQANVLCISRLEFVQYQS

SEQ ID NO: 6825 - protein, 336 aa, Homo sapiens
MPPPAPGARLRLLAAAALAGLAVISRGLLSQSLEFNSPADNYTVCEGDNATLSCFIDEHVTRVAWLNRSNILYAGNDRWTSDPRVRLLINTPEEFSILITEVGLGDEGLYTCSFQTRHQPYTTQVYLIVHVPARIVNISSPVTVNEGGNVNLLCLAVGRPEPTVTWRQLRDGFTSEGEILEISDIQRGQAGEYECVTHNGVNSAPDSRRVLVTVNYPPTITDVTSARTALGRAALLRCEAMAVPPADFQWYKDDRLLSSGTAEGLKVQTERTRSMLLFANVSARHYGNYTCRAANRLGASSASMRLLRPGSLENSAPRPPGLLALLSALGWLWWRM

SEQ ID NO: 6826 - protein, 1327 aa, Homo sapiens
MTLDRPGEGATMLKTFTVLLFCILMDPQPELWIESNYPQAPWENITLWCRSPSRISSKFLLLKDKTQMTWIRPSHKTFQVSFLIGALTESNAGLYRCCYWKETGWSKPSKVLELEAPGQLPKPIFWIQAETPALPGCNVNILCHGWLQDLVFMLFKEGYAEPVDYQVPTGTMAIFSIDNLTPEDEGVYICRTHIQMLPTLWSEPSNPLKLVVAGLYPKPTLTAHPGPIMAPGESLNLRCQGPIYGMTFALMRVEDLEKSFYHKKTIKNEANFFFQSLKIQDTGHYLCFYYDASYRGSLLSDVLKIWVTDTFPKTWLLARPSAVVQMGQNVSLRCRGPVDGVGLALYKKGEDKPLQFLDATSIDDNTSFFLNNVTYSDTGIYSCHYLLTWKTSIRMPSHNTVELMVVDKPPKPSLSAWPSTVFKLGKAITLQCRVSHPVLEFSLEWEERETFQKFSVNGDFIISNVDGKGTGTYSCSYRVETHPNIWSHRSEPLKLMGPAGYLTWNYVLNEAIRLSLIMQLVALLLVVLWIRWKCRRLRIREAWLLGTAQGVTMLFIVTALLCCGLCNGVLIEETEIVMPTPKPELWAETNFPLAPWKNLTLWCRSPSGSTKEFVLLKDGTGWIATRPASEQVRAAFPLGALTQSHTGSYHCHSWEEMAVSEPSEALELVGTDILPKPVISASPTIRGQELQLRCKGWLAGMGFALYKEGEQEPVQQLGAVGREAFFTIQRMEDKDEGNYSCRTHTEKRPFKWSEPSEPLELVIKEMYPKPFFKTWASPVVTPGARVTFNCSTPHQHMSFILYKDGSEIASSDRSWASPGASAAHFLIISVGIGDGGNYSCRYYDFSIWSEPSDPVELVVTEFYPKPTLLAQPGPVVFPGKSVILRCQGTFQGMRFALLQEGAHVPLQFRSVSGNSADFLLHTVGAEDSGNYSCIYYETTMSNRGSYLSMPLMIWVTDTFPKPWLFAEPSSVVPMGQNVTLWCRGPVHGVGYILHKEGEATSMQLWGSTSNDGAFPITNISGTSMGRYSCCYHPDWTSSIKIQPSNTLELLVTGLLPKPSLLAQPGPMVAPGENMTLQCQGELPDSTFVLLKEGAQEPLEQQRPSGYRADFWMPAVRGEDSGIYSCVYYLDSTPFAASNHSDSLEIWVTDKPPKPSLSAWPSTMFKLGKDITLQCRGPLPGVEFVLEHDGEEAPQQFSEDGDFVINNVEGKGIGNYSCSYRLQAYPDIWSEPSDPLELVGAAGPVAQECTVGNIVRSSLIVVVVVALGVVLAIEWKKWPRLRTRGSETDGRDQTIALEECNQEGEPGTPANSPSSTSQRISVELPVPI

SEQ ID NO: 6827 - protein, 1327 aa, Homo sapiens; identical to SEQ ID NO: 6826

SEQ ID NO: 6828 - protein, 242 aa, Homo sapiens
MTLDRPGEGATMLKTFTVLLFCIRMSLGMTSIVMDPQPELWIESNYPQAPWENITLWCRSPSRISSKFLLLKDKTQMTWIRPSHKTFQVSFLIGALTESNAGLYRCCYWKETGWSKPSKVLELEAPGQLPKPIFWIQAETPALPGCNVNILCHGWLQDLVFMLFKEGYAEPVDYQVPTGTMAIFSIDNLTPEDEGVYICRTHIQMLPTLWSEPSNPLKLVVAGGCGYGCWHLAIVVPGIMAG

SEQ ID NO: 6829 - protein, 242 aa, Homo sapiens; identical to SEQ ID NO: 6828

SEQ ID NO: 6830 - protein, 1341 aa, Homo sapiens
MTLDRPGEGATMLKTFTVLLFCIRMSLGMTSIVMDPQPELWIESNYPQAPWENITLWCRSPSRISSKFLLLKDKTQMTWIRPSHKTFQVSFLIGALTESNAGLYRCCYWKETGWSKPSKVLELEAPGQLPKPIFWIQAETPALPGCNVNILCHGWLQDLVFMLFKEGYAEPVDYQVPTGTMAIFSIDNLTPEDEGVYICRTHIQMLPTLWSEPSNPLKLVVAGLYPKPTLTAHPGPIMAPGESLNLRCQGPIYGMTFALMRVEDLEKSFYHKKTIKNEANFFFQSLKIQDTGHYLCFYYDASYRGSLLSDVLKIWVTDTFPKTWLLARPSAVVQMGQNVSLRCRGPVDGVGLALYKKGEDKPLQFLDATSIDDNTSFFLNNVTYSDTGIYSCHYLLTWKTSIRMPSHNTVELMVVDKPPKPSLSAWPSTVFKLGKAITLQCRVSHPVLEFSLEWEERETFQKFSVNGDFIISNVDGKGTGTYSCSYRVETHPNIWSHRSEPLKLMGPAGYLTWNYVLNEAIRLSLIMQLVALLLVVLWIRWKCRRLRIREAWLLGTAQGVTMLFIVTALLCCAISFAGLCNGVLIEETEIVMPTPKPELWAETNFPLAPWKNLTLWCRSPSGSTKEFVLLKDGTGWIATRPASEQVRAAFPLGALTQSHTGSYHCHSWEEMAVSEPSEALELVGTDILPKPVISASPTIRGQELQLRCKGWLAGMGFALYKEGEQEPVQQLGAVGREAFFTIQRMEDKDEGNYSCRTHTEKRPFKWSEPSEPLELVIKEMYPKPFFKTWASPVVTPGARVTFNCSTPHQHMSFILYKDGSEIASSDRSWASPGASAAHFLIISVGIGDGGNYSCRYYDFSIWSEPSDPVELVVTEFYPKPTLLAQPGPVVFPGKSVILRCQGTFQGMRFALLQEGAHVPLQFRSVSGNSADFLLHTVGAEDSGNYSCIYYETTMSNRGSYLSMPLMIWVTDTFPKPWLFAEPSSVVPMGQNVTLWCRGPVHGVGYILHKEGEATSMQLWGSTSNDGAFPITNISGTSMGRYSCCYHPDWTSSIKIQPSNTLELLVTGLLPKPSLLAQPGPMVAPGENMTLQCQGELPDSTFVLLKEGAQEPLEQQRPSGYRADFWMPAVRGEDSGIYSCVYYLDSTPFAASNHSDSLEIWVTDKPPKPSLSAWPSTMFKLGKDITLQCRGPLPGVEFVLEHDGEEAPQQFSEDGDFVINNVEGKGIGNYSCSYRLQAYPDIWSEPSDPLELVGAAGPVAQECTVGNIVRSSLIVVVVVALGVVLAIEWKKWPRLRTRGSETDGRDQTIALEECNQEGEPGTPANSPSSTSQRISVELPVPI

SEQ ID NO: 6831 - protein, 1336 aa, Homo sapiens
MTLDRPGEGATMLKTFTVLLFCIRMSLGMTSIVMDPQPELWIESNYPQAPWENITLWCRSPSRISSKFLLLKDKTQMTWIRPSHKTFQVSFLIGALTESNAGLYRCCYWKETGWSKPSKVLELEAPGQLPKPIFWIQAETPALPGCNVNILCHGWLQDLVFMLFKEGYAEPVDYQVPTGTMAIFSIDNLTPEDEGVYICRTHIQMLPTLWSEPSNPLKLVVAGLYPKPTLTAHPGPIMAPGESLNLRCQGPIYGMTFALMRVEDLEKSFYHKKTIKNEANFFFQSLKIQDTGHYLCFYYDASYRGSLLSDVLKIWVTDTFPKTWLLARPSAVVQMGQNVSLRCRGPVDGVGLALYKKGEDKPLQFLDATSIDDNTSFFLNNVTYSDTGIYSCHYLLTWKTSIRMPSHNTVELMVVDKPPKPSLSAWPSTVFKLGKAITLQCRVSHPVLEFSLEWEERETFQKFSVNGDFIISNVDGKGTGTYSCSYRVETHPNIWSHRSEPLKLMGPAGYLTWNYVLNEAIRLSLIMQLVALLLVVLWIRWKCRRLRIREAWLLGTAQGVTMLFIVTALLCCGLCNGVLIEETEIVMPTPKPELWAETNFPLAPWKNLTLWCRSPSGSTKEFVLLKDGTGWIATRPASEQVRAAFPLGALTQSHTGSYHCHSWEEMAVSEPSEALELVGTDILPKPVISASPTIRGQELQLRCKGWLAGMGFALYKEGEQEPVQQLGAVGREAFFTIQRMEDKDEGNYSCRTHTEKRPFKWSEPSEPLELVIKEMYPKPFFKTWASPVVTPGARVTFNCSTPHQHMSFILYKDGSEIASSDRSWASPGASAAHFLIISVGIGDGGNYSCRYYDFSIWSEPSDPVELVVTEFYPKPTLLAQPGPVVFPGKSVILRCQGTFQGMRFALLQEGAHVPLQFRSVSGNSADFLLHTVGAEDSGNYSCIYYETTMSNRGSYLSMPLMIWVTDTFPKPWLFAEPSSVVPMGQNVTLWCRGPVHGVGYILHKEGEATSMQLWGSTSNDGAFPITNISGTSMGRYSCCYHPDWTSSIKIQPSNTLELLVTGLLPKPSLLAQPGPMVAPGENMTLQCQGELPDSTFVLLKEGAQEPLEQQRPSGYRADFWMPAVRGEDSGIYSCVYYLDSTPFAASNHSDSLEIWVTDKPPKPSLSAWPSTMFKLGKDITLQCRGPLPGVEFVLEHDGEEAPQQFSEDGDFVINNVEGKGIGNYSCSYRLQAYPDIWSEPSDPLELVGAAGPVAQECTVGNIVRSSLIVVVVVALGVVLAIEWKKWPRLRTRGSETDGRDQTIALEECNQEGEPGTPANSPSSTSQRISVELPVPI

SEQ ID NO: 6832 - protein, 2623 aa, Homo sapiens
MKVKGRGITCLLVSFAVICLVATPGGKACPRRCACYMPTEVHCTFRYLTSIPDSIPPNVERINLGYNSLVRLMETDFSGLTKLELLMLHSNGIHTIPDKTFSDLQALQVLKMSYNKVRKLQKDTFYGLRSLTRLHMDHNNIEFINPEVFYGLNFLRLVHLEGNQLTKLHPDTFVSLSYLQIFKISFIKFLYLSDNFLTSLPQEMVSYMPDLDSLYLHGNPWTCDCHLKWLSDWIQEKPDVIKCKKDRSPSSAQQCPLCMNPRTSKGKPLAMVSAAAFQCAKPTIDSSLKSKSLTILEDSSSAFISPQGFMAPFGSLTLNMTDQSGNEANMVCSIQKPSRTSPIAFTEENDYIVLNTSFSTFLVCNIDYGHIQPVWQILALYSDSPLILERSHLLSETPQLYYKYKQVAPKPEDIFTNIEADLRADPSWLMQDQISLQLNRTATTFSTLQIQYSSDAQITLPRAEMRPVKHKWTMISRDNNTKLEHTVLVGGTVGLNCPGQGDPTPHVDWLLADGSKVRAPYVSEDGRILIDKSGKLELQMADSFDTGVYHCISSNYDDADILTYRITVVEPLVEAYQENGIHHTVFIGETLDLPCHSTGIPDASISWVIPGNNVLYQSSRDKKVLNNGTLRILQVTPKDQGYYRCVAANPSGVDFLIFQVSVKMKGQRPLEHDGETEGSGLDESNPIAHLKEPPGAQLRTSALMEAEVGKHTSSTSKRHNYRELTLQRRGDSTHRRFRENRRHFPPSARRIDPQHWAALLEKAKKNAMPDKRENTTVSPPPVVTQLPNIPGEEDDSSGMLALHEEFMVPATKALNLPARTVTADSRTISDSPMTNINYGTEFSPVVNSQILPPEEPTDFKLSTAIKTTAMSKNINPTMSSQIQGTTNQHSSTVFPLLLGATEFQDSDQMGRGREHFQSRPPITVRTMIKDVNVKMLSSTTNKLLLESVNTTNSHQTSVREVSEPRHNHFYSHTTQILSTSTFPSDPHTAAHSQFPIPRNSTVNIPLFRRFGRQRKIGGRGRIISPYRTPVLRRHRYSIFRSTTRGSSEKSTTAFSATVLNVTCLSCLPRERLTTATAALSFPSAAPITFPKADIARVPSEESTTLVQNPLLLLENKPSVEKTTPTIKYFRTEISQVTPTGAVMTYAPTSIPMEKTHKVNASYPRVSSTNEAKRDSVITSSLSGAITKPPMTIIAITRFSRRKIPWQQNFVNNHNPKGRLRNQHKVSLQKSTAVMLPKTSPALPRDKVSPFHFTTLSTSVMQIPSNTLTTAHHTTTKTHNPGSLPTKKELPFPPLNPMLPSIISKDSSTKSIISTQTAIPATTPTFPASVITYETQTERSRAQTIQREQEPQKKNRTDPNISPDQSSGFTTPTAMTPPVLTTAETSVKPSVSAFTHSPPENTTGISSTISFHSRTLNLTDVIEELAQASTQTLKSTIASETTLSSKSHQSTTTRKAIIRHSTIPPFLSSSATLMPVPISPPFTQRAVTDNVATPISGLMTNTVVKLHESSRHNAKPQQLVAEVATSPKVHPNAKFTIGTTHFIYSNLLHSTPMPALTTVKSQNSKLTPSPWAENQFWHKPYSEIAEKGKKPEVSMLATTGLSEATTLVSDWDGQKNTKKSDFDKKPVQEATTSKLLPFDSLSRYIFEKPRIVGGKAASFTIPANSDAFLPCEAVGNPLPTIHWTRVPSGLDLSKRKQNSRVQVLPNGTLSIQRVEIQDRGQYLCSASNLFGTDHLHVTLSVVSYPPRILERRTKEITVHSGSTVELKCRAEGRPSPTVTWILANQTVVSESSQGSRQAVVTVDGTLVLHNLSIYDRGFYKCVASNPGGQDSLLVKIQVIAAPPVILEQRRQVIVGTWGESLKLPCTAKGTPQPSVYWVLSDGTEVKPLQFTNSKLFLFSNGTLYIRNLASSDRGTYECIATSSTGSERRVVMLTMEERVTSPRIEAASQKRTEVNFGDKLLLNCSATGEPKPQIMWRLPSKAVVDQQHRVGSWIHVYPNGSLFIGSVTEKDSGVYLCVARNKMGDDLILMHVSLRLKPAKIDHKQYFRKQVLHGKDFQVDCKASGSPVPEISWSLPDGTMINNAMQADDSGHRTRRYTLFNNGTLYFNKVGVAEEGDYTCYAQNTLGKDEMKVHLTVITAAPRIRQSNKTNKRIKAGDTAVLDCEVTGDPKPKIFWLLPSNDMISFSIDRYTFHANGSLTINKVKLLDSGEYVCVARNPSGDDTKMYKLDVVSKPPLINGLYTNRTVIKATAVRHSKKHFDCRAEGTPSPEVMWIMPDNIFLTAPYYGSRITVHKNGTLEIRNVRLSDSADFICVARNEGGESVLVVQLEVLEMLRRPTFRNPFNEKIVAQLGKSTALNCSVDGNPPPEIIWILPNGTRFSNGPQSYQYLIASNGSFIISKTTREDAGKYRCAARNKVGYIEKLVILEIGQKPVILTYAPGTVKGISGESLSLHCVSDGIPKPNIKWTMPSGYVVDRPQINGKYILHDNGTLVIKEATAYDRGNYICKAQNSVGHTLITVPVMIVAYPPRITNRPPRSIVTRTGAAFQLHCVALGVPKPEITWEMPDHSLLSTASKERTHGSEQLHLQGTLVIQNPQTSDSGIYKCTAKNPLGSDYAATYIQVI

SEQ ID NO: 6833 - protein, 86 aa, Homo sapiens
TMEERVTSPRIEAASQKRTEVNFGDKLLLNCSATGEPKPQIMWRLPSKAVVDQQHRILDFYFSEAEAMPCSCCNHKTEYPAYYCQV

SEQ ID NO: 6834 - protein, 406 aa, Homo sapiens
MSLVELLLWWNCFSRTGVAASLEVSESPGSIQVARGQPAVLPCTFTTSAALINLNVIWMVTPLSNANQPEQVILYQGGQMFDGAPRFHGRVGFTGTMPATNVSIFINNTQLSDTGTYQCLVNNLPDIGGRNIGVTGLTVLVPPSAPHCQIQGSQDIGSDVILLCSSEEGIPRPTYLWEKLDNTLKLPPTATQDQVQGTVTIRNISALSSAQPRNIGLIAGAIGTGAVIIIFCIALILGAFFYWRSKNKEEEEEEIPNEIREDDLPPKCSSAKAFHTEISSSDNNTLTSSNAYNSRYWSNNPKVHRNTESVSHFSDLGQSFSFHSGNANIPSIYANGTHLVPGQHKTLVVTANRGSSPQVMSRSNGSVSRKPRPPHTHSYTISHATLERIGAVPVMVPAQSRAGSLV

SEQ ID NO: 6835 - protein, 430 aa, Homo sapiens
MSLVELLLWWNCFSRTGVAASLEVSESPGSIQVARGQPAVLPCTFTTSAALINLNVIWMVTPLSNANQPEQVILYQGGQMFDGAPRFHGRVGFTGTMPATNVSIFINNTQLSDTGTYQCLVNNLPDIGGRNIGVTGLTVLVPPSAPHCQIQGSQDIGSDVILLCSSEEGIPRPTYLWEKLDNTLKLPPTATQDQVQGTVTIRNISALSSGLYQCVASNAIGTSTCLLDLQVISPQPRNIGLIAGAIGTGAVIIIFCIALILGAFFYWRSKNKEEEEEEIPNEIREDDLPPKCSSAKAFHTEISSSDNNTLTSSNAYNSRYWSNNPKVHRNTESVSHFSDLGQSFSFHSGNANIPSIYANGTHLVPGQHKTLVVTANRGSSPQVMSRSNGSVSRKPRPPHTHSYTISHATLERIGAVPVMVPAQSRAGSLV

SEQ ID NO: 6836 - protein, 430 aa, Homo sapiens; identical to SEQ ID NO: 6835

SEQ ID NO: 6837 - protein, 407 aa, Homo sapiens
MTSQRSPLAPLLLLSLHGVAASLEVSESPGSIQVARGQPAVLPCTFTTSAALINLNVIWMVTPLSNANQPEQVILYQGGQMFDGAPRFHGRVGFTGTMPATNVSIFINNTQLSDTGTYQCLVNNLPDIGGRNIGVTGLTVLVPPSAPHCQIQGSQDIGSDVILLCSSEEGIPRPTYLWEKLDNTLKLPPTATQDQVQGTVTIRNISALSSAQPRNIGLIAGAIGTGAVIIIFCIALILGAFFYWRSKNKEEEEEEIPNEIREDDLPPKCSSAKAFHTEISSSDNNTLTSSNAYNSRYWSNNPKVHRNTESVSHFSDLGQSFSFHSGNANIPSIYANGTHLVPGQHKTLVVTANRGSSPQVMSRSNGSVSRKPRPPHTHSYTISHATLERIGAVPVMVPAQSRAGSLV

SEQ ID NO: 6838 - protein, 431 aa, Homo sapiens
MTSQRSPLAPLLLLSLHGVAASLEVSESPGSIQVARGQPAVLPCTFTTSAALINLNVIWMVTPLSNANQPEQVILYQGGQMFDGAPRFHGRVGFTGTMPATNVSIFINNTQLSDTGTYQCLVNNLPDIGGRNIGVTGLTVLVPPSAPHCQIQGSQDIGSDVILLCSSEEGIPRPTYLWEKLDNTLKLPPTATQDQVQGTVTIRNISALSSGLYQCVASNAIGTSTCLLDLQVISPQPRNIGLIAGAIGTGAVIIIFCIALILGAFFYWRSKNKEEEEEEIPNEIREDDLPPKCSSAKAFHTEISSSDNNTLTSSNAYNSRYWSNNPKVHRNTESVSHFSDLGQSFSFHSGNANIPSIYANGTHLVPGQHKTLVVTANRGSSPQVMSRSNGSVSRKPRPPHTHSYTISHATLERIGAVPVMVPAQSRAGSLV

SEQ ID NO: 6839 - protein, 403 aa, Homo sapiens
MTSQRSPLAPLLLLSLHGVAASLEVSESPGSIQVARGQPAVLPCTFTTSAALINLNVIWMVTPLSNANQPEQVILYQGGQMFDGAPRFHGRVGFTGTMPATNVSIFINNTQLSDTGTYQCLVNNLPDIGGRNIGVTGLTVLVPPSAPHCQIQGSQDIGSDVILLCSSEEGIPRPTYLWEKLDNTLKLPPTATQDQVQGTVTIRNISALSSGLYQCVASNAIGTSTCLLDLQVISRAFFYWRSKNKEEEEEEIPNEIREDDLPPKCSSAKAFHTEISSSDNNTLTSSNAYNSRYWSNNPKVHRNTESVSHFSDLGQSFSFHSGNANIPSIYANGTHLVPGQHKTLVVTANRGSSPQVMSRSNGSVSRKPRPPHTHSYTISHATLERIGAVPVMVPAQSRAGSLV

SEQ ID NO: 6840 - protein, 33 aa, Homo sapiens
MVTPLSNANQPEQVILYQGGQMFDGAPRFHGRV

SEQ ID NO: 6841 - protein, 59 aa, Homo sapiens
MVTPLSNANQPEQVILYQGGQMFDGAPRFHGRVGFTGTMPATNVSIFINNTQLSDTGTY

SEQ ID NO: 6842 - protein, 467 aa, Homo sapiens
MRTAPSLRRCVCLLLAAILDLARGYLTVNIEPLPPVVAGDAVTLKCNFKTDGRMREIVWYRVTDGGTIKQKIFTFDAMFSTNYSHMENYRKREDLVYQSTVRLPEVRISDNGPYECHVGIYDRATREKVVLASGNIFLNVMAPPTSIEVVAADTPAPFSRYQAQNFTLVCIVSGGKPAPMVYFKRDGEPIDAVPLSEPPAASSGPLQDSRPFRSLLHRDLDDTKMQKSLSLLDAENRGGRPYTERPSRGLTPDPNILLQPTTENIPETVVSREFPRWVHSAEPTYFLRHSRTPSSDGTVEVRALLTWTLNPQIDNEALFSCEVKHPALSMPMQAEVTLVAPKGPKIVMTPSRARVGDTVRILVHGFQNEVFPEPMFTWTRVGSRLLDGSAEFDGKELVLERVPAELNGSMYRCTAQNPLGSTDTHTRLIVFENPNIPRGTEDSNGSIGPTGARLTLVLALTVILELT

SEQ ID NO: 6843 - protein, 613 aa, Homo sapiens
MGALRPTLLPPSLPLLLLLMLGMGCWAREVLVPEGPLYRVAGTAVSISCNVTGYEGPAQQNFEWFLYRPEAPDTALGIVSTKDTQFSYAVFKSRVVAGEVQVQRLQGDAVVLKIARLQAQDAGIYECHTPSTDTRYLGSYSGKVELRVLPDVLQVSAAPPGPRGRQAPTSPPRMTVHEGQELALGCLARTSTQKHTHLAVSFGRSVPEAPVGRSTLQEVVGIRSDLAVEAGAPYAERLAAGELRLGKEGTDRYRMVVGGAQAGDAGTYHCTAAEWIQDPDGSWAQIAEKRAVLAHVDVQTLSSQLAVTVGPGERRIGPGEPLELLCNVSGALPPAGRHAAYSVGWEMAPAGAPGPGRLVAQLDTEGVGSLGPGYEGRHIAMEKVASRTYRLRLEAARPGDAGTYRCLAKAYVRGSGTRLREAASARSRPLPVHVREEGVVLEAVAWLAGGTVYRGETASLLCNISVRGGPPGLRLAASWWVERPEDGELSSVPAQLVGGVGQDGVAELGVRPGGGPVSVELVGPRSHRLRLHSLGPEDEGVYHCAPSAWVQHADYSWYQAGSARSGPVTVYPYMHALDTLFVPLLVGTGVALVTGATVLGTITCCFMKRLRKR

SEQ ID NO: 6844 - protein, 613 aa, Homo sapiens; identical to SEQ ID NO: 6843

SEQ ID NO: 6845 - protein, 301 aa, Homo sapiens
MGALRPTLLPPSLPLLLLLMLGMGCWAREVLVPEGPLYRVAGTAVSISCNVTGYEGPAQQNFEWFLYRPEAPDTALGIVSTKDTQFSYAVFKSRVVAGEVQVQRLQGDAVVLKIARLQAQDAGIYECHTPSTDTRYLGSYSGKVELRVLPDVLQVSAAPPGPRGRQAPTSPPRMTVHEGQELALGCLARTSTQKHTHLAVSFGRSVPEAPVGRSTLQEVVGIRSDLAVEAGAPYAERLAAGELRLGKEGTDRYRMVVGGAQAGDAGTYHCTAAEWIQDPDGSWAQIAEKRAVLAHVDVQTL

SEQ ID NO: 6846 - protein, 613 aa, Homo sapiens; identical to SEQ ID NO: 6843

SEQ ID NO: 6847 - protein, 1163 aa, Homo sapiens
MVWCLGLAVLSLVISQGADGRGKPEVVSVVGRAGESVVLGCDLLPPAGRPPLHVIEWLRFGFLLPIFIQFGLYSPRIDPDYVGRVRLQKGASLQIEGLRVEDQGWYECRVFFLDQHIPEDDFANGSWVHLTVNSPPQFQETPPAVLEVQELEPVTLRCVARGSPLPHVTWKLRGKDLGQGQGQVQVQNGTLRIRRVERGSSGVYTCQASSTEGSATHATQLLVLGPPVIVVPPKNSTVNASQDVSLACHAEAYPANLTYSWFQDNINVFHISRLQPRVRILVDGSLRLLATQPDDAGCYTCVPSNGLLHPPSASAYLTVLCMPGVIRCPVRANPPLLFVSWTKDGKALQLDKFPGWSQGTEGSLIIALGNEDALGEYSCTPYNSLGTAGPSPVTRVLLKAPPAFIERPKEEYFQEVGRELLIPCSAQGDPPPVVSWTKVGRGLQGQAQVDSNSSLILRPLTKEAHGHWECSASNAVARVATSTNVYVLGTSPHVVTNVSVVALPKGANVSWEPGFDGGYLQRFSVWYTPLAKRPDRMHHDWVSLAVPVGAAHLLVPGLQPHTQYQFSVLAQNKLGSGPFSEIVLSAPEGLPTTPAAPGLPPTEIPPPLSPPRGLVAVRTPRGVLLHWDPPELVPKRLDGYVLEGRQGSQGWEVLDPAVAGTETELLVPGLIKDVLYEFRLVAFAGSFVSDPSNTANVSTSGLEVYPSRTQLPGLLPQPVLAGVVGGVCFLGVAVLVSILAGCLLNRRRAARRRRKRLRQDPPLIFSPTGKSAAPSALGSGSPDSVAKLKLQGSPVPSLRQSLLWGDPAGTPSPHPDPPSSRGPLPLEPICRGPDGRFVMGPTVAAPQERSGREQAEPRTPAQRLARSFDCSSSSPSGAPQPLCIEDISPVAPPPAAPPSPLPGPGPLLQYLSLPFFREMNVDGDWPPLEEPSPAAPPDYMDTRRCPTSSFLRSPETPPVSPRESLPGAVVGAGATAEPPYTALADWTLRERLLPGLLPAAPRGSLTSQSSGRGSASFLRPPSTAPSAGGSYLSPAPGDTSSWASGPERWPRREHVVTVSKRRNTSVDENYEWDSEFPGDMELLETLHLGLASSRLRPEAEPELGVKTPEEGCLLNTAHVTGPEARCAALREEFLAFRRRRDATRARLPAYRQPVPHPEQATLL

SEQ ID NO: 6848 - protein, 1179 aa, Homo sapiens
MVWCLGLAVLSLVISQGADGRGKPEVVSVVGRAGESVVLGCDLLPPAGRPPLHVIEWLRFGFLLPIFIQFGLYSPRIDPDYVGRVRLQKGASLQIEGLRVEDQGWYECRVFFLDQHIPEDDFANGSWVHLTVNSPPQFQETPPAVLEVQELEPVTLRCVARGSPLPHVTWKLRGKDLGQGQGQVQVQNGTLRIRRVERGSSGVYTCQASSTEGSATHATQLLVLGPPVIVVPPKNSTVNASQDVSLACHAEAYPANLTYSWFQDNINVFHISRLQPRVRILVDGSLRLLATQPDDAGCYTCVPSNGLLHPPSASAYLTVLYPAQVTAMPPETPLPIGMPGVIRCPVRANPPLLFVSWTKDGKALQLDKFPGWSQGTEGSLIIALGNEDALGEYSCTPYNSLGTAGPSPVTRVLLKAPPAFIERPKEEYFQEVGRELLIPCSAQGDPPPVVSWTKVGRGLQGQAQVDSNSSLILRPLTKEAHGHWECSASNAVARVATSTNVYVLGTSPHVVTNVSVVALPKGANVSWEPGFDGGYLQRFSVWYTPLAKRPDRMHHDWVSLAVPVGAAHLLVPGLQPHTQYQFSVLAQNKLGSGPFSEIVLSAPEGLPTTPAAPGLPPTEIPPPLSPPRGLVAVRTPRGVLLHWDPPELVPKRLDGYVLEGRQGSQGWEVLDPAVAGTETELLVPGLIKDVLYEFRLVAFAGSFVSDPSNTANVSTSGLEVYPSRTQLPGLLPQPVLAGVVGGVCFLGVAVLVSILAGCLLNRRRAARRRRKRLRQDPPLIFSPTGKSAAPSALGSGSPDSVAKLKLQGSPVPSLRQSLLWGDPAGTPSPHPDPPSSRGPLPLEPICRGPDGRFVMGPTVAAPQERSGREQAEPRTPAQRLARSFDCSSSSPSGAPQPLCIEDISPVAPPPAAPPSPLPGPGPLLQYLSLPFFREMNVDGDWPPLEEPSPAAPPDYMDTRRCPTSSFLRSPETPPVSPRESLPGAVVGAGATAEPPYTALADWTLRERLLPGLLPAAPRGSLTSQSSGRGSASFLRPPSTAPSAGGSYLSPAPGDTSSWASGPERWPRREHVVTVSKRRNTSVDENYEWDSEFPGDMELLETLHLGLASSRLRPEAEPELGVKTPEEGCLLNTAHVTGPEARCAALREEFLAFRRRRDATRARLPAYRQPVPHPEQATLL

SEQ ID NO: 6849 - protein, 717 aa, Homo sapiens
MVWCLGLAVLSLVISQGADGRGKPEVVSVVGRAGESVVLGCDLLPPAGRPPLHVIEWLRFGFLLPIFIQFGLYSPRIDPDYVGRVRLQKGASLQIEGLRVEDQGWYECRVFFLDQHIPEDDFANGSWVHLTVNSPPQFQETPPAVLEVQELEPVTLRCVARGSPLPHVTWKLRGKDLGQGQGQVQVQNGTLRIRRVERGSSGVYTCQASSTEGSATHATQLLVLGPPVIVVPPKNSTVNASQDVSLACHAEAYPANLTYSWFQDNINVFHISRLQPRVRILVDGSLRLLATQPDDAGCYTCVPSNGLLHPPSASAYLTVLYPAQVTAMPPETPLPIGMPGVIRCPVRANPPLLFVSWTKDGKALQLDKFPGWSQGTEGSLIIALGNEDALGEYSCTPYNSLGTAGPSPVTRVLLKAPPAFIERPKEEYFQEVGRELLIPCSAQGDPPPAAPPSPLPGPGPLLQYLSLPFFREMNVDGDWPPLEEPSPAAPPDYMDTRRCPTSSFLRSPETPPVSPRESLPGAVVGAGATAEPPYTALADWTLRERLLPGLLPAAPRGSLTSQSSGRGSASFLRPPSTAPSAGGSYLSPAPGDTSSWASGPERWPRREHVVTVSKRRNTSVDENYEWDSEFPGDMELLETLHLGLASSRLRPEAEPELGVKTPEEGCLLNTAHVTGPEARCAALREEFLAFRRRRDATRARLPAYRQPVPHPEQATLL

SEQ ID NO: 6850 - protein, 411 aa, Homo sapiens
MSPARLRPRLHFCLVLLLLLVVPAAWGCGPGRVVGSRRRPPRKLVPLAYKQFSPNVPEKTLGASGRYEGKIARSSERFKELTPNYNPDIIFKDEENTGADRLMTQRCKDRLNSLAISVMNQWPGVKLRVTEGWDEDGHHSEESLHYEGRAVDITTSDRDRNKYGLLARLAVEAGFDWVYYESKAHVHCSVKSEHSAAAKTGGCFPAGAQVRLESGARVALSAVRPGDRVLAMGEDGSPTFSDVLIFLDREPHRLRAFQVIETQDPPRRLALTPAHLLFTADNHTEPAARFRATFASHVQPGQYVLVAGVPGLQPARVAAVSTHVALGAYAPLTKHGTLVVEDVVASCFAAVADHHLAQLAFWPLRLFHSLAWGSWTPGEGVHWYPQLLYRLGRLLLEEGSFHPLGMSGAGS

SEQ ID NO: 6851 - protein, 178 aa, Homo sapiens
MHSSALLCCLVLLTGVRASPGQGTQSENSCTHFPGNLPNMLRDLRDAFSRVKTFFQMKDQLDNLLLKESLLEDFKGYLGCQALSEMIQFYLEEVMPQAENQDPDIKAHVNSLGENLKTLRLRLRRCHRFLPCENKSKAVEQVKNAFNKLQEKGIYKAMSEFDIFINYIEAYMTMKIRN

SEQ ID NO: 6852 - protein, 74 aa, Homo sapiens
MIQFYLEEVMPQAENQDPDIKAHVNSLGENLKTLRLRLRRCHRFLPCENKSKAVEQVKNAFNKLQEKGIYKAMS

SEQ ID NO: 6853 - protein, 199 aa, Homo sapiens
MNCVCRLVLVVLSLWPDTAVAPGPPPGPPRVSPDPRAELDSTVLLTRSLLADTRQLAAQLRDKFPADGDHNLDSLPTLAMSAGALGALQLPGVLTRLRADLLSYLRHVQWLRRAGGSSLKTLEPELGTLQARLDRLLRRLQLLMSRLALPQPPPDPPAPPLAPPSSAWGGIRAAHAILGGLHLTLDWAVRGLLLLKTRL

SEQ ID NO: 6854 - protein, 199 aa, Homo sapiens; identical to SEQ ID NO: 6853

SEQ ID NO: 6855 - protein, 40 aa, Homo sapiens
MSAGALGALQLPGVLTRLRADLLSYLRHVQWLRRAGGSSL

SEQ ID NO: 6856 - protein, 120 aa, Homo sapiens
MSAGALGALQLPGVLTRLRADLLSYLRHVQWLRRAGGSSLKTLEPELGTLQARLDRLLRRLQLLMSRLALPQPPPDPPAPPLAPPSSAWGGIRAAHAILGGLHLTLDWAVRGLLLLKTRL

SEQ ID NO: 6857 - protein, 152 aa, Homo sapiens
MSSSCSGLSRVLVAVATALVSASSPCPQAWGPPDPPARPVVSCQAADYENFSCTWSPSQISGLPTRYLTSYRKKTVLGADSQRRSPSTGPWPCPQDPLGAARCVVHGAEFWSQYRINVTEVNPLGASTRLLDVSLQSILRPDPPQGLRVESV

SEQ ID NO: 6858 - protein, 54 aa, Homo sapiens
MSSSCSGLSRVLVAVATALVSASSPCPQAWGPPGTQCPGFGMGSQSCSRDLTLG

SEQ ID NO: 6859 - protein, 139 aa, Homo sapiens
MSSSCSGLSRVLVAVATALVSASSPCPQAWGPPGVQYGQPGRSVKLCCPGVTAGDPVSWFRDGEPKLLQGPDSGLGHELVLAQADSTDEGTYICQTLDGALGGTVTLQLGYPPARPVVSCQAADYENFSCTWSPSQISG

SEQ ID NO: 6860 - protein, 167 aa, Homo sapiens
MSSSCSGLSRVLVAVATALVSASSPCPQAWGPPGVQYGQPGRSVKLCCPGVTAGDPVSWFRDGEPKLLQGPDSGLGHELVLAQADSTDEGTYICQTLDGALGGTVTLQLGYPPARPVVSCQAADYENFSCTWSPSQISGLPTRYLTSYRKKTVLGADSQRRSPSTGP

SEQ ID NO: 6861 - protein, 422 aa, Homo sapiens
MSSSCSGLSRVLVAVATALVSASSPCPQAWGPPGVQYGQPGRSVKLCCPGVTAGDPVSWFRDGEPKLLQGPDSGLGHELVLAQADSTDEGTYICQTLDGALGGTVTLQLGYPPARPVVSCQAADYENFSCTWSPSQISGLPTRYLTSYRKKTVLGADSQRRSPSTGPWPCPQDPLGAARCVVHGAEFWSQYRINVTEVNPLGASTRLLDVSLQSILRPDPPQGLRVESVPGYPRRLRASWTYPASWPCQPHFLLKFRLQYRPAQHPAWSTVEPAGLEEVITDAVAGLPHAVRVSARDFLDAGTWSTWSPEAWGTPSTGTIPKEIPAWGQLHTQPEVEPQVDSPAPPRPSLQPHPRLLDHRDSVEQVAVLASLGILSFLGLVAGALALGLWLRLRRGGKDGSPKPGFLASVIPVDRRPGAPNL

SEQ ID NO: 6862 - protein, 422 aa, Homo sapiens; identical to SEQ ID NO: 6861

SEQ ID NO: 6863 - protein, 270 aa, Homo sapiens
MSSSCSGLSRVLVAVATALVSASSPCPQAWGPPGVQYGQPGRSVKLCCPGVTAGDPVSWFRDGEPKLLQGPDSGLGHELVLAQADSTDEGTYICQTLDGALGGTVTLQLGYPPARPVVSCQAADYENFSCTWSPSQISGLPTRYLTSYRKKTVLGADSQRRSPSTGPWPCPQDPLGAARCVVHGAEFWSQYRINVTEVNPLGASTRLLDVSLQSILRPDPPQGLRVESVPGYPRRLRASWTYPASWPCQPHFLLKFRLQYRPAQHPAWST

SEQ ID NO: 6864 - protein, 390 aa, Homo sapiens
MSSSCSGLSRVLVAVATALVSASSPCPQAWGPPGVQYGQPGRSVKLCCPGVTAGDPVSWFRDGEPKLLQGPDSGLGHELVLAQADSTDEGTYICQTLDGALGGTVTLQLGYPPARPVVSCQAADYENFSCTWSPSQISGLPTRYLTSYRKKTVLGADSQRRSPSTGPWPCPQDPLGAARCVVHGAEFWSQYRINVTEVNPLGASTRLLDVSLQSILRPDPPQGLRVESVPGYPRRLRASWTYPASWPCQPHFLLKFRLQYRPAQHPAWSTVEPAGLEEVITDAVAGLPHAVRVSARDFLDAGTWSTWSPEAWGTPSTGTIPKEIPAWGQLHTQPEVEPQVDSPAPPRPSLQPHPRLLDHRDSVEQVAVLASLGILSFLGLVAGALALGLW

SEQ ID NO: 6865 - protein, 422 aa, Homo sapiens; identical to SEQ ID NO: 6861

SEQ ID NO: 6866 - protein, 68 aa, Homo sapiens
MSSSCSGLSRVLVAVATALVSASSPCPQAWGPPGVQYGQPGRSVKLCCPGVTAGPSSPPCCLLPSSRL

SEQ ID NO: 6867 - protein, 77 aa, Homo sapiens
  VARIANT 1: note = misc_feature - Xaa can be any naturally occurring amino acid
XTPSTGTIPKEIPAWGQLHTQPEVEPQVDSPAPPRPSLQPHPRLLDHRDSVEQVAVLASLGILSFLGLVAGALALGL

SEQ ID NO: 6868 - protein, 328 aa, Homo sapiens
MCHQQLVISWFSLVFLASPLVAIWELKKDVYVVELDWYPDAPGEMVVLTCDTPEEDGITWTLDQSSEVLGSGKTLTIQVKEFGDAGQYTCHKGGEVLSHSLLLLHKKEDGIWSTDILKDQKEPKNKTFLRCEAKNYSGRFTCWWLTTISTDLTFSVKSSRGSSDPQGVTCGAATLSAERVRGDNKEYEYSVECQEDSACPAAEESLPIEVMVDAVHKLKYENYTSSFFIRDIIKPDPPKNLQLKPLKNSRQVEVSWEYPDTWSTPHSYFSLTFCVQVQGKSKREKKDRVFTDKTSATVICRKNASISVRAQDRYYSSSWSEWASVPCS

SEQ ID NO: 6869 - protein, 51 aa, Homo sapiens
MEPLVTWVVPLLFLFLLSRQGAACRTSECCFQDPPYPDADSGSASGPRDLR

SEQ ID NO: 6870 - protein, 67 aa, Homo sapiens
MEPLVTWVVPLLFLFLLSRQGAACRTSECCFQDPPYPDADSGSASGPRDLRCYRISSDRYECSWQYE

SEQ ID NO: 6871 - protein, 381 aa, Homo sapiens
MEPLVTWVVPLLFLFLLSRQGAACRTSECCFQDPPYPDADSGSASGPRDLRCYRISSDRYECSWQYEGPTAGVSHFLRCCLSSGRCCYFAAGSATRLQFSDQAGVSVLYTVTLWVESWARNQTEKSPEVTLQLYNSVKYEPPLGDIKVSKLAGQLRMEWETPDNQVGAEVQFRHRTPSSPWKLGDCGPQDDDTESCLCPLEMNVAQEFQLRRRQLGSQGSSWSKWSSPVCVPPENPPQPQVRFSVEQLGQDGRRRLTLKEQPTQLELPEGCQGLAPGTEVTYRLQLHMLSCPCKAKATRTLHLGKMPYLSGAAYNVAVISSNQFGPGLNQTWHIPADTHTDGMISAHCNLRLPDSRDSPASASRVAGITGICHHTRLILYF

SEQ ID NO: 6872 - protein, 662 aa, Homo sapiens
MEPLVTWVVPLLFLFLLSRQGAACRTSECCFQDPPYPDADSGSASGPRDLRCYRISSDRYECSWQYEGPTAGVSHFLRCCLSSGRCCYFAAGSATRLQFSDQAGVSVLYTVTLWVESWARNQTEKSPEVTLQLYNSVKYEPPLGDIKVSKLAGQLRMEWETPDNQVGAEVQFRHRTPSSPWKLGDCGPQDDDTESCLCPLEMNVAQEFQLRRRQLGSQGSSWSKWSSPVCVPPENPPQPQVRFSVEQLGQDGRRRLTLKEQPTQLELPEGCQGLAPGTEVTYRLQLHMLSCPCKAKATRTLHLGKMPYLSGAAYNVAVISSNQFGPGLNQTWHIPADTHTEPVALNISVGTNGTTMYWPARAQSMTYCIEWQPVGQDGGLATCSLTAPQDPDPAGMATYSWSRESGAMGQEKCYYITIFASAHPEKLTLWSTVLSTYHFGGNASAAGTPHHVSVKNHSLDSVSVDWAPSLLSTCPGVLKEYVVRCRDEDSKQVSEHPVQPTETQVTLSGLRAGVAYTVQVRADTAWLRGVWSQPQRFSIEVQVSDWLIFFASLGSFLSILLVGVLGYLGLNRAARHLCPPLPTPCASSAIEFPGGKETWQWINPVDFQEEASLQEALVVEMSWDKGERTEPLEKTELPEGAPELALDTELSLEDGDRCKAKM

SEQ ID NO: 6873 - protein, 662 aa, Homo sapiens; identical to SEQ ID NO: 6872

SEQ ID NO: 6874 - protein, 118 aa, Homo sapiens
MEPLVTWVVPLLFLFLLSRQGAACRTSECCFQDPPYPDADSGSLPGSASGPRDLRCYRISSDRYECSWQYEGPTAGVSHFLRCCLSSGRCCYFAAGSATRLQFSDQAGVSVLYTVTLW

SEQ ID NO: 6875 - protein, 862 aa, Homo sapiens
MAHTFRGCSLAFMFIITWLLIKAKIDACKRGDVTVKPSHVILLGSTVNITCSLKPRQGCFHYSRRNKLILYKFDRRINFHHGHSLNSQVTGLPLGTTLFVCKLACINSDEIQICGAEIFVGVAPEQPQNLSCIQKGEQGTVACTWERGRDTHLYTEYTLQLSGPKNLTWQKQCKDIYCDYLDFGINLTPESPESNFTAKVTAVNSLGSSSSLPSTFTFLDIVRPLPPWDIRIKFQKASVSRCTLYWRDEGLVLLNRLRYRPSNSRLWNMVNVTKAKGRHDLLDLKPFTEYEFQISSKLHLYKGSWSDWSESLRAQTPEEEPTGMLDVWYMKRHIDYSRQQISLFWKNLSVSEARGKILHYQVTLQELTGGKAMTQNITGHTSWTTVIPRTGNWAVAVSAANSKGSSLPTRINIMNLCEAGLLAPRQVSANSEGMDNILVTWQPPRKDPSAVQEYVVEWRELHPGGDTQVPLNWLRSRPYNVSALISENIKSYICYEIRVYALSGDQGGCSSILGNSKHKAPLSGPHINAITEEKGSILISWNSIPVQEQMGCLLHYRIYWKERDSNSQPQLCEIPYRVSQNSHPINSLQPRVTYVLWMTALTAAGESSHGNEREFCLQGKANWMAFVAPSICIAIIMVGIFSTHYFQQKVFVLLAALRPQWCSREIPDPANSTCAKKYPIAEEKTQLPLDRLLIDWPTPEDPEPLVISEVLHQVTPVFRHPPCSNWPQREKGIQGHQASEKDMMHSASSPPPPRALQAESRQLVDLYKVLESRGSDPKPENPACPWTVLPAGDLPTHDGYLPSNIDDLPSHEAPLADSLEELEPQHISLSVFPSSSLHPLTFSCGDKLTLDQLKMRCDSLML

SEQ ID NO: 6876 - protein, 659 aa, Homo sapiens
MAHTFRGCSLAFMFIITWLLIKAKIDACKRGDVTVKPSHVILLGSTVNITCSLKPRQGCFHYSRRNKLILYKFDRRINFHHGHSLNSQVTGLPLGTTLFVCKLACINSDEIQICGAEIFVGVAPEQPQNLSCIQKGEQGTVACTWERGRDTHLYTEYTLQLSGPKNLTWQKQCKDIYCDYLDFGINLTPESPESNFTAKVTAVNSLGSSSSLPSTFTFLDIVRPLPPWDIRIKFQKASVSRCTLYWRDEGLVLLNRLRYRPSNSRLWNMVNVTKAKGRHDLLDLKPFTEYEFQISSKLHLYKGSWSDWSESLRAQTPEEEPTGMLDVWYMKRHIDYSRQQISLFWKNLSVSEARGKILHYQVTLQELTGGKAMTQNITGHTSWTTVIPRTGNWAVAVSAANSKGSSLPTRINIMNLCEAGLLAPRQVSANSEGMDNILVTWQPPRKDPSAVQEYVVEWRELHPGGDTQVPLNWLRSRPYNVSALISENIKSYICYEIRVYALSGDQGGCSSILGNSKHKAPLSGPHINAITEEKGSILISWNSIPVQEQMGCLLHYRIYWKERDSNSQPQLCEIPYRVSQNSHPINSLQPRVTYVLWMTALTAAGESSHGNEREFCLQGKANWMAFVAPSICIAIIMVGIFSTHYFQQKRRHSCPWTGS

SEQ ID NO: 6877 - protein, 635 aa, Homo sapiens
MAHTFRGCSLAFMFIITWLLIKAKIDACKRGDVTVKPSHVILLGSTVNITCSLKPRQGCFHYSRRNKLILYKFDRRINFHHGHSLNSQVTGLPLGTTLFVCKLACINSDEIQICGAEIFVGVAPEQPQNLSCIQKGEQGTVACTWERGRDTHLYTEYTLQLSGPKNLTWQKQCKDIYCDYLDFGINLTPESPESNFTAKVTAVNSLGSSSSLPSTFTFLDIVRPLPPWDIRIKFQKASVSRCTLYWRDEGLVLLNRLRYRPSNSRLWNMVNVTKAKGRHDLLDLKPFTEYEFQISSKLHLYKGSWSDWSESLRAQTPEEEPTGMLDVWYMKRHIDYSRQQISLFWKNLSVSEARGKILHYQVTLQELTGGKAMTQNITGHTSWTTVIPRTGNWAVAVSAANSKGSSLPTRINIMNLCEAGLLAPRQVSANSEGMDNILVTWQPPRKDPSAVQEYVVEWRELHPGGDTQVPLNWLRSRPYNVSALISENIKSYICYEIRVYALSGDQGGCSSILGNSKHKAPLSGPHINAITEEKGSILISWNSIPVQEQMGCLLHYRIYWKERDSNSQPQLCEIPYRVSQNSHPINSLQPRVTYVLWMTALTAAGESSHGNEREFCLQGEDTAALGQAPDRLAHA

SEQ ID NO: 6878 - protein, 776 aa, Homo sapiens
MAHTFRGCSLAFMFIITWLLIKAKIDACKRGDVTVKPSHVILLGSTVNITCSLKPRQGCFHYSRRNKLILYKFDRRINFHHGHSLNSQVTGLPLGTTLFVCKLACINSDEIQICGAEIFVGVAPEQPQNLSCIQKGEQGTVACTWERGRDTHLYTEYTLQLSGPKNLTWQKQCKDIYCDYLDFGINLTPESPESNFTAKVTAVNSLGSSSSLPSTFTFLDIVRPLPPWDIRIKFQKASVSRCTLYWRDEGLVLLNRLRYRPSNSRLWNMVNVTKAKGRHDLLDLKPFTEYEFQISSKLHLYKGSWSDWSESLRAQTPEEEPTGMLDVWYMKRHIDYSRQQISLFWKNLSVSEARGKILHYQVTLQELTGGKAMTQNITGHTSWTTVIPRTGNWAVAVSAANSKGSSLPTRINIMNLCEAGLLAPRQVSANSEGMDNILVTWQPPRKDPSAVQEYVVEWRELHPGGDTQVPLNWLRSRPYNVSALISEIPYRVSQNSHPINSLQPRVTYVLWMTALTAAGESSHGNEREFCLQGKANWMAFVAPSICIAIIMVGIFSTHYFQQKVFVLLAALRPQWCSREIPDPANSTCAKKYPIAEEKTQLPLDRLLIDWPTPEDPEPLVISEVLHQVTPVFRHPPCSNWPQREKGIQGHQASEKDMMHSASSPPPPRALQAESRQLVDLYKVLESRGSDPKPENPACPWTVLPAGDLPTHDGYLPSNIDDLPSHEAPLADSLEELEPQHISLSVFPSSSLHPLTFSCGDKLTLDQLKMRCDSLML

SEQ ID NO: 6879 - protein, 230 aa, Homo sapiens
  VARIANT 1: note = misc_feature - Xaa can be any naturally occurring amino acid
XQKGEQGTVACTWERGRDTHLYTEYTLQLSGPKNLTWQKQCKDIYCDYLDFGINLTPESPESNFTAKVTAVNSLGSSSSLPSTFTFLDIVRPLPPWDIRIKFQKASVSRCTLYWRDEGLVLLNRLRYRPSNSRLWNMVNVTKAKGRHDLLDLKPFTEYEFQISSKLHLYKGSWSDWSESLRAQTPEEEPTGMLDVWYMKRHIDYSRQQISLFWKVSFKRQLKTQGNKTEG

SEQ ID NO: 6880 - protein, 144 aa, Homo sapiens
MALLLTTVIALTCLGGFASPGPVPPSTALRELIEELVNITQNQKAPLCNGSMVWSINLTAGMYCAALESLINVSGCSAIEKTQRMLSGFCPHKVSAGQFSSLHVRDTKIEVAQFVKDLLLHLKKLFREGQFNNFESIIICRDRT

SEQ ID NO: 6881 - protein, 146 aa, Homo sapiens
MHPLLNPLLLALGLMALLLTTVIALTCLGGFASPGPVPPSTALRELIEELVNITQNQKAPLCNGSMVWSINLTAGMYCAALESLINVSGCSAIEKTQRMLSGFCPHKVSAGQFSSLHVRDTKIEVAQFVKDLLLHLKKLFREGQFN

SEQ ID NO: 6882 - protein, 279 aa, Homo sapiens
MEWPARLCGLWALLLCAGGGGGGGGAAPTETQPPVTNLSVSVENLCTVIWTWNPPEGASSNCSLWYFSHFGDKQDKKIAPETRRSIEVPLNERICLQVGSQCSTNESEKPSILVEKCISPPEGDPESAVTELQCIWHNLSYMKCSWLPGRNTSPDTNYTLYYWHRSLEKIHQCENIFREGQYFGCSFDLTKVKDSSFEQHSVQIMVKDNAGKIKPSFNIVPLTSRVKPDPPHIKNLSFHNDDLYVQWENPQNFISRCLFYEVEVNNSQTETHNVFYVRF

SEQ ID NO: 6883 - protein, 427 aa, Homo sapiens
MEWPARLCGLWALLLCAGGGGGGGGAAPTETQPPVTNLSVSVENLCTVIWTWNPPEGASSNCSLWYFSHFGDKQDKKIAPETRRSIEVPLNERICLQVGSQCSTNESEKPSILVEKCISPPEGDPESAVTELQCIWHNLSYMKCSWLPGRNTSPDTNYTLYYWHRSLEKIHQCENIFREGQYFGCSFDLTKVKDSSFEQHSVQIMVKDNAGKIKPSFNIVPLTSRVKPDPPHIKNLSFHNDDLYVQWENPQNFISRCLFYEVEVNNSQTETHNVFYVQEAKCENPEFERNVENTSCFMVPGVLPDTLNTVRIRVKTNKLCYEDDKLWSNWSQEMSIGKKRNSTLYITMLLIVPVIVAGAIIVLLLYLKRLKIIIFPPIPDPGKIFKEMFGDQNDDTLHWKKYDIYEKQTKEETDSVVLIENLKKASQ

SEQ ID NO: 6884 - protein, 308 aa, Homo sapiens
MAPRRARGCRTLGLPALLLLLLLRPPATRDARDRLAVLAGRSRISESFNHEVQTHEACVRLRTMENCPQCHHHRTSRQQAGITCPPPMSVEHADIWVKSYSLYSRERYICNSGFKRKAGTSSLTECVLNKATNVAHWTTPSLKCIRDPALVHQRPAPPSTVTTAGVTPQPESLSPSGKEPAASSPSSNNTAATTAAIVPGSQLMPSKSPSTGTTEISSHESSHGTPSQTTAKNWELTASASHQPPGVYPQGHSDTTVAISTSTVLLCGLSAVSLLACYLKSSLDAFIKIRGGFSTWLLGLPHSTVGSG

SEQ ID NO: 6885 - protein, 346 aa, Homo sapiens
MAPRRARGCRTLGLPALLLLLLLRPPATRDARDRLAVLAGRSRISESFNHEVQTHEACVRLRTMENCPQCHHHRTSRQQAGITCPPPMSVEHADIWVKSYSLYSRERYICNSGFKRKAGTSSLTECVLNKATNVAHWTTPSLKCIRDPALVHQRPAPPSTVTTAGVTPQPESLSPSGKEPAASSPSSNNTAATTAAIVPGSQLMPSKSPSTGTTEISSHESSHGTPSQTTAKNWELTASASHQPPGVYPQGHSDTTVAISTSTVLLCGLSAVSLLACYLKSSSHSRELTLLTLKWPKELLLLRRDISPALVEGAGQMPRASAPRQLQTGQPRMTSVLPRLCLSFGS

SEQ ID NO: 6886 - protein, 305 aa, Homo sapiens
MAPRRARGCRTLGLPALLLLLLLRPPATRDARDRLAVLAGRSRISESFNHEVQTHEACVRLRTMENCPQCHHHRTSRQQAGITCPPPMSVEHADIWVKSYSLYSRERYICNSGFKRKAGTSSLTECVLNKATNVAHWTTPSLKCIRDPALVHQRPAPPSTVTTAGVTPQPESLSPSGKEPAASSPSSNNTAATTAAIVPGSQLMPSKSPSTGTTEISSHESSHGTPSQTTAKNWELTASASHQPPGVYPQGHSDTTGRKQHLLPDFQASFQRDCINKHIEDKECWTVASFLLFCTMFVSTCWYTL

SEQ ID NO: 6887 - protein, 331 aa, Homo sapiens
MAPRRARGCRTLGLPALLLLLLLRPPATRDARDRLAVLAGRSRISESFNHEVQTHEACVRLRTMENCPQCHHHRTSRQQAGITCPPPMSVEHADIWVKSYSLYSRERYICNSGFKRKAGTSSLTECVLNKATNVAHWTTPSLKCIRDPALVHQRPAPPSTVTTAGVTPQPESLSPSGKEPAASSPSSNNTAATTAAIVPGSQLMPSKSPSTGTTEISSHESSHGTPSQTTAKNWELTASASHQPPGVYPQGHSDTTVAISTSTVLLCGLSAVSLLACYLKSRWLAKRSLPGDAEAPNMSRGGRNAWEQLSRAPATSLLRTPVESALSASRP

SEQ ID NO: 6888 - protein, 154 aa, Homo sapiens
MAPRRARGCRTLGLPALLLLLLLRPPATREPAASSPSSNNTAATTAAIVPGSQLMPSKSPSTGTTEISSHESSHGTPSQTTAKNWELTASASHQPPGVYPQGHSDTTVAISTSTVLLCGLSAVSLLACYLKSRASVCSCHPRSAGHTCSVGSVC

SEQ ID NO: 6889 - protein, 169 aa, Homo sapiens
MAPRRARGCRTLGLPALLLLLLLRPPATREPAASSPSSNNTAATTAAIVPGSQLMPSKSPSTGTTEISSHESSHGTPSQTTAKNWELTASASHQPPGVYPQGHSDTTVAISTSTVLLCGLSAVSLLACYLKSRQTPPLASVEMEAMEALPVTWGTSSRDEDLENCSHHL

SEQ ID NO: 6890 - protein, 172 aa, Homo sapiens
MAPRRARGCRTLGLPALLLLLLLRPPATRGITCPPPMSVEHADIWVKSYSLYSRERYICNSGFKRKAGTSSLTECVLNKATNVAHWTTPSLKCIKPAASSPSSNNTAATTAAIVPGSQLMPSKSPSTGTTEISSHESSHGTPSQTTAKNWELTASASHQPPGVYPQGHSDTT

SEQ ID NO: 6891 - protein, 219 aa, Homo sapiens
MAPRRARGCRTLGLPALLLLLLLRPPATRGITCPPPMSVEHADIWVKSYSLYSRERYICNSGFKRKAGTSSLTECVLNKATNVAHWTTPSLKCIKPAASSPSSNNTAATTAAIVPGSQLMPSKSPSTGTTEISSHESSHGTPSQTTAKNWELTASASHQPPGVYPQGHSDTTVAISTSTVLLCGLSAVSLLACYLKSRASVCSCHPRSAGHTCSVGSVC

SEQ ID NO: 6892 - protein, 234 aa, Homo sapiens
MAPRRARGCRTLGLPALLLLLLLRPPATRGITCPPPMSVEHADIWVKSYSLYSRERYICNSGFKRKAGTSSLTECVLNKATNVAHWTTPSLKCIKPAASSPSSNNTAATTAAIVPGSQLMPSKSPSTGTTEISSHESSHGTPSQTTAKNWELTASASHQPPGVYPQGHSDTTVAISTSTVLLCGLSAVSLLACYLKSRQTPPLASVEMEAMEALPVTWGTSSRDEDLENCSHHL

SEQ ID NO: 6893 - protein, 252 aa, Homo sapiens
MAPRRARGCRTLGLPALLLLLLLRPPATRGITCPPPMSVEHADIWVKSYSLYSRERYICNSGFKRKAGTSSLTECVLNKATNVAHWTTPSLKCIRDPALVHQRPAPPSTVTTAGVTPQPESLSPSGKEPAASSPSSNNTAATTAAIVPGSQLMPSKSPSTGTTEISSHESSHGTPSQTTAKNWELTASASHQPPGVYPQGHSDTTVAISTSTVLLCGLSAVSLLACYLKSRASVCSCHPRSAGHTCSVGSVC

SEQ ID NO: 6894 - protein, 267 aa, Homo sapiens
MAPRRARGCRTLGLPALLLLLLLRPPATRGITCPPPMSVEHADIWVKSYSLYSRERYICNSGFKRKAGTSSLTECVLNKATNVAHWTTPSLKCIRDPALVHQRPAPPSTVTTAGVTPQPESLSPSGKEPAASSPSSNNTAATTAAIVPGSQLMPSKSPSTGTTEISSHESSHGTPSQTTAKNWELTASASHQPPGVYPQGHSDTTVAISTSTVLLCGLSAVSLLACYLKSRQTPPLASVEMEAMEALPVTWGTSSRDEDLENCSHHL

SEQ ID NO: 6895 - protein, 353 aa, Homo sapiens
MRLAGRQVPEQRSPPPPGLGSARPGSPAVSCGAAAMAPRRARGCRTLGLPALLLLLLLRPPATRDARDRLAVLAGRSRISESFNHEVQTHEACVRLRTMENCPQCHHHRTSRQQAGITCPPPMSVEHADIWVKSYSLYSRERYICNSGFKRKAGTSSLTECVLNKATNVAHWTTPSLKCIRDPALVHQRPAPPSTVTTAGVTPQPESLSPSGKEPAASSPSSNNTAATTAAIVPGSQLMPSKSPSTGTTEISSHESSHGTPSQTTAKNWELTASASHQPPGVYPQGHSDTTVAISTSTVLLCGLSAVSLLACYLKSRQTPPLASVEMEAMEALPVTWGTSSRDEDLENCSHHL

SEQ ID NO: 6896 - protein, 172 aa, Homo sapiens
MSVEHADIWVKSYSLYSRERYICNSGFKRKAGTSSLTECVLNKATNVAHWTTPSLKCIKPAASSPSSNNTAATTAAIVPGSQLMPSKSPSTGTTEISSHESSHGTPSQTTAKNWELTASASHQPPGVYPQGHSDTTVAISTSTVLLCGLSAVSLLACYLKSRQTPPLASVEM

SEQ ID NO: 6897 - protein, 148 aa, Homo sapiens
MSVEHADIWVKSYSLYSRERYICNSGFKRKAGTSSLTECVLNKATNVAHWTTPSLKCINPALVHQRPAPPSTVTTAGVTPQPESLSPSGKEPAASSPSSNNTAATTAAIVPGSQLMPSKSPSTGTTEISSHESSHGTPSQTTAKNWEL

SEQ ID NO: 6898 - protein, 231 aa, Homo sapiens
MSVEHADIWVKSYSLYSRERYICNSGFKRKAGTSSLTECVLNKATNVAHWTTPSLKCIRDPALVHQRPAPPSTVTTAGVTPQPESLSPSGKEPAASSPSSNNTAATTAAIVPGSQLMPSKSPSTGTTEISSHESSHGTPSQTTAKNWELTASASHQPPGVYPQGHSDTTVAISTSTVLLCGLSAVSLLACYLKSRQTPPLASVEMEAMEALPVTWGTSSRDEDLENCSHHL

SEQ ID NO: 6899 - protein, 209 aa, Homo sapiens
  VARIANT 1: note = misc_feature - Xaa can be any naturally occurring amino acid
XITCPPPMSVEHADIWVKSYSLYSRERYICNSGFKRKAGTSSLTECVLNKATNVAHWTTPSLKCIRTTEISSHESSHGTPSQTTAKNWELTASASHQPPGVYPQGHSDTTGRKQHLLPDFQASFQRDCINKHIEDKECWTVASFLLFLAISTSTVLLCGLSAVSLLACYLKSRQTPPLASVEMEAMEALPVTWGTSSRDEDLENCSHHL

SEQ ID NO: 6900 - protein, 155 aa, Homo sapiens
  VARIANT 1: note = misc_feature - Xaa can be any naturally occurring amino acid
XLVHQRPAPPSTVTTAGVTPQPESLSPSGKEPAASSPSSNNTAATTAAIVPGSQLMPSKSPSTGTTEISSHESSHGTPSQTTAKNWELTASASHQPPGVYPQGHSDTTVAISTSTVLLCGLSAVSLLACYLKSRASVCSCHPRSAGHTCSVGSVC

SEQ ID NO: 6901 - protein, 198 aa, Homo sapiens
  VARIANT 1: note = misc_feature - Xaa can be any naturally occurring amino acid
XPAASSPSSNNTAATTAAIVPGSQLMPSKSPSTGTTEISSHESSHGTPSQTTAKNWELTASASHQPPGVYPQGHSDTTVAISTSTVLLCGLSAVSLLACYLKSSSQRKVTYLRLSVNYKAPPGVGDVYREDTSVWAPPNDPVSSCAARTDREPEKVEEMLSPVNPLHRRIQEEENSSQRHFTYICIYTSLSVISTHYI

SEQ ID NO: 6902 - protein, 155 aa, Homo sapiens
MTPGKTSLVSLLLLLSLEAIVKAGITIPRNPGCPNSEDKNFPRTVMVNLNIHNRNTNTNPKRSSDYYNRSTSPWNLHRNEDPERYPSVIWEAKCRHLGCINADGNVDYHMNSVPIQQEILVLRREPPHCPNSFRLEKILVSVGCTCVTPIVHHVA

SEQ ID NO: 6903 - protein, 180 aa, Homo sapiens
MDWPHNLLFLLTISIFLGLGQPRSPKSKRKGQGRPGPLAPGPHQVPLDLVSRMKPYARMEEYERNIEEMVAQLRNSSELAQRKCEVNLQLWMSNKRSLSPWGYSINHDPSRIPVDLPEARCLCLGCVNPFTMQEDRSMVSVPVFSQVPVRRRLCPPPPRTGPCRQRAVMETIAVGCTCIF

SEQ ID NO: 6904 - protein, 197 aa, Homo sapiens
MTLLPGLLFLTWLHTCLAHHDPSLRGHPHSHGTPHCYSAEELPLGQAPPHLLARGAKWGQALPVALVSSLEAASHRGRHERPSATTQCPVLRPEEVLEADTHQRSISPWRYRVDTDEDRYPQKLAFAECLCRGCIDARTGRETAALNSVRLLQSLLVLRRRPCSRDGSGLPTPGAFAFHTEFIHVPVGCTCVLPRSV

SEQ ID NO: 6905 - protein, 35 aa, Homo sapiens
MLGALVWMLVAGFLLALPPSWAAGAPRAGRRPARP

SEQ ID NO: 6906 - protein, 202 aa, Homo sapiens
MLVAGFLLALPPSWAAGAPRAGRRPARPRGCADRPEELLEQLYGRLAAGVLSAFHHTLQLGPREQARNASCPAGGRPADRRFRPPTNLRSVSPWAYRISYDPARYPRYLPEAYCLCRGCLTGLFGEEDVRFRSAPVYMPTVVLRRTPACAGGRSVYTEAYVTIPVGCTCVPEPEKDADSINSSIDKQGAKLLLGPNDAPAGP

SEQ ID NO: 6907 - protein, 90 aa, Homo sapiens
  VARIANT 1: note = misc_feature - Xaa can be any naturally occurring amino acid
XRPRGCADRPEELLEQLYGRLAAGVLSAFHHTLQLGPREQARNASCPAGGRPADRRFRPPTNLRSVSPWAYSSVSITSNHPWRTRPLFLD

SEQ ID NO: 6908 - protein, 163 aa, Homo sapiens
MTVKTLHGPAMVKYLLLSILGLAFLSEAAARKIPKVGHTFFQKPESCPPVPGGSMKLDIGIINENQRVSMSRNIESRSTSPWNYTVTWDPNRYPSEVVQAQCRNLGCINAQGKEDISMNSVPIQQETLVVRRKHQGCSVSFQLEKVLVTVGCTCVTPVIHHVQ

SEQ ID NO: 6909 - protein, 866 aa, Homo sapiens
MGAARSPPSAVPGPLLGLLLLLLGVLAPGGASLRLLDHRALVCSQPGLNCTVKNSTCLDDSWIHPRNLTPSSPKDLQIQLHFAHTQQGDLFPVAHIEWTLQTDASILYLEGAELSVLQLNTNERLCVRFEFLSKLRHHHRRWRFTFSHFVVDPDQEYEVTVHHLPKPIPDGDPNHQSKNFLVPDCEHARMKVTTPCMSSGSLWDPNITVETLEAHQLRVSFTLWNESTHYQILLTSFPHMENHSCFEHMHHIPAPRPEEFHQRSNVTLTLRNLKGCCRHQVQIQPFFSSCLNDCLRHSATVSCPEMPDTPEPIPDYMPLWVYWFITGISILLVGSVILLIVCMTWRLAGPGSEKYSDDTKYTDGLPAADLIPPPLKPRKVWIIYSADHPLYVDVVLKFAQFLLTACGTEVALDLLEEQAISEAGVMTWVGRQKQEMVESNSKIIVLCSRGTRAKWQALLGRGAPVRLRCDHGKPVGDLFTAAMNMILPDFKRPACFGTYVVCYFSEVSCDGDVPDLFGAAPRYPLMDRFEEVYFRIQDLEMFQPGRMHRVGELSGDNYLRSPGGRQLRAALDRFRDWQVRCPDWFECENLYSADDQDAPSLDEEVFEEPLLPPGTGIVKRAPLVREPGSQACLAIDPLVGEEGGAAVAKLEPHLQPRGQPAPQPLHTLVLAAEEGALVAAVEPGPLADGAAVRLALAGEGEACPLLGSPGAGRNSVLFLPVDPEDSPLGSSTPMASPDLLPEDVREHLEGLMLSLFEQSLSCQAQGGCSRPAMVLTDPHTPYEEEQRQSVQSDQGYISRSSPQPPEGLTEMEEEEEEEQDPGKPALPLSPEDLESLRSLQRQLLFRQLQKNSGWDTMGSESEGPSA

SEQ ID NO: 6910 - protein, 832 aa, Homo sapiens
MGAARSPPSAVPGPLLGLLLLLLGVLAPGGASLRLLDHRALVCSQPGLNCTVKNSTCLDDSWIHPRNLTPSSPKDLQIQLHFAHTQQGDLFPVAHIEWTLQTDASILYLEGAELSVLQLNTNERLCVRFEFLSKLRHHHRRWRFTFSHFVVDPDQEYEVTVHHLPKPIPDGDPNHQSKNFLVPDCEHARMKVTTPCMSSGSLWDPNITVETLEAHQLRVSFTLWNESTHYQILLTSFPHMENHSCFEHMHHIPAPRPEEFHQRSNVTLTLRNLKGCCRHQVQIQPFFSSCLNDCLRHSATVSCPEMPDTPEPIPGPGSEKYSDDTKYTDGLPAADLIPPPLKPRKVWIIYSADHPLYVDVVLKFAQFLLTACGTEVALDLLEEQAISEAGVMTWVGRQKQEMVESNSKIIVLCSRGTRAKWQALLGRGAPVRLRCDHGKPVGDLFTAAMNMILPDFKRPACFGTYVVCYFSEVSCDGDVPDLFGAAPRYPLMDRFEEVYFRIQDLEMFQPGRMHRVGELSGDNYLRSPGGRQLRAALDRFRDWQVRCPDWFECENLYSADDQDAPSLDEEVFEEPLLPPGTGIVKRAPLVREPGSQACLAIDPLVGEEGGAAVAKLEPHLQPRGQPAPQPLHTLVLAAEEGALVAAVEPGPLADGAAVRLALAGEGEACPLLGSPGAGRNSVLFLPVDPEDSPLGSSTPMASPDLLPEDVREHLEGLMLSLFEQSLSCQAQGGCSRPAMVLTDPHTPYEEEQRQSVQSDQGYISRSSPQPPEGLTEMEEEEEEEQDPGKPALPLSPEDLESLRSLQRQLLFRQLQKNSGWDTMGSESEGPSA

SEQ ID NO: 6911 - protein, 330 aa, Homo sapiens
MPVPWFLLSLALGRSPVVLSLERLVGPQDATHCSPGLSCRLWDSDILCLPGDIVPAPGPVLAPTHLQTELVLRCQKETDCDLCLRVAVHLAVHASLQAQVVLSFQAYPTARCVLLEVQVPAALVQFGQSVGSVVYDCFEAALGSEVRIWSYTQPRYEKELNHTQQLPALPWLNVSADGDNVHLVLNVSEEQHFGLSLYWNQVQGPPKPRWHKNLTGPQIITLNHTDLVPCLCIQVWPLEPDSVRTNICPFREDPRAHQNLWQAARLQLLTLQSWLLDAPCSLPAEAALCWRAPGGDPCQPLVPPLSWENVTVDKVLEFPLLKGHPNLCVQ

SEQ ID NO: 6912 - protein, 242 aa, Homo sapiens
MPVPWFLLSLALGRSPVVLSLERLVGPQDATHCSPGLSCRLWDSDILCLPGDIVPAPGPVLAPTHLQTELVLRCQKETDCDLCLRVAVHLAVHASLQAQVVLSFQAYPTARCVLLEVQVPAALVQFGQSVGSVVYDCFEAALGSEVRIWSYTQPRYEKELNHTQQLPALPWLNVSADGDNVHLVLNVSEEQHFGLSLYWNQVQGPPKPRWHKNLVRPPPSQVHSHCRPMPVQRTQCHIREDP

SEQ ID NO: 6913 - protein, 416 aa, Homo sapiens
MPVPWFLLSLALGRSPVVLSLERLVGPQDATHCSPGLSCRLWDSDILCLPGDIVPAPGPVLAPTHLQTELVLRCQKETDCDLCLRVAVHLAVHASLQAQVVLSFQAYPTARCVLLEVQVPAALVQFGQSVGSVVYDCFEAALGSEVRIWSYTQPRYEKELNHTQQLPDCRGLEVWNSIPSCWALPWLNVSADGDNVHLVLNVSEEQHFGLSLYWNQVQGPPKPRWHKNLTGPQIITLNHTDLVPCLCIQVWPLEPDSVRTNICPFREDPRAHQNLWQAARLQLLTLQSWLLDAPCSLPAEAALCWRAPGGDPCQPLVPPLSWENVTVDKVLEFPLLKGHPNLCVQVNSSEKLQLQECLWADSLGPLKDDVLLLETRGPQDNRSLCALEPSGCTSLPSKASTRAARLGEYLLQDLQS

SEQ ID NO: 6914 - protein, 99 aa, Homo sapiens
MPVPWFLLSLALGRSPVVLSLERLVGPQDATHCSPGLSCRLWDSDILCLPGDIVPAPGPVLAPTHLQTELVLRCQKETDCDLCLRVAVHLAVHGEQVIL

SEQ ID NO: 6915 - protein, 156 aa, Homo sapiens
MPVPWFLLSLALGRSPVVLSLERLVGPQDATHCSPGLSCRLWDSDILCLPGDIVPAPGPVLAPTHLQTELVLRCQKETDCDLCLRVAVHLAVHGHWEEPEDEEKFGGAADSGVEEPRNASLQAQVVLSFQAYPTARCVLLEVQVPAALVQFGLCGI

SEQ ID NO: 6916 - protein, 705 aa, Homo sapiens
MPVPWFLLSLALGRSPVVLSLERLVGPQDATHCSPGLSCRLWDSDILCLPGDIVPAPGPVLAPTHLQTELVLRCQKETDCDLCLRVAVHLAVHGHWEEPEDEEKFGGAADSGVEEPRNASLQAQVVLSFQAYPTARCVLLEVQVPAALVQFGQSVGSVVYDCFEAALGSEVRIWSYTQPRYEKELNHTQQLPALPWLNVSADGDNVHLVLNVSEEQHFGLSLYWNQVQGPPKPRWHKNLTGPQIITLNHTDLVPCLCIQVWPLEPDSVRTNICPFREDPRAHQNLWQAARLQLLTLQSWLLDAPCSLPAEAALCWRAPGGDPCQPLVPPLSWENVTVDKVLEFPLLKGHPNLCVQVNSSEKLQLQECLWADSLGPLKDDVLLLETRGPQDNRSLCALEPSGCTSLPSKASTRAARLGEYLLQDLQSGQCLQLWDDDLGALWACPMDKYIHKRWALVWLACLLFAAALSLILLLKKDHAKGWLRLLKQDVRSGAAARGRAALLLYSADDSGFERLVGALASALCQLPLRVAVDLWSRRELSAQGPVAWFHAQRRQTLQEGGVVVLLFSPGAVALCSEWLQDGVSGPGAHGPHDAFRASLSCVLPDFLQGRAPGSYVGACFDRLLHPDAVPALFRTVPVFTLPSQLPDFLGALQQPRAPRSGRLQERAEQVSRALQPALDSYFHPPGTPAPGRGVGPGAGPGAGDGT

SEQ ID NO: 6917 - protein, 688 aa, Homo sapiens
MPVPWFLLSLALGRSPVVLSLERLVGPQDATHCSPGLSCRLWDSDILCLPGDIVPAPGPVLAPTHLQTELVLRCQKETDCDLCLRVAVHLAVHGHWEEPEDEEKFGGAADSGVEEPRNASLQAQVVLSFQAYPTARCVLLEVQVPAALVQFGQSVGSVVYDCFEAALGSEVRIWSYTQPRYEKELNHTQQLPALPWLNVSADGDNVHLVLNVSEEQHFGLSLYWNQVQGPPKPRWHKNLTGPQIITLNHTDLVPCLCIQVWPLEPDSVRTNICPFREDPRAHQNLWQAARLQLLTLQSWLLDAPCSLPAEAALCWRAPGGDPCQPLVPPLSWENVTVDVNSSEKLQLQECLWADSLGPLKDDVLLLETRGPQDNRSLCALEPSGCTSLPSKASTRAARLGEYLLQDLQSGQCLQLWDDDLGALWACPMDKYIHKRWALVWLACLLFAAALSLILLLKKDHAKGWLRLLKQDVRSGAAARGRAALLLYSADDSGFERLVGALASALCQLPLRVAVDLWSRRELSAQGPVAWFHAQRRQTLQEGGVVVLLFSPGAVALCSEWLQDGVSGPGAHGPHDAFRASLSCVLPDFLQGRAPGSYVGACFDRLLHPDAVPALFRTVPVFTLPSQLPDFLGALQQPRAPRSGRLQERAEQVSRALQPALDSYFHPPGTPAPGRGVGPGAGPGAGDGT

SEQ ID NO: 6918 - protein, 690 aa, Homo sapiens
MPVPWFLLSLALGRSPVVLSLERLVGPQDATHCSPGLSCRLWDSDILCLPGDIVPAPGPVLAPTHLQTELVLRCQKETDCDLCLRVAVHLAVHGHWEEPEDEEKFGGAADSGVEEPRNASLQAQVVLSFQAYPTARCVLLEVQVPAALVQFGQSVGSVVYDCFEAALGSEVRIWSYTQPRYEKELNHTQQLPDCRGLEVWNSIPSCWALPWLNVSADGDNVHLVLNVSEEQHFGLSLYWNQVQGPPKPRWHKNLTGPQIITLNHTDLVPCLCIQVWPLEPDSVRTNICPFREDPRAHQNLWQAARLQLLTLQSWLLDAPCSLPAEAALCWRAPGGDPCQPLVPPLSWENVTVDVNSSEKLQLQECLWADSLGPLKDDVLLLETRGPQDNRSLCALEPSGCTSLPSKASTRAARLGEYLLQDLQSGQCLQLWDDDLGALWACPMDKYIHKRWALVWLACLLFAAALSLILLLKKDHAKAAARGRAALLLYSADDSGFERLVGALASALCQLPLRVAVDLWSRRELSAQGPVAWFHAQRRQTLQEGGVVVLLFSPGAVALCSEWLQDGVSGPGAHGPHDAFRASLSCVLPDFLQGRAPGSYVGACFDRLLHPDAVPALFRTVPVFTLPSQLPDFLGALQQPRAPRSGRLQERAEQVSRALQPALDSYFHPPGTPAPGRGVGPGAGPGAGDGT

SEQ ID NO: 6919 - protein, 720 aa, Homo sapiens
MPVPWFLLSLALGRSPVVLSLERLVGPQDATHCSPGLSCRLWDSDILCLPGDIVPAPGPVLAPTHLQTELVLRCQKETDCDLCLRVAVHLAVHGHWEEPEDEEKFGGAADSGVEEPRNASLQAQVVLSFQAYPTARCVLLEVQVPAALVQFGQSVGSVVYDCFEAALGSEVRIWSYTQPRYEKELNHTQQLPDCRGLEVWNSIPSCWALPWLNVSADGDNVHLVLNVSEEQHFGLSLYWNQVQGPPKPRWHKNLTGPQIITLNHTDLVPCLCIQVWPLEPDSVRTNICPFREDPRAHQNLWQAARLQLLTLQSWLLDAPCSLPAEAALCWRAPGGDPCQPLVPPLSWENVTVDKVLEFPLLKGHPNLCVQVNSSEKLQLQECLWADSLGPLKDDVLLLETRGPQDNRSLCALEPSGCTSLPSKASTRAARLGEYLLQDLQSGQCLQLWDDDLGALWACPMDKYIHKRWALVWLACLLFAAALSLILLLKKDHAKGWLRLLKQDVRSGAAARGRAALLLYSADDSGFERLVGALASALCQLPLRVAVDLWSRRELSAQGPVAWFHAQRRQTLQEGGVVVLLFSPGAVALCSEWLQDGVSGPGAHGPHDAFRASLSCVLPDFLQGRAPGSYVGACFDRLLHPDAVPALFRTVPVFTLPSQLPDFLGALQQPRAPRSGRLQERAEQVSRALQPALDSYFHPPGTPAPGRGVGPGAGPGAGDGT

SEQ ID NO: 6920 - protein, 707 aa, Homo sapiens
MPVPWFLLSLALGRSPVVLSLERLVGPQDATHCSPGLSCRLWDSDILCLPGDIVPAPGPVLAPTHLQTELVLRCQKETDCDLCLRVAVHLAVHGHWEEPEDEEKFGGAADSGVEEPRNASLQAQVVLSFQAYPTARCVLLEVQVPAALVQFGQSVGSVVYDCFEAALGSEVRIWSYTQPRYEKELNHTQQLPDCRGLEVWNSIPSCWALPWLNVSADGDNVHLVLNVSEEQHFGLSLYWNQVQGPPKPRWHKNLTGPQIITLNHTDLVPCLCIQVWPLEPDSVRTNICPFREDPRAHQNLWQAARLQLLTLQSWLLDAPCSLPAEAALCWRAPGGDPCQPLVPPLSWENVTVDKVLEFPLLKGHPNLCVQVNSSEKLQLQECLWADSLGPLKDDVLLLETRGPQDNRSLCALEPSGCTSLPSKASTRAARLGEYLLQDLQSGQCLQLWDDDLGALWACPMDKYIHKRWALVWLACLLFAAALSLILLLKKDHAKAAARGRAALLLYSADDSGFERLVGALASALCQLPLRVAVDLWSRRELSAQGPVAWFHAQRRQTLQEGGVVVLLFSPGAVALCSEWLQDGVSGPGAHGPHDAFRASLSCVLPDFLQGRAPGSYVGACFDRLLHPDAVPALFRTVPVFTLPSQLPDFLGALQQPRAPRSGRLQERAEQVSRALQPALDSYFHPPGTPAPGRGVGPGAGPGAGDGT

SEQ ID NO: 6921 - protein, 98 aa, Homo sapiens
MPVPWFLLSLALGRSPVVLSLERLVGPQDATHCSPGLSCRLWDSDILCLPGDIVPAPGPVLAPTHLQTELVLRCQKETDCDLCLRVAVHLAVHGLCGI

SEQ ID NO: 6922 - protein, 123 aa, Homo sapiens
MPVPWFLLSLALGRSPVVLSLERLVGPQDATHCSPGLSCRLWDSDILCLPGDIVPAPGPVLAPTHLQTELVLRCQKETDCDLCLRVAVHLAVHGLPYCPLRPAGGASACCPCAVWSVCGLCGI

SEQ ID NO: 6923 - protein, 91 aa, Homo sapiens
MPVPWFLLSLALGRSPVVLSLERLVGPQDATHCSPGLSCRLWGATKFWAWNSFSSHPLLHTQTVTYSACLGTSCLLRAPCWRLRTCRQSWC

SEQ ID NO: 6924 - protein, 70 aa, Homo sapiens
MPVPWFLLSLALGRSPVVLSLERLVGPQDATHCSPGLSCRLWVTYSACLGTSCLLRAPCWRLRTCRQSWC

SEQ ID NO: 6925 - protein, 44 aa, Homo sapiens
MPVPWFLLSLALGRSPVVLSLERLVGPQDATHCSPNCPVWSVWC

SEQ ID NO: 6926 - protein, 791 aa, Homo sapiens
MPVPWFLLSLALGRSPVVLSLERLVGPQDATHCSPVSLEPWGDEERLRVQFLAQQSLSLAPVTAATARTALSGLSGADGRREERGRGKSWVCLSLGGSGNTEPQKKGLSCRLWDSDILCLPGDIVPAPGPVLAPTHLQTELVLRCQKETDCDLCLRVAVHLAVHGHWEEPEDEEKFGGAADSGVEEPRNASLQAQVVLSFQAYPTARCVLLEVQVPAALVQFGQSVGSVVYDCFEAALGSEVRIWSYTQPRYEKELNHTQQLPDCRGLEVWNSIPSCWALPWLNVSADGDNVHLVLNVSEEQHFGLSLYWNQVQGPPKPRWHKNLTGPQIITLNHTDLVPCLCIQVWPLEPDSVRTNICPFREDPRAHQNLWQAARLQLLTLQSWLLDAPCSLPAEAALCWRAPGGDPCQPLVPPLSWENVTVDKVLEFPLLKGHPNLCVQVNSSEKLQLQECLWADSLGPLKDDVLLLETRGPQDNRSLCALEPSGCTSLPSKASTRAARLGEYLLQDLQSGQCLQLWDDDLGALWACPMDKYIHKRWALVWLACLLFAAALSLILLLKKDHAKGWLRLLKQDVRSGAAARGRAALLLYSADDSGFERLVGALASALCQLPLRVAVDLWSRRELSAQGPVAWFHAQRRQTLQEGGVVVLLFSPGAVALCSEWLQDGVSGPGAHGPHDAFRASLSCVLPDFLQGRAPGSYVGACFDRLLHPDAVPALFRTVPVFTLPSQLPDFLGALQQPRAPRSGRLQERAEQVSRALQPALDSYFHPPGTPAPGRGVGPGAGPGAGDGT

SEQ ID NO: 6927 - protein, 173 aa, Homo sapiens
MGSSRLAALLLPLLLIVIDLSDSAGIGFRHLPHWNTRCPLASHTDDSFTGLQRGLFHLLVQKSKKSSTFKFYRRHKMPAPAQRKLLPRRHLSEKSHHISIPSPDISHKGLRSKRTQPSDPETWESLPRLDSQRHGGPEFSFDLLPEARAIRVTISSGPEVSVRLCHQWALECE

SEQ ID NO: 6928 - protein, 667 aa, Homo sapiens
MGSSRLAALLLPLLLIVIDLSDSAGIGFRHLPHWNTRCPLASHTDDSFTGSSAYIPCRTWWALFSTKPWCVRVWHCSRCLCQHLLSGGSGLQRGLFHLLVQKSKKSSTFKFYRRHKMPAPAQRKLLPRRHLSEKSHHISIPSPDISHKGLRSKRTQPSDPETWESLPRLDSQRHGGPEFSFDLLPEARAIRVTISSGPEVSVRLCHQWALECEELSSPYDVQKIVSGGHTVELPYEFLLPCLCIEASYLQEDTVRRKKCPFQSWPEAYGSDFWKSVHFTDYSQHTQMVMALTLRCPLKLEAALCQRHDWHTLCKDLPNATARESDGWYVLEKVDLHPQLCFKFSFGNSSHVECPHQTGSLTSWNVSMDTQAQQLILHFSSRMHATFSAAWSLPGLGQDTLVPPVYTVSQARGSSPVSLDLIIPFLRPGCCVLVWRSDVQFAWKHLLCPDVSYRHLGLLILALLALLTLLGVVLALTCRRPQSGPGPARPVLLLHAADSEAQRRLVGALAELLRAALGGGRDVIVDLWEGRHVARVGPLPWLWAARTRVAREQGTVLLLWSGADLRPVSGPDPRAAPLLALLHAAPRPLLLLAYFSRLCAKGDIPPPLRALPRYRLLRDLPRLLRALDARPFAEATSWGRLGARQRRQSRLELCSRLEREAARLADLG

SEQ ID NO: 6929 - protein, 533 aa, Homo sapiens
MGSSRLAALLLPLLLIVIDLSDSAGIGFRHLPHWNTRCPLASHTDDSFTGSSAYIPCRTWWALFSTKPWCVRVWHCSRCLCQHLLSGGSGLQRGLFHLLVQKSKKSSTFKFYRRHKMPAPAQRKLLPRRHLSEKSHHISIPSPDISHKGLRSKRTQPSDPETWESLPRLDSQRHGGPEFSFDLLPEARAIRVTISSGPEVSVRLCHQWALECEELSSPYDVQKIVSGGHTVELPYEFLLPCLCIEASYLQEDTVRRKKCPFQSWPEAYGSDFWKSVHFTDYSQHTQMVMALTLRCPLKLEAALCQRHDWHTLCKDLPNATARESDGWYVLEKVDLHPQLCFKFSFGNSSHVECPHQTGSLTSWNVSMDTQAQQLILHFSSRMHATFSAAWSLPGLGQDTLVPPVYTVSQARGSSPVSLDLIIPFLRPGCCVLLHASLSSPGGEDAWLIGVGGSVPSGVAVRCPVCLEAPLVSGCLLQTPGALDPGTAGPPHPTGCCSGPHLPAPTVRPGPSAASAPPARGGLGGAAAPGGSAG

SEQ ID NO: 6930 - protein, 186 aa, Homo sapiens
MGSSRLAALLLPLLLIVIDLSDSAGIGFRHLPHWNTRCPLASHTEVLPISLAAPGGPSSPQSLGVCESGTVPAVCASICCQVAQVFNGASSTSWCRNPKSLPHSSSIGDTRCQHLLRGSCCLVVTCLRRAITFPSPPQTSPTRDFALKGPNLRIQRHGKVFPDWTHKGMEDPSSPLICCLRPGLFG

SEQ ID NO: 6931 - protein, 190 aa, Homo sapiens
MGSSRLAALLLPLLLIVIDLSDSAGIGFRHLPHWNTRCPLASHTRKLLPRRHLSEKSHHISIPSPDISHKGLRSKRTQPSDPETWESLPRLDSQRHGGPEFSFDLLPEARAIRVTISSGPEVSVRLCHQWALECEELSSPYDVQKIVSGGHTVELPYEFLLPCLCIEMARTSGSQCTSLTTASTLRWSWP

SEQ ID NO: 6932 - protein, 146 aa, Homo sapiens
MGSSRLAALLLPLLLIVIDLSDSAGIGFRHLPHWNTRCPLASHTVFNGASSTSWCRNPKSLPHSSSIGDTRCQHLLRGSCCLVVTCLRRAITFPSPPQTSPTRDFALKGPNLRIQRHGKVFPDWTHKGMEDPSSPLICCLRPGLFG

SEQ ID NO: 6933 - protein, 700 aa, Homo sapiens
MLAPFLLLLTHSRSPLSFRPCSHVPGALIAQKPMGSSRLAALLLPLLLIVIDLSDSAGIGFRHLPHWNTRCPLASHTDDSFTGSSAYIPCRTWWALFSTKPWCVRVWHCSRCLCQHLLSGGSGLQRGLFHLLVQKSKKSSTFKFYRRHKMPAPAQRKLLPRRHLSEKSHHISIPSPDISHKGLRSKRTQPSDPETWESLPRLDSQRHGGPEFSFDLLPEARAIRVTISSGPEVSVRLCHQWALECEELSSPYDVQKIVSGGHTVELPYEFLLPCLCIEASYLQEDTVRRKKCPFQSWPEAYGSDFWKSVHFTDYSQHTQMVMALTLRCPLKLEAALCQRHDWHTLCKDLPNATARESDGWYVLEKVDLHPQLCFKFSFGNSSHVECPHQTGSLTSWNVSMDTQAQQLILHFSSRMHATFSAAWSLPGLGQDTLVPPVYTVSQARGSSPVSLDLIIPFLRPGCCVLVWRSDVQFAWKHLLCPDVSYRHLGLLILALLALLTLLGVVLALTCRRPQSGPGPARPVLLLHAADSEAQRRLVGALAELLRAALGGGRDVIVDLWEGRHVARVGPLPWLWAARTRVAREQGTVLLLWSGADLRPVSGPDPRAAPLLALLHAAPRPLLLLAYFSRLCAKGDIPPPLRALPRYRLLRDLPRLLRALDARPFAEATSWGRLGARQRRQSRLELCSRLEREAARLADLG

SEQ ID NO: 6934 - protein, 194 aa, Homo sapiens
MTMRHNWTPDLSPLWVLLLCAHVVTLLVRATPVSQTTTAATASVRSTKDPCPSQPPVFPAAKQCPALEVTWPEVEVPLNGTLSLSCVACSRFPNFSILYWLGNGSFIEHLPGRLWEGSTSRERGSTGTQLCKALVLEQLTPALHSTNFSCVLVDPEQVVQRHVVLAQLWAGLRATLPPTQEALPSSHSSPQQQG

SEQ ID NO: 6935 - protein, 194 aa, Homo sapiens; identical to SEQ ID NO: 6934

SEQ ID NO: 6936 - protein, 194 aa, Homo sapiens; identical to SEQ ID NO: 6934

SEQ ID NO: 6937 - protein, 194 aa, Homo sapiens; identical to SEQ ID NO: 6934

SEQ ID NO: 6938 - protein, 194 aa, Homo sapiens; identical to SEQ ID NO: 6934

SEQ ID NO: 6939 - protein, 194 aa, Homo sapiens; identical to SEQ ID NO: 6934

SEQ ID NO: 6940 - protein, 199 aa, Homo sapiens
MTMRHNWTPDLSPLWVLLLCAHVVTLLVRATPVSQTTTAATASVRSTKDPCPSQPPVFPAAKQCPALEVTWPEVEVPLNGTLSLSCVACSRFPNFSILYWLGNGSFIEHLPGRLWEGSTSRERGSTGTQLCKALVLEQLTPALHSTNFSCVLVDPEQVVQRHVVLAQLWVRSPRRGLQEQEELCFHMWGGKGGLCQSSL

SEQ ID NO: 6941 - protein, 199 aa, Homo sapiens; identical to SEQ ID NO: 6940

SEQ ID NO: 6942 - protein, 163 aa, Homo sapiens
MTMRHNWTPDLSPLWVLLLCAHVVTLLVRATPVSQTTTAATASVRSTKDPCPSQPPVFPAAKQCPALEVTWPEVEVPLNGTLSLSCVACSRFPNFSILYWLGNGSFIEHLPGRLWEGSTSRERGSTGWAEGNLAPHPRSPALQPQQSTAAGLRLSTGPAAAQP

SEQ ID NO: 6943 - protein, 163 aa, Homo sapiens; identical to SEQ ID NO: 6942

SEQ ID NO: 6944 - protein, 115 aa, Homo sapiens
MTMRHNWTPDLSPLWVLLLCAHVVTLLVRATPVSQTTTAATASVRSTKDPCPSQPPVFPAAKQCPALEVTWPEVEVPLSWAEGNLAPHPRSPALQPQQSTAAGLRLSTGPAAAQP

SEQ ID NO: 6945 - protein, 170 aa, Homo sapiens
MNCRELPLTLWVLISVSTAESCTSRPHITVVEGEPFYLKHCSCSLAHEIETTTKSWYKSSGSQEHVELNPRSSSRIALHDCVLEFWPVELNDTGSYFFQMKNYTQKWKLNVIRRNKHSCFTERQVTSKIVEVKKFFQITCENSYYQTLVNSTSLYKIGPPICRKTSSGLH

SEQ ID NO: 6946 - protein, 541 aa, Homo sapiens
MNCRELPLTLWVLISVSTAESCTSRPHITVVEGEPFYLKHCSCSLAHEIETTTKSWYKSSGSQEHVELNPRSSSRIALHDCVLEFWPVELNDTGSYFFQMKNYTQKWKLNVIRRNKHSCFTERQVTSKIVEVKKFFQITCENSYYQTLVNSTSLYKNCKKLLLENNKNPTIKKNAEFEDQGYYSCVHFLHHNGKLFNITKTFNITIVEDRSNIVPVLLGPKLNHVAVELGKNVRLNCSALLNEEDVIYWMFGEENGSDPNIHEEKEMRIMTPEGKWHASKVLRIENIGESNLNVLYNCTVASTGGTDTKSFILVRKADMADIPGHVFTRGMIIAVLILVAVVCLVTVCVIYRVDLVLFYRHLTRRDETLTDGKTYDAFVSYLKECRPENGEEHTFAVEILPRVLEKHFGYKLCIFERDVVPGGAVVDEIHSLIEKSRRLIIVLSKSYMSNEVRYELESGLHEALVERKIKIILIEFTPVTDFTFLPQSLKLLKSHRVLKWKADKSLSYNSRFWKNLLYLMPAKTVKPGRDEPEVLPVLSES

SEQ ID NO: 6947 - protein, 541 aa, Homo sapiens; identical to SEQ ID NO: 6946

SEQ ID NO: 6948 - protein, 541 aa, Homo sapiens; identical to SEQ ID NO: 6946

SEQ ID NO: 6949 - protein, 457 aa, Homo sapiens
MILEVKPQTNASCEYSASHKQDLLLGSTGSISCPSLSCQSDAQSPAVTWYKNGKLLSVERSNRIVVDEVYDYHQGTYVCDYTQSDTVSSWTVRAVVQVRTIVGDTKLKPDILDPVEDTLEVELGKPLTISCKARFGFERVFNPVIKWYIKDSDLEWEVSVPEAKSIKSTLKDEIIERNIILEKVTQRDLRRKFVCFVQNSIGNTTQSVQLKEKRGVVLLYILLGTIGTLVAVLAASALLYRHWIEIVLLYRTYQSKDQTLGDKKDFDAFVSYAKWSSFPSEATSSLSEEHLALSLFPDVLENKYGYSLCLLERDVAPGGVYAEDIVSIIKRSRRGIFILSPNYVNGPSIFELQAAVNLALDDQTLKLILIKFCYFQEPESLPHLVKKALRVLPTVTWRGLKSVPPNSRFWAKMRYHMPVKNSQGFTWNQLRITSRIFQWKGLSRTETTGRSSQPKEW

SEQ ID NO: 6950 - protein, 44 aa, Homo sapiens
MLCLGWIFLWLVAGERIKGFNISGCSTKKLLWTYSTRSEEEFVL

SEQ ID NO: 6951 - protein, 599 aa, Homo sapiens
MLCLGWIFLWLVAGERIKGFNISGCSTKKLLWTYSTRSEEEFVLFCDLPEPQKSHFCHRNRLSPKQVPEHLPFMGSNDLSDVQWYQQPSNGDPLEDIRKSYPHIIQDKCTLHFLTPGVNNSGSYICRPKMIKSPYDVACCVKMILEVKPQTNASCEYSASHKQDLLLGSTGSISCPSLSCQSDAQSPAVTWYKNGKLLSVERSNRIVVDEVYDYHQGTYVCDYTQSDTVSSWTVRAVVQVRTIVGDTKLKPDILDPVEDTLEVELGKPLTISCKARFGFERVFNPVIKWYIKDSDLEWEVSVPEAKSIKSTLKDEIIERNIILEKVTQRDLRRKFVCFVQNSIGNTTQSVQLKEKRGVVLLYILLGTIGTLVAVLAASALLYRHWIEIVLLYRTYQSKDQTLGDKKDFDAFVSYAKWSSFPSEATSSLSEEHLALSLFPDVLENKYGYSLCLLERDVAPGGVYAEDIVSIIKRSRRGIFILSPNYVNGPSIFELQAAVNLALDDQTLKLILIKFCYFQEPESLPHLVKKALRVLPTVTWRGLKSVPPNSRFWAKMRYHMPVKNSQGFTWNQLRITSRIFQWKGLSRTETTGRSSQPKEW

SEQ ID NO: 6952 - protein, 215 aa, Homo sapiens
MCTEGAFPHRSACSLPLTHVHTHIHVCVPVLWGSVPRGMKLQCVSLWLLGTILILCSVDNHGLRRCLISTDMHHIEESFQEIKRAIQAKDTFPNVTILSTLETLQIIKPLDVCCVTKNLLAFYVDRVFKDHQEPNPKILRKISSIANSFLYMQKTLRQCQEQRQCHCRQEATNATRVIHDNYDQLEVHAAAIKSLGELDVFLAWINKNHEVMFSA

SEQ ID NO: 6953 - protein, 177 aa, Homo sapiens
MKLQCVSLWLLGTILILCSVDNHGLRRCLISTDMHHIEESFQEIKRAIQAKDTFPNVTILSTLETLQIIKPLDVCCVTKNLLAFYVDRVFKDHQEPNPKILRKISSIANSFLYMQKTLRQCQEQRQCHCRQEATNATRVIHDNYDQLEVHAAAIKSLGELDVFLAWINKNHEVMFSA

SEQ ID NO: 6954 - protein, 177 aa, Homo sapiens; identical to SEQ ID NO: 6953

SEQ ID NO: 6955 - protein, 298 aa, Homo sapiens
MEFFKNENNELPKLQWYKDCKPLLLDNIHFSGVKDRLIVMNVAEKHRGNYTCHASYTYLGKQYPITRVIEFITLEENKPTRPVIVSPANETMEVDLGSQIQLICNVTGQLSDIAYWKWNGSVIDEDDPVLGEDYYSVENPANKRRSTLITVLNISEIESRFYKHPFTCFAKNTHGIDAAYIQLIYPVTNFQKHMIGICVTLTVIIVCSVFIYKIFKIDIVLWYRDSCYDFLPIKASDGKTYDAYILYPKTVGEGSTSDCDIFVFKVLPEVLEKQCGYKLFIYGRDDYVGEDIVEVINE

SEQ ID NO: 6956 - protein, 80 aa, Homo sapiens
MKVLLRLICFIALLISSLEADKCKEREEKIILVSSANEIDVRPCPLNPNEHKGTITWYKDDSKTPVSTEQASRIHQHKEK

SEQ ID NO: 6957 - protein, 119 aa, Homo sapiens
MKVLLRLICFIALLISSLEADKCKEREEKIILVSSANEIDVRPCPLNPNEHKGTITWYKDDSKTPVSTEQASRIHQHKEKLWFVPAKVEDSGHYYCVVRIANLYFLTIYTLVESKIGSS

SEQ ID NO: 6958 - protein, 106 aa, Homo sapiens
MKVLLRLICFIALLISSLEADKCKEREEKIILVSSANEIDVRPCPLNPNEHKGTITWYKDDSKTPVSTEQASRIHQHKEKLWFVPAKVEDSGHYYCVVRNSSYCLR

SEQ ID NO: 6959 - protein, 114 aa, Homo sapiens
MKVLLRLICFIALLISSLEADKCKEREEKIILVSSANEIDVRPCPLNPNEHKGTITWYKDDSKTPVSTEQASRIHQHKEKLWFVPAKVEDSGHYYCVVRNSSYCLRIKISAKFV

SEQ ID NO: 6960 - protein, 182 aa, Homo sapiens
MKVLLRLICFIALLISSLEADKCKEREEKIILVSSANEIDVRPCPLNPNEHKGTITWYKDDSKTPVSTEQASRIHQHKEKLWFVPAKVEDSGHYYCVVRNSSYCLRIKISAKFVENEPNLCYNAQAIFKQKLPVAGDGGLVCPYMEFFKNENNELPKLQWYKDCKPLLLDNIHFSGVKDRLI

SEQ ID NO: 6961 - protein, 447 aa, Homo sapiens
MKVLLRLICFIALLISSLEADKCKEREEKIILVSSANEIDVRPCPLNPNEHKGTITWYKDDSKTPVSTEQASRIHQHKEKLWFVPAKVEDSGHYYCVVRNSSYCLRIKISAKFVENEPNLCYNAQAIFKQKLPVAGDGGLVCPYMEFFKNENNELPKLQWYKDCKPLLLDNIHFSGVKDRLIVMNVAEKHRGNYTCHASYTYLGKQYPITRVIEFITLEENKPTRPVIVSPANETMEVDLGSQIQLICNVTGQLSDIAYWKWNGSVIDEDDPVLGEDYYSVENPANKRRSTLITVLNISEIESRFYKHPFTCFAKNTHGIDAAYIQLIYPVTNFQKHMIGICVTLTVIIVCSVFIYKIFKIDIVLWYRDSCYDFLPIKASDGKTYDAYILYPKTVGEGSTSDCDIFVFKVLPEVLEKQCGYKLFIYGRDDYVGEGMCVMEQSKGLLL

SEQ ID NO: 6962 - protein, 447 aa, Homo sapiens; identical to SEQ ID NO: 6961

SEQ ID NO: 6963 - protein, 538 aa, Homo sapiens
MKVLLRLICFIALLISSLEADKCKEREEKIILVSSANEIDVRPCPLNPNEHKGTITWYKDDSKTPVSTEQASRIHQHKEKLWFVPAKVEDSGHYYCVVRNSSYCLRIKISAKFVENEPNLCYNAQAIFKQKLPVAGDGGLVCPYMEFFKNENNELPKLQWYKDCKPLLLDNIHFSGVKDRLIVMNVAEKHRGNYTCHASYTYLGKQYPITRVIEFITLEENKPTRPVIVSPANETMEVDLGSQIQLICNVTGQLSDIAYWKWNGSVIDEDDPVLGEDYYSVENPANKRRSTLITVLNISEIESRFYKHPFTCFAKNTHGIDAAYIQLIYPVTNFQKHMIGICVTLTVIIVCSVFIYKIFKIDIVLWYRDSCYDFLPIKVLPEVLEKQCGYKLFIYGRDDYVGEDIVEVINENVKKSRRLIIILVRETSGFSWLGGSSEEQIAMYNALVQDGIKVVLLELEKIQDYEKMPESIKFIKQKHGAIRWSGDFTQGPQSAKTRFWKNVRYHMPVQRRSPSSKHQLLSPATKEKLQREAHVPLG

SEQ ID NO: 6964 - protein, 447 aa, Homo sapiens; identical to SEQ ID NO: 6961

SEQ ID NO: 6965 - protein, 569 aa, Homo sapiens
MKVLLRLICFIALLISSLEADKCKEREEKIILVSSANEIDVRPCPLNPNEHKGTITWYKDDSKTPVSTEQASRIHQHKEKLWFVPAKVEDSGHYYCVVRNSSYCLRIKISAKFVENEPNLCYNAQAIFKQKLPVAGDGGLVCPYMEFFKNENNELPKLQWYKDCKPLLLDNIHFSGVKDRLIVMNVAEKHRGNYTCHASYTYLGKQYPITRVIEFITLEENKPTRPVIVSPANETMEVDLGSQIQLICNVTGQLSDIAYWKWNGSVIDEDDPVLGEDYYSVENPANKRRSTLITVLNISEIESRFYKHPFTCFAKNTHGIDAAYIQLIYPVTNFQKHMIGICVTLTVIIVCSVFIYKIFKIDIVLWYRDSCYDFLPIKASDGKTYDAYILYPKTVGEGSTSDCDIFVFKVLPEVLEKQCGYKLFIYGRDDYVGEDIVEVINENVKKSRRLIIILVRETSGFSWLGGSSEEQIAMYNALVQDGIKVVLLELEKIQDYEKMPESIKFIKQKHGAIRWSGDFTQGPQSAKTRFWKNVRYHMPVQRRSPSSKHQLLSPATKEKLQREAHVPLG

SEQ ID NO: 6966 - protein, 173 aa, Homo sapiens
MKVLLRLICFIALLISSLEADKCKEREEKIILVSSANEIDVRPCPLNPNEHKGTITWYKDDSKTPVSTEQASRIHQHKEKLWFVPAKVEDSGHYYCVVRNSSYCLRIKISAKFVENEPNLCYNAQAIFKQKLPVAGDGGLVCPYMEFFKNENNELPKLQWYKVAVSRVWATAL

SEQ ID NO: 6967 - protein, 124 aa, Homo sapiens
  VARIANT 1: note = misc_feature - Xaa can be any naturally occurring amino acid
XKCKEREEKIILVSSANEIDVRPCPLNPNEHKGTITWYKDDSKTPVSTEQASRIHQHKEKLWFVPAKVEDSGHYYCVETEDLCALIWSFLKMKIMSYLNYSGIRIANLYFLTIYTLVESKIGSS

SEQ ID NO: 6968 - protein, 229 aa, Homo sapiens
MLRLYVLVMGVSAFTLQPAAHTGAARSCRFRGRHYKREFRLEGEPVALRCPQVPYWLWASVSPRINLTWHKNDSARTVPGEEETRMWAQDGALWLLPALQEDSGTYVCTTRNASYCDKMSIELRVFENTDAFLPFISYPQILTLSTSGVLVCPDLSEFTRDKTDVKIQWYKDSLLLDKDNEKFLSVRGTTHLLVHDVALEDAGYYRCVLTFAHEGQQYNITRSIELRIK

SEQ ID NO: 6969 - protein, 398 aa, Homo sapiens
MLRLYVLVMGVSAFTLQPAAHTGAARSCRFRGRHYKREFRLEGEPVALRCPQVPYWLWASVSPRINLTWHKNDSARTVPGEEETRMWAQDGALWLLPALQEDSGTYVCTTRNASYCDKMSIELRVFENTDAFLPFISYPQILTLSTSGVLVCPDLSEFTRDKTDVKIQWYKDSLLLDKDNEKFLSVRGTTHLLVHDVALEDAGYYRCVLTFAHEGQQYNITRSIELRIKKKKEETIPVIISPLKTISASLGSRLTIPCKVFLGTGTPLTTMLWWTANDTHIESAYPGGRVTEGPRQEYSENNENYIEVPLIFDPVTREDLHMDFKCVVHNTLSFQTLRTTVKEASSTFSWGIVLAPLSLAFLVLGGIWMHRRCKHRTGKADGLTVLWPHHQDFQSYPK

SEQ ID NO: 6970 - protein, 398 aa, Homo sapiens; identical to SEQ ID NO: 6969

SEQ ID NO: 6971 - protein, 296 aa, Homo sapiens
MLRLYVLVMGVSAFTLQPAAHTGAARSCRFRGRHYKREFRLEGEPVALRCPQVPYWLWASVSPRINLTWHKNDSARTVPGEEETRMWAQDGALWLLPALQEDSGTYVCTTRNASYCDKMSIELRVFENTDAFLPFISYPQILTLSTSGVLVCPDLSEFTRDKTDVKIQWYKDSLLLDKDNEKFLSVRGTTHLLVHDVALEDAGYYRCVLTFAHEGQQYNITRSIELRIKKKKEETIPVIISPLKTISASLGSRLTIPCKVFLGTGTPLTTMLWWTANDTHIESAYPGGRVTEGPRQ

SEQ ID NO: 6972 - protein, 215 aa, Homo sapiens
MKLPVHKLYIEYGIQRITCPNVDGYFPSSVKPTITWYMGCYKIQNFNNVIPEGMNLSFLIALISNNGNYTCVVTYPENGRTFHLTRTLTVKVVGSPKNAVPPVIHSPNDHVVYEKEPGEELLIPCTVYFSFLMDSRNEVWWTIDGKKPDDITIDVTINESISHSRTEDETRTQILSIKKVTSEDLKRSYVCHARSAKGEVAKAAKVKQKGNRCGQ

SEQ ID NO: 6973 - protein, 113 aa, Homo sapiens
MTLLWCVVSLYFYGILQSDASERCDDWGLDTMRQIQVFEDEPARIKCPLFEHFLKFNYSTAHSAGLTLIWYWTRQDRDLEEPINFRLPENRISKEKDVLWFRPTLLNDTGNYT

SEQ ID NO: 6974 - protein, 145 aa, Homo sapiens
MTLLWCVVSLYFYGILQSDASERCDDWGLDTMRQIQVFEDEPARIKCPLFEHFLKFNYSTAHSAGLTLIWYWTRQDRDLEEPINFRLPENRISKEKDVLWFRPTLLNDTGNYTCMLRNTTYCSKVAFPLEVVQKDSCFNSPMKLP

SEQ ID NO: 6975 - protein, 570 aa, Homo sapiens
MTLLWCVVSLYFYGILQSDASERCDDWGLDTMRQIQVFEDEPARIKCPLFEHFLKFNYSTAHSAGLTLIWYWTRQDRDLEEPINFRLPENRISKEKDVLWFRPTLLNDTGNYTCMLRNTTYCSKVAFPLEVVQKDSCFNSPMKLPVHKLYIEYGIQRITCPNVDGYFPSSVKPTITWYMGCYKIQNFNNVIPEGMNLSFLIALISNNGNYTCVVTYPENGRTFHLTRTLTVKVVGSPKNAVPPVIHSPNDHVVYEKEPGEELLIPCTVYFSFLMDSRNEVWWTIDGKKPDDITIDVTINESISHSRTEDETRTQILSIKKVTSEDLKRSYVCHARSAKGEVAKAAKVKQKVPAPRYTVELACGFGATVLLVVILIVVYHVYWLEMVLFYRAHFGTDETILDGKEYDIYVSYARNAEEEEFVLLTLRGVLENEFGYKLCIFDRDSLPGGIVTDETLSFIQKSRRLLVVLSPNYVLQGTQALLELKAGLENMASRGNINVILVQYKAVKETKVKELKRAKTVLTVIKWKGEKSKYPQGRFWKQLQVAMPVKKSPRRSSSDEQGLSYSSLKNV

SEQ ID NO: 6976 - protein, 346 aa, Homo sapiens
MTLLWCVVSLYFYGILQSDASERCDDWGLDTMRQIQVFEDEPARIKCPLFEHFLKFNYSTAHSAGLTLIWYWTRQDRDLEEPINFRLPENRISKEKDVLWFRPTLLNDTGNYTCMLRNTTYCSKVAFPLEVVQKDSCFNSPMKLPVHKLYIEYGIQRITCPNVDGYFPSSVKPTITWYMGCYKIQNFNNVIPEGMNLSFLIALISNNGNYTCVVTYPENGRTFHLTRTLTVKVVGSPKNAVPPVIHSPNDHVVYEKEPGEELLIPCTVYFSFLMDSRNEVWWTIDGKKPDDITIDVTINESASSKIHSGTGLWFWSHSPASGDSHCCLPCLLARDGPILPGSFWNR

SEQ ID NO: 6977 - protein, 687 aa, Homo sapiens
MTLLWCVVSLYFYGILQSDASERCDDWGLDTMRQIQVFEDEPARIKCPLFEHFLKFNYSTAHSAGLTLIWYWTRQDRDLEEPINFRLPENRISKEKDVLWFRPTLLNDTGNYTCMLRNTTYCSKVAFPLEVVQKDSCFNSPMKLPVHKLYIEYGIQRITCPNVDGYFPSSVKPTITWYMGCYKIQNFNNVIPEGMNLSFLIALISNNGNYTCVVTYPENGRTFHLTRTLTVKVVGSPKNAVPPVIHSPNDHVVYEKEPGEELLIPCTVYFSFLMDSRNEVWWTIDGKKPDDITIDVTINESISHSRTEDETRTQILSIKKVTSEDLKRSYVCHARSAKGEVAKAAKVKQKVPAPRYTVELACGFGATVLLVVILIVVYHVYWLEMVLFYRAHFGTDETILDGKEYDIYVSYARNAEEEEFVLLTLRGVLENEFGYKLCIFDRDSLPGGNTVEAVFDFIQRSRRMIVVLSPDYVTEKSISMLEFKLGVMCQNSIATKLIVVEYRPLEHPHPGILQLKESVSFVSWKGEKSKHSGSKFWKALRLALPLRSLSASSGWNESCSSQSDISLDHVQRRRSRLKEPPELQSSERAAGSPPAPGTMSKHRGKSSATCRCCVTYCEGENHLRNKSRAEIHNQPQWETHLCKPVPQESETQWIQNGTRLEPPAPQISALALHHFTDLSNNNDFYIL

SEQ ID NO: 6978 - protein, 570 aa, Homo sapiens; identical to SEQ ID NO: 6975

SEQ ID NO: 6979 - protein, 687 aa, Homo sapiens; identical to SEQ ID NO: 6977

SEQ ID NO: 6980 - protein, 356 aa, Homo sapiens
MTLLWCVVSLYFYGILQSDASERCDDWGLDTMRQIQVFEDEPARIKCPLFEHFLKFNYSTAHSAGLTLIWYWTRQDRDLEEPINFRLPENRISKEKDVLWFRPTLLNDTGNYTCMLRNTTYCSKVAFPLEVVQKDSCFNSPMKLPVHKLYIEYGIQRITCPNVDGYFPSSVKPTITWYMGCYKIQNFNNVIPEGMNLSFLIALISNNGNYTCVVTYPENGRTFHLTRTLTVKVVGSPKNAVPPVIHSPNDHVVYEKEPGEELLIPCTVYFSFLMDSRNEVWWTIDGKKPDDITIDVTINESISHSRTEDETRTQILSIKKVTSEDLKRSYVCHARSAKGEVAKAAKVKQKGNRCGQ

SEQ ID NO: 6981 - protein, 356 aa, Homo sapiens; identical to SEQ ID NO: 6980

SEQ ID NO: 6982 - protein, 346 aa, Homo sapiens; identical to SEQ ID NO: 6976

SEQ ID NO: 6983 - protein, 570 aa, Homo sapiens; identical to SEQ ID NO: 6975

SEQ ID NO: 6984 - protein, 570 aa, Homo sapiens; identical to SEQ ID NO: 6975

SEQ ID NO: 6985 - protein, 193 aa, Homo sapiens
  VARIANT 1: note = misc_feature - Xaa can be any naturally occurring amino acid
XFIHIGTSKHIEVKTQGCYKIQNFNNVIPEGMNLSFLIALISNNGNYTCVVTYPENGRTFHLTRTLTVKVVGSPKNAVPPVIHSPNDHVVYEKEPGEELLIPCTVYFSFLMDSRNEVWWTIDGKKPDDITIDVTINESISHSRTEDETRTQILSIKKVTSEDLKRSYVCHARSAKGEVAKAAKVKQKGNRCGQ

SEQ ID NO: 6986 - protein, 38 aa, Homo sapiens
MGFWILAILTILMYSTAAKFSKQSWGLENEALIVRCPR

SEQ ID NO: 6987 - protein, 556 aa, Homo sapiens
MGFWILAILTILMYSTAAKFSKQSWGLENEALIVRCPRQGKPSYTVDWYYSQTNKSIPTQERNRVFASGQLLKFLPAAVADSGIYTCIVRSPTFNRTGYANVTIYKKQSDCNVPDYLMYSTVSGSEKNSKIYCPTIDLYNWTAPLEWFKNCQALQGSRYRAHKSFLVIDNVMTEDAGDYTCKFIHNENGANYSVTATRSFTVKDEQGFSLFPVIGAPAQNEIKEVEIGKNANLTCSACFGKGTQFLAAVLWQLNGTKITDFGEPRIQQEEGQNQSFSNGLACLDMVLRIADVKEEDLLLQYDCLALNLHGLRRHTVRLSRKNPIDHHSIYCIIAVCSVFLMLINVLVIILKMFWIEATLLWRDIAKPYKTRNDGKLYDAYVVYPRNYKSSTDGASRVEHFVHQILPDVLENKCGYTLCIYGRDMLPGEDVVTAVETNIRKSRRHIFILTPQITHNKEFAYEQEVALHCALIQNDAKVILIEMEALSELDMLQAEALQDSLQHLMKVQGTIKWREDHIANKRSLNSKFWKHVRYQMPVPSKIPRKASSLTPLAAQKQ

SEQ ID NO: 6988 - protein, 328 aa, Homo sapiens
MGFWILAILTILMYSTAAKFSKQSWGLENEALIVRCPRQGKPSYTVDWYYSQTNKSIPTQERNRVFASGQLLKFLPAAVADSGIYTCIVRSPTFNRTGYANVTIYKKQSDCNVPDYLMYSTVSGSEKNSKIYCPTIDLYNWTAPLEWFKNCQALQGSRYRAHKSFLVIDNVMTEDAGDYTCKFIHNENGANYSVTATRSFTVKDEQGFSLFPVIGAPAQNEIKEVEIGKNANLTCSACFGKGTQFLAAVLWQLNGTKITDFGEPRIQQEEGQNQSFSNGLACLDMVLRIADVKEEDLLLQYDCLALNLHGLRRHTVRLSRKNPSKECF

SEQ ID NO: 6989 - protein, 314 aa, Homo sapiens
MGFWILAILTILMYSTAAKFSKQSWGLENEALIVRCPRQGKPSYTVDWYYSQTNKSIPTQERNRVFASGQLLKFLPAAVADSGIYTCIVRSPTFNRTGYANVTIYKKQSDCNVPDYLMYSTVSGSEKNSKIYCPTIDLYNWTAPLEWFKNCQALQGSRYRAHKSFLVIDNVMTEDAGDYTCKFIHNENGANYSVTATRSFTVKDEQGFSLFPVIGAPAQNEIKEVEIGTQFLAAVLWQLNGTKITDFGEPRIQQEEGQNQSFSNGLACLDMVLRIADVKEEDLLLQYDCLALNLHGLRRHTVRLSRKNPSKECF

SEQ ID NO: 6990 - protein, 259 aa, Homo sapiens
MGFWILAILTILMYSTAAKFSKQSWGLENEALIVRCPRQGKPSYTVDWYYSQTNKSIPTQERNRVFASGQLLKFLPAAVADSGIYTCIVRSPTFNRTGYANVTIYKKQSDCNVPDYLMYSTVSGSEKNSKIYCPTIDLYNWTAPLEWFKNCQALQGSRYRAHKSFLVIDNVMTEDAGDYTCKFIHNENGANYSVTATRSFTVKVWCQSFCKLKKSLIFSNTHWIQSLMRGFVMVYYGVHKCCRVVFNLCLQYFQHHQWP

SEQ ID NO: 6991 - protein, 211 aa, Homo sapiens
MYSTVSGSEKNSKIYCPTIDLYNWTAPLEWFKNCQALQGSRYRAHKSFLVIDNVMTEDAGDYTCKFIHNENGANYSVTATRSFTVKDEQGFSLFPVIGAPAQNEIKEVEIGKNANLTCSACFGKGTQFLAAVLWQLNGTKITDFGEPRIQQEEGQNQSFSNGLACLDMVLRIADVKEEDLLLQYDCLALNLHGLRRHTVRLSRKNPSKECF

SEQ ID NO: 6992 - protein, 457 aa, Homo sapiens
MTGLVSLSYFPLSTRSCALQSCSPVWGCGPCCSAGCPSPFHCLSQQDCNEIKGERFTVLETRLLVSNVSAEDRGNYACQAILTHSGKQYEVLNGITVSIKRAGYGGSVPKIIYPKNHSIEVQLGTTLIVDCNVTDTKDNTNLRCWRVNNTLVDDYYDESKRIREGVETHVSFREHNLYTVNITFLEVKMEDYGLPFMCHAGVSTAYIILQLPAPDFRAYLIGGLIALVAVAVSVVYIYNIFKIDIVLWYRSAFHSTETIVDGKLYDAYVLYPKPHKESQRHAVDALVLNILPEVLERQCGYKLFIFGRDEFPGQAVANVIDENVKLCRRLIVIVVPESLGFGLLKNLSEEQIAVYSALIQDGMKVILIELEKIEDYTVMPESIQYIKQKHGAIRWHGDFTEQSQCMKTKFWKTVRYHMPPRRCRPFPPVQLLQHTPCYRTAGPELGSRRKKCTLTTG

SEQ ID NO: 6993 - protein, 172 aa, Homo sapiens
MWSLLLCGLSIALPLSVTADGCKDIFMKNEILSASQPFAFNCTFPPITSGEVSVTWYKNSSKIPVSKIIQSRIHQDETWILFLPMEWGDSGVYQCVIKGRDSCHRIHVNLTVFEKHWCDTSIGGLPNLSDEYKQILHLGKDDSLTCHLHFPKSCVLGPIKWYKDCNEIKGER

SEQ ID NO: 6994 - protein, 575 aa, Homo sapiens
MWSLLLCGLSIALPLSVTADGCKDIFMKNEILSASQPFAFNCTFPPITSGEVSVTWYKNSSKIPVSKIIQSRIHQDETWILFLPMEWGDSGVYQCVIKGRDSCHRIHVNLTVFEKHWCDTSIGGLPNLSDEYKQILHLGKDDSLTCHLHFPKSCVLGPIKWYKDCNEIKGERFTVLETRLLVSNVSAEDRGNYACQAILTHSGKQYEVLNGITVSITERAGYGGSVPKIIYPKNHSIEVQLGTTLIVDCNVTDTKDNTNLRCWRVNNTLVDDYYDESKRIREGVETHVSFREHNLYTVNITFLEVKMEDYGLPFMCHAGVSTAYIILQLPAPDFRAYLIGGLIALVAVAVSVVYIYNIFKIDIVLWYRSAFHSTETIVDGKLYDAYVLYPKPHKESQRHAVDALVLNILPEVLERQCGYKLFIFGRDEFPGQAVANVIDENVKLCRRLIVIVVPESLGFGLLKNLSEEQIAVYSALIQDGMKVILIELEKIEDYTVMPESIQYIKQKHGAIRWHGDFTEQSQCMKTKFWKTVRYHMPPRRCRPFPPVQLLQHTPCYRTAGPELGSRRKKCTLTTG

SEQ ID NO: 6995 - protein, 180 aa, Homo sapiens
MALADLYEEGGGGGGEGEDNADSKETICRPSGRKSSKMQAFRIWDVNQKTFYLRNNQLVAGYLQGPNVNLEEKIDVVPIEPHALFLGIHGGKMCLSCVKSGDETRLQLEAVNITDLSENRKQDKRFAFIRSDSGPTTSFESAACPGWFLCTAMEADQPVSLTNMPDEGVMVTKFYFQEDE

SEQ ID NO: 6996 - protein, 159 aa, Homo sapiens
MALETICRPSGRKSSKMQAFRIWDVNQKTFYLRNNQLVAGYLQGPNVNLEEKIDVVPIEPHALFLGIHGGKMCLSCVKSGDETRLQLEAVNITDLSENRKQDKRFAFIRSDSGPTTSFESAACPGWFLCTAMEADQPVSLTNMPDEGVMVTKFYFQEDE

SEQ ID NO: 6997 - protein, 177 aa, Homo sapiens
MEICRGLRSHLITLLLFLFHSETICRPSGRKSSKMQAFRIWDVNQKTFYLRNNQLVAGYLQGPNVNLEEKIDVVPIEPHALFLGIHGGKMCLSCVKSGDETRLQLEAVNITDLSENRKQDKRFAFIRSDSGPTTSFESAACPGWFLCTAMEADQPVSLTNMPDEGVMVTKFYFQEDE

SEQ ID NO: 6998 - protein, 143 aa, Homo sapiens
MQAFRIWDVNQKTFYLRNNQLVAGYLQGPNVNLEEKIDVVPIEPHALFLGIHGGKMCLSCVKSGDETRLQLEAVNITDLSENRKQDKRFAFIRSDSGPTTSFESAACPGWFLCTAMEADQPVSLTNMPDEGVMVTKFYFQEDE

SEQ ID NO: 6999 - protein, 143 aa, Homo sapiens; identical to SEQ ID NO: 6998

SEQ ID NO: 7000 - protein, 153 aa, Homo sapiens
MYRMQLLSCIALSLALVTNSAPTSSSTKKTQLQLEHLLLDLQMILNGINNYKNPKLTRMLTFKFYMPKKATELKHLQCLEEELKPLEEVLNLAQSKNFHLRPRDLISNINVIVLELKGSETTFMCEYADETATIVEFLNRWITFCQSIISTLT

SEQ ID NO: 7001 - protein, 176 aa, Homo sapiens
MKASSLAFSLLSAAFYLLWTPSTGLKTLNLGSCVIATNLQEIRNGFSEIRGSVQAKDGNIDIRILRRTESLQDTKPANRCCLLRHLLRLYLDRVFKNYQTPDHYTLRKISSLANSFLTIKKDLRLCHAHMTCHCGEEAMKKYSQILSHFEKLEPQAAVVKALGELDILLQWMEETE

SEQ ID NO: 7002 - protein, 176 aa, Homo sapiens; identical to SEQ ID NO: 7001

SEQ ID NO: 7003 - protein, 151 aa, Homo sapiens
MKASSLAFSLLSAAFYLLWTPSTGLKTLNLGSCVIATNLQEIRNGFSEIRGSVQAKDGNIDIRILRRTESLQDTKPANRCCLLRHLLRLYLDRVFKNYQTPDHYTLRKISSLANSFLTIKKDLRLCLEPQAAVVKALGELDILLQWMEETE

SEQ ID NO: 7004 - protein, 504 aa, Homo sapiens
MKNVLQWTPPEGLQGVKVTYTVQYFIYGQKKWLNKSECRNINRTYCDLSAETSDYEHQYYAKVKAIWGTKCSKWAESGRFYPFLETQIGPPEVALTTDEKSISVVLTAPEKWKRNPEDLPVSMQQIYSNLKYNVSVLNTKSNRTWSQCVTNHTLVLTWLEPNTLYCVHVESFVPGPPRRAQPSEKQCARTLKDQSSEFKAKIIFWYVLPVSITVFLFSVMGYSIYRYIHVGKEKHPANLILIYGNEFDKRFFVPAEKIVINFITLNISDDSKISHQDMSLLGKSSDVSSLNDPQPSGNLRPPQEEEEVKHLGYASHLMEIFCDSEENTEGTSLTQQESLSRTIPPDKTVIEYEYDVRTTDICAGPEEQELSLQEEVSTQGTLLESQAALAVLGPQTLQYSYTPQLQDLDPLAQEHTDSEEGPEEEPSTTLVDWDPQTGRLCIPSLSSFDQDSEGCEPSEGDGLGEEGLLSRLYEEPAPDRPPGENETYLMQFMEEWGLYVQMEN

SEQ ID NO: 7005 - protein, 42 aa, Homo sapiens
MRAPGRPALRPLPLPPLLLLLLAAPWGRAGYSRPLLGLWAKV

SEQ ID NO: 7006 - protein, 209 aa, Homo sapiens
MRAPGRPALRPLPLPPLLLLLLAAPWGRAVPCVSGGLPKPANITFLSINMKNVLQWTPPEGLQGVKVTYTVQYFIYGQKKWLNKSECRNINRTYCDLSAETSDYEHQYYAKVKAIWGTKCSKWAESGRFYPFLETQIGPPEVALTTDEKSISVVLTAPEKWKRNPEDLPVSMQQIYSNLKYNVSVLNTKSNRTVSLKWNGAYIHVPLCS

SEQ ID NO: 7007 - protein, 553 aa, Homo sapiens
MRAPGRPALRPLPLPPLLLLLLAAPWGRAVPCVSGGLPKPANITFLSINMKNVLQWTPPEGLQGVKVTYTVQYFIYGQKKWLNKSECRNINRTYCDLSAETSDYEHQYYAKVKAIWGTKCSKWAESGRFYPFLETQIGPPEVALTTDEKSISVVLTAPEKWKRNPEDLPVSMQQIYSNLKYNVSVLNTKSNRTWSQCVTNHTLVLTWLEPNTLYCVHVESFVPGPPRRAQPSEKQCARTLKDQSSEFKAKIIFWYVLPVSITVFLFSVMGYSIYRYIHVGKEKHPANLILIYGNEFDKRFFVPAEKIVINFITLNISDDSKISHQDMSLLGKSSDVSSLNDPQPSGNLRPPQEEEEVKHLGYASHLMEIFCDSEENTEGTSLTQQESLSRTIPPDKTVIEYEYDVRTTDICAGPEEQELSLQEEVSTQGTLLESQAALAVLGPQTLQYSYTPQLQDLDPLAQEHTDSEEGPEEEPSTTLVDWDPQTGRLCIPSLSSFDQDSEGCEPSEGDGLGEEGLLSRLYEEPAPDRPPGENETYLMQFMEEWGLYVQMEN

SEQ ID NO: 7008 - protein, 89 aa, Homo sapiens
MSYNGLHQRVFKELKLLTLCSISSPEKWKRNPEDLPVSMQQIYSNLKYNVSVLNTKSNRTWSQCVTNHTLVLTWLEPNTLYCVHVESFV

SEQ ID NO: 7009 - protein, 177 aa, Homo sapiens
MSYNGLHQRVFKELKLLTLCSISSQIGPPEVALTTDEKSISVVLTAPEKWKRNPEDLPVSMQQIYSNLKYNVSVLNTKSNRTWSQCVTNHTLVLTWLEPNTLYCVHVESFVPGPPRRAQPSEKQCARTLKDQSSEFKAKIIFWYVLPVSITVFLFSVMGYSIYRYIHVGKEKHPANL

SEQ ID NO: 7010 - protein, 442 aa, Homo sapiens
MSYNGLHQRVFKELKLLTLCSISSQIGPPEVALTTDEKSISVVLTAPEKWKRNPEDLPVSMQQIYSNLKYNVSVLNTKSNRTWSQCVTNHTLVLTWLEPNTLYCVHVESFVPGPPRRAQPSEKQCARTLKDQSSEFKAKIIFWYVLPVSITVFLFSVMGYSIYRYIHVGKEKHPANLILIYGNEFDKRFFVPAEKIVINFITLNISDDSKISHQDMSLLGKSSDVSSLNDPQPSGNLRPPQEEEEVKHLGYASHLMEIFCDSEENTEGTSLTQQESLSRTIPPDKTVIEYEYDVRTTDICAGPEEQELSLQEEVSTQGTLLESQAALAVLGPQTLQYSYTPQLQDLDPLAQEHTDSEEGPEEEPSTTLVDWDPQTGRLCIPSLSSFDQDSEGCEPSEGDGLGEEGLLSRLYEEPAPDRPPGENETYLMQFMEEWGLYVQMEN

SEQ ID NO: 7011 - protein, 162 aa, Homo sapiens
MRSSPGNMERIVICLMVIFLGTLVHKSSSQGQDRHMIRMRQLIDIVDQLKNYVNDLVPEFLPAPEDVETNCEWSAFSCFQKAQLKSANTGNNERIINVSIKKLKRKPPSTNAGRRQKHRLTCPSCDSYEKKPPKEFLERFKSLLQKMIHQHLSSRTHGSEDS

SEQ ID NO: 7012 - protein, 153 aa, Homo sapiens
MRSSPGNMERIVICLMVIFLGTLVHKSSSQGQDRHMIRMRQLIDIVDQLKNYVNDLVPEFLPAPEDVETNCEWSAFSCFQKAQLKSANTGNNERIINVSIKKLKRKPPSTNAGRRQKHRLTCPSCDSYEKKPPKEFLERFKSLLQKVSTLSFI

SEQ ID NO: 7013 - protein, 179 aa, Homo sapiens
MAALQKSVSSFLMGTLATSCLLLLALLVQGGAAAPISSHCRLDKSNFQQPYITNRTFMLAKEASLADNNTDVRLIGEKLFHGVSMSERCYLMKQVLNFTLEEVLFPQSDRFQPYMQEVVPFLARLSNRLSTCHIEGDDLHIQRNVQKLKDTVKKLGESGEIKAIGELDLLFMSLRNACI

SEQ ID NO: 7014 - protein, 179 aa, Homo sapiens; identical to SEQ ID NO: 7013

SEQ ID NO: 7015 - protein, 263 aa, Homo sapiens
MMPKHCFLGFLISFFLTGVAGTQSTHESLKPQRVQFQSRNFHNILQWQPGRALTGNSSVYFVQYKIMFSCSMKSSHQKPSGCWQHISCNFPGCRTLAKYGQRQWKNKEDCWGTQELSCDLTSETSDIQEPYYGRVRAASAGSYSEWSMTPRFTPWWETKIDPPVMNITQVNGSLLVILHAPNLPYRYQKEKNVSIEDYYELLYRVFIINNSLEKEQKVYEGAHRAVEIEALTPHSSYCVVAEIYQPMLDRRSQRSEERCVEIP

SEQ ID NO: 7016 - protein, 130 aa, Homo sapiens
MMPKHCFLGFLISFFLTGVAGTQSTHESLKPQRVQFQSRNFHNILQWQPGRALTGNSSVYFVQYKIYGQRQWKNKEDCWGTQELSCDLTSETSDIQEPYYGRVRAASAGSYSEWSMTPRFTPWWERAKGL

SEQ ID NO: 7017 - protein, 231 aa, Homo sapiens
MMPKHCFLGFLISFFLTGVAGTQSTHESLKPQRVQFQSRNFHNILQWQPGRALTGNSSVYFVQYKIYGQRQWKNKEDCWGTQELSCDLTSETSDIQEPYYGRVRAASAGSYSEWSMTPRFTPWWETKIDPPVMNITQVNGSLLVILHAPNLPYRYQKEKNVSIEDYYELLYRVFIINNSLEKEQKVYEGAHRAVEIEALTPHSSYCVVAEIYQPMLDRRSQRSEERCVEIP

SEQ ID NO: 7018 - protein, 189 aa, Homo sapiens
MLGSRAVMLLLLLPWTAQGRAVPGGSSPAWTQCQQLSQKLCTLAWSAHPLVGHMDLREEGDEETTNDVPHIQCGDGCDPQGLRDNSQFCLQRIHQGLIFYEKLLGSDIFTGEPSLLPDSPVGQLHASLLGLSQLLQPEGHHWETQQIPSLSPSQPWQRLLLRFKILRSLQAFVAVAARVFAHGAATLSP

SEQ ID NO: 7019 - protein, 206 aa, Homo sapiens
MNFQQRLQSLWTLARPFCPPLLATASQMQMVVLPCLGFTLLLWSQVSGAQGQEFHFGPCQVKGVVPQKLWEAFWAVKDTMQAQDNITSARLLQQEVLQNVSDAESCYLVHTLLEFYLKTVFKNYHNRTVEVRTLKSFSTLANNFVLIVSQLQPSQENEMFSIRDSAHRRFLLFRRAFKQLDVEAALTKALGEVDILLTWMQKFYKL

SEQ ID NO: 7020 - protein, 60 aa, Homo sapiens
MNFQQRLQSLWTLASKLRITSRVPGCCSRRFCRTSRKKMRCFPSETVHTGGFCYSGEHSN

SEQ ID NO: 7021 - protein, 63 aa, Homo sapiens
MNFQQRLQSLWTLASKLRITSRVPGCCSRRFCRTSRKKMRCFPSETVHTGGFCYSGEHSNSWT

SEQ ID NO: 7022 - protein, 51 aa, Homo sapiens
MNFQQRLQSLWTLASKLRITSRVPGCCSRRFCRTSRMLRAVTLSTPCWSST

SEQ ID NO: 7023 - protein, 207 aa, Homo sapiens
MNFQQRLQSLWTLASRPFCPPLLATASQMQMVVLPCLGFTLLLWSQVSGAQGQEFHFGPCQVKGVVPQKLWEAFWAVKDTMQAQDNITSARLLQQEVLQNVSDAESCYLVHTLLEFYLKTVFKNYHNRTVEVRTLKSFSTLANNFVLIVSQLQPSQENEMFSIRDSAHRRFLLFRRAFKQLDVEAALTKALGEVDILLTWMQKFYKL

SEQ ID NO: 7024 - protein, 154 aa, Homo sapiens
MNFQQRLQSLWTLASRPFCPPLLATASQMQMVVLPCLGFTLLLWSQVSGAQGQEFHFGPCQVKGVVPQKLWEAFWAVKDTMQAQDNITSARLLQQEVLQNVSQENEMFSIRDSAHRRFLLFRRAFKQLDVEAALTKALGEVDILLTWMQKFYKL

SEQ ID NO: 7025 - protein, 177 aa, Homo sapiens
MRERPRLGEDSSLISLFLQVVAFLAMVMGTHTYSHWPSCCPSKGQDTSEELLRWSTVPVPPLEPARPNRHPESCRASEDGPLNSRAISPWRYELDRDLNRLPQDLYHARCLCPHCVSLQTGSHMDPRGNSELLYHNQTVFYRRPCHGEKGTHKGYCLERRLYRVSLACVCVRPRVMG

SEQ ID NO: 7026 - protein, 161 aa, Homo sapiens
MYQVVAFLAMVMGTHTYSHWPSCCPSKGQDTSEELLRWSTVPVPPLEPARPNRHPESCRASEDGPLNSRAISPWRYELDRDLNRLPQDLYHARCLCPHCVSLQTGSHMDPRGNSELLYHNQTVFYRRPCHGEKGTHKGYCLERRLYRVSLACVCVRPRVMG

SEQ ID NO: 7027 - protein, 171 aa, Homo sapiens
MLVNFILRCGLLLVTLSLAIAKHKQSSFTKSCYPRGTLSQAVDALYIKAAWLKATIPEDRIKNIRLLKKKTKKQFMKNCQFQEQLLSFFMEDVFGQLQLQGCKKIRFVEDFHSLRQKLSHCISCASSAREMKSITRMKRIFYRIGNKGIYKAISELDILLSWIKKLLESSQ

SEQ ID NO: 7028 - protein, 24 aa, Homo sapiens
MERMQLWAMRLDLRDLQRHLRFQV

SEQ ID NO: 7029 - protein, 243 aa, Homo sapiens
MGQTAGDLGWRLSLLLLPLLLVQAGVWGFPRPPGRPQLSLQELRREFTVSLHLARKLLSEVRGQAHRFAESHLPGVNLYLLPLGEQLPDVSLTFQAWRRLSDPERLCFISTTLQPFHALLGGLGTQGRWTNMERMQLWAMRLDLRDLQRHLRFQVLAAGFNLPEEEEEEEEEEEEERKGLLPGALGSALQGPAQVSWPQLLSTYRLLHSLELVLSRAVRELLLLSKAGHSVWPLGFPTLSPQP

SEQ ID NO: 7030 - protein, 88 aa, Homo sapiens
MAAPALSWRLPLLILLLPLATSWASAAVNGTSQFTCFYNSRANISCVWSQDGALQDTSCQVHAWPDRRRWNQTCELLPVSQASWACNL

SEQ ID NO: 7031 - protein, 146 aa, Homo sapiens
MAAPALSWRLPLLILLLPLATSWASAAVNGTSQFTCFYNSRANISCVWSQDGALQDTSCQVHAWPDRRRWNQTCELLPVSQASWACNLILGAPDSQKLTTVDIVTLRVLCREGVRWRVMAIQDFKPFENLRLMAPISLQVVHVETH

SEQ ID NO: 7032 - protein, 188 aa, Homo sapiens
MAAPALSWRLPLLILLLPLATSWASAAVNGTSQFTCFYNSRANISCVWSQDGALQDTSCQVHAWPDRRRWNQTCELLPVSQASWACNLILGAPDSQKLTTVDIVTLRVLCREGVRWRVMAIQDFKPFENLRLMAPISLQVVHVETHRCNISWEISQASHYFERHLEFEARTLSPGHTWEEAPLLTLKQ

SEQ ID NO: 7033 - protein, 551 aa, Homo sapiens
MAAPALSWRLPLLILLLPLATSWASAAVNGTSQFTCFYNSRANISCVWSQDGALQDTSCQVHAWPDRRRWNQTCELLPVSQASWACNLILGAPDSQKLTTVDIVTLRVLCREGVRWRVMAIQDFKPFENLRLMAPISLQVVHVETHRCNISWEISQASHYFERHLEFEARTLSPGHTWEEAPLLTLKQKQEWICLETLTPDTQYEFQVRVKPLQGEFTTWSPWSQPLAFRTKPAALGKDTIPWLGHLLVGLSGAFGFIILVYLLINCRNTGPWLKKVLKCNTPDPSKFFSQLSSEHGGDVQKWLSSPFPSSSFSPGGLAPEISPLEVLERDKVTQLLLQQDKVPEPASLSSNHSLTSCFTNQGYFFFHLPDALEIEACQVYFTYDPYSEEDPDEGVAGAPTGSSPQPLQPLSGEDDAYCTFPSRDDLLLFSPSLLGGPSPPSTAPGGSGAGEERMPPSLQERVPRDWDPQPLGPPTPGVPDLVDFQPPPELVLREAGEEVPDAGPREGVSFPWSRPPGQGEFRALNARLPLNTDAYLSLQELQGQDPTHLV

SEQ ID NO: 7034 - protein, 105 aa, Homo sapiens
TCFYNSRANISCVWSQDGALQDTSCQVHAWPDRRSLQLPWDQAGMREQDKVPMREECHGASGGGSAPHSGWHRGPSLALLPGAILAAERSEKSPLGQLCGSFLFF

SEQ ID NO: 7035 - protein, 152 aa, Homo sapiens
MSRLPVLLLLQLLVRPGLQAPMTQTTPLKTSWVNCSNMIDEIITHLKQPPLPLLDFNNLNGEDQDILMENNLRRPNLEAFNRAVKSLQNASAIESILKNLLPCLPLATAAPTRHPIHIKDGDWNEFRRKLTFYLKTLENAQAQQTTLSLAIF

SEQ ID NO: 7036 - protein, 164 aa, Homo sapiens
MASHSGPSTSVLFLFCCLGGWLASHTLPVRLLRPSDDVQKIVEELQSLSKMLLKDVEEEKGVLVSQNYTLPCLSPDAQPPNNIHSPAIRAYLKTIRQLDNKSVIDEIIEHLDKLIFQDAPETNISVPTDTHECKRFILTISQQFSECMDLALKSLTSGAQQATT

SEQ ID NO: 7037 - protein, 582 aa, Homo sapiens
MCIRQLKFFTTACVCECPQNILSPQPSCVNLGMMWTWALWMLPSLCKFSLAALPAKPENISCVYYYRKNLTCTWSPGKETSYTQYTVKRTYAFGEKHDNCTTNSSTSENRASCSFFLPRITIPDNYTIEVEAENGDGVIKSHMTYWRLENIAKTEPPKIFRVKPVLGIKRMIQIEWIKPELAPVSSDLKYTLRFRTVNSTSWMEVNFAKNRKDKNQTYNLTGLQPFTEYVIALRCAVKESKFWSDWSQEKMGMTEEEAPCGLELWRVLKPAEADGRRPVRLLWKKARGAPVLEKTLGYNIWYYPESNTNLTETMNTTNQQLELHLGGESFWVSMISYNSLGKSPVATLRIPAIQEKSFQCIEVMQACVAEDQLVVKWQSSALDVNTWMIEWFPDVDSEPTTLSWESVSQATNWTIQQDKLKPFWCYNISVYPMLHDKVGEPYSIQAYAKEGVPSEGPETKVENIGVKTVTITWKEIPKSERKGIICNYTIFYQAEGGKGFCKHAHSEVEKNPKPQIDAMDRPVVGMAPPSHCDLQPGMNHLASLNLSENGAKSTHLLGFWGLNESEVTVPERRVLRKWKELL

SEQ ID NO: 7038 - protein, 681 aa, Homo sapiens
MCIRQLKFFTTACVCECPQNILSPQPSCVNLGMMWTWALWMLPSLCKFSLAALPAKPENISCVYYYRKNLTCTWSPGKETSYTQYTVKRTYAFGEKHDNCTTNSSTSENRASCSFFLPRITIPDNYTIEVEAENGDGVIKSHMTYWRLENIAKTEPPKIFRVKPVLGIKRMIQIEWIKPELAPVSSDLKYTLRFRTVNSTSWMEVNFAKNRKDKNQTYNLTGLQPFTEYVIALRCAVKESKFWSDWSQEKMGMTEEEAPCGLELWRVLKPAEADGRRPVRLLWKKARGAPVLEKTLGYNIWYYPESNTNLTETMNTTNQQLELHLGGESFWVSMISYNSLGKSPVATLRIPAIQEKSFQCIEVMQACVAEDQLVVKWQSSALDVNTWMIEWFPDVDSEPTTLSWESVSQATNWTIQQDKLKPFWCYNISVYPMLHDKVGEPYSIQAYAKEGVPSEGPETKVENIGVKTVTITWKEIPKSERKGIICNYTIFYQAEGGKGFSKTVNSSILQYGLESLKRKTSYIVQVMASTSAGGTNGTSINFKTLSFSVFEIILITSLIGGGLLILIILTVAYGLKKPNKLTHLCWPTVPNPAESSIATWHGDDFKDKLNLKESDDSVNTEDRILKPCSTPSDKLVIDKLVVNFGNVLQEIFTDEARTGQENNLGGEKNGTRILSSCPTSI

SEQ ID NO: 7039 - protein, 764 aa, Homo sapiens
MCIRQLKFFTTACVCECPQNILSPQPSCVNLGMMWTWALWMLPSLCKFSLAALPAKPENISCVYYYRKNLTCTWSPGKETSYTQYTVKRTYAFGEKHDNCTTNSSTSENRASCSFFLPRITIPDNYTIEVEAENGDGVIKSHMTYWRLENIAKTEPPKIFRVKPVLGIKRMIQIEWIKPELAPVSSDLKYTLRFRTVNSTSWMEVNFAKNRKDKNQTYNLTGLQPFTEYVIALRCAVKESKFWSDWSQEKMGMTEEEAPCGLELWRVLKPAEADGRRPVRLLWKKARGAPVLEKTLGYNIWYYPESNTNLTETMNTTNQQLELHLGGESFWVSMISYNSLGKSPVATLRIPAIQEKSFQCIEVMQACVAEDQLVVKWQSSALDVNTWMIEWFPDVDSEPTTLSWESVSQATNWTIQQDKLKPFWCYNISVYPMLHDKVGEPYSIQAYAKEGVPSEGPETKVENIGVKTVTITWKEIPKSERKGIICNYTIFYQAEGGKGFSKTVNSSILQYGLESLKRKTSYIVQVMASTSAGGTNGTSINFKTLSFSVFEIILITSLIGGGLLILIILTVAYGLKKPNKLTHLCWPTVPNPAESSIATWHGDDFKDKLNLKESDDSVNTEDRILKPCSTPSDKLVIDKLVVNFGNVLQEIFTDEARTGQENNLGGEKNGYVTCPFRPDCPLGKSFEELPVSPEIPPRKSQYLRSRMPEGTRPEAKEQLLFSGQSLVPDHLCEEGAPNPYLKNSVTAREFLVSEKLPEHTKGEV

SEQ ID NO: 7040 - protein, 745 aa, Homo sapiens
MKLSPQPSCVNLGMMWTWALWMLPSLCKFSLAALPAKPENISCVYYYRKNLTCTWSPGKETSYTQYTVKRTYAFGEKHDNCTTNSSTSENRASCSFFLPRITIPDNYTIEVEAENGDGVIKSHMTYWRLENIAKTEPPKIFRVKPVLGIKRMIQIEWIKPELAPVSSDLKYTLRFRTVNSTSWMEVNFAKNRKDKNQTYNLTGLQPFTEYVIALRCAVKESKFWSDWSQEKMGMTEEEAPCGLELWRVLKPAEADGRRPVRLLWKKARGAPVLEKTLGYNIWYYPESNTNLTETMNTTNQQLELHLGGESFWVSMISYNSLGKSPVATLRIPAIQEKSFQCIEVMQACVAEDQLVVKWQSSALDVNTWMIEWFPDVDSEPTTLSWESVSQATNWTIQQDKLKPFWCYNISVYPMLHDKVGEPYSIQAYAKEGVPSEGPETKVENIGVKTVTITWKEIPKSERKGIICNYTIFYQAEGGKGFSKTVNSSILQYGLESLKRKTSYIVQVMASTSAGGTNGTSINFKTLSFSVFEIILITSLIGGGLLILIILTVAYGLKKPNKLTHLCWPTVPNPAESSIATWHGDDFKDKLNLKESDDSVNTEDRILKPCSTPSDKLVIDKLVVNFGNVLQEIFTDEARTGQENNLGGEKNGYVTCPFRPDCPLGKSFEELPVSPEIPPRKSQYLRSRMPEGTRPEAKEQLLFSGQSLVPDHLCEEGAPNPYLKNSVTAREFLVSEKLPEHTKGEV

SEQ ID NO: 7041 - protein, 662 aa, Homo sapiens
MKLSPQPSCVNLGMMWTWALWMLPSLCKFSLAALPAKPENISCVYYYRKNLTCTWSPGKETSYTQYTVKRTYAFGEKHDNCTTNSSTSENRASCSFFLPRITIPDNYTIEVEAENGDGVIKSHMTYWRLENIAKTEPPKIFRVKPVLGIKRMIQIEWIKPELAPVSSDLKYTLRFRTVNSTSWMEVNFAKNRKDKNQTYNLTGLQPFTEYVIALRCAVKESKFWSDWSQEKMGMTEEEAPCGLELWRVLKPAEADGRRPVRLLWKKARGAPVLEKTLGYNIWYYPESNTNLTETMNTTNQQLELHLGGESFWVSMISYNSLGKSPVATLRIPAIQEKSFQCIEVMQACVAEDQLVVKWQSSALDVNTWMIEWFPDVDSEPTTLSWESVSQATNWTIQQDKLKPFWCYNISVYPMLHDKVGEPYSIQAYAKEGVPSEGPETKVENIGVKTVTITWKEIPKSERKGIICNYTIFYQAEGGKGFSKTVNSSILQYGLESLKRKTSYIVQVMASTSAGGTNGTSINFKTLSFSVFEIILITSLIGGGLLILIILTVAYGLKKPNKLTHLCWPTVPNPAESSIATWHGDDFKDKLNLKESDDSVNTEDRILKPCSTPSDKLVIDKLVVNFGNVLQEIFTDEARTGQENNLGGEKNGTRILSSCPTSI

SEQ ID NO: 7042 - protein, 662 aa, Homo sapiens; identical to SEQ ID NO: 7041

SEQ ID NO: 7043 - protein, 324 aa, Homo sapiens
MMWTWALWMLPSLCKFSLAALPAKPENISCVYYYRKNLTCTWSPGKETSYTQYTVKRTYAFGEKHDNCTTNSSTSENRASCSFFLPRITIPDNYTIEVEAENGDGVIKSHMTYWRLENIAKTEPPKIFRVKPVLGIKRMIQIEWIKPELAPVSSDLKYTLRFRTVNSTSWMEVNFAKNRKDKNQTYNLTGLQPFTEYVIALRCAVKESKFWSDWSQEKMGMTEEEAPCGLELWRVLKPAEADGRRPVRLLWKKARGAPVLEKTLGYNIWYYPESNTNLTETMNTTNQQLELHLGGESFWVSMISYNSLGKSPVATLRIPAIQEK

SEQ ID NO: 7044 - protein, 622 aa, Homo sapiens
MTYWRLENIAKTEPPKIFRVKPVLGIKRMIQIEWIKPELAPVSSDLKYTLRFRTVNSTSWMEVNFAKNRKDKNQTYNLTGLQPFTEYVIALRCAVKESKFWSDWSQEKMGMTEEEAPCGLELWRVLKPAEADGRRPVRLLWKKARGAPVLEKTLGYNIWYYPESNTNLTETMNTTNQQLELHLGGESFWVSMISYNSLGKSPVATLRIPAIQEKSFQCIEVMQACVAEDQLVVKWQSSALDVNTWMIEWFPDVDSEPTTLSWESVSQATNWTIQQDKLKPFWCYNISVYPMLHDKVGEPYSIQAYAKEGVPSEGPETKVENIGVKTVTITWKEIPKSERKGIICNYTIFYQAEGGKGFSKTVNSSILQYGLESLKRKTSYIVQVMASTSAGGTNGTSINFKTLSFSVFEIILITSLIGGGLLILIILTVAYGLKKPNKLTHLCWPTVPNPAESSIATWHGDDFKDKLNLKESDDSVNTEDRILKPCSTPSDKLVIDKLVVNFGNVLQEIFTDEARTGQENNLGGEKNGYVTCPFRPDCPLGKSFEELPVSPEIPPRKSQYLRSRMPEGTRPEAKEQLLFSGQSLVPDHLCEEGAPNPYLKNSVTAREFLVSEKLPEHTKGEV

SEQ ID NO: 7045 - protein, 212 aa, Homo sapiens
MCFPKGLGAWVSACDTEDTVGHLGPWRDKDPALWCQLCLSSQHQAIERFYDKMQNAESGRGQVMSSLAELEDDFKEGYLETVAAYYEEQHPELTPLLEKERDGLRCRGNRSPVPDVEDPATEEPGESFCDKVMRWFQAMLQRLQTWWHGVLAWVKEKVVALVHAVQALWKQFQSFCCSLSELFMSSFQSYGAPRGDKEELTPQKCSEPQSSK

SEQ ID NO: 7046 - protein, 131 aa, Homo sapiens
MCFPKVLSDDMKKLKARMDDFKEGYLETVAAYYEEQHPELTPLLEKERDGLRCRGNRSPVPDVEDPATEEPGESFCDKVMRWFQAMLQRLQTWWHGVLAWVKEKVVALVHAVQALWKQFQSFCCSLSELFM

SEQ ID NO: 7047 - protein, 179 aa, Homo sapiens
MCFPKVLSDDMKKLKARMHQAIERFYDKMQNAESGRGQDDFKEGYLETVAAYYEEQHPELTPLLEKERDGLRCRGNRSPVPDVEDPATEEPGESFCDKVMRWFQAMLQRLQTWWHGVLAWVKEKVVALVHAVQALWKQFQSFCCSLSELFMSSFQSYGAPRGDKEELTPQKCSEPQSSK

SEQ ID NO: 7048 - protein, 179 aa, Homo sapiens; identical to SEQ ID NO: 7047

SEQ ID NO: 7049 - protein, 131 aa, Homo sapiens
MCFPKVLSDDMKKLKARMHQAIERFYDKMQNAESGRGQVMSSLAELEDDFKEGYLETVAAYYEEQHPELTPLLEKERDGLRCRGNRSPVPDVEDPATEEPGESFCDKSYGAPRGDKEELTPQKCSEPQSSK

SEQ ID NO: 7050 - protein, 131 aa, Homo sapiens; identical to SEQ ID NO: 7049

SEQ ID NO: 7051 - protein, 131 aa, Homo sapiens; identical to SEQ ID NO: 7049

SEQ ID NO: 7052 - protein, 188 aa, Homo sapiens
MCFPKVLSDDMKKLKARMHQAIERFYDKMQNAESGRGQVMSSLAELEDDFKEGYLETVAAYYEEQHPELTPLLEKERDGLRCRGNRSPVPDVEDPATEEPGESFCDKVMRWFQAMLQRLQTWWHGVLAWVKEKVVALVHAVQALWKQFQSFCCSLSELFMSSFQSYGAPRGDKEELTPQKCSEPQSSK

SEQ ID NO: 7053 - protein, 188 aa, Homo sapiens; identical to SEQ ID NO: 7052

SEQ ID NO: 7054 - protein, 188 aa, Homo sapiens; identical to SEQ ID NO: 7052

SEQ ID NO: 7055 - protein, 188 aa, Homo sapiens; identical to SEQ ID NO: 7052

SEQ ID NO: 7056 - protein, 188 aa, Homo sapiens; identical to SEQ ID NO: 7052

SEQ ID NO: 7057 - protein, 188 aa, Homo sapiens; identical to SEQ ID NO: 7052

SEQ ID NO: 7058 - protein, 188 aa, Homo sapiens; identical to SEQ ID NO: 7052

SEQ ID NO: 7059 - protein, 188 aa, Homo sapiens; identical to SEQ ID NO: 7052

SEQ ID NO: 7060 - protein, 188 aa, Homo sapiens; identical to SEQ ID NO: 7052

SEQ ID NO: 7061 - protein, 188 aa, Homo sapiens; identical to SEQ ID NO: 7052

SEQ ID NO: 7062 - protein, 168 aa, Homo sapiens
MCFPKVLSDDMKKLKARMHQAIERFYDKMQNAESGRGQVMSSLAELEELTPLLEKERDGLRCRGNRSPVPDVEDPATEEPGESFCDKVMRWFQAMLQRLQTWWHGVLAWVKEKVVALVHAVQALWKQFQSFCCSLSELFMSSFQSYGAPRGDKEELTPQKCSEPQSSK

SEQ ID NO: 7063 - protein, 168 aa, Homo sapiens; identical to SEQ ID NO: 7062

SEQ ID NO: 7064 - protein, 225 aa, Homo sapiens
MCFPKVLSDDMKKLKARMVMLLPTSAQGLGAWVSACDTEDTVGHLGPWRDKDPALWCQLCLSSQHQAIERFYDKMQNAESGRGQDDFKEGYLETVAAYYEEQHPELTPLLEKERDGLRCRGNRSPVPDVEDPATEEPGESFCDKVMRWFQAMLQRLQTWWHGVLAWVKEKVVALVHAVQALWKQFQSFCCSLSELFMSSFQSYGAPRGDKEELTPQKCSEPQSSK

SEQ ID NO: 7065 - protein, 225 aa, Homo sapiens
MCFPKVLSDDMKKLKARMVMLLPTSAQGLGAWVSACDTEDTVGHLGPWRDKDPALWCQLCLSSQHQAIERFYDKMQNAESGRGQVMSSLAELEDDFKEGYLETVAAYYEEQHPELTPLLEKERDGLRCRGNRSPVPDVEDPATEEPGESFCDKVMRWFQAMLQRLQTWWHGVLAWVKEKVVALVHAVQALWKQFQSFCCSLSELFMSSFQSYGAPRGDKEELTPQ

SEQ ID NO: 7066 - protein, 234 aa, Homo sapiens
MCFPKVLSDDMKKLKARMVMLLPTSAQGLGAWVSACDTEDTVGHLGPWRDKDPALWCQLCLSSQHQAIERFYDKMQNAESGRGQVMSSLAELEDDFKEGYLETVAAYYEEQHPELTPLLEKERDGLRCRGNRSPVPDVEDPATEEPGESFCDKVMRWFQAMLQRLQTWWHGVLAWVKEKVVALVHAVQALWKQFQSFCCSLSELFMSSFQSYGAPRGDKEELTPQKCSEPQSSK

SEQ ID NO: 7067 - protein, 234 aa, Homo sapiens; identical to SEQ ID NO: 7066

SEQ ID NO: 7068 - protein, 234 aa, Homo sapiens; identical to SEQ ID NO: 7066

SEQ ID NO: 7069 - protein, 221 aa, Homo sapiens
MCFPKVLSDDMKKLKARMVMLLPTSAQGLGAWVSACDTEDTVGHLGPWRDKDPALWCQLCLSSQHQAIERFYDKMQNAESGRGQVMSSLAELEDDFKEGYLETVAAYYEEQHPELTPLLEKERDGLRCRGNRSPVPDVEDPATEEPGESFCDKVMRWFQAMLQRLQTWWHGVLAWVKEKVVALVHAVQALWKQFQSFCCSLSELFMSSFQSYGATRGARRS

SEQ ID NO: 7070 - protein, 168 aa, Homo sapiens
MCFPKVLSDDMKKLKARMVMSSLAELEDDFKEGYLETVAAYYEEQHPELTPLLEKERDGLRCRGNRSPVPDVEDPATEEPGESFCDKVMRWFQAMLQRLQTWWHGVLAWVKEKVVALVHAVQALWKQFQSFCCSLSELFMSSFQSYGAPRGDKEELTPQKCSEPQSSK

SEQ ID NO: 7071 - protein, 168 aa, Homo sapiens; identical to SEQ ID NO: 7070

SEQ ID NO: 7072 - protein, 168 aa, Homo sapiens; identical to SEQ ID NO: 7070

SEQ ID NO: 7073 - protein, 148 aa, Homo sapiens
MCFPKVLSDDMKKLKARMVMSSLAELEELTPLLEKERDGLRCRGNRSPVPDVEDPATEEPGESFCDKVMRWFQAMLQRLQTWWHGVLAWVKEKVVALVHAVQALWKQFQSFCCSLSELFMSSFQSYGAPRGDKEELTPQKCSEPQSSK

SEQ ID NO: 7074 - protein, 178 aa, Homo sapiens
MKKLKARMHQAIERFYDKMQNAESGRGQVMSSLAELEDDFKEGYLETVAAYYEEQHPELTPLLEKERDGLRCRGNRSPVPDVEDPATEEPGESFCDKVMRWFQAMLQRLQTWWHGVLAWVKEKVVALVHAVQALWKQFQSFCCSLSELFMSSFQSYGAPRGDKEELTPQKCSEPQSSK

SEQ ID NO: 7075 - protein, 54 aa, Homo sapiens
MPRGFTWLRYLGIFLGVALGNEPLEMWPLTQNEECTVTGFLRDKLQYRSRLQYM

SEQ ID NO: 7076 - protein, 242 aa, Homo sapiens
MPRGFTWLRYLGIFLGVALGNEPLEMWPLTQNEECTVTGFLRDKLQYRSRLQYMKHYFPINYKISVPYEGVFRIANVTRLQRAQVSERELRYLWVLVSLSATESVQDVLLEGHPSWKYLQEVETLLLNVQQGLTDVEVSPKVESVLSLLNAPGPNLKLVRPKALLDNCFRVMELLYCSCCKQSSVLNWQDCEVPSPQSCSPEPSLQYAATQLYPPPPWSPSSPPHSTGSVRPVRAQGEGLLP

SEQ ID NO: 7077 - protein, 242 aa, Homo sapiens; identical to SEQ ID NO: 7076

SEQ ID NO: 7078 - protein, 217 aa, Homo sapiens
MWPLTQNEECTVTGFLRDKLQYRSRLQYMKHYFPINYKISVPYEGVFRIANVTRLQRAQVSERELRYLWVLVSLSATESVQDVLLEGHPSWKYLQEVETLLLNVQQGLTDVEVSPKVESVLSLLNAPGPNLKLVRPKALLDNCFRVMELLYCSCCKQSSVLNWQDCEVPSPQSCSPEPSLQYAATQLYPPPPWSPSSPPHSTGSVRPVRAQGEGLLP

SEQ ID NO: 7079 - protein, 378 aa, Homo sapiens
MVLLWLTLLLIALPCLLQTKEDPNPPITNLRMKAKAQQLTWDLNRNVTDIECVKDADYSMPAVNNSYCQFGAISLCEVTNYTVRVANPPFSTWILFPENSGKPWAGAENLTCWIHDVDFLSCSWAVGPGAPADVQYDLYLNVANRRQQYECLHYKTDAQGTRIGCRFDDISRLSSGSQSSHILVRGRSAAFGIPCTDKFVVFSQIEILTPPNMTAKCNKTHSFMHWKMRSHFNRKFRYELQIQKRMQPVITEQVRDRTSFQLLNPGTYTVQIRARERVYEFLSAWSTPQRFECDQEEGANTRAWRTSLLIALGTLLALVCVFVICRRYLVMQRLFPRIPHMKDPIGDSFQNDKLVVWEAGKAGLEECLVTEVQVVQKT

SEQ ID NO: 7080 - protein, 164 aa, Homo sapiens
MVLLWLTLLLIALPCLLQTKEGGKPWAGAENLTCWIHDVDFLSCSWAVGPGAPADVQYDLYLNVANRRQQYECLHYKTDAQGTRIGCRFDDISRLSSGSQSSHILVRGRSAAFGIPCTDKFVVFSQIEILTPPNMTAKCNKTHSFMHWKMRSHFNRKFRYELQI

SEQ ID NO: 7081 - protein, 300 aa, Homo sapiens
MVLLWLTLLLIALPCLLQTKEGGKPWAGAENLTCWIHDVDFLSCSWAVGPGAPADVQYDLYLNVANRRQQYECLHYKTDAQGTRIGCRFDDISRLSSGSQSSHILVRGRSAAFGIPCTDKFVVFSQIEILTPPNMTAKCNKTHSFMHWKMRSHFNRKFRYELQIQKRMQPVITEQVRDRTSFQLLNPGTYTVQIRARERVYEFLSAWSTPQRFECDQEEGANTRAWRTSLLIALGTLLALVCVFVICRRYLVMQRLFPRIPHMKDPIGDSFQNDKLVVWEAGKAGLEECLVTEVQVVQKT

SEQ ID NO: 7082 - protein, 137 aa, Homo sapiens
MGLTSQLLPPLFFLLACAGNFVHGHKCDITLQEIIKTLNSLTEQKNTTEKETFCRAATVLRQFYSHHEKDTRCLGATAQQFHRHKQLIRFLKRLDRNLWGLAGLNSCPVKEANQSTLENFLERLKTIMREKYSKCSS

SEQ ID NO: 7083 - protein, 153 aa, Homo sapiens [sequence omitted]

SEQ ID NO: 7084 - protein, 136 aa, Homo sapiens
MGLTSQLLPPLFFLLACAGNFVHGHKCDITLQEIIKTLNSLTEQKTLCTELTVTDIFAASKQHACLPTSRHTGTICRPPSARVPSTSTRLQSPERTQLRRKPSAGLRLCSGSSTATMRRTLAAWVRLHSSSTGTSS

SEQ ID NO: 7085 - protein, 32 aa, Homo sapiens
MAPLALHLLVLVPILLSLVASQDWKAERSQDP

SEQ ID NO: 7086 - protein, 150 aa, Homo sapiens
MAPLALHLLVLVPILLSLVASQDWKAERSQDPFEKCMQDPDYEQLLKVTILEADNRIGGRIFTYRDQNTGWIGELGAMRMPSSHRILHKLCQGLGLNLTKFTQYDKNTWTEVHEVKLRNYVVEKVPEKLGYALRPQEKGHSPEDIYQMAL

SEQ ID NO: 7087 - protein, 71 aa, Homo sapiens
MAPLALHLLVLVPILLSLVASQDWKAERSQDPFEKCMQDPDYEQLLKVVTWGLNRTLKPQRVIVVGAGVAG

SEQ ID NO: 7088 - protein, 567 aa, Homo sapiens
MAPLALHLLVLVPILLSLVASQDWKAERSQDPFEKCMQDPDYEQLLKVVTWGLNRTLKPQRVIVVGAGVAGLVAAKVLSDAGHKVTILEADNRIGGRIFTYRDQNTGWIGELGAMRMPSSHRILHKLCQGLGLNLTKFTQYDKNTWTEVHEVKLRNYVVEKVPEKLGYALRPQEKGHSPEDIYQMALNQALKDLKALGCRKAMKKFERHTLLEYLLGEGNLSRPAVQLLGDVMSEDGFFYLSFAEALRAHSCLSDRLQYSRIVGGWDLLPRALLSSLSGLVLLNAPVVAMTQGPHDVHVQIETSPPARNLKVLKADVVLLTASGPAVKRITFSPPLPRHMQEALRRLHYVPATKVFLSFRRPFWREEHIEGGHSNTDRPSRMIFYPPPREGALLLASYTWSDAAAAFAGLSREEALRLALDDVAALHGPVVRQLWDGTGVVKRWAEDQHSQGGFVVQPPALWQTEKDDWTVPYGRIYFAGEHTAYPHGWVETAVKSALRAAIKINSRKGPASDTASPEGHASDMEGQGHVHGVASSPSHDLAKEEGSHPPVQGQLSLQNTTHTRTSH

SEQ ID NO: 7089 - protein, 82 aa, Homo sapiens
MPNDDFCPGLTIKAMGAERAPQRQPCNTISHRESWPHWPCTSSSSSPSSSAWWPPRTGRLNAAKTPSRNACRILTMSSCSRW

SEQ ID NO: 7090 - protein, 106 aa, Homo sapiens
MPNDDFCPGLTIKAMGAERAPQRQPCTLHLLVLVPILLSLVASQDWKAERSQDPFEKCMQDPDYEQLLKVVTWGLNRTLKPQRVIVVGAGVAGLVAAKVLSDAGHK

SEQ ID NO: 7091 - protein, 589 aa, Homo sapiens
MPNDDFCPGLTIKAMGAERAPQRQPCTLHLLVLVPILLSLVASQDWKAERSQDPFEKCMQDPDYEQLLKVVTWGLNRTLKPQRVIVVGAGVAGLVAAKVLSDAGHKVTILEADNRIGGRIFTYRDQNTGWIGELGAMRMPSSHRILHKLCQGLGLNLTKFTQYDKNTWTEVHEVKLRNYVVEKVPEKLGYALRPQEKGHSPEDIYQMALNQALKDLKALGCRKAMKKFERHTLLEYLLGEGNLSRPAVQLLGDVMSEDGFFYLSFAEALRAHSCLSDRLQYSRIVGGWDLLPRALLSSLSGLVLLNAPVVAMTQGPHDVHVQIETSPPARNLKVLKADVVLLTASGPAVKRITFSPPLPRHMQEALRRLHYVPATKVFLSFRRPFWREEHIEGGHSNTDRPSRMIFYPPPREGALLLASYTWSDAAAAFAGLSREEALRLALDDVAALHGPVVRQLWDGTGVVKRWAEDQHSQGGFVVQPPALWQTEKDDWTVPYGRIYFAGEHTAYPHGWVETAVKSALRAAIKINSRKGPASDTASPEGHASDMEGQGHVHGVASSPSHDLAKEEGSHPPVQGQLSLQNTTHTRTSH

SEQ ID NO: 7092 - protein, 589 aa, Homo sapiens; identical to SEQ ID NO: 7091

SEQ ID NO: 7093 - protein, 10 aa, Homo sapiens
MGWLCSGLLF

SEQ ID NO: 7094 - protein, 66 aa, Homo sapiens
MGWLCSGLLFPVSCLVLLQVASSGLFRMPCGERKRVEARRSGGRSGVEEMRGSGSLWEVDLRTDWN

SEQ ID NO: 7095 - protein, 66 aa, Homo sapiens; identical to SEQ ID NO: 7094

SEQ ID NO: 7096 - protein, 66 aa, Homo sapiens; identical to SEQ ID NO: 7094

SEQ ID NO: 7097 - protein, 64 aa, Homo sapiens
MGWLCSGLLFPVSCLVLLQVASSGNMKVLQEPTCVSDYMSISTCEWKMNGPTNCSTELRLLYQL

SEQ ID NO: 7098 - protein, 120 aa, Homo sapiens
MGWLCSGLLFPVSCLVLLQVASSGNMKVLQEPTCVSDYMSISTCEWKMNGPTNCSTELRLLYQLVFLLSEAHTCIPENNGGAGCVCHLLMDDVVSADNYTLDLWAGQQLLWKGSFKPSEH

SEQ ID NO: 7099 - protein, 120 aa, Homo sapiens; identical to SEQ ID NO: 7098

SEQ ID NO: 7100 - protein, 825 aa, Homo sapiens
MGWLCSGLLFPVSCLVLLQVASSGNMKVLQEPTCVSDYMSISTCEWKMNGPTNCSTELRLLYQLVFLLSEAHTCIPENNGGAGCVCHLLMDDVVSADNYTLDLWAGQQLLWKGSFKPSEHVKPRAPGNLTVHTNVSDTLLLTWSNPYPPDNYLYNHLTYAVNIWSENDPADFRIYNVTYLEPSLRIAASTLKSGISYRARVRAWAQCYNTTWSEWSPSTKWHNSYREPFEQHLLLGVSVSCIVILAVCLLCYVSITKIKKEWWDQIPNPARSRLVAIIIQDAQGSQWEKRSRGQEPAKCPHWKNCLTKLLPCFLEHNMKRDEDPHKAAKEMPFQGSGKSAWCPVEISKTVLWPESISVVRCVELFEAPVECEEEEEVEEEKGSFCASPESSRDDFQEGREGIVARLTESLFLDLLGEENGGFCQQDMGESCLLPPSGSTSAHMPWDEFPSAGPKEAPPWGKEQPLHLEPSPPASPTQSPDNLTCTETPLVIAGNPAYRSFSNSLSQSPCPRELGPDPLLARHLEEVEPEMPCVPQLSEPTTVPQPEPETWEQILRRNVLQHGAAAAPVSAPTSGYQEFVHAVEQGGTQASAVVGLGPPGEAGYKAFSSLLASSAVSPEKCGFGASSGEEGYKPFQDLIPGCPGDPAPVPVPLFTFGLDREPPRSPQSSHLPSSSPEHLGLEPGEKVEDMPKPPLPQEQATDPLVDSLGSGIVYSALTCHLCGHLKQCHGQEDGGQTPVMASPCCGCCCGDRSSPPTTPLRAPDPSPGGVPLEASLCPASLAPSGISEKSKSSSSFHPAPGNAQSSSQTPKIVNFVSVGPTYMRVS

SEQ ID NO: 7101 - protein, 825 aa, Homo sapiens; identical to SEQ ID NO: 7100

SEQ ID NO: 7102 - protein, 124 aa, Homo sapiens
MGWLCSGLLFPVSCLVLLQVASSGNMKVLQEPTCVSDYMSISTCEWKMNGPTNCSTELRLLYQLVFLLSEAHTCIPENNGGAGCVCHLLMDDVVSADNYTLDLWAGQQLLWKGSFKPSEHVQNL

SEQ ID NO: 7103 - protein, 810 aa, Homo sapiens
MQKDARREGNMKVLQEPTCVSDYMSISTCEWKMNGPTNCSTELRLLYQLVFLLSEAHTCIPENNGGAGCVCHLLMDDVVSADNYTLDLWAGQQLLWKGSFKPSEHVKPRAPGNLTVHTNVSDTLLLTWSNPYPPDNYLYNHLTYAVNIWSENDPADFRIYNVTYLEPSLRIAASTLKSGISYRARVRAWAQCYNTTWSEWSPSTKWHNSYREPFEQHLLLGVSVSCIVILAVCLLCYVSITKIKKEWWDQIPNPARSRLVAIIIQDAQGSQWEKRSRGQEPAKCPHWKNCLTKLLPCFLEHNMKRDEDPHKAAKEMPFQGSGKSAWCPVEISKTVLWPESISVVRCVELFEAPVECEEEEEVEEEKGSFCASPESSRDDFQEGREGIVARLTESLFLDLLGEENGGFCQQDMGESCLLPPSGSTSAHMPWDEFPSAGPKEAPPWGKEQPLHLEPSPPASPTQSPDNLTCTETPLVIAGNPAYRSFSNSLSQSPCPRELGPDPLLARHLEEVEPEMPCVPQLSEPTTVPQPEPETWEQILRRNVLQHGAAAAPVSAPTSGYQEFVHAVEQGGTQASAVVGLGPPGEAGYKAFSSLLASSAVSPEKCGFGASSGEEGYKPFQDLIPGCPGDPAPVPVPLFTFGLDREPPRSPQSSHLPSSSPEHLGLEPGEKVEDMPKPPLPQEQATDPLVDSLGSGIVYSALTCHLCGHLKQCHGQEDGGQTPVMASPCCGCCCGDRSSPPTTPLRAPDPSPGGVPLEASLCPASLAPSGISEKSKSSSSFHPAPGNAQSSSQTPKIVNFVSVGPTYMRVS

SEQ ID NO: 7104 - protein, 133 aa, Homo sapiens
PSTKWHNSYREPFEQHLLLGVSVSCIVILAVCLLCYVSITKIKKEWWDQIPNPARSRLVAIIIQDAQGSQWEKRSRGPWAPRLVNELLAAPSTASAADCPCCNCPRHVLPTRSWPTWRPTCLCLTELEAEPRN

SEQ ID NO: 7105 - protein, 49 aa, Homo sapiens
  VARIANT 1: note = misc_feature - Xaa can be any naturally occurring amino acid
XCVCHLLMDDVVSADNYTLDLWAGQQLLWKGSFKPSEHVLPPLKRSWSQ

SEQ ID NO: 7106 - protein, 193 aa, Homo sapiens
  VARIANT 1: note = misc_feature - Xaa can be any naturally occurring amino acid
XNVTYLEPSLRIAASTLKSGISYRARVRAWAQCYNTTWSEWSPSTKWHNSYREPFEQHLLLGVSVSCIVILAVCLLCYVSITKIKKEWWDQIPNPARSRLVAIIIQDAQGSQWEKRSRGQEPAKCPLQGTAGGGVFWKRGLLAKPPEFHWCVRHWKNCLTKLLPCFLEHNMKRDEDPHKAAKEMPFQGSGKSA

SEQ ID NO: 7107 - protein, 51 aa, Homo sapiens
MGVVVGWIGDPGSGTLRIPVPVHKNHQLCTEEIFQGIGTLESQTVQGGTVE

SEQ ID NO: 7108 - protein, 134 aa, Homo sapiens
MRMLLHLSLLALGAAYVYAIPTEIPTSALVKETLALLSTHRTLLIANETLRIPVPVHKNHQLCTEEIFQGIGTLESQTVQGGTVERLFKNLSLIKKYIDGQKKKCGEERRRVNQFLDYLQEFLGVMNTEWIIES

SEQ ID NO: 7109 - protein, 109 aa, Homo sapiens
MIIVAHVLLILLGATEILQADLLPDEKISLLPPVNFTIKVTGLAQVLLQWKPNPDQEQRNVNLEYQVKINAPKEDDYETRITESKCVTILHKGFSASVRTILQNDHSLL

SEQ ID NO: 7110 - protein, 196 aa, Homo sapiens
MIIVAHVLLILLGATEILQADLLPDEKISLLPPVNFTIKVTGLAQVLLQWKPNPDQEQRNVNLEYQVKINAPKEDDYETRITESKCVTILHKGFSASVRTILQNDHSLLASSWASAELHAPPGSPGTSIVNLTCTTNTTEDNYSRLRSYQVSLHCTWLVGTDAPEDTQYFLYYRYGSWTEECQEYSKDTLGRNIAC

SEQ ID NO: 7111 - protein, 420 aa, Homo sapiens
MIIVAHVLLILLGATEILQADLLPDEKISLLPPVNFTIKVTGLAQVLLQWKPNPDQEQRNVNLEYQVKINAPKEDDYETRITESKCVTILHKGFSASVRTILQNDHSLLASSWASAELHAPPGSPGTSIVNLTCTTNTTEDNYSRLRSYQVSLHCTWLVGTDAPEDTQYFLYYRYGSWTEECQEYSKDTLGRNIACWFPRTFILSKGRDWLAVLVNGSSKHSAIRPFDQLFALHAIDQINPPLNVTAEIEGTRLSIQWEKPVSAFPIHCFDYEVKIHNTRNGYLQIEKLMTNAFISIIDDLSKYDVQVRAAVSSMCREAGLWSEWSQPIYVGNDEHKPLREWFVIVIMATICFILLILSLICKICHLWIKLFPPIPAPKSNIKDLFVTTNYEKAGSSETEIEVICYIEKPGVETLEDSVF

SEQ ID NO: 7112 - protein, 335 aa, Homo sapiens
MIIVAHVLLILLGATEILQADLLPDEKISLLPPVNFTIKVTGLAQVLLQWKPNPDQEQRNVNLEYQVKINAPKEDDYETRITESKCVTILHKGFSASVRTILQNDHSLLASSWASAELHAPPGSPGTSIVNLTCTTNTTEDNYSRLRSYQVSLHCTWLVGTDAPEDTQYFLYYRYGSWTEECQEYSKDTLGRNIACWFPRTFILSKGRDWLAVLVNGSSKHSAIRPFDQLFALHAIDQINPPLNVTAEIEGTRLSIQWEKPVSAFPIHCFDYEVKIHNTRNGYLQIEKLMTNAFISIIDDLSKYDVQVRAAVSSMCREAGLWSEWSQPIYVGFSR

SEQ ID NO: 7113 - protein, 335 aa, Homo sapiens; identical to SEQ ID NO: 7112

SEQ ID NO: 7114 - protein, 333 aa, Homo sapiens
MIIVAHVLLILLGATEILQADLLPDEKISLLPPVNFTIKVTGLAQVLLQWKPNPDQEQRNVNLEYQVKINAPKEDDYETRITESKCVTILHKGFSASVRTILQNDHSLLASSWASAELHAPPGSPGTSIVNLTCTTNTTEDNYSRLRSYQVSLHCTWLVGTDAPEDTQYFLYYRYGSWTEECQEYSKDTLGRNIACWFPRTFILSKGRDWLAVLVNGSSKHSAIRPFDQLFALHAIDQINPPLNVTAEIEGTRLSIQWEKPVSAFPIHCFDYEVKIHNTRNGYLQIEKLMTNAFISIIDDLSKYDVQVRAAVSSMCREAGLWSEWSQPIYVGK

SEQ ID NO: 7115 - protein, 420 aa, Homo sapiens; identical to SEQ ID NO: 7111

SEQ ID NO: 7116 - protein, 378 aa, Homo sapiens
MIIVAHVLLILLGATEILQADLLPDEKISLLPPVNFTIKVTGLAQVLLQWKPNPDQEQRNVNLEYQVKINAPKEDDYETRITESKCVTILHKGFSASVRTILQNDHSLLASSWASAELHAPPGSPGTSIVNLTCTTNTTEDNYSRLRSYQVSLHCTWLVGTDAPEDTQYFLYYRYGSWTEECQEYSKDTLGRNIACWFPRTFILSKGRDWLAVLVNGSSKHSAIRPFDQLFALHAIDQINPPLNVTAEIEGTRLSIQWEKPVSAFPIHCFDYEVKIHNTRNGYLQIEKLMTNAFISIIDDLSKYDVQVRAAVSSMCREAGLWSEWSQPIYVGNDEHKPLREWFVIVIMATICFILLILSLICKIKLGPVRRKLKSSVI

SEQ ID NO: 7117 - protein, 333 aa, Homo sapiens; identical to SEQ ID NO: 7114

SEQ ID NO: 7118 - protein, 325 aa, Homo sapiens
MIIVAHVLLILLGATEILQADLLPDEKISLLPPVNFTIKVTGLAQVLLQWKPNPDQEQRNVNLEYQVKINAPKEDDYETRITESKCVTILHKGFSASVRTILQNDHSLLASSWASAELHAPPGSPGTSIVNLTCTTNTTEDNYSRLRSYQVSLHCTWLVGTDAPEDTQYFLYYRYGSWTEECQEYSKDTLGRNIACWFPRTFILSKGRDWLAVLVNGSSKHSAIRPFDQLFALHAIGNDEHKPLREWFVIVIMATICFILLILSLICKICHLWIKLFPPIPAPKSNIKDLFVTTNYEKAGSSETEIEVICYIEKPGVETLEDSVF

SEQ ID NO: 7119 - protein, 136 aa, Homo sapiens
MCESSKEALAENNLNLPKMAEKDGCFQSGFNEETCLVKIITGLLEFEVYLEYLQNRFESSEEQARAVQMSTKVLIQFLQKKAKNLDAITTPDPTTNASLLTKLQAQNQWLQDMTTHLILRSFKEFLQSSLRALRQM

SEQ ID NO: 7120 - protein, 122 aa, Homo sapiens
MCESSKEALAENNLNLPKMAEKDGCFQSGFNEETCLVKIITGLLEFEVYLEYLQNRFESSEEQARAVQMSTKVLIQFLQKKVGVSSFPQLGVGEDRLKDSVLDNSGMQCHFQKRRLHVNKRV

SEQ ID NO: 7121 - protein, 189 aa, Homo sapiens
MNSFSTIPPGEDSKDVAAPHRQPLTSSERIDKQIRYILDGISALRKETCNKSNMCESSKEALAENNLNLPKMAEKDGCFQSGFNEETCLVKIITGLLEFEVYLEYLQNRFESSEEQARAVQMSTKVLIQFLQKKAKNLDAITTPDPTTNASLLTKLQAQNQWLQDMTTHLILRSFKEFLQSSLRALRQM

SEQ ID NO: 7122 - protein, 152 aa, Homo sapiens
MNSFSTSAFGPVAFSLGLLLVLPAAFPAPVPPGEDSKDVAAPHRQPLTSSERIDKQIRYILDGISALRKETCNKSNMCESSKEALAENNLNLPKMAEKDGCFQSGFNEETCLVKIITGLLEFEVYLEYLQNRFESSEEQARAVQMSTKVLIQ

SEQ ID NO: 7123 - protein, 212 aa, Homo sapiens
MNSFSTSAFGPVAFSLGLLLVLPAAFPAPVPPGEDSKDVAAPHRQPLTSSERIDKQIRYILDGISALRKETCNKSNMCESSKEALAENNLNLPKMAEKDGCFQSGFNEETCLVKIITGLLEFEVYLEYLQNRFESSEEQARAVQMSTKVLIQFLQKKAKNLDAITTPDPTTNASLLTKLQAQNQWLQDMTTHLILRSFKEFLQSSLRALRQM

SEQ ID NO: 7124 - protein, 212 aa, Homo sapiens; identical to SEQ ID NO: 7123

SEQ ID NO: 7125 - protein, 198 aa, Homo sapiens
MNSFSTSAFGPVAFSLGLLLVLPAAFPAPVPPGEDSKDVAAPHRQPLTSSERIDKQIRYILDGISALRKETCNKSNMCESSKEALAENNLNLPKMAEKDGCFQSGFNEETCLVKIITGLLEFEVYLEYLQNRFESSEEQARAVQMSTKVLIQFLQKKVGVSSFPQLGVGEDRLKDSVLDNSGMQCHFQKRRLHVNKRV

SEQ ID NO: 7126 - protein, 171 aa, Homo sapiens [sequence omitted]

SEQ ID NO: 7127 - protein, 365 aa, Homo sapiens [sequence omitted]

SEQ ID NO: 7128 - protein, 468 aa, Homo sapiens
MLAVGCALLAALLAAPGAALAPRRCPAQEVARGVLTSLPGDSVTLTCPGVEPEDNATVHWVLRKPAAGSHPSRWAGMGRRLLLRSVQLHDSGNYSCYRAGRPAGTVHLLVDVPPEEPQLSCFRKSPLSNVVCEWGPRSTPSLTTKAVLLVRKFQNSPAEDFQEPCQYSQESQKFSCQLAVPEGDSSFYIVSMCVASSVGSKFSKTQTFQGCGILQPDPPANITVTAVARNPRWLSVTWQDPHSWNSSFYRLRFELRYRAERSKTFTTWMVKDLQHHCVIHDAWSGLRHVVQLRAQEEFGQGEWSEWSPEAMGTPWTESRSPPAENEVSTPMQALTTNKDDDNILFRDSANATSLPVQDSSSVPLPTFLVAGGSLAFGTLLCIAIVLRFKKTWKLRALKEGKTSMHPPYSLGQLVPERPRPTPVLVPLISPPVSPSSLGSDNTSSHNRPDARDPRSPYDISNTDYFFPR

SEQ ID NO: 7129 - protein, 352 aa, Homo sapiens
MLAVGCALLAALLAAPGAALAPRRCPAQEVARGVLTSLPGDSVTLTCPGVEPEDNATVHWVLRKPAAGSHPSRWAGMGRRLLLRSVQLHDSGNYSCYRAGRPAGTVHLLVDVPPEEPQLSCFRKSPLSNVVCEWGPRSTPSLTTKAVLLVRKFQNSPAEDFQEPCQYSQESQKFSCQLAVPEGDSSFYIVSMCVASSVGSKFSKTQTFQGCGILQPDPPANITVTAVARNPRWLSVTWQDPHSWNSSFYRLRFELRYRAERSKTFTTWMVKDLQHHCVIHDAWSGLRHVVQLRAQEEFGQGEWSEWSPEAMGTPWTDRLSPRCPGWSTAVQSQLTATSASWVQAILPPQPPK

SEQ ID NO: 7130 - protein, 190 aa, Homo sapiens
  VARIANT 1: note = misc_feature - Xaa can be any naturally occurring amino acid
XGSKFSKTQTFQGCGILQPDPPANITVTAVARNPRWLSVTWQDPHSWNSSFYRLRFELRYRAERSKTFTTWMVKDLQHHCVIHDAWSGLRHVVQLRAQEEFGQGEWSEWSPEAMGTPWTESRSPPAENEVSTPMQALTTNKDDDNILFRDSANATSLPVQDSSSVPLPTFLVAGGSLAFGTLLCIAIVLR

SEQ ID NO: 7131 - protein, 294 aa, Homo sapiens
  VARIANT 1: note = misc_feature - Xaa can be any naturally occurring amino acid
XRRLLLRSVQLHDSGNYSCYRAGRPAGTVHLLVDVPPEEPQLSCFRKSPLSNVVCEWGPRSTPSLTTKAVLLVRKFQNSPAEDFQEPCQYSQESQKFSCQLAVPEGDSSFYIVSMCVASSVGSKFSKTQTFQGCGILQPDPPANITVTAVARNPRWLSVTWQDPHSWNSSFYRLRFELRYRAERSKTFTTWMVKDLQHHCVIHDAWSGLRHVVQLRAQEEFGQGEWSEWSPEAMGTPWTGFSPQTIPGGIWDPAGESRSPPAENEVSTPMQALTTNKDDDNILFRDSANATSLP

SEQ ID NO: 7132 - protein, 66 aa, Homo sapiens
MLTLQTWLVQALFIFLTTESTELKNTSGLMFQILQRVILPSGHLTLLQGTILIQKIKCIQMAISLM

SEQ ID NO: 7133 - protein, 918 aa, Homo sapiens
MLTLQTWLVQALFIFLTTESTGELLDPCGYISPESPVVQLHSNFTAVCVLKEKCMDYFHVNANYIVWKTNHFTIPKEQYTIINRTASSVTFTDIASLNIQLTCNILTFGQLEQNVYGITIISGLPPEKPKNLSCIVNEGKKMRCEWDGGRETHLETNFTLKSEWATHKFADCKAKRDTPTSCTVDYSTVYFVNIEVWVEAENALGKVTSDHINFDPVYKVKPNPPHNLSVINSEELSSILKLTWTNPSIKSVIILKYNIQYRTKDASTWSQIPPEDTASTRSSFTVQDLKPFTEYVFRIRCMKEDGKGYWSDWSEEASGITYEDRPSKAPSFWYKIDPSHTQGYRTVQLVWKTLPPFEANGKILDYEVTLTRWKSHLQNYTVNATKLTVNLTNDRYLATLTVRNLVGKSDAAVLTIPACDFQATHPVMDLKAFPKDNMLWVEWTTPRESVKKYILEWCVLSDKAPCITDWQQEDGTVHRTYLRGNLAESKCYLITVTPVYADGPGSPESIKAYLKQAPPSKGPTVRTKKVGKNEAVLEWDQLPVDVQNGFIRNYTIFYRTIIGNETAVNVDSSHTEYTLSSLTSDTLYMVRMAAYTDEGGKDGPEFTFTTPKFAQGEIEAIVVPVCLAFLLTTLLGVLFCFNKRDLIKKHIWPNVPDPSKSHIAQWSPHTPPRHNFNSKDQMYSDGNFTDVSVVEIEANDKKPFPEDLKSLDLFKKEKINTEGHSSGIGGSSCMSSSRPSISSSDENESSQNTSSTVQYSTVVHSGYRHQVPSVQVFSRSESTQPLLDSEERPEDLQLVDHVDGGDGILPRQQYFKQNCSQHESSPDISHFERSKQVSSVNEEDFVRLKQQISDHISQSCGSGQMKMFQEVSAADAFGPGTEGQVERFETVGMEAATDEGMPKSYLPQTVRQGGYMPQ

SEQ ID NO: 7134 - protein, 918 aa, Homo sapiens; identical to SEQ ID NO: 7133

SEQ ID NO: 7135 - protein, 857 aa, Homo sapiens
MLTLQTWLVQALFIFLTTESTGELLDPCGYISPESPVVQLHSNFTAVCVLKEKCMDYFHVNANYIVWKTNHFTIPKEQYTIINRTASSVTFTDIASLNIQLTCNILTFGQLEQNVYGITIISGLPPEKPKNLSCIVNEGKKMRCEWDGGRETHLETNFTLKSEWATHKFADCKAKRDTPTSCTVDYSTVYFVNIEVWVEAENALGKVTSDHINFDPVYKVKPNPPHNLSVINSEELSSILKLTWTNPSIKSVIILKYNIQYRTKDASTWSQIPPEDTASTRSSFTVQDLKPFTEYVFRIRCMKEDGKGYWSDWSEEASGITYEDRPSKAPSFWYKIDPSHTQGYRTVQLVWKTLPPFEANGKILDYEVTLTRWKSHLQNYTVNATKLTVNLTNDRYLATLTVRNLVGKSDAAVLTIPACDFQGNLAESKCYLITVTPVYADGPGSPESIKAYLKQAPPSKGPTVRTKKVGKNEAVLEWDQLPVDVQNGFIRNYTIFYRTIIGNETAVNVDSSHTEYTLSSLTSDTLYMVRMAAYTDEGGKDGPEFTFTTPKFAQGEIEAIVVPVCLAFLLTTLLGVLFCFNKRDLIKKHIWPNVPDPSKSHIAQWSPHTPPRHNFNSKDQMYSDGNFTDVSVVEIEANDKKPFPEDLKSLDLFKKEKINTEGHSSGIGGSSCMSSSRPSISSSDENESSQNTSSTVQYSTVVHSGYRHQVPSVQVFSRSESTQPLLDSEERPEDLQLVDHVDGGDGILPRQQYFKQNCSQHESSPDISHFERSKQVSSVNEEDFVRLKQQISDHISQSCGSGQMKMFQEVSAADAFGPGTEGQVERFETVGMEAATDEGMPKSYLPQTVRQGGYMPQ

SEQ ID NO: 7136 - protein, 329 aa, Homo sapiens
MLTLQTWLVQALFIFLTTESTGELLDPCGYISPESPVVQLHSNFTAVCVLKEKCMDYFHVNANYIVWKTNHFTIPKEQYTIINRTASSVTFTDIASLNIQLTCNILTFGQLEQNVYGITIISGLPPEKPKNLSCIVNEGKKMRCEWDGGRETHLETNFTLKSEWATHKFADCKAKRDTPTSCTVDYSTVYFVNIEVWVEAENALGKVTSDHINFDPVYKVKPNPPHNLSVINSEELSSILKLTWTNPSIKSVIILKYNIQYRTKDASTWSQIPPEDTASTRSSFTVQDLKPFTEYVFRIRCMKEDGKGYWSDWSEEASGITYEDNIASF

SEQ ID NO: 7137 - protein, 918 aa, Homo sapiens; identical to SEQ ID NO: 7133

SEQ ID NO: 7138 - protein, 329 aa, Homo sapiens; identical to SEQ ID NO: 7136

SEQ ID NO: 7139 - protein, 333 aa, Homo sapiens
MLTLQTWLVQALFIFLTTESTGELLDPCGYISPESPVVQLHSNFTAVCVLKEKCMDYFHVNANYIVWKTNHFTIPKEQYTIINRTASSVTFTDIASLNIQLTCNILTFGQLEQNVYGITIISGLPPEKPKNLSCIVNEGKKMRCEWDGGRETHLETNFTLKSEWATHKFADCKAKRDTPTSCTVDYSTVYFVNIEVWVEAENALGKVTSDHINFDPVYKVKPNPPHNLSVINSEELSSILKLTWTNPSIKSVIILKYNIQYRTKDASTWSQIPPEDTASTRSSFTVQDLKPFTEYVFRIRCMKEDGKGYWSDWSEEASGITYEDTLDKPLGSG

SEQ ID NO: 7140 - protein, 203 aa, Homo sapiens
MLTLQTWLVQALFIFLTTESTGELLDPCGYISPESPVVQLHSNFTAVCVLKEKLKPNPPHNLSVINSEELSSILKLTWTNPSIKSVIILKYNIQYRTKDASTWSQIPPEDTASTRSSFTVQDLKPFTEYVFRIRCMKEDGKGYWSDWSEEASGITYEDKLKNTSGLMFQILQRVILPSGHLTLLQGTILIQKIKCIQMAISLM

SEQ ID NO: 7141 - protein, 55 aa, Homo sapiens
MLTLQTWLVQALFIFLTTESTGQHTSLLIAKQNVTPPPHALLIILLCILSTLKSG

SEQ ID NO: 7142 - protein, 115 aa, Homo sapiens
MFHVSFRYIFGLPPLILVLLPVASSDCDIEGKDGKQYESVLMVSIDQLLDSMKEIGSNCLNNEFNFFKRHICDANKEENKSLKEQKKLNDLCFLKRLLQEIKTCWNKILMGTKEH

SEQ ID NO: 7143 - protein, 159 aa, Homo sapiens
MFHVSFRYIFGLPPLILVLLPVASSDCDIEGKDGKQYESVLMVSIDQLLDSMKEIGSNCLNNEFNFFKRHICDANKEGMFLFRAARKLRQFLKMNSTGDFDLHLLKVSEGTTILLNCTGQEENKSLKEQKKLNDLCFLKRLLQEIKTCWNKILMGTKEH

SEQ ID NO: 7144 - protein, 177 aa, Homo sapiens
MFHVSFRYIFGLPPLILVLLPVASSDCDIEGKDGKQYESVLMVSIDQLLDSMKEIGSNCLNNEFNFFKRHICDANKEGMFLFRAARKLRQFLKMNSTGDFDLHLLKVSEGTTILLNCTGQVKGRKPAALGEAQPTKSLEENKSLKEQKKLNDLCFLKRLLQEIKTCWNKILMGTKEH

SEQ ID NO: 7145 - protein, 133 aa, Homo sapiens
MFHVSFRYIFGLPPLILVLLPVASSDCDIEGKDGKQYESVLMVSIDQLLDSMKEIGSNCLNNEFNFFKRHICDANKVKGRKPAALGEAQPTKSLEENKSLKEQKKLNDLCFLKRLLQEIKTCWNKILMGTKEH

SEQ ID NO: 7146 - protein, 71 aa, Homo sapiens
MFHVSFRYIFGLPPLILVLLPVASSDCDIEGKDGKQYESVLMVSIDQLLNQPYKKKEKRTERKQQSAMSNN

SEQ ID NO: 7147 - protein, 71 aa, Homo sapiens; identical to SEQ ID NO: 7146

SEQ ID NO: 7148 - protein, 37 aa, Homo sapiens
MFHVSFRYIFGLPPLILVLLPVASSDCDIEGQHERNW

SEQ ID NO: 7149 - protein, 37 aa, Homo sapiens; identical to SEQ ID NO: 7148

SEQ ID NO: 7150 - protein, 65 aa, Homo sapiens
AAMYEIKVRSIPDHYFKGFWSEWSPSYYFRTPEINNSSGLSLSYGPVSPIIRRLWNIFVRNQEKI

SEQ ID NO: 7151 - protein, 52 aa, Homo sapiens
MTILGTTFGMVFSLLQVVSGESGYAQNGDLEDAELDDYSFSCYSQLEVNGSQ

SEQ ID NO: 7152 - protein, 59 aa, Homo sapiens
MTILGTTFGMVFSLLQVVSGESGYAQNGDLEDAELDDYSFSCYSQLEVNGSQHSLTCAF

SEQ ID NO: 7153 - protein, 150 aa, Homo sapiens
MTILGTTFGMVFSLLQVVSGESGYAQNGDLEDAELDDYSFSCYSQLEVNGSQHSLTCAFEDPDVNITNLEFEICGALVEVKCLNFRKLQEIYFIETKKFLLIGKSNICVKVGEKSLTCKKIDLTTIGKKLYIKVWLSLLGYLKTLCLDIL

SEQ ID NO: 7154 - protein, 180 aa, Homo sapiens
MTILGTTFGMVFSLLQVVSGESGYAQNGDLEDAELDDYSFSCYSQLEVNGSQHSLTCAFEDPDVNITNLEFEICGALVEVKCLNFRKLQEIYFIETKKFLLIGKSNICVKVGEKSLTCKKIDLTTIVKPEAPFDLSVVYREGANDFVVTFNTSHLQKKYVKVLMHDVAYRQEKDENKWTD

SEQ ID NO: 7155 - protein, 459 aa, Homo sapiens
MTILGTTFGMVFSLLQVVSGESGYAQNGDLEDAELDDYSFSCYSQLEVNGSQHSLTCAFEDPDVNITNLEFEICGALVEVKCLNFRKLQEIYFIETKKFLLIGKSNICVKVGEKSLTCKKIDLTTIVKPEAPFDLSVVYREGANDFVVTFNTSHLQKKYVKVLMHDVAYRQEKDENKWTHVNLSSTKLTLLQRKLQPAAMYEIKVRSIPDHYFKGFWSEWSPSYYFRTPEINNSSGEMDPILLTISILSFFSVALLVILACVLWKKRIKPIVWPSLPDHKKTLEHLCKKPRKNLNVSFNPESFLDCQIHRVDDIQARDEVEGFLQDTFPQQLEESEKQRLGGDVQSPNCPSEDVVITPESFGRDSSLTCLAGNVSACDAPILSSSRSLDCRESGKNGPHVYQDLLLSLGTTNSTLPPPFSLQSGILTLNPVAQGQPILTSLGSNQEEAYVTMSSFYQNQ

SEQ ID NO: 7156 - protein, 261 aa, Homo sapiens
MTILGTTFGMVFSLLQVVSGESGYAQNGDLEDAELDDYSFSCYSQLEVNGSQHSLTCAFEDPDVNITNLEFEICGALVEVKCLNFRKLQEIYFIETKKFLLIGKSNICVKVGEKSLTCKKIDLTTIVKPEAPFDLSVVYREGANDFVVTFNTSHLQKKYVKVLMHDVAYRQEKDENKWTHVNLSSTKLTLLQRKLQPAAMYEIKVRSIPDHYFKGFWSEWSPSYYFRTPEINNSSGLSLSYGPVSPIIRRLWNIFVRNQEK

SEQ ID NO: 7157 - protein, 144 aa, Homo sapiens
MLLAMVLTSALLLCSVAGQGCPTLAGILDINFLINKMQEDPASKCHCSANVTSCLCLGIPSDNCTRPCFSERLSQMTNTTMQTRYPLIFSRVKKSVEVLKNNKCPYFSCEQPCNQTTAGNALTFLKSLLEIFQKEKMRGMRGKI

SEQ ID NO: 7158 - protein, 457 aa, Homo sapiens
MAWPKLPAPWLLLCTWLPAGCLSLLVTVQHTERYVTLFASIILKCDYTTSAQLQDVVVTWRFKSFCKDPIFDYYSASYQAALSLGQDPSNDCNDNQREVRIVAQRRGQNEPVLGVDYRQRKITIQNPLARHRYMKQAQALGPQMMGKPLYWGADRSSQVSSYPMHPLLQRDLSLPSSLPQMPMTQTTNQPPIANGVLEYLEKELRNLNLAQPLPPDLKGRFGHPCSMLSSLGSEVVERRIIHLPPLIRDLSSSRRTSDSLHQQWLTPIPSRPWDLREGRSHHHYPDFHQELQDRGPKSWALERRELDPSWSGRHRSSRLNGSPIHWSDRDSLSDVPSSSEARWRPSHPPFRSRCQERPRRPSPRESTQRHGRRRRHRSYSPPLPSGLSSWSSEEDKERQPQSWRAHRRGSHSPHWPEEKPPSYRSLDITPGKNSRKKGSVERRSEKDSSHSGRSVVI

SEQ ID NO: 7159 - protein, 546 aa, Homo sapiens
MAWPKLPAPWLLLCTWLPAGCLSLLVTVQHTERYVTLFASIILKCDYTTSAQLQDVVVTWRFKSFCKDPIFDYYSASYQAALSLGQDPSNDCNDNQREVRIVAQRRGQNEPVLGVDYRQRKITIQNRADLVINEVMWWDHGVYYCTIEAPGDTSGDPDKEVKLIVLHWLTVIFIILGALLLLLLIGVCWCQCCPQYCCCYIRCPCCPAHCCCPEEALARHRYMKQAQALGPQMMGKPLYWGADRSSQVSSYPMHPLLQRDLSLPSSLPQMPMTQTTNQPPIANGVLEYLEKELRNLNLAQPLPPDLKGRFGHPCSMLSSLGSEVVERRIIHLPPLIRDLSSSRRTSDSLHQQWLTPIPSRPWDLREGRSHHHYPDFHQELQDRGPKSWALERRELDPSWSGRHRSSRLNGSPIHWSDRDSLSDVPSSSEARWRPSHPPFRSRCQERPRRPSPRESTQRHGRRRRHRSYSPPLPSGLSSWSSEEDKERQPQSWRAHRRGSHSPHWPEEKPPSYRSLDITPGKNSRKKGSVERRSEKDSSHSGRSVVI

SEQ ID NO: 7160 - protein, 546 aa, Homo sapiens; identical to SEQ ID NO: 7159

SEQ ID NO: 7161 - protein, 265 aa, Homo sapiens
MAWPKLPAPWLLLCTWLPAGCLSLLVTVQHTERYVTLFASIILKCDYTTSAQLQDVVVTWRFKSFCKDPIFDYYSASYQAALSLGQDPSNDCNDNQREVRIVAQRRGQNEPVLGVDYRQRKITIQNRADLVINEVMWWDHGVYYCTIEAPGDTSGDPDKEVKLIVLHWLTVIFIILGALLLLLLIGVCWCQCCPQYCCCYIRCPCCPAHCCCPEEALARHRYMKQAQALGPQMMGKPLYWGADRSSQVSSYPMHPLLQRASRRCQ

SEQ ID NO: 7162 - protein, 502 aa, Homo sapiens
MAWPKLPAPWLLLCTWLPAGCLSLLVTVQHTERYVTLFASIILKCDYTTSAQLQDVVVTWRFKSFCKDPIFDYYSASYQAALSLGQDPSNDCNDNQREVRIVAQRRGQNEPVLGVDYRQRKITIQNRADLVINEVMWWDHGVYYCTIEAPGDTSGDPDKEVKLIVLHWLTVIFIILGALLLLLLIGVCWCQCCPQYCCCYIRCPCCPAHCCCPEEDLSLPSSLPQMPMTQTTNQPPIANGVLEYLEKELRNLNLAQPLPPDLKGRFGHPCSMLSSLGSEVVERRIIHLPPLIRDLSSSRRTSDSLHQQWLTPIPSRPWDLREGRSHHHYPDFHQELQDRGPKSWALERRELDPSWSGRHRSSRLNGSPIHWSDRDSLSDVPSSSEARWRPSHPPFRSRCQERPRRPSPRESTQRHGRRRRHRSYSPPLPSGLSSWSSEEDKERQPQSWRAHRRGSHSPHWPEEKPPSYRSLDITPGKNSRKKGSVERRSEKDSSHSGRSVVI

SEQ ID NO: 7163 - protein, 167 aa, Homo sapiens
MDRVLLRWISLFWLTAMVEGLQVTVPDKKKVAMLFQPTVLRCHFSTSSHQPAVVQWKFKSYCQDRMGESLGMSSTRAQSLSKRNLEWDPYLDCLDSRRTVRVVASKQGSTVTLGDFYRGREITIVHDADLQIGKLMWGDSGLYYCIITTPDDLEGKNEDSVELLVLE

SEQ ID NO: 7164 - protein, 620 aa, Homo sapiens
MDRVLLRWISLFWLTAMVEGLQVTVPDKKKVAMLFQPTVLRCHFSTSSHQPAVVQWKFKSYCQDRMGESLGMSSTRAQSLSKRNLEWDPYLDCLDSRRTVRVVASKQGSTVTLGDFYRGREITIVHDADLQIGKLMWGDSGLYYCIITTPDDLEGKNEDSVELLVLEWVFVGLVLLGVFLFFVLVGICWCQCCPHSCCCYVRCPCCPDSCCCPQALYEAGKAAKAGYPPSVSGVPGPYSIPSVPLGGAPSSGMLMDKPHPPPLAPSDSTGGSHSVRKGYRIQADKERDSMKVLYYVEKELAQFDPARRMRGRYNNTISELSSLHEEDSNFRQSFHQMRSKQFPVSGDLESNPDYWSGVMGGSSGASRGPSAMEYNKEDRESFRHSQPRSKSEMLSRKNFATGVPAVSMDELAAFADSYGQRPRRADGNSHEARGGSRFERSESRAHSGFYQDDSLEEYYGQRSRSREPLTDADRGWAFSPARRRPAEDAHLPRLVSRTPGTAPKYDHSYLGSARERQARPEGASRGGSLETPSKRSAQLGPRSASYYAWSPPGTYKAGSSQDDQEDASDDALPPYSELELTRGPSYRGRDLPYHSNSEKKRKKEPAKKTNDFPTRMSLVV

SEQ ID NO: 7165 - protein, 580 aa, Homo sapiens
MDRVLLRWISLFWLTAMVEGLQVTVPDKKKVAMLFQPTVLRCHFSTSSHQPAVVQWKFKSYCQDRMGESLGMSSTRAQSLSKRNLEWDPYLDCLDSRRTVRVVASKQGSTVTLGDFYRGREITIVHDADLQIGKLMWGDSGLYYCIITTPDDLEGKNEDSVELLVLGRTGLLADLLPSFAVEIMPEWVFVGLVLLGVFLFFVLVGICWCQCCPHSCCCYVRCPCCPDSCCCPQAFRKGYRIQADKERDSMKVLYYVEKELAQFDPARRMRGRYNNTISELSSLHEEDSNFRQSFHQMRSKQFPVSGDLESNPDYWSGVMGGSSGASRGPSAMEYNKEDRESFRHSQPRSKSEMLSRKNFATGVPAVSMDELAAFADSYGQRPRRADGNSHEARGGSRFERSESRAHSGFYQDDSLEEYYGQRSRSREPLTDADRGWAFSPARRRPAEDAHLPRLVSRTPGTAPKYDHSYLGSARERQARPEGASRGGSLETPSKRSAQLGPRSASYYAWSPPGTYKAGSSQDDQEDASDDALPPYSELELTRGPSYRGRDLPYHSNSEKKRKKEPAKKTNDFPTRMSLVV

SEQ ID NO: 7166 - protein, 639 aa, Homo sapiens
MDRVLLRWISLFWLTAMVEGLQVTVPDKKKVAMLFQPTVLRCHFSTSSHQPAVVQWKFKSYCQDRMGESLGMSSTRAQSLSKRNLEWDPYLDCLDSRRTVRVVASKQGSTVTLGDFYRGREITIVHDADLQIGKLMWGDSGLYYCIITTPDDLEGKNEDSVELLVLGRTGLLADLLPSFAVEIMPEWVFVGLVLLGVFLFFVLVGICWCQCCPHSCCCYVRCPCCPDSCCCPQALYEAGKAAKAGYPPSVSGVPGPYSIPSVPLGGAPSSGMLMDKPHPPPLAPSDSTGGSHSVRKGYRIQADKERDSMKVLYYVEKELAQFDPARRMRGRYNNTISELSSLHEEDSNFRQSFHQMRSKQFPVSGDLESNPDYWSGVMGGSSGASRGPSAMEYNKEDRESFRHSQPRSKSEMLSRKNFATGVPAVSMDELAAFADSYGQRPRRADGNSHEARGGSRFERSESRAHSGFYQDDSLEEYYGQRSRSREPLTDADRGWAFSPARRRPAEDAHLPRLVSRTPGTAPKYDHSYLGSARERQARPEGASRGGSLETPSKRSAQLGPRSASYYAWSPPGTYKAGSSQDDQEDASDDALPPYSELELTRGPSYRGRDLPYHSNSEKKRKKEPAKKTNDFPTRMSLVV

SEQ ID NO: 7167 - protein, 437 aa, Homo sapiens
MDRVLLRWISLFWLTAMVEGLQVTVPDKKKVAMLFQPTVLRCHFSTSSHQPAVVQWKFKSYCQDRMGESLGMSSTRAQSLSKRNLEWDPYLDCLDSRRTVRVVASKQGSTVTLGDFYRGREITIVHDADLQIGKLMWGDSGLYYCIITTPDDLEGKNEDSVELLVLGRTGLLADLLPSFAVEIMPEWVFVGLVLLGVFLFFVLVGICWCQCCPHSCCCYVRCPCCPDSCCCPQALYEAGKAAKAGYPPSVSGVPGPYSIPSVPLGGAPSSGMLMDKPHPPPLAPSDSTGGSHSVRKGYRIQADKERDSMKVLYYVEKELAQFDPARRMRGRYNNTISELSSLHEEDSNFRQSFHQMRSKQFPVSGDLESNPDYWSGVMGGSSGASRGPSAMEYNKEDRESFRHRMTFQPGCPLWSDVVNISLDNEKSDMDYGDKTQI

SEQ ID NO: 7168 - protein, 531 aa, Homo sapiens
MDRVLLRWISLFWLTAMVEGLQVTVPDKKKVAMLFQPTVLRCHFSTSSHQPAVVQWKFKSYCQDRMGESLGMSSTRAQSLSKRNLEWDPYLDCLDSRRTVRVVASKQGSTVTLGDFYRGREITIVHDADLQIGKLMWGDSGLYYCIITTPDDLEGKNEDSVELLVLGRTGLLADLLPSFAVEIMPVRKGYRIQADKERDSMKVLYYVEKELAQFDPARRMRGRYNNTISELSSLHEEDSNFRQSFHQMRSKQFPVSGDLESNPDYWSGVMGGSSGASRGPSAMEYNKEDRESFRHSQPRSKSEMLSRKNFATGVPAVSMDELAAFADSYGQRPRRADGNSHEARGGSRFERSESRAHSGFYQDDSLEEYYGQRSRSREPLTDADRGWAFSPARRRPAEDAHLPRLVSRTPGTAPKYDHSYLGSARERQARPEGASRGGSLETPSKRSAQLGPRSASYYAWSPPGTYKAGSSQDDQEDASDDALPPYSELELTRGPSYRGRDLPYHSNSEKKRKKEPAKKTNDFPTRMSLVV

SEQ ID NO: 7169 - protein, 512 aa, Homo sapiens
MDRVLLRWISLFWLTAMVEGLQVTVPDKKKVAMLFQPTVLRCHFSTSSHQPAVVQWKFKSYCQDRMGESLGMSSTRAQSLSKRNLEWDPYLDCLDSRRTVRVVASKQGSTVTLGDFYRGREITIVHDADLQIGKLMWGDSGLYYCIITTPDDLEGKNEDSVELLVLVRKGYRIQADKERDSMKVLYYVEKELAQFDPARRMRGRYNNTISELSSLHEEDSNFRQSFHQMRSKQFPVSGDLESNPDYWSGVMGGSSGASRGPSAMEYNKEDRESFRHSQPRSKSEMLSRKNFATGVPAVSMDELAAFADSYGQRPRRADGNSHEARGGSRFERSESRAHSGFYQDDSLEEYYGQRSRSREPLTDADRGWAFSPARRRPAEDAHLPRLVSRTPGTAPKYDHSYLGSARERQARPEGASRGGSLETPSKRSAQLGPRSASYYAWSPPGTYKAGSSQDDQEDASDDALPPYSELELTRGPSYRGRDLPYHSNSEKKRKKEPAKKTNDFPTRMSLVV

SEQ ID NO: 7170 - protein, 172 aa, Homo sapiens
MITTSRDPSSRLKMFAKELKLVFPGAQRMNRGRHEVGALVRACKANGVTDLLVVHEHRGTPVGLIVSHLPFGPTAYFTLCNVVMRHDIPDLGTMSEAKPHLITHGFSSRLGKRVSDILRYLFPVPKDDSHRVITFANQDDYISFRHHVYKKTDHRNVELTEVGPRFELKLYM

SEQ ID NO: 7171 - protein, 76 aa, Homo sapiens
MLRREARLRREYLYRKAREEAQRSAQERKERLRRALEENRLIPTELRREALALQGSLEFDDAGGEGNYTRCDQPRG

SEQ ID NO: 7172 - protein, 248 aa, Homo sapiens
MLRREARLRREYLYRKAREEAQRSAQERKERLRRALEENRLIPTELRREALALQGSLEFDDAGGEGVTSHVDDEYRWAGVEDPKVMITTSRDPSSRLKMFAKELKLVFPGAQRMNRGRHEVGALVRACKANGVTDLLVVHEHRGTPVGLIVSHLPFGPTAYFTLCNVVMRHDIPDLGTMSEAKPHLITHGFSSRLGKRVSDILRYLFPVPKDDSHRVITFANQDDYISFRHHVYKKTDHRNVELTECT

SEQ ID NO: 7173 - protein, 291 aa, Homo sapiens
MLRREARLRREYLYRKAREEAQRSAQERKERLRRALEENRLIPTELRREALALQGSLEFDDAGGEGVTSHVDDEYRWAGVEDPKVMITTSRDPSSRLKMFAKELKLVFPGAQRMNRGRHEVGALVRACKANGVTDLLVVHEHRGTPVGLIVSHLPFGPTAYFTLCNVVMRHDIPDLGTMSEAKPHLITHGFSSRLGKRVSDILRYLFPVPKDDSHRVITFANQDDYISFRHHVYKKTDHRNVELTEVGPRFELKLYMIRLGTLEQEATADVEWRWHPYTNTARKRVFLSTE

SEQ ID NO: 7174 - protein, 236 aa, Homo sapiens
MMLEVKVTIQGVTSHVDDEYRWAGVEDPKVMITTSRDPSSRLKMFAKELKLVFPGAQRMNRGRHEVGALVRACKANGVTDLLVVHEHRGTPVGLIVSHLPFGPTAYFTLCNVVMRHDIPDLGTMSEAKPHLITHGFSSRLGKRVSDILRYLFPVPKDDSHRVITFANQDDYISFRHHVYKKTDHRNVELTEVGPRFELKLYMIRLGTLEQEATADVEWRWHPYTNTARKRVFLSTE

SEQ ID NO: 7175 - protein, 280 aa, Homo sapiens
  VARIANT 1: note = misc_feature - Xaa can be any naturally occurring amino acid
XSKCLPAVFLAHWVLLLVLRVFLPCDENRLIPTELRREALALQGSLEFDDAGGEGVTSHVDDEYRWAGVEDPKVMITTSRDPSSRLKMFAKELKLVFPGAQRMNRGRHEVGALVRACKANGVTDLLVVHEHRGTPVGLIVSHLPFGPTAYFTLCNVVMRHDIPDLGTMSEAKPHLITHGFSSRLGKRVSDILRYLFPVPKDDSHRVITFANQDDYISFRHHVYKKTDHRNVELTEVGPRFELKLYMIRLGTLEQEATADVEWRWHPYTNTARKRVFLSTE

SEQ ID NO: 7176 - protein, 158 aa, Homo sapiens
ERPNGTSAQPAQVKPEFYRQAELKPCPWTGSNQRRCITFCPTPDQADPCKFLACGEFAQCVKNERTEEAECRCKPGYDSQGSLDGLEPGLCGPGTKECEVLQGKGAPCRLPDHSENQAYKTSVKKFQNQQNNKVISKRNSELLTVEYEEFNHQDWEGN

SEQ ID NO: 7177 - protein, 140 aa, Homo sapiens
MKQILDSLQAYYRLRVCQEAVWEAYRIFLDRIPDTGEYQDWVSICQQETFCLFDIGKNFSNSQEHLDLLQQRIKQRSFPDRKDEISAEKTLGEPGETIVISTEKNKGKTKPFNILQFGNNHHEHLLPIFCLLSSIIYTYY

SEQ ID NO: 7178 - protein, 797 aa, Homo sapiens
MYLETRRAIFVFWIFLQVQGTKDISINIYHSETKDIDNPPRNETTESTEKMYKMSTMRRIFDLAKHRTKRSAFFPTGVKVCPQESMKQILDSLQAYYRLRVCQEAVWEAYRIFLDRIPDTGEYQDWVSICQQETFCLFDIGKNFSNSQEHLDLLQQRIKQRSFPDRKDEISAEKTLGEPGETIVISTDVANVSLGPFPLTPDDTLLNEILDNTLNDTKMPTTERETEFAVLEEQRVELSVSLVNQKFKAELADSQSPYYQELAGKSQLQMQKIFKKLPGFKKIHVLGFRPKKEKDGSSSTEMQLTAIFKRHSAEAKSPASDLLSFDSNKIESEEVYHGTMEEDKQPEIYLTATDLKRLISKALEEEQSLDVGTIQFTDEIAGSLPAFGPDTQSELPTSFAVITEDATLSPELPPVEPQLETVDGAEHGLPDTSWSPPAMASTSLSEAPPFFMASSIFSLTDQGTTDTMATDQTMLVPGLTIPTSDYSAISQLALGISHPPASSDDSRSSAGGEDMVRHLDEMDLSDTPAPSEVPELSEYVSVPDHFLEDTTPVSALQYITTSSMTIAPKGRELVVFFSLRVANMAFSNDLFNKSSLEYRALEQQFTQLLVPYLRSNLTGFKQLEILNFRNGSVIVNSKMKFAKSVPYNLTKAVHGVLEDFRSAAAQQLHLEIDSYSLNIEPADQADPCKFLACGEFAQCVKNERTEEAECRCKPGYDSQGSLDGLEPGLCGPGTKECEVLQGKGAPCRLPDHSENQAYKTSVKKFQNQQNNKVISKRNSELLTVEYEEFNHQDWEGN

SEQ ID NO: 7179 - protein, 719 aa, Homo sapiens
MYLETRRAIFVFWIFLQVQGTKVCQEAVWEAYRIFLDRIPDTGEYQDWVSICQQETFCLFDIGKNFSNSQEHLDLLQQRIKQRSFPDRKDEISAEKTLGEPGETIVISTDVANVSLGPFPLTPDDTLLNEILDNTLNDTKMPTTERETEFAVLEEQRVELSVSLVNQKFKAELADSQSPYYQELAGKSQLQMQKIFKKLPGFKKIHVLGFRPKKEKDGSSSTEMQLTAIFKRHSAEAKSPASDLLSFDSNKIESEEVYHGTMEEDKQPEIYLTATDLKRLISKALEEEQSLDVGTIQFTDEIAGSLPAFGPDTQSELPTSFAVITEDATLSPELPPVEPQLETVDGAEHGLPDTSWSPPAMASTSLSEAPPFFMASSIFSLTDQGTTDTMATDQTMLVPGLTIPTSDYSAISQLALGISHPPASSDDSRSSAGGEDMVRHLDEMDLSDTPAPSEVPELSEYVSVPDHFLEDTTPVSALQYITTSSMTIAPKGRELVVFFSLRVANMAFSNDLFNKSSLEYRALEQQFTQLLVPYLRSNLTGFKQLEILNFRNGSVIVNSKMKFAKSVPYNLTKAVHGVLEDFRSAAAQQLHLEIDSYSLNIEPADQADPCKFLACGEFAQCVKNERTEEAECRCKPGYDSQGSLDGLEPGLCGPGTKECEVLQGKGAPCRLPDHSENQAYKTSVKKFQNQQNNKVISKRNSELLTVEYEEFNHQDWEGN

SEQ ID NO: 7180 - protein, 366 aa, Homo sapiens
MVLHLLLFLLLTPQGGHSCQGLELARELVLAKVRALFLDALGPPAVTREGGDPGVRRLPRRHALGGFTHRGSEPEEEEDVSQAILFPATDASCEDKSAARGLAQEAEEGLFRYMFRPSQHTRSRQVTSAQLWFHTGLDRQGTAASNSSEPLLGLLALSPGGPVAVPMSLGHAPPHWAVLHLATSALSLLTHPVLVLLLRCPLCTCSARPEATPFLVAHTRTRPPSGGERARRSTPLMSWPWSPSALRLLQRPPEEPAAHANCHRVALNISFQELGWERWIVYPPSFIFHYCHGGCGLHIPPNLSLPVPGAPPTPAQPYSLLPGAQPCCAALPGTMRPLHVRTTSDGGYSFKYETVPNLLTQHCACI

SEQ ID NO: 7181 - protein, 426 aa, Homo sapiens
MPLLWLRGFLLASCWIIVRSSPTPGSEGHSAAPDCPSCALAALPKDVPNSQPEMVEAVKKHILNMLHLKKRPDVTQPVPKAALLNAIRKLHVGKVGENGYVEIEDDIGRRAEMNELMEQTSEIITFAESGTARKTLHFEISKEGSDLSVVERAEVWLFLKVPKANRTRTKVTIRLFQQQKHPQGSLDTGEEAEEVGLKGERSELLLSEKVVDARKSTWHVFPVSSSIQRLLDQGKSSLDVRIACEQCQESGASLVLLGKKKKKEEEGEGKKKGGGEGGAGADEEKEQSHRPFLMLQARQSEDHPHRRRRRGLECDGKVNICCKKQFFVSFKDIGWNDWIIAPSGYHANYCEGECPSHIAGTSGSSLSFHSTVINHYRMRGHSPFANLKSCCVPTKLRPMSMLYYDDGQNIIKKDIQNMIVEECGCS

SEQ ID NO: 7182 - protein, 426 aa, Homo sapiens; identical to SEQ ID NO: 7181

SEQ ID NO: 7183 - protein, 426 aa, Homo sapiens; identical to SEQ ID NO: 7181

SEQ ID NO: 7184 - protein, 407 aa, Homo sapiens
MDGLPGRALGAACLLLLAAGWLGPEAWGSPTPPPTPAAPPPPPPPGSPGGSQDTCTSCGGFRRPEELGRVDGDFLEAVKRHILSRLQMRGRPNITHAVPKAAMVTALRKLHAGKVREDGRVEIPHLDGHASPGADGQERVSEIISFAETDGLASSRVRLYFFISNEGNQNLFVVQASLWLYLKLLPYVLEKGSRRKVRVKVYFQEQGHGDRWNMVEKRVDLKRSGWHTFPLTEAIQALFERGERRLNLDVQCDSCQELAVVPVFVDPGEESHRPFVVVQARLGDSRHRIRKRGLECDGRTNLCCRQQFFIDFRLIGWNDWIIAPTGYYGNYCEGSCPAYLAGVPGSASSFHTAVVNQYRMRGLNPGTVNSCCIPTKLSTMSMLYFDDEYNIVKRDVPNMIVEECGCA

SEQ ID NO: 7185 - protein, 352 aa, Homo sapiens
MTSSLLLAFLLLAPTTVATPRAGGQCPACGGPTLELESQRELLLDLAKRSILDKLHLTQRPTLNRPVSRAALRTALQHLHGVPQGALLEDNREQECEIISFAETGLSTINQTRLDFHFSSDRTAGDREVQQASLMFFVQLPSNTTWTLKVRVLVLGPHNTNLTLATQYLLEVDASGWHQLPLGPEAQAACSQGHLTLELVLEGQVAQSSVILGGAAHRPFVAARVRVGGKHQIHRRGIDCQGGSRMCCRQEFFVDFREIGWHDWIIQPEGYAMNFCIGQCPLHIAGMPGIAASFHTAVLNLLKANTAAGTTGGGSCCVPTARRPLSLLYYDRDSNIVKTDIPDMVVEACGCS

SEQ ID NO: 7186 - protein, 274 aa, Homo sapiens
METAAAVVKLERLEAALTRALRRLQPGSVAPGNGEEVISFATVTDSTSAYSSLLTFHLSTPRSHHLYHARLWLHVLPTLPGTLCLRIFRWGPRRRRQGSRTLLAEHHITNLGWHTLTLPSSGLRGEKSGVLKLQLDCRPLEGNSTVTGQPRRLLDTAGHQQPFLELKIRANEPGAGRARRRTPTCEPATPLCCRRDHYVDFQELGWRDWILQPEGYQLNYCSGQCPPHLAGSPGIAASFHSAVFSLLKANNPWPASTSCCVPTARRPLSLLYLD

SEQ ID NO: 7187 - protein, 350 aa, Homo sapiens
MRLPDVQLWLVLLWALVRAQGTGSVCPSCGGSKLAPQAERALVLELAKQQILDGLHLTSRPRITHPPPQAALTRALRRLQPGSVAPGNGEEVISFATVTDSTSAYSSLLTFHLSTPRSHHLYHARLWLHVLPTLPGTLCLRIFRWGPRRRRQGSRTLLAEHHITNLGWHTLTLPSSGLRGEKSGVLKLQLDCRPLEGNSTVTGQPRRLLDTAGHQQPFLELKIRANEPGAGRARRRTPTCEPATPLCCRRDHYVDFQELGWRDWILQPEGYQLNYCSGQCPPHLAGSPGIAASFHSAVFSLLKANNPWPASTSCCVPTARRPLSLLYLDHNGNVVKTDVPDMVVEACGCS

SEQ ID NO: 7188 - protein, 104 aa, Homo sapiens
LDISFPPSYPYSEDARQGEQYMNTRCPAWCDRILMSPSAKELVLRSESEEKVVTYDHIGPNVCMGDHKPVFLAFRIMPGAGKRCQRHERTLREPPCSRGPNTHS

SEQ ID NO: 7189 - protein, 412 aa, Homo sapiens
MAGKAAAPGTAVLLVTANVGSLFDDPENLQKNWLREFYQVVHTHKPHFMALHCQEFGGKNYEASMSHVDKFVKELLSSDAMKEYNRARVYLDENYKSQEHFTALGSFYFLHESLKNIYQFDFKAKKYRKVAGKEIYSDTLESTPMLEKEKFPQDYFPECKWSRKGFIRTRWCIADCAFDLVNIHLFHDASNLVAWETSPSVYSGIRHKALGYVLDRIIDQRFEKVSYFVFGDFNFRLDSKSVVETLCTKATMQTVRAADTNEVVKLIFRESDNDRKVMLQLEKKLFDYFNQEVFRDNNGTALLEFDKELSVFKDRLYELDISFPPSYPYSEDARQGEQYMNTRCPAWCDRILMSPSAKELVLRSESEEKVVTYDHIGPNVCMGDHKPVFLAFRIMPGAGKPHAHVHKCCVVQ

SEQ ID NO: 7190 - protein, 387 aa, Homo sapiens
MAGKAAAPGTAVLLVTANVGSLFDDPENLQKNWLREFYQVVHTHKPHFMALHCQEFGGKNYEASMSHVDKFVKELLSSDAMKEYNRARVYLDENYKSQEHFTALGSFYFLHESLKNIYQFDFKAKKYRKVAGKEIYSDTLESTPMLEKEKFPQDYFPECKWSRKGFIRTRWCIADCAFDLVNIHLFHDASNLVAWETSPSVYSGIRHKALGYVLDRIIDQRFEKVSYFVFGDFNFRLDSKSVVETLCTKATMQTVRAADTNEVVKLIFRESDNDRKVMLQLEKKLFDYFNQEVFRDNNGTALLEFDKELSVFKDRLYELDISFPPSYPYSEDARQGEQYMNTRCPAWCDRILMSPSAKELVLRVSVCCPSPGHRGMWSAGSGLAQPW

SEQ ID NO: 7191 - protein, 138 aa, Homo sapiens
VTANVGSLFDDPENLQKNWLREFYQALGSFYFLHESLKNIYQFDFKAKKYRKVAGKEIYSDTLESTPMLEKEKFPQDYFPECKWSRKGFIRTRWCIADCAFDLVNIHLFHDASNLVAWETSPSVYSGIRHKALGYVLD

SEQ ID NO: 7192 - protein, 278 aa, Homo sapiens
  VARIANT 1: note = misc_feature - Xaa can be any naturally occurring amino acid
XQKNWLREFYQVVHTHKPHFMALHCQEFGGKNYEASMSHVDKFVKELLSSDAMKEYNRARVYLDENYKSQEHFTALGSFYFLHESLKNIYQFDFKAKKYRKVAGKEIYSDTLESTPMLEKEKFPQDYFPECKWSRKGFIRTRWCIADCAFDLVNIHLFHDASNLVAWETSPSVYSGIRHKALGYVLDRIIDQRFEKVSYFVFGDFNFRLDSKSVVELLEFDKELSVFKDRLYELDISFPPSYPYSEDARQGEQYMNTRCPAWCDRILMSPSAKELVLR

SEQ ID NO: 7193 - protein, 92 aa, Homo sapiens
MALWMRLLPLLALLALWGPDPAAAFVNQHLCGSHLVEALYLVCGERGFFYTPKTRREAEDLQAGELLQLDAARRQPHTRRLLHRERWNKALE

SEQ ID NO: 7194 - protein, 98 aa, Homo sapiens
MALWMRLLPLLALLALWGPDPAAAFVNQHLCGSHLVEALYLVCGERGFFYTPKTRREAEDLQGSLQPLALEGSLQKRGIVEQCCTSICSLYQLENYCN

SEQ ID NO: 7195 - protein, 110 aa, Homo sapiens
MALWMRLLPLLALLALWGPDPAAAFVNQHLCGSHLVEALYLVCGERGFFYTPKTRREAEDLQVGQVELGGGPGAGSLQPLALEGSLQKRGIVEQCCTSICSLYQLENYCN

SEQ ID NO: 7196 - protein, 110 aa, Homo sapiens; identical to SEQ ID NO: 7195

SEQ ID NO: 7197 - protein, 110 aa, Homo sapiens; identical to SEQ ID NO: 7195

SEQ ID NO: 7198 - protein, 200 aa, Homo sapiens
MALWMRLLPLLALLALWGPDPAAAFVNQHLCGSHLVEALYLVCGERGFFYTPKTRREAEDLQASALSLSSSTSTWPEGLDATARAPPALVVTANIGQAGGSSSRQFRQRALGTSDSPVLFIHCPGAAGTAQGLEYRGRRVTTELVWEEVDSSPQPQGSESLPAQPPAQPAPQPEPQQAREPSPEVSCCGLWPRRPQRSQN

SEQ ID NO: 7199 - protein, 200 aa, Homo sapiens; identical to SEQ ID NO: 7198

SEQ ID NO: 7200 - protein, 157 aa, Homo sapiens
MDPRLPAWALVLLGPALVFALGPAPTPEMREKLCGHHFVRALVRVCGGPRWSTEARRPATGGDQRESHSVSQAGLKLLSSSNPPTLTFQSVGISDVSCYSGWRDDICSMGWWPTVISRWDLACSPCPRPLTITATTVQLPPTLHATAASVAVPNKTC

SEQ ID NO: 7201 - protein, 131 aa, Homo sapiens
MDPRLPAWALVLLGPALVFALGPAPTPEMREKLCGHHFVRALVRVCGGPRWSTEARRPATGGDRELLQWLERRHLLHGLVADSNLTLGPGLQPLPQTSHHHRHHRAAATNPARYCCLSGCTQQDLLTLCPY

SEQ ID NO: 7202 - protein, 71 aa, Homo sapiens
  VARIANT 1: note = misc_feature - Xaa can be any naturally occurring amino acid
XDPRLPAWALVLLGPALVFALGPAPTPEMREKLCGHHFVRALVRVCGGPRWSTEARRPATGGDPEFHSVPR

SEQ ID NO: 7203 - protein, 139 aa, Homo sapiens
MASLFRSYLPAIWLLLSQLLRESLAAELRGCGPRFGKHLLSYCPMPEKTFTTTPGGWLLESGRPKEMVSTSNNKDGQALGTTSEFIPNLSPELKKPLSEGQPSLKKIILSRKKRSGRHRFDPFCCEVICDDGTSVKLCT

SEQ ID NO: 7204 - protein, 135 aa, Homo sapiens
MKGSIFTLFLFSVLFAISEVRSKESVRLCGLEYIRTVIYICASSRWRRHQEGIPQAQQAETGNSFQLPHKREFSEENPAQNLPKVDASGEDRLWGGQMPTEELWKSKKHSVMSRQDLQTLCCTDGCSMTDLSALC

SEQ ID NO: 7205 - protein, 213 aa, Homo sapiens
MPRLLRLSLLWLGLLLVRFSRELSDISSARKLCGRYLVKEIEKLCGHANWSQFRFEEETPFSRLIAQASEKVEAYSPYQFESPQTASPARGRGTNPVSTSWEEAVNSWEMQSLPEYKDKKGYSPLGKTREFSSSHNINVYIHENAKFQKKRRNKIKTLSNLFWGHHPQRKRRGYSEKCCLTGCTKEELSIACLPYIDFKRLKEKRSSLVTKIY

SEQ ID NO: 7206 - protein, 902 aa, Homo sapiens
MAVYTYLRLIVDHHGTAQLQALRQKEVDFCISLLRERFMECLMIGRDLVRLLQNVARIPEFELLWKDIIHNPQALSPQFTGILQLLQSRTSRKFLACRLTPDMETKLLFMTSRVRFGQQKRYQDWFQRQYLSTPDSQSLRCDLIRYICGVVHPSNEVLSSDILPRWAIIGWLLTTCTSNVAASNAKLALFYDWLFFSPDKDSIMNIEPAILVMHHSMKPHPAITATLLDFMCRIIPNFYPPLEGHVRQGVFSSLNHIVEKRVLAHLAPLFDNPKLDKELRAMLREKFPEFCSSPSPPVEVKIEEPVSMEMDNHMSDKDESCYDNAEAAFSDDEEDLNSKGKKREFRFHPIKETVVEEPVDITPYLDQLDESLRDKVLQLQKGSDTEAQCEVMQEIVDQVLEEDFDSEQLSVLASCLQELFKAHFRGEVLPEEITEESLEESVGKPLYLIFRNLCQMQEDNSSFSLLLDLLSELYQKQPKIGYHLLYYLRASKAAAGKMNLYESFAQATQLGDLHTCLMMDMKACQEDDVRLLCHLTPSIYTEFPDETLRSGELLNMIVAVIDSAQLQELVCHVMMGNLVMFRKDSVLNILIQSLDWETFEQYCAWQLFLAHNIPLETIIPILQHLKYKEHPEALSCLLLQLRREKPSEEMVKMVLSRPCHPDDQFTTSILRHWCMKHDELLAEHIKSLLIKNNSLPRKRQSLRSSSSKLAQLTLEQILEHLDNLRLNLTNTKQNCMPSTLGVQCRRCCPGPDYAWSQAGGRGRTPGATTHTRDKTTCACCLISSQTSDCFSFPALPFLPLVFSQTPILQALQHVQASCDEAHKMKFSDLFSLAEEYEDSSTKPPKSRRKAALSSPRSRKNATQPPNAEEESGSSSASEEEDTKPKPTKRKRKGSSAVGSDSD

SEQ ID NO: 7207 - protein, 1042 aa, Homo sapiens
MELQKGKGAAAAAAASGAAGGGGGGAGAGAPGGGRLLLSTSLDAKDELEERLERCMSIVTSMTAGVSEREANDALNAYVCKGLPQHEEICLGLFTLILTEPAQAQKCYRDLALVSRDGMNIVLNKINQILMEKYLKLQDTCRTQLVWLVRELVKSGVLGADGVCMTFMKQIAGGDVTAKNIWLAESVLDILTEQREWVLKSSILIAMAVYTYLRLIVDHHGTAQLQALRQKEVDFCISLLRERFMECLMIGRDLVRLLQNVARIPEFELLWKDIIHNPQALSPQFTGILQLLQSRTSRKFLACRLTPDMETKLLFMTSRVRFGQQKRYQDWFQRQYLSTPDSQSLRCDLIRYICGVVHPSNEVLSSDILPRWAIIGWLLTTCTSNVAASNAKLALFYDWLFFSPDKDSIMNIEPAILVMHHSMKPHPAITATLLDFMCRIIPNFYPPLEGHVRQGVFSSLNHIVEKRVLAHLAPLFDNPKLDKELRAMLREKFPEFCSSPSPPVEVKIEEPVSMEMDNHMSDKDESCYDNAEAAFSDDEEDLNSKGKKREFRFHPIKETVVEEPVDITPYLDQLDESLRDKVLQLQKGSDTEAQCEVMQEIVDQVLEEDFDSEQLSVLASCLQELFKAHFRGEVLPEEITEESLEESVGKPLYLIFRNLCQMQEDNSSFSLLLDLLSELYQKQPKIGYHLLYYLRASKAAAGKMNLYESFAQATQLGDLHTCLMMDMKACQEDDVRLLCHLTPSIYTEFPDETLRSGELLNMIVAVIDSAQLQELVCHVMMGNLVMFRKDSVLNILIQSLDWETFEQYCAWQLFLAHNIPLETIIPILQHLKYKEHPEALSCLLLQLRREKPSEEMVKMVLSRPCHPDDQFTTSILRHWCMKHDELLAEHIKSLLIKNNSLPRKRQSLRSSSSKLAQLTLEQILEHLDNLRLNLTNTKQNFFSQTPILQALQHVQASCDEAHKMKFSDLFSLAEEYEDSSTKPPKSRRKAALSSPRSRKNATQPPNAEEESGSSSASEEEDTKPKPTKRKRKGSSAVGSDSD

SEQ ID NO: 7208 - protein, 1042 aa, Homo sapiens; identical to SEQ ID NO: 7207

SEQ ID NO: 7209 - protein, 41 aa, Homo sapiens
TQPPNAEEESGSSSASEEEDTKPKPTKRKRKGSSAVGSDSD

SEQ ID NO: 7210 - protein, 280 aa, Homo sapiens
VYTYLRLIVDHHGTAQLQALRQKEVDFCISLLRERFMECLMIGRDLVRLLQNVARIPEFELLWKDIIHNPQALSPQFTGILQLLQSRTSRKFLACRLTPDMETKLLFMTSRVRFGQQKRYQDWFQRQYLSTPDSQSLRCDLIRYICGVVHPSNEVLSSDILPRWAIIGWLLTTCTSNVAASNAKLALFYDWLFFSPDKDSIMNIEPAILVMHHSMKPHPAITATLLDFMCRIIPNFYPPLEGHVRQGVFSSLNHIVEKRVLACKKYWLYLRLLGICLLGS

SEQ ID NO: 7211 - protein, 49 aa, Homo sapiens
  VARIANT 1: note = misc_feature - Xaa can be any naturally occurring amino acid
XSQSLRCDLIRYICGVVHPSNEVLSSDILPRWAIIGWLLTTCTTPSSPV

SEQ ID NO: 7212 - protein, 64 aa, Homo sapiens
MDLNSASTVVLQVLTQATSQDTAVLKPAEEQLKQWETQPGFYSVLLNIFTNHTLDINVRWLAVL

SEQ ID NO: 7213 - protein, 149 aa, Homo sapiens
MDLNSASTVVLQVLTQATSQDTAVLKPAEEQLKQWETQPGFYSVLLNIFTNHTLDINVRWLAVLYFKHGIDRYWRRVAPHALSEEEKTTLRAGLITNFNEPINQIATQIAVLIAKVARLDCPRQWPELIPTLIESVKVQDDLRQHRALL

SEQ ID NO: 7214 - protein, 162 aa, Homo sapiens
MDLNSASTVVLQVLTQATSQDTAVLKPAEEQLKQWETQPGFYSVLLNIFTNHTLDINVRWLAVLYFKHGIDRYWRRVAPHALSEEEKTTLRAGLITNFNEPINQIATQIAVLIAKVARLDCPRQWPELIPTLIESVKVQDDLRQHRALLTFYHVTKTLASKR

SEQ ID NO: 7215 - protein, 975 aa, Homo sapiens
MDLNSASTVVLQVLTQATSQDTAVLKPAEEQLKQWETQPGFYSVLLNIFTNHTLDINVRWLAVLYFKHGIDRYWRRVAPHALSEEEKTTLRAGLITNFNEPINQIATQIAVLIAKVARLDCPRQWPELIPTLIESVKVQDDLRQHRALLTFYHVTKTLASKRLAADRKLFYDLASGIYNFACSLWNHHTDTFLQEVSSGNEAAILSSLERTLLSLKVLRKLTVNGFVEPHKNMEVMGFLHGIFERLKQFLECSRSIGTDNVCRDRLEKTIILFTKVLLDFLDQHPFSFTPLIQRSLEFSVSYVFTEVGEGVTFERFIVQCMNLIKMIVKNYAYKPSKNFEDSSPETLEAHKIKMAFFTYPTLTEICRRLVSHYFLLTEEELTMWEEDPEGFTVEETGGDSWKYSLRPCTEVLFIDIFHEYNQTLTPVLLEMMQTLQGPTNVEDMNALLIKDAVYNAVGLAAYELFDSVDFDQWFKNQLLPELQVIHNRYKPLRRRVIWLIGQWISVKFKSDLRPMLYEAICNLLQDQDLVVRIETATTLKLTVDDFEFRTDQFLPYLETMFTLLFQLLQQVTECDTKMHVLHVLSCVIERVNMQIRPYVGCLVQYLPLLWKQSEEHNMLRCAILTTLIHLVQGLGADSKNLYPFLLPVIQLSTDVSQPPHVYLLEDGLELWLVTLENSPCITPELLRIFQNMSPLLELSSENLRTCFKIINGYIFLSSTEFLQTYAVGLCQSFCELLKEITTEGQVQVLKVVENALKVNPILGPQMFQPILPYVFKGIIEGERYPVVMSTYLGVMGRVLLQNTSFFSSLLNEMAHKFNQEMDQLLGNMIEMWVDRMDNITQPERRKLSALALLSLLPSDNSVIQDKFCGIINISVEGLHDVMTEDPETGTYKDCMLMSHLEEPKVTEDEEPPTEQDKRKKMLALKDPVHTVSLQQFIYEKLKAQQEMLGEQGFQSLMETVDTEIVTQLQEFLQGF

SEQ ID NO: 7216 - protein, 863 aa, Homo sapiens
MDLNSASTVVLQVLTQATSQDTAVLKPAEEQLKQWETQPGFYSVLLNIFTNHTLDINVRWLAVLYFKHGIDRYWRRVAPHALSEEEKTTLRAGLITNFNEPINQIATQIAVLIAKVARLDCPRQWPELIPTLIESVKVQDDLRQHRALLTFYHVTKTLASKRLAADRKLFYDLASGIYNFACSLWNHHTDTFLQEVSSGNEAAILSSLERTLLSLKVLRKLTVNGFVEPHKNMEVMGFLHGIFERLKQFLECSRSIGTDNVCRDRLEKTIILFTKVLLDFLDQHPFSFTPLIQRSLEFSVSYVFTEVGEGVTFERFIVQCMNLIKMIVKNYAYKPSKNFEDSSPETLEAHKIKMAFFTYPTLTEICRRLVSHYFLLTEEELTMWEEDPEGFTVEETGGDSWKYSLRPCTEVLFIDIFHEYNQTLTPVLLEMMQTLQGPTNVEDMNALLIKDAVYNAVGLAAYELFDSVDFDQWFKNQLLPELQVIHNRYKPLRRRVIWLIGQWISVKFKSDLRPMLYEAICNLLQDQDLVVRIETATTLKLTVDDFEFRTDQFLPYLETMFTLLFQLLQQVTECDTKMHVLHVLSCVIERVNMQIRPYVGCLVQYLPLLWKQSEEHNMLRCAILTTLIHLVQGLGADSKNLYPFLLPVIQLSTDVSQPPHVYLLEDGLELWLVTLENSPCITPELLRIFQNMSPLLELSSENLRTCFKIINGYIFLSSTEFLQTYAVGLCQSFCELLKEITTEGQVQVLKVVENALKVNPILGPQMFQPILPYVFKGIIEGERYPVVMSTYLGVMGRVLLQNTSFFSSLLNEMAHKFNQEMDQLLGNMIEMWVDRMDNITQPERRKLSALALLSLLPSDNSQF

SEQ ID NO: 7217 - protein, 59 aa, Homo sapiens
MDQLLGNMIEMWVDRMDNITQPERRKLSALALLSLLPSDNSFLYPWQPLFYTLTVKEPM

SEQ ID NO: 7218 - protein, 94 aa, Homo sapiens
MTEDPETGTYKDCMLMSHLEEPKVTEDEEPPTEQDKRKKMLALKDPVHTVSLQQFIYEKLKAQQEMLGEQGFQSLMETVDTEIVTQLQEFLQGF

SEQ ID NO: 7219 - protein, 1015 aa, Homo sapiens
MVQPIIHLGYVVYSLLYLGYKPVQHVTALNTVSSCHKMVSMDLNSASTVVLQVLTQATSQDTAVLKPAEEQLKQWETQPGFYSVLLNIFTNHTLDINVRWLAVLYFKHGIDRYWRRVAPHALSEEEKTTLRAGLITNFNEPINQIATQIAVLIAKVARLDCPRQWPELIPTLIESVKVQDDLRQHRALLTFYHVTKTLASKRLAADRKLFYDLASGIYNFACSLWNHHTDTFLQEVSSGNEAAILSSLERTLLSLKVLRKLTVNGFVEPHKNMEVMGFLHGIFERLKQFLECSRSIGTDNVCRDRLEKTIILFTKVLLDFLDQHPFSFTPLIQRSLEFSVSYVFTEVGEGVTFERFIVQCMNLIKMIVKNYAYKPSKNFEDSSPETLEAHKIKMAFFTYPTLTEICRRLVSHYFLLTEEELTMWEEDPEGFTVEETGGDSWKYSLRPCTEVLFIDIFHEYNQTLTPVLLEMMQTLQGPTNVEDMNALLIKDAVYNAVGLAAYELFDSVDFDQWFKNQLLPELQVIHNRYKPLRRRVIWLIGQWISVKFKSDLRPMLYEAICNLLQDQDLVVRIETATTLKLTVDDFEFRTDQFLPYLETMFTLLFQLLQQVTECDTKMHVLHVLSCVIERVNMQIRPYVGCLVQYLPLLWKQSEEHNMLRCAILTTLIHLVQGLGADSKNLYPFLLPVIQLSTDVSQPPHVYLLEDGLELWLVTLENSPCITPELLRIFQNMSPLLELSSENLRTCFKIINGYIFLSSTEFLQTYAVGLCQSFCELLKEITTEGQVQVLKVVENALKVNPILGPQMFQPILPYVFKGIIEGERYPVVMSTYLGVMGRVLLQNTSFFSSLLNEMAHKFNQEMDQLLGNMIEMWVDRMDNITQPERRKLSALALLSLLPSDNSVIQDKFCGIINISVEGLHDVMTEDPETGTYKDCMLMSHLEEPKVTEDEEPPTEQDKRKKMLALKDPVHTVSLQQFIYEKLKAQQEMLGEQGFQSLMETVDTEIVTQLQEFLQGF

SEQ ID NO: 7220 - protein, 160 aa, Homo sapiens
  VARIANT 1: note = misc_feature - Xaa can be any naturally occurring amino acid
XLRCAILTTLIHLVQVVENALKVNPILGPQMFQPILPYVFKGIIEGERYPVVMSTYLGVMGRVLLQNTSFFSSLLNEMAHKFNQEMDQLLGNMIEMWVDRMDNITQPERRKLSALALLSLLPSDNSVIQDKFCGIINISVEGLHDVMTEDPETGTYKDWP

SEQ ID NO: 7221 - protein, 1041 aa, Homo sapiens
MAAAAAAGAASGLPGPVAQGLKEALVDTLTGILSPVQEVRAAAEEQIKVLEVTEEFGVHLAELTVDPQGALAIRQLASVILKQYVETHWCAQSEKFRPPETTERAKIVIRELLPNGLRESISKVRSSVAYAVSAIAHWDWPEAWPQLFNLLMEMLVSGDLNAVHGAMRVLTEFTREVTDTQMPLVAPVILPEMYKIFTMAEVYGIRTRSRAVEIFTTCAHMICNMEELEKGAAKVLIFPVVQQFTEAFVQALQIPDGPTSDSGFKMEVLKAVTALVKNFPKHMVSSMQQILPIVWNTLTESAAFYVRTEVNYTEEVEDPVDSDGEVLGFENLVFSIFEFVHALLENSKFKSTVKKALPELIYYIILYMQITEEQIKVWTANPQQFVEDEDDDTFSYTVRIAAQDLLLAVATDFQNESAAALAAAATRHLQEAEQTKNSGTEHWWKIHEACMLALGSVKAIITDSVKNGRIHFDMHGFLTNVILADLNLSVSPFLLGRALWAASRFTVAMSPELIQQFLQATVSGLHETQPPSVRISAVRAIWGYCDQLKVSESTHVLQPFLPSILDGLIHLAAQFSSEVLNLVMETLCIVCTVDPEFTASMESKICPFTIAIFLKYSNDPVVASLAQDIFKELSQIEACQGPMQMRLIPTLVSIMQAPADKIPAGLCATAIDILTTVVRNTKPPLSQLLICQAFPAVAQCTLHTDDNATMQNGGECLRAYVSVTLEQVAQWHDEQGHNGLWYVMQVVSQLLDPRTSEFTAAFVGRLVSTLISKAGRELGENLDQILRAILSKMQQAETLSVMQSLIMVFAHLVHTQLEPLLEFLCSLPGPTGKPALEFVMAEWTSRQHLFYGQYEGKVSSVALCKLLQHGINADDKRLQDIRVKGEEIYSMDEGIRTRSKSAKNPERWTNIPLLVKILKLIINELSNVMEANAARQATPAEWSQDDSNDMWEDQEEEEEEEEDGLAGQLLSDILATSKYEEDYYEDDEEDDPDALKDPLYQIDLQAYLTDFLCQFAQQPCYIMFSGHLNDNERRVLQTIGI

SEQ ID NO: 7222 - protein, 155 aa, Homo sapiens
SNVMEANAARQATPAEWSQDDSNDMWEDQEEEEEEEEDGLAGQLLSDILATSKYEEDYYEDDEEDDPDALKDPLYQIDLQATLMTMRGEFYRPSASKKGSLSTFAPSGPAANHFAALTGLEMHFLLNLKWHLDPWPLASAVTLMTIQTRLTGAVT

SEQ ID NO: 7223 - protein, 127 aa, Homo sapiens
MDTQNLEKTAIKIQSWWRGNMVRRTLLQAALRAWVIQCWWRSMQAKMLEQRRRLALRLYTCQEWAVVKVQAQVRMWQARRRFLQARQAACIIQSHWRWHASQTRGLIRGHYEVRASRLELDIEILMT

SEQ ID NO: 7224 - protein, 107 aa, Homo sapiens
MVRRTLLQAALRAWVIQCWWRSMQAKMLEQRRRLALRLYTCQEWAVVKVQAQVRMWQARRRFLQARQAACIIQSHWRWHASQTRGLIRGHYEVRASRLELDIEILMT

SEQ ID NO: 7225 - protein, 596 aa, Homo sapiens
MAGNCGARGALSAHTLLFDLPPALLGELCAVLDSCDGALGWRGLAERLSSSWLDVRHIEKYVDQGKSGTRELLWSWAQKNKTIGDLLQVLQEMGHRRAIHLITNYGAVLSPSEKSYQEGGFPNILFKETANVTVDNVLIPEHNEKGILLKSSISFQNIIEGTRNFHKDFLIGEGEIFEVYRVEIQNLTYAVKLFKQEKKMQCKKHWKRFLSELEVLLLFHHPNILELAAYFTETEKFCLIYPYMRNGTLFDRLQCVGDTAPLPWHIRIGILIGISKAIHYLHNVQPCSVICGSISSANILLDDQFQPKLTDFAMAHFRSHLEHQSCTINMTSSSSKHLWYMPEEYIRQGKLSIKTDVYSFGIVIMEVLTGCRVVLDDPKHIQLRDLLRELMEKRGLDSCLSFLDKKVPPCPRNFSAKLFCLAGRCAATRAKLRPSMDEVLNTLESTQASLYFAEDPPTSLKSFRCPSPLFLENVPSIPVEDDESQNNNLLPSDEGLRIDRMTQKTPFECSQSEVMFLSLDKKPESKRNEEACNMPSSSCEESWFPKYIVPSQDLRPYKVNIDPSSEAPGHSCRSRPVESSCSSKFSWDEYEQYKKE

SEQ ID NO: 7226 - protein, 535 aa, Homo sapiens
MAGNCGARGALSAHTLLFDLPPALLGELCAVLDSCDGALGWRGLGAVLSPSEKSYQEGGFPNILFKETANVTVDNVLIPEHNEKGILLKSSISFQNIIEGTRNFHKDFLIGEGEIFEVYRVEIQNLTYAVKLFKQEKKMQCKKHWKRFLSELEVLLLFHHPNILELAAYFTETEKFCLIYPYMRNGTLFDRLQCVGDTAPLPWHIRIGILIGISKAIHYLHNVQPCSVICGSISSANILLDDQFQPKLTDFAMAHFRSHLEHQSCTINMTSSSSKHLWYMPEEYIRQGKLSIKTDVYSFGIVIMEVLTGCRVVLDDPKHIQLRDLLRELMEKRGLDSCLSFLDKKVPPCPRNFSAKLFCLAGRCAATRAKLRPSMDEVLNTLESTQASLYFAEDPPTSLKSFRCPSPLFLENVPSIPVEDDESQNNNLLPSDEGLRIDRMTQKTPFECSQSEVMFLSLDKKPESKRNEEACNMPSSSCEESWFPKYIVPSQDLRPYKVNIDPSSEAPGHSCRSRPVESSCSSKFSWDEYEQYKKE

SEQ ID NO: 7227 - protein, 93 aa, Homo sapiens
MAGNCGARGALSAHTLLFDLPPALLGELCAVLDSCDGALGWRGLVSKNKLCENGVLILQGFWHVVVCKYKDSKYGCVALFEKTPSETYLHMET

SEQ ID NO: 7228 - protein, 1257 aa, Homo sapiens
MASCSFTRDQATRRLRGAAAAAAAALAAVVTTPLLSSGTPTALIGTGSSCPGAMWLSTATGSRSDSESEEEDLPVGEEVCKRGYLRKQKHGHRRYFVLKLETADAPARLEYYENARKFRHSVRAAAAAAAAAASGAAIPPLIPPRRVITLYQCFSVSQRADARYRHLIALFTQDEYFAMVAENESEQESWYLLLSRLILESKRRRCGTLGAQPDGEPAALAAAAAAEPPFYKDVWQVIVKPRGLGHRKELSGVFRLCLTDEEVVFVRLNTEVASVVVQLLSIRRCGHSEQYFFLEVGRSTVIGPGELWMQVDDCVVAQNMHELFLEKMRALCADEYRARCRSYSISIGAHLLTLLSARRHLGLVPLEPGGWLRRSRFEQFCHLRAIGDGEDEMLFTRRFVTPSEPVAHSRRGRLHLPRGRRSRRAVSVPASFFRRLAPSPARPRHPAEAPNNGARLSSEVSGSGSGNFGEEGNPQGKEDQEGSGGDYMPMNNWGSGNGRGSGGGQGSNGQGSSSHSSGGNQCSGEGQGSRGGQGSNGQGSGGNQCSRDGQGTAGGHGSGGGQRPGGGHGSGGGQGPGDGHGSGGGKNSGGGKGSGSGKGSDGDGERGKSLKKRSYFGKLTQSKQQQMPPPPPPPPPPPPAGGTGGKGKSGGRFRLYFCVDRGATKECKEAKEVKDAEIPEGAARGPHRARAFDEDEDDPYVPMRPGVATPLVSSSDYMPMAPQNVSASKKRHSRSPFEDSRGYMMMFPRVSPPPAPSPPKAPDTNKEDDSKDNDSESDYMFMAPGAGAIPKNPRNPQGGSSSKSWSSYFSLPNPFRSSPLGQNDNSEYVPMLPGKFLGRGLDKEVSYNWDPKDAASKPSGEGSFSKPGDGGSPSKPSDHEPPKNKAKRPNRLSFITKGYKIKPKPQKPTHEQREADSSSDYVNMDFTKRESNTPAPSTQGLPDSWGIIAEPRQSAFSNYVNVEFGVPFPNPANDLSDLLRAIPRANPLSLDSARWPLPPLPLSATGSNAIEEEGDYIEVIFNSAMTPAMALADSAIRYDAETGRIYVVDPFSECCMDISLSPSRCSEPPPVARLLQEEEQERRRPQSRSQSFFAAARAAVSAFPTDSLERDLSPSSAPAVASAAEPTLALSQVVAAASALAAAPGIGAAAAAAGFDSASARWFQPVANAADAEAVRGAQDVAGGSNPGAHNPSANLARGDNQAGGAAAAAAAPEPPPRSRRVPRPPEREDSDNDDDTHVRMDFARRDNQFDSPKRGR

SEQ ID NO: 7229 - protein, 147 aa, Homo sapiens
MQELHLLWWALLLGLAQACPEPCDCGEKYGFQIADCAYRDLESVPPGFPANVTTLSLSANRLPGLPEGAFREVPLLQSLWLAHNEIRTVAAGALASLSHLKSLDLSHNLISDFAWSDLHNLSALQLLKMDSNELTFIPRDAFRSLRA

SEQ ID NO: 7230 - protein, 183 aa, Homo sapiens
MQELHLLWWALLLGLAQACPEPCDCGEKYGFQIADCAYRDLESVPPGFPANVTTLSLSANRLPGLPEGAFREVPLLQSLWLAHNEIRTVAAGALASLSHLKSLDLSHNLISDFAWSDLHNLSALQLLKMDSNELTFIPRDAFRSLRALRSLQLNHNRLHTLAEGTFTPLTALSHLQINENPFD

SEQ ID NO: 7231 - protein, 428 aa, Homo sapiens
MQELHLLWWALLLGLAQACPEPCDCGEKYGFQIADCAYRDLESVPPGFPANVTTLSLSANRLPGLPEGAFREVPLLQSLWLAHNEIRTVAAGALASLSHLKSLDLSHNLISDFAWSDLHNLSALQLLKMDSNELTFIPRDAFRSLRALRSLQLNHNRLHTLAEGTFTPLTALSHLQINENPFDCTCGIVWLKTWALTTAVSIPEQDNIACTSPHVLKGTPLSRLPPLPCSAPSVQLSYQPSQDGAELRPGFVLALHCDVDGQPAPQLHWHIQIPSGIVEITSPNVGTDGRALPGTPVASSQPRFQAFANGSLLIPDFGKLEEGTYSCLATNELGSAESSVDVALATPGEGGEDTLGRRFHGKAVEGKGCYTVDNEVQPSGPEDNVVIIYLSRAGNPEAAVAEGVPGQLPPGLLLLGQSLLLFFFLTSF

SEQ ID NO: 7232 - protein, 428 aa, Homo sapiens; identical to SEQ ID NO: 7231

SEQ ID NO: 7233 - protein, 5 aa, Homo sapiens
MFPLR

SEQ ID NO: 7234 - protein, 89 aa, Homo sapiens
MFPLRALWLVWALLGVAGSCPEPCACVDKYAHQFADCAYKELREVPEGLPANVTTLSLSANKITVLRRGAFADVTQVTSLWLAHNEVRT

SEQ ID NO: 7235 - protein, 114 aa, Homo sapiens
MFPLRALWLVWALLGVAGSCPEPCACVDKYAHQFADCAYKELREVPEGLPANVTTLSLSANKITVLRRGAFADVTQVTSLWLAHNEVRTVEPGALAVLSQLKNLDLSHNFISSF

SEQ ID NO: 7236 - protein, 138 aa, Homo sapiens
MFPLRALWLVWALLGVAGSCPEPCACVDKYAHQFADCAYKELREVPEGLPANVTTLSLSANKITVLRRGAFADVTQVTSLWLAHNEVRTVEPGALAVLSQLKNLDLSHNFISSFPWSDLRNLSALQLLKMNHNRLGSL

SEQ ID NO: 7237 - protein, 334 aa, Homo sapiens
MFPLRALWLVWALLGVAGSCPEPCACVDKYAHQFADCAYKELREVPEGLPANVTTLSLSANKITVLRRGAFADVTQVTSLWLAHNEVRTVEPGALAVLSQLKNLDLSHNFISSFPWSDLRNLSALQLLKMNHNRLGSLPRDALGALPDLRSLRINNNRLAGEACHVQVVFSTKKELPSLLVIVAVSVFLLVLATVPLLGAACCHLLAKHPGKPYRLILRPQAPDPMEKRIAADFDPRASYLESEKSYPAGGEAGGEEPEDVQGEGLDEDAEQGDPSGDLQREESLAACSLVESQSKANQEEFEAGSEYSDRLPLGAEAVNIAQEINGNYRQTAG

SEQ ID NO: 7238 - protein, 745 aa, Homo sapiens
MFPLRALWLVWALLGVAGSCPEPCACVDKYAHQFADCAYKELREVPEGLPANVTTLSLSANKITVLRRGAFADVTQVTSLWLAHNEVRTVEPGALAVLSQLKNLDLSHNFISSFPWSDLRNLSALQLLKMNHNRLGSLPRDALGALPDLRSLRINNNRLRTLAPGTFDALSALSHLQLYHNPFHCGCGLVWLQAWAASTRVSLPEPDSIACASPPALQGVPVYRLPALPCAPPSVHLSAEPPLEAPGTPLRAGLAFVLHCIADGHPTPRLQWQLQIPGGTVVLEPPVLSGEDDGVGAEEGEGEGDGDLLTQTQAQTPTPAPAWPAPPATPRFLALANGSLLVPLLSAKEAGVYTCRAHNELGANSTSIRVAVAATGPPKHAPGAGGEPDGQAPTSERKSTAKGRGNSVLPSKPEGKIKGQGLAKVSILGETETEPEEDTSEGEEAEDQILADPAEEQRCGNGDPSRYVSNHAFNQSAELKPHVFELGVIALDVAEREARVQLTPLAARWGPGPGGAGGAPRPGRRPLRLLYLCPAGGGAAVQWSRVEEGVNAYWFRGLRPGTNYSVCLALAGEACHVQVVFSTKKELPSLLVIVAVSVFLLVLATVPLLGAACCHLLAKHPGKPYRLILRPQAPDPMEKRIAADFDPRASYLESEKSYPAGGEAGGEEPEDVQGEGLDEDAEQGDPSGDLQREESLAACSLVESQSKANQEEFEAGSEYSDRLPLGAEAVNIAQEINGNYRQTAG

SEQ ID NO: 7239 - protein, 745 aa, Homo sapiens; identical to SEQ ID NO: 7238

SEQ ID NO: 7240 - protein, 745 aa, Homo sapiens; identical to SEQ ID NO: 7238

SEQ ID NO: 7241 - protein, 745 aa, Homo sapiens; identical to SEQ ID NO: 7238

SEQ ID NO: 7242 - protein, 745 aa, Homo sapiens; identical to SEQ ID NO: 7238

SEQ ID NO: 7243 - protein, 464 aa, Homo sapiens
MVRLAAELLLLLGLLLLTLHITVLRGSGAADGPDAAAGNASQAQLQNNLNVGSDTTSETSFSLSKEAPREHLDHQAAHQPFPRPRFRQETGHPSLQRDFPRSFLLDLPNFPDLSKADINGQNPNIQVTIEVVDGPDSEADKDQHPENKPSWSVPSPDWRAWWQRSLSLARANSGDQDYKYDSTSDDSNFLNPPRGWDHTAPGHRTFETKDQPEYDSTDGEGDWSLWSVCSVTCGNGNQKRTRSCGYACTATESRTCDRPNCPGIEDTFRTAATEVSLLAGSEEFNATKLFEVDTDSCERWMSCKSEFLKKYMHKVMNDLPSCPCSYPTEVAYSTADIFDRIKRKDFRWKDASGPKEKLEIYKPTARYCIRSMLSLESTTLAAQHCCYGDNMQLITRGKGAGTPNLISTEFSAELHYKVDVLPWIICKGDWSRYNEARPPNNGQKCTESPSDEDYIKQFQEAREY

SEQ ID NO: 7244 - protein, 76 aa, Homo sapiens
MRALRDRAGLLLCVLLLAALLEAALGLPVKKPRLRGPRPGSLTRLAEPPFQVRASSERSPAGARNLALCGVAGQGR

SEQ ID NO: 7245 - protein, 292 aa, Homo sapiens
MRALRDRAGLLLCVLLLAALLEAALGLPVKKPRLRGPRPGSLTRLAEVSASPDPRPLKEEEEAPLLPRTHLQAEPHQHGCWTVTEPAAMTPGNATPPRTPEVTPLRLELQKLPGLANTTLSTPNPDTQASASPDPRPLREEEEARLLPRTHLQAELHQHGCWTVTEPAALTPGNATPPRTQEVTPLLLELQKLPELVHATLSTPNPDNQTMSLRRSGVPGLPAVGTAALASSRGLGPVAMAALPPRPVPVTCPPVLALRTRTPWASPVRSGSSWPAMLRTCMIKMWTAVRSG

SEQ ID NO: 7246 - protein, 571 aa, Homo sapiens
MRALRDRAGLLLCVLLLAALLEAALGLPVKKPRLRGPRPGSLTRLAEVSASPDPRPLKEEEEAPLLPRTHLQAEPHQHGCWTVTEPAAMTPGNATPPRTPEVTPLRLELQKLPGLANTTLSTPNPDTQASASPDPRPLREEEEARLLPRTHLQAELHQHGCWTVTEPAALTPGNATPPRTQEVTPLLLELQKLPELVHATLSTPNPDNQVTIKVVEDPQAEVSIDLLAEPSNPPPQDTLSWLPALWSFLWGDYKGEEKDRAPGEKGEEKEEDEDYPSEDIEGEDQEDKEEDEEEQALWFNGTTDNWDQGWLAPGDWVFKDSVSYDYEPQKEWSPWSPCSGNCSTGKQQRTRPCGYGCTATETRTCDLPSCPGTEDKDTLGLPSEEWKLLARNATDMHDQDVDSCEKWLNCKSDFLIKYLSQMLRDLPSCPCAYPLEAMDSPVSLQDEHQGRSFRWRDASGPRERLDIYQPTARFCLRSMLSGESSTLAAQHCCYDEDSRLLTRGKGAGMPNLISTDFSPKLHFKFDTTPWILCKGDWSRLHAVLPPNNGRACTDNPLEEEYLAQLQEAKEY

SEQ ID NO: 7247 - protein, 185 aa, Homo sapiens
MRALRDRAGLLLCVLLLAALLEAALGLPVKKPRLRGPRPGSLTRLAEVSASPDPRPLKEEEEAPLLPRTHLQAEPHQHGCWTVTEPAAMTPGNATPPRTPEVTPLRLELQKLPGLANTTLSTPNPDTQVTIKVVEDPQAEVSIDLLAEPSNPPPQDTLSWLPALWSFLWGDYKGEEKDRAPGEKG

SEQ ID NO: 7248 - protein, 104 aa, Homo sapiens
  VARIANT 1: note = misc_feature - Xaa can be any naturally occurring amino acid
XCVLLLAALLEAALGLPVKKPRLRGPRPGSLTRLAEVSGGGTGLRSALSVPPPQPAGSSRAGSGTGTHTGSDPPMERGAGAGRKLPDTGRCPGAPDFGASTPRA

SEQ ID NO: 7249 - protein, 73 aa, Homo sapiens
  VARIANT 1: note = misc_feature - Xaa can be any naturally occurring amino acid
XRLAEVSGGGTGLRSALSVPPPQPAGSSRAGSGTGTHTGSDPPMERGAGAGRKLPDTGRCPGAPDFGASTPRA

SEQ ID NO: 7250 - protein, 614 aa, Homo sapiens
MAWEARREPGPRRAAVRETVMLLLCLGVPTGRPYNVDTESALLYQGPHNTLFGYSVVLHSHGANRWLLVGAPTANWLANASVINPGAIYRCRIGKNPGQTCEQLQLGSPNGEPCGKTCLEERDNQWLGVTLSRQPGENGSIVTCGHRWKNIFYIKNENKLPTGGCYGVPPDLRTELSKRIAPCYQDYVKKFGENFASCQAGISSFYTKDLIVMGAPGSSYWTGSLFVYNITTNKYKAFLDKQNQVKFGSYLGYSVGAGHFRSQHTTEVVGGAPQHEQIGKAYIFSIDEKELNILHEMKGKKLGSYFGASVCAVDLNADGFSDLLVGAPMQSTIREEGRVFVYINSGSGAVMNAMETNLVGSDKYAARFGESIVNLGDIDNDGFEDVAIGAPQEDDLQGAIYIYNGRADGISSTFSQRIEGLQISKSLSMFGQSISGQIDADNNGYVDVAVGAFRSDSAVLLRTRPVVIVDASLSHPESVNRTKFDCVENGWPSVCIDLTLCFSYKGKEVPGYIVLFYNMSLDVNRKAESPPRFYFSSNGTSDVITGSIQVSSREANCRTHQAFMRKDVRDILTPIQIEAAYHLGPHVISKRSTEEFPPLQPILQQKKEKDIMKK

SEQ ID NO: 7251 - protein, 1032 aa, Homo sapiens [sequence omitted]

SEQ ID NO: 7252 - protein, 195 aa, Homo sapiens
MAWEARREPGPRRAAVRETVMLLLCLGVPTGRPYNVDTESALLYQGPHNTLFGYSVVLHSHGANRWLLVGAPTANWLANASVINPGAIYRCRIGKNPGQTCEQLQLGSPNGEPCGKTCLEERDNQWLGVTLSRQPGENGSIVTCGHRWKNIFYIKNENKLPTGGCYGVPPDLRTELSKRIAPCYQGSISKYRART

SEQ ID NO: 7253 - protein, 1035 aa, Homo sapiens
MGGPAAPRGAGRLRALLLALVVAGIPAGAYNLDPQRPVHFQGPADSFFGYAVLEHFHDNTRWVLVGAPKADSKYSPSVKSPGAVFKCRVHTNPDRRCTELDMARGKNRGTSCGKTCREDRDDEWMGVSLARQPKADGRVLACAHRWKNIYYEADHILPHGFCYIIPSNLQAKGRTLIPCYEEYKKKYGEEHGSCQAGIAGFFTEELVVMGAPGSFYWAGTIKVLNLTDNTYLKLNDEVIMNRRYTYLGYAVTAGHFSHPSTIDVVGGAPQDKGIGKVYIFRADRRSGTLIKIFQASGKKMGSYFGSSLCAVDLNGDGLSDLLVGAPMFSEIRDEGQVTVYINRGNGALEEQLALTGDGAYNAHFGESIASLDDLDNDGFPDVAIGAPKEDDFAGAVYIYHGDAGGIVPQYSMKLSGQKINPVLRMFGQSISGGIDMDGNGYPDVTVGAFMSDSVVLLRARPVITVDVSIFLPGSINITAPQCHDGQQPVNCLNVTTCFSFHGKHVPGEIGLNYVLMADVAKKEKGQMPRVYFVLLGETMGQVTEKLQLTYMEETCRHYVAHVKRRVQDVISPIVFEAAYSLSEHVTGEEERELPPLTPVLRWKKGQKIAQKNQTVFERNCRSEDCAADLQLQGKLLLSSMDEKTLYLALGAVKNISLNISISNLGDDAYDANVSFNVSRELFFINMWQKEEMGISCELLESDFLKCSVGFPFMRSKSKYEFSVIFDTSHLSGEEEVLSFIVTAQSGNTERSESLHDNTLVLMVPLMHEVDTSITGIMSPTSFVYGESVDAANFIQLDDLECHFQPINITLQVYNTGPSTLPGSSVSISFPNRLSSGGAEMFHVQEMVVGQEKGNCSFQKNPTPCIIPQEQENIFHTIFAFFTKSGRKVLDCEKPGISCLTAHCNFSALAKEESRTIDIYMLLNTEILKKDSSSVIQFMSRAKVKVDPALRVVEIAHGNPEEVTVVFEALHNLEPRGYVVGWIIAISLLVGILIFLLLAVLLWKMGFFRRRYKEIIEAEKNRKENEDSWDWVQKNQ

SEQ ID NO: 7254 - protein, 632 aa, Homo sapiens
MGGPAAPRGAGRLRALLLALVVAGIPAGAYNLDPQRPVHFQGPADSFFGYAVLEHFHDNTRWVLVGAPKADSKYSPSVKSPGAVFKCRVHTNPDRRCTELDMARGKNRGTSCGKTCREDRDDEWMGVSLARQPKADGRVLACAHRWKNIYYEADHILPHGFCYIIPSNLQAKGRTLIPCYEEYKKKYGEEHGSCQAGIAGFFTEELVVMGAPGSFYWAGTIKVLNLTDNTYLKLNDEVIMNRRYTYLGYAVTAGHFSHPSTIDVVGGAPQDKGIGKVYIFRADRRSGTLIKIFQASGKKMGSYFGSSLCAVDLNGDGLSDLLVGAPMFSEIRDEGQVTVYINRGNGALEEQLALTGDGAYNAHFGESIASLDDLDNDGFPDVAIGAPKEDDFAGAVYIYHGDAGGIVPQYSMKLSGQKINPVLRMFGQSISGGIDMDGNGYPDVTVGAFMSDSVVLLRARPVITVDVSIFLPGSINITAPQCHDGQQPVNCLNVTTCFSFHGKHVPGEIGLNYVLMADVAKKEKGQMPRVYFVLLGETMGQVTEKLQLTYMEETCRHYVAHVKRRVQDVISPIVFEAAYSLSEHVTGEEERELPPLTPVLRWKKGQKIAQKNQVRTLKLILSTQGGSCTEQK

SEQ ID NO: 7255 - protein, 69 aa, Homo sapiens
  VARIANT 1: note = misc_feature - Xaa can be any naturally occurring amino acid
XKKDSSSVIQFMSRAKVKVDPALRVVEIAHGNPEEVTMGFFRRRYKEIIEAEKNRKENEDSWDWVQKNQ

SEQ ID NO: 7256 - protein, 404 aa, Homo sapiens
MKDSCITVMAMALLSGFFFFAPASSYNLDVRGARSFSPPRAGRHFGYRVLQIKSLIPQFQGRLVANLTYTLQLDGHRTRRRGLFPGGRHELRRNIAVTTSMSCTDFSFHFPMMFNTLVNSSWGDSVELHANVTCNNEDSDLLEDNSATTIIPILYPINILIQDQEDSTLYVSFTPKGPKIHQVKHMYQVRIQPSIHDHNIPTLEAVVGVPQPPSEGPITHQWSVQMEPPVPCHYEDLERLPDAAEPCLPGALFRCPVVFRQEILVQVIGTLELVGEIEASSMFSLCSSLSISFNSSKHFHLYGSNASLAQVVMKVDVVYEKQMLYLYVLSGIGGLLLLLLIFIVLYKVGFFKRNLKEKMEAGRGVPNGIPAEDSEQLASGQEAGDPGCLKPLHEKDSESGGGKD

SEQ ID NO: 7257 - protein, 109 aa, Homo sapiens
MKDSCITVMAMALLSGFFFFAPASSYNLDVRGARSFSPPRAGRHFGYRVLQLDGHRTRRRGLFPGGRHELRRNIAVTTSMSCTDFSFHFPIQSPASNCFCQPLCGAEPE

SEQ ID NO: 7258 - protein, 55 aa, Homo sapiens
MKDSCITVMAMALLSGFFFFAPASSYNLDVRGARSFSPPRAGRHFGYRVLQVGNG

SEQ ID NO: 7259 - protein, 1170 aa, Homo sapiens
MKDSCITVMAMALLSGFFFFAPASSYNLDVRGARSFSPPRAGRHFGYRVLQVGNGVIVGAPGEGNSTGSLYQCQSGTGHCLPVTLRGSNYTSKYLGMTLATDPTDGSILACDPGLSRTCDQNTYLSGLCYLFRQNLQGPMLQGRPGFQECIKGNVDLVFLFDGSMSLQPDEFQKILDFMKDVMKKLSNTSYQFAAVQFSTSYKTEFDFSDYVKRKDPDALLKHVKHMLLLTNTFGAINYVATEVFREELGARPDATKVLIIITDGEATDSGNIDAAKDIIRYIIGIGKHFQTKESQETLHKFASKPASEFVKILDTFEKLKDLFTELQKKIYVIEGTSKQDLTSFNMELSSSGISADLSRGHAVVGAVGAKDWAGGFLDLKADLQDDTFIGNEPLTPEVRAGYLGYTVTWLPSRQKTSLLASGAPRYQHMGRVLLFQEPQGGGHWSQVQTIHGTQIGSYFGGELCGVDVDQDGETELLLIGAPLFYGEQRGGRVFIYQRRQLGFEEVSELQGDPGYPLGRFGEAITALTDINGDGLVDVAVGAPLEEQGAVYIFNGRHGGLSPQPSQRIEGTQVLSGIQWFGRSIHGVKDLEGDGLADVAVGAESQMIVLSSRPVVDMVTLMSFSPAEIPVHEVECSYSTSNKMKEGVNITICFQIKSLIPQFQGRLVANLTYTLQLDGHRTRRRGLFPGGRHELRRNIAVTTSMSCTDFSFHFPVCVQDLISPINVSLNFSLWEEEGTPRDQRAQGKDIPPILRPSLHSETWEIPFEKNCGEDKKCEANLRVSFSPARSRALRLTAFASLSVELSLSNLEEDAYWVQLDLHFPPGLSFRKVEMLKPHSQIPVSCEELPEESRLLSRALSCNVSSPIFKAGHSVALQMMFNTLVNSSWGDSVELHANVTCNNEDSDLLEDNSATTIIPILYPINILIQDQEDSTLYVSFTPKGPKIHQVKHMYQVRIQPSIHDHNIPTLEAVVGVPQPPSEGPITHQWSVQMEPPVPCHYEDLERLPDAAEPCLPGALFRCPVVFRQEILVQVIGTLELVGEIEASSMFSLCSSLSISFNSSKHFHLYGSNASLAQVVMKVDVVYEKQMLYLYVLSGIGGLLLLLLIFIVLYKVGFFKRNLKEKMEAGRGVPNGIPAEDSEQLASGQEAGDPGCLKPLHEKDSESGGGKD

SEQ ID NO: 7260 - protein, 162 aa, Homo sapiens
MKDSCITVMAMALLSGFFFFAPASSYNLDVRGARSFSPPRAGRHFGYRVLQVGNGVIVGAPGEGNSTGSLYQCQSGTGHCLPVTLRGSNYTSKYLGMTLATDPTDGSILACDPGLSRTCDQNTYLSGLCYLFRQNLQGPMLQGRPGFQVCCCSVFHKLQNRI

SEQ ID NO: 7261 - protein, 1086 aa, Homo sapiens
MKDSCITVMAMALLSGFFFFAPASSYNLDVRGARSFSPPRAGRHFGYRVLQVGNGVIVGAPGEGNSTGSLYQCQSGTGHCLPVTLRGSNYTSKYLGMTLATDPTDGSILFAAVQFSTSYKTEFDFSDYVKRKDPDALLKHVKHMLLLTNTFGAINYVATEVFREELGARPDATKVLIIITDGEATDSGNIDAAKDIIRYIIGIGKHFQTKESQETLHKFASKPASEFVKILDTFEKLKDLFTELQKKIYVIEGTSKQDLTSFNMELSSSGISADLSRGHAVVGAVGAKDWAGGFLDLKADLQDDTFIGNEPLTPEVRAGYLGYTVTWLPSRQKTSLLASGAPRYQHMGRVLLFQEPQGGGHWSQVQTIHGTQIGSYFGGELCGVDVDQDGETELLLIGAPLFYGEQRGGRVFIYQRRQLGFEEVSELQGDPGYPLGRFGEAITALTDINGDGLVDVAVGAPLEEQGAVYIFNGRHGGLSPQPSQRIEGTQVLSGIQWFGRSIHGVKDLEGDGLADVAVGAESQMIVLSSRPVVDMVTLMSFSPAEIPVHEVECSYSTSNKMKEGVNITICFQIKSLIPQFQGRLVANLTYTLQLDGHRTRRRGLFPGGRHELRRNIAVTTSMSCTDFSFHFPVCVQDLISPINVSLNFSLWEEEGTPRDQRAGKDIPPILRPSLHSETWEIPFEKNCGEDKKCEANLRVSFSPARSRALRLTAFASLSVELSLSNLEEDAYWVQLDLHFPPGLSFRKVEMLKPHSQIPVSCEELPEESRLLSRALSCNVSSPIFKAGHSVALQMMFNTLVNSSWGDSVELHANVTCNNEDSDLLEDNSATTIIPILYPINILIQDQEDSTLYVSFTPKGPKIHQVKHMYQVRIQPSIHDHNIPTLEAVVGVPQPPSEGPITHQWSVQMEPPVPCHYEDLERLPDAAEPCLPGALFRCPVVFRQEILVQVIGTLELVGEIEASSMFSLCSSLSISFNSSKHFHLYGSNASLAQVVMKVDVVYEKQMLYLYVLSGIGGLLLLLLIFIVLYKVGFFKRNLKEKMEAGRGVPNGIPAEDSEQLASGQEAGDPGCLKPLHEKDSESGGGKD

SEQ ID NO: 7262 - protein, 204 aa, Homo sapiens
MKDSCITVMAMALLSGFFFFAPASSYNLDVRGARSFSPPRAGRHFGYRVLQVGNGVIVGAPGEGNSTGSLYQCQSGTGHCLPVTLRGSNYTSKYLGMTLATDPTDGSILFAAVQFSTSYKTEFDFSDYVKRKDPDALLKHVKHMLLLTNTFGAINYVATEVFREELGARPDATKVLIIITDGEATDSGNIDAAKDIIRYIIGVG

SEQ ID NO: 7263 - protein, 90 aa, Homo sapiens
MKDSCITVMAMALLSGFFFFERPNGKLYPQALGRAFRALGGPGVAPSIFPEVNALEGKRRVRVAWGATSGWAWDRPPAGHVQGRGSLGRS

SEQ ID NO: 7264 - protein, 41 aa, Homo sapiens
MTLATDPTDGSILACDPGLSRTCDQNTYLSGLCYLFRQNLQ

SEQ ID NO: 7265 - protein, 38 aa, Homo sapiens
  VARIANT 1: note = misc_feature - Xaa can be any naturally occurring amino acid
XKEGVNITICFQIKSLIPQFQAGWPPDQKTGVVPRRET

SEQ ID NO: 7266 - protein, 1163 aa, Homo sapiens
MTRTRAALLLFTALATSLGFNLDTEELTAFRVDSAGFGDSVVQYANSWVVVGAPQKITAANQTGGLYQCGYSTGACEPIGLQVPPEAVNMSLGLSLASTTSPSQLLACGPTVHHECGRNMYLTGLCFLLGPTQLTQRLPVSRQECPRQEQDIVFLIDGSGSISSRNFATMMNFVRAVISQFQRPSTQFSLMQFSNKFQTHFTFEEFRRSSNPLSLLASVHQLQGFTYTATAIQNVVHRLFHASYGARRDAAKILIVITDGKKEGDSLDYKDVIPMADAAGIIRYAIGVGLAFQNRNSWKELNDIASKPSQEHIFKVEDFDALKDIQNQLKEKIFAIEGTETTSSSSFELEMAQEGFSAVFTPDGPVLGAVGSFTWSGGAFLYPPNMSPTFINMSQENVDMRDSYLGYSTELALWKGVQSLVLGAPRYQHTGKAVIFTQVSRQWRMKAEVTGTQIGSYFGASLCSVDVDSDGSTDLVLIGAPHYYEQTRGGQVSVCPLPRGWRRWWCDAVLYGEQGHPWGRFGAALTVLGDVNGDKLTDVVIGAPGEEENRGAVYLFHGVLGPSISPSHSQRIAGSQLSSRLQYFGQALSGGQDLTQDGLVDLAVGARGQVLLLRTRPVLWVGVSMQFIPAEIPRSAFECREQVVSEQTLVQSNICLYIDKRSKNLLGSRDLQSSVTLDLALDPGRLSPRATFQETKNRSLSRVRVLGLKAHCENFNLLLPSCVEDSVTPITLRLNFTLVGKPLLAFRNLRPMLAADAQRYFTASLPFEKNCGADHICQDNLGISFSFPGLKSLLVGSNLELNAEVMVWNDGEDSYGTTITFSHPAGLSYRYVAEGQKQGQLRSLHLTCDSAPVGSQGTWSTSCRINHLIFRGGAQITFLATFDVSPKAVLGDRLLLTANVSSENNTPRTSKTTFQLELPVKYAVYTVVSSHEQFTKYLNFSESEEKESHVAMHRYQVNNLGQRDLPVSINFWVPVELNQEAVWMDVEVSHPQNPSLRCSSEKIAPPASDFLAHIQKNPVLDCSIAGCLRFRCDVPSFSVQEELDFTLKGNLSFGWVRQILQKKVSVVSVAEITFDTSVYSQLPGQEAFMRAQTTTVLEKYKVHNPTPLIVGSSIGGLLLLALITAVLYKVGFFKRQYKEMMEEANGQIAPENGTQTPSPPSEK

SEQ ID NO: 7267 - protein, 1169 aa, Homo sapiens
MTRTRAALLLFTALATSLGFNLDTEELTAFRVDSAGFGDSVVQYANSWVVVGAPQKITAANQTGGLYQCGYSTGACEPIGLQVPPEAVNMSLGLSLASTTSPSQLLACGPTVHHECGRNMYLTGLCFLLGPTQLTQRLPVSRQECPRQEQDIVFLIDGSGSISSRNFATMMNFVRAVISQFQRPSTQFSLMQFSNKFQTHFTFEEFRRSSNPLSLLASVHQLQGFTYTATAIQNVVHRLFHASYGARRDAAKILIVITDGKKEGDSLDYKDVIPMADAAGIIRYAIGVGLAFQNRNSWKELNDIASKPSQEHIFKVEDFDALKDIQNQLKEKIFAIEGTETTSSSSFELEMAQEGFSAVFTPDGPVLGAVGSFTWSGGAFLYPPNMSPTFINMSQENVDMRDSYLGYSTELALWKGVQSLVLGAPRYQHTGKAVIFTQVSRQWRMKAEVTGTQIGSYFGASLCSVDVDSDGSTDLVLIGAPHYYEQTRGGQVSVCPLPRGWRRWWCDAVLYGEQGHPWGRFGAALTVLGDVNGDKLTDVVIGAPGEEENRGAVYLFHGVLGPSISPSHSQRIAGSQLSSRLQYFGQALSGGQDLTQDGLVDLAVGARGQVLLLRTRPVLWVGVSMQFIPAEIPRSAFECREQVVSEQTLVQSNICLYIDKRSKNLLGSRDLQSSVTLDLALDPGRLSPRATFQETKNRSLSRVRVLGLKAHCENFNLLLPSCVEDSVTPITLRLNFTLVGKPLLAFRNLRPMLAADAQRYFTASLPFEKNCGADHICQDNLGISFSFPGLKSLLVGSNLELNAEVMVWNDGEDSYGTTITFSHPAGLSYRYVAEGQKQGQLRSLHLTCDSAPVGSQGTWSTSCRINHLIFRGGAQITFLATFDVSPKAVLGDRLLLTANVSSENNTPRTSKTTFQLELPVKYAVYTVVSSHEQFTKYLNFSESEEKESHVAMHRYQVNNLGQRDLPVSINFWVPVELNQEAVWMDVEVSHPQNPSLRCSSEKIAPPASDFLAHIQKNPVLDCSIAGCLRFRCDVPSFSVQEELDFTLKGNLSFGWVRQILQKKVSVVSVAEITFDTSVYSQLPGQEAFMRAQTTTVLEKYKVHNPTPLIVGSSIGGLLLLALITAVLYKVGFFKRQYKEMMEEANGQIAPENGTQTPSPPTPHYPQDNV

SEQ ID NO: 7268 - protein, 181 aa, Homo sapiens
MTRTRAALLLFTALATSLGFNLDTEELTAFRVDSAGFGDSVVQYANSWVVVGAPQKITAANQTGGLYQCGYSTGACEPIGLQVPPEAVNMSLGLSLASTTSPSQLLLTQRLPVSRQGECRDHQGFEELTHIQLGVRWARDSLARVDQKEGIWKKSYHVLQWFLTLLPAHPADRPHAAGPFL

SEQ ID NO: 7269 - protein, 49 aa, Homo sapiens
MNLQPIFWIGLISSVCCVFAQTDENRCLKANAKSCGECIQAGPNCGWCT

SEQ ID NO: 7270 - protein, 89 aa, Homo sapiens
MNLQPIFWIGLISSVCCVFAQTDENRCLKANAKSCGECIQAGPNCGWCTNSTFLQEGMPTSARCDDLEALKKKGCPPDDIENPRGSKDI

SEQ ID NO: 7271 - protein, 104 aa, Homo sapiens
MNLQPIFWIGLISSVCCVFAQTDENRCLKANAKSCGECIQAGPNCGWCTNSTFLQEGMPTSARCDDLEALKKKGCPPDDIENPRGSKDIKKNKNVTNRSKGTAE

SEQ ID NO: 7272 - protein, 125 aa, Homo sapiens
MNLQPIFWIGLISSVCCVFAQTDENRCLKANAKSCGECIQAGPNCGWCTNSTFLQEGMPTSARCDDLEALKKKGCPPDDIENPRGSKDIKKNKNVTNRSKGTAEKLKPEDITQIQPQQLVLRLRS

SEQ ID NO: 7273 - protein, 136 aa, Homo sapiens
MNLQPIFWIGLISSVCCVFAQTDENRCLKANAKSCGECIQAGPNCGWCTNSTFLQEGMPTSARCDDLEALKKKGCPPDDIENPRGSKDIKKNKNVTNRSKGTAEKLKPEDITQIQPQQLVLRLRSGEPQTFTLKFK

SEQ ID NO: 7274 - protein, 143 aa, Homo sapiens
MNLQPIFWIGLISSVCCVFAQTDENRCLKANAKSCGECIQAGPNCGWCTNSTFLQEGMPTSARCDDLEALKKKGCPPDDIENPRGSKDIKKNKNVTNRSKGTAEKLKPEDITQIQPQQLVLRLRSGEPQTFTLKFKRAEDYPI

SEQ ID NO: 7275 - protein, 163 aa, Homo sapiens
MNLQPIFWIGLISSVCCVFAQTDENRCLKANAKSCGECIQAGPNCGWCTNSTFLQEGMPTSARCDDLEALKKKGCPPDDIENPRGSKDIKKNKNVTNRSKGTAEKLKPEDITQIQPQQLVLRLRSGEPQTFTLKFKRAEDYPIDLYYLMDLSYSMKDDLENVK

SEQ ID NO: 7276 - protein, 798 aa, Homo sapiens
MNLQPIFWIGLISSVCCVFAQTDENRCLKANAKSCGECIQAGPNCGWCTNSTFLQEGMPTSARCDDLEALKKKGCPPDDIENPRGSKDIKKNKNVTNRSKGTAEKLKPEDITQIQPQQLVLRLRSGEPQTFTLKFKRAEDYPIDLYYLMDLSYSMKDDLENVKSLGTDLMNEMRRITSDFRIGFGSFVEKTVMPYISTTPAKLRNPCTSEQNCTSPFSYKNVLSLTNKGEVFNELVGKQRISGNLDSPEGGFDAIMQVAVCGSLIGWRNVTRLLVFSTDAGFHFAGDGKLGGIVLPNDGQCHLENNMYTMSHYYDYPSIAHLVQKLSENNIQTIFAVTEEFQPVYKELKNLIPKSAVGTLSANSSNVIQLIIDAYNSLSSEVILENGKLSEGVTISYKSYCKNGVNGTGENGRKCSNISIGDEVQFEISITSNKCPKKDSDSFKIRPLGFTEEVEVILQYICECECQSEGIPESPKCHEGNGTFECGACRCNEGRVGRHCECSTDEVNSEDMDAYCRKENSSEICSNNGECVCGQCVCRKRDNTNEIYSGKFCECDNFNCDRSNGLICGGNGVCKCRVCECNPNYTGSACDCSLDTSTCEASNGQICNGRGICECGVCKCTDPKFQGQTCEMCQTCLGVCAEHKECVQCRAFNKGEKKDTCTQECSYFNITKVESRDKLPQPVQPDPVSHCKEKDVDDCWFYFTYSVNGNNEVMVHVVENPECPTGPDIIPIVAGVVAGIVLIGLALLLIWKLLMIIHDRREFAKFEKEKMNAKWDTGENPIYKSAVTTVVNPKYEGK

SEQ ID NO: 7277 - protein, 798 aa, Homo sapiens; identical to SEQ ID NO: 7276

SEQ ID NO: 7278 - protein, 801 aa, Homo sapiens
MNLQPIFWIGLISSVCCVFAQTDENRCLKANAKSCGECIQAGPNCGWCTNSTFLQEGMPTSARCDDLEALKKKGCPPDDIENPRGSKDIKKNKNVTNRSKGTAEKLKPEDITQIQPQQLVLRLRSGEPQTFTLKFKRAEDYPIDLYYLMDLSYSMKDDLENVKSLGTDLMNEMRRITSDFRIGFGSFVEKTVMPYISTTPAKLRNPCTSEQNCTSPFSYKNVLSLTNKGEVFNELVGKQRISGNLDSPEGGFDAIMQVAVCGSLIGWRNVTRLLVFSTDAGFHFAGDGKLGGIVLPNDGQCHLENNMYTMSHYYDYPSIAHLVQKLSENNIQTIFAVTEEFQPVYKELKNLIPKSAVGTLSANSSNVIQLIIDAYNSLSSEVILENGKLSEGVTISYKSYCKNGVNGTGENGRKCSNISIGDEVQFEISITSNKCPKKDSDSFKIRPLGFTEEVEVILQYICECECQSEGIPESPKCHEGNGTFECGACRCNEGRVGRHCECSTDEVNSEDMDAYCRKENSSEICSNNGECVCGQCVCRKRDNTNEIYSGKFCECDNFNCDRSNGLICGGNGVCKCRVCECNPNYTGSACDCSLDTSTCEASNGQICNGRGICECGVCKCTDPKFQGQTCEMCQTCLGVCAEHKECVQCRAFNKGEKKDTCTQECSYFNITKVESRDKLPQPVQPDPVSHCKEKDVDDCWFYFTYSVNGNNEVMVHVVENPECPTGPDIIPIVAGVVAGIVLIGLALLLIWKLLMIIHDRREFAKFEKEKMNAKWDTQENPIYKSPINNFKNPNYGRKAGL

SEQ ID NO: 7279 - protein, 152 aa, Homo sapiens
MNLQPIFWIGLISSVCCVFAQTDENRCLKANAKSCGECIQAGPNCGWCTNSVSKTFLQEGMPTSARCDDLEALKKKGCPPDDIENPRGSKDIKKNKNVTNRSKGTAEKLKPEDITQIQPQQLVLRLRSGEPQTFTLKFKRAEDYPIDLYYLM

SEQ ID NO: 7280 - protein, 14 aa, Homo sapiens
MPTSARCDDLEALK

SEQ ID NO: 7281 - protein, 31 aa, Homo sapiens
MPTSARCDDLEALKKKGCPPDDIENPRGSKD

SEQ ID NO: 7282 - protein, 98 aa, Homo sapiens
MPTSARCDDLEALKKKGCPPDDIENPRGSKDIKKNKNVTNRSKGTAEKLKPEDITQIQPQQLVLRLRSGEPQTFTLKFKRAEDYPIDLYYLMDLSYSM

SEQ ID NO: 7283 - protein, 108 aa, Homo sapiens
  VARIANT 1: note = misc_feature - Xaa can be any naturally occurring amino acid
XDMDAYCRKENSSEICSNNGECVCGQCVCRKRDNTNEIYSGKFCECDNFNCDRSNGLICGGNGVCKCRVCECNPNYTGSACDCSLDTSTCEASNGQICNGRGICECGV

SEQ ID NO: 7284 - protein, 70 aa, Homo sapiens
  VARIANT 1: note = misc_feature - Xaa can be any naturally occurring amino acid
XVAGVVAGIVLIGLALLLIWKLLMIIHDRREFAKFEKEKMNAKWDTQENPIYKSPINNFKNPNYGRKAGL

SEQ ID NO: 7285 - protein, 322 aa, Homo sapiens
GRLGKDLATGVLSQECTKFKVSSCRECIESGPGCTWCQKLNFTGPGDPDSIRCDTRPQLLMRGCAADDIMDPTSLAETQEDHNGGQKQLSPQKVTLYLRPGQAAAFNVTFRRAKGYPIDLYYLMDLSYSMLDDLRNVKKLGGDLLRALNEITESGRIGFGSFVDKTVLPFVNTHPDKLRNPCPNKEKECQPPFAFRHVLKLTNNSNQFQTEVGKQLISGNLDAPEGGLDAMMQVAACPEEIGWRNVTRLLVFATDDGFHFAGDGKLGAILTPNDGRCHLEDNLYKRSNEFDYPSVGQLAHKLAENNIQPIFAVTSRMVKTYE

SEQ ID NO: 7286 - protein, 71 aa, Homo sapiens
MLGLRPPLLALVGLLSLGCGRPRAPTHQPASSLSPLSGVHEVQGQQLPGMHRVGARLHLVPEAELHRAGGS

SEQ ID NO: 7287 - protein, 49 aa, Homo sapiens
MLGLRPPLLALVGLLSLGCVLSQECTKFKVSSCRECIESGPGCTWCQKL

SEQ ID NO: 7288 - protein, 93 aa, Homo sapiens
MLGLRPPLLALVGLLSLGCVLSQECTKFKVSSCRECIESGPGCTWCQKLGAALGPPAHATAASSPRRRSRVAPVCPRTEQGGQAPELHRAGGS

SEQ ID NO: 7289 - protein, 108 aa, Homo sapiens
MLGLRPPLLALVGLLSLGCVLSQECTKFKVSSCRECIESGPGCTWCQKLGAALGPPAHATAASSPRRRSRVAPVCPRTEQGGQAPGGNYLGQAGFFPSPFWRFSAPLK

SEQ ID NO: 7290 - protein, 70 aa, Homo sapiens
MLGLRPPLLALVGLLSLGCVLSQECTKFKVSSCRECIESGPGCTWCQKLNFTGPGDPDSIRCDTRPQLLM

SEQ ID NO: 7291 - protein, 712 aa, Homo sapiens
MLGLRPPLLALVGLLSLGCVLSQECTKFKVSSCRECIESGPGCTWCQKLNFTGPGDPDSIRCDTRPQLLMRGCAADDIMDPTSLAETQEDHNGGQKQLSPQKVTLYLRPGFGSFVDKTVLPFVNTHPDKLRNPCPNKEKECQPPFAFRHVLKLTNNSNQFQTEVGKQLISGNLDAPEGGLDAMMQVAACPEEIGWRNVTRLLVFATDDGFHFAGDGKLGAILTPNDGRCHLEDNLYKRSNEFDYPSVGQLAHKLAENNIQPIFAVTSRMVKTYEKLTEIIPKSAVGELSEDSSNVVHLIKNAYNKLSSRVFLDHNALPDTLKVTYDSFCSNGVTHRNQPRGDCDGVQINVPITFQVKVTATECIQEQSFVIRALGFTDIVTVQVLPQCECRCRDQSRDRSLCHGKGFLECGICRCDTGYIGKNCECQTQGRSSQELEGSCRKDNNSIICSGLGDCVCGQCLCHTSDVPGKLIYGQYCECDTINCERYNGQVCGGPGRGLCFCGKCRCHPGFEGSACQCERTTEGCLNPRRVECSGRGRCRCNVCECHSGYQLPLCQECPGCPSPCGKYISCAECLKFEKGPFGKNCSAACPGLQLSNNPVKGRTCKERDSEGCWVAYTLEQQDGMDRYLIYVDESRECVAGPNIAAIVGGTVAGIVLIGILLLVIWKALIHLSDLREYRRFEKEKLKSQWNNDNPLFKSATTTVMNPKFAES

SEQ ID NO: 7292 - protein, 120 aa, Homo sapiens
MLGLRPPLLALVGLLSLGCVLSQECTKFKVSSCRECIESGPGCTWCQKLNFTGPGDPDSIRCDTRPQLLMRGCAADDIMDPTSLAETQEDHNGGQKQLSPQKVTLYLRPGQAAAFNVTFR

SEQ ID NO: 7293 - protein, 160 aa, Homo sapiens
MLGLRPPLLALVGLLSLGCVLSQECTKFKVSSCRECIESGPGCTWCQKLNFTGPGDPDSIRCDTRPQLLMRGCAADDIMDPTSLAETQEDHNGGQKQLSPQKVTLYLRPGQAAAFNVTFRRAKGYPIDLYYLMDLSYSMLDDLRNVKKLGGDLLRALNEI

SEQ ID NO: 7294 - protein, 166 aa, Homo sapiens
MLGLRPPLLALVGLLSLGCVLSQECTKFKVSSCRECIESGPGCTWCQKLNFTGPGDPDSIRCDTRPQLLMRGCAADDIMDPTSLAETQEDHNGGQKQLSPQKVTLYLRPGQAAAFNVTFRRAKGYPIDLYYLMDLSYSMLDDLRNVKKLGGDLLRALNEITESGRI

SEQ ID NO: 7295 - protein, 769 aa, Homo sapiens
MLGLRPPLLALVGLLSLGCVLSQECTKFKVSSCRECIESGPGCTWCQKLNFTGPGDPDSIRCDTRPQLLMRGCAADDIMDPTSLAETQEDHNGGQKQLSPQKVTLYLRPGQAAAFNVTFRRAKGYPIDLYYLMDLSYSMLDDLRNVKKLGGDLLRALNEITESGRIGFGSFVDKTVLPFVNTHPDKLRNPCPNKEKECQPPFAFRHVLKLTNNSNQFQTEVGKQLISGNLDAPEGGLDAMMQVAACPEEIGWRNVTRLLVFATDDGFHFAGDGKLGAILTPNDGRCHLEDNLYKRSNEFDYPSVGQLAHKLAENNIQPIFAVTSRMVKTYEKLTEIIPKSAVGELSEDSSNVVHLIKNAYNKLSSRVFLDHNALPDTLKVTYDSFCSNGVTHRNQPRGDCDGVQINVPITFQVKVTATECIQEQSFVIRALGFTDIVTVQVLPQCECRCRDQSRDRSLCHGKGFLECGICRCDTGYIGKNCECQTQGRSSQELEGSCRKDNNSIICSGLGDCVCGQCLCHTSDVPGKLIYGQYCECDTINCERYNGQVCGGPGRGLCFCGKCRCHPGFEGSACQCERTTEGCLNPRRVECSGRGRCRCNVCECHSGYQLPLCQECPGCPSPCGKYISCAECLKFEKGPFGKNCSAACPGLQLSNNPVKGRTCKERDSEGCWVAYTLEQQDGMDRYLIYVDESRECVAGPNIAAIVGGTVAGIVLIGILLLVIWKALIHLSDLREYRRFEKEKLKSQWNNDNPLFKSATTTVMNPKFAES

SEQ ID NO: 7296 - protein, 769 aa, Homo sapiens; identical to SEQ ID NO: 7295

SEQ ID NO: 7297 - protein, 769 aa, Homo sapiens; identical to SEQ ID NO: 7295

SEQ ID NO: 7298 - protein, 769 aa, Homo sapiens; identical to SEQ ID NO: 7295

SEQ ID NO: 7299 - protein, 769 aa, Homo sapiens; identical to SEQ ID NO: 7295

SEQ ID NO: 7300 - protein, 37 aa, Homo sapiens
MRGCAADDIMDPTSLAETQEDHNGGQKQLSPQKVTLY

SEQ ID NO: 7301 - protein, 49 aa, Homo sapiens
MRGCAADDIMDPTSLAETQEDHNGGQKQLSPQKVTLYLRPGQAAAFNVT

SEQ ID NO: 7302 - protein, 35 aa, Homo sapiens
LKSCMGLKIGDTVRWAGQGLCPGASVGTQPPFFLL

SEQ ID NO: 7303 - protein, 788 aa, Homo sapiens
MRARPRPRPLWATVLALGALAGVGVGGPNICTTRGVSSCQQCLAVSPMCAWCSDEALPLGSPRCDLKENLLKDNCAPESIEFPVSEARVLEDRPLSDKGSGDSSQVTQVSPQRIALRLRPDDSKNFSIQVRQVEDYPVDIYYLMDLSYSMKDDLWSIQNLGTKLATQMRKLTSNLRIGFGAFVDKPVSPYMYISPPEALENPCYDMKTTCLPMFGYKHVLTLTDQVTRFNEEVKKQSVSRNRDAPEGGFDAIMQATVCDEKIGWRNDASHLLVFTTDAKTHIALDGRLAGIVQPNDGQCHVGSDNHYSASTTMDYPSLGLMTEKLSQKNINLIFAVTENVVNLYQNYSELIPGTTVGVLSMDSSNVLQLIVDAYGKIRSKVELEVRDLPEELSLSFNATCLNNEVIPGLKSCMGLKIGDTVSFSIEAKVRGCPQEKEKSFTIKPVGFKDSLIVQVTFDCDCACQAQAEPNSHRCNNGNGTFECGVCRCGPGWLGSQCECSEEDYRPSQQDECSPREGQPVCSQRGECLCGQCVCHSSDFGKITGKYCECDDFSCVRYKGEMCSGHGQCSCGDCLCDSDWTGYYCNCTTRTDTCMSSNGLLCSGRGKCECGSCVCIQPGSYGDTCEKCPTCPDACTFKKECVECKKFDRGALHDENTCNRYCRDEIESVKELKDTGKDAVNCTYKNEDDCVVRFQYYEDSSGKSILYVVEEPECPKGPDILVVLLSVMGAILLIGLAALLIWKLLITIHDRKEFAKFEEERARAKWDTANNPLYKEATSTFTNITYRGT

SEQ ID NO: 7304 - protein, 443 aa, Homo sapiens
MRARPRPRPLWATVLALGALAGVGVGGPNICTTRGVSSCQQCLAVSPMCAWCSDEALPLGSPRCDLKENLLKDNCAPESIEFPVSEARVLEDRPLSDKGSGDSSQVTQVSPQRIALRLRPDDSKNFSIQVRQVEDYPVDIYYLMDLSYSMKDDLWSIQNLGTKLATQMRKLTSNLRIGFGAFVDKPVSPYMYISPPEALENPCYDMKTTCLPMFGYKHVLTLTDQVTRFNEEVKKQSVSRNRDAPEGGFDAIMQATVCDEKIGWRNDASHLLVFTTDAKTHIALDGRLAGIVQPNDGQCHVGSDNHYSASTTMDYPSLGLMTEKLSQKNINLIFAVTENVVNLYQNYSELIPGTTVGVLSMDSSNVLQLIVDAYGKIRSKVELEVRDLPEELSLSFNATCLNNEVIPGLKSCMGLKIGDTVRWAGQGLCPGASVGTQPPFFLL

SEQ ID NO: 7305 - protein, 89 aa, Homo sapiens
MVALPMVLVLLLVLSRGESELDAKIPSTGDATEWRNPHLSMLGSCQPAPSCQKCILSHPSCAWCKQLNFTASGEAEARRCARREELLAR

SEQ ID NO: 7306 - protein, 93 aa, Homo sapiens
MVALPMVLVLLLVLSRGESELDAKIPSTGDATEWRNPHLSMLGSCQPAPSCQKCILSHPSCAWCKQLNFTASGEAEARRCARREELLARGCPL

SEQ ID NO: 7307 - protein, 158 aa, Homo sapiens
MVALPMVLVLLLVLSRGESELDAKIPSTGDATEWRNPHLSMLGSCQPAPSCQKCILSHPSCAWCKQLNFTASGEAEARRCARREELLARGCPLEELEEPRGQQEVLQDQPLSQGARGEGATQLAPQRVRVTLRPGEPQQLQVRFLRAEGYPVDLYYLM

SEQ ID NO: 7308 - protein, 798 aa, Homo sapiens
MVALPMVLVLLLVLSRGESELDAKIPSTGDATEWRNPHLSMLGSCQPAPSCQKCILSHPSCAWCKQLNFTASGEAEARRCARREELLARGCPLEELEEPRGQQEVLQDQPLSQGARGEGATQLAPQRVRVTLRPGEPQQLQVRFLRAEGYPVDLYYLMDLSYSMKDDLERVRQLGHALLVRLQEVTHSVRIGFGSFVDKTVLPFVSTVPSKLRHPCPTRLERCQSPFSFHHVLSLTGDAQAFEREVGRQSVSGNLDSPEGGFDAILQAALCQEQIGWRNVSRLLVFTSDDTFHTAGDGKLGGIFMPSDGHCHLDSNGLYSRSTEFDYPSVGQVAQALSAANIQPIFAVTSAALPVYQELSKLIPKSAVGELSEDSSNVVQLIMDAYNSLSSTVTLEHSSLPPGVHISYESQCEGPEKREGKAEDRGQCNHVRINQTVTFWVSLQATHCLPEPHLLRLRALGFSEELIVELHTLCDCNCSDTQPQAPHCSDGQGHLQCGVCSCAPGRLGRLCECSVAELSSPDLESGCRAPNGTGPLCSGKGHCQCGRCSCSGQSSGHLCECDDASCERHEGILCGGFGRCQCGVCHCHANRTGRACECSGDMDSCISPEGGLCSGHGRCKCNRCQCLDGYYGALCDQCPGCKTPCERHRDCAECGAFRTGPLATNCSTACAHTNVTLALAPILDDGWCKERTLDNQLFFFLVEDDARGTVVLRVRPQEKGADHTQAIVLGCVGGIVAVGLGLVLAYRLSVEIYDRREYSRFEKEQQQLNWKQDSNPLYKSAITTTINPRFQEADSPTL

SEQ ID NO: 7309 - protein, 798 aa, Homo sapiens; identical to SEQ ID NO: 7308

SEQ ID NO: 7310 - protein, 650 aa, Homo sapiens
MVALPMVLVLLLVLSRGESELDAKIPSTGDATEWRNPHLSMLGSCQPAPSCQKCILSHPSCAWCKQLNFTASGEAEARRCARREELLARGCPLEELEEPRGQQEVLQDQPLSQGARGEGATQLAPQRVRVTLRPGEPQQLQVRFLRAEGYPVDLYYLMDLSYSMKDDLERVRQLGHALLVRLQEVTHSVRIGFGSFVDKTVLPFVSTVPSKLRHPCPTRLERCQSPFSFHHVLSLTGDAQAFEREVGRQSVSGNLDSPEGGFDAILQAALCQEQIGWRNVSRLLVFTSDDTFHTAGDGKLGGIFMPSDGHCHLDSNGLYSRSTEFDYPSVGQVAQALSAANIQPIFAVTSAALPVYQELSKLIPKSAVGELSEDSSNVVQLIMDAYNSLSSTVTLEHSSLPPGVHISYESQCEGPEKREGKAEDRGQCNHVRINQTVTFWVSLQATHCLPEPHLLRLRALGFSEELIVELHTLCDCNCSDTQPQAPHCSDGQGHLQCGVCRDCAECGAFRTGPLATNCSTACAHTNVTLALAPILDDGWCKERTLDNQLFFFLVEDDARGTVVLRVRPQEKGADHTQAIVLGCVGGIVAVGLGLVLAYRLSVEIYDRREYSRFEKEQQQLNWKQDSNPLYKSAITTTINPRFQEADSPTL

SEQ ID NO: 7311 - protein, 471 aa, Homo sapiens
MVALPMVLVLLLVLSRGESELDAKIPSTGDATEWRNPHLSMLGSCQPAPSCQKCILSHPSCAWCKQLNFTASGEAEARRCARREELLARGCPLEELEEPRGQQEVLQDQPLSQGARGEGATQLAPQRVRVTLRPGEPQQLQVRFLRAEGYPVDLYYLMDLSYSMKDDLERVRQLGHALLVRLQEVTHSVRIGFGSFVDKTVLPFVSTVPSKLRHPCPTRLERCQSPFSFHHVLSLTGDAQAFEREVGRQSVSGNLDSPEGGFDAILQAALCQEQIGWRNVSRLLVFTSDDTFHTAGDGKLGGIFMPSDGHCHLDSNGLYSRSTEFDYPSVGQVAQALSAANIQPIFAVTSAALPVYQELSKLIPKSAVGELSEDSSNVVQLIMDAYNSLSSTVTLEHSSLPPGVHISYESQCEGPEKREGKAEDRGQCNHVRINQTGLCRVWGLQDWPTGHQLQYSLCPYQCDPGLGPYLG

SEQ ID NO: 7312 - protein, 117 aa, Homo sapiens
  VARIANT 1: note = misc_feature - Xaa can be any naturally occurring amino acid
XSTACAHTNVTLALAPILDDGWCKERTLDNQLFFFLVEDDARGTVVLRVRPQEKGADHTQAIVLGCVGGIVAVGLGLVLAYRLSVEIYDRREYSRFEKEQQQLNWKQLLGFGSRLAS

SEQ ID NO: 7313 - protein, 353 aa, Homo sapiens
MCKNSQDIICSNAGTCHCGRCKCDNSDGSGLVYGKFCECDDRECIDDETEEICGGHGKCYCGNCYCKAGWHGDKCEFQCDITPWESKRRCTSPDGKICSNRGTCVCGECTCHDVDPTGDWGDIHGDTCECDERDCRAVYDRYSDDFCSGHGQCNCGRCDCKAGWYGKKCEHPQSCTLSAEESIRKCQGSSDLPCSGRGKCECGKCTCYPPGDRRVYGKTCECDDRRCEDLDGVVCGGHGTCSCGRCVCERGWFGKLCQHPRKCNMTEEQSKNLCESADGILCSGKGSCHCGKCICSAEEWYISGEFCDCDDRDCDKHDGLICTGNGICSCGNCECWDGWNGNACEIWLGSEYP

SEQ ID NO: 7314 - protein, 401 aa, Homo sapiens
MNLVAVMGAFNKGHGKCDCGKCKCDQGWYGDACQYPTNCDLTKKKSNQMCKNSQDIICSNAGTCHCGRCKCDNSDGSGLVYGKFCECDDRECIDDETEEICGGHGKCYCGNCYCKAGWHGDKCEFQCDITPWESKRRCTSPDGKICSNRGTCVCGECTCHDVDPTGDWGDIHGDTCECDERDCRAVYDRYSDDFCSGHGQCNCGRCDCKAGWYGKKCEHPQSCTLSAEESIRKCQGSSDLPCSGRGKCECGKCTCYPPGDRRVYGKTCECDDRRCEDLDGVVCGGHGTCSCGRCVCERGWFGKLCQHPRKCNMTEEQSKNLCESADGILCSGKGSCHCGKCICSAEEWYISGEFCDCDDRDCDKHDGLICTGNGICSCGNCECWDGWNGNACEIWLGSEYP

SEQ ID NO: 7315 - protein, 494 aa, Homo sapiens
MRPPGFRNFLLLASSLLFAGLSAVPQSFSPSLRSWPGAACRLSRAESERRCRAPGQPPGAALCHGRGRCDCGVCICHVTEPGMFFGPLCECHEWVCETYDGSTCAGHGKCDCGKCKCDQGWYGDACQYPTNCDLTKKKSNQMCKNSQDIICSNAGTCHCGRCKCDNSDGSGLVYGKFCECDDRECIDDETEEICGGHGKCYCGNCYCKAGWHGDKCEFQCDITPWESKRRCTSPDGKICSNRGTCVCGECTCHDVDPTGDWGDIHGDTCECDERDCRAVYDRYSDDFCSGHGQCNCGRCDCKAGWYGKKCEHPQSCTLSAEESIRKCQGSSDLPCSGRGKCECGKCTCYPPGDRRVYGKTCECDDRRCEDLDGVVCGGHGTCSCGRCVCERGWFGKLCQHPRKCNMTEEQSKNLCESADGILCSGKGSCHCGKCICSAEEWYISGEFCDCDDRDCDKHDGLICTGNGICSCGNCECWDGWNGNACEIWLGSEYP

SEQ ID NO: 7316 - protein, 445 aa, Homo sapiens
MRPPGFRNFLLLASSLLFAGLSAVPQSFSPSLRSWPGAACRLSRAESERRCRAPGQPPGAALCHGRGRCDCGVCICHVTEPGMFFGPLCECHEWVCETYDGSTCAGTCHCGRCKCDNSDGSGLVYGKFCECDDRECIDDETEEICGGHGKCYCGNCYCKAGWHGDKCEFQCDITPWESKRRCTSPDGKICSNRGTCVCGECTCHDVDPTGDWGDIHGDTCECDERDCRAVYDRYSDDFCSGHGQCNCGRCDCKAGWYGKKCEHPQSCTLSAEESIRKCQGSSDLPCSGRGKCECGKCTCYPPGDRRVYGKTCECDDRRCEDLDGVVCGGHGTCSCGRCVCERGWFGKLCQHPRKCNMTEEQSKNLCESADGILCSGKGSCHCGKCICSAEEWYISGEFCDCDDRDCDKHDGLICTGNGICSCGNCECWDGWNGNACEIWLGSEYP

SEQ ID NO: 7317 - protein, 401 aa, Homo sapiens
MSGCARPTTGAPVQAMVSVGKCKCDQGWYGDACQYPTNCDLTKKKSNQMCKNSQDIICSNAGTCHCGRCKCDNSDGSGLVYGKFCECDDRECIDDETEEICGGHGKCYCGNCYCKAGWHGDKCEFQCDITPWESKRRCTSPDGKICSNRGTCVCGECTCHDVDPTGDWGDIHGDTCECDERDCRAVYDRYSDDFCSGHGQCNCGRCDCKAGWYGKKCEHPQSCTLSAEESIRKCQGSSDLPCSGRGKCECGKCTCYPPGDRRVYGKTCECDDRRCEDLDGVVCGGHGTCSCGRCVCERGWFGKLCQHPRKCNMTEEQSKNLCESADGILCSGKGSCHCGKCICSAEEWYISGEFCDCDDRDCDKHDGLICTGNGICSCGNCECWDGWNGNACEIWLGSEYP

SEQ ID NO: 7318 - protein, 208 aa, Homo sapiens
  VARIANT 1: note = misc_feature - Xaa can be any naturally occurring amino acid
XCEGHGQCNCGRCDCKAGWYGKKCEHPQSCTLSAEESIRKCQGSSDLPCSGRGKCECGKCTCYPPGDRRVYGKTCECDDRRCEDLDGVVCGGHGTCSCGRCVCERGWFGKLCQHPRKCNMTEEQSKNLCESADGILCSGKGSCHCGKCICSAEEWYISGEFCDCDDRDCDKHDGLICTGNGICSCGNCECWDGWNGNACEIWLGSEYP

SEQ ID NO: 7319 - protein, 911 aa, Homo sapiens
MDGAMGPRGLLLCMYLVSLLILQAMPALGSATGRSKSSEKRQAVDTAVDGVFIRSLKVNCKVTSRFAHYVVTSQVVNTANEAREVAFDLEIPKTAFISDFAVTADGNAFIGDIKDKVTAWKQYRKAAISGENAGLVRASGRTMEQFTIHLTVNPQSKVTFQLTYEEVLKRNHMQYEIVIKVKPKQLVHHFEIDVDIFEPQGISKLDAQASFLPKELAAQTIKKSFSGKKGHVLFRPTVSQQQSCPTCSTSLLNGHFKVTYDVSRDKICDLLVANNHFAHFFAPQNLTNMNKNVVFVIDISGSMRGQKVKQTKEALLKILGDMQPGDYFDLVLFGTRVQSWKGSLVQASEANLQAAQDFVRGFSLDEATNLNGGLLRGIEILNQVQESLPELSNHASILIMLTDGDPTEGVTDRSQILKNVRNAIRGRFPLYNLGFGHNVDFNFLEVMSMENNGRAQRIYEDHDATQQLQGFYSQVAKPLLVDVDLQYPQDAVLALTQNHHKQYYEGSEIVVAGRIADNKQSSFKADVQAHGEGQEFSITCLVDEEEMKKLLRERGHMLENHVERLWAYLTIQELLAKRMKVDREERANLSSQALQMSLDYGFVTPLTSMSIRGMADQDGLKPTIDKPSEDSPPLEMLGPRRTFVLSALQPSPTHSSSNTQRLPDRVTGVDTDPHFIIHVPQKEDTLCFNINEEPGVILSLVQDPNTGFSVNGQLIGNKARSPGQHDGTYFGRLGIANPATDFQLEVTPQNITLNPGFGGPVFSWRDQAVLRQDGVVVTINKKRNLVVSVDDGGTFEVVLHRVWKGSSVHQDFLGFYVLDSHRMSARTHGLLGQFFHPIGFEVSDIHPGSDPTKPDATMVVRNRRLTVTRGLQKDYSKDPWHGAEVSCWFIHNNGAGLIDGAYTDYIVPDIF

SEQ ID NO: 7320 - protein, 213 aa, Homo sapiens
MDGAMGPRGLLLCMYLVSLLILQAMPALGSATGRSKSSEKRQAVDTAVDGVFIRSLKVNCKVTSRFAHYVVTSQVVNTANEAREVAFDLEIPKTAFISDFAVTADGNAFIGDIKDKVTAWKQYRKAAISGENAGLVRASGRTMEQFTIHLTVNPQSKVTFQLTYEEVLKRNHMQYEIVIKVKPKQLVHHFEVDHRSRGRGPAPLSVTMAPNTG

SEQ ID NO: 7321 - protein, 623 aa, Homo sapiens
MNKNVVFVIDISGSMRGQKVKQTKEALLKILGDMQPGDYFDLVLFGTRVQSWKGSLVQASEANLQAAQDFVRGFSLDEATNLNGGLLRGIEILNQVQESLPELSNHASILIMLTDGDPTEGVTDRSQILKNVRNAIRGRFPLYNLGFGHNVDFNFLEVMSMENNGRAQRIYEDHDATQQLQGFYSQVAKPLLVDVDLQYPQDAVLALTQNHHKQYYEGSEIVVAGRIADNKQSSFKADVQAHGEGQEFSITCLVDEEEMKKLLRERGHMLENHVERLWAYLTIQELLAKRMKVDREERANLSSQALQMSLDYGFVTPLTSMSIRGMADQDGLKPTIDKPSEDSPPLEMLGPRRTFVLSALQPSPTHSSSNTQRLPDRVTGVDTDPHFIIHVPQKEDTLCFNINEEPGVILSLVQDPNTGFSVNGQLIGNKARSPGQHDGTYFGRLGIANPATDFQLEVTPQNITLNPGFGGPVFSWRDQAVLRQDGVVVTINKKRNLVVSVDDGGTFEVVLHRVWKGSSVHQDFLGFYVLDSHRMSARTHGLLGQFFHPIGFEVSDIHPGSDPTKPDATMVVRNRRLTVTRGLQKDYSKDPWHGAEVSCWFIHNNGAGLIDGAYTDYIVPDIF

SEQ ID NO: 7322 - protein, 277 aa, Homo sapiens
MPLPLPSAFVLSALQPSPTHSSSNTQRLPDRVTGVDTDPHFIIHVPQKEDTLCFNINEEPGVILSLVQDPNTGFSVNGQLIGNKARSPGQHDGTYFGRLGIANPATDFQLEVTPQNITLNPGFGGPVFSWRDQAVLRQDGVVVTINKKRNLVVSVDDGGTFEVVLHRVWKGSSVHQDFLGFYVLDSHRMSARTHGLLGQFFHPIGFEVSDIHPGSDPTKPDATMVVRNRRLTVTRGLQKDYSKDPWHGAEVSCWFIHNNGAGLIDGAYTDYIVPDIF

SEQ ID NO: 7323 - protein, 464 aa, Homo sapiens
SMENNGRAQRIYEDHDATQQLQGFYSQVAKPLLVDVDLQYPQDAVLALTQNHHKQYYEGSEIVVAGRIADNKQSSFKADVQAHGEGQEFSITCLVDEEEMKKLLRERGHMLENHVERLWAYLTIQELLAKRMKVDREERANLSSQALQMSLDYGFVTPLTSMSIRGMADQDGLKPTIDKPSEGIGCREMLGPRRTFVLSALQPSPTHSSSNTQRLPDRVTGVDTDPHFIIHVPQKEDTLCFNINEEPGVILSLVQDPNTGFSVNGQLIGNKARSPGQHDGTYFGRLGIANPATDFQLEVTPQNITLNPGFGGPVFSWRDQAVLRQDGVVVTINKKRNLVVSVDDGGTFEVVLHRVWKGSSVHQDFLGFYVLDSHRMSARTHGLLGQFFHPIGFEVSDIHPGSDPTKPDATMVVRNRRLTVTRGLQKDYSKDPWHGAEVSCWFIHNNGAGLIDGAYTDYIVPDIF

SEQ ID NO: 7324 - protein, 74 aa, Homo sapiens
  VARIANT 1: note = misc_feature - Xaa can be any naturally occurring amino acid
XMKVDREERANLSSQALQMSLDYGFVTPLTSMSIRGMADQDGLKPTIDKPSEDSPPLEMLGPRRTPIPSGCQTE

SEQ ID NO: 7325 - protein, 935 aa, Homo sapiens
MKRLTCFFICFFLSEVSGFEIPINGLSEFVDYEDLVELAPGKFQLVAENRRYQEEVDQVTLYSYKVQSTITSRMATTMIQSKVVNNSPQPQNVVFDVQIPKGAFISNFSMTVDGKTFRSSIKEKTVGRALYAQARAKGKTAGLVRSSALDMENFRTEVNVLPGAKVQFELHYQEVKWRKLGSYEHRIYLQPGRLAKHLEVDVWVIEPQGLRFLHVPDTFEGHFDGVPVISKGQQKAHVSFKPTVAQQRICPNCRETAVDGELVVLYDVKREEKAGELEVFNGYFVHFFAPDNLDPIPKNILFVIDVSGSMWGVKMKQTVEAMKTILDDLRAEDHFSVIDFNQNIRTWRNDLISATKTQVADAKRYIEKIQPSGGTNINEALLRAIFILNEANNLGLLDPNSVSLIILVSDGDPTVGELKLSKIQKNVKENIQDNISLFSLGMGFDVDYDFLKRLSNENHGIAQRIYGNQDTSSQLKKFYNQVSTPLLRNVQFNYPHTSVTDVTQNNFHNYFGGSEIVVAGKFDPAKLDQIESVITATSANTQLVLETLAQMDDLQDFLSKDKHADPDFTRKLWAYLTINQLLAERSLAPTAAAKRRITRSILQMSLDHHIVTPLTSLVIENEAGDERMLADAPPQDPSCCSGALYYGSKVVPDSTPSWANPSPTPVISMLAQGSQVLESTPPPHVMRVENDPHFIIYLPKSQKNICFNIDSEPGKILNLVSDPESGIVVNGQLVGAKKPNNGKLSTYFGKLGFYFQSEDIKIEISTETITLSHGSSTFSLSWSDTAQVTNQRVQISVKKEKVVTITLDKEMSFSVLLHRVWKKHPVNVDFLGIYIPPTNKFSPKAHGLIGQFMQEPKIHIFNERPGKDPEKPEASMEVKGQKLIITRGLQKDYRTDLVFGTDVTCWFVHNSGKGFIDGHYKDYFVPQLYSFLKRP

SEQ ID NO: 7326 - protein, 946 aa, Homo sapiens
MKRLTCFFICFFLSEVSGFEIPINGLSEFVDYEDLVELAPGKFQLVAENRRYQRSLPGESEEMMEEVDQVTLYSYKVQSTITSRMATTMIQSKVVNNSPQPQNVVFDVQIPKGAFISNFSMTVDGKTFRSSIKEKTVGRALYAQARAKGKTAGLVRSSALDMENFRTEVNVLPGAKVQFELHYQEVKWRKLGSYEHRIYLQPGRLAKHLEVDVWVIEPQGLRFLHVPDTFEGHFDGVPVISKGQQKAHVSFKPTVAQQRICPNCRETAVDGELVVLYDVKREEKAGELEVFNGYFVHFFAPDNLDPIPKNILFVIDVSGSMWGVKMKQTVEAMKTILDDLRAEDHFSVIDFNQNIRTWRNDLISATKTQVADAKRYIEKIQPSGGTNINEALLRAIFILNEANNLGLLDPNSVSLIILVSDGDPTVGELKLSKIQKNVKENIQDNISLFSLGMGFDVDYDFLKRLSNENHGIAQRIYGNQDTSSQLKKFYNQVSTPLLRNVQFNYPHTSVTDVTQNNFHNYFGGSEIVVAGKFDPAKLDQIESVITATSANTQLVLETLAQMDDLQDFLSKDKHADPDFTRKLWAYLTINQLLAERSLAPTAAAKRRITRSILQMSLDHHIVTPLTSLVIENEAGDERMLADAPPQDPSCCSGALYYGSKVVPDSTPSWANPSPTPVISMLAQGSQVLESTPPPHVMRVENDPHFIIYLPKSQKNICFNIDSEPGKILNLVSDPESGIVVNGQLVGAKKPNNGKLSTYFGKLGFYFQSEDIKIEISTETITLSHGSSTFSLSWSDTAQVTNQRVQISVKKEKVVTITLDKEMSFSVLLHRVWKKHPVNVDFLGIYIPPTNKFSPKAHGLIGQFMQEPKIHIFNERPGKDPEKPEASMEVKGQKLIITRGLQKDYRTDLVFGTDVTCWFVHNSGKGFIDGHYKDYFVPQLYSFLKRP

SEQ ID NO: 7327 - protein, 237 aa, Homo sapiens
MKRLTCFFICFFLSEVSGFEIPINGLSERSLPGESEEMMEEVDQVTLYSYKVQSTITSRMATTMIQSKVVNNSPQPQNVVFDVQIPKGAFISNFSMTVDGKTFRSSIKEKTVGRALYAQARAKGKTAGLVRSSALDMENFRTEVNVLPGAKVQFELHYQEVKWRKLGSYEHRIYLQPGRLAKHLEVDVWVIEPQGLRFLHVPDTFEGHFDGVPVISKGQQKAHVSFKPTVAQQRICP

SEQ ID NO: 7328 - protein, 698 aa, Homo sapiens
MAFAWWPCLILALLSSLAASGFPRSPFRLLGKRSLPEGVANGIEVYSTKINSKVTSRFAHNVVTMRAVNRADTAKEVSFDVELPKTAFITNFTLTIDGVTYPGNVKEKEVAKKQYEKAVSQGKTAGLVKASGRKLEKFTVSVNVAAGSKVTFELTYEELLKRHKGKYEMYLKVQPKQLVKHFEIEVDIFEPQGISMLDAEASFITNDLLGSALTKSFSGKKGHVSFKPSLDQQRSCPTCTDSLLNGDFTITYDVNRESPGNVQIVNGYFVHFFAPQGLPVVPKNVAFVIDISGSMAGRKLEQTKEALLRILEDMQEEDYLNFILFSGDVSTWKEHLVQATPENLQEARTFVKSMEDKGMTNINDGLLRGISMLNKAREEHRIPERSTSIVIMLTDGDANVGESRPEKIQENVRNAIGGKFPLYNLGFGNNLNYNFLENMALENHGFARRIYEDSDADLQLQGFYEEVANPLLTGVEMEYPENAILDLTQNTYQHFYDGSEIVVAGRLVDEDMNSFKADVKGHGATNDLTFTEEVTTEKITLWNRAVPSTFSWLDTVTVTQDGLSMMINRKNMVVSFGDGVTFVVVLHQVWKKHPVHRDFLGFYVVDSHRMSAQTHGLLGQFFQPFDFKVSDIRPGSDPTKPDATLVVKNHQLIVTRGSQKDYRKDASIGTKVVCWFVHNNGEGLIDGVHTDYIVPNLF

SEQ ID NO: 7329 - protein, 890 aa, Homo sapiens
MAFAWWPCLILALLSSLAASGFPRSPFRLLGKRSLPEGVANGIEVYSTKINSKVTSRFAHNVVTMRAVNRADTAKEVSFDVELPKTAFITNFTLTIDGVTYPGNVKEKEVAKKQYEKAVSQGKTAGLVKASGRKLEKFTVSVNVAAGSKVTFELTYEELLKRHKGKYEMYLKVQPKQLVKHFEIEVDIFEPQGISMLDAEASFITNDLLGSALTKSFSGKKGHVSFKPSLDQQRSCPTCTDSLLNGDFTITYDVNRESPGNVQIVNGYFVHFFAPQGLPVVPKNVAFVIDISGSMAGRKLEQTKEALLRILEDMQEEDYLNFILFSGDVSTWKEHLVQATPENLQEARTFVKSMEDKGMTNINDGLLRGISMLNKAREEHRIPERSTSIVIMLTDGDANVGESRPEKIQENVRNAIGGKFPLYNLGFGNNLNYNFLENMALENHGFARRIYEDSDADLQLQGFYEEVANPLLTGVEMEYPENAILDLTQNTYQHFYDGSEIVVAGRLVDEDMNSFKADVKGHGATNDLTFTEEVDMKEMEKALQERDYIFGNYIERLWAYLTIEQLLEKRKNAHGEEKENLTARALDLSLKYHFVTPLTSMVVTKPEDNEDERAIADKPGEDAEATPVSPAMSYLTSYQPPQNPYYYVDGDPHFIIQIPEKDDALCFNIDEAPGTVLRLIQDAVTGLTVNGQITGDKRGSPDSKTRKTYFGKLGIANAQMDFQVEVTTEKITLWNRAVPSTFSWLDTVTVTQDGLSMMINRKNMVVSFGDGVTFVVVLHQVWKKHPVHRDFLGFYVVDSHRMSAQTHGLLGQFFQPFDFKVSDIRPGSDPTKPDATLVVKNHQLIVTRGSQKDYRKDASIGTKVVCWFVHNNGEGLIDGVHTDYIVPNLF

SEQ ID NO: 7330 - protein, 670 aa, Homo sapiens [sequence omitted]

SEQ ID NO: 7331 - protein, 930 aa, Homo sapiens
MKPPRPVRTCSKVLVLLSLLAIHQTTTAEKNGIDIYSLTVDSRVSSRFAHTVVTSRVVNRANTVQEATFQMELPKKAFITNFSMIIDGMTYPGIIKEKAEAQAQYSAAVAKGKSAGLVKATGRNMEQFQVSVSVAPNAKITFELVYEELLKRRLGVYELLLKVRPQQLVKHLQMDIHIFEPQGISFLETESTFMTNQLVDALTTWQNKTKAHIRFKPTLSQQQKSPEQQETVLDGNLIIRYDVDRAISGGSIQIENGYFVHYFAPEGLTTMPKNVVFVIDKSGSMSGRKIQQTREALIKILDDLSPRDQFNLIVFSTEATQWRPSLVPASAENVNKARSFAAGIQALGGTNINDAMLMAVQLLDSSNQEERLPEGSVSLIILLTDGDPTVGETNPRSIQNNVREAVSGRYSLFCLGFGFDVSYAFLEKLALDNGGLARRIHEDSDSALQLQDFYQEVANPLLTAVTFEYPSNAVEEVTQNNFRLLFKGSEMVVAGKLQDRGPDVLTATVSGKLPTQNITFQTESSVAEQEAEFQSPKYIFHNFMERLWAYLTIQQLLEQTVSASDADQQALRNQALNLSLAYSFVTPLTSMVVTKPDDQEQSQVAEKPMEGESRNRNVHSGSTFFKYYLQGAKIPKPEASFSPRRGWNRQAGAAGSRMNFRPGVLSSRQLGLPGPPDVPDHAAYHPFRRLAILPASAPPATSNPDPAVSRVMNMKIEETTMTTQTPAPIQAPSAILPLPGQSVERLCVDPRHRQGPVNLLSDPEQGVEVTGQYEREKAGFSWIEVTFKNPLVWVHASPEHVVVTRNRRSSAYKWKETLFSVMPGLKMTMDKTGLLLLSDPDKVTIGLLFWDGRGEGLRLLLRDTDRFSSHVGGTLGQFYQEVLWGSPAASDDGRRTLRVQGNDHSATRERRLDYQEGPPGVEISCWSVEL

SEQ ID NO: 7332 - protein, 900 aa, Homo sapiens
MKPPRPVRTCSKVLVLLSLLAIHQTTTAEKNGIDIYSLTVDSRVSSRFAHTVVTSRVVNRANTVQEATFQMELPKKAFITNFSMIIDGMTYPGIIKEKAEAQAQYSAAVAKGKSAGLVKATGRNMEQFQVSVSVAPNAKITFELVYEELLKRRLGVYELLLKVRPQQLVKHLQMDIHIFEPQGISFLETESTFMTNQLVDALTTWQNKTKAHIRFKPTLSQQQKSPEQQETVLDGNLIIRYDVDRAISGGSIQIENGYFVHYFAPEGLTTMPKNVVFVIDKSGSMSGRKIQQTREALIKILDDLSPRDQFNLIVFSTEATQWRPSLVPASAENVNKARSFAAGIQALGGTNINDAMLMAVQLLDSSNQEERLPEGSVSLIILLTDGDPTVGETNPRSIQNNVREAVSGRYSLFCLGFGFDVSYAFLEKLALDNGGLARRIHEDSDSALQLQDFYQEVANPLLTAVTFEYPSNAVEEVTQNNFRLLFKGSEMVVAGKLQDRGPDVLTATVSGKLPTQNITFQTESSVAEQEAEFQSPKYIFHNFMERLWAYLTIQQLLEQTVSASDADQQALRNQALNLSLAYSFVTPLTSMVVTKPDDQEQSQVAEKPMEGESRNRNVHSAGAAGSRMNFRPGVLSSRQLGLPGPPDVPDHAAYHPFRRLAILPASAPPATSNPDPAVSRVMNMKIEETTMTTQTPAPIQAPSAILPLPGQSVERLCVDPRHRQGPVNLLSDPEQGVEVTGQYEREKAGFSWIEVTFKNPLVWVHASPEHVVVTRNRRSSAYKWKETLFSVMPGLKMTMDKTGLLLLSDPDKVTIGLLFWDGRGEGLRLLLRDTDRFSSHVGGTLGQFYQEVLWGSPAASDDGRRTLRVQGNDHSATRERRLDYQEGPPGVEISCWSVEL

SEQ ID NO: 7333 - protein, 935 aa, Homo sapiens
MKPPRPVRTCSKVLVLLSLLAIHQTTTAEKNGIDIYSLTVDSRVSSRFAHTVVTSRVVNRANTVQEATFQMELPKKAFITNFSMIIDGMTYPGIIKEKAEAQAQYSAAVAKGKSAGLVKATGRNMEQFQVSVSVAPNAKITFELVYEELLKRRLGVYELLLKVRPQQLVKHLQMDIHIFEPQGISFLETESTFMTNQLVDALTTWQNKTKAHIRFKPTLSQQQKSPEQQETVLDGNLIIRYDVDRAISGGSIQIENGYFVHYFAPEGLTTMPKNVVFVIDKSGSMSGRKIQQTREALIKILDDLSPRDQFNLIVFSTEATQWRPSLVPASAENVNKARSFAAGIQALGGTNINDAMLMAVQLLDSSNQEERLPEGSVSLIILLTDGDPTVGETNPRSIQNNVREAVSGRYSLFCLGFGFDVSYAFLEKLALDNGGLARRIHEDSDSALQLQDFYQEVANPLLTAVTFEYPSNAVEEVTQNNFRLLFKGSEMVVAGKLQDRGPDVLTATVSGKLPTQNITFQTESSVAEQEAEFQSPKYIFHNFMERLWAYLTIQQLLEQTVSASDADQQALRNQALNLSLAYSFVTPLTSMVVTKPDDQEQSQVAEKPMEGESRNRNVHSGSTFFKYYLQGAKIPKPGLDHTEASFSPRRGWNRQAGAAGSRMNFRPGVLSSRQLGLPGPPDVPDHAAYHPFRRLAILPASAPPATSNPDPAVSRVMNMKIEETTMTTQTPAPIQAPSAILPLPGQSVERLCVDPRHRQGPVNLLSDPEQGVEVTGQYEREKAGFSWIEVTFKNPLVWVHASPEHVVVTRNRRSSAYKWKETLFSVMPGLKMTMDKTGLLLLSDPDKVTIGLLFWDGRGEGLRLLLRDTDRFSSHVGGTLGQFYQEVLWGSPAASDDGRRTLRVQGNDHSATRERRLDYQEGPPGVEISCWSVEL

SEQ ID NO: 7334 - protein, 719 aa, Homo sapiens
  VARIANT 1: note = misc_feature - Xaa can be any naturally occurring amino acid
XVSVAPNAKITFELVYEELLKRRLGVYELLLKVRPQQLVKHLQMDIHIFEPQGISFLETESTFMTNQLVDALTTWQNKTKQKSPEQQETVLDGNLIIRYDVDRAISGGSIQIENGYFVHYFAPEGLTTMPKNVVFVIDKSGSMSGRKIQQTREALIKILDDLSPRDQFNLIVFSTEATQWRPSLVPASAENVNKARSFAAGIQALGGTNINDAMLMAVQLLDSSNQEERLPEGSVSLIILLTDGDPTVGETNPRSIQNNVREAVSGRYSLFCLGFGFDVSYAFLEKLALDNGGLARRIHEDSDSALQLQDFYQEVANPLLTAVTFEYPSNAVEEVTQNNFRLLFKGSEMVVAGKLQDRGPDVLTATVSGKLPTQNITFQTESSVAEQEAEFQSPKYIFHNFMERLWAYLTIQQLLEQTVSASDADQQALRNQALNLSLAYSFVTPLTSMVVTKPDDQEQSQVAEKPMEGESRNRNVHSAGAAGSRMNFRPGVLSSRQLGLPGPPDVPDHAAYHPFRRLAILPASAPPATSNPDPAVSRVMNMKIEETTMTTQTPGVEVTGQYEREKAGFSWIEVTFKNPLVWVHASPEHVVVTRNRRSSAYKWKETLFSVMPGLKMTMDKTGLLLLSDPDKVTIGLLFWDGRGEGLRLLLRDTDRFSSHVGGTLGQFYQEVLWGSPAASDDGRRTLRVQGNDHSATRERRLDYQEGPPGVEISCWSVEL

SEQ ID NO: 7335 - protein, 942 aa, Homo sapiens
MLLLLGLCLGLSLCVGSQEEAQSWGHSSEQDGLRVPRQVRLLQRLKTKPLMTEFSVKSTIISRYAFTTVSCRMLNRASEDQDIEFQMQIPAAAFITNFTMLIGDKVYQGEITEREKKSGDRVKEKRNKTTEENGEKGTEIFRASAVIPSKDKAAFFLSYEELLQRRLGKYEHSISVRPQQLSGRLSVDVNILESAGIASLEVLPLHNSRQRGSGRGEDDSGPPPSTVINQNETFANIIFKPTVVQQARIAQNGILGDFIIRYDVNREQSIGDIQVLNGYFVHYFAPKDLPPLPKNVVFVLDSSASMVGTKLRQTKDALFTILHDLRPQDRFSIIGFSNRIKVWKDHLISVTPDSIRDGKVYIHHMSPTGGTDINGALQRAIRLLNKYVAHSGIGDRSVSLIVFLTDGKPTVGETHTLKILNNTREAARGQVCIFTIGIGNDVDFRLLEKLSLENCGLTRRVHEEEDAGSQLIGFYDEIRTPLLSDIRIDYPPSSVVQATKTLFPNYFNGSEIIIAGKLVDRKLDHLHVEVTASNSKKFIILKTDVPVRPQKAGKDVTGSPRPGGDGEGDTNHIERLWSYLTTKELLSSWLQSDDEPEKERLRQRAQALAVSYRFLTPFTSMKLRGPVPRMDGLEEAHGMSAAMGPEPVVQSVRGAGTQPGPLLKKPYQPRIKISKTSVDGDPHFVVDFPLSRLTVCFNIDGQPGDILRLVSDHRDSGVTVNGELIGAPAPPNGHKKQRTYLRTITILINKPERSYLEITPSRVILDGGDRLVLPCNQSVVVGSWGLEVSVSANANVTVTIQGSIAFVILIHLYKKPAPFQRHHLGFYIANSEGLSSNCHGLLGQFLNQDARLTEDPAGPSQNLTHPLLLQVGEGPEAVLTVKGHQVPVVWKQRKIYNGEEQIDCWFARNNAAKLIDGEYKDYLASHPFDTGMTLGRGMSREL

SEQ ID NO: 7336 - protein, 702 aa, Homo sapiens
MLLLLGLCLGLSLCVGSQEEAQSWGHSSEQDGLRVPRQVRLLQRLKTKPLMTEFSVKSTIISRYAFTTVSCRMLNRASEDQDIEFQMQIPAAAFITNFTMLIGDKVYQGEITEREKKSGDRVKEKRNKTTEENGEKGTEIFRASAVIPSKDKAAFFLSYEELLQRRLGKYEHSISVRPQQLSGRLSVDVNILESAGIASLEVLPLHNSRQRGSGRGEDDSGPPPSTVINQNETFANIIFKPTVVQQARIAQNGILGDFIIRYDVNREQSIGDIQVLNGYFVHYFAPKDLPPLPKNVVFVLDSSASMVGTKLRQTKDALFTILHDLRPQDRFSIIGFSNRIKVWKDHLISVTPDSIRDGKVYIHHMSPTGGTDINGALQRAIRLLNKYVAHSGIGDRSVSLIVFLTDGKPTVGETHTLKILNNTREAARGQVCIFTIGIGNDVDFRLLEKLSLENCGLTRRVHEEEDAGSQLIGFYDEIRTPLLSDIRIDYPPSSVVQATKTLFPNYFNGSEIIIAGKLVDRKLDHLHVEVTASNSKKFIILKTDVPVRPQKAGKDVTGSPRPGGDGEGDTNHIERLWSYLTTKELLSSWLQSDDEPEKERLRQRAQALAVSYRFLTPFTSMKLRGPVPRMDGLEEAHGMSAAMGPEPVVQSVRGAGTQPGPLLKKPYQPRIKISKTSVRGFRREEQIFSNVMKFPFASILEL

SEQ ID NO: 7337 - protein, 728 aa, Homo sapiens
MRNYDSGPPPSTVINQNETFANIIFKPTVVQQARIAQNGILGDFIIRYDVNREQSIGDIQVLNGYFVHYFAPKDLPPLPKNVVFVLDSSASMVGTKLRQTKDALFTILHDLRPQDRFSIIGFSNRIKVWKDHLISVTPDSIRDGKVYIHHMSPTGGTDINGALQRAIRLLNKYVAHSGIGDRSVSLIVFLTDGKPTVGETHTLKILNNTREAARGQVCIFTIGIGNDVDFRLLEKLSLENCGLTRRVHEEEDAGSQLIGFYDEIRTPLLSDIRIDYPPSSVVQATKTLFPNYFNGSEIIIAGKLVDRKLDHLHVEVTASNSKKFIILKTDVPVRPQKAGKDVTGSPRPGGDGEGDTNHIERLWSYLTTKELLSSWLQSDDEPEKERLRQRAQALAVSYRFLTPFTSMKLRGPVPRMDGLEEAHGMSAAMGPEPVVQSVRGAGTQPGPLLKKPYQPRIKISKTSVDGDPHFVVDFPLSRLTVCFNIDGQPGDILRLVSDHRDSGVTVNGELIGAPAPPNGHKKQRTYLRTITILINKPERSYLEITPSRVILDGGDRLVLPCNQSVVVGSWGLEVSVSANANVTVTIQGSIAFVILIHLYKKPAPFQRHHLGFYIANSEGLSSNCHGLLGQFLNQDARLTEDPAGPSQNLTHPLLLQVGEGPEAVLTVKGHQVPVVWKQRKIYNGEEQIDCWFARNNAAKLIDGEYKDYLASHPFDTGMTLGRGMSREL

SEQ ID NO: 7338 - protein, 119 aa, Homo sapiens
  VARIANT 1: note = misc_feature - Xaa can be any naturally occurring amino acid
XPSTVINQNETFANIIFKPTVVQQARIAQNGILGDFIIRYDVNREQSIGDIQVLNGYFVHYFAPKDLPPLPKNVVFVLDSSASMVGTKLRQDIGFSLAVQNWVPKGYLDISCVTLQVHV

SEQ ID NO: 7339 - protein, 1313 aa, Homo sapiens
MSGWRYLICVSFLLTILLELTYQGPPVPASSSTKLLMTSYSMRSTVVSRYAHTLVTSVLFNPHAEAHEAIFDLDLPHLAFISNFTMTINNKVYIAEVKEKHQAKKIYEEAHQQGKTAAHVGIRDRESEKFRISTSLAAGTEVTFSLAYEELLQRHQGQYQLVVSLRPGQLVKRLSIEVTVSERTGISYVHIPPLRTGRLRTNAHASEVDSPPSTRIERGETCVRITYCPTLQDQSSISGSGIMADFLVQYDVVMEDIIGDVQIYDDYFIHYFAPRGLPPMEKNVVFVIDVSSSMFGTKMEQTKTAMNVILSDLQANDYFNIISFSDTVNVWKAGGSIQATIQNVHSAKDYLHCMEADGWTDVNSALLAAASVLNHSNQEPGRGPSVGRIPLIIFLTDGEPTAGVTTPSVILSNVRQALGHRVSLFSLAFGDDADFTLLRRLSLENRGIARRIYEDTDAALQLKGLYEEISMPLLADVRLNYLGGLVGASPWAVFPNYFGGSELVVAGQVQPGKQELGIHLAARGPKDQLLVAHHSEGATNNSQKAFGCPGEPAPNVAHFIRRLWAYVTIGELLDAHFQARDTTTRHLLAAKVLNLSLEYNFVTPLTSLVMVQPKQASEETRRQTSTSAGPDTIMPSSSSRHGLGVSTAQPALVPKVISPKSRPVKPKFYLSSTTTASTKKMLSSKELEPLGESPHTLSMPTYPKAKIPAQQDSGTLAQPTLRTKPTILVPSNSGTLLPLKPGSLSHQNPDILPTNSRTQVPPVKPGIPASPKADTVKCVTPLHSKPGAPSHPQLGALTSQAPKGLPQSRPGVSTLQVPKYPLHTRPRVPAPKTRNNMPHLGPGILLSKTPKILLSLKPSAPPHQISTSISLSKPETPNPHMPQTPLPPRPDRPRPPLPESLSTFPNTISSSTGPSSTTTTSVLGEPLPMPFTPTLPPGRFWHQYDLLPGPQRTRQVLGPSRPGVPTMSLLNSSRPTPEGSPPNLPILLPSSILPEAISLLLLPEELELLSESMVESKFVESLNPPAFYTFLTPDEDGSPNWDGNSEEILGGAGGSMESQGSSVGLAKGTLPSIFTFSSSVDGDPHFVIQIPHSEEKICFTLNGHPGDLLQLIEDPKAGLHVSGKLLGAPPRPGHKDQTRTYFQIITVTTDKPRAYTITISRSSISLRGEGTLRLSWDQPALLKRPQLELYVAAAARLTLRLGPYLEFLVLRHRYRHPSTLQLPHLGFYVANGSGLSPSARGLIGQFQHADIRLVTGPMGPCLRRHHGPDVPVILGKRLLKDSPRLLPRWASCWLVKRSHVELLLGHPYLSYVL

SEQ ID NO: 7340 - protein, 313 aa, Homo sapiens
MNQLSFLLFLIATTRGWSTDEANTYFKEWTCSSSPSLPRSCKEIKDECPSAFDGLYFLRTENGVIYQTFCDMTSGGGGWTLVASVHENDMRGKCTVGDRWSSQQGSKAVYPEGDGNWANYNTFGSAEAATSDDYKNPGYYDIQAKDLGIWHVPNKSPMQHWRNSSLLRYRTDTGFLQTLGHNLFGIYQKYPVKYGEGKCWTDNGPVIPVVYDFGDAQKTASYYSPYGQREFTAGFVQFRVFNNERAANALCAGMRVTGCNTEHHCIGGGGYFPEASPQQCGDFSGFDWSGYGTHVGYSSSREITEAAVLLFYR

SEQ ID NO: 7341 - protein, 325 aa, Homo sapiens
MLSMLRTMTRLCFLLFFSVATSGCSAAAASSLEMLSREFETCAFSFSSLPRSCKEIKERCHSAGDGLYFLRTKNGVVYQTFCDMTSGGGGWTLVASVHENDMRGKCTVGDRWSSQQGNKADYPEGDGNWANYNTFGSAEAATSDDYKNPGYYDIQAKDLGIWHVPNKSPMQHWRNSALLRYRTNTGFLQRLGHNLFGIYQKYPVKYRSGKCWNDNGPAIPVVYDFGDAKKTASYYSPYGQREFVAGFVQFRVFNNERAANALCAGIKVTGCNTEHHCIGGGGFFPQGKPRQCGDFSAFDWDGYGTHVKSSCSREITEAAVLLFYR

SEQ ID NO: 7342 - protein, 243 aa, Homo sapiens
MACWWPLLLELWTVMPTWAGDELLNICMNAKHHKRVPSPEDKLYEECIPWKDNACCTLTTSWEAHLDVSPLYNFSLFHCGLLMPGCRKHFIQAICFYECSPNLGPWIQPVAPSGQGERVVNVPLCQEDCEEWWEDCRMSYTCKSNWRGGWDWSQGKNRCPKGAQCLPFSHYFPTPADLCEKTWSNSFKASPERRNSGRCLQKWFEPAQGNPNVAVARLFASSAPSWELSYTIMVCSLFLPFLS

SEQ ID NO: 7343 - protein, 250 aa, Homo sapiens
MACWWPLLLELWTVMPTWAGDELLNICMNAKHHKRVPSPEDKLYEECIPWKDNACCTLTTSWEAHLDVSPLYNFSLFHCGLLMPGCRKHFIQAICFYECSPNLGPWIQPVGSLGWEVAPSGQGERVVNVPLCQEDCEEWWEDCRMSYTCKSNWRGGWDWSQGKNRCPKGAQCLPFSHYFPTPADLCEKTWSNSFKASPERRNSGRCLQKWFEPAQGNPNVAVARLFASSAPSWELSYTIMVCSLFLPFLS

SEQ ID NO: 7344 - protein, 184 aa, Homo sapiens
MALLLCLVCLTAALAHGCLHCHSNFSKKFSFYRHHVNFKSWWVGDIPVSGALLTDWSDDTMKELHLAIPAKITREKLDQVATAVYQMMDQLYQGKMYFPGKGRETEAGPPHPGTPRPPPEPDLLLPRRLRVFPQRAAKHLPGAGAPHPERHHRKPHRLSAPLWSSAQWKSAVQGLLNYINNWHK

SEQ ID NO: 7345 - protein, 232 aa, Homo sapiens
MALLLCLVCLTAALAHGCLHCHSNFSKKFSFYRHHVNFKSWWVGDIPVSGALLTDWSDDTMKELHLAIPAKITREKLDQVATAVYQMMDQLYQGKMYFPGYFPNELRNIFREQVHLIQNAIIESRIDCQHRCGIFQYETISCNNCTDSHVACFGYNCESSAQWKSAVQGLLNYINNWHKQDTSMRPRSSAFSWPGTHRATPAFLVSPALRCLEPPHLANLTLEDAAECLKQH

SEQ ID NO: 7346 - protein, 214 aa, Homo sapiens
MALLLCLVCLTAALAHGCLHCHSNFSKKFSFYRHHVNFKSWWVGDIPVSGALLTDWSDDTMKELHLAIPAKITREKLDQVATAVYQMMDQLYQGKMYFPGYFPNELRNIFREQVHLIQNAIIESRIDCQHRCGIFQYETISCNNCTDSHVACFGYNCESSAQWKSAVQGLLNYINNWHKQDTSMSLVSPALRCLEPPHLANLTLEDAAECLKQH

SEQ ID NO: 7347 - protein, 208 aa, Homo sapiens
MALLLCLVCLTAALAHGCLHCHSNFSKKFSFYRHHVNFKSWWVGDIPVSGALLTDWSDDTMKELHLAIPAKITREKLDQVATAVYQMMDQLYQGKMYFPGYFPNELRNIFREQVHLIQNAIIESRIDCQHRCGIFQYETISCNNCTDSHVACFGYNCESSAQWKSAVQGLLNYINNWHNLVSPALRCLEPPHLANLTLEDAAECLKQH

SEQ ID NO: 7348 - protein, 152 aa, Homo sapiens
VSGALLTDWSDDTMKELHLAIPAKITREKLDQVATAVYQMMDQLYQGKMYFPGYFPNELRNIFREQVHLIQNAIIESIFQYETISCNNCTDSHVACFGYNCESSAQWKSAVQGLLNYINNWHNLVSPALRCLEPPHLANLTLEDAAECLKQH

SEQ ID NO: 7349 - protein, 152 aa, Homo sapiens
  VARIANT 1: note = misc_feature - Xaa can be any naturally occurring amino acid
XPQQLLQEVLLLPPPCELQVLVGGRHPRVRGAAHRLERRHDEGAAPGHPRQDHPGEAGPSGDSSVPDDGSAVPGEDVLPRVFPQRAAKHLPGAGAPHPERHHRKPHRLSAPLWSSAQWKSAVQGLLNYINNWHKPRSSAFSWPGTHRATPAL

SEQ ID NO: 7350 - protein, 138 aa, Homo sapiens
  VARIANT 1: note = misc_feature - Xaa can be any naturally occurring amino acid
XSALPQQLLQEVLLLPPPCELQVLVGGRHPRVRGAAHRLERRHDEGAAPGHPRQDHPGEAGPSGDSSVPDDGSAVPGEDVLPRVFPQRAAKHLPGAGAPHPERHHRKPHRLSAPLWHLPVRDHLLQQLHRLARRLLWL

SEQ ID NO: 7351 - protein, 155 aa, Homo sapiens
MFCPLKLILLPVLLDYSLGLNDLNVSPPELTVHVGDSALMGCVFQSTEDKCIFKIDWTLSPGEHAKDEYVLYYYSNLSVPIGRFQNRVHLMGDILCNDGSLLLQDVQEADQGTYICEIRLKGESQVFKKAVVLHVLPEEPKELMVHVGGLIQMGC

SEQ ID NO: 7352 - protein, 383 aa, Homo sapiens
MFCPLKLILLPVLLDYSLGLNDLNVSPPELTVHVGDSALMGCVFQSTEDKCIFKIDWTLSPGEHAKDEYVLYYYSNLSVPIGRFQNRVHLMGDILCNDGSLLLQDVQEADQGTYICEIRLKGESQVFKKAVVLHVLPEEPKELMVHVGGLIQMGCVFQSTEVKHVTKEEIVFRYYHKLRMSVEYSQSWGHFQNRVNLVGDIFRNDGSIMLQGVRESDGGNYTCSIHLGNLVFKKTIVLHVSPEEPRTLVTPAALRPLVLGGNQLVIIVGIVCATILLLPVLILIVKKTCGNKSSVNSTVLVKNTKKTNPEIKEKPCHFERCEGEKHIYSPIIVREVIEEEEPSEKSEATYMTMHPVWPSLRSDRNNSLEKKSGGGMPKTQQAF

SEQ ID NO: 7353 - protein, 394 aa, Homo sapiens
MFCPLKLILLPVLLDYSLGLNDLNVSPPELTVHVGDSALMGCVFQSTEDKCIFKIDWTLSPGEHAKDEYVLYYYSNLSVPIGRFQNRVHLMGDILCNDGSLLLQDVQEADQGTYICEIRLKGESQVFKKAVVLHVLPEEPKELMVHVGGLIQMGCVFQSTEVKHVTKVEWIFSGRRAKEEIVFRYYHKLRMSVEYSQSWGHFQNRVNLVGDIFRNDGSIMLQGVRESDGGNYTCSIHLGNLVFKKTIVLHVSPEEPRTLVTPAALRPLVLGGNQLVIIVGIVCATILLLPVLILIVKKTCGNKSSVNSTVLVKNTKKTNPEIKEKPCHFERCEGEKHIYSPIIVREVIEEEEPSEKSEATYMTMHPVWPSLRSDRNNSLEKKSGGGMPKTQQAF

SEQ ID NO: 7354 - protein, 66 aa, Homo sapiens
MFCPLKLILLPVLLEHRRQMYIQDRLDSVTRRARQGRICAILLLQSQCAYWALPEPRTLDGGHLMQ

SEQ ID NO: 7355 - protein, 121 aa, Homo sapiens
MGCVFQSTEDKCIFKIDWTLSPGEHAKDEYVLYYYSNLSVPIGRFQNRVHLMGDILCNDGSLLLQDVQEADQGTYICEIRLKGESQVFKKAVVLHVLPEEPKELMVHVGGLIQMGCVFQST

SEQ ID NO: 7356 - protein, 220 aa, Homo sapiens
MGCVFQSTEDKCIFKIDWTLSPGEHAKDEYVLYYYSNLSVPIGRFQNRVHLMGDILCNDGSLLLQDVQEADQGTYICEIRLKGESQVFKKAVVLHVLPEEPKELMVHVGGLIQMGCVFQSTEVKHVTKVEWIFSGRRAKEEIVFRYYHKLRMSVEYSQSWGHFQNRVNLVGDIFRNDGSIMLQGVRESDGGNYTCSIHLGNLVFKKTIVLHVSPEEPRKW

SEQ ID NO: 7357 - protein, 305 aa, Homo sapiens
MGCVFQSTEDKCIFKIDWTLSPGEHAKDEYVLYYYSNLSVPIGRFQNRVHLMGDILCNDGSLLLQDVQEADQGTYICEIRLKGESQVFKKAVVLHVLPEEPKELMVHVGGLIQMGCVFQSTEVKHVTKVEWIFSGRRAKEEIVFRYYHKLRMSVEYSQSWGHFQNRVNLVGDIFRNDGSIMLQGVRESDGGNYTCSIHLGNLVFKKTIVLHVSPEEPRTLVTPAALRPLVLGGNQLVIIVGIVCATILLLPVLILIVKKTCGNKSSVNSTVLVKNTKKTNPEIKEKPCHFERCEGEVNTRFSLKH

SEQ ID NO: 7358 - protein, 355 aa, Homo sapiens
MGCVFQSTEDKCIFKIDWTLSPGEHAKDEYVLYYYSNLSVPIGRFQNRVHLMGDILCNDGSLLLQDVQEADQGTYICEIRLKGESQVFKKAVVLHVLPEEPKELMVHVGGLIQMGCVFQSTEVKHVTKVEWIFSGRRAKEEIVFRYYHKLRMSVEYSQSWGHFQNRVNLVGDIFRNDGSIMLQGVRESDGGNYTCSIHLGNLVFKKTIVLHVSPEEPRTLVTPAALRPLVLGGNQLVIIVGIVCATILLLPVLILIVKKTCGNKSSVNSTVLVKNTKKTNPEIKEKPCHFERCEGEKHIYSPIIVREVIEEEEPSEKSEATYMTMHPVWPSLRSDRNNSLEKKSGGGMPKTQQAF

SEQ ID NO: 7359 - protein, 384 aa, Homo sapiens
MVSGDYSLGLNDLNVSPPELTVHVGDSALMGCVFQSTEDKCIFKIDWTLSPGEHAKDEYVLYYYSNLSVPIGRFQNRVHLMGDILCNDGSLLLQDVQEADQGTYICEIRLKGESQVFKKAVVLHVLPEEPKELMVHVGGLIQMGCVFQSTEVKHVTKVEWIFSGRRAKEEIVFRYYHKLRMSVEYSQSWGHFQNRVNLVGDIFRNDGSIMLQGVRESDGGNYTCSIHLGNLVFKKTIVLHVSPEEPRTLVTPAALRPLVLGGNQLVIIVGIVCATILLLPVLILIVKKTCGNKSSVNSTVLVKNTKKTNPEIKEKPCHFERCEGEKHIYSPIIVREVIEEEEPSEKSEATYMTMHPVWPSLRSDRNNSLEKKSGGGMPKTQQAF

SEQ ID NO: 7360 - protein, 70 aa, Homo sapiens
MKNHLLFWGVLAVFIKAVHVKAQEDERIVLVDNKCKCARITSRIIRSSEDPNEDIVERNIRIIVPLNNRE

SEQ ID NO: 7361 - protein, 159 aa, Homo sapiens
MKNHLLFWGVLAVFIKAVHVKAQEDERIVLVDNKCKCARITSRIIRSSEDPNEDIVERNIRIIVPLNNRENISDPTSPLRTRFVYHLSDLCKKCDPTEVELDNQIVTATQSNICDEDSATETCYTYDRNKCYTAVVPLVYGGETKMVETALTPDACYPD

SEQ ID NO: 7362 - protein, 159 aa, Homo sapiens; identical to SEQ ID NO: 7361

SEQ ID NO: 7363 - protein, 159 aa, Homo sapiens; identical to SEQ ID NO: 7361

SEQ ID NO: 7364 - protein, 158 aa, Homo sapiens
MKNHLLFWGVLAVFIKAVHVKENGIHSEFRAQEDERIVLVDNKCKCARITSRIIRSSEDPNEDIVERNIRIIVPLNNRENISDPTSPLRTRFVYHLSDLCKKCDPTEVELDNQIVTATQSNICDEDSATETCYTYDRNKCYTAVVPLVYGGETKMVET

SEQ ID NO: 7365 - protein, 157 aa, Homo sapiens
MKNHLLFWGVLAVFIKAVHVKGSRDSSASASRVAGITAQEDERIVLVDNKCKCARITSRIIRSSEDPNEDIVERNIRIIVPLNNRENISDPTSPLRTRFVYHLSDLCKKCDPTEVELDNQIVTATQSNICDEDSATETCYTYDRNKCYTAVVPLVYG

SEQ ID NO: 7366 - protein, 285 aa, Homo sapiens
MAGGWAQGSRRAARLPEGGRLMAPASRLLALWALAAVALPGSGAEGDGGWRPGGPGAVAEEERCTVERRADLTYAEFVQQYAFVRPVILQGLTDNSRFRALCSRDRLLASFGDRVVRLSTANTYSYHKVDLPFQEYVEQLLHPQDPTSLGNDTLYFFGDNNFTEWASLFRHYSPPPFGLLGTAPAYSFGIAGAGSGVPFHWHGPGYSEVIYGRKRWFLYPPEKTPEFHPNKTTLAWLRDTYPALPPSARPLECTIRAGEVLYFPDRWWHATLNLDTSVFISTFLG

SEQ ID NO: 7367 - protein, 264 aa, Homo sapiens
MAPASRLLALWALAAVALPGSGAEGDGGWRPGGPGAVAEEERCTVERRADLTYAEFVQQYAFVRPVILQGLTDNSRFRALCSRDRLLASFGDRVVRLSTANTYSYHKVDLPFQEYVEQLLHPQDPTSLGNDTLYFFGDNNFTEWASLFRHYSPPPFGLLGTAPAYSFGIAGAGSGVPFHWHGPGYSEVIYGRKRWFLYPPEKTPEFHPNKTTLAWLRDTYPALPPSARPLECTIRAGEVLYFPDRWWHATLNLDTSVFISTFLG

SEQ ID NO: 7368 - protein, 219 aa, Homo sapiens
MAPASRLLALWALAAVALPGSGAEGDGGWRPGGPGAVAEEERCTVERRADLTYAEFVQQYAFVRPVILQGLTDNSRFRALCSRDRLLASFGDRVVRLSTANTYSYHKVDLPFQEYVEQLLHPQDPTSLGNDTLYFFGDNNFTEWASLFRHYSPPPFGLLGTAPAYSFGIAGAGSGVPFHWHGPGYSEVIYGRKVLYFPDRWWHATLNLDTSVFISTFLG

SEQ ID NO: 7369 - protein, 234 aa, Homo sapiens
MAPASRLLALWALAAVALPGSGAEGDGGWYAFVRPVILQGLTDNSRFRALCSRDRLLASFGDRVVRLSTANTYSYHKVDLPFQEYVEQLLHPQDPTSLGNDTLYFFGDNNFTEWASLFRHYSPPPFGLLGTAPAYSFGIAGAGSGVPFHWHGPGYSEVIYGRKRWFLYPPEKTPEFHPNKTTLAWLRDTYPALPPSARPLECTIRAGEVLYFPDRWWHATLNLDTSVFISTFLG

SEQ ID NO: 7370 - protein, 81 aa, Homo sapiens
  VARIANT 1: note = misc_feature - Xaa can be any naturally occurring amino acid
XWTCPSRSMWSSCCTPRTPPPWAMTPCTSSGTTTSPSGPLSFGTTPHPHLACWEPLQLTALESQELARGCPSTGMDPGTQK

SEQ ID NO: 7371 - protein, 331 aa, Homo sapiens
MSMTTRAWEELDGGLGSCQALEDHSALAETQEDRASATPRLADSGSVPHDSQVAEGPSVDTRPKKMEKEPAARGTPGTGKERLKAGASPRSVPARKKAQTAPPLQPPPPPPALSEELPWGDLSLNKCLVLASLVALLGSAFQLCRDAVPGEAALQARVPEPWVPPSSAPREPSSPLPKFEAQAPPSAPPAPRAEAEVRPKIPGSREAAENDEEEPGEATGEAVREDRVTLADRGPKERPRREGKPRKEKPRKEERPKKERPRKEERPRAAREPREALPQRWESREGGHRPWARDSRDAEPRKKQAWVSPRRPDEEQRPGSRQKLRAGKGRD

SEQ ID NO: 7372 - protein, 206 aa, Homo sapiens
ENLKRLKCLRRYRQRYGVEALLHRQLKERRMLATDGAAQQAHTTRSSQRCLAFVDDVRCSNQSLPMTRHCLTHICQDTNQVLFKCCQGSEEVPCNKPVPVSLSEDPCCPLHFQLPPQMYKPEQDLDVVGDGMQCPPSPLLFDPSLTLEDHLVKEIAEDPVDILGQMQMAGDGCRSQGSRNSEKASAPLSQSGLATANGKPEPTSIS

SEQ ID NO: 7373 - protein, 675 aa, Homo sapiens
MAVLFPLSSCGWAAISLFLSAQSCYSASKQCQSQSPSCRLPGARISGDWSRRTKWRSHRLPRPGPVVRSEAGRDKGGVRGGGVAAAWGWCCRFPSCCSCASPEDTFSVVWFGVGPGMEGHAKGRQSHRCLWRLGEGGGDLRSVPYGDDFCMSFGNCPRDLCGAGIFGKGKGFLVFRLTPQVLVMNRIRIHVLPTNRGRITPVPRSQEPLSCAFTHRPCSHPRLEGQEFCIKHILEDKNAPFKQCSYISTKNGKRCPNAAPKPEKKDGVSFCAEHVRRNALALHAQMKKTNPGPVGETLLCQLSSYAKTELGSQTPESSRSEASRILDEDSWSDGEQEPITVDQTWRGDPDSEADSIDSDQEDPLKHAGVYTAEEVALIMREKLIRLQSLYIDQFKRLQHLLKEKKRRYLHNRKVEHEALGSSLLTGPEGLLAKERENLKRLKCLRRYRQRYGVEALLHRQLKERRMLATDGAAQQAHTTRSSQRCLAFVDDVRCSNQSLPMTRHCLTHICQDTNQVLFKCCQGSEEVPCNKPVPVSLSEDPCCPLHFQLPPQMYKPEQVLSVPDDLEAGPMDLYLSAAELQPTESLPLEFSDDLDVVGDGMQCPPSPLLFDPSLTLEDHLVKEIAEDPVDILGQMQMAGDGCRSQGSRNSEKASAPLSQSGLATANGKPEPTSIS

SEQ ID NO: 7374 - protein, 69 aa, Homo sapiens
MNRIRIHVLPTNRGRITPVPRSQEPLSCAFTHRPCSHPRLEGQEFCIKHILEDKNAPFKQCSYISTKNG

SEQ ID NO: 7375 - protein, 108 aa, Homo sapiens
MNRIRIHVLPTNRGRITPVPRSQEPLSCAFTHRPCSHPRLEGQEFCIKHILEDKNAPFKQCSYISTKNGKRCPNAAPKPEKKDGVSFCAEHVRRNALALHAQMKKTNP

SEQ ID NO: 7376 - protein, 492 aa, Homo sapiens
MNRIRIHVLPTNRGRITPVPRSQEPLSCAFTHRPCSHPRLEGQEFCIKHILEDKNAPFKQCSYISTKNGKRCPNAAPKPEKKDGVSFCAEHVRRNALALHAQMKKTNPGPVGETLLCQLSSYAKTELGSQTPESSRSEASRILDEDSWSDGEQEPITVDQTWRGDPDSEADSIDSDQEDPLKHAGVYTAEEVALIMREKLIRLQSLYIDQFKRLQHLLKEKKRRYLHNRKVEHEALGSSLLTGPEGLLAKERENLKRLKCLRRYRQRYGVEALLHRQLKERRMLATDGAAQQAHTTRSSQRCLAFVDDVRCSNQSLPMTRHCLTHICQDTNQVLFKCCQGSEEVPCNKPVPVSLSEDPCCPLHFQLPPQMYKPEQVLSVPDDLEAGPMDLYLSAAELQPTESLPLEFSDDLDVVGDGMQCPPSPLLFDPSLTLEDHLVKEIAEDPVDILGQMQMAGDGCRSQGSRNSEKASAPLSQSGLATANGKPEPTSIS

SEQ ID NO: 7377 - protein, 454 aa, Homo sapiens
MNRIRIHVLPTNRGRITPVPRSQEPLSCAFTHRPCSHPRLEGQEFCIKHILEDKNAPFKQCSYISTKNGKRCPNAAPKPEKKDGVSFCAEHVRRNALALHAQMKKTNPGPVGETLLCQLSSYAKTELGSQTPESSRSEASRILDEDSWSDGEQEPITVDQTWRGDPDSEADSIDSDQEDPLKHAGVYTAEEVALIMREKLIRLQSLYIDQFKRLQHLLKEKKRRYLHNRKVEHEALGSSLLTGPEGLLAKERENLKRLKCLRRYRQRYGVEALLHRQLKERRMLATDGAAQQAHTTRSSQRCLAFVDDVRCSNQSLPMTRHCLTHICQDTNQVLFKCCQGSEEVPCNKPVPVSLSEDPCCPLHFQLPPQMYKPEQDLDVVGDGMQCPPSPLLFDPSLTLEDHLVKEIAEDPGQMQMAGDGCRSQGSRNSEKASAPLSQSGLATANGKPEPTSIS

SEQ ID NO: 7378 - protein, 155 aa, Homo sapiens
MNRIRIHVLPTNRGRITPVPRSQEPLSCAFTHRPCSHPRLEGQEFCIKHILEDKNAPFKQCSYISTKNGKRCPNAAPKPEKKDGVSFCAEHVRRNALALHAQMKKTNPGPVGETLLCQLSSYAKTELGSQTPESSRSEASRILDMLVSTQQKKWP

SEQ ID NO: 7379 - protein, 133 aa, Homo sapiens
MNRIRIHVLPTNRGRITPVPRVSFCAEHVRRNALALHAQMKKTNPGPVGETLLCQLSSYAKTELGSQTPESSRSEASRILDEDSWSDGEQEPITVDQTWRGDPDSEADSIDSDQEDPLKHAGVYTAEEVALIM

SEQ ID NO: 7380 - protein, 74 aa, Homo sapiens
PNAAPKPEKKDGVSFCAEHVRRNALALHAQMKKTNPGPVGETLLCQLSSYAKTELGSQTPESSRSEASRILGLG

SEQ ID NO: 7381 - protein, 340 aa, Homo sapiens
  VARIANT 1: note = misc_feature - Xaa can be any naturally occurring amino acid
XLPTNRGRITPVPRSQEPLSCAFTHRPCSHPRLEGQEFCIKHILEDKNAPFKQCSYISTKNGKRCPNAAPKPEKKDGVSFCAEHVRRNALALHAQMKKTNPGPVGETLLCQLSSYAKTELGSQTPESSRSEASRILDEDSWSDGEQEPITVDQTWRGDPDSEADSIDSDQEDPLKHAGVYTAEEVALIMREKLIRLQSLYIDQFKRLQHLLKEKKRRYLHNRKVEHEALGSSLLTGPEGLLAKERENLKRLKCLRRYRQRYGVEALLHRQLKERRMLATDGAAQQAHTTRSSQRCLAFVDDVRCSNQSLPMTRHCLTQKDATAIGDLLTLYCGLMETALD

SEQ ID NO: 7382 - protein, 25 aa, Homo sapiens
  VARIANT 1: note = misc_feature - Xaa can be any naturally occurring amino acid
XPESSRSEASRILDMLVSTQQKKWP

SEQ ID NO: 7383 - protein, 304 aa, Homo sapiens
MLPPPRPAAALALPVLLLLLVVLTPPPTGARPSPGPDYLRRGWMRLLAEGEGCAPCRPEECAAPRGCLAGRVRDACGCCWECANLEGQLCDLDPSAHFYGHCGEQLECRLDTGGDLSRGEVPEPLCACRSQSPLCGSDGHTYSQICRLQEAARARPDANLTVAHPGPCESGPQIVSHPYDTWNVTGQDVIFGCEVFAYPMASIEWRKDGLDIQLPGDDPHISVQFRGGPQRFEVTGWLQIQAVRPSDEGTYRCLGRNALGQVEAPASLTVLTPDQLNSTGIPQLRSLNLVPEEEAESEENDDYY

SEQ ID NO: 7384 - protein, 230 aa, Homo sapiens
MGIQGMELCAMAVVVLLFIAVLKQFGILEPISMEDSSDSELELSTVRHQPEGLDQLQAQTKFTKKELQSLYRGFKNECPTGLVDEDTFKLIYAQFFPQGDATTYAHFLFNAFDADGNGAIHFEDFVVGLSILLRGTVHEKLKWAFNLYDINKDGYITKEEMLAIMKSIYDMMGRHTYPILREDAPAEHVERFFEKMDRNQDGVVTIEEFLEACQKDENIMSSMQLFENVI

SEQ ID NO: 7385 - protein, 256 aa, Homo sapiens
MQPAKEVTKASDGSLLGDLGHTPLSKKEGIKWQRPRLSRQALMRCCLVKWILSSTAPQGSDSSDSELELSTVRHQPEGLDQLQAQTKFTKKELQSLYRGFKNECPTGLVDEDTFKLIYAQFFPQGDATTYAHFLFNAFDADGNGAIHFEDFVVGLSILLRGTVHEKLKWAFNLYDINKDGYITKEEMLAIMKSIYDMMGRHTYPILREDAPAEHVERFFEKMDRNQDGVVTIEEFLEACQKDENIMSSMQLFENVI

SEQ ID NO: 7386 - protein, 256 aa, Homo sapiens
MQPRKEVTKASDGSLLGDLGHTPLSKKEGIKWQRPRLSRQALMRCCLVKWILSSTAPQGSDSSDSELELSTVRHQPEGLDQLQAQTKFTKKELQSLYRGFKNECPTGLVDEDTFKLIYAQFFPQGDATTYAHFLFNAFDADGNGAIHFEDFVVGLSILLRGTVHEKLKWAFNLYDINKDGYITKEEMLAIMKSIYDMMGRHTYPILREDAPAEHVERFFEKMDRNQDGVVTIEEFLEACQKDENIMSSMQLFENVI

SEQ ID NO: 7387 - protein, 252 aa, Homo sapiens
MGGLRPWSRYGLLVVAHLLALGLGAVVFQALEGPPACRLQAELRAELAAFQAEHRACLPPGALEELLGTALATQAHGVSTLGNSSEGRTWDLPSALLFAASILTTTGYGHMAPLSPGGKAFCMVYAALGLPASLALVATLRHCLLPVLSRPRAWVAVHWQLSPARAALLQAVALGLLVASSFVLLPALVLWGLQGDCSLLGAVYFCFSSLSTIGLEDLLPGRGRSLHPVIYHLGQLALLGGGTSLQGTAWEG

SEQ ID NO: 7388 - protein, 252 aa, Homo sapiens; identical to SEQ ID NO: 7387

SEQ ID NO: 7389 - protein, 257 aa, Homo sapiens
MGGLRPWSRYGLLVVAHLLALGLGAVVFQALEGPPACRLQAELRAELAAFQAEHRACLPPGALEELLGTALATQAHGVSTLGNSSEGRTWDLPSALLFAASILTTTGYGHMAPLSPGGKAFCMVYAALGLPASLALVATLRHCLLPVLSRPRAWVAVHWQLSPARAALLQAVALGLLVASSFVLLPALVLWGLQGDCSLLGAVYFCFSSLSTIGLEDLLPGRGRSLHPVIYHLGQLALLGKSSHLTACGGRGKRSLD

SEQ ID NO: 7390 - protein, 307 aa, Homo sapiens
MGGLRPWSRYGLLVVAHLLALGLGAVVFQALEGPPACRLQAELRAELAAFQAEHRACLPPGALEELLGTALATQAHGVSTLGNSSEGRTWDLPSALLFAASILTTTGYGHMAPLSPGGKAFCMVYAALGLPASLALVATLRHCLLPVLSRPRAWVAVHWQLSPARAALLQAVALGLLVASSFVLLPALVLWGLQGDCSLLGAVYFCFSSLSTIGLEDLLPGRGRSLHPVIYHLGQLALLGYLLLGLLAMLLAVETFSELPQVRAMGKFFRPSGPVTAEDQGGILGQDELALSTLPPAAPASGQAPAC

SEQ ID NO: 7391 - protein, 72 aa, Homo sapiens
  VARIANT 1: note = misc_feature - Xaa can be any naturally occurring amino acid
XHLGQLALLGLLAMLLAVETFSELPQVRAMGKFFRPSGPVTAEDQGGILGQDELALSTLPPAAPASGQAPAC

SEQ ID NO: 7392 - protein, 28 aa, Homo sapiens
  VARIANT 1: note = misc_feature - Xaa can be any naturally occurring amino acid
XLHPVIYHLGQLALLGGGTSLQGTAWEG

SEQ ID NO: 7393 - protein, 57 aa, Homo sapiens
MGGDLVLGLGALRRRKRLLEQEKSLAGWALVLAGTGIGLMVLHAEMLWFGGCSTHFG

SEQ ID NO: 7394 - protein, 427 aa, Homo sapiens
MGGDLVLGLGALRRRKRLLEQEKSLAGWALVLAGTGIGLMVLHAEMLWFGGCSWALYLFLVKCTISISTFLLLCLIVAFHAKEVQLFMTDNGLRDWRVALTGRQAAQIVLELVVCGLHPAPVRGPPCVQDLGAPLTSPQPWPGFLGQGEALLSLAMLLRLYLVPRAVLLRSGVLLNASYRSIGALNQVRFRHWFVAKLYMNTHPGRLLLGLTLGLWLTTAWVLSVAERQAVNATGHLSDTLWLIPITFLTIGYGDVVPGTMWGKIVCLCTGVMGVCCTALLVAVVARKLEFNKAEKHVHNFMMDIQYTKEMKESAARVLQEAWMFYKHTRRKESHAARRHQRKLLAAINAFRQVRLKHRKLREQVNSMVDISKMHMILYDLQQNLSSSHRALEKQIDTLAGKLDALTELLSTALGPRQLPEPSQQSK

SEQ ID NO: 7395 - protein, 295 aa, Homo sapiens
MHDQHFHLLTPLPHRGLSCQRGPAVHDRQRAAGLARGADRAAGNASYRSIGALNQVRFRHWFVAKLYMNTHPGRLLLGLTLGLWLTTAWVLSVAERQAVNATGHLSDTLWLIPITFLTIGYGDVVPGTMWGKIVCLCTGVMGVCCTALLVAVVARKLEFNKAEKHVHNFMMDIQYTKEMKESAARVLQEAWMFYKHTRRKESHAARRHQRKLLAAINAFRQVRLKHRKLREQVNSMVDISKMHMILYDLQQNLSSSHRALEKQIDTLAGKLDALTELLSTALGPRQLPEPSQQSK

SEQ ID NO: 7396 - protein, 113 aa, Homo sapiens
SDTLWLIPITFLTIGYGDVVPGTMWGKIVCLCTGVMGVCCTALLVAVVARKLEFNKAEKHVHNFMMDIQYTKEMKESAARVLQEAWMFYKHTRRKESHAARRHQRKLLAAINA

SEQ ID NO: 7397 - protein, 59 aa, Homo sapiens
VDISKMHMILYDLQQNLSSSHRALEKQIDTLAGKLDALTELLSTALGPRQLPEPSQQSK

SEQ ID NO: 7398 - protein, 165 aa, Homo sapiens
  VARIANT 1: note = misc_feature - Xaa can be any naturally occurring amino acid
XVCCTALLVAVVARKLEFNKAEKHVHNFMMDIQYTKEEGVSCCPQASAQAAGRHQRVRAALYAHVSMCTHVQVTSLHGCVCACPCLSRFRQVRLKHRKLREQVNSMVDISKMHMILYDLQQNLSSSHRALEKQIDTLAGKLDALTELLSTALGPRQLPEPSQQSK

SEQ ID NO: 7399 - protein, 113 aa, Homo sapiens
MFQTKLRNETWEDLPKMSCTTEIQAAFILSSFVTFFSGLIILLIFRLIWRSVKKWQIIKGTGIILELFTSGTIARSHVRSLHFQGQFRDHIEMLLSAQTFVGQVLPCWKLFII

SEQ ID NO: 7400 - protein, 1149 aa, Homo sapiens
MFQTKLRNETWEDLPKMSCTTEIQAAFILSSFVTFFSGLIILLIFRLIWRSVKKWQIIKGTGIILELFTSGTIARSHVRSLHFQGQFRDHIEMLLSAQTFVGQVLVILVFVLSIGSLIIYFINSADPVGSCSSYEDKTIPIDLVFNAFFSFYFGLRFMAADDKIKFWLEMNSIVDIFTIPPTFISYYLKSNWLGLRFLRALRLLELPQILQILRAIKTSNSVKFSKLLSIILSTWFTAAGFIHLVENSGDPWLKGRNSQNISYFESIYLVMATTSTVGFGDVVAKTSLGRTFIMFFTLGSLILFANYIPEMVELFANKRKYTSSYEALKGKKFIVVCGNITVDSVTAFLRNFLRDKSGEINTEIVFLGETPPSLELETIFKCYLAYTTFISGSAMKWEDLRRVAVESAEACLIIANPLCSDSHAEDISNIMRVLSIKNYDSTTRIIIQILQSHNKVYLPKIPSWNWDTGDNIICFAELKLGFIAQGCLVPGLCTFLTSLFVEQNKKVMPKQTWKKHFLNSMKNKILTQRLSDDFAGMSFPEVARLCFLKMHLLLIAIEYKSLFTDGFCGLILNPPPQVRIRKNTLGFFIAETPKDVRRALFYCSVCHDDVFIPELITNCGCKSRSRQHITVPSVKRMKKCLKGISSRISGQDSPPRVSASTSSISNFTTRTLQHDVEQDSDQLDSSGMFHWCKPTSLDKVTLKRTGKSKYKFRNHIVACVFGDAHSAPMGLRNFVMPLRASNYTRKELKDIVFIGSLDYLQREWRFLWNFPQIYILPGCALYSGDLHAANIEQCSMCAVLSPPPQPSSNQTLVDTEAIMATLTIGSLQIDSSSDPSPSVSEETPGYTNGHNEKSNCRKVPILTELKNPSNIHFIEQLGGLEGSLQETNLHLSTAFSTGTVFSGSFLDSLLATAFYNYHVLELLQMLVTGGVSSQLEQHLDKDKVYGVADSCTSLLSGRNRCKLGLLSLHETILSDVNPRNTFGQLFCGSLDLFGILCVGLYRIIDEEELNPENKRFVITRPANEFKLLPSDLVFCAIPFSTACYKRNEEFSLQKSYEIVNKASQTTETHSDTNCPPTIDSVTETLYSPVYSYQPRTNSLSFPKQIAWNQSRTNSIISSQIPLGDNAKENERKTSDEVYDEDPFAYSEPL

SEQ ID NO: 7401 - protein, 308 aa, Homo sapiens
MFQTKLRNETWEDLPKMSCTTEIQAAFILSSFVTFFSGLIILLIFRLIWRSVKKWQIIKGTGIILELFTSGTIARSHVRSLHFQGQFRDHIEMLLSAQTFVGQVLVILVFVLSIGSLIIYFINSADPVGSCSSYEDKTIPIDLVFNAFFSFYFGLRFMAADDKIKFWLEMNSIVDIFTIPPTFISYYLKSNWLGLRFLRALRLLELPQILQILRAIKTSNSVKFSKLLSIILSTWFTAAGFIHLVENSGDPWLKGRNSQNISYFESIYLVMATTSTVGFGDVVAKTSLGRTFIMFFTLGSLVKNIFNI

SEQ ID NO: 7402 - protein, 947 aa, Homo sapiens
MFQTKLRNETWEDLPKMSCTTEIQAAFILSSFVTFFSGLIILLIFRLIWRSVKKWQIIKGTGIILELFTSGTIARSHVRSLHFQGQFRDHIEMLLSAQTFVGQVLVILVFVLSIGSLIIYFINSADPVGSCSSYEDKTIPIDLVFNAFFSFYFGLRFMAADDKIKFWLEMNSIVDIFTIPPTFISYYLKSNWLGLRFLRALRLLELPQILQILRAIKTSNSVKFSKLLSIILSTWFTAAGFIHLVENSGDPWLKGRNSQNISYFESIYLVMATTSTVGFGDVVAKTSLGRTFIMFFTLGSLILFANYIPEMVELFANKRKYTSSYEALKGKKFIVVCGNITVDSVTAFLRNFLRDKSGEINTEIVFLGETPPSLELETIFKCYLAYTTFISGSAMKWEDLRRVAVESAEACLIIANPLCSDSHAEDISNIMRVLSIKNYDSTTRIIIQILQSHNKVYLPKIPSWNWDTGDNIICFAELKLGFIAQGCLVPGLCTFLTSLFVEQNKKVMPKQTWKKHFLNSMKNKILTQRLSDDFAGMSFPEVARLCFLKMHLLLIAIEYKSLFTDGFCGLILNPPPQVRIRKNTLGFFIAETPKDVRRALFYCSVCHDDVFIPELITNCGCKSRSRQHITVPSVKRMKKCLKGISSRISGQDSPPRVSASTSSISNFTTRTLQHDVEQDSDQLDSSGMFHWCKPTSLDKVTLKRTGKSKYKFRNHIVACVFGDAHSAPMGLRNFVMPLRASNYTRKELKDIVFIGSLDYLQREWRFLWNFPQIYILPGCALYSGDLHAANIEQCSMCAVLSPPPQPSSNQTLVDTEAIMATLTIGSLQIDSSSDPSPSVSEETPGYTNGHNEKSNCRKVPILTELKNPSNIHFIEQLGGLEGSLQETNLHLSTAFSTGTVFSGSFLDSLLATLMWKLAIKGSQFQGRSSGLCWPSTIIMSWNCFRCW

SEQ ID NO: 7403 - protein, 51 aa, Homo sapiens
MIKKTEFSNVCSIFYLILQAMLKGLLQLSCPGIASDAGDRRSKFSAGTTFR

SEQ ID NO: 7404 - protein, 1628 aa, Homo sapiens
MAGVGAAALSLLLHLGALALAAGAEGGAVPREPPGQQTTAHSSVLAGNSQEQWHPLREWLGRLEAAVMELREQNKDLQTRVRQLESCECHPASPQCWGLGRAWPEGARWEPDACTACVCQDGAAHCGPQAHLPHCRGCSQNGQTYGNGETFSPDACTTCRCLEGTITCNQKPCPRGPCPEPGACCPHCKPGCDYEGQLYEEGVTFLSSSNPCLQCTCLRSRVRCMALKCPPSPCPEPVLRPGHCCPTCQGCTEGGSHWEHGQEWTTPGDPCRICRCLEGHIQCRQRECASLCPYPARPLPGTCCPVCDGCFLNGREHRSGEPVGSGDPCSHCRCANGSVQCEPLPCPPVPCRHPGKIPGQCCPVCDGCEYQGHQYQSQETFRLQERGLCVRCSCQAGEVSCEEQECPVTPCALPASGRQLCPACELDGEEFAEGVQWEPDGRPCTACVCQDGVPKCGAVLCPPAPCQHPTQPPGACCPSCDSCTYHSQVYANGQNFTDADSPCHACHCQDGTVTCSLVDCPPTTCARPQSGPGQCCPRCPDCILEEEVFVDGESFSHPRDPCQECRCQEGHAHCQPRPCPRAPCAHPLPGTCCPNDCSGCAFGGKEYPSGADFPHPSDPCRLCRCLSGNVQCLARRCVPLPCPEPVLLPGECCPQCPAAPAPAGCPRPGAAHARHQEYFSPPGDPCRRCLCLDGSVSCQRLPCPPAPCAHPRQGPCCPSCDGCLYQGKEFASGERFPSPTAACHLCLCWEGSVSCEPKACAPALCPFPARGDCCPDCDGCEYLGESYLSNQEFPDPREPCNLCTCLGGFVTCGRRPCEPPGCSHPLIPSGHCCPTCQGCRYHGVTTASGETLPDPLDPTCSLCTCQEGSMRCQKKPCPPALCPHPSPGPCFCPVCHSCLSQGREHQDGEEFEGPAGSCEWCRCQAGQVSCVRLQCPPLPCKLQVTERGSCCPRCRGCLAHGEEHPEGSRWVPPDSACSSCVCHEGVVTCARIQCISSCAQPRQGPHDCCPQCSDCEHEGRKYEPGESFQPGADPCEVCICEPQPEGPPSLRCHRRQCPSLVGCPPSQLLPPGPQHCCPTCAEALSNCSEGLLGSELAPPDPCYTCQCQDLTWLCIHQACPELSCPLSERHTPPGSCCPVCRECVVEAEGRRVADGESWRDPSNACIACTCHRGHVECHLEECQALSCPHGWAKVPQADSCCERCQAPTQSCVHQGREVASGERWTVDTCTSCSCMAGTVRCQSQRCSPLSCGPDKAPALSPGSCCPRCLPRPASCMAFGDPHYRTFDGRLLHFQGSCSYVLAKDCHSGDFSVHVTNDDRGRSGVAWTQEVAVLLGDMAVRLLQDGAVTVDGHPVALPFLQEPLLYVELRGHTVILHAQPGLQVLWDGQSQVEVSVPGSYQGRTCGLCGNFNGFAQDDLQGPEGLLLPSEAAFGNSWQVSEGLWPGRPCSAGREVDPCRAAGYRARREANARCGVLKSSPFSRCHAVVPPEPFFAACVYDLCACGPGSSADACLCDALEAYASHCRQAGVTPTWRGPTLCVVGCPLERGFVFDECGPPCPRTCFNQHIPLGELAAHCVRPCVPGCQCPAGLVEHEAHCIPPEACPQVLLTGDQPLGARPSPSREPQETP

SEQ ID NO: 7405 - protein, 1504 aa, Homo sapiens
MAGVGAAALSLLLHLGALALAAGAEGGAVPREPPGQQTTAHSSVLAGNSQEQWHPLREWLGRLEAAVMELREQNKDLQTRVRQLESCECHPASPQCWGLGRAWPEGARWEPDACTACVCQDGAAHCGPQAHLPHCRGCSQNGQTYGNGETFSPDACTTCRCLTGAVQCQGPSCSELNCLESCTPPGECCPICRCTEGGSHWEHGQEWTTPGDPCRICRCLEGHIQCRQRECASLCPYPARPLPGTCCPVCDGCFLNGREHRSGEPVGSGDPCSHCRCANGSVQCEPLPCPPVPCRHPGKIPGQCCPVCDGCEYQGHQYQSQETFRLQERGLCVRCSCQAGEVSCEEQECPVTPCALPASGRQLCPACELDGEEFAEGVQWEPDGRPCTACVCQDGVPKCGAVLCPPAPCQHPTQPPGACCPSCDSCTYHSQVYANGQNFTDADSPCHACHCQDGTVTCSLVDCPPTTCARPQSGPGQCCPRCPDCILEEEVFVDGESFSHPRDPCQECRCQEGHAHCQPRPCPRAPCAHPLPGTCCPNDCSGCAFGGKEYPSGADFPHPSDPCRLCRCLSGNVQCLARRCVPLPCPEPVLLPGECCPQCPAPAGCPRPGAAHARHQEYFSPPGDPCRRCLCLDGSVSCQRLPCPPAPCAHPRQGPCCPSCDGCLYQGKEFASGERFPSPTAACHLCLCWEGSVSCEPKACAPALCPFPARGDCCPDCDGCEYLGESYLSNQEFPDPREPCNLCTCLGGFVTCGRRPCEPPGCSHPLIPSGHCCPTCQGCRYHGVTTASGETLPDPLDPTCSLCTCQEGSMRCQKKPCPPALCPHPSPGPCFCPVCHSCLSQGREHQDGEEFEGPAGSCEWCRCQAGQVSCVRLQCPPLPCKLQVTERGSCCPRCRGCLAHGEEHPEGSRWVPPDSACSSCVCHEGVVTCARIQCISSCAQPRQGPHDCCPQCSDCEHEGRKYEPGESFQPGADPCEVCICEPQPEGPPSLRCHRRQCPSLVGCPPSQLLPPGPQHCCPTCAEALSNCSEGLLGSELAPPDPCYTCQCQDLTWLCIHQACPELSCPLSERHTPPGSCCPVCRAPTQSCVHQGREVASGERWTVDTCTSCSCMAGTVRCQSQRCSPLSCGPDKAPALSPGSCCPRCLPRPASCMAFGDPHYRTFDGRLLHFQGSCSYVLAKDCHSGDFSVHVTNDDRGRSGVAWTQEVAVLLGDMAVRLLQDGAVTVDGHPVALPFLQEPLLYVELRGHTVILHAQPGLQVLWDGQSQVEVSVPGSYQGRTCGLCGNFNGFAQDDLQGPEGLLLPSEAAFGNSWQVSEGLWPGRPCSAGREVDPCRAAGYRARREANARCGVLKSSPFSRCHAVVPPEPFFAACVYDLCACGPGSSADACLCDALEAYASHCRQAGVTPTWRGPTLCVVGCPLERGFVFDECGPPCPRTCFNQHIPLGELAAHCVRPCVPGCQCPAGLVEHEAHCIPPEACPQVLLTGDQPLGARPSPSREPQETP

SEQ ID NO: 7406 - protein, 1568 aa, Homo sapiens
MAGVGAAALSLLLHLGALALAAGAEGGAVPREPPGQQTTAHSSVLAGNSQEQWHPLREWLGRLEAAVMELREQNKDLQTRVRQLESCECHPASPQCWGLGRAWPEGARWEPDACTACVCQDGAAHCGPQAHLPHCRGCSQNGQTYGNGETFSPDACTTCRCLTGAVQCQGPSCSELNCLESCTPPGECCPICRPGCDYEGQLYEEGVTFLSSSNPCLQCTCLRSRVRCMALKCPPSPCPEPVLRPGHCCPTCQGCTEGGSHWEHGQEWTTPGDPCRICRCLEGHIQCRQRECASLCPYPARPLPGTCCPVCDGCFLNGREHRSGEPVGSGDPCSHCRCANGSVQCEPLPCPPVPCRHPGKIPGQCCPVCDGCEYQGHQYQSQETFRLQERGLCVRCSCQAGEVSCEEQECPVTPCALPASGRQLCPACELDGEEFAEGVQWEPDGRPCTACVCQDGVPKCGAVLCPPAPCQHPTQPPGACCPSCDSCTYHSQVYANGQNFTDADSPCHACHCQDGTVTCSLVDCPPTTCARPQSGPGQCCPRCPDCILEEEVFVDGESFSHPRDPCQECRCQEGHAHCQPRPCPRAPCAHPLPGTCCPNDCSGCAFGGKEYPSGADFPHPSDPCRLCRCLSGNVQCLARRCVPLPCPEPVLLPGECCPQCPAAPAPAGCPRPGAAHARHQEYFSPPGDPCRRCLCLDGSVSCQRLPCPPAPCAHPRQGPCCPSCDGCLYQGKEFASGERFPSPTAACHLCLCWEGSVSCEPKACAPALCPFPARGDCCPDCDGCEYLGESYLSNQEFPDPREPCNLCTCLGGFVTCGRRPCEPPGCSHPLIPSGHCCPTCQGCRYHGVTTASGETLPDPLDPTCSLCTCQEGSMRCQKKPCPPALCPHPSPGPCFCPVCHSCLSQGREHQDGEEFEGPAGSCEWCRCQAGQVSCVRLQCPPLPCKLQVTERGSCCPRCRGCLAHGEEHPEGSRWVPPDSACSSCVCHEGVVTCARIQCISSCAQPRQGPHDCCPQCSDCEHEGRKYEPGESFQPGADPCEVCICEPQPEGPPSLRCHRRQCPSLVGCPPSQLLPPGPQHCCPTCAEALSNCSEGLLGSELAPPDPCYTCQCQDLTWLCIHQACPELSCPLSERHTPPGSCCPVCRAPTQSCVHQGREVASGERWTVDTCTSCSCMAGTVRCQSQRCSPLSCGPDKAPALSPGSCCPRCLPRPASCMAFGDPHYRTFDGRLLHFQGSCSYVLAKDCHSGDFSVHVTNDDRGRSGVAWTQEVAVLLGDMAVRLLQDGAVTVDGHPVALPFLQEPLLYVELRGHTVILHAQPGLQVLWDGQSQVEVSVPGSYQGRTCGLCGNFNGFAQDDLQGPEGLLLPSEAAFGNSWQVSEGLWPGRPCSAGREVDPCRAAGYRARREANARCGVLKSSPFSRCHAVVPPEPFFAACVYDLCACGPGSSADACLCDALEAYASHCRQAGVTPTWRGPTLCVVGCPLERGFVFDECGPPCPRTCFNQHIPLGELAAHCVRPCVPGCQCPAGLVEHEAHCIPPEACPQVLLTGDQPLGARPSPSREPQETP

SEQ ID NO: 7407 - protein, 1275 aa, Homo sapiens
MAGVGAAALSLLLHLGALALAAGAEGGAVPREPPGQQTTAHSSVLAGNSQEQWHPLREWLGRLEAAVMELREQNKDLQTRVRQLESCECHPASPQCWGLGRAWPEGARWEPDACTACVCQDGAAHCGPQAHLPHCRGCSQNGQTYGNGETFSPDACTTCRCLTGAVQCQGPSCSELNCLESCTPPGECCPICRPGCDYEGQLYEEGVTFLSSSNPCLQCTCLRSRVRCMALKCPPSPCPEPVLRPGHCCPTCQGCTEGGSHWEHGQEWTTPGDPCRICRCLEGHIQCRQRECASLCPYPARPLPGTCCPVCDGCFLNGREHRSGEPVGSGDPCSHCRCANGSVQCEPLPCPPVPCRHPGKIPGQCCPVCDGCEYQGHQYQSQETFRLQERGLCVRCSCQAGEVSCEEQECPVTPCALPASGRQLCPACELDGEEFAEGVQWEPDGRPCTACVCQDGVPKCGAVLCPPAPCQHPTQPPGACCPSCDSCTYHSQVYANGQNFTDADSPCHACHCQDGTVTCSLVDCPPTTCARPQSGPGQCCPRCPDCILEEEVFVDGESFSHPRDPCQECRCQEGHAHCQPRPCPRAPCAHPLPGTCCPNDCSGCAFGGKEYPSGADFPHPSDPCRLCRCLSGNVQCLARRCVPLPCPEPVLLPGECCPQCPAAPAPAGCPRPGAAHARHQEYFSPPGDPCRRCLCLDGSVSCQRLPCPPAPCAHPRQGPCCPSCDGCLYQGKEFASGERFPSPTAACHLCLCWEGSVSCEPKACAPALCPFPARGDCCPDCDGCEYLGESYLSNQEFPDPREPCNLCTCLGGFVTCGRRPCEPPGCSHPLIPSGHCCPTCQGCRYHGVTTASGETLPDPLDPTCSLCTCQEGSMRCQKKPCPPALCPHPSPGPCFCPVCHSCLSQGREHQDGEEFEGPAGSCEWCRCQAGQVSCVRLQCPPLPCKLQVTERGSCCPRCRGCLAHGEEHPEGSRWVPPDSACSSCVCHEGVVTCARIQCISSCAQPRQGPHDCCPQCSDCEHEGRKYEPGESFQPGADPCEVCICEPQPEGPPSLRCHRRQCPSLVGCPPSQLLPPGPQHCCPTCAEALSNCSEGLLGSELAPPDPCYTCQCQDLTWLCIHQACPELSCPLSERHTPPGSCCPVCRAPTQSCVHQGREVASGERWTVDTCTSCSCMAGTVRCQSQRCSPLSCGPDKAPALSPGSCCPRCLPRPASCMAFGDPHYRTFDGRLLHFQGSCSYVLAKDCHSGDFRWMGTRWPCPSCRSRCCMWSCEDTL

SEQ ID NO: 7408 - protein, 502 aa, Homo sapiens
MFGTLLLYCFFLATVPALAETGGERQLSPEKSEIWGPGLKADVVLPARYFYIQAVDTSGNKFTSSPGEKVFQVKVSAPEEQFTRVGVQVLDRKDGSFIVRYRMYASYKNLKVEIKFQGQHVAKSPYILKGPVYHENCDCPLQDSAAWLREMNCPETIAQIQRDLAHFPAVDPEKIAVEIPKRFGQRQSLCHYTLKDNKVYIKTHGEHVGFRIFMDAILLSLTRKVKMPDVELFVNLGDWPLEKKKSNSNIHPIFSWCGSTDSKDIVMPTYDLTDSVLETMGRVSLDMMSVQANTGPPWESKNSTAVWRGRDSRKERLELVKLSRKHPELIDAAFTNFFFFKHDENLYGPIVKHISFFDFFKHKYQINIDGTVAAYRLPYLLVGDSVVLKQDSIYYEHFYNELQPWKHYIPVKSNLSDLLEKLKWAKDHDEEAKKIAKAGQEFARNNLMGDDIFCYYFKLFQEYANLQVSEPQIREGMKRVEPQTEDDLFPCTCHRKKTKDEL

SEQ ID NO: 7409 - protein, 507 aa, Homo sapiens
MRRLPRALLLQLRLALLVAAGAPEVLVSAPRSLVWGPGLQAAVVLPVRYFYLQAVNSEGQNLTRSPAGETPFKVVVKSLSPKELVRIHVPKPLDRNDGTFLMRYRMYETVDEGLKIEVLYGDEHVAQSPYILKGPVYHEYCECPEDPQAWQKTLSCPTKEPQIAKDFASFPSINLQQMLKEVPKRFGDERGAIVHYTILNNHVYRRSLGKYTDFKMFSDEILLSLTRKVLLPDLEFYVNLGDWPLEHRKVNGTPSPIPIISWCGSLDSRDVVLPTYDITHSMLEAMRGVTNDLLSIQGNTGPSWINKTERAFFRGRDSREERLQLVQLSKENPQLLDAGITGYFFFQEKEKELGKAKLMGFFDFFKYKYQVNVDGTVAAYRYPYLMLGDSLVLKQDSPYYEHFYMALEPWKHYVPIKRNLSDLLEKVKWAKENDEEAKKIAKEGQLMARDLLQPHRLYCYYYQVLQKYAERQSSKPEVRDGMELVPQPEDSTAICQCHRKKPSREEL

SEQ ID NO: 7410 - protein, 451 aa, Homo sapiens
MVELFIFLFLLGETPFKVVVKSLSPKELVRIHVPKPLDRNDGTFLMRYRMYETVDEGLKIEVLYGDEHVAQSPYILKGPVYHEYCECPEDPQAWQKTLSCPTKEPQIAKDFASFPSINLQQMLKEVPKRFGDERGAIVHYTILNNHVYRRSLGKYTDFKMFSDEILLSLTRKVLLPDLEFYVNLGDWPLEHRKVNGTPSPIPIISWCGSLDSRDVVLPTYDITHSMLEAMRGVTNDLLSIQGNTGPSWINKTERAFFRGRDSREERLQLVQLSKENPQLLDAGITGYFFFQEKEKELGKAKLMGFFDFFKYKYQVNVDGTVAAYRYPYLMLGDSLVLKQDSPYYEHFYMALEPWKHYVPIKRNLSDLLEKVKWAKENDEEAKKIAKEGQLMARDLLQPHRLYCYYYQVLQKYAERQSSKPEVRDGMELVPQPEDSTAICQCHRKKPSREEL

SEQ ID NO: 7411 - protein, 409 aa, Homo sapiens
MVELFIFLFLLGETPFKVVVKSLSPKELVRIHVPKPLDRNDGTFLMRYRMYETVDEGLKIEVLYGDEHVAQSPYILKGPVYHEYCECPEDPQAWQKTLSCPTKEPQIAKDFASFPSINLQQMLKEVPKRFGDERGAIVHYTILNNHVYRRSLGKYTDFKMFSDEILLSLTRKVLLPDLEFYVNLGDWPLEHRKVNGTPSPIPIISWCGSLDSRDVVLPTYDITHSMLEAMRGVTNDLLSIQGNTGPSWINKTERAFFRGRDSREERLQLVQLSKENPQLLDAGITGYFFFQEKEKELGKAKLMGFFDFFKYKYQVNVDGTVAAYRYPYLMLGDSLVLKQDSPYYEHFYMALEPWKHYVPIKRNLSDLLEKVKWAKSFTLSPRLECSGTISTHCNLCLPGSRNFVPQPPE

SEQ ID NO: 7412 - protein, 160 aa, Homo sapiens
  VARIANT 1: note = misc_feature - Xaa can be any naturally occurring amino acid
XEAMRGVTNDLLSIQGNTGPSWINKTERAFFRGRDSREERLQLVQLSKENPQLLDAGITGYFFFQEKEKELGKAKLMGFFDFFKENDEEAKKIAKEGQLMARDLLQPHRLYCYYYQVLQKYAERQSSKPEVRDGMELVPQPEDSTAICQCHRKKPSREEL

SEQ ID NO: 7413 - protein, 302 aa, Homo sapiens [sequence omitted]

SEQ ID NO: 7414 - protein, 876 aa, Homo sapiens
MLSGKKAAAAAAAAAAAATGTEAGPGTAGGSENGSEVAAQPAGLSGPAEVGPGAVGERTPRKKEPPRASPPGGLAEPPGSAGPQAGPTVVPGSATPMETGIAETPEGRRTSRRKRAKVEYREMDESLANLSEDEYYSEEERNAKAEKEKKLPPPPPQAPPEEENESEPEEPSGQAGGLQDDSSGGYGDGQASGVEGAAFQSRLPHDRMTSQEAACFPDIISGPQQTQKVFLFIRNRTLQLWLDNPKIQLTFEATLQQLEAPYNSDTVLVHRVHSYLERHGLINFGIYKRIKPLPTKKTGKVIIIGSGVSGLAAARQLQSFGMDVTLLEARDRVGGRVATFRKGNYVADLGAMVVTGLGGNPMAVVSKQVNMELAKIKQKCPLYEANGQADTVKVPKEKDEMVEQEFNRLLEATSYLSHQLDFNVLNNKPVSLGQALEVVIQLQEKHVKDEQIEHWKKIVKTQEELKELLNKMVNLKEKIKELHQQYKEASEVKPPRDITAEFLVKSKHRDLTALCKEYDELAETQGKLEEKLQELEANPPSDVYLSSRDRQILDWHFANLEFANATPLSTLSLKHWDQDDDFEFTGSHLTVRNGYSCVPVALAEGLDIKLNTAVRQVRYTASGCEVIAVNTRSTSQTFIYKCDAVLCTLPLGVLKQQPPAVQFVPPLPEWKTSAVQRMGFGNLNKVVLCFDRVFWDPSVNLFGHVGSTTASRGELFLFWNLYKAPILLALVAGEAAGIMENISDDVIVGRCLAILKGIFGSSAVPQPKETVVSRWRADPWARGSYSYVAAGSSGNDYDLMAQPITPGPSIPGAPQPIPRLFFAGEHTIRNYPATVHGALLSGLREAGRIADQFLGAMYTLPRQATPGVPAQQSPSM

SEQ ID NO: 7415 - protein, 852 aa, Homo sapiens
MLSGKKAAAAAAAAAAAATGTEAGPGTAGGSENGSEVAAQPAGLSGPAEVGPGAVGERTPRKKEPPRASPPGGLAEPPGSAGPQAGPTVVPGSATPMETGIAETPEGRRTSRRKRAKVEYREMDESLANLSEDEYYSEEERNAKAEKEKKLPPPPPQAPPEEENESEPEEPSGVEGAAFQSRLPHDRMTSQEAACFPDIISGPQQTQKVFLFIRNRTLQLWLDNPKIQLTFEATLQQLEAPYNSDTVLVHRVHSYLERHGLINFGIYKRIKPLPTKKTGKVIIIGSGVSGLAAARQLQSFGMDVTLLEARDRVGGRVATFRKGNYVADLGAMVVTGLGGNPMAVVSKQVNMELAKIKQKCPLYEANGQAVPKEKDEMVEQEFNRLLEATSYLSHQLDFNVLNNKPVSLGQALEVVIQLQEKHVKDEQIEHWKKIVKTQEELKELLNKMVNLKEKIKELHQQYKEASEVKPPRDITAEFLVKSKHRDLTALCKEYDELAETQGKLEEKLQELEANPPSDVYLSSRDRQILDWHFANLEFANATPLSTLSLKHWDQDDDFEFTGSHLTVRNGYSCVPVALAEGLDIKLNTAVRQVRYTASGCEVIAVNTRSTSQTFIYKCDAVLCTLPLGVLKQQPPAVQFVPPLPEWKTSAVQRMGFGNLNKVVLCFDRVFWDPSVNLFGHVGSTTASRGELFLFWNLYKAPILLALVAGEAAGIMENISDDVIVGRCLAILKGIFGSSAVPQPKETVVSRWRADPWARGSYSYVAAGSSGNDYDLMAQPITPGPSIPGAPQPIPRLFFAGEHTIRNYPATVHGALLSGLREAGRIADQFLGAMYTLPRQATPGVPAQQSPSM

SEQ ID NO: 7416 - protein, 858 aa, Homo sapiens
MLSGKKAAAAAAAAAAAATGTEAGPGTAGGSENGSEVAAQPAGLSGPAEVGPGAVGERTPRKKEPPRASPPGGLAEPPGSAGPQAGPTVVPGSATPMETGIAETPEGRRTSRRKRAKVEYREMDESLANLSEDEYYSEEERNAKAEKEKKLPPPPPQAPPEEENESEPEEPSGVEGAAFQSRLPHDRMTSQEAACFPDIISGPQQTQKVFLFIRNRTLQLWLDNPKIQLTFEATLQQLEAPYNSDTVLVHRVHSYLERHGLINFGIYKRIKPLPTKKTGKVIIIGSGVSGLAAARQLQSFGMDVTLLEARDRVGGRVATFRKGNYVADLGAMVVTGLGGNPMAVVSKQVNMELAKIKQKCPLYEANGQAVPKEKDEMVEQEFNRLLEATSYLSHQLDFNVLNNKPVSLGQALEVVIQLQEKHVKDEQIEHWKKIVKTQEELKELLNKMVNLKEKIKELHQQYKEASEVKPPRDITAEFLVKSKHRDLTALCKEYDELAETQGKLEEKLQELEANPPSPLFFCSDVYLSSRDRQILDWHFANLEFANATPLSTLSLKHWDQDDDFEFTGSHLTVRNGYSCVPVALAEGLDIKLNTAVRQVRYTASGCEVIAVNTRSTSQTFIYKCDAVLCTLPLGVLKQQPPAVQFVPPLPEWKTSAVQRMGFGNLNKVVLCFDRVFWDPSVNLFGHVGSTTASRGELFLFWNLYKAPILLALVAGEAAGIMENISDDVIVGRCLAILKGIFGSSAVPQPKETVVSRWRADPWARGSYSYVAAGSSGNDYDLMAQPITPGPSIPGAPQPIPRLFFAGEHTIRNYPATVHGALLSGLREAGRIADQFLGAMYTLPRQATPGVPAQQSPSM

SEQ ID NO: 7417 - protein, 274 aa, Homo sapiens
IFVEFDGCNWKQHSWVKVHAEEVIVLLLEGSLVWAPREDPVLLQGIRVSIAQWPALTFTPLVDKLGLGSVVPVEYLLDRELRFLSDANGLHLFQMGTDSQNQILLEHAALRETVNALISDQKLQEIFSRGPYSVQGHRVKIYQPEGEEGWLYGVVSHQDSITRLMEVSVTESGEIKSVDPRLIHVMLMDNSAPQSEGGTLKAVKSSKGKKKRESIEGKDGRRRKSASDSGCDPASKKLKGDRGEVDSNGSDGDKPQHSLCHLHQRKRQDSGGAG

SEQ ID NO: 7418 - protein, 1761 aa, Homo sapiens
MADAAASPVGKRLLLLFADTAASASASAPAAAAASGDPGPALRTRAWRAGTVRAMSGAVPQDLAIFVEFDGCNWKQHSWVKVHAEEVIVLLLEGSLVWAPREDPVLLQGIRVSIAQWPALTFTPLVDKLGLGSVVPVEYLLDRELRFLSDANGLHLFQMGTDSQNQILLEHAALRETVNALISDQKLQEIFSRGPYSVQGHRVKIYQPEGEEGWLYGVVSHQDSITRLMEVSVTESGEIKSVDPRLIHVMLMDNSAPQSEGGTLKAVKSSKGKKKRESIEGKDGRRRKSASDSGCDPASKKLKGDRGEVDSNGSDGGEASRGPWKGGNASGEPGLDQRAKQPPSTFVPQINRNIRFATYTKENGRTLVVQDEPVGGDTPASFTPYSTATGQTPLAPEVGGAENKEAGKTLEQVGQGIVASAAVVTTASSTPNTVRISDTGLAAGTVPEKQKGSRSQASGENSRNSILASSGFGAPLPSSSQPLTFGSGRSQSNGVLATENKPLGFSFGCSSAQEAQKDTDLSKNLFFQCMSQTLPTSNYFTTVSESLADDSSSRDSFKQSLESLSSGLCKGRSVLGTDTKPGSKAGSSVDRKVPAESMPTLTPAFPRSLLNARTPENHENLFLQPPKLSREEPSNPFLAFVEKVEHSPFSSFASQASGSSSSATTVTSKVAPSWPESHSSADSASLAKKKPLFITTDSSKLVSGVLGSALTSGGPSLSAMGNGRSSSPTSSLTQPIEMPTLSSSPTEERPTVGPGQQDNPLLKTFSNVFGRHSGGFLSSPADFSQENKAPFEAVKRFSLDERSLACRQDSDSSTNSDLSDLSDSEEQLQAKTGLKGIPEHLMGKLGPNGERSAELLLGKSKGKQAPKGRPRTAPLKVGQSVLKDVSKVKKLKQSGEPFLQDGSCINVAPHLHKCRECRLERYRKFKEQEQDDSTVACRFFHFRRLIFTRKGVLRVEGFLSPQQSDPDAMNLWIPSSSLAEGIDLETSKYILANVGDQFCQLVMSEKEAMMMVEPHQKVAWKRAVRGVREMCDVCETTLFNIHWVCRKCGFGVCLDCYRLRKSRPRSETEEMGDEEVFSWLKCAKGQSHEPENLMPTQIIPGTALYNIGDMVHAARGKWGIKANCPCISRQNKSVLRPAVTNGMSQLPSINPSASSGNETTFSGGGGPAPVTTPEPDHVPKADSTDIRSEEPLKTDSSASNSNSELKAIRPPCPDTAPPSSALHWLADLATQKAKEETKEAGSLRSVLNKESHSPFGLDSFNSTAKVSPLTPKLFNSLLLGPTASNNKTEGSSLRDLLHSGPGKLPQTPLDTGIPFPPVFSTSSAGVKSKASLPNFLDHIIASVVENKKTSDASKRACNLTDTQKEVKEMVMGLNVLDPHTSHSWLCDGRLLCLHDPSNKNNWKIFRECWKQGQPVLVSGVHKKLKSELWKPEAFSQEFGDQDVDLVNCRNCAIISDVKVRDFWDGFEIICKRLRSEDGQPMVLKLKDWPPGEDFRDMMPTRFEDLMENLPLPEYTKRDGRLNLASRLPSYFVRPDLGPKMYNAYGLITAEDRRVGTTNLHLDVSDAVNVMVYVGIPIGEGAHDEEVLKTIDEGDADEVTKQRIHDGKEKPGALWHIYAAKDAEKIRELLRKVGEEQGQENPPDHDPIHDQSWYLDQTLRKRLYEEYGVQGWAIVQFLGDAVFIPAGAPHQVHNLYSCIKVAEDFVSPEHVKHCFRLTQEFRHLSNTHTNHEDKLQVKNIIYHAVKDAVGTLKAHESKLARS

SEQ ID NO: 7419 - protein, 759 aa, Homo sapiens
MSEKEAMMMVEPHQKVAWKRAVRGVREMCDVCETTLFNIHWVCRKCGFGVCLDCYRLRKSRPRSETEEMGDEEVFSWLKCAKGQSHEPENLMPTQIIPGTALYNIGDMVHAARGKWGIKANCPCISRQNKSVLRPAVTNGMSQLPSINPSASSGNETTFSGGGGPAPVTTPEPDHVPKADSTDIRSEEPLKTDSSASNSNSELKAIRPPCPDTAPPSSALHWLADLATQKAKEETKEAGSLRSVLNKESHSPFGLDSFNSTAKVSPLTPKLFNSLLLGPTASNNKTEGSSLRDLLHSGPGKLPQTPLDTGIPFPPVFSTSSAGVKSKASLPNFLDHIIASVVENKKTSDASKRACNLTDTQKEVKEMVMGLNVLDPHTSHSWLCDGRLLCLHDPSNKNNWKIFRECWKQGQPVLVSGVHKKLKSELWKPEAFSQEFGDQDVDLVNCRNCAIISDVKVRDFWDGFEIICKRLRSEDGQPMVLKLKDWPPGEDFRDMMPTRFEDLMENLPLPEYTKRDGRLNLASRLPSYFVRPDLGPKMYNAYGLITAEDRRVGTTNLHLDVSDAVNVMVYVGIPIGEGAHDEEVLKTIDEGDADEVTKQRIHDGKEKPGALWHIYAAKDAEKIRELLRKVGEEQGQENPPDHDPIHDQSWYLDQTLRKRLYEEYGVQGWAIVQFLGDAVFIPAGAPHQVHNLYSCIKVAEDFVSPEHVKHCFRLTQEFRHLSNTHTNHEDKLQVKNIIYHAVKDAVGTLKAHESKLARS

SEQ ID NO: 7420 - protein, 20 aa, Homo sapiens
VPEKQKGSRSQASGELASQC

SEQ ID NO: 7421 - protein, 1384 aa, Homo sapiens
MAAGKASGESEEASPSLTAEEREALGGLDSRLFGFVRFHEDGARTKALLGKAVRCYESLILKAEGKVESDFFCQLGHFNLLLEDYPKALSAYQRYYSLQSDYWKNAAFLYGLGLVYFHYNAFQWAIKAFQEVLYVDPSFCRAKEIHLRLGLMFKVNTDYESSLKHFQLALVDCNPCTLSNAEIQFHIAHLYETQRKYHSAKEAYEQLLQTENLSAQVKATVLQQLGWMHHTVDLLGDKATKESYAIQYLQKSLEADPNSGQSWYFLGRCYSSIGKVQDAFISYRQSIDKSEASADTWCSIGVLYQQQNQPMDALQAYICAVQLDHGHAAAWMDLGTLYESCNQPQDAIKCYLNATRSKSCSNTSALAARIKYLQACKPHHPNTEPVLGLSQTPISQQSLPLHMIPSSQVDDLSSPAKRKRTSSPTKNTSDNWSGGHAVSHPPVQQQAHSWCLTPQKLQHLEQLRANRNNLNPAQKLMLEQLESQFVLMQQHQMRPTGVAQVRSTGIPNGPTADSSLPTNSVSGQQPQLALTRVPSVSQPGVRPACPGQPLANGPFSAGHVPCSTSRTLGSTDTILIGNNHITGSGSNGNVPYLQRNALTLPHNRTNLTSSAEEPWKNQLSNSTQGLHKGQSSHSAGPNGERPLSSTGPSQHLQAAGSGIQNQNGHPTLPSNSVTQGAALNHLSSHTATSGGQQGITLTKESKPSGNILTVPETSRHTGETPNSTASVEGLPNHVHQMTADAVCSPSHGDSKSPGLLSSDNPQLSALLMGKANNNVGTGTCDKVNNIHPAVHTKTDNSVASSPSSAISTATPSPKSTEQTTTNSVTSLNSPHSGLHTINGEGMEESQSPMKTDLLLVNHKPSPQIIPSMSVSIYPSSAEVLKACRNLGKNGLSNSSILLDKCPPPRPPSSPYPPLPKDKLNPPTPSIYLENKRDAFFPPLHQFCTNPNNPVTVIRGLAGALKLDLGLFSTKTLVEANNEHMVEVRTQLLQPADENWDPTGTKKIWHCESNRSHTTIAKYAQYQASSFQESLREENEKRSHHKDHSDSESTSSDNSGRRRKGPFKTIKFGTNIDLSDDKKWKLQLHELTKLPAFVRVVSAGNLLSHVGHTILGMNTVQLYMKVPGSRTPGHQENNNFCSVNINIGPGDCEWFVVPEGYWGVLNDFCEKNNLNFLMGSWWPNLEDLYEANVPVYRFIQRPGDLVWINAGTVHWVQAIGWCNNIAWNVGPLTACQYKLAVERYEWNKLQSVKSIVPMVHLSWNMARNIKVSDPKLFEMIKYCLLRTLKQCQTLREALIAAGKEIIWHGRTKEEPAHYCSICEVEVFDLLFVTNESNSRKTYIVHCQDCARKTSGNLENFVVLEQYKMEDLMQVYDQFTLAPPLPSASS

SEQ ID NO: 7422 - protein, 1269 aa, Homo sapiens
MAAGKASGESEEASPSLTAEEREALGGLDSRLFGFVRFHEDGARTKALLGKAVRCYESLILKAEGKVESDFFCQLGHFNLLLEDYPKALSAYQRYYSLQSDYWKNAAFLYGLGLVYFHYNAFQWAIKAFQEVLYVDPSFCRAKEIHLRLGLMFKVNTDYESSLKHFQLALVDCNPCTLSNAEIQFHIAHLYETQRKYHSAKEAYEQLLQTENLSAQVKATVLQQLGWMHHTVDLLGDKATKESYAIQYLQKSLEADPNSGQSWYFLGRCYSSIGKVQDAFISYRQSIDKSEASADTWCSIGVLYQQQNQPMDALQAYICAVQLDHGHAAAWMDLGTLYESCNQPQDAIKCYLNATRSKSCSNTSALAARIKYLQACKPHHPNTEPVLGLSQTPISQQSLPLHMIPSSQVDDLSSPAKRKRTSSPTKNTSDNWSGGHAVSHPPVQQQAHSWCLTPQKLQMRPTGVAQVRSTGIPNGPTADSSLPTNSVSGQQPQLALTRVPSVSQPGVRPACPGQPLANGPFSAGHVPCSTSRTLGSTDTILIGNNHITGSGSNGNVPYLQRNALTLPHNRTNLTSSAEEPWKNQLSNSTQGLHKGQSSHSAGPNGERPLSSTGPSQHLQAAGSGIQNQNGHPTLPSNSVTQGAALNHLSSHTATSGGQQGITLTKESKPSGNILTVPETSRHTGETPNSTASVEGLPNHVHQMTADAVCSPSHGDSKSPGLLSSDNPQLSALLMGKANNNVGTGTCDKVNNIHPAVHTKTDNSVASSPSSAISTATPSPKSTEQTTTNSVTSLNSPHSGLHTINGEGMEESQSPMKTDLLLVNHKPSPQIIPSMSVSIYPSSAEVLKACRNLGKNGLSNSSILLDKCPPPRPPSSPYPPLPKDKLNPPTPSIYLENKRDAFFPPLHQFCTNPNNPVTVIRGLAGALKLDLGLFSTKTLVEANNEHMVEVRTQLLQPADENWDPTGTKKIWHCESNRSHTTIAKYAQYQASSFQESLREENEKRSHHKDHSDSESTSSDNSGRRRKGPFKTIKFGTNIDLSDDKKWKLQLHELTKLPAFVRVVSAGNLLSHVGHTILGMNTVQLYMKVPGSRTPGHQENNNFCSVNINIGPGDCEWFVVPEGYWGVLNDFCEKNNLNFLMGSWWPNLEDLYEANVPVYRFIQRPGDLVWINAGTVHWVQAIGWCNNIAWNVGPLTACQYKLAVERYEWNKLQSVKSIVPMVHLSWNMARNIKVLSSKNSEAMSDIEGSSHCCRKRDYMAWADKRRTSSLL

SEQ ID NO: 7423 - protein, 1332 aa, Homo sapiens
MAAGKASGESEEASPSLTAEEREALGGLDSRLFGFVRFHEDGARTKALLGKAVRCYESLILKAEGKVESDFFCQLGHFNLLLEDYPKALSAYQRYYSLQSDYWKNAAFLYGLGLVYFHYNAFQWAIKAFQEVLYVDPSFCRAKEIHLRLGLMFKVNTDYESSLKHFQLALVDCNPCTLSNAEIQFHIAHLYETQRKYHSAKEAYEQLLQTENLSAQVKATVLQQLGWMHHTVDLLGDKATKESYAIQYLQKSLEADPNSGQSWYFLGRCYSSIGKVQDAFISYRQSIDKSEASADTWCSIGVLYQQQNQPMDALQAYICAVQLDHGHAAAWMDLGTLYESCNQPQDAIKCYLNATRSKSCSNTSALAARIKYLQNTSDNWSGGHAVSHPPVQQQAHSWCLTPQKLQHLEQLRANRNNLNPAQKLMLEQLESQFVLMQQHQMRPTGVAQVRSTGIPNGPTADSSLPTNSVSGQQPQLALTRVPSVSQPGVRPACPGQPLANGPFSAGHVPCSTSRTLGSTDTILIGNNHITGSGSNGNVPYLQRNALTLPHNRTNLTSSAEEPWKNQLSNSTQGLHKGQSSHSAGPNGERPLSSTGPSQHLQAAGSGIQNQNGHPTLPSNSVTQGAALNHLSSHTATSGGQQGITLTKESKPSGNILTVPETSRHTGETPNSTASVEGLPNHVHQMTADAVCSPSHGDSKSPGLLSSDNPQLSALLMGKANNNVGTGTCDKVNNIHPAVHTKTDNSVASSPSSAISTATPSPKSTEQTTTNSVTSLNSPHSGLHTINGEGMEESQSPMKTDLLLVNHKPSPQIIPSMSVSIYPSSAEVLKACRNLGKNGLSNSSILLDKCPPPRPPSSPYPPLPKDKLNPPTPSIYLENKRDAFFPPLHQFCTNPNNPVTVIRGLAGALKLDLGLFSTKTLVEANNEHMVEVRTQLLQPADENWDPTGTKKIWHCESNRSHTTIAKYAQYQASSFQESLREENEKRSHHKDHSDSESTSSDNSGRRRKGPFKTIKFGTNIDLSDDKKWKLQLHELTKLPAFVRVVSAGNLLSHVGHTILGMNTVQLYMKVPGSRTPGHQENNNFCSVNINIGPGDCEWFVVPEGYWGVLNDFCEKNNLNFLMGSWWPNLEDLYEANVPVYRFIQRPGDLVWINAGTVHWVQAIGWCNNIAWNVGPLTACQYKLAVERYEWNKLQSVKSIVPMVHLSWNMARNIKVSDPKLFEMIKYCLLRTLKQCQTLREALIAAGKEIIWHGRTKEEPAHYCSICEVEVFDLLFVTNESNSRKTYIVHCQDCARKTSGNLENFVVLEQYKMEDLMQVYDQFTLAPPLPSASS

SEQ ID NO: 7424 - protein, 1429 aa, Homo sapiens
MAAGKASGESEEASPSLTAEEREALGGLDSRLFGFVRFHEDGARTKALLGKAVRCYESLILKAEGKVESDFFCQLGHFNLLLEDYPKALSAYQRYYSLQSDYWKNAAFLYGLGLVYFHYNAFQWAIKAFQEVLYVDPSFCRAKEIHLRLGLMFKVNTDYESSLKHFQLALVDCNPCTLSNAEIQFHIAHLYETQRKYHSAKEAYEQLLQTENLSAQVKATVLQQLGWMHHTVDLLGDKATKESYAIQYLQKSLEADPNSGQSWYFLGRCYSSIGKVQDAFISYRQSIDKSEASADTWCSIGVLYQQQNQPMDALQAYICAVQLDHGHAAAWMDLGTLYESCNQPQDAIKCYLNATRSKSCSNTSALAARIKYLQAQLCNLPQGSLQNKTKLLPSIEEAWSLPIPAELTSRQGAMNTAQQACKPHHPNTEPVLGLSQTPISQQSLPLHMIPSSQVDDLSSPAKRKRTSSPTKNTSDNWSGGHAVSHPPVQQQAHSWCLTPQKLQHLEQLRANRNNLNPAQKLMLEQLESQFVLMQQHQMRPTGVAQVRSTGIPNGPTADSSLPTNSVSGQQPQLALTRVPSVSQPGVRPACPGQPLANGPFSAGHVPCSTSRTLGSTDTILIGNNHITGSGSNGNVPYLQRNALTLPHNRTNLTSSAEEPWKNQLSNSTQGLHKGQSSHSAGPNGERPLSSTGPSQHLQAAGSGIQNQNGHPTLPSNSVTQGAALNHLSSHTATSGGQQGITLTKESKPSGNILTVPETSRHTGETPNSTASVEGLPNHVHQMTADAVCSPSHGDSKSPGLLSSDNPQLSALLMGKANNNVGTGTCDKVNNIHPAVHTKTDNSVASSPSSAISTATPSPKSTEQTTTNSVTSLNSPHSGLHTINGEGMEESQSPMKTDLLLVNHKPSPQIIPSMSVSIYPSSAEVLKACRNLGKNGLSNSSILLDKCPPPRPPSSPYPPLPKDKLNPPTPSIYLENKRDAFFPPLHQFCTNPNNPVTVIRGLAGALKLDLGLFSTKTLVEANNEHMVEVRTQLLQPADENWDPTGTKKIWHCESNRSHTTIAKYAQYQASSFQESLREENEKRSHHKDHSDSESTSSDNSGRRRKGPFKTIKFGTNIDLSDDKKWKLQLHELTKLPAFVRVVSAGNLLSHVGHTILGMNTVQLYMKVPGSRTPGHQENNNFCSVNINIGPGDCEWFVVPEGYWGVLNDFCEKNNLNFLMGSWWPNLEDLYEANVPVYRFIQRPGDLVWINAGTVHWVQAIGWCNNIAWNVGPLTACQYKLAVERYEWNKLQSVKSIVPMVHLSWNMARNIKVSDPKLFEMIKYCLLRTLKQCQTLREALIAAGKEIIWHGRTKEEPAHYCSICEVEVFDLLFVTNESNSRKTYIVHCQDCARKTSGNLENFVVLEQYKMEDLMQVYDQFTLAPPLPSASS

SEQ ID NO: 7425 - protein, 1401 aa, Homo sapiens
MKSCGVSLATAAAAAAAFGDEEKKMAAGKASGESEEASPSLTAEEREALGGLDSRLFGFVRFHEDGARTKALLGKAVRCYESLILKAEGKVESDFFCQLGHFNLLLEDYPKALSAYQRYYSLQSDYWKNAAFLYGLGLVYFHYNAFQWAIKAFQEVLYVDPSFCRAKEIHLRLGLMFKVNTDYESSLKHFQLALVDCNPCTLSNAEIQFHIAHLYETQRKYHSAKEAYEQLLQTENLSAQVKATVLQQLGWMHHTVDLLGDKATKESYAIQYLQKSLEADPNSGQSWYFLGRCYSSIGKVQDAFISYRQSIDKSEASADTWCSIGVLYQQQNQPMDALQAYICAVQLDHGHAAAWMDLGTLYESCNQPQDAIKCYLNATRSKSCSNTSALAARIKYLQAQLCNLPQGSLQNKTKLLPSIEEAWSLPIPAELTSRQGAMNTAQQNTSDNWSGGHAVSHPPVQQQAHSWCLTPQKLQHLEQLRANRNNLNPAQKLMLEQLESQFVLMQQHQMRPTGVAQVRSTGIPNGPTADSSLPTNSVSGQQPQLALTRVPSVSQPGVRPACPGQPLANGPFSAGHVPCSTSRTLGSTDTILIGNNHITGSGSNGNVPYLQRNALTLPHNRTNLTSSAEEPWKNQLSNSTQGLHKGQSSHSAGPNGERPLSSTGPSQHLQAAGSGIQNQNGHPTLPSNSVTQGAALNHLSSHTATSGGQQGITLTKESKPSGNILTVPETSRHTGETPNSTASVEGLPNHVHQMTADAVCSPSHGDSKSPGLLSSDNPQLSALLMGKANNNVGTGTCDKVNNIHPAVHTKTDNSVASSPSSAISTATPSPKSTEQTTTNSVTSLNSPHSGLHTINGEGMEESQSPMKTDLLLVNHKPSPQIIPSMSVSIYPSSAEVLKACRNLGKNGLSNSSILLDKCPPPRPPSSPYPPLPKDKLNPPTPSIYLENKRDAFFPPLHQFCTNPNNPVTVIRGLAGALKLDLGLFSTKTLVEANNEHMVEVRTQLLQPADENWDPTGTKKIWHCESNRSHTTIAKYAQYQASSFQESLREENEKRSHHKDHSDSESTSSDNSGRRRKGPFKTIKFGTNIDLSDDKKWKLQLHELTKLPAFVRVVSAGNLLSHVGHTILGMNTVQLYMKVPGSRTPGHQENNNFCSVNINIGPGDCEWFVVPEGYWGVLNDFCEKNNLNFLMGSWWPNLEDLYEANVPVYRFIQRPGDLVWINAGTVHWVQAIGWCNNIAWNVGPLTACQYKLAVERYEWNKLQSVKSIVPMVHLSWNMARNIKVSDPKLFEMIKYCLLRTLKQCQTLREALIAAGKEIIWHGRTKEEPAHYCSICEVEVFDLLFVTNESNSRKTYIVHCQDCARKTSGNLENFVVLEQYKMEDLMQVYDQFTLAPPLPSASS

SEQ ID NO: 7426 - protein, 224 aa, Homo sapiens
MKSCGVSLATAAAAAAAFGDEEKKMAAGKASGESEEASPSLTAEEREALGGLDSRLFGFVRFHEDGARTKALLGKAVRCYESLILKAEGKVESDFFCQLGHFNLLLEDYPKALSAYQRYYSLQSDYWKNAAFLYGLGLVYFHYNAFQWAIKAFQEVLYVDPSFCRAKEIHLRLGLMFKVNTDYESSLKHFQLALVDCNPCTLSNAEIQFHIAHLYETQVGCITL

SEQ ID NO: 7427 - protein, 161 aa, Homo sapiens
  VARIANT 1: note = misc_feature - Xaa can be any naturally occurring amino acid
XARNIKVSDPKLFEMIKIFSLSPNFRAEKCLRDHLVQPLRSNGEPEPLRFTGEYCLLRTLKQCQTLREALIAAGKEIIWHGRTKEEPAHYCSICEVEVFDLLFVTNESNSRKTYIVHCQDCARKTSGNLENFVVLEQYKMEDLMQVYDQFTLAPPLPSASS

SEQ ID NO: 7428 - protein, 999 aa, Homo sapiens
  VARIANT 1: note = misc_feature - Xaa can be any naturally occurring amino acid
XGTLYESCNQPQDAIKCYLNATRSKSCSNTSALAARIKYLQNTSDNWSGGHAVSHPPVQQQAHSWCLTPQKLQHLEQLRANRNNLNPAQKLMLEQLESQFVLMQQHQMRPTGVAQVRSTGIPNGPTADSSLPTNSVSGQQPQLALTRVPSVSQPGVRPACPGQPLANGPFSAGHVPCSTSRTLGSTDTILIGNNHITGSGSNGNVPYLQRNALTLPHNRTNLTSSAEEPWKNQLSNSTQGLHKGQSSHSAGPNGERPLSSTGPSQHLQAAGSGIQNQNGHPTLPSNSVTQGAALNHLSSHTATSGGQQGITLTKESKPSGNILTVPETSRHTGETPNSTASVEGLPNHVHQMTADAVCSPSHGDSKSPGLLSSDNPQLSALLMGKANNNVGTGTCDKVNNIHPAVHTKTDNSVASSPSSAISTATPSPKSTEQTTTNSVTSLNSPHSGLHTINGEGMEESQSPMKTDLLLVNHKPSPQIIPSMSVSIYPSSAEVLKACRNLGKNGLSNSSILLDKCPPPRPPSSPYPPLPKDKLNPPTPSIYLENKRDAFFPPLHQFCTNPNNPVTVIRGLAGALKLDLGLFSTKTLVEANNEHMVEVRTQLLQPADENWDPTGTKKIWHCESNRSHTTIAKYAQYQASSFQESLREENEKRSHHKDHSDSESTSSDNSGRRRKGPFKTIKFGTNIDLSDDKKWKLQLHELTKLPAFVRVVSAGNLLSHVGHTILGMNTVQLYMKVPGSRTPGHQENNNFCSVNINIGPGDCEWFVVPEGYWGVLNDFCEKNNLNFLMGSWWPNLEDLYEANVPVYRFIQRPGDLVWINAGTVHWVQAIGWCNNIAWNVGPLTACQYKLAVERYEWNKLQSVKSIVPMVHLSWNMARNIKVSDPKLFEMIKYCLLRTLKQCQTLREALIAAGKEIIWHGRTKEEPAHYCSICEVEVFDLLFVTNESNSRKTYIVHCQDCARKTSGNLENFVVLEQYKMEDLMQVYDQFTLAPPLPSASS

SEQ ID NO: 7429 - protein, 224 aa, Homo sapiens
  VARIANT 1: note = misc_feature - Xaa can be any naturally occurring amino acid
XLQAYICAVQLDHGHAAAWMDLGTLYESCNQPQDAIKCYLNATRSKSCSNTSALAARIKYLQAQLCNLPQGSLQNKTKLLPSIEEAWSLPIPAELTSRQGAMNTAQQNTSDNWSGGHAVSHPPVQQQAHSWCLTPQKLQMRPTGVAQVRSTGIPNGPTADSSLPTNSVSGQQPQLALTRVPSVSQPGVRPACPGQPLANGPFSAGHVPCSTSRTLGSTDTILIG

SEQ ID NO: 7430 - protein, 1044 aa, Homo sapiens
  VARIANT 1: note = misc_feature - Xaa can be any naturally occurring amino acid
XNKTKLLPSIEEAWSLPIPAELTSRQGAMNTAQQACKPHHPNTEPVLGLSQTPISQQSLPLHMIPSSQVDDLSSPAKRKRTSSPTKNTSDNWSGGHAVSHPPVQQQAHSWCLTPQKLQHLEQLRANRNNLNPAQKLMLEQLESQFVLMQQHQMRPTGVAQVRSTGIPNGPTADSSLPTNSVSGQQPQLALTRVPSVSQPGVRPACPGQPLANGPFSAGHVPCSTSRTLGSTDTILIGNNHITGSGSNGNVPYLQRNALTLPHNRTNLTSSAEEPWKNQLSNSTQGLHKGQSSHSAGPNGERPLSSTGPSQHLQAAGSGIQNQNGHPTLPSNSVTQGAALNHLSSHTATSGGQQGITLTKESKPSGNILTVPETSRHTGETPNSTASVEGLPNHVHQMTADAVCSPSHGDSKSPGLLSSDNPQLSALLMGKANNNVGTGTCDKVNNIHPAVHTKTDNSVASSPSSAISTATPSPKSTEQTTTNSVTSLNSPHSGLHTINGEGMEESQSPMKTDLLLVNHKPSPQIIPSMSVSIYPSSAEVLKACRNLGKNGLSNSSILLDKCPPPRPPSSPYPPLPKDKLNPPTPSIYLENKRDAFFPPLHQFCTNPNNPVTVIRGLAGALKLDLGLFSTKTLVEANNEHMVEVRTQLLQPADENWDPTGTKKIWHCESNRSHTTIAKYAQYQASSFQESLREENEKRSHHKDHSDSESTSSDNSGRRRKGPFKTIKFGTNIDLSDDKKWKLQLHELTKLPAFVRVVSAGNLLSHVGHTILGMNTVQLYMKVPGSRTPGHQENNNFCSVNINIGPGDCEWFVVPEGYWGVLNDFCEKNNLNFLMGSWWPNLEDLYEANVPVYRFIQRPGDLVWINAGTVHWVQAIGWCNNIAWNVGPLTACQYKLAVERYEWNKLQSVKSIVPMVHLSWNMARNIKVSDPKLFEMIKYCLLRTLKQCQTLREALIAAGKEIIWHGRTKEEPAHYCSICEVEVFDLLFVTNESNSRKTYIVHCQDCARKTSGNLENFVVLEQYKMEDLMQVYDQFTLAPPLPSASS

SEQ ID NO: 7431 - protein, 941 aa, Homo sapiens
MAGAAAAVAAGAAAGAAAAAVSVAAPGRASAPPPPPPVYCVCRQPYDVNRFMIECDICKDWFHGSCVGVEEHHAVDIDLYHCPNCAVLHGSSLMKKRRNWHRHDYTEIDDGSKPVQAGTRTFIKELRSRVFPSADEIIIKMHGSQLTQRYLEKHGFDVPIMVPKLDDLGLRLPSPTFSVMDVERYVGGDKVIDVIDVARQADSKMTLHNYVKYFMNPNRPKVLNVISLEFSDTKMSELVEVPDIAKKLSWVENYWPDDSVFPKPFVQKYCLMGVQDSYTDFHIDFGGTSVWYHVLWGEKIFYLIKPTDENLARYESWSSSVTQSEVFFGDKVDKCYKCVVKQGHTLFVPTGWIHAVLTSQDCMAFGGNFLHNLNIGMQLRCYEMEKRLKTPDLFKFPFFEAICWFVAKNLLETLKELREDGFQPQTYLVQGVKALHTALKLWMKKELVSEHAFEIPDNVRPGHLIKELSKVIRAIEEENGKPVKSQGIPIVCPVSRSSNEATSPYHSRRKMRKLRDHNVRTPSNLDILELHTREVLKRLEMCPWEEDILSSKLNGKFNKHLQPSSTVPEWRAKDNDLRLLLTNGRIIKDERQPFADQSLYTADSENEEDKRRTKKAKMKIEESSGVEGVEHEESQKPLNGFFTRVKSELRSRSSGYSDISESEDSGPECTALKSIFTTEESESSGDEKKQEITSNFKEESNVMRNFLQKSQKPSRSEIPIKRECPTSTSTEEEAIQGMLSMAGLHYSTCLQRQIQSTDCSGERNSLQDPSSCHGSNHEVRQLYRYDKPVECGYHVKTEDPDLRTSSWIKQFDTSRFHPQDLSRSQKCIRKEGSSEISQRVQSRNYVDSSGSSLQNGKYMQNSNLTSGACQISNGSLSPERPVGETSFSVPLHPTKRPASNPPPISNQATKGKRPKKGMATAKQRLGKILKLNRNGHARFFV

SEQ ID NO: 7432 - protein, 404 aa, Homo sapiens
  VARIANT 1: note = misc_feature - Xaa can be any naturally occurring amino acid
XAKNLLETLKELREDGFQPQTYLVQGVKALHTALKLWMKKELVSEHAFEIPDNVRPGHLIKELSKVIRAIEEENGKPVKSQGIPIVCPVSRSSNEATSPYHSRRKMRKLRDHNVRTPSNLDILELHTREVLKRLEMCPWEEDILSSKLNGKFNKHLQPSSTVPEWRAKDNDLRLLLTNGRIIKDERQPFADQSLYTADSENEEDKRRTKKAKMKIEESSGVEGVEHEESQKPLNGFFTRVKSELRSRSSGYSDISESEDSGPECTALKSIFTTEESESSGDEKKQEITSNFKEESNVMRNFLQKSQKPSRSEIPIKRECPTSTSTEEEAIQGMLSMAGLHYSTCLQRQIQSTDCSGERNSLQDPSSCHGSNHEVRQLYRYDKPVECETRSHLCCPDWSPTPELK

SEQ ID NO: 7433 - protein, 39 aa, Homo sapiens
MLLLAAAFLVAFVLLLYMVSPLISPKPLALPGAHVVFFR

SEQ ID NO: 7434 - protein, 155 aa, Homo sapiens
MLLLAAAFLVAFVLLLYMVSPLISPKPLALPGAHVVVTGGSSGIGKCIAIECYKQGAFITLVARNEDKLLQAKKEIEMHSINDKQVVLCISVDVSQDYNQVENVIKQAQEKLGPVDMLVNCAGMAVSGKFEDLERLMSINYLGSVYPSRAVITTM

SEQ ID NO: 7435 - protein, 332 aa, Homo sapiens
MLLLAAAFLVAFVLLLYMVSPLISPKPLALPGAHVVVTGGSSGIGKCIAIECYKQGAFITLVARNEDKLLQAKKEIEMHSINDKQVVLCISVDVSQDYNQVENVIKQAQEKLGPVDMLVNCAGMAVSGKFEDLEVSTFERLMSINYLGSVYPSRAVITTMKERRVGRIVFVSSQAGQLGLFGFTAYSASKFAIRGLAEALQMEVKPYNVYITVAYPPDTDTPGFAEENRTKPLETRLISETTSVCKPEQVAKQIVKDAIQGNFNSSLGSDGYMLSALTCGMAPVTSITEGLQQVVTMGLFRTIALFYLGSFDSIVRRCMMQREKSENADKTA

SEQ ID NO: 7436 - protein, 332 aa, Homo sapiens; identical to SEQ ID NO: 7435

SEQ ID NO: 7437 - protein, 298 aa, Homo sapiens
MLLLAAAFLVAFVLLLYMVSPLISPKPLALPGAHVVVTGGSSGIGKCIAIECYKQGAFITLVARNEDKLLQAKKEIEMHSINDKQVVLCISVDVSQDYNQVENVIKQAQEKLGPVDMLVNCAGMAVSGKFEDLEVSTFERLMSINYLGSVYPSRAVITTMKERRVGRIVFVSSQAGQLGLFGFTAYSASKFAIRGLAEALQMEVKPYNVYITVAYPPDTDTPGFAEENRTKPLETRLISETTSVCKPEQVAKQIVKDAIVVTMGLFRTIALFYLGSFDSIVRRCMMQREKSENADKTA

SEQ ID NO: 7438 - protein, 268 aa, Homo sapiens
MLLLAAAFLVAFVLLLYMVSPLISPKPLALPGAHVVVTGGSSGIGKCIAIECYKQGAFITLVARNEDKLLQAKKEIEMHSINDKQVVLCISVDVSQDYNQVENVIKQAQEKLGPVDMLVNCAGMAVSGKFEDLEVSTFEVKPYNVYITVAYPPDTDTPGFAEENRTKPLETRLISETTSVCKPEQVAKQIVKDAIQGNFNSSLGSDGYMLSALTCGMAPVTSITEGLQQVVTMGLFRTIALFYLGSFDSIVRRCMMQREKSENADKTA

SEQ ID NO: 7439 - protein, 39 aa, Homo sapiens
MLLLAAAFLVAFVLLLYMVSPLISPKPLALPGAHVVWEG

SEQ ID NO: 7440 - protein, 352 aa, Homo sapiens
MAGTICFIMWVLFITDTVWSRSVRQVYEVHDSDDWTIHDFECPMECFCPPSFPTALYCENRGLKEIPAIPSRIWYLYLQNNLIETIPEKPFENATQLRWINLNKNKITNYGIEKGALSQLKKLLFLFLEDNELEEVPSPLPRSLEQLQLARNKVSRIPQGTFSNLENLTLLDLQNNKLVDNAFQRDTFKGLKNLMQLNMAKNALRNMPPRLPANTMQLFLDNNSIEGIPENYFNVIPKVAFLRLNHNKLSDEGLPSRGFDVSSILDLQLSHNQLTKVPRISAHLQHLHLDHNKIKSVNVSVICPSPSMLPAERDSFSYGPHLRYLRLDGNEIKPPIPMALMTCFRLLQAVII

SEQ ID NO: 7441 - protein, 287 aa, Homo sapiens
DPSPPLPWWDKSRLLFHGDWHMDIEQANLHQLATEFVFKGDLDINVRTASKYDDCCFLHLPDLCMTLDLQWLCHGNPHDHHSVTLRAPEFLPEVPLGQLHDSYRAFRSENLNLSIKMDLTRHSGTISQPRILLYSSTLRWMQNFWATWTSVTRPICRGKLFNNLKPSKKKLGQHYKQLSYTALFPQLQVHYWASFAQQRGIQIECSQGHVFTRGTQRLIPQAGTVMRRLISDWSVTQMVSDLSQVTVHLMASPTEENADHCLDPLVTKTHLLSLSSLTYQRHSNRTA

SEQ ID NO: 7442 - protein, 2235 aa, Homo sapiens
MPLFFSALLVLLLVALSALFLGRWLVVRLATKWCQRKLQAELKIGSFRFFWIQNVSLKFQQHQQTVEIDNLWISSKLLSHDLPHYVALCFGEVRIRTDLQKVSDLSAPFSQSAGVDQKELSFSPSLLKIFCQLFSIHVDAINIMVLKVDTSESLWHIQISRSRFLLDSDGKRLICEVSLCKINSKVLKSGQLEDTCLVELSLALDLCLKVGISSRHLTAITVDVWTLHAELHEGLFQSQLLCQGPSLASKPVPCSEVTENLVEPTLPGLFLLQQLPDQVKVKMENTSVVLSMNSQKRHLTWTLKLLQFLYHRDEDQLPLRSFTANSDMAQMSTELLLEDGLLLSQSRQRIVCLNSLKASVQVTTIDLSASLVLNTCIIHYRHQEFSHWLHLLALETQGSSSPVLKQRKKRTFPQILAPIIFSTSISNVNISIQLGDTPPFALGFNSISLDYQHLRPQSIHQRGVLTVDHLCWRVGSDSHIQRAPHPPNMHVWGEALVLDSFTLQGSYNQPLGLSSTQSDTLFLDCTIRGLQVEASDTCAQCLSRILSLMGPQSGKSAVSRHSSFGESVSLLWKVDLKVEDMNLFTLSALVGASEVRLDTLTILGSAETSTVGIQGLVLALVKSVTEKMQPCCKAPDIPTPVLSLSMLSITYHSSIRSLEVQCGAGLTLLWSPPDHMYLYQHVLATLQCRDLLRATVFPETVPSLALETSGTTSELEGRAPEPLPPKRLLNLTLEVSTAKLTAFVAEDKFITLAAESVSLSRHGGSLQAYCPELAAGFDGNSIFNFKEVEVQLLPELEEMILHRNPFPALQTLRNRVWLLSFGSVSVEFPYQYDFSRTLDEAVGVQKWLKGLHQGTRAWASPSPVPLPPDLLLKVEHFSWVFLDDVFEVKLHDNYELMKDESKESAKRLQLLDAKVAALRKQHGELLPARKIEELYASLERKNIEIYIQRSRRLYGNTPMRRALLTWSLAGLELVALADASFHGPEHVVEQVQELDPGSPFPPEGLDLVIQWCRMLKCNVKSFLVRIRDYPRYLFEIRDWRLMGRLVGTEQSGQPCSRRRQILHLGLPWGNVAVERNMPPLKFYHDFHSEIFQYTVVWGPCWDPAWTLIGQCVDLLTKPSADPSPPLPWWDKSRLLFHGDWHMDIEQANLHQLATEDPYNTTENMHWEWSHLSFHWKPGQFVFKGDLDINVRTASKYDDCCFLHLPDLCMTLDLQWLCHGNPHDHHSVTLRAPEFLPEVPLGQLHDSYRAFRSENLNLSIKMDLTRHSGTISQPRILLYSSTLRWMQNFWATWTSVTRPICRGKLFNNLKPSKKKLGQHYKQLSYTALFPQLQVHYWASFAQQRGIQIECSQGHVFTRGTQRLIPQAGTVMRRLISDWSVTQMVSDLSQVTVHLMASPTEENADHCLDPLVTKTHLLSLSSLTYQRHSNRTAEEELSARDGDPTFHTHQLHLVDLRISWTTTNRDIAFGLYDGYKKAAVLKRNLSTEALKGLKIDPQMPAKKPKRGVPTSASAPPRVNTPSFSGQPDKGSSGGAYMLQKLIEETDRFVVFTEEESGMSDQLCGIAACQTDDIYNRNCLIELVNCQMVLRGAETEGCVIVSAAKAQLLQCQHHPAWYGDTLKQKTSWTCLLDGMQYFATTESSPTEQDGRQLWLEVKNIEEHRQRSLDSVQELMESGQAVGGMVTTTTDWNQPAEAQQAQQVQRIISRCNCRMYYISYSHDIDPELATQIKPPEVLENQEKEDLLKKQEGAVDTFTLIHHELEISTNPAQYAMILDIVNNLLLHVEPKRKEHSEKKQRVRFQLEISSNPEEQRSSILHLQEAVRQHVAQIRQLEKQMYSIMKSLQDDSKNENLLDLNQKLQLQLNQEKANLQLESEELNILIRCFKDFQLQRANKMELRKQQEDVSVVRRTEFYFAQARWRLTEEDGQLGIAELELQRFLYSKVNKSDDTAEHLLELGWFTMNNLLPNAVYKVVLRPQSSCQSGRQLALRLFSKVRPPVGGISVKEHFEVNVVPLTIQLTHQFFHRMMGFFFPGRSVEDDEVGDEEDKSKLVTTGIPVVKPRQLIATDDAVPLGPGKGVAQGLTRSSGVRRSFRKSPEHPVDDIDKMKERAAMNNSFIYIKIPQVPLCVSYKGEKNSVDWGDLNLVLPCLEYHNNTWTWLDFAMAVKRDSRKALVAQVIKEKLRLKSATGSEVRGKLETKSDLNMQQQEEEEKARLLIGLSVGDKNPGKKSIFGRRK

SEQ ID NO: 7443 - protein, 86 aa, Homo sapiens
MPLFFSALLVLLLVALSALFLGRWLVVRLATKWCQRKLQAELKIGSFRFFWIQNVSLKFQQHQQTVTLCGIVLWRSAYQNGPTESF

SEQ ID NO: 7444 - protein, 2092 aa, Homo sapiens
MVLKVDTSESLWHIQISRSRFLLDSDGKRLICEVSLCKINSKVLKSGQLEDTCLVELSLALDLCLKVGISSRHLTAITVDVWTLHAELHEGLFQSQLLCQGPSLASKPVPCSEVTENLVEPTLPGLFLLQQLPDQVKVKMENTSVVLSMNSQKRHLTWTLKLLQFLYHRDEDQLPLRSFTANSDMAQMSTELLLEDGLLLSQSRQRIVCLNSLKASVQVTTIDLSASLVLNTCIIHYRHQEFSHWLHLLALETQGSSSPVLKQRKKRTFPQILAPIIFSTSISNVNISIQLGDTPPFALGFNSISLDYQHLRPQSIHQRGVLTVDHLCWRVGSDSHIQRAPHPPNMHVWGEALVLDSFTLQGSYNQPLGLSSTQSDTLFLDCTIRGLQVEASDTCAQCLSRILSLMGPQSGKSAVSRHSSFGESVSLLWKVDLKVEDMNLFTLSALVGASEVRLDTLTILGSAETSTVGIQGLVLALVKSVTEKMQPCCKAPDIPTPVLSLSMLSITYHSSIRSLEVQCGAGLTLLWSPPDHMYLYQHVLATLQCRDLLRATVFPETVPSLALETSGTTSELEGRAPEPLPPKRLLNLTLEVSTAKLTAFVAEDKFITLAAESVSLSRHGGSLQAYCPELAAGFDGNSIFNFKEVEVQLLPELEEMILHRNPFPALQTLRNRVWLLSFGSVSVEFPYQYDFSRTLDEAVGVQKWLKGLHQGTRAWASPSPVPLPPDLLLKVEHFSWVFLDDVFEVKLHDNYELMKDESKESAKRLQLLDAKVAALRKQHGELLPARKIEELYASLERKNIEIYIQRSRRLYGNTPMRRALLTWSLAGLELVALADASFHGPEHVVEQVQELDPGSPFPPEGLDLVIQWCRMLKCNVKSFLVRIRDYPRYLFEIRDWRLMGRLVGTEQSGQPCSRRRQILHLGLPWGNVAVERNMPPLKFYHDFHSEIFQYTVVWGPCWDPAWTLIGQCVDLLTKPSADPSPPLPWWDKSRLLFHGDWHMDIEQANLHQLATEDPYNTTENMHWEWSHLSFHWKPGQFVFKGDLDINVRTASKYDDCCFLHLPDLCMTLDLQWLCHGNPHDHHSVTLRAPEFLPEVPLGQLHDSYRAFRSENLNLSIKMDLTRHSGTISQPRILLYSSTLRWMQNFWATWTSVTRPICRGKLFNNLKPSKKKLGQHYKQLSYTALFPQLQVHYWASFAQQRGIQIECSQGHVFTRGTQRLIPQAGTVMRRLISDWSVTQMVSDLSQVTVHLMASPTEENADHCLDPLVTKTHLLSLSSLTYQRHSNRTAEEELSARDGDPTFHTHQLHLVDLRISWTTTNRDIAFGLYDGYKKAAVLKRNLSTEALKGLKIDPQMPAKKPKRGVPTSASAPPRVNTPSFSGQPDKGSSGGAYMLQKLIEETDRFVVFTEEESGMSDQLCGIAACQTDDIYNRNCLIELVNCQMVLRGAETEGCVIVSAAKAQLLQCQHHPAWYGDTLKQKTSWTCLLDGMQYFATTESSPTEQDGRQLWLEVKNIEEHRQRSLDSVQELMESGQAVGGMVTTTTDWNQPAEAQQAQQVQRIISRCNCRMYYISYSHDIDPELATQIKPPEVLENQEKEDLLKKQEGAVDTFTLIHHELEISTNPAQYAMILDIVNNLLLHVEPKRKEHSEKKQRVRFQLEISSNPEEQRSSILHLQEAVRQHVAQIRQLEKQMYSIMKSLQDDSKNENLLDLNQKLQLQLNQEKANLQLESEELNILIRCFKDFQLQRANKMELRKQQEDVSVVRRTEFYFAQARWRLTEEDGQLGIAELELQRFLYSKVNKSDDTAEHLLELGWFTMNNLLPNAVYKAILRPQSSCQSGRQLALRLFSKVRPPVGGISVKEHFEVNVVPLTIQLTHQFFHRMMGFFFPGRSVEDDEVGDEEDKSKLVTTGIPVVKPRQLIATDDAVPLGPGKGVAQGLTRSSGVRRSFRKSPEHPVDDIDKMKERAAMNNSFIYIKIPQVPLCVSYKGEKNSVDWGDLNLVLPCLEYHNNTWTWLDFAMAVKRDSRKALVAQVIKEKLRLKSATGSEVRGKLETKSDLNMQQQEEEEKARLLIGLSVGDKNPGKKSIFGRRK

SEQ ID NO: 7445 - protein, 2092 aa, Homo sapiens
MVLKVDTSESLWHIQISRSRFLLDSDGKRLICEVSLCKINSKVLKSGQLEDTCLVELSLALDLCLKVGISSRHLTAITVDVWTLHAELHEGLFQSQLLCQGPSLASKPVPCSEVTENLVEPTLPGLFLLQQLPDQVKVKMENTSVVLSMNSQKRHLTWTLKLLQFLYHRDEDQLPLRSFTANSDMAQMSTELLLEDGLLLSQSRQRIVCLNSLKASVQVTTIDLSASLVLNTCIIHYRHQEFSHWLHLLALETQGSSSPVLKQRKKRTFPQILAPIIFSTSISNVNISIQLGDTPPFALGFNSISLDYQHLRPQSIHQRGVLTVDHLCWRVGSDSHIQRAPHPPNMHVWGEALVLDSFTLQGSYNQPLGLSSTQSDTLFLDCTIRGLQVEASDTCAQCLSRILSLMGPQSGKSAVSRHSSFGESVSLLWKVDLKVEDMNLFTLSALVGASEVRLDTLTILGSAETSTVGIQGLVLALVKSVTEKMQPCCKAPDIPTPVLSLSMLSITYHSSIRSLEVQCGAGLTLLWSPPDHMYLYQHVLATLQCRDLLRATVFPETVPSLALETSGTTSELEGRAPEPLPPKRLLNLTLEVSTAKLTAFVAEDKFITLAAESVSLSRHGGSLQAYCPELAAGFDGNSIFNFKEVEVQLLPELEEMILHRNPFPALQTLRNRVWLLSFGSVSVEFPYQYDFSRTLDEAVGVQKWLKGLHQGTRAWASPSPVPLPPDLLLKVEHFSWVFLDDVFEVKLHDNYELMKDESKESAKRLQLLDAKVAALRKQHGELLPARKIEELYASLERKNIEIYIQRSRRLYGNTPMRRALLTWSLAGLELVALADASFHGPEHVVEQVQELDPGSPFPPEGLDLVIQWCRMLKCNVKSFLVRIRDYPRYLFEIRDWRLMGRLVGTEQSGQPCSRRRQILHLGLPWGNVAVERNMPPLKFYHDFHSEIFQYTVVWGPCWDPAWTLIGQCVDLLTKPSADPSPPLPWWDKSRLLFHGDWHMDIEQANLHQLATEDPYNTTENMHWEWSHLSFHWKPGQFVFKGDLDINVRTASKYDDCCFLHLPDLCMTLDLQWLCHGNPHDHHSVTLRAPEFLPEVPLGQLHDSYRAFRSENLNLSIKMDLTRHSGTISQPRILLYSSTLRWMQNFWATWTSVTRPICRGKLFNNLKPSKKKLGQHYKQLSYTALFPQLQVHYWASFAQQRGIQIECSQGHVFTRGTQRLIPQAGTVMRRLISDWSVTQMVSDLSQVTVHLMASPTEENADHCLDPLVTKTHLLSLSSLTYQRHSNRTAEEELSARDGDPTFHTHQLHLVDLRISWTTTNRDIAFGLYDGYKKAAVLKRNLSTEALKGLKIDPQMPAKKPKRGVPTSASAPPRVNTPSFSGQPDKGSSGGAYMLQKLIEETDRFVVFTEEESGMSDQLCGIAACQTDDIYNRNCLIELVNCQMVLRGAETEGCVIVSAAKAQLLQCQHHPAWYGDTLKQKTSWTCLLDGMQYFATTESSPTEQDGRQLWLEVKNIEEHRQRSLDSVQELMESGQAVGGMVTTTTDWNQPAEAQQAQQVQRIISRCNCRMYYISYSHDIDPELATQIKPPEVLENQEKEDLLKKQEGAVDTFTLIHHELEISTNPAQYAMILDIVNNLLLHVEPKRKEHSEKKQRVRFQLEISSNPEEQRSSILHLQEAVRQHVAQIRQLEKQMYSIMKSLQDDSKNENLLDLNQKLQLQLNQEKANLQLESEELNILIRCFKDFQLQRANKMELRKQQEDVSVVRRTEFYFAQARWRLTEEDGQLGIAELELQRFLYSKVNKSDDTAEHLLELGWFTMNNLLPNAVYKVVLRPQSSCQSGRQLALRLFSKVRPPVGGISVKEHFEVNVVPLTIQLTHQFFHRMMGFFFPGRSVEDDEVGDEEDKSKLVTTGIPVVKPRQLIATDDAVPLGPGKGVAQGLTRSSGVRRSFRKSPEHPVDDIDKMKERAAMNNSFIYIKIPQVPLCVSYKGEKNSVDWGDLNLVLPCLEYHNNTWTWLDFAMAVKRDSRKALVAQVIKEKLRLKSATGSEVRGKLETKSDLNMQQQEEEEKARLLIGLSVGDKNPGKKSIFGRRK

SEQ ID NO: 7446 - protein, 21 aa, Homo sapiens
  VARIANT 1: note = misc_feature - Xaa can be any naturally occurring amino acid
XQGPSLASKPVPCSAARPGQG

SEQ ID NO: 7447 - protein, 1072 aa, Homo sapiens
MAPPTGVLSSLLLLVTIAGCARKQCSEGRTYSNAVISPNLETTRIMRVSHTFPVVDCTAACCDLSSCDLAWWFEGRCYLVSCPHKENCEPKKMGPIRSYLTFVLRPVQRPAQLLDYGDMMLNRGSPSGIWGDSPEDIRKDLTFLGKDWGLEEMSEYSDDYRELEKDLLQPSGKQEPRGSAEYTDWGLLPGSEGAFNSSVGDSPAVPAETQQDPELHYLNESASTPAPKLPERSVLLPLPTTPSSGEVLEKEKASQLQEQSSNSSGKEVLMPSHSLPPASLELSSVTVEKSPVLTVTPGSTEHSIPTPPTSAAPSESTPSELPISPTTAPRTVKELTVSAGDNLIITLPDNEVELKAFVAPAPPVETTYNYEWNLISHPTDYQGEIKQGHKQTLNLSQLSVGLYVFKVTVSSENAFGEGFVNVTVKPARRVNLPPVAVVSPQLQELTLPLTSALIDGSQSTDDTEIVSYHWEEINGPFIEEKTSVDSPVLRLSNLDPGNYSFRLTVTDSDGATNSTTAALIVNNAVDYPPVANAGPNHTITLPQNSITLNGNQSSDDHQIVLYEWSLGPGSEGKHVVMQGVQTPYLHLSAMQEGDYTFQLKVTDSSRQQSTAVVTVIVQPENNRPPVAVAGPDKELIFPVESATLDGSSSSDDHGIVFYHWEHVRGPSAVEMENIDKAIATVTGLQVGTYHFRLTVKDQQGLSSTSTLTVAVKKENNSPPRARAGGRHVLVLPNNSITLDGSRSTDDQRIVSYLWIRDGQSPAAGDVIDGSDHSVALQLTNLVEGVYTFHLRVTDSQGASDTDTATVEVQPDPRKSGLVELTLQVGVGQLTEQRKDTLVRQLAVLLNVLDSDIKVQKIRAHSDLSTVIVFYVQSRPPFKVLKAAEVARNLHMRLSKEKADFLLFKVLRVDTAGCLLKCSGHGHCDPLTKRCICSHLWMENLIQRYIWDGESNCEWSIFYVTVLAFTLIVLTGGFTWLCICCCKRQKRTKIRKKTKYTILDNMDEQERMELRPKYGIKHRSTEHNSSLMVSESEFDSDQDTIFSREKMERGNPKVSMNGSIRNGASFSYCSKDR

SEQ ID NO: 7448 - protein, 1011 aa, Homo sapiens
MAPPTGVLSSLLLLVTIAGCARKQCSEGRTYSNAVISPNLETTRIMRVSHTFPVVDCTAACCDLSSCDLAWWFEGRCYLVSCPHKENCEPKKMGPIRSYLTFVLRPVQRPAQLLDYGDMMLNRGSPSGIWGDSPEDIRKDLTFLGKDWGLEEMSEYSDDYRELEKDLLQPSGKQEPRGSAEYTDWGLLPGSEGAFNSSVGDSPAVPAETQQDPELHYLNESASTPAPKLPERSVLLPLPTTPSSGEVLEKEKASQLQEQSSNSSGKEVLMPSHSLPPASLELSSVTVEKSPVLTVTPGSTEHSIPTPPTSAAPSESTPSELPISPTTAPRTVKELTVSAGDNLIITLPDNEVELKAFVAPAPPVETTYNYEWNLISHPTDYQGEIKQGHKQTLNLSQLSVGLYVFKVTVSSENAFGEGFVNVTVKPARRVNLPPVAVVSPQLQELTLPLTSALIDGSQSTDDTEIVSYHWEEINGPFIEEKTSVDSPVLRLSNLDPGNYSFRLTVTDSDGATNSTTAALIVNNAVDYPPVANAGPNHTITLPQNSITLNGNQSSDDHQIVLYEWSLGPGSEGKHVVMQGVQTPYLHLSAMQEGDYTFQLKVTDSSRQQSTAVVTVIVQPENNRPPVAVAGPDKELIFPVESATLDGSSSSDDHGIVFYHWEHVRGPSAVEMENIDKAIATVTGLQVGTYHFRLTVKDQQGLSSTSTLTVAVKKENNSPPRARAGGRHVLVLPNNSITLDGSRSTDDQRIVSYLWIRDGQSPAAGDVIDGSDHSVALQLTNLVEGVYTFHLRVTDSQGASDTDTATVEVQPDPRKSGLVELTLQVGVGQLTEQRKDTLVRQLAVLLNVLDSDIKVQKIRAHSDLSTVIVFYVQSRPPFKVLKAAEVARNLHMRLSKEKADFLLFKVLRVDTAGCLLKCSGHGHCDPLTKRCICSHLWMENLIQRYIWDGESNCGIKHRSTEHNSSLMVSESEFDSDQDTIFSREKMERGNPKVSMNGSIRNGASFSYCSKDR

SEQ ID NO: 7449 - protein, 1072 aa, Homo sapiens; identical to SEQ ID NO: 7447

SEQ ID NO: 7450 - protein, 483 aa, Homo sapiens
MQEGDYTFQLKVTDSSRQQSTAVVTVIVQPENNRPPVAVAGPDKELIFPVESATLDGSSSSDDHGIVFYHWEHVRGPSAVEMENIDKAIATVTGLQVGTYHFRLTVKDQQGLSSTSTLTVAVKKENNSPPRARAGGRHVLVLPNNSITLDGSRSTDDQRIVSYLWIRDGQSPAAGDVIDGSDHSVALQLTNLVEGVYTFHLRVTDSQGASDTDTATVEVQPDPRKSGLVELTLQVGVGQLTEQRKDTLVRQLAVLLNVLDSDIKVQKIRAHSDLSTVIVFYVQSRPPFKVLKAAEVARNLHMRLSKEKADFLLFKVLRVDTAGCLLKCSGHGHCDPLTKRCICSHLWMENLIQRYIWDGESNCEWSIFYVTVLAFTLIVLTGGFTWLCICCCKRQKRTKIRKKTKYTILDNMDEQERMELRPKYGIKHRSTEHNSSLMVSESEFDSDQDTIFSREKMERGNPKVSMNGSIRNGASFSYCSKDR

SEQ ID NO: 7451 - protein, 1027 aa, Homo sapiens
MRVSHTFPVVDCTAACCDLSSCDLAWWFEGRCYLVSCPHKENCEPKKMGPIRSYLTFVLRPVQRPAQLLDYGDMMLNRGSPSGIWGDSPEDIRKDLTFLGKDWGLEEMSEYSDDYRELEKDLLQPSGKQEPRGSAEYTDWGLLPGSEGAFNSSVGDSPAVPAETQQDPELHYLNESASTPAPKLPERSVLLPLPTTPSSGEVLEKEKASQLQEQSSNSSGKEVLMPSHSLPPASLELSSVTVEKSPVLTVTPGSTEHSIPTPPTSAAPSESTPSELPISPTTAPRTVKELTVSAGDNLIITLPDNEVELKAFVAPAPPVETTYNYEWNLISHPTDYQGEIKQGHKQTLNLSQLSVGLYVFKVTVSSENAFGEGFVNVTVKPARRVNLPPVAVVSPQLQELTLPLTSALIDGSQSTDDTEIVSYHWEEINGPFIEEKTSVDSPVLRLSNLDPGNYSFRLTVTDSDGATNSTTAALIVNNAVDYPPVANAGPNHTITLPQNSITLNGNQSSDDHQIVLYEWSLGPGSEGKHVVMQGVQTPYLHLSAMQEGDYTFQLKVTDSSRQQSTAVVTVIVQPENNRPPVAVAGPDKELIFPVESATLDGSSSSDDHGIVFYHWEHVRGPSAVEMENIDKAIATVTGLQVGTYHFRLTVKDQQGLSSTSTLTVAVKKENNSPPRARAGGRHVLVLPNNSITLDGSRSTDDQRIVSYLWIRDGQSPAAGDVIDGSDHSVALQLTNLVEGVYTFHLRVTDSQGASDTDTATVEVQPDPRKSGLVELTLQVGVGQLTEQRKDTLVRQLAVLLNVLDSDIKVQKIRAHSDLSTVIVFYVQSRPPFKVLKAAEVARNLHMRLSKEKADFLLFKVLRVDTAGCLLKCSGHGHCDPLTKRCICSHLWMENLIQRYIWDGESNCEWSIFYVTVLAFTLIVLTGGFTWLCICCCKRQKRTKIRKKTKYTILDNMDEQERMELRPKYGIKHRSTEHNSSLMVSESEFDSDQDTIFSREKMERGNPKVSMNGSIRNGASFSYCSKDR

SEQ ID NO: 7452 - protein, 1063 aa, Homo sapiens
MTRLGWPSPCCARKQCSEGRTYSNAVISPNLETTRIMRVSHTFPVVDCTAACCDLSSCDLAWWFEGRCYLVSCPHKENCEPKKMGPIRSYLTFVLRPVQRPAQLLDYGDMMLNRGSPSGIWGDSPEDIRKDLTFLGKDWGLEEMSEYSDDYRELEKDLLQPSGKQEPRGSAEYTDWGLLPGSEGAFNSSVGDSPAVPAETQQDPELHYLNESASTPAPKLPERSVLLPLPTTPSSGEVLEKEKASQLQEQSSNSSGKEVLMPSHSLPPASLELSSVTVEKSPVLTVTPGSTEHSIPTPPTSAAPSESTPSELPISPTTAPRTVKELTVSAGDNLIITLPDNEVELKAFVAPAPPVETTYNYEWNLISHPTDYQGEIKQGHKQTLNLSQLSVGLYVFKVTVSSENAFGEGFVNVTVKPARRVNLPPVAVVSPQLQELTLPLTSALIDGSQSTDDTEIVSYHWEEINGPFIEEKTSVDSPVLRLSNLDPGNYSFRLTVTDSDGATNSTTAALIVNNAVDYPPVANAGPNHTITLPQNSITLNGNQSSDDHQIVLYEWSLGPGSEGKHVVMQGVQTPYLHLSAMQEGDYTFQLKVTDSSRQQSTAVVTVIVQPENNRPPVAVAGPDKELIFPVESATLDGSSSSDDHGIVFYHWEHVRGPSAVEMENIDKAIATVTGLQVGTYHFRLTVKDQQGLSSTSTLTVAVKKENNSPPRARAGGRHVLVLPNNSITLDGSRSTDDQRIVSYLWIRDGQSPAAGDVIDGSDHSVALQLTNLVEGVYTFHLRVTDSQGASDTDTATVEVQPDPRKSGLVELTLQVGVGQLTEQRKDTLVRQLAVLLNVLDSDIKVQKIRAHSDLSTVIVFYVQSRPPFKVLKAAEVARNLHMRLSKEKADFLLFKVLRVDTAGCLLKCSGHGHCDPLTKRCICSHLWMENLIQRYIWDGESNCEWSIFYVTVLAFTLIVLTGGFTWLCICCCKRQKRTKIRKKTKYTILDNMDEQERMELRPKYGIKHRSTEHNSSLMVSESEFDSDQDTIFSREKMERGNPKVSMNGSIRNGASFSYCSKDR

SEQ ID NO: 7453 - protein, 82 aa, Homo sapiens
ILLTVLTCYFWKKNQKLEYKYSKLVMNATLKDCDLPAADSCAIMEGEDVEDDLIFTSKKSLFGKIKSFTSKVSGSSPLGAES

SEQ ID NO: 7454 - protein, 62 aa, Homo sapiens
MAEPGHSHHLSARVRGRTERRIPRLWRLLLWAGTAFQVTQGTGPELHACKEPSPATPGSFWI

SEQ ID NO: 7455 - protein, 91 aa, Homo sapiens
MAEPGHSHHLSARVRGRTERRIPRLWRLLLWAGTAFQVTQGTGPELHACKESEYHYEYTACDSTGSRWRVAVPHTPGLCTSLPDPIKGTEC

SEQ ID NO: 7456 - protein, 152 aa, Homo sapiens
MAEPGHSHHLSARVRGRTERRIPRLWRLLLWAGTAFQVTQGTGPELHACKESEYHYEYTACDSTGSRWRVAVPHTPGLCTSLPDPIKGTECSFSCNAGEFLDMKDQSCKPCAEGRYSLGTGIRFDEWDELPHGFASLSANMELDDSAAESTG

SEQ ID NO: 7457 - protein, 156 aa, Homo sapiens
MAEPGHSHHLSARVRGRTERRIPRLWRLLLWAGTAFQVTQGTGPELHACKESEYHYEYTACDSTGSRWRVAVPHTPGLCTSLPDPIKGTECSFSCNAGEFLDMKDQSCKPCAEGRYSLGTGIRFDEWDELPHGFASLSANMELDDSAAESTGNCTS

SEQ ID NO: 7458 - protein, 205 aa, Homo sapiens
MAEPGHSHHLSARVRGRTERRIPRLWRLLLWAGTAFQVTQGTGPELHACKESEYHYEYTACDSTGSRWRVAVPHTPGLCTSLPDPIKGTECSFSCNAGEFLDMKDQSCKPCAEGRYSLGTGIRFDEWDELPHGFASLSANMELDDSAAESTGNCTSSKWVPRGDYIASNTDECTATLMYAVNLKQSGTVNFEYYYPDSSIIFEFF

SEQ ID NO: 7459 - protein, 1013 aa, Homo sapiens
MAEPGHSHHLSARVRGRTERRIPRLWRLLLWAGTAFQVTQGTGPELHACKESEYHYEYTACDSTGSRWRVAVPHTPGLCTSLPDPIKGTECSFSCNAGEFLDMKDQSCKPCAEGRYSLGTGIRFDEWDELPHGFASLSANMELDDSAAESTGNCTSSKWVPRGDYIASNTDECTATLMYAVNLKQSGTVNFEYYYPDSSIIFEFFVQNDQCQPNADDSRWMKTTEKGWEFHSVELNRGNNVLYWRTTAFSVWTKVPKPVLVRNIAITGVAYTSECFPCKPGTYADKQGSSFCKLCPANSYSNKGETSCHQCDPDKYSEKGSSSCNVRPACTDKDYFYTHTACDANGETQLMYKWAKPKICSEDLEGAVKLPASGVKTHCPPCNPGFFKTNNSTCQPCPYGSYSNGSDCTRCPAGTEPAVGFEYKWWNTLPTNMETTVLSGINFEYKGMTGWEVAGDHIYTAAGASDNDFMILTLVVPGFRPPQSVMADTENKEVARITFVFETLCSVNCELYFMVGVNSRTNTPVETWKGSKGKQSYTYIIEENTTTSFTWAFQRTTFHEASRKYTNDVAKIYSINVTNVMNGVASYCRPCALEASDVGSSCTSCPAGYYIDRDSGTCHSCPTNTILKAHQPYGVQACVPCGPGTKNNKIHSLCYNDCTFSRNTPTRTFNYNFSALANTVTLAGGPSFTSKGLKYFHHFTLSLCGNQGRKMSVCTDNVTDLRIPEGESGFSKSITAYVCQAVIIPPEVTGYKAGVSSQPVSLADRLIGVTTDMTLDGITSPAELFHLESLGIPDVIFFYRSNDVTQSCSSGRSTTIRVRCSPQKTVPGSLLLPGTCSDGTCDGCNFHFLWESAAACPLCSVADYHAIVSSCVAGIQKTTYVWREPKLCSGGISLPEQRVTICKTIDFWLKVGISAGTCTAILLTVLTCYFWKKNQKLEYKYSKLVMNATLKDCDLPAADSCAIMEGEDVEDDLIFTSKKSLFGKIKSFTSKRTPDGFDSVPLKTSSGGLDMDL

SEQ ID NO: 7460 - protein, 901 aa, Homo sapiens
MAEPGHSHHLSARVRGRTERRIPRLWRLLLWAGTAFQVTQGTGPELHACKESEYHYEYTACDSTGSRWRVAVPHTPGLCTSLPDPIKGTECSFSCNAGEFLDMKDQSCKPCAEGRYSLGTGIRFDEWDELPHGFASLSANMELDDSAAESTGNCTSSKWVPRGDYIASNTDECTATLMYAVNLKQSGTVNFEYYYPDSSIIFEFFVQNDQCQPNADDSRWMKTTEKGWEFHSVELNRGNNVLYWRTTAFSVWTKVPKPVLVRNIAITEKGSSSCNVRPACTDKDYFYTHTACDANGETQLMYKWAKPKICSEDLEGAVKLPASGVKTHCPPCNPGFFKTNNSTCQPCPYGSYSNGSDCTRCPAGTEPAVGFEYKWWNTLPTNMETTVLSGINFEYKGMTGWEVAGDHIYTAAGASDNDFMILTLVVPGFRPPQSVMADTENKEVARITFVFETLCSVNCELYFMVGVNSRTNTPVETWKGSKGKQSYTYIIEENTTTSFTWAFQRTTFHEASRKYTNDVAKIYSINVTNVMNGVASYCRPCALEASDVGSSCTSCPAGYYIDRDSGTCHSCPTNTILKAHQPYGVQACVPCGPGTKNNKIHSLCYNDCTFSRNTPTRTFNYNFSALANTVTLAGGPSFTSKGLKYFHHFTLSLCGNQGRKMSVCTDNVTDLRIPEGESGFSKSITAYVCQAVIIPPEVTGYKAGVSSQPVSLADRLIGVTTDMTLDGITSPAELFHLESLGIPDVIFFYRSNDVTQSCSSGRSTTIRVRCSPQKTVPGSLLLPGTCSDGTCDGCNFHFLWESAAACPLCSVADYHAIVSSCVAGIQKTTYVWREPKLCSGGISLPEQRVTICKTIDFWLKVGISAGTCTAILLTVLTCYFWKKNQKLEYKYSKLVMNATLK

SEQ ID NO: 7461 - protein, 926 aa, Homo sapiens
MAEPGHSHHLSARVRGRTERRIPRLWRLLLWAGTAFQVTQGTGPELHACKESEYHYEYTACDSTGSRWRVAVPHTPGLCTSLPDPIKGTECSFSCNAGEFLDMKDQSCKPCAEGRYSLGTGIRFDEWDELPHGFASLSANMELDDSAAESTGNCTSSKWVPRGDYIASNTDECTATLMYAVNLKQSGTVNFEYYYPDSSIIFEFFVQNDQCQPNADDSRWMKTTEKGWEFHSVELNRGNNVLYWRTTAFSVWTKVPKPVLTQLMYKWAKPKICSEDLEGAVKLPASGVKTHCPPCNPGFFKTNNSTCQPCPYGSYSNGSDCTRCPAGTEPAVGFEYKWWNTLPTNMETTVLSGINFEYKGMTGWEVAGDHIYTAAGASDNDFMILTLVVPGFRPPQSVMADTENKEVARITFVFETLCSVNCELYFMVGVNSRTNTPVETWKGSKGKQSYTYIIEENTTTSFTWAFQRTTFHEASRKYTNDVAKIYSINVTNVMNGVASYCRPCALEASDVGSSCTSCPAGYYIDRDSGTCHSCPTNTILKAHQPYGVQACVPCGPGTKNNKIHSLCYNDCTFSRNTPTRTFNYNFSALANTVTLAGGPSFTSKGLKYFHHFTLSLCGNQGRKMSVCTDNVTDLRIPEGESGFSKSITAYVCQAVIIPPEVTGYKAGVSSQPVSLADRLIGVTTDMTLDGITSPAELFHLESLGIPDVIFFYRSNDVTQSCSSGRSTTIRVRCSPQKTVPGSLLLPGTCSDGTCDGCNFHFLWESAAACPLCSVADYHAIVSSCVAGIQKTTYVWREPKLCSGGISLPEQRVTICKTIDFWLKVGISAGTCTAILLTVLTCYFWKKNQKLEYKYSKLVMNATLKDCDLPAADSCAIMEGEDVEDDLIFTSKKSLFGKIKSFTSKRTPDGFDSVPLKTSSGGLDMDL

SEQ ID NO: 7462 - protein, 838 aa, Homo sapiens
MYAFYSLLIYIFYSLFRRDGGAAAAAEPGDPAQRARKPRGRRRPDLPAPELWTELTGLAASSEPEDGSEGAAEGRAAAVSLEEALLRLAEFLSVQLGAEESCGGPADLGQSGEVPSLLTVTSQLLALLAWLRSPRGRQALLQGTQPAPRVRPPSPDGSTSQEESPSHFTAVPGEPLGDETQGQQPLQLEEDQRAWQRLEQLILGQLEELKQQLEQQEEELGRLRLGVGATDSEKRVQHLTLENEALKQSLSLMRDLLLHWGPGPPIRAPQEEAEALLELQGRLQEAQDTTEALRAQLGVQEVQLQGLQGALQQLQQETEQNCRRELQQMHGQLAGLRARMASLRQGCGDLRGLVSTFTQSCQGSLSEARGQVSWALGALSSGGPGTQLPEGQQGPPAGCPGRLPELKGNIRVLCRLRPGTSSSLVSVEPGPGGTVTTCYRGRHRRFRLDWVFPPDASQEEVFRELEPAVLSCLRGYSVCIFTYGQTGTGKTYSMEGPPEDPGIVPRALQSLFREMGAGRQHRVTLSMVEIYNEAVRDLLAPGPPERLAVRQGPEGQGGIQVAGLTHWDVPNLETLHQMLKLGRSNRATAATAMNQRSSRSHALVTLTLRAASPPRAPGTAGTLHLVDLAGSERARKAGAAGPPRGDPDGARRLREAQTINRSLLALGGVMAALRAHRPHVPFRDSQLTRLLQPALGPGTTAVLLLQVGAGAGQVCACRSPPTRARPPAPLARRSPRGRRISGRQSAPSSSPTEWVKWSWGQPGAAGSRAPPGRLLPSAPTLRSPGPPAPLRRPLAVLHAPVPTTARARLSRPQRACPSSPGSRPCPWGLRPGLCWQRR

SEQ ID NO: 7463 - protein, 744 aa, Homo sapiens
MYAFYSLLIYIFYSLFRRDGGAAAAAEPGDPAQRARKPRGRRRPDLPAPELWTELTGLAASSEPEDGSEGAAEGRAAAVSLEEALLRLAEFLSVQLGAEESCGGPADLGQSGEVPSLLTVTSQLLALLAWLRSPRGRQALLQGTQPAPRVRPPSPDGSTSQEESPSHFTAVPGEPLGDETQGQQPLQLEEDQRAWQRLEQLILGQLEELKQQLEQQEEELGRLRLGVGATDSEKRVQHLTLENEALKQSLSLMRDLLLHWGPGPPIRAPQEEAEALLELQGRLQEAQDTTEALRAQLQQETEQNCRRELQQMHGQLAGLRARMASLRQGCGDLRGLVSTFTQSCQGSLSEARGQVSWALGALSSGGPGTQLPEGQQGPPAGCPGRLPELKGNIRVLCRLRPGTSSSLVSVEPGPGGTVTTCYRGRHRRFRLDWVFPPDASQEEVFRELEPAVLSCLRGYSVCIFTYGQTGTGKTYSMEGPPEDPGIVPRALQSLFREMGAGRQHRVTLSMVEIYNEAVRDLLAPGPPERLAVRQGPEGQGGIQVAGLTHWDVPNLETLHQMLKLGRSNRATAATAMNQRSSRSHALVTLTLRAASPPRAPGTAGTLHLVDLAGSERARKAGAAGPPRGDPDGARRLREAQTINRSLLALGGVMAALRAHRPHVPFRDSQLTRLLQPALGPGTTAVLLLQISTRPEDLGETVCSLKFADRVGQVELGPARRRRVPRSSGTPSSLSTDTPLTGTPC

SEQ ID NO: 7464 - protein, 791 aa, Homo sapiens
MYAFYSLLIYIFYSLFRRDGGAAAAAEPGDPAQRARKPRGRRRPDLPAPELWTELTGLAASSEPEDGSEGAAEGRAAAVSLEEALLRLAEFLSVQLGAEESCGGPADLGQSGEVPSLLTVTSQLLALLAWLRSPRGRQALLQGTQPAPRVRPPSPDGSTSQEESPSHFTAVPGEPLGDETQGQQPLQLEEDQRAWQRLEQLILGQLEELKQQLEQQEEELGRLRLGVGATDSEKRVQHLTLENEALKQSLSLMRDLLLHWGPGPPIRAPQEEAEALLELQGRLQEAQDTTEALRAQLGVQEVQLQGLQGALQQLQQETEQNCRRELQQMHGQLAGLRARMASLRQGCGDLRGLVSTFTQSCQGSLSEARGQVSWALGALSSGGPGTQLPEGQQGPPAGCPGRLPELKGNIRVLCRLRPGTSSSLVSVEPGPGGTVTTCYRGRHRRFRLDWVFPPDASQEEVFRELEPAVLSCLRGYSVCIFTYGQTGTGKTYSMEGPPEDPGIVPRALQSLFREMGAGRQHRVTLSMVEIYNEAVRDLLAPGPPERLAVRQGPEGQGGIQVAGLTHWDVPNLETLHQMLKLGRSNRATAATAMNQRSSRSHALVTLTLRAASPPRAPGTAGTLHLVDLAGSERARKAGAAGPPRGDPDGARRLREAQTINRSLLALGGVMAALRAHRPHVPFRDSQLTRLLQPALGPGTTAVLLLQISTRPEDLGETVCSLKFADRVGQVELGPARRRRVPRSSGTPSSLSTDTPLTGTPCTPTPSPGSPPCPSPDNGSGSALAPAEGLPL

SEQ ID NO: 7465 - protein, 325 aa, Homo sapiens
MSMSPTVIILACLGFFLDQSVWAHVGGQDKPFCSAWPSAVVPQGGHVTLRCHYRRGFNIFTLYKKDGVPVPELYNRIFWNSFLISPVTPAHAGTYRCRGFHPHSPTEWSAPSNPLVIMVTGLYEKPSLTARPGPTVRAGENVTLSCSSQSSFDIYHLSREGEAHELRLPAVPSINGTFQADFPLGPATHGETYRCFGSFHGSPYEWSDPSDPLPVSVTDAAVMNQEPAGHRTVNREDSDEQDPQEVTYAQLDHCIFTQRKITGPSQRSKRPSTDTSVCIELPNAEPRALSPAHEHHSQALMGSSRETTALSQTQLASSNVPAAGI

SEQ ID NO: 7466 - protein, 342 aa, Homo sapiens
MSMSPTVIILACLGFFLDQSVWAHVGGQDKPFCSAWPSAVVPQGGHVTLRCHYRRGFNIFTLYKKDGVPVPELYNRIFWNSFLISPVTPAHAGTYRCRGFHPHSPTEWSAPSNPLVIMVTGLYEKPSLTARPGPTVRAGENVTLSCSSQSSFDIYHLSREGEAHELRLPAVPSINGTFQADFPLGPATHGETYRCFGSFHGSPYEWSDPSDPLPVSVTGNPSSSWPSPTEPSFKTDAAVMNQEPAGHRTVNREDSDEQDPQEVTYAQLDHCIFTQRKITGPSQRSKRPSTDTSVCIELPNAEPRALSPAHEHHSQALMGSSRETTALSQTQLASSNVPAAGI

SEQ ID NO: 7467 - protein, 273 aa, Homo sapiens
MSMSPTVIILACLGFFLDQSVWAHVGGQDKPFCSAWPSAVVPQGGHVTLRCHYRRGFNIFTLYKKDGVPVPELYNRIFWNSFLISPVTPAHAGTYRCRGFHPHSPTEWSAPSNPLVIMVTGLYEKPSLTARPGPTVRAGENVTLSCSSQSSFDIYHLSREGEAHELRLPAVPSINGTFQADFPLGPATHGETYRCFGSFHGSPYEWSDPSDPLPVSVTGNPSSSWPSPTEPSFKTGIARHLHAVIRYSVAIILFTILPFFLLHRWCSKKKMLL

SEQ ID NO: 7468 - protein, 230 aa, Homo sapiens
MSMSPTVIILACLGFFLDQSVWAHVGLYEKPSLTARPGPTVRAGENVTLSCSSQSSFDIYHLSREGEAHELRLPAVPSINGTFQADFPLGPATHGETYRCFGSFHGSPYEWSDPSDPLPVSVTDAAVMNQEPAGHRTVNREDSDEQDPQEVTYAQLDHCIFTQRKITGPSQRSKRPSTDTSVCIELPNAEPRALSPAHEHHSQALMGSSRETTALSQTQLASSNVPAAGI

SEQ ID NO: 7469 - protein, 247 aa, Homo sapiens
MSMSPTVIILACLGFFLDQSVWAHVGLYEKPSLTARPGPTVRAGENVTLSCSSQSSFDIYHLSREGEAHELRLPAVPSINGTFQADFPLGPATHGETYRCFGSFHGSPYEWSDPSDPLPVSVTGNPSSSWPSPTEPSFKTDAAVMNQEPAGHRTVNREDSDEQDPQEVTYAQLDHCIFTQRKITGPSQRSKRPSTDTSVCIELPNAEPRALSPAHEHHSQALMGSSRETTALSQTQLASSNVPAAGI

SEQ ID NO: 7470 - protein, 416 aa, Homo sapiens
MSPSHVVVNVSTARSGPLTTSSAPVSRAESLRPGSRSCTMSMSPTVIILACLGFFLDQSVWAHVGGQDKPFCSAWPSAVVPQGGHVTLRCHYRRGFNIFTLYKKDGVPVPELYNRIFWNSFLISPVTPAHAGTYRCRGFHPHSPTEWSAPSNPLVIMVTGLYEKPSLTARPGPTVRAGENVTLSCSSQSSFDIYHLSREGEAHELRLPAVPSINGTFQADFPLGPATHGETYRCFGSFHGSPYEWSDPSDPLPVSVTGNPSSSWPSPTEPSFKTGIARHLHAVIRYSVAIILFTILPFFLLHRWCSKKKDAAVMNQEPAGHRTVNREDSDEQDPQEVTYAQLDHCIFTQRKITGPSQRSKRPSTDTSVCIELPNAEPRALSPAHEHHSQALMGSSRETTALSQTQLASSNVPAAGI

SEQ ID NO: 7471 - protein, 398 aa, Homo sapiens
  VARIANT 1: note = misc_feature - Xaa can be any naturally occurring amino acid
XMSPTVIILACLGFFLDQSVWAHVGGQDKPFCSAWPSAVVPQGGHVTLRCHYRRGFNIFTLYKKDGVPVPELYNRIFWNSFLISPVTPAHAGTYRCRGFHPHSPTEWSAPSNPLVIMVTGLYEKPSLTARPGPTVRAGENVTLSCSSQSSFDIYHLSREGEAHELRLPAVPSINGTFQADFPLGPATHGETYRCFGSFHGSPYEWSDPSDPLPVSVTGNPSSSWPSPTEPSFKTGIARHLHAVIRYSVAIILFTILPFFLLHRWCSKKKVSLTKQRPENSGPCAEAGWEHADAAVMNQEPAGHRTVNREDSDEQDPQEVTYAQLDHCIFTQRKITGPSQRSKRPSTDTSVCIELPNAEPRALSPAHEHHSQALMGSSRETTALSQTQLASSNVPAAGI

SEQ ID NO: 7472 - protein, 139 aa, Homo sapiens
MAPKLITVLCLGFCLNQKICPHAGAQDKFSLSAWPSPVVPLGGRVTLSCHSHLRFVIWTIFQTTGTRSHELHTGLSNNITISPVTPEHAGTYRCVGIYKHASKWSAESNSLKIIVTAFSLHPGGPHDEAGREVDPLLQL

SEQ ID NO: 7473 - protein, 133 aa, Homo sapiens
MAPKLITVLCLGFCLNQKICPHAGAQDKFSLSAWPSPVVPLGGRVTLSCHSHLRFVIWTIFQTTGTRSHELHTGLSNNITISPVTPEHAGTYRCVGIYKHASKWSAESNSLKIIVTGGPHDEAGREVDPLLQL

SEQ ID NO: 7474 - protein, 133 aa, Homo sapiens; identical to SEQ ID NO: 7473

SEQ ID NO: 7475 - protein, 352 aa, Homo sapiens
MAPKLITVLCLGFCLNQKICPHAGAQDKFSLSAWPSPVVPLGGRVTLSCHSHLRFVIWTIFQTTGTRSHELHTGLSNNITISPVTPEHAGTYRCVGIYKHASKWSAESNSLKIIVTGLFTKPSISAHPSSLVHAGARVSLRCHSELAFDEFILYKEGHIQHSQQLDQGMEAGIHYVEAVFSMGPVTPAHAGAYRCCGCFSHSRYEWSAPSDPLDIVITGKYKKPSLSTQVDPMMRLGEKLTLFCSSEISFDQYHLFRHGVAHGQWLSGGQRHREAFQANFSVGRATPVPGGTYRCYGSFNDSPYKPPVTRCNFTPQETLRVLLCHSQNPPLNLTHLALKDSPATCICSLDSQ

SEQ ID NO: 7476 - protein, 365 aa, Homo sapiens
MAPKLITVLCLGFCLNQKICPHAGAQDKFSLSAWPSPVVPLGGRVTLSCHSHLRFVIWTIFQTTGTRSHELHTGLSNNITISPVTPEHAGTYRCVGIYKHASKWSAESNSLKIIVTGLFTKPSISAHPSSLVHAGARVSLRCHSELAFDEFILYKEGHIQHSQQLDQGMEAGIHYVEAVFSMGPVTPAHAGAYRCCGCFSHSRYEWSAPSDPLDIVITGKYKKPSLSTQVDPMMRLGEKLTLFCSSEISFDQYHLFRHGVAHGQWLSGGQRHREAFQANFSVGRATPVPGGTYRCYGSFNDSPYKPPVTRCNFTPQETLRVLLCHSQNPPLNLTPPWQTQSPRKANGRMKRSLQQKRHRRSYMPS

SEQ ID NO: 7477 - protein, 191 aa, Homo sapiens
MLRMRVPALLVLLFCFRGRAGPSPHFLQQPEDLVVLLGEEARLPCALGAYWGLVQWTKSGLALGGQRDLPGWSRYWISGNAANGQHDLHIRPVELEDEASYECQATQAGLRSRPAQLHVLVPPEAPQVLGGPSVSLVAGVPANLTCRSRGDARPTPELLWFRDGVLLDGATFHQTLLKEGTPGSVESTLTL

SEQ ID NO: 7478 - protein, 633 aa, Homo sapiens
MLRMRVPALLVLLFCFRGRAGPSPHFLQQPEDLVVLLGEEARLPCALGAYWGLVQWTKSGLALGGQRDLPGWSRYWISGNAANGQHDLHIRPVELEDEASYECQATQAGLRSRPAQLHVLVPPEAPQVLGGPSVSLVAGVPANLTCRSRGDARPTPELLWFRDGVLLDGATFHQTLLKEGTPGSVESTLTLTPFSHDDGATFVCRARSQALPTGRDTAITLSLQYPPEVTLSASPHTVQEGEKVIFLCQATAQPPVTGYRWAKGGSPVLGARGPRLEVVADASFLTEPVSCEVSNAVGSANRSTALDVLFGPILQAKPEPVSVDVGEDASFSCAWRGNPLPRVTWTRRGGAQVLGSGATLRLPSVGPEDAGDYVCRAEAGLSGLRGGAAEARLTVNAPPVVTALHSAPAFLRGPARLQCLVFASPAPDAVVWSWDEGFLEAGSQGRFLVETFPAPESRGGLGPGLISVLHISGTQESDFSRSFNCSARNRLGEGGAQASLGRRDLLPTVRIVAGVAAATTTLLMVITGVALCCWRHSKASASFSEQKNLMRIPGSSDGSSSRGPEEEETGSREDRGPIVHTDHSDLVLEEEGTLETKDPTNGYYKVRGVSPPASPDSRVTSFQWKSPGISNLP

SEQ ID NO: 7479 - protein, 708 aa, Homo sapiens
MLRMRVPALLVLLFCFRGRAGPSPHFLQQPEDLVVLLGEEARLPCALGAYWGLVQWTKSGLALGGQRDLPGWSRYWISGNAANGQHDLHIRPVELEDEASYECQATQAGLRSRPAQLHVLVPPEAPQVLGGPSVSLVAGVPANLTCRSRGDARPTPELLWFRDGVLLDGATFHQTLLKEGTPGSVESTLTLTPFSHDDGATFVCRARSQALPTGRDTAITLSLQYPPEVTLSASPHTVQEGEKVIFLCQATAQPPVTGYRWAKGGSPVLGARGPRLEVVADASFLTEPVSCEVSNAVGSANRSTALDVLFGPILQAKPEPVSVDVGEDASFSCAWRGNPLPRVTWTRRGGAQVLGSGATLRLPSVGPEDAGDYVCRAEAGLSGLRGGAAEARLTVNAPPVVTALHSAPAFLRGPARLQCLVFASPAPDAVVWSWDEGFLEAGSQGRFLVETFPAPESRGGLGPGLISVLHISGTQESDFSRSFNCSARNRLGEGGAQASLGRRDLLPTVRIVAGVAAATTTLLMVITGVALCCWRHSKASASFSEQKNLMRIPGSSDGSSSRGPEEEETGSREDRGPIVHTDHSDLVLEEEGTLETKDPTNGYYKVRGVSVSLSLGEAPGGGLFLPPPSPLGPPGTPTFYDFNPHLGMVPPCRLYRARAGYLTTPHPRAFTSYIKPTSFGPPDLAPGTPPFPYAAFPTPSHPRLQTHV

SEQ ID NO: 7480 - protein, 673 aa, Homo sapiens
MLRMRVPALLVLLFCFRGRAGPSPHFLQQPEDLVVLLGEEARLPCALGAYWGLVQWTKSGLALGGQRDLPGWSRYWISGNAANGQHDLHIRPVELEDEASYECQATQAGLRSRPAQLHVLVPPEAPQVLGGPSVSLVAGVPANLTCRSRGDARPTPELLWFRDGVLLDGATFHQTLLKEGTPGSVESTLTLTPFSHDDGATFVCRARSQALPTGRDTAITLSLQYPPEVTLSASPHTVQEGEKVIFLCQATAQPPVTGYRWAKGGSPVLGARGPRLEVVADASFLTEPVSCEVSNAVGSANRSTALDVLFGPILQAKPEPVSVDVGEDASFSCAWRGNPLPRVTWTRRGGAQVLGSGATLRLPSVGPEDAGDYVCRAEAGLSGLRGGAAEARLTVNAPPVVTALHSAPAFLRGPARLQCLVFASPAPDAVVWSWDEGFLEAGSQGRFLVETFPAPESRGGLGPGLISVLHISGTQESDFSRSFNCSARNRLGEGGAQASLGRRASASFSEQKNLMRIPGSSDGSSSRGPEEEETGSREDRGPIVHTDHSDLVLEEEGTLETKDPTNGYYKVRGVSVSLSLGEAPGGGLFLPPPSPLGPPGTPTFYDFNPHLGMVPPCRLYRARAGYLTTPHPRAFTSYIKPTSFGPPDLAPGTPPFPYAAFPTPSHPRLQTHV

SEQ ID NO: 7481 - protein, 583 aa, Homo sapiens
MLRMRVPALLVLLFCFRGRAGWSRYWISGNAANGQHDLHIRPVELEDEASYECQATQAGLRSRPAQLHVLVPPEAPQVLGGPSVSLVAGVPANLTCRSRGDARPTPELLWFRDGVLLDGATFHQTLLKEGTPGSVESTLTLTPFSHDDGATFVCRARSQALPTGRDTAITLSLQYPPEVTLSASPHTVQEGEKVIFLCQATAQPPVTGYRWAKGGSPVLGARGPRLEVVADASFLTEPVSCEVSNAVGSANRSTALDVLFGPILQAKPEPVSVDVGEDASFSCAWRGNPLPRVTWTRRGGAQVLGSGATLRLPSVGPEDAGDYVCRAEAGLSGLRGGAAEARLTVNAPPVVTALHSAPAFLRGPARLQCLVFASPAPDAVVWSWDEGFLEAGSQGRFLVETFPAPESRGGLGPGLISVLHISGTQESDFSRSFNCSARNRLGEGGAQASLGRRDLLPTVRIVAGVAAATTTLLMVITGVALCCWRHSKASASFSEQKNLMRIPGSSDGSSSRGPEEEETGSREDRGPIVHTDHSDLVLEEEGTLETKDPTNGYYKVRGVSPPASPDSRVTSFQWKSPGISNLP

SEQ ID NO: 7482 - protein, 138 aa, Homo sapiens
MNSLVSWQLLLFLCATHFGEPLEKVASVGNSRPTGQQLESLGLLAPGEQSLPCTERKPAATARLSRRGTSLSPPPESSGSPQQPGLSAPHSRQIPAPQGAVLVQREKDLPNYNWNSFGLRFGKREAAPGNHGRSAGRG

SEQ ID NO: 7483 - protein, 144 aa, Homo sapiens [sequence omitted]

SEQ ID NO: 7484 - protein, 708 aa, Homo sapiens
MAAAAVAAAAAAAAAASLQVLEMESMETAAAGSAGLAAEVRGSGTVDFGPGPGISAMEASGGDPGPEAEDFECSSHCSELSWRQNEQRRQGLFCDITLCFGGAGGREFRAHRSVLAAATEYFTPLLSGQFSESRSGRVEMRKWSSEPGPEPDTVEAVIEYMYTGRIRVSTGSVHEVLELADRFLLIRLKEFCGEFLKKKLHLSNCVAIHSLAHMYTLSQLALKAADMIRRNFHKVIQDEEFYTLPFHLIRDWLSDLEITVDSEEVLFETVLKWVQRNAEERERYFEELFKLLRLSQMKPTYLTRHVKPERLVANNEVCVKLVADAVERHALRAENIQSGTCQHPTSHVSLLPRYGQNMDVIMVIGGVSEGGDYLSECVGYFVDEDRWVNLPHIHNHLDGHAVAVTESYVYVAGSMEPGFAKTVERYNPNLNTWEHVCSLMTRKHSFGLTEVKGKLYSIGGHGNFSPGFKDVTVYNPELDKWHNLESAPKILRDVKALAIEDRFVYIAARTPVDRDTEDGLKAVITCYDTETRQWQDVESLPLIDNYCFFQMSVVNSNFYQTASCCPKSYCLENEEAVRKIASQVSDEILESLPPEVLSIEGAAICYYKDDVFIIGGWKNSDDIDKQYRKEAYRYCAERKRWMLLPPMPQPRCRATACHVRIPYRYLHGTQRYPMPQNLMWQKDRIRQMQEIHRHALNMRRVPSSQIEC

SEQ ID NO: 7485 - protein, 235 aa, Homo sapiens
MAEEQEFTQLCKLPAQPSHPHCVNNTYRSAQHSQALLRGLLALRDSGILFDVVLVVEGRHIEAHRILLAASCDYFRGMFAGGLKEMEQEEVLIHGVSYNAMCQILHFIYTSELELSLSNVQETLVAACQLQIPEIIHFCCDFLMSWVDEENILDVYRLAELFDLSRLTEQLDTYILKNFVAFSRTDKYRQLPLEKVYSLLSSNRLEVSCETEVYEGALLYHYSLEQVQADQISLH

SEQ ID NO: 7486 - protein, 634 aa, Homo sapiens
MAEEQEFTQLCKLPAQPSHPHCVNNTYRSAQHSQALLRGLLALRDSGILFDVVLVVEGRHIEAHRILLAASCDYFRGMFAGGLKEMEQEEVLIHGVSYNAMCQILHFIYTSELELSLSNVQETLVAACQLQIPEIIHFCCDFLMSWVDEENILDVYRLAELFDLSRLTEQLDTYILKNFVAFSRTDKYRQLPLEKVYSLLSSNRLEVSCETEVYEGALLYHYSLEQVQADQISLHEPPKLLETVRFPLMEAEVLQRLHDKLDPSPLRDTVASALMYHRNESLQPSLQSPQTELRSDFQCVVGFGGIHSTPSTVLSDQAKYLNPLLGEWKHFTASLAPRMSNQGIAVLNNFVYLIGGDNNVQGFRAESRCWRYDPRHNRWFQIQSLQQEHADLSVCVVGRYIYAVAGRDYHNDLNAVERYDPATNSWAYVAPLKREVYAHAGATLEGKMYITCGRRGEDYLKETHCYDPGSNTWHTLADGPVRRAWHGMATLLNKLYVIGGSNNDAGYRRDVHQVACYSCTSGQWSSVCPLPAGHGEPGIAVLDNRIYVLGGRSHNRGSRTGYVHIYDVEKDCWEEGPQLDNSISGLAACVLTLPRSLLLEPPRGTPDRSQADPDFASEVMSVSDWEEFDNSSED

SEQ ID NO: 7487 - protein, 158 aa, Homo sapiens
MAEEQEFTQLCKLPAQPSHPHCVNNTYRSAQHSQALLRGLLALRDSGILFDVVLVVEGRHIEAHRILLAASCDYFRGMFAGGLKEMEQEEVLIHGVSYNAMCQILHFIYTSELELSLSNVQETLVAACQLQMLFTSPGLNGCHSLCRSQKLSISAVIS

SEQ ID NO: 7488 - protein, 225 aa, Homo sapiens
MFAGGLKEMEQEEVLIHGVSYNAMCQILHFIYTSELELSLSNVQETLVAACQLQIPEIIHFCCDFLMSWVDEENILDVYRLAELFDLSRLTEQLDTYILKNFVAFSRTDKYRQLPLEKVYSLLSSNRLEVSCETEVYEGALLYHYSLEQVQADQISLHEPPKLLETVRFPLMEAEVLQRLHDKLDPSPLRDTVASALMYHRNESLQPSLQSPQTELRSDFQCVVG

SEQ ID NO: 7489 - protein, 252 aa, Homo sapiens
MGLGSSCHLSLPKRAEALLCSRKATVVRDLVAVRMAEEQEFTQLCKLPAQPSHPHCVNNTYRSAQHSQALLRGLLALRDSGILFDVVLVVEGRHIEAHRILLAASCDYFRGMFAGGLKEMEQEEVLIHGVSYNAMCQILHFIYTSELELSLSNVQETLVAACQLQIPEIIHFCCDFLMSWVDEENILDVYRLAELFDLSRLTEQLDTYILKNFVAFSRTDKYRQLPLEKVYSLLSSNRLEVSCETEVYEGAL

SEQ ID NO: 7490 - protein, 107 aa, Homo sapiens
MPPPWHPPPRLLAVCLLTTTQATVVRDLVAVRMAEEQEFTQLCKLPAQPSHPHCVNNTYRSAQHSQALLRGLLALRDSGILFDVVLVVEGRHIEAHRILLAASCDYF

SEQ ID NO: 7491 - protein, 295 aa, Homo sapiens
MPPPWHPPPRLLAVCLLTTTQATVVRDLVAVRMAEEQEFTQLCKLPAQPSHPHCVNNTYRSAQHSQALLRGLLALRDSGILFDVVLVVEGRHIEAHRILLAASCDYFRGMFAGGLKEMEQEEVLIHGVSYNAMCQILHFIYTSELELSLSNVQETLVAACQLQIPEIIHFCCDFLMSWVDEENILDVYRLAELFDLSRLTEQLDTYILKNFVAFSRTDKYRQLPLEKVYSLLSSNRLEVSCETEVYEGALLYHYSLEQVQADQISLHEPPKLLETVRFPLMEAEVLQRLHDKLDP

SEQ ID NO: 7492 - protein, 56 aa, Homo sapiens
MWFLVLCLALSLGGTALVFWNPTPRILNAFSASASALASPKIASKRTPYPSSTLRP

SEQ ID NO: 7493 - protein, 262 aa, Homo sapiens
MWFLVLCLALSLGGTGAAPPIQSRIVGGWECEQHSQPWQAALYHFSTFQCGGILVHRQWVLTAAHCISDNYQLWLGRHNLFDDENTAQFVHVSESFPHPGFNMSLLENHTRQADEDYSHDLMLLRLTEPADTITDAVKVVELPTEEPEVGSTCLASGWGSIEPENFSFPDDLQCVDLKILPNDECKKAHVQKVTDFMLCVGHLEGGKDTCVGDSGGPLMCDGVLQGVTSWGYVPCGTPNKPSVAVRVLSYVKWIEDTIAENS

SEQ ID NO: 7494 - protein, 143 aa, Homo sapiens
MRAPHLHLSAASGARALAKLLPLLMAQLWAAEAALLPQNDTRLDPEAYGSPCARGSQPWQVSLFNGLSFHCAGVLVDQSWVLTAAHCGNKPLWARVGDDHLLLLQGEQLRRTTRSVVHPKYHQGSGPILPRRTDEHDLMLLKL

SEQ ID NO: 7495 - protein, 276 aa, Homo sapiens
MRAPHLHLSAASGARALAKLLPLLMAQLWAAEAALLPQNDTRLDPEAYGSPCARGSQPWQVSLFNGLSFHCAGVLVDQSWVLTAAHCGNKPLWARVGDDHLLLLQGEQLRRTTRSVVHPKYHQGSGPILPRRTDEHDLMLLKLARPVVLGPRVRALQLPYRCAQPGDQCQVAGWGTTAARRVKYNKGLTCSSITILSPKECEVFYPGVVTNNMICAGLDRGQDPCQSDSGGPLVCDETLQGILSWGVYPCGSAQHPAVYTQICKYMSWINKVIRSN

SEQ ID NO: 7496 - protein, 276 aa, Homo sapiens; identical to SEQ ID NO: 7495

SEQ ID NO: 7497 - protein, 276 aa, Homo sapiens; identical to SEQ ID NO: 7495

SEQ ID NO: 7498 - protein, 43 aa, Homo sapiens
MTTCCFFRESSSAGPLALLSIPSTTRAQAPSCQGERMSTISCC

SEQ ID NO: 7499 - protein, 282 aa, Homo sapiens
MQRLRWLRDWKSSGRGLTAAKEPGARSSPLQAMRILQLILLALATGLVGGETRIIKGFECKPHSQPWQAALFEKTRLLCGATLIAPRWLLTAAHCLKPRYIVHLGQHNLQKEEGCEQTRTATESFPHPGFNNSLPNKDHRNDIMLVKMASPVSITWAVRPLTLSSRCVTAGTSCLISGWGSTSSPQLRLPHTLRCANITIIEHQKCENAYPGNITDTMVCASVQEGGKDSCQGDSGGPLVCNQSLQGIISWGQDPCAITRKPGVYTKVCKYVDWIQETMKNN

SEQ ID NO: 7500 - protein, 116 aa, Homo sapiens
MQRLRWLRDWKSSGRGLTAAKEPGARSSPLQAMRILQLILLALATGLVGGETRIIKGFECKPHSQPWQAALFEKTRLLCGATLIAPRWLLTAAHCLKPWPLHSSPGAAQPPEGGGL

SEQ ID NO: 7501 - protein, 68 aa, Homo sapiens
MRILQLILLALATGLVGGETRIIKGFECKPHSQPWQAALFEKTRLLCGATLIAPRWLLTAAHCLKPRY

SEQ ID NO: 7502 - protein, 170 aa, Homo sapiens
MRILQLILLALATGLVGGETRIIKGFECKPHSQPWQAALFEKTRLLCGATLIAPRWLLTAAHCLKPRYIVHLGQHNLQKEEGCEQTRTATESFPHPGFNNSLPNKDHRNDIMLVKMASPVSITWAVRPLTLSSRCVTAGTSCLISGWGSTSSPQLRLPHTLRCANITIIE

SEQ ID NO: 7503 - protein, 250 aa, Homo sapiens
MRILQLILLALATGLVGGETRIIKGFECKPHSQPWQAALFEKTRLLCGATLIAPRWLLTAAHCLKPRYIVHLGQHNLQKEEGCEQTRTATESFPHPGFNNSLPNKDHRNDIMLVKMASPVSITWAVRPLTLSSRCVTAGTSCLISGWGSTSSPQLRLPHTLRCANITIIEHQKCENAYPGNITDTMVCASVQEGGKDSCQGDSGGPLVCNQSLQGIISWGQDPCAITRKPGVYTKVCKYVDWIQETMKNN

SEQ ID NO: 7504 - protein, 250 aa, Homo sapiens; identical to SEQ ID NO: 7503

SEQ ID NO: 7505 - protein, 275 aa, Homo sapiens
MRILQLILLALATGLVGGETRIIKGFECKPHSQPWQAALFEKTRLLCGATLIAPRWLLTAAHCLKPWVSLTSPTHVSPDLSSSNYCLSHLSRYIVHLGQHNLQKEEGCEQTRTATESFPHPGFNNSLPNKDHRNDIMLVKMASPVSITWAVRPLTLSSRCVTAGTSCLISGWGSTSSPQLRLPHTLRCANITIIEHQKCENAYPGNITDTMVCASVQEGGKDSCQGDSGGPLVCNQSLQGIISWGQDPCAITRKPGVYTKVCKYVDWIQETMKNN

SEQ ID NO: 7506 - protein, 109 aa, Homo sapiens
MRILQLILLALATVRLPHTLRCANITIIEHQKCENAYPGNITDTMVCASVQEGGKDSCQGDSGGPLVCNQSLQGIISWGQDPCAITRKPGVYTKVCKYVDWIQETMKNN

SEQ ID NO: 7507 - protein, 141 aa, Homo sapiens
  VARIANT 1: note = misc_feature - Xaa can be any naturally occurring amino acid
XNSLPNKDHRNDIMLVKMASPVSITWAVRPLTLSSRCVTAGTSCLISGWGSTSSPQLRLPHTLRCANITIIEHQKCENAYPGNITDTMVCASVQEGGKDSCQSLQGIISWGQDPCAITRKPGVYTKVCKYVDWIQETMKNN

SEQ ID NO: 7508 - protein, 79 aa, Homo sapiens
MGLSIFLLLCVLGEFSRSRERAGLRLDPFTPMRRPHHPPHLSSGPQPGGEEERGFLCASIYLQLSGAQPGSHTEDFQWH

SEQ ID NO: 7509 - protein, 79 aa, Homo sapiens; identical to SEQ ID NO: 7508

SEQ ID NO: 7510 - protein, 111 aa, Homo sapiens
MGLSIFLLLCVLGLSQAATPKIFNGTECGRNSQPWQVGLFEGTSLRCGGVLIDHRWVLTAAHCSGRPIPGSAPVPQPLHRLPCHLPWCVSRENHEQHGVCRRRPGAGCLPG

SEQ ID NO: 7511 - protein, 248 aa, Homo sapiens
MGLSIFLLLCVLGLSQAATPKIFNGTECGRNSQPWQVGLFEGTSLRCGGVLIDHRWVLTAAHCSGSRYWVRLGEHSLSQLDWTEQIRHSGFSVTHPGYLGASTSHEHDLRLLRLRLPVRVTSSVQPLPLPNDCATAGTECHVSGWGITNHPRNPFPDLLQCLNLSIVSHATCHGVYPGRITSNMVCAGGVPGQDACQGDSGGPLVCGGVLQGLVSWGSVGPCGQDGIPGVYTYICKYVDWIRMIMRNN

SEQ ID NO: 7512 - protein, 248 aa, Homo sapiens; identical to SEQ ID NO: 7511

SEQ ID NO: 7513 - protein, 254 aa, Homo sapiens
MGLSIFLLLCVLGLSQAATPKIFNGTECGRNSQPWQVGLFEGTSLRCGGVLIDHRWVLTAAHCSGSRYWVRLGEHSLSQLDWTEQIRHSGFSVTHPGYLGASTSHEHDLRLLRLRLPVRVTSSVQPLPLPNDCATAGTECHVSGWGITNHPRNPFPDLLQCLNLSIVSHATCHGVYPGRITSNMVCAGGVPGQDACQGDSGGPLVCGGVLQGLVSWGSVGPCGQDGIPGVYTYICNSTLVGLGTSWNFNSCQPF

SEQ ID NO: 7514 - protein, 177 aa, Homo sapiens
MGLSIFLLLCVLGLSQAATPKIFNGTECGRNSQPWQVGLFEGTSLRCGGVLIDHRWVLTAAHCSGSRYWVRLGEHSLSQLDWTEQIRHSGFSVTHPGYLGASTSHEHDLRLLRLRLPVRVTSSVQPLPLPNDCATAGTECHVSGWGITNHPRSKGPRARGQGSGWVQVWDAGREVES

SEQ ID NO: 7515 - protein, 98 aa, Homo sapiens
MGLIYKCLPEKVTVNIETRCLPGVFQGSQHQWDQWVSPRWLHLLPPLSALAGCPTSARAATLWGSPGPPQMGPHCRTLSKGGAQSLPRQARPRACGSW

SEQ ID NO: 7516 - protein, 98 aa, Homo sapiens; identical to SEQ ID NO: 7515

SEQ ID NO: 7517 - protein, 93 aa, Homo sapiens
MWPLALVIASLTLALSGGEDFKEPSQGPRDVMAASRPEAFPKGLTLEPRPEKGGICGCLAPGTILGLKVGWLFSSGDTPWIHARATPECHTLG

SEQ ID NO: 7518 - protein, 93 aa, Homo sapiens; identical to SEQ ID NO: 7517

SEQ ID NO: 7519 - protein, 99 aa, Homo sapiens
MWPLALVIASLTLALSGGVSQESSKVLNTNGTSGFLPGGYTCFPHSQPWQAALLVQGRLLCGGVLVHPKWVLTAAHCLKEGLKVYLGKHALGRVEAGEQ

SEQ ID NO: 7520 - protein, 180 aa, Homo sapiens
MWPLALVIASLTLALSGGVSQESSKVLNTNGTSGFLPGGYTCFPHSQPWQAALLVQGRLLCGGVLVHPKWVLTAAHCLKEGLKVYLGKHALGRVEAGEQVREVVHSIPHPEYRRSPTHLNHDHDIMLLELQSPVQLTGYIQTLPLSHNNRLTPGTTCRVSGWGTTTSPQGMHPHRWPEAP

SEQ ID NO: 7521 - protein, 277 aa, Homo sapiens
MWPLALVIASLTLALSGGVSQESSKVLNTNGTSGFLPGGYTCFPHSQPWQAALLVQGRLLCGGVLVHPKWVLTAAHCLKEGLKVYLGKHALGRVEAGEQVREVVHSIPHPEYRRSPTHLNHDHDIMLLELQSPVQLTGYIQTLPLSHNNRLTPGTTCRVSGWGTTTSPQVNYPKTLQCANIQLRSDEECRQVYPGKITDNMLCAGTKEGGKDSCEGDSGGPLVCNRTLYGIVSWGDFPCGQPDRPGVYTRVSRYVLWIRETIRKYETQQQKWLKGPQ

SEQ ID NO: 7522 - protein, 204 aa, Homo sapiens
MWPLALVIASLTLALSGGVSQESSKVLNTNGTSGFLPGGYTCFPHSQPWQAALLVQGRLLCGGVLVHPKWVLTAAHCLKEGLKVYLGKHALGRVEAVNYPKTLQCANIQLRSDEECRQVYPGKITDNMLCAGTKEGGKDSCEGDSGGPLVCNRTLYGIVSWGDFPCGQPDRPGVYTRVSRYVLWIRETIRKYETQQQKWLKGPQ

SEQ ID NO: 7523 - protein, 125 aa, Homo sapiens
MWPLALVIASLTLALSGVNYPKTLQCANIQLRSDEECRQVYPGKITDNMLCAGTKEGGKDSCEGDSGGPLVCNRTLYGIVSWGDFPCGQPDRPGVYTRVSRYVLWIRETIRKYETQQQKWLKGPQ

SEQ ID NO: 7524 - protein, 267 aa, Homo sapiens
MSLRVLGSGTWPSAPKMFLLLTALQVLAIAMTQSQEDENKIIGGHTCTRSSQPWQAALLAGPRRRFLCGGALLSGQWVITAAHCGRPILQVALGKHNLRRWEATQQVLRVVRQVTHPNYNSRTHDNDLMLLQLQQPARIGRAVRPIEVTQACASPGTSCRVSGWGTISSPIARYPASLQCVNINISPDEVCQKAYPRTITPGMVCAGVPQGGKDSCQGDSGGPLVCRGQLQGLVSWGMERCALPGYPGVYTNLCKYRSWIEETMRDK

SEQ ID NO: 7525 - protein, 267 aa, Homo sapiens; identical to SEQ ID NO: 7524

SEQ ID NO: 7526 - protein, 43 aa, Homo sapiens
MRVRLGEHNLRKRDGPEQLRTTSRVIPHPRYEARSHRNDIMLL

SEQ ID NO: 7527 - protein, 256 aa, Homo sapiens
MWLLLTLSFLLASTAAQDGDKLLEGDECAPHSQPWQVALYERGRFNCGASLISPHWVLSAAHCQSRFMRVRLGEHNLRKRDGPEQLRTTSRVIPHPRYEARSHRNDIMLLRLVQPARLNPQVRPAVLPTRCPHPGEACVVSGWGLVSHNEPGTAGSPRSQVSLPDTLHCANISIISDTSCDKSYPGRLTNTMVCAGAEGRGAESCEGDSGGPLVCGGILQGIVSWGDVPCDNTTKPGVYTKVCHYLEWIRETMKRN

SEQ ID NO: 7528 - protein, 120 aa, Homo sapiens
MWLLLTLSFLLASTAQDGDKLLEGDECAPHSQPWQVALYERGRFNCGASLISPHWVLSAAHCQSRFMRVRLGEHNLRKRDGPEQLRTTSRVIPHPRYEARSHRNDIMLLRLVQPARLNPQ

SEQ ID NO: 7529 - protein, 160 aa, Homo sapiens
MWLLLTLSFLLASTAQDGDKLLEGDECAPHSQPWQVALYERGRFNCGASLISPHWVLSAAHCQSRFMRVRLGEHNLRKRDGPEQLRTTSRVIPHPRYEARSHRNDIMLLRLVQPARLNPQVRPAVLPTRCPHPGEACVVSGWGLVSHNEPGTAGSPRSQG

SEQ ID NO: 7530 - protein, 255 aa, Homo sapiens
MWLLLTLSFLLASTAQDGDKLLEGDECAPHSQPWQVALYERGRFNCGASLISPHWVLSAAHCQSRFMRVRLGEHNLRKRDGPEQLRTTSRVIPHPRYEARSHRNDIMLLRLVQPARLNPQVRPAVLPTRCPHPGEACVVSGWGLVSHNEPGTAGSPRSQVSLPDTLHCANISIISDTSCDKSYPGRLTNTMVCAGAEGRGAESCEGDSGGPLVCGGILQGIVSWGDVPCDNTTKPGVYTKVCHYLEWIRETMKRN

SEQ ID NO: 7531 - protein, 23 aa, Homo sapiens
MSLLKHQSLRPDEDSSHDLMLLR

SEQ ID NO: 7532 - protein, 44 aa, Homo sapiens
MSLLKHQSLRPDEDSSHDLMLLRLSEPAKITDVVKVLGLPTQEP

SEQ ID NO: 7533 - protein, 159 aa, Homo sapiens
MSLLKHQSLRPDEDSSHDLMLLRLSEPAKITDVVKVLGLPTQEPALGTTCYASGWGSIEPEEFLRPRSLQCVSLHLLSNDMCARAYSEKVTEFMLCAGLWTGGKDTCGGDSGGPLVCNGVLQGITSWGPEPCALPEKPAVYTKVVHYRKWIKDTIAANP

SEQ ID NO: 7534 - protein, 69 aa, Homo sapiens
MWDLVLSIALSVGCTGAVPLIQSRIVGGWECEKHSQPWQVAVYSHGWAHCGGVLVHPQWVLTAAHCLKK

SEQ ID NO: 7535 - protein, 122 aa, Homo sapiens
MWDLVLSIALSVGCTGAVPLIQSRIVGGWECEKHSQPWQVAVYSHGWAHCGGVLVHPQWVLTAAHCLKKACQDHRCCEGPGPAHPGASTGDHLLRLRLGQHRTRGVLAPQESSVCEPPSPVQ

SEQ ID NO: 7536 - protein, 164 aa, Homo sapiens
MWDLVLSIALSVGCTGAVPLIQSRIVGGWECEKHSQPWQVAVYSHGWAHCGGVLVHPQWVLTAAHCLKKNSQVWLGRHNLFEPEDTGQRVPVSHSFPHPLYNMSLLKHQSLRPDEDSSHDLMLLRLSEPAKITDVVKVLGLPTQEPALGTTCYASGWGSIEPEE

SEQ ID NO: 7537 - protein, 261 aa, Homo sapiens
MWDLVLSIALSVGCTGAVPLIQSRIVGGWECEKHSQPWQVAVYSHGWAHCGGVLVHPQWVLTAAHCLKKNSQVWLGRHNLFEPEDTGQRVPVSHSFPHPLYNMSLLKHQSLRPDEDSSHDLMLLRLSEPAKITDVVKVLGLPTQEPALGTTCYASGWGSIEPEEFLRPRSLQCVSLHLLSNDMCARAYSEKVTEFMLCAGLWTGGKDTCGGDSGGPLVCNGVLQGITSWGPEPCALPEKPAVYTKVVHYRKWIKDTIAANP

SEQ ID NO: 7538 - protein, 223 aa, Homo sapiens
MWDLVLSIALSVGCTGAVPLIQSRIVGGWECEKHSQPWQVAVYSHGWAHCGGVLVHPQWVLTAAHCLKKNSQVWLGRHNLFEPEDTGQRVPVSHSFPHPLYNMSLLKHQSLRPDEDSSHDLMLLRLSEPAKITDVVKVLGLPTQEPALGTTCYASGWGSIEPEEFLRPRSLQCVSLHLLSNDMCARAYSEKVTEFMLCAGLWTGGKDTCGVSHPYSQHLEGKG

SEQ ID NO: 7539 - protein, 49 aa, Homo sapiens
MWDLVLSIALSVGCTGIARSGWVGTTCLSLKTQARGSLSATASHTRSTI

SEQ ID NO: 7540 - protein, 49 aa, Homo sapiens; identical to SEQ ID NO: 7539

SEQ ID NO: 7541 - protein, 49 aa, Homo sapiens; identical to SEQ ID NO: 7539

SEQ ID NO: 7542 - protein, 51 aa, Homo sapiens
  VARIANT 1: note = misc_feature - Xaa can be any naturally occurring amino acid
XEKVTEFMLCAGLWTGGKDTCGHNSPIPVLSTCLLGTCYVTSIAVDPGKQQ

SEQ ID NO: 7543 - protein, 184 aa, Homo sapiens
  VARIANT 1: note = misc_feature - Xaa can be any naturally occurring amino acid
XPDEDSSHDLMLLRLSEPAKITDVVKVLGLPTQEPALGTTCYASGWGSIEPEEFLRPRSLQCVSLHLLSNDMCARAYSEKVTEFMLCAGLWTGGKDTCGESGAVDGAGQKKDRAWLRVILGVHLSVMVCFKVSHHGALSHVPCLKSLLCTPRWCITGSGSRTPSQPTPECPCPTPTSSKFKSTS

SEQ ID NO: 7544 - protein, 172 aa, Homo sapiens
MWVPVVFLTLAVCGGVLVHPQWVLTAAHCIRNKSVILLGRHSLFHPEDTGQVFQVSHSFPHPLYDMSLLKNRFLRPGDDSSHDLMLLRLSEPAELTDAVKVMDLPTQEPALGTTCYASGWGSIEPEEFLTPKKLQCVDLHVISNDVCAQVHPQKVTKFMLCAGRWTGGKSTC

SEQ ID NO: 7545 - protein, 173 aa, Homo sapiens [sequence omitted]

SEQ ID NO: 7546 - protein, 218 aa, Homo sapiens
MWVPVVFLTLSVTWIGAAPLILSRIVGGWECEKHSQPWQVLVASRGRAVCGGVLVHPQWVLTAAHCIRKPGDDSSHDLMLLRLSEPAELTDAVKVMDLPTQEPALGTTCYASGWGSIEPEEFLTPKKLQCVDLHVISNDVCAQVHPQKVTKFMLCAGRWTGGKSTCSGDSGGPLVCNGVLQGITSWGSEPCALPERPSLYTKVVHYRKWIKDTIVANP

SEQ ID NO: 7547 - protein, 195 aa, Homo sapiens
MWVPVVFLTLSVTWIGAAPLILSRIVGGWECEKHSQPWQVLVASRGRAVCGGVLVHPQWVLTAAHCIRKPGDDSSHDLMLLRLSEPAELTDAVKVMDLPTQEPALGTTCYASGWGSIEPEEFLTPKKLQCVDLHVISNDVCAQVHPQKVTKFMLCAGRWTGGKSTCSWVILITELTMPALPMVLHGSLVPWRGGV

SEQ ID NO: 7548 - protein, 90 aa, Homo sapiens
MWVPVVFLTLSVTWIGAAPLILSRIVGGWECEKHSQPWQVLVASRGRAVCGGVLVHPQWVLTAAHCIRNKSVILLGRHSLFHPEDTGQAR

SEQ ID NO: 7549 - protein, 261 aa, Homo sapiens
MWVPVVFLTLSVTWIGAAPLILSRIVGGWECEKHSQPWQVLVASRGRAVCGGVLVHPQWVLTAAHCIRNKSVILLGRHSLFHPEDTGQVFQVSHSFPHPLYDMSLLKNRFLRPGDDSSHDLMLLRLSEPAELTDAVKVMDLPTQEPALGTTCYASGWGSIEPEEFLTPKKLQCVDLHVISNDVCAQVHPQKVTKFMLCAGRWTGGKSTCSGDSGGPLVCNGVLQGITSWGSEPCALPERPSLYTKVVHYRKWIKDTIVANP

SEQ ID NO: 7550 - protein, 227 aa, Homo sapiens
MWVPVVFLTLSVTWIGAAPLILSRIVGGWECEKHSQPWQVLVASRGRAVCGGVLVHPQWVLTAAHCIRNKSVILLGRHSLFHPEDTGQVFQVSHSFPHPLYDMSLLKNRFLRPGDDSSHDLMLLRLSEPAELTDAVKVMDLPTQEPALGTTCYASGWGSIEPEEFLTPKKLQCVDLHVISNDVCAQVHPQKVTKFMLCAGRWTGGKSTCSVSHPYSQDLEGKGEWGP

SEQ ID NO: 7551 - protein, 238 aa, Homo sapiens
MWVPVVFLTLSVTWIGAAPLILSRIVGGWECEKHSQPWQVLVASRGRAVCGGVLVHPQWVLTAAHCIRNKSVILLGRHSLFHPEDTGQVFQVSHSFPHPLYDMSLLKNRFLRPGDDSSHDLMLLRLSEPAELTDAVKVMDLPTQEPALGTTCYASGWGSIEPEEFLTPKKLQCVDLHVISNDVCAQVHPQKVTKFMLCAGRWTGGKSTCSWVILITELTMPALPMVLHGSLVPWRGGV

SEQ ID NO: 7552 - protein, 220 aa, Homo sapiens
MWVPVVFLTLSVTWIGAAPLILSRIVGGWECEKHSQPWQVLVASRGRAVCGGVLVHPQWVLTAAHCIRNKSVILLGRHSLFHPEDTGQVFQVSHSFPHPLYDMSLLKNRFLRPGDDSSIEPEEFLTPKKLQCVDLHVISNDVCAQVHPQKVTKFMLCAGRWTGGKSTCSGDSGGPLVCNGVLQGITSWGSEPCALPERPSLYTKVVHYRKWIKDTIVANP

SEQ ID NO: 7553 - protein, 124 aa, Homo sapiens
MWVPVVFLTLSVTWIGAAPLILSRIVGGWECEKHSQPWQVLVASRGRAVCGGVLVHPQWVLTAAHCIRNKSVILLGRHSLFHPEDTGQVFQVSHSFPHPLYDMSLLKNRFLRPGDDSTLNQRSS

SEQ ID NO: 7554 - protein, 104 aa, Homo sapiens
MWVPVVFLTLSVTWIGERGHGWGDAGEGASPDCQAEALSPPTQHPSPDRELGSFLSLPAPLQAHTPSPSILQQSSLPHQVPAPSHLPQNFLPIAQPAPCSQLLY

SEQ ID NO: 7555 - protein, 262 aa, Homo sapiens
  VARIANT 1: note = misc_feature - Xaa can be any naturally occurring amino acid
XFLTLSVTWIGAAPLILSRIVGGWECEKHSQPWQVLVASRGRAVCGGVLVHPQWVLTAAHCIRNKSVILLGRHSLFHPEDTGQVFQVSHSFPHPLYDMSLLKNRFLRPGDDSSHDLMLLRLSEPAELTDAVKVMDLPTQEPALGTTCYASGWGSIEPEECTPGPDVLTPKKLQCVDLHVISNDVCAQVHPQKVTKFMLCAGRWTGGKSTCSGDSGGPLVCNGVLQGITSWGSEPCALPERPSLYTKVVHYRKWIKDTIVANP

SEQ ID NO: 7556 - protein, 75 aa, Homo sapiens
MATAGNPWGWFLGYLILGVAGSLVSGSCSQIINGEDCSPHSQPWQAALVMENELFCSGVLVHPQWVLSAAHCFQK

SEQ ID NO: 7557 - protein, 254 aa, Homo sapiens
MATAGNPWGWFLGYLILGVAGSLVSGSCSQIINGEDCSPHSQPWQAALVMENELFCSGVLVHPQWVLSAAHCFQNSYTIGLGLHSLEADQEPGSQMVEASLSVRHPEYNRPLLANDLMLIKLDESVSESDTIRSISIASQCPTAGNSCLVSGWGLLANGRMPTVLQCVNVSVVSEEVCSKLYDPLYHPSMFCAGGGQDQKDSCNGDSGGPLICNGYLQGLVSFGKAPCGQVGVPGVYTNLCKFTEWIEKTVQAS

SEQ ID NO: 7558 - protein, 110 aa, Homo sapiens
MENELFCSGVLVHPQWVLSAAHCFQNSYTIGLGLHSLEADQEPGSQMVEASLSVRHPEYNRPLLANDLMLIKLDESVSESDTIRSISIASQCPTAGNSCLVSGWGLLANG

SEQ ID NO: 7559 - protein, 71 aa, Homo sapiens
MVEASLSVRHPEYNRPLLANDLMLIKLDESVSESDTIRSISIASQCPTAGNSCLVSGWGLLANECLPCCSA

SEQ ID NO: 7560 - protein, 71 aa, Homo sapiens; identical to SEQ ID NO: 7559

SEQ ID NO: 7561 - protein, 205 aa, Homo sapiens
MATARPPWMWVLCALITALLLGVTEHVLANNDVSCDHPSNTVPSGSNQDLGAGAGEDARSDDSSSRIINGSDCDMHTQPWQAALLLRPNQLYCGAVLVHPQWLLTAAHCRKKVFRVRLGHYSLSPVYESGQQMFQGVKSIPHPGYSHPGHSNDLMLIKLNRRIRPTKDVRPINVSSHCPSAGTKCLVSGWGTTKSPQVHFPKVLQ

SEQ ID NO: 7562 - protein, 293 aa, Homo sapiens
MATARPPWMWVLCALITALLLGVTEHVLANNDVSCDHPSNTVPSGSNQDLGAGAGEDARSDDSSSRIINGSDCDMHTQPWQAALLLRPNQLYCGAVLVHPQWLLTAAHCRKKVFRVRLGHYSLSPVYESGQQMFQGVKSIPHPGYSHPGHSNDLMLIKLNRRIRPTKDVRPINVSSHCPSAGTKCLVSGWGTTKSPQVHFPKVLQCLNISVLSQKRCEDAYPRQIDDTMFCAGDKAGRDSCQGDSGGPVVCNGSLQGLVSWGDYPCARPNRPGVYTNLCKFTKWIQETIQANS

SEQ ID NO: 7563 - protein, 293 aa, Homo sapiens; identical to SEQ ID NO: 7562

SEQ ID NO: 7564 - protein, 293 aa, Homo sapiens; identical to SEQ ID NO: 7562

SEQ ID NO: 7565 - protein, 69 aa, Homo sapiens
MADPATRHLTPTKLPSTPRATCSVVGSLSIHCGSSQLPTAKNRIFRSSWGSITFGKGRVPRSRVLLSGL

SEQ ID NO: 7566 - protein, 244 aa, Homo sapiens
MKKLMVVLSLIAAAWAEEQNKLVHGGPCDKTSHPYQAALYTSGHLLCGGVLIHPLWVLTAAHCKKPNLQVFLGKHNLRQRESSQEQSSVVRAVIHPDYDAASHDQDIMLLRLARPAKLSELIQPLPLERDCSANTTSCHILGWGKTADGDFPDTIQCAYIHLVSREECEHAYPGQITQNMLCAGDEKYGKDSCQGDSGGPLVCGDHLRGLVSWGNIPCGSKEKPGVYTNVCRYTNWIQKTIQAK

SEQ ID NO: 7567 - protein, 244 aa, Homo sapiens; identical to SEQ ID NO: 7566

SEQ ID NO: 7568 - protein, 244 aa, Homo sapiens; identical to SEQ ID NO: 7566

SEQ ID NO: 7569 - protein, 40 aa, Homo sapiens
MKKLMVVLSLIAAGIFRSSWGSITFGKGRVPRSRVLLSGL

SEQ ID NO: 7570 - protein, 40 aa, Homo sapiens; identical to SEQ ID NO: 7569

SEQ ID NO: 7571 - protein, 137 aa, Homo sapiens
MLLRLARPAKLSELIQPLPLERDCSANTTSCHILGWGKTADGDFPDTIQCAYIHLVSREECEHAYPGQITQNMLCAGDEKYGKDSCQGDSGGPLVCGDHLRGLVSWGNIPCGSKEKPGVYTNVCRYTNWIQKTIQAK

SEQ ID NO: 7572 - protein, 253 aa, Homo sapiens
MARSLLLPLQILLLSLALETAGEEAQGDKIIDGAPCARGSHPWQVALLSGNQLHCGGVLVNERWVLTAAHCKMNEYTVHLGSDTLGDRRAQRIKASKSFRHPGYSTQTHVNDLMLVKLNSQARLSSMVKKVRLPSRCEPPGTTCTVSGWGTTTSPDVTFPSDLMCVDVKLISPQDCTKVYKDLLENSMLCAGIPDSKKNACNGDSGGPLVCRGTLQGLVSWGTFPCGQPNDPGVYTQVCKFTKWINDTMKKHR

SEQ ID NO: 7573 - protein, 253 aa, Homo sapiens; identical to SEQ ID NO: 7572

SEQ ID NO: 7574 - protein, 66 aa, Homo sapiens
MARSLLLPLQILLLSLALETAGEEVSTPCTWAVIRWATGELRGSRPRSHSATPATPHRPMLMTSCS

SEQ ID NO: 7575 - protein, 69 aa, Homo sapiens
MNEYTVHLGSDTLGDRRAQRIKASKSFRHPGYSTQTHVNDLMLVKLNSQARLSSMVKKVRLPSRCEPPG

SEQ ID NO: 7576 - protein, 181 aa, Homo sapiens
MNEYTVHLGSDTLGDRRAQRIKASKSFRHPGYSTQTHVNDLMLVKLNSQARLSSMVKKVRLPSRCEPPGTTCTVSGWGTTTSPDVTFPSDLMCVDVKLISPQDCTKVYKDLLENSMLCAGIPDSKKNACNGDSGGPLVCRGTLQGLVSWGTFPCGQPNDPGVYTQVCKFTKWINDTMKKHR

SEQ ID NO: 7577 - protein, 305 aa, Homo sapiens
MGRPRPRAAKTWMFLLLLGGAWAACGSLDLLTKLYAENLPCVHLNPQWPSQPSHCPRGWRSNPLPPAAGHSRAQEDKVLGGHECQPHSQPWQAALFQGQQLLCGGVLVGGNWVLTAAHCKKPKYTVRLGDHSLQNKDGPEQEIPVVQSIPHPCYNSSDVEDHNHDLMLLQLRDQASLGSKVKPISLADHCTQPGQKCTVSGWGTVTSPRENFPDTLNCAEVKIFPQKKCEDAYPGQITDGMVCAGSSKGADTCQGDSGGPLVCDGALQGITSWGSDPCGRSDKPGVYTNICRYLDWIKKIIGSKG

SEQ ID NO: 7578 - protein, 119 aa, Homo sapiens
MGRPRPRAAKTWMFLLLLGGAWAENFPDTLNCAEVKIFPQKKCEDAYPGQITDGMVCAGSSKGADTCQGDSGGPLVCDGALQGITSWGSDPCGRSDKPGVYTNICRYLDWIKKIIGSKG

SEQ ID NO: 7579 - protein, 97 aa, Homo sapiens
MGRPRPRAAKTWMFLLLLGGAWAGHSRAQEDKVLGGHECQPHSQPWQAALFQGQQLLCGGVLVGGNWVLTAAHCKKPKYTVRLGDHSLQNKDGPEQE

SEQ ID NO: 7580 - protein, 260 aa, Homo sapiens
MGRPRPRAAKTWMFLLLLGGAWAGHSRAQEDKVLGGHECQPHSQPWQAALFQGQQLLCGGVLVGGNWVLTAAHCKKPKYTVRLGDHSLQNKDGPEQEIPVVQSIPHPCYNSSDVEDHNHDLMLLQLRDQASLGSKVKPISLADHCTQPGQKCTVSGWGTVTSPRENFPDTLNCAEVKIFPQKKCEDAYPGQITDGMVCAGSSKGADTCQGDSGGPLVCDGALQGITSWGSDPCGRSDKPGVYTNICRYLDWIKKIIGSKG

SEQ ID NO: 7581 - protein, 32 aa, Homo sapiens
MGRPRPRAAKTWMFLLLLGGAWAGRFWRPPGV

SEQ ID NO: 7582 - protein, 32 aa, Homo sapiens; identical to SEQ ID NO: 7581

SEQ ID NO: 7583 - protein, 139 aa, Homo sapiens
MLLQLRDQASLGSKVKPISLADHCTQPGQKCTVSGWGTVTSPRENFPDTLNCAEVKIFPQKKCEDAYPGQITDGMVCAGSSKGADTCQGDSGGPLVCDGALQGITSWGSDPCGRSDKPGVYTNICRYLDWIKKIIGSKG

SEQ ID NO: 7584 - protein, 54 aa, Homo sapiens
  VARIANT 1: note = misc_feature - Xaa can be any naturally occurring amino acid
XLLLLGGAWAGNTQYAWETTAYRIKMAQSKKYLWFSPSHTPATTAAMWRTTTMI

SEQ ID NO: 7585 - protein, 250 aa, Homo sapiens
MKLGLLCALLSLLAGHGWADTRAIGAEECRPNSQPWQAGLFHLTRLFCGATLISDRWLLTAAHCRKPYLWVRLGEHHLWKWEGPEQLFRVTDFFPHPGFNKDLSANDHNDDIMLIRLPRQARLSPAVQPLNLSQTCVSPGMQCLISGWGAVSSPKALFPVTLQCANISILENKLCHWAYPGHISDSMLCAGLWEGGRGSCQGDSGGPLVCNGTLAGVVSGGAEPCSRPRRPAVYTSVCHYLDWIQEIMEN

SEQ ID NO: 7586 - protein, 61 aa, Homo sapiens
MKLGLLCALLSLLAGICGSALESTTSGNGRVRSSCSGLRTSSPTLASTRTSAPMTTMMTSC

SEQ ID NO: 7587 - protein, 148 aa, Homo sapiens
MILFKQATYFISLFATVSCGCLTQLYENAFFRGGDVASMYTPNAQYCQMRCTFHPRCLLFSFLPASSINDMEKRFGCFLKDSVTGTLPKVHRTGAVSGHSLKQCGHQISACHRDIYKGVDMRGVNFNVSKVSSVEECQKRCTSNIRCQ

SEQ ID NO: 7588 - protein, 638 aa, Homo sapiens
MILFKQATYFISLFATVSCGCLTQLYENAFFRGGDVASMYTPNAQYCQMRCTFHPRCLLFSFLPASSINDMEKRFGCFLKDSVTGTLPKVHRTGAVSGHSLKQCGHQISACHRDIYKGVDMRGVNFNVSKVSSVEECQKRCTSNIRCQFFSYATQTFHKAEYRNNCLLKYSPGGTPTAIKVLSNVESGFSLKPCALSEIGCHMNIFQHLAFSDVDVARVLTPDAFVCRTICTYHPNCLFFTFYTNVWKIESQRNVCLLKTSESGTPSSSTPQENTISGYSLLTCKRTLPEPCHSKIYPGVDFGGEELNVTFVKGVNVCQETCTKMIRCQFFTYSLLPEDCKEEKCKCFLRLSMDGSPTRIAYGTQGSSGYSLRLCNTGDNSVCTTKTSTRIVGGTNSSWGEWPWQVSLQVKLTAQRHLCGGSLIGHQWVLTAAHCFDGLPLQDVWRIYSGILNLSDITKDTPFSQIKEIIIHQNYKVSEGNHDIALIKLQAPLNYTEFQKPICLPSKGDTSTIYTNCWVTGWGFSKEKGEIQNILQKVNIPLVTNEECQKRYQDYKITQRMVCAGYKEGGKDACKGDSGGPLVCKHNGMWRLVGITSWGEGCARREQPGVYTKVAEYMDWILEKTQSSDGKAQMQSPA

SEQ ID NO: 7589 - protein, 141 aa, Homo sapiens
MYTPNAQYCQMRCTFHPRCLLFSFLPASSINDMEKRFGCFLKDSVTGTLPKVHRTGAVSGHSLKQCGHQISACHRDIYKGVDMRGVNFNVSKVSSVEECQKRCTSNIRCQFFSYATQTFHKAEYRNNCLLKYSPGGTPTAI

SEQ ID NO: 7590 - protein, 514 aa, Homo sapiens
MYTPNAQYCQMRCTFHPRCLLFSFLPASSINDMEKRFGCFLKDSVTGTLPKVHRTGAVSGHSLKQCGHQISACHRDIYKGVDMRGVNFNVSKVSSVEECQKRCTSNIRCQFFSYATQTFHKAEYRNNCLLKYSPGGTPTAIKVLSNVESGFSLKPCALSEIGCHMNIFQHLAFSDVDVARVLTPDAFVCRTICTYHPNCLFFTFYTNVWKIESQRNVCLLKTSESGTPSSSTPQENTISGYSLLTCKRTLPEPCHSKIYPGVDFGGEELNVTFVKGVNVCQETCTKMIRCQFFTYSLLPEDCKEEKCKCFLRLSMDGSPTRIAYGTQGSSGYSLRLCNTGDNSVCTTKTSTRIVGGTNSSWGEWPWQVSLQVKLTAQRHLCGGSLIGHQWVLTAAHCFDGLPLQDVWRIYSGILNLSDITKDTPFSQIKEIIIHQNYKVSEGNHDIALIKLQAPLNYTEFQKPICLPSKGDTSTIYTNCWVTGWGFSKEKGRFRWSLSLQTQWNVAFGGHHQLG

SEQ ID NO: 7591 - protein, 686 aa, Homo sapiens
  VARIANT 1: note = misc_feature - Xaa can be any naturally occurring amino acid
XSEDCEVAGYRVLKGTEAVIIPYALHRDPRYFPNPEEFQPERFFPENAQGRHPYAYVPFSAGPRNCIGCLTQLYENAFFRGGDVASMYTPNAQYCQMRCTFHPRCLLFSFLPASSINDMEKRFGCFLKDSVTGTLPKVHRTGAVSGHSLKQCGHQISACHRDIYKGVDMRGVNFNVSKVSSVEECQKRCTSNIRCQFFSYATQTFHKAEYRNNCLLKYSPGGTPTAIKVLSNVESGFSLKPCALSEIGCHMNIFQHLAFSDVDVARVLTPDAFVCRTICTYHPNCLFFTFYTNVWKIESQRNVCLLKTSESGTPSSSTPQENTISGYSLLTCKRTLPEPCHSKIYPGVDFGGEELNVTFVKGVNVCQETCTKMIRCQFFTYSLLPEDCKEEKCKCFLRLSMDGSPTRIAYGTQGSSGYSLRLCNTGDNSVCTTKTSTRIVGGTNSSWGEWPWQVSLQVKLTAQRHLCGGSLIGHQWVLTAAHCFDGLPLQDVWRIYSGILNLSDITKDTPFSQIKEIIIHQNYKVSEGNHDIALIKLQAPLNYTEFQKPICLPSKGDTSTIYTNCWVTGWGFSKEKGEIQNILQKVNIPLVTNEECQKRYQDYKITQRMVCAGYKEGGKDACKGDSGGPLVCKHNGMWRLVGITSWGEGCARREQPGVYTKVAEYMDWILEKTQSSDGKAQMQSPA

SEQ ID NO: 7592 - protein, 91 aa, Homo sapiens
MARGERIYRAVKDLFLHEPEQMLWNAFPPSGRELSYTSRSQMPGETISRNLQETRREKKCWERSTERHEVRGTEDQRRQERSPGTFSKPKI

SEQ ID NO: 7593 - protein, 352 aa, Homo sapiens
MARGRKMSKPRAVEAAAAAAAVAATAPGPEMVERRGPGRPRTDGENVFTGQSKIYSYMSPNKCSGMRFPLQEENSVTHHEVKCQGKPLAGIYRKREEKRNAGNAVRSAMKSEEQKIKDARKGPLVPFPNQKSEAAEPPKTPPSSCDSTNAAIAKQALKKPIKGKQAPRKKAQGKTQQNRKLTDFYPVRRSSRKSKAELQSEERKRIDELIESGKEEGMKIDLIDGKGRGVIATKQFSRGDFVVEYHGDLIEITDAKKREALYAQDPSTGCYMYYFQYLSKTYCVDATRETNRLGRLINHSKCGNCQTKLHDIDGVPHLILIASRDIAAGEELLYDYGDRSKASIEAHPWLKH

SEQ ID NO: 7594 - protein, 299 aa, Homo sapiens
MRWLWLLLFPDSPVTLREVLPSQPWRLRGCSDLRGENVFTGQSKIYSYMSPNKCSGMRFPLQEENSVTHHEVKCQGKPLAGIYRKREEKRNAGNAVRSAMKSEEQKIKDARKGPLVPFPNQKSEAAEPPKTPPSSCDSTNAAIAKQALKKPIKGKQAPRKKAQGKTQQNRKLTDFYPVRRSSRKSKAELQSEERKRIDELIESGKEEGMKIDLIDGKGRGVIATKQFSRGDFVVEYHGDLIEITDAKKREALYAQDPSTGCYMYYFQYLSKTYCVDATRETNRLGRLINHSKCGNCQTK

SEQ ID NO: 7595 - protein, 322 aa, Homo sapiens
MVERRGPGRPRTDGENVFTGQSKIYSYMSPNKCSGMRFPLQEENSVTHHEVKCQGKPLAGIYRKREEKRNAGNAVRSAMKSEEQKIKDARKGPLVPFPNQKSEAAEPPKTPPSSCDSTNAAIAKQALKKPIKGKQAPRKKAQGKTQQNRKLTDFYPVRRSSRKSKAELQSEERKRIDELIESGKEEGMKIDLIDGKGRGVIATKQFSRGDFVVEYHGDLIEITDAKKREALYAQDPSTGCYMYYFQYLSKTYCVDATRETNRLGRLINHSKCGNCQTKLHDIDGVPHLILIASRDIAAGEELLYDYGDRSKASIEAHPWLKH

SEQ ID NO: 7596 - protein, 1749 aa, Homo sapiens
MQAMDPAAADLYEEDGKDLDFYDFEPLPTLPEDEENVSLADILSLRDRGLSEQEAWAVCLECSLSMRSVAHAAIFQSLCITPDTLAFNTSGNVCFMEQLSDDPEGAFVPPEFDVTGNTFEAHIYSLGATLKAALEYVAEPTLEPRLSQDLEALLSRMQAEDPGDRPDLESIIALCEEKLQLTSSCRVCRSLSAVGRRVLSIESFGALQDVSESSWRERPAPGNAGPRRPPGDPSTDPEVLPTPEGPESETSRGPRASPTKALLSTPVRNGESHSREGLAGLVLDAERTLGELDRDALRRSRLRKVQTFPRLLSDSPEATLCLPLTRGKSQLPISELFSPDPRKAFLDRKNGLSSFQAQPKCRLWPEQEPEHQLGRVPCAGRSTDRGPGVPGSPGQPETSHPSQGPAEAPADPRDASGEAQTPRDDERIPEGARQLESAAAEQWVSLQDLLSQLGRPFREYELWALCLACLRALQTRPEHPAYLCLDSVLVAEDGAVLFQPPPANGSYDSFFLAPELAEERLVTEKASVYCVAAVLWTAAKFSVPRNHKLALPRRLKTLLLDMARRSAPERPSAAEAIKVCGSYLLQRGMDSRKILAHLRASICQVYQEEETISLQNAFSVVELKPSVAPAPEPSPGFLPVNSDTGLVAVPGPVPGQHPCGEEATQLPAAFTSEATHFKPIVLAQNASVARDQPALAQEESEERGGQREGEGEEKLSLEAHAGSPSLKTPDGPVPGPGPQGAAPEPLGASVQRDSAQGRPCPPPQAPANQPEGASSAAPGSPVPAPPTKASALPVEQGPAEPIPPGVASGGLRPDALGPTTAHHGPRHPPKPPRSKATERPGQEPEGPGATPAGERDDQSPDSVPERPRPADRRLCLPCVDASPLPGRTACPSLQEATRLIQEEFAFDGYLDNGLEALIMGEYIFALKDLTFATFCGAISEKFCDLYWDEKLLQNLFKVVNGQASPSPSTAEEAGSQLEGSQSPRSPSSKRPSLHRLGKEKPAMARTSSRAPCSPTSVSDVDSDALSRGNFEVGFRPQRSVKAERAQQPEAGEDRRPAGGASDVEAVTRLARSKGVGPALSPGPAGFQSCSPGWCSAFYEADCFGADVHNYVKDLGRQQADGALPDAQSPELEQQLMMEKRNYRKTLKFYQKLLQKEKRNKGSDVKTMLSKLKGQLEEMKSRVQFLSLVKKYLQVMYAERWGLEPCTLPVIVNIAAAPCDTLDFSPLDESSSLIFYNVNKHPGGRQKARILQAGTPLGLMAYLYSSDAFLEGYVQQFLYTFRYFCTPHDFLHFLLDRINSTLTRAHQDPTSTFTKIYRRSLCVLQAWVEDCYAVDFPRNSGLLGKLEDFISSKILPLDGSAKHLLGLLEVGMDRRAEGNPRGTDLENPREAEEDARPFNALCKRLSEDGISRKSFPWRLPRGNGLVLPPHKERPYTIAAALPKPCFLEDFYGPCAKTSEKGPYFLTEYSTHQLFSQLTLLQQELFQKCHPVHFLNSRALGVMDKSTAIPKASSSESLSAKTCSLFLPNYVQDKYLLQLLRNADDVSTWVAAEIVTSHTSKLQVNLLSKFLLIAKSCYEQRNFATAMQILSGLEHLAVRQSPAWRILPAKIAEVMEELKAVEVFLKSDSLCLMEGRRFRAQPTLPSAHLLAMHIQQLETGGFTMTNGAHRWSKLRNIAKVVSQVHAFQENPYTFSPDPKLQSYLKQRIARFSGADISTLAADSRANFHQVSSEKHSRKIQDKLRRMKATFQ

SEQ ID NO: 7597 - protein, 1141 aa, Homo sapiens
MRSVAHAAIFQSLCITPDTLAFNTSGNVCFMEQLSDDPEGAFVPPEFDVTGNTFEAHIYSLGATLKAALEYVAEPTLEPRLSQDLEALLSRMQAEDPGDRPDLESIIALCEEKLQLTSSCRVCRSLSAVGRRVLSIESFGALQDVSESSWRERPAPGNAGPRRPPGDPSTDPEVLPTPEGPESETSRGPRASPTKALLSTPVRNGESHSREGLAGLVLDAERTLGELDRDALRRSRLRKVQTFPRLLSDSPEATLCLPLTRGKSQLPISELFSPDPRKAFLDRKNGLSSFQAQPKCRLWPEQEPEHQLGRVPCAGRSTDRGPGVPGSPGQPETSHPSQGPAEAPADPRDASGEAQTPRDDERIPEGARQLESAAAEQWVSLQDLLSQLGRPFREYELWALCLACLRALQTRPEHPAYLCLDSVLVAEDGAVLFQPPPANGSYDSFFLAPELAEERLVTEKASVYCVAAVLWTAAKFSVPRNHKLALPRRLKTLLLDMARRSAPERPSAAEAIKVCGSYLLQRGMDSRKILAHLRASICQVYQEEETISLQNAFSVVELKPSVAPAPEPSPGFLPVNSDTGLVAVPGPVPGQHPCGEEATQLPAAFTSEATHFKPIVLAQNASVARDQPALAQEESEERGGQREGEGEEKLSLEAHAGSPSLKTPDGPVPGPGPQGAAPEPLGASVQRDSAQGRPCPPPQAPANQPEGASSAAPGSPVPAPPTKASALPVEQGPAEPIPPGVASGGLRPDALGPTTAHHGPRHPPKPPRSKATERPGQEPEGPGATPAGERDDQSPDSVPERPRPADRRLCLPCVDASPLPGRTACPSLQEATRLIQEEFAFDGYLDNGLEALIMGEYIFALKDLTFATFCGAISEKFCDLYWDEKLLQNLFKVVNGQASPSPSTAEEAGSQLEGSQSPRSPSSKRPSLHRLGKEKPAMARTSSRAPCSPTSVSDVDSDALSRGNFEVGFRPQRSVKAERAQQPEAGEDRRPAGGASDVEAVTRLARSKGVGPALSPGPAGFQSCSPGWCSAFYEADCFGADVHNYVKDLGRQQADGALPDAQSPELEQQLMMEKRNYRKTLKFYQKLLQKEKRNKGSDVKTMLSKLKGQLEEMKSRVQFLSLVKKYLQASGLRAPLCPVRQ

SEQ ID NO: 7598 - protein, 391 aa, Homo sapiens
MKLITILFLCSRLLLSLTQESQSEEIDCNDKDLFKAVDAALKKYNSQNQSNNQFVLYRITEATKTVGSDTFYSFKYEIKEGDCPVQSGKTWQDCEYKDAAKAATGECTATVGKRSSTKFSVATQTCQITPAEGPVVTAQYDCLGCVHPISTQSPDLEPILRHGIQYFNNNTQHSSLFMLNEVKRAQRQDTGECTDNAYIDIQLRIASFSQNCDIYPGKDFVQPPTKICVGCPRDIPTNSPELEETLTHTITKLNAENNATFYFKIDNVKKARVQVVAGKKYFIDFVARETTCSKESNEELTESCETKKLGQSLDCNAEVYVVPWEKKIYPTVNCQPLGMISLMKRPPGFSPFRSSRIGEIKEETTSHLRSCEYKGRPPKAGAEPASEREVS

SEQ ID NO: 7599 - protein, 427 aa, Homo sapiens
MKLITILFLCSRLLLSLTQESQSEEIDCNDKDLFKAVDAALKKYNSQNQSNNQFVLYRITEATKTVGSDTFYSFKYEIKEGDCPVQSGKTWQDCEYKDAAKAATGECTATVGKRSSTKFSVATQTCQITPAEGPVVTAQYDCLGCVHPISTQSPDLEPILRHGIQYFNNNTQHSSLFMLNEVKRAQRQVVAGLNFRITYSIVQTNCSKENFLFLTPDCKSLWNGDTGECTDNAYIDIQLRIASFSQNCDIYPGKDFVQPPTKICVGCPRDIPTNSPELEETLTHTITKLNAENNATFYFKIDNVKKARVQVVAGKKYFIDFVARETTCSKESNEELTESCETKKLGQSLDCNAEVYVVPWEKKIYPTVNCQPLGMISLMKRPPGFSPFRSSRIGEIKEETTSHLRSCEYKGRPPKAGAEPASEREVS

SEQ ID NO: 7600 - protein, 644 aa, Homo sapiens
MKLITILFLCSRLLLSLTQESQSEEIDCNDKDLFKAVDAALKKYNSQNQSNNQFVLYRITEATKTVGSDTFYSFKYEIKEGDCPVQSGKTWQDCEYKDAAKAATGECTATVGKRSSTKFSVATQTCQITPAEGPVVTAQYDCLGCVHPISTQSPDLEPILRHGIQYFNNNTQHSSLFMLNEVKRAQRQVVAGLNFRITYSIVQTNCSKENFLFLTPDCKSLWNGDTGECTDNAYIDIQLRIASFSQNCDIYPGKDFVQPPTKICVGCPRDIPTNSPELEETLTHTITKLNAENNATFYFKIDNVKKARVQVVAGKKYFIDFVARETTCSKESNEELTESCETKKLGQSLDCNAEVYVVPWEKKIYPTVNCQPLGMISLMKRPPGFSPFRSSRIGEIKEETTVSPPHTSMAPAQDEERDSGKEQGHTRRHDWGHEKQRKHNLGHGHKHERDQGHGHQRGHGLGHGHEQQHGLGHGHKFKLDDDLEHQGGHVLDHGHKHKHGHGHGKHKNKGKKNGKHNGWKTEHLASSSEDSTTPSAQTQEKTEGPTPIPSLAKPGVTVTFSDFQDSDLIATMMPPISPAPIQSDDDWIPDIQIDPNGLSFNPISDFPDTTSPKCPGRPWKSVSEINPTTQMKESYYFDLTDGLS

SEQ ID NO: 7601 - protein, 427 aa, Homo sapiens; identical to SEQ ID NO: 7599

SEQ ID NO: 7602 - protein, 644 aa, Homo sapiens; identical to SEQ ID NO: 7600

SEQ ID NO: 7603 - protein, 458 aa, Homo sapiens
MLFQEATAFENMTKDWNYLEGSQKDCYRDTMLDSYENTVPQGSFLQLSMMPQRAGNDPPGVSNASEMEMEISNMREKFLMSVTKLVESKSYNSKVFSKEKYFQTIKEVKEAKEKGKKSSRDYRRAAKYDVISVQGTEKLIEATHGERDRIRYYVHKEELFDILHDTHLSIGHGGRTRMLKELQGKYGNVTKEVIVLYLTLCKQCHQKNPVPKRGLAPKPMTFKDIDSTCQVEILDMQSSADGEFKFILYYQDHSTKFIILRPLRTKQAHEVVSVLLDIFTILGTPSVLDSDSGVEFTNQVVHELNELWPDLKIVSGKYHPGQSQGSLEGASRDVKNMISTWMQSNHSCHWAKGLRFMQMVRNQAFDVSLQQSPFEAMFGYKAKFGLYSSNLPRETVATLQTEEELEIAEEQLENSLWIRQEERAEIGADRSDMDDDMDPTPEASEPSTSQGTSGLLCW

SEQ ID NO: 7604 - protein, 410 aa, Homo sapiens
MMPQRAGNDPPGVSNASEMEMEISNMREKFLMSVTKLVESKSYNSKVFSKEKYFQTIKEVKEAKEKGKKSSRDYRRAAKYDVISVQGTEKLIEATHGERDRIRYYVHKEELFDILHDTHLSIGHGGRTRMLKELQGKYGNVTKEVIVLYLTLCKQCHQKNPVPKRGLAPKPMTFKDIDSTCQVEILDMQSSADGEFKFILYYQDHSTKFIILRPLRTKQAHEVVSVLLDIFTILGTPSVLDSDSGVEFTNQVVHELNELWPDLKIVSGKYHPGQSQGSLEGASRDVKNMISTWMQSNHSCHWAKGLRFMQMVRNQAFDVSLQQSPFEAMFGYKAKFGLYSSNLPRETVATLQTEEELEIAEEQLENSLWIRQEERAEIGADRSDMDDDMDPTPEASEPSTSQGTSGLLCW

SEQ ID NO: 7605 - protein, 492 aa, Homo sapiens
MPSFLVPSLVSSPVLLKLLFSPGPKTIWSLWQQPMLFQEATAFENMTKDWNYLEGSQKDCYRDTMLDSYENTVPQGSFLQLSMMPQRAGNDPPGVSNASEMEMEISNMREKFLMSVTKLVESKSYNSKVFSKEKYFQTIKEVKEAKEKGKKSSRDYRRAAKYDVISVQGTEKLIEATHGERDRIRYYVHKEELFDILHDTHLSIGHGGRTRMLKELQGKYGNVTKEVIVLYLTLCKQCHQKNPVPKRGLAPKPMTFKDIDSTCQVEILDMQSSADGEFKFILYYQDHSTKFIILRPLRTKQAHEVVSVLLDIFTILGTPSVLDSDSGVEFTNQVVHELNELWPDLKIVSGKYHPGQSQGSLEGASRDVKNMISTWMQSNHSCHWAKGLRFMQMVRNQAFDVSLQQSPFEAMFGYKAKFGLYSSNLPRETVATLQTEEELEIAEEQLENSLWIRQEERAEIGADRSDMDDDMDPTPEASEPSTSQGTSGLLCW

SEQ ID NO: 7606 - protein, 492 aa, Homo sapiens; identical to SEQ ID NO: 7605

SEQ ID NO: 7607 - protein, 462 aa, Homo sapiens
MGTQALQGFLFLLFLPLLQPRGASAGSLHSPGLSECFQVNGADYRGHQNRTGPRGAGRPCLFWDQTQQHSYSSASDPHGRWGLGAHNFCRNPDGDVQPWCYVAETEEGIYWRYCDIPSCHMPGYLGCFVDSGAPPALSGPSGTSTKLTVQVCLRFCRMKGYQLAGVEAGYACFCGSESDLARGRLAPATDCDQICFGHPGQLCGGDGRLGVYEVSVGSCQGNWTAPQGVIYSPDFPDEYGPDRNCSWALGPPGAALELTFRLFELADPRDRLELRDAASGSLLRAFDGARPPPSGPLRLGTAALLLTFRSDARGHAQGFALTYRGLQDAAEDPEAPEGSAQTPAAPLDGANVSCSPRPGAPPAAIGARVFSTVTAVSVLLLLLLGLLRPLRRRSCLLAPGKGPPALGASRGPRRSWAVWYQQPRGVALPCSPGDPQAEGSAAGYRPLSASSQSSLRSLISAL

SEQ ID NO: 7608 - protein, 420 aa, Homo sapiens
MGTQALQGFLFLLFLPLLQPRGASAGSLHSPGLSECFQVNGADYRGHQNRTGPRGAGRPCLFWDQTQQHSYSSASDPHGRWGLGAHNFCRNPDGDVQPWCYVAETEEGIYWRYCDIPSCHMPGYLGCFVDSGAPPALSGPSGTSTKLTVQVCLRFCRMKGYQLAGVEAGYACFCGSESDLARGRLAPATDCDQICFGHPGQLCGGDGRLGVYEVSVGSCQGNWTAPQGVIYSPDFPDEYGPDRNCSWALGPPGAALELTFRLFELADPRDRLELRDAASGSLLRAFDGARPPPSGPLRLGTAALLLTFRSDARGHAQGFALTYRGLQDAAEDPEAPEGSAQTPAAPLDGANVSCSPRPGAPPAAIGGAVCWLREKGPRRWGLPGAPGEAGLCGTNSPEGWPCPAPPGTPRLRVLPRATGL

SEQ ID NO: 7609 - protein, 399 aa, Homo sapiens
MGTQALQGFLFLLFLPLLQPRGASAGSLHSPGLSECFQVNGADYRGHQNRTGPRGAGRPCLFWDQTQQHSYSSASDPHGRWGLGAHNFCRNPDGDVQPWCYVAETEEGIYWRYCDIPSCHMPGYLGCFVDSGAPPALSGPSGTSTKLTVQVCLRFCRMKGYQLAGVEAGYACFCGSESDLARGRLAPATDCDQICFGHPGQLCGGDGRLGVYEVSVGSCQGNWTAPQGVIYSPDFPDEYGPDRNCSWALGPPGAALELTFRLFELADPRDRLELRDAASGSLLRAFDGARPPPSGPLRLGTAALLLTFRSDARGHAQGFALTYRGLQDAAEDPEAPEGSAQTPAAPLDGANVSCSPRPGAPPAAIGGEAGARDGSESGSRPLAPILTAAVCPQPGSSRR

SEQ ID NO: 7610 - protein, 424 aa, Homo sapiens
MGTQALQGFLFLLFLPLLQPRGASAGSLHSPGLSECFQVNGADYRGHQNRTGPRGAGRPCLFWDQTQQHSYSSASDPHGRWGLGAHNFCRNPDGDVQPWCYVAETEEGIYWRYCDIPSCHMPGYLGCFVDSGAPPALSGPSGTSTKLTVQVCLRFCRMKGYQLAGVEAGYACFCGSESDLARGRLAPATDCDQICFGHPGQLCGGDGRLGVYEVSVGSCQGNWTAPQGVIYSPDFPDEYGPDRNCSWALGPPGAALELTFRLFELADPRDRLELRDAASGSLLRAFDGARPPPSGPLRLGTAALLLTFRSDARGHAQGFALTYRGLQDAAEDPEAPEGSAQTPAAPLDGANVSCSPRPGAPPAAIGARVFSTVTAVSVLLLLLLGLLRPLRRRCGALGQGLRADRWWGAGAPEGNRARKELLGS

SEQ ID NO: 7611 - protein, 381 aa, Homo sapiens
MGTQALQGFLFLLFLPLLQPRGASAGSLHSPGLSECFQVNGADYRGHQNRTGPRGAGRPCLFWDQTQQHSYSSASDPHGRWGLGAHNFCRNPDGDVQPWCYVAETEEGIYWRYCDIPSCHMPGYLGCFVDSGAPPALSGPSGTSTKLTVQVCLRFCRMKGYQLCGGDGRLGVYEVSVGSCQGNWTAPQGVIYSPDFPDEYGPDRNCSWALGPPGAALELTFRLFELADPRDRLELRDAASGSLLRAFDGARPPPSGPLRLGTAALLLTFRSDARGHAQGFALTYRGLQDAAEDPEAPEGSAQTPAAPLDGANVSCSPRPGAPPAAIGGAVCWLREKGPRRWGLPGAPGEAGLCGTNSPEGWPCPAPPGTPRLRVLPRATGL

SEQ ID NO: 7612 - protein, 423 aa, Homo sapiens
MGTQALQGFLFLLFLPLLQPRGASAGSLHSPGLSECFQVNGADYRGHQNRTGPRGAGRPCLFWDQTQQHSYSSASDPHGRWGLGAHNFCRNPDGDVQPWCYVAETEEGIYWRYCDIPSCHMPGYLGCFVDSGAPPALSGPSGTSTKLTVQVCLRFCRMKGYQLCGGDGRLGVYEVSVGSCQGNWTAPQGVIYSPDFPDEYGPDRNCSWALGPPGAALELTFRLFELADPRDRLELRDAASGSLLRAFDGARPPPSGPLRLGTAALLLTFRSDARGHAQGFALTYRGLQDAAEDPEAPEGSAQTPAAPLDGANVSCSPRPGAPPAAIGARVFSTVTAVSVLLLLLLGLLRPLRRRSCLLAPGKGPPALGASRGPRRSWAVWYQQPRGVALPCSPGDPQAEGSAAGYRPLSASSQSSLRSLISAL

SEQ ID NO: 7613 - protein, 85 aa, Homo sapiens
MKIPVLPAVVLLSLLVLHSAQGATLGGPEEESTIENYASRPEAFKADEFLNWHALFESIKRKLPFLNWDAFPKLKGLRSATPDAQ

SEQ ID NO: 7614 - protein, 99 aa, Homo sapiens
MKIPVLPAVVLLSLLVLHSAQGATLGGPEEESTIENYASRPEAFNTPFLNIDKLRSAFKADEFLNWHALFESIKRKLPFLNWDAFPKLKGLRSATPDAQ

SEQ ID NO: 7615 - protein, 153 aa, Homo sapiens
EEKGGASLSPQYVSYNQSSYTQWDLQPDTDYEIHLFKERMFRHQMAVKTNGTVKDKEDTQVDSEARPMKDETFGEYSDNEEKAFGSSQPSLNGDIKPLGSDDSLADYGGSVDVQFNEDGSFIGQYSGKKEKEAAGGNDSSGATSPINPAVALE

SEQ ID NO: 7616 - protein, 90 aa, Homo sapiens
MVVALRYVWPLLLCSPCLLIQIPEELMEPPVITEQSPRRLVVFPTDDISLKCEASGKPEVQFRWTRDGVHFKPKEELGVTVYQSPHSGSF

SEQ ID NO: 7617 - protein, 128 aa, Homo sapiens
MVVALRYVWPLLLCSPCLLIQIPEELMEPPVITEQSPRRLVVFPTDDISLKCEASGKPEVQFRWTRDGVHFKPKEELGVTVYQSPHSGSFTITGNNSNFAQRFQGIYRCFASNKLGTAMSHEIRLMAE

SEQ ID NO: 7618 - protein, 1248 aa, Homo sapiens
MVVALRYVWPLLLCSPCLLIQIPEELMEPPVITEQSPRRLVVFPTDDISLKCEASGKPEVQFRWTRDGVHFKPKEELGVTVYQSPHSGSFTITGNNSNFAQRFQGIYRCFASNKLGTAMSHEIRLMAEGAPKWPKETVKPVEVEEGESVVLPCNPPPSAEPLRIYWMNSKILHIKQDERVTMGQNGNLYFANVLTSDNHSDYICHAHFPGTRTIIQKEPIDLRVKATNSMIDRKPRLLFPTNSSSHLVALQGQPLVLECIAEGFPTPTIKWLRPSGPMPADRVTYQNHNKTLQLLKVGEEDDGEYRCLAENSLGSARHAYYVTVEAAPYWLHKPQSHLYGPGETARLDCQVQGRPQPEVTWRINGIPVEELAKDQKYRIQRGALILSNVQPSDTMVTQCEARNRHGLLLANAYIYVVQLPAKILTADNQTYMAVQGSTAYLLCKAFGAPVPSVQWLDEDGTTVLQDERFFPYANGTLGIRDLQANDTGRYFCLAANDQNNVTIMANLKVKDATQITQGPRSTIEKKGSRVTFTCQASFDPSLQPSITWRGDGRDLQELGDSDKYFIEDGRLVIHSLDYSDQGNYSCVASTELDVVESRAQLLVVGSPGPVPRLVLSDLHLLTQSQVRVSWSPAEDHNAPIEKYDIEFEDKEMAPEKWYSLGKVPGNQTSTTLKLSPYVHYTFRVTAINKYGPGEPSPVSETVVTPEAAPEKNPVDVKGEGNETTNMVITWKPLRWMDWNAPQVQYRVQWRPQGTRGPWQEQIVSDPFLVVSNTSTFVPYEIKVQAVNSQGKGPEPQVTIGYSGEDYPQAIPELEGIEILNSSAVLVKWRPVDLAQVKGHLRGYNVTYWREGSQRKHSKRHIHKDHVVVPANTTSVILSGLRPYSSYHLEVQAFNGRGSGPASEFTFSTPEGVPGHPEALHLECQSNTSLLLRWQPPLSHNGVLTGYVLSYHPLDEGGKGQLSFNLRDPELRTHNLTDLSPHLRYRFQLQATTKEGPGEAIVREGGTMALSGISDFGNISATAGENYSVVSWVPKEGQCNFRFHILFKALGEEKGGASLSPQYVSYNQSSYTQWDLQPDTDYEIHLFKERMFRHQMAVKTNGTGRVRLPPAGFATEGWFIGFVSAIILLLLVLLILCFIKRSKGGKYSVKDKEDTQVDSEARPMKDETFGEYSDNEEKAFGSSQPSLNGDIKPLGSDDSLADYGGSVDVQFNEDGSFIGQYSGKKEKEAAGGNDSSGATSPINPAVALE

SEQ ID NO: 7619 - protein, 1248 aa, Homo sapiens; identical to SEQ ID NO: 7618

SEQ ID NO: 7620 - protein, 84 aa, Homo sapiens
MVVALRYVWPLLLCSPCLLIQIPEEYEGHHVMEPPVITEQSPRRLVVFPTDDISLKCEASGKPEVQFRWTRDGVHFKPKEELGV

SEQ ID NO: 7621 - protein, 151 aa, Homo sapiens
MVVALRYVWPLLLCSPCLLIQIPEEYEGHHVMEPPVITEQSPRRLVVFPTDDISLKCEASGKPEVQFRWTRDGVHFKPKEELGVTVYQSPHSGSFTITGNNSNFAQRFQGIYRCFASNKLGTAMSHEIRLMAEGAPKWPKETVKPVEVEEG

SEQ ID NO: 7622 - protein, 1253 aa, Homo sapiens
MVVALRYVWPLLLCSPCLLIQIPEEYEGHHVMEPPVITEQSPRRLVVFPTDDISLKCEASGKPEVQFRWTRDGVHFKPKEELGVTVYQSPHSGSFTITGNNSNFAQRFQGIYRCFASNKLGTAMSHEIRLMAEGAPKWPKETVKPVEVEEGESVVLPCNPPPSAEPLRIYWMNSKILHIKQDERVTMGQNGNLYFANVLTSDNHSDYICHAHFPGTRTIIQKEPIDLRVKATNSMIDRKPRLLFPTNSSSHLVALQGQPLVLECIAEGFPTPTIKWLRPSGPMPADRVTYQNHNKTLQLLKVGEEDDGEYRCLAENSLGSARHAYYVTVEAAPYWLHKPQSHLYGPGETARLDCQVQGRPQPEVTWRINGIPVEELAKDQKYRIQRGALILSNVQPSDTMVTQCEARNRHGLLLANAYIYVVQLPAKILTADNQTYMAVQGSTAYLLCKAFGAPVPSVQWLDEDGTTVLQDERFFPYANGTLGIRDLQANDTGRYFCLAANDQNNVTIMANLKVKDATQITQGPRSTIEKKGSRVTFTCQASFDPSLQPSITWRGDGRDLQELGDSDKYFIEDGRLVIHSLDYSDQGNYSCVASTELDVVESRAQLLVVGSPGPVPRLVLSDLHLLTQSQVRVSWSPAEDHNAPIEKYDIEFEDKEMAPEKWYSLGKVPGNQTSTTLKLSPYVHYTFRVTAINKYGPGEPSPVSETVVTPEAAPEKNPVDVKGEGNETTNMVITWKPLRWMDWNAPQVQYRVQWRPQGTRGPWQEQIVSDPFLVVSNTSTFVPYEIKVQAVNSQGKGPEPQVTIGYSGEDYPQAIPELEGIEILNSSAVLVKWRPVDLAQVKGHLRGYNVTYWREGSQRKHSKRHIHKDHVVVPANTTSVILSGLRPYSSYHLEVQAFNGRGSGPASEFTFSTPEGVPGHPEALHLECQSNTSLLLRWQPPLSHNGVLTGYVLSYHPLDEGGKGQLSFNLRDPELRTHNLTDLSPHLRYRFQLQATTKEGPGEAIVREGGTMALSGISDFGNISATAGENYSVVSWVPKEGQCNFRFHILFKALGEEKGGASLSPQYVSYNQSSYTQWDLQPDTDYEIHLFKERMFRHQMAVKTNGTGRVRLPPAGFATEGWFIGFVSAIILLLLVLLILCFIKRSKGGKYSVKDKEDTQVDSEARPMKDETFGEYSDNEEKAFGSSQPSLNGDIKPLGSDDSLADYGGSVDVQFNEDGSFIGQYSGKKEKEAAGGNDSSGATSPINPAVALE

SEQ ID NO: 7623 - protein, 1257 aa, Homo sapiens
MVVALRYVWPLLLCSPCLLIQIPEEYEGHHVMEPPVITEQSPRRLVVFPTDDISLKCEASGKPEVQFRWTRDGVHFKPKEELGVTVYQSPHSGSFTITGNNSNFAQRFQGIYRCFASNKLGTAMSHEIRLMAEGAPKWPKETVKPVEVEEGESVVLPCNPPPSAEPLRIYWMNSKILHIKQDERVTMGQNGNLYFANVLTSDNHSDYICHAHFPGTRTIIQKEPIDLRVKATNSMIDRKPRLLFPTNSSSHLVALQGQPLVLECIAEGFPTPTIKWLRPSGPMPADRVTYQNHNKTLQLLKVGEEDDGEYRCLAENSLGSARHAYYVTVEAAPYWLHKPQSHLYGPGETARLDCQVQGRPQPEVTWRINGIPVEELAKDQKYRIQRGALILSNVQPSDTMVTQCEARNRHGLLLANAYIYVVQLPAKILTADNQTYMAVQGSTAYLLCKAFGAPVPSVQWLDEDGTTVLQDERFFPYANGTLGIRDLQANDTGRYFCLAANDQNNVTIMANLKVKDATQITQGPRSTIEKKGSRVTFTCQASFDPSLQPSITWRGDGRDLQELGDSDKYFIEDGRLVIHSLDYSDQGNYSCVASTELDVVESRAQLLVVGSPGPVPRLVLSDLHLLTQSQVRVSWSPAEDHNAPIEKYDIEFEDKEMAPEKWYSLGKVPGNQTSTTLKLSPYVHYTFRVTAINKYGPGEPSPVSETVVTPEAAPEKNPVDVKGEGNETTNMVITWKPLRWMDWNAPQVQYRVQWRPQGTRGPWQEQIVSDPFLVVSNTSTFVPYEIKVQAVNSQGKGPEPQVTIGYSGEDYPQAIPELEGIEILNSSAVLVKWRPVDLAQVKGHLRGYNVTYWREGSQRKHSKRHIHKDHVVVPANTTSVILSGLRPYSSYHLEVQAFNGRGSGPASEFTFSTPEGVPGHPEALHLECQSNTSLLLRWQPPLSHNGVLTGYVLSYHPLDEGGKGQLSFNLRDPELRTHNLTDLSPHLRYRFQLQATTKEGPGEAIVREGGTMALSGISDFGNISATAGENYSVVSWVPKEGQCNFRFHILFKALGEEKGGASLSPQYVSYNQSSYTQWDLQPDTDYEIHLFKERMFRHQMAVKTNGTGRVRLPPAGFATEGWFIGFVSAIILLLLVLLILCFIKRSKGGKYSVKDKEDTQVDSEARPMKDETFGEYRSLESDNEEKAFGSSQPSLNGDIKPLGSDDSLADYGGSVDVQFNEDGSFIGQYSGKKEKEAAGGNDSSGATSPINPAVALE

SEQ ID NO: 7624 - protein, 190 aa, Homo sapiens
  VARIANT 1: note = misc_feature - Xaa can be any naturally occurring amino acid
XDPSLQPSITWRGDGRDLQELGDSDKYFIEDGRLVIHSLDYSDQGNYSCVASTELDVVESRAQLLVVEYDIEFEDKEMAPEKWYSLGKVPGNQTSTTLKLSPYVHYTFRVTAINKYGPGEPSPVSETVVTPEAAPEKNPVDVKGEGNETTNMVITWKPLRWMDWNAPQVQYRVQWRPQGTRGPWQEQIVS

SEQ ID NO: 7625 - protein, 232 aa, Homo sapiens
ETPSSEPMEEEEDDDLELFGGYDSFRSYNSSVGSESSSYLEESSEAENEDREAGELPTSPLHLLSPGTPRSLDGSGSEPAVCEMCGIVGTREAFFSKTKRFCSVSCSRSYSSNSKKASILARLQGKPPTKKAKVLHKAAWSAKIGAFLHSQGTGQLADGTPTGQDALVLGFDWGKFLKDHSYKAAPVSCFKHGIGCCFGMKALKMTPAMTSGATWEQWMSTPLAGVPSTARS

SEQ ID NO: 7626 - protein, 705 aa, Homo sapiens
MEKPRSIEETPSSEPMEEEEDDDLELFGGYDSFRSYNSSVGSESSSYLEESSEAENEDREAGELPTSPLHLLSPGTPRSLDGSGSEPAVCEMCGIVGTREAFFSKTKRFCSVSCSRSYSSNSKKASILARLQGKPPTKKAKVLHKAAWSAKIGAFLHSQGTGQLADGTPTGQDALVLGFDWGKFLKDHSYKAAPVSCFKHVPLYDQWEDVMKGMKVEVLNSDAVLPSRVYWIASVIQTAGYRVLLRYEGFENDASHDFWCNLGTVDVHPIGWCAINSKILVPPRTIHAKFTDWKGYLMKRLVGSRTLPVDFHIKMVESMKYPFRQGMRLEVVDKSQVSRTRMAVVDTVIGGRLRLLYEDGDSDDDFWCHMWSPLIHPVGWSRRVGHGIKMSERRSDMAHHPTFRKIYCDAVPYLFKKVRAVYTEGGWFEEGMKLEAIDPLNLGNICVATVCKVLLDGYLMICVDGGPSTDGLDWFCYHASSHAIFPATFCQKNDIELTPPKGYEAQTFNWENYLEKTKSKAAPSRLFNMDCPNHGFKVGMKLEAVDLMEPRLICVATVKRVVHRLLSIHFDGWDSEYDQWVDCESPDIYPVGWCELTGYQLQPPVAAEPATPLKAKEATKKKKKQFGKKRKRIPPTKTRPLRQGSKKPLLEDDPQGARKISSEPVPGEIIAVRVKEEHLDVASPDKASSPELPVSVENIKQETDD

SEQ ID NO: 7627 - protein, 614 aa, Homo sapiens
MEKPRSIEETPSSEPMEEEEDDDLELFGGYDSFRSYNSSVGSESSSYLEESSEAENEDREAGELPTSPLHLLSPGTPRSLDGSGSEPAVCEMCGIVGTREAFFSKTKRFCSVSCSRSYSSNSKKASILARLQGKPPTKKAKVLHKAAWSAKIGAFLHSQGTGQLADGTPTGQDALVLGFDWGKFLKDHSYKAAPVSCFKHVPLYDQWEDVMKGMKVEVLNSDAVLPSRVYWIASVIQTAGYRVLLRYEGFENDASHDFWCNLGTVDVHPIGWCAINSKILVPPRTIHAKFTDWKGYLMKRLVGSRTLPVDFHIKMVESMKYPFRQGMRLEVVDKSQVSRTRMAVVDTVIGGRLRLLYEDGDSDDDFWCHMWSPLIHPVGWSRRVGHGIKMSERRSDMAHHPTFRKIYCDAVPYLFKKVRAVYTEGGWFEEGMKLEAIDPLNLGNICVATVCKVLLDGYLMICVDGGPSTDGLDWFCYHASSHAIFPATFCQKNDIELTPPKGYEAQTFNWENYLEKTKSKAAPSRLFNMDCPNHGFKVGMKLEAVDLMEPRLICVATVKRVVHRLLSIHFDGWDSEYDQWVDCESPDIYPVGWCELTGYQLQPPVAAGKLPRSL

SEQ ID NO: 7628 - protein, 40 aa, Homo sapiens
MEKPRSIERWGVAVLPRLVSNSWVQAIHLPQPPKVLGLQM

SEQ ID NO: 7629 - protein, 288 aa, Homo sapiens
  VARIANT 1: note = misc_feature - Xaa can be any naturally occurring amino acid
XRPHLQNQWRKRKMTTWSCLVAMIVSGVITAVWAVRAAPIWRSQVKQKMRIGKQGNCRPPRCICSALGLLAPWMAVVLSQGKPPTKKAKVLHKAAWSAKIGAFLHSQGTGQLADGTPTGQDALVLGFDWGKFLKDHSYKAAPVSCFKHVPLYDQWEDVMKGMKVEVLNSDAVLPSRVYWIASVIQTAGYRVLLRYEGFENDASHDFWCNLGTVDVHPIGWCAINSKILVPPRTIHAKFTDWKGYLMKRLVGSRTLPVDFHIKVGSEPLTDVPPSALPFFCILHATHWS

SEQ ID NO: 7630 - protein, 127 aa, Homo sapiens
MKFTTLLFLAAVAGALVYAEDASSDSTGADPAQEAGTSKPNEEISGPAEPASPPETTTTAQETSAAAVQGTAKVTSSRQELNPLKQALAKAGKGMHGGVPGGKQFIENGSEFAQKLLKKFSLLKPWA

SEQ ID NO: 7631 - protein, 138 aa, Homo sapiens
MKFTTLLFLAAVAGALVYAEDASSDSTGADPAQEAGTSKPNEEISGPAEPASPPETTTTAQETSAAAVQGTAKVTSSRQELNPLKSIVEKSILLTEQALAKAGKGMHGGVPGGKQFIENGSEFAQKLLKKFSLLKPWA

SEQ ID NO: 7632 - protein, 85 aa, Homo sapiens
PAQEAGTSKPNEEISGPAEPASPPETTTTAQETSAAAVQGTAKVTSSRQELNPLKQALAKAGKGMHGGVPGGKQFIESECIPRWK

SEQ ID NO: 7633 - protein, 126 aa, Homo sapiens
MRIASISKSLTMVALAKLWEAGKLDLDIPVQHYVPEFPEKEYEGEKVSVTTRLLISHLSGIRHYEKDIKKVKEEKAYKALKMMKENVAFEQEKEGKSNEKNDFTKFKTEQENEAKCRNSKPGKKKN

SEQ ID NO: 7634 - protein, 547 aa, Homo sapiens
MYRLMSAVTARAAAPGGLASSCGRRGVHQRAGLPPLGHGWVGGLGLGLGLALGVKLAGGLRGAAPAQSPAAPDPEASPLAEPPQEQSLAPWSPQTPAPPCSRCFARAIESSRDLLHRIKDEVGAPGIVVGVSVDGKEVWSEGLGYADVENRVPCKPETVMRIASISKSLTMVALAKLWEAGKLDLDIPVQHYVPEFPEKEYEGEKVSVTTRLLISHLSGIRHYEKDIKKVKEEKAYKALKMMKENVAFEQEKEGKSNEKNDFTKFKTEQENEAKCRNSKPGKKKNDFEQGELYLREKFENSIESLRLFKNDPLFFKPGSQFLYSTFGYTLLAAIVERASGCKYLDYMQKIFHDLDMLTTVQEENEPVIYNRARFYVYNKKKRLVNTPYVDNSYKWAGGGFLSTVGDLLKFGNAMLYGYQVGLFKNSNENLLPGYLKPETMVMMWTPVPNTEMSWDKEGKYAMAWGVVERKQTYGSCRKQRHYASHTGGAVGASSVLLVLPEELDTETINNKVPPRGIIVSIICNMQSVGLNSTALKIALEFDKDRSD

SEQ ID NO: 7635 - protein, 373 aa, Homo sapiens
MYRLMSAVTARAAAPGGLASSCGRRGVHQRAGLPPLGHGWVGGLGLGLGLALGVKLAGGLRGAAPAQSPAAPDPEASPLAEPPQEQSLAPWSPQTPAPPCSRCFARAIESSRDLLHRIKDEVGAPGIVVGVSVDGKEVWSEGLGYADVENRVPCKPETVMRIASISKSLTMVALAKLWEAGKLDLDIPVQHYVPEFPEKEYEGEKVSVTTRLLISHLSGIRHYEKDIKKVKEEKAYKALKMMKENVAFEQEKEGKSNEKNDFTKFKTEQENEAKCRNSKPGKKKNDFEQGELYLREKFENSIESLRLFKNDPLFFKPGSQFLYSTFGYTLLAAIVERASGCKYLDYMQKIFHDLDMLTTVQEENEPVIYNRAR

SEQ ID NO: 7636 - protein, 525 aa, Homo sapiens
MWEAQFLGLLFLQPLWVAPVKPLQPGAEVPVVWAQEGAPAQLPCSPTIPLQDLSLLRRAGVTWQHQPDSGPPAAAPGHPLAPGPHPAAPSSWGPRPRRYTVLSVGPGGLRSGRLPLQPRVQLDERGRQRGDFSLWLRPARRADAGEYRAAVHLRDRALSCRLRLRLGQASMTASPPGSLRASDWVILNCSFSRPDRPASVHWFRNRGQGRVPVRESPHHHLAESFLFLPQVSPMDSGPWGCILTYRDGFNVSIMYNLTVLGLEPPTPLTVYAGAGSRVGLPCRLPAGVGTRSFLTAKWTPPGGGPDLLVTGDNGDFTLRLEDVSQAQAGTYTCHIHLQEQQLNATVTLAIITVTPKSFGSPGSLGKLLCEVTPVSGQERFVWSSLDTPSQRSFSGPWLEAQEAQLLSQPWQCQLYQGERLLGAAVYFTELSSPGAQRSGRAPGALPAGHLLLFLILGVLSLLLLVTGAFGFHLWRRQWRPRRFSALEQGIHPPQAQSKIEELEQEPEPEPEPEPEPEPEPEPEQL

SEQ ID NO: 7637 - protein, 360 aa, Homo sapiens
MWEAQFLGLLFLQPLWVAPVKPLQPGAEVPVVWAQEGAPAQLPCSPTIPLQDLSLLRRAGVTWQHQPDSGPPAAAPGHPLAPGPHPAAPSSWGPRPRRYTVLSVGPGGLRSGRLPLQPRVQLDERGRQRGDFSLWLRPARRADAGEYRAAVHLRDRALSCRLRLRLGQASMTASPPGSLRASDWVILNCSFSRPDRPASVHWFRNRGQGRVPVRESPHHHLAESFLFLPQVSPMDSGPWGCILTYRDGFNVSIMYNLTVLGLEPPTPLTVYAGAGSRVGLPCRLPAGVGTRSFLTAKWTPPGGGPDLLVTGDNGDFTLRLEDVSQAQAGTYTCHIHLQEQQLNATVTLAIITGQPQVGKE

SEQ ID NO: 7638 - protein, 77 aa, Homo sapiens
MEREMGALPRPSISAEPGTVISPGSHVTFMCRGPVGVQTFRLEREDRAKYKDSYNVFRLGPSESEARFHIDSVSEGN

SEQ ID NO: 7639 - protein, 89 aa, Homo sapiens
MEREMVLCLAQTIHTQEGALPRPSISAEPGTVISPGSHVTFMCRGPVGVQTFRLEREDRAKYKDSYNVFRLGPSESEARFHIDSVSEGN

SEQ ID NO: 7640 - protein, 152 aa, Homo sapiens
MSPHLTALLGLVLCLAQTIHTQEGALPRPSISAEPGTVISPGSHVTFMCRGPVGVQTFRLEREDRAKYKDSYNVFRLGPSESEARFHIDSVSEGNAGLYRCLYYKPPGWSEHSDFLELLVKESSGGPDSPDTEPGSSAGTVPGTEASGFDAP

SEQ ID NO: 7641 - protein, 135 aa, Homo sapiens
MSPHLTALLGLVLCLAQTIHTQEGALPRPSISAEPGTVISPGSHVTFMCRGPVGVQTFRLEREDRAKYKDSYNVFRLGPSESEARFHIDSVSEGNAGLYRCLYYKPPGWSEHSDFLELLVKGTVPGTEASGFDAP

SEQ ID NO: 7642 - protein, 123 aa, Homo sapiens
MRFFVPLFLVGILFPAILAKQFTKCELSQLLKDIDGYGGIALPELICTMFHTSGYDTQAIVENNESTEYGLFQISNKLWCKSSQVPQSRNICDISCDKFLDDDITDDIMCAKKILDIKGIDYW

SEQ ID NO: 7643 - protein, 142 aa, Homo sapiens
MRFFVPLFLVGILFPAILAKQFTKCELSQLLKDIDGYGGIALPELICTMFHTSGYDTQAIVENNESTEYGLFQISNKLWCKSSQVPQSRNICDISCDKFLDDDITDDIMCAKKILDIKGIDYWLAHKALCTEKLEQWLCEKL

SEQ ID NO: 7644 - protein, 217 aa, Homo sapiens
MLIGGNIEVHVNPGDGTGLRKALLHAPTGTCSDGQAHSISLVRNRRIITVQLDENNPVEMKLGTLVESRTINVSNLYVGGIPEGEGTSLLTMRRSFHGCIKNLIFNLELLDFNSAVGMSKSTWTPAGCQKGLSWLPMQRTKLLPEPRAFPVGAASFTISQVQSAKEGLGQRELKWGLAVKVPAKAGAGAGAGAVLKIRAGTGRERVPQATQMTRPNP

SEQ ID NO: 7645 - protein, 3075 aa, Homo sapiens
MRGGVLLVLLLCVAAQCRQRGLFPAILNLASNAHISTNATCGEKGPEMFCKLVEHVPGRPVRNPQCRICDGNSANPRERHPISHAIDGTNNWWQSPSIQNGREYHWVTITLDLRQVFQVAYVIIKAANAPRPGNWILERSLDGTTFSPWQYYAVSDSECLSRYNITPRRGPPTYRADDEVICTSYYSRLVPLEHGEIHTSLINGRPSADDLSPKLLEFTSARYIRLRLQRIRTLNADLMTLSHREPKELDPIVTRRYYYSIKDISVGGMCICYGHASSCPWDETTKKLQCQCEHNTCGESCNRCCPGYHQQPWRPGTVSSGNTCEACNCHNKAKDCYYDESVAKQKKSLNTAGQFRGGGVCINCLQNTMGINCETCIDGYYRPHKVSPYEDEPCRPCNCDPVGSLSSVCIKDDLHSDLHNGKQPGQCPCKEGYTGEKCDRCQLGYKDYPTCVSCGCNPVGSASDEPCTGPCVCKENVEGKACDRCKPGFYNLKEKNPRGCSECFCFGVSDVCSSLSWPVGQVNSMSGWLVTDLISPRKIPSQQDALGGRHQVSINNTAVMQRLAPKYYWAAPEAYLGNKLTAFGGFLKYTVSYDIPVETVDSNLMSHADVIIKGNGLTLSTQAEGLSLQPYEEYLNVVRLVPENFQDFHSKRQIDRDQLMTVLANVTHLLIRANYNSAKMALYRLESVSLDIASSNAIDLVVAADVEHCECPQGYTGTSCESCLSGYYRVDGILFGGICQPCECHGHAAECNVHGVCIACAHNTTGVHCEQCLPGFYGEPSRGTPGDCQPCACPLTIASNNFSPTCHLNDGDEVVCDWCAPGYSGAWCERCADGYYGNPTVPGESCVPCDCSGNVDPSEAGHCDSVTGECLKCLGNTDGAHCERCADGFYGDAVTAKNCRACECHVKGSHSAVCHLETGLCDCKPNVTGQQCDQCLHGYYGLDSGHGCRPCNCSVAGSVSDGCTDEGQCHCVPGVAGKRCDRCAHGFYAYQDGSCTPCDCPHTQNTCDPETGECVCPPHTQGVKCEECEDGHWGYDAEVGCQACNCSLVGSTHHRCDVVTGHCQCKSKFGGRACDQCSLGYRDFPDCVPCDCDLRGTSGDACNLEQGLCGCVEETGACPCKENVFGPQCNECREGTFALRADNPLGCSPCFCSGLSHLCSELEDYVRTPVTLGSDQPLLRVVSQSNLRGTTEGVYYQAPDFLLDAATVRQHIRAEPFYWRLPQQFQGDQLMAYGGKLKYSVAFYSLDGVGTSNFEPQVLIKGGRIRKQVIYMDAPAPENGVRQEQEVAMRENFWKYFNSVSEKPVTREDFMSVLSDIEYILIKASYGQGLQQSRISDISMEVGRKAEKLHPEEEVASLLENCVCPPGTVGFSCQDCAPGYHRGKLPAGSDRGPRPLVAPCVPCSCNNHSDTCDPNTGKCLNCGDNTAGDHCDVCTSGYYGKVTGSASDCALCACPHSPPASFSPTCVLEGDHDFRCDACLLGYEGKHCERCSSSYYGNPQTPGGSCQKCDCNPHGSVHGDCDRTSGQCVCRLGASGLRCDECEPRHILMETDCVSCDDECVGVLLNDLDEIGDAVLSLNLTGIIPVPYGILSNLENTTKYLQESLLKENMQKDLGKIKLEGVAEETDNLQKKLTRMLASTQKVNRATERIFKESQDLAIAIERLQMSITEIMEKTTLNQTLDEDFLLPNSTLQNMQQNGTSLLEIMQIRDFTQLHQNATLELKAAEDLLSQIQENYQKPLEELEVLKEAASHVLSKHNNELKAAEALVREAEAKMQESNHLLLMVNANLREFSDKKLHVQEEQNLTSELIVQGRGLIDAAAAQTDAVQDALEHLEDHQDKLLLWSAKIRHHIDDLVMHMSQRNAVDLVYRAEDHAAEFQRLADVLYSGLENIRNVSLNATSAAYVHYNIQSLIEESEELARDAHRTVTETSLLSESLVSNGKAAVQRSSRFLKEGNNLSRKLPGIALELSELRNKTNRFQENAVEITRQTNESLLILRAIPKGIRDKGAKTKELATSASQSAVSTLRDVAGLSQELLNTSASLSRVNTTLRETHQLLQDSTMATLLAGRKVKDVEIQANLLFDRLKPLKMLEENLSRNLSEIKLLISQARKQAASIKVAVSADRDCIRAYQPQISSTNYNTLTLNVKTQEPDNLLFYLGSSTASDFLAVEMRRGRVAFLWDLGSGSTRLEFPDFPIDDNRWHSIHVARFGNIGSLSVKEMSSNQKSPTKTSKSPGTANVLDVNNSTLMFVGGLGGQIKKSPAVKVTHFKGCLGEAFLNGKSIGLWNYIEREGKCRGCFGSSQNEDPSFHFDGSGYSVVEKSLPATVTQIIMLFNTFSPNGLLLYLGSYGTKDFLSIELFRGRVKVMTDLGSGPITLLTDRRYNNGTWYKIAFQRNRKQGVLAVIDAYNTSNKETKQGETPGASSDLNRLDKDPIYVGGLPRSRVVRRGVTTKSFVGCIKNLEISRSTFDLLRNSYGVRKGCLLEPIRSVSFLKGGYIELPPKSLSPESEWLVTFATTNSSGIILAALGGDVEKRGDREEAHVPFFSVMLIGGNIEVHVNPGDGTGLRKALLHAPTGTCSDGQAHSISLVRNRRIITVQLDENNPVEMKLGTLVESRTINVSNLYVGGIPEGEGTSLLTMRRSFHGCIKNLIFNLELLDFNSAVGHEQVDLDTCWLSERPKLAPDAEDSKLLPEPRAFPEQCVVDAALEYVPGAHQFGLTQNSHFILPFNQSAVRKKLSVELSIRTFASSGLIYYMAHQNQADYAVLQLHGGRLHFMFDLGKGRTKVSHPALLSDGKWHTVKTDYVKRKGFITVDGRESPMVTVVGDGTMLDVEGLFYLGGLPSQYQARKIGNITHSIPACIGDVTVNSKQLDKDSPVSAFTVNRCYAVAQEGTYFDGSGYAALVKEGYKVQSDVNITLEFRTSSQNGVLLGISTAKVDAIGLELVDGKVLFHVNNGAGRITAAYEPKTATVLCDGKWHTLQANKSKHRITLIVDGNAVGAESPHTQSTSVDTNNPIYVGGYPAGVKQKCLRSQTSFRGCLRKLALIKSPQVQSFDFSRAFELHGVFLHSCPGTES

SEQ ID NO: 7646 - protein, 3122 aa, Homo sapiens
MPGAAGVLLLLLLSGGLGGVQAQRPQQQRQSQAHQQRGLFPAVLNLASNALITTNATCGEKGPEMYCKLVEHVPGQPVRNPQCRICNQNSSNPNQRHPITNAIDGKNTWWQSPSIKNGIEYHYVTITLDLQQVFQIAYVIVKAANSPRPGNWILERSLDDVEYKPWQYHAVTDTECLTLYNIYPRTGPPSYAKDDEVICTSFYSKIHPLENGEIHISLINGRPSADDPSPELLEFTSARYIRLRFQRIRTLNADLMMFAHKDPREIDPIVTRRYYYSVKDISVGGMCICYGHARACPLDPATNKSRCECEHNTCGDSCDQCCPGFHQKPWRAGTFLTKTECEACNCHGKAEECYYDENVARRNLSLNIRGKYIGGGVCINCTQNTAGINCETCTDGFFRPKGVSPNYPRPCQPCHCDPIGSLNEVCVKDEKHARRGLAPGSCHCKTGFGGVSCDRCARGYTGYPDCKACNCSGLGSKNEDPCFGPCICKENVEGGDCSRCKSGFFNLQEDNWKGCDECFCSGVSNRCQSSYWTYGKIQDMSGWYLTDLPGRIRVAPQQDDLDSPQQISISNAEARQALPHSYYWSAPAPYLGNKLPAVGGQLTFTISYDLEEEEEDTERVLQLMIILEGNDLSISTAQDEVYLHPSEEHTNVLLLKEESFTIHGTHFPVRRKEFMTVLANLKRVLLQITYSFGMDAIFRLSSVNLESAVSYPTDGSIAAAVEVCQCPPGYTGSSCESCWPRHRRVNGTIFGGICEPCQCFGHAESCDDVTGECLNCKDHTGGPYCDKCLPGFYGEPTKGTSEDCQPCACPLNIPSNNFSPTCHLDRSLGLICDGCPVGYTGPRCERCAEGYFGQPSVPGGSCQPCQCNDNLDFSIPGSCDSLSGSCLICKPGTTGRYCELCADGYFGDAVDAKNCQPCRCNAGGSFSEVCHSQTGQCECRANVQGQRCDKCKAGTFGLQSARGCVPCNCNSFGSKSFDCEESGQCWCQPGVTGKKCDRCAHGYFNFQEGGCTACECSHLGNNCDPKTGRCICPPNTIGEKCSKCAPNTWGHSITTGCKACNCSTVGSLDFQCNVNTGQCNCHPKFSGAKCTECSRGHWNYPRCNLCDCFLPGTDATTCDSETKKCSCSDQTGQCTCKVNVEGIHCDRCRPGKFGLDAKNPLGCSSCYCFGTTTQCSEAKGLIRTWVTLKAEQTILPLVDEALQHTTTKGIVFQHPEIVAHMDLMREDLHLEPFYWKLPEQFEGKKLMAYGGKLKYAIYFEAREETGFSTYNPQVIIRGGTPTHARIIVRHMAAPLIGQLTRHEIEMTEKEWKYYGDDPRVHRTVTREDFLDILYDIHYILIKATYGNFMRQSRISEISMEVAEQGRGTTMTPPADLIEKCDCPLGYSGLSCEACLPGFYRLRSQPGGRTPGPTLGTCVPCQCNGHSSLCDPETSICQNCQHHTAGDFCERCALGYYGIVKGLPNDCQQCACPLISSSNNFSPSCVAEGLDDYRCTACPRGYEGQYCERCAPGYTGSPGNPGGSCQECECDPYGSLPVPCDPVTGFCTCRPGATGRKCDGCKHWHAREGWECVFCGDECTGLLLGDLARLEQMVMSINLTGPLPAPYKMLYGLENMTQELKHLLSPQRAPERLIQLAEGNLNTLVTEMNELLTRATKVTADGEQTGQDAERTNTRAKSLGEFIKELARDAEAVNEKAIKLNETLGTRDEAFERNLEGLQKEIDQMIKELRRKNLETQKEIAEDELVAAEALLKKVKKLFGESRGENEEMEKDLREKLADYKNKVDDAWDLLREATDKIREANRLFAVNQKNMTALEKKKEAVESGKRQIENTLKEGNDILDEANRLADEINSIIDYVEDIQTKLPPMSEELNDKIDDLSQEIKDRKLAEKVSQAESHAAQLNDSSAVLDGILDEAKNISFNATAAFKAYSNIKDYIDEAEKVAKEAKDLAHEATKLATGPRGLLKEDAKGCLQKSFRILNEAKKLANDVKENEDHLNGLKTRIENADARNGDLLRTLNDTLGKLSAIPNDTAAKLQAVKDKARQANDTAKDVLAQITELHQNLDGLKKNYNKLADSVAKTNAVVKDPSKNKIIADADATVKNLEQEADRLIDKLKPIKELEDNLKKNISEIKELINQARKQANSIKVSVSSGGDCIRTYKPEIKKGSYNNIVVNVKTAVADNLLFYLGSAKFIDFLAIEMRKGKVSFLWDVGSGVGRVEYPDLTIDDSYWYRIVASRTGRNGTISVRALDGPKASIVPSTHHSTSPPGYTILDVDANAMLFVGGLTGKLKKADAVRVITFTGCMGETYFDNKPIGLWNFREKEGDCKGCTVSPQVEDSEGTIQFDGEGYALVSRPIRWYPNISTVMFKFRTFSSSALLMYLATRDLRDFMSVELTDGHIKVSYDLGSGMASVVSNQNHNDGKWKSFTLSRIQKQANISIVDIDTNQEENIATSSSGNNFGLDLKADDKIYFGGLPTLRNLSMKARPEVNLKKYSGCLKDIEISRTPYNILSSPDYVGVTKGCSLENVYTVSFPKPGFVELSPVPIDVGTEINLSFSTKNESGIILLGSGGTPAPPRRKRRQTGQAYYAILLNRGRLEVHLSTGARTMRKIVIRPEPNLFHDGREHSVHVERTRGIFTVQVDENRRYMQNLTVEQPIEVKKLFVGGAPPEFQPSPLRNIPPFEGCIWNLVINSVPMDFARPVSFKNADIGRCAHQKLREDEDGAAPAEIVIQPEPVPTPAFPTPTPVLTHGPCAAESEPALLIGSKQFGLSRNSHIAIAFDDTKVKNRLTIELEVRTEAESGLLFYMARINHADFATVQLRNGLPYFSYDLGSGDTHTMIPTKINDGQWHKIKIMRSKQEGILYVDGASNRTISPKKADILDVVGMLYVGGLPINYTTRRIGPVTYSIDGCVRNLHMAEAPADLEQPTSSFHVGTCFANAQRGTYFDGTGFAKAVGGFKVGLDLLVEFEFRTTTTTGVLLGISSQKMDGMGIEMIDEKLMFHVDNGAGRFTAVYDAGVPGHLCDGQWHKVTANKIKHRIELTVDGNQVEAQSPNPASTSADTNDPVFVGGFPDDLKQFGLTTSIPFRGCIRSLKLTKGTGKPLEVNFAKALELRGVQPVSCPAN

SEQ ID NO: 7647 - protein, 3121 aa, Homo sapiens
MPGAAGVLLLLLLSGGLGGVQAQRPQQQRQSQAHQQRGLFPAVLNLASNALITTNATCGEKGPEMYCKLVEHVPGQPVRNPQCRICNQNSSNPNQRHPITNAIDGKNTWWQSPSIKNGIEYHYVTITLDLQQVFQIAYVIVKAANSPRPGNWILERSLDDVEYKPWQYHAVTDTECLTLYNIYPRTGPPSYAKDDEVICTSFYSKIHPLENGEIHISLINGRPSADDPSPELLEFTSARYIRLRFQRIRTLNADLMMFAHKDPREIDPIVTRRYYYSVKDISVGGMCICYGHARACPLDPATNKSRCECEHNTCGDSCDQCCPGFHQKPWRAGTFLTKTECEACNCHGKAEECYYDENVARRNLSLNIRGKYIGGGVCINCTQNTAGINCETCTDGFFRPKGVSPNYPRPCQPCHCDPIGSLNEVCVKDEKHARRGLAPGSCHCKTGFGGVSCDRCARGYTGYPDCKACNCSGLGSKNEDPCFGPCICKENVEGGDCSRCKSGFFNLQEDNWKGCDECFCSGVSNRCQSSYWTYGKIQDMSGWYLTDLPGRIRVAPQQDDLDSPQQISISNAEARQALPHSYYWSAPAPYLGNKLPAVGGQLTFTISYDLEEEEEDTERVLQLMIILEGNDLSISTAQDEVYLHPSEEHTNVLLLKEESFTIHGTHFPVRRKEFMTVLANLKRVLLQITYSFGMDAIFRLSSVNLESAVSYPTDGSIAAAVEVCQCPPGYTGSSCESCWPRHRRVNGTIFGGICEPCQCFGHAESCDDVTGECLNCKDHTGGPYCDKCLPGFYGEPTKGTSEDCQPCACPLNIPSNNFSPTCHLDRSLGLICDGCPVGYTGPRCERCAEGYFGQPSVPGGSCQPCQCNDNLDFSIPGSCDSLSGSCLICKPGTTGRYCELCADGYFGDAVDAKNCQPCRCNAGGSFSEVCHSQTGQCECRANVQGQRCDKCKAGTFGLQSARGCVPCNCNSFGSKSFDCEESGQCWCQPGVTGKKCDRCAHGYFNFQEGGCTACECSHLGNNCDPKTGRCICPPNTIGEKCSKCAPNTWGHSITTGCKACNCSTVGSLDFQCNVNTGQCNCHPKFSGAKCTECSRGHWNYPRCNLCDCFLPGTDATTCDSETKKCSCSDQTGQCTCKVNVEGIHCDRCRPGKFGLDAKNPLGCSSCYCFGTTTQCSEAKGLIRTWVTLKAEQTILPLVDEALQHTTTKGIVFQHPEIVAHMDLMREDLHLEPFYWKLPEQFEGKKLMAYGGKLKYAIYFEAREETGFSTYNPQVIIRGGTPTHARIIVRHMAAPLIGQLTRHEIEMTEKEWKYYGDDPRVHRTVTREDFLDILYDIHYILIKATYGNFMRQSRISEISMEVAEQGRGTTMTPPADLIEKCDCPLGYSGLSCEACLPGFYRLRSQPGGRTPGPTLGTCVPCQCNGHSSLCDPETSICQNCQHHTAGDFCERCALGYYGIVKGLPNDCQQCACPLISSSNNFSPSCVAEGLDDYRCTACPRGYEGQYCERCAPGYTGSPGNPGGSCQECECDPYGSLPVPCDPVTGFCTCRPGATGRKCDGCKHWHAREGWECVFCGDECTGLLLGDLARLEQMVMSINLTGPLPAPYKMLYGLENMTQELKHLLSPQRAPERLIQLAEGNLNTLVTEMNELLTRATKVTADGEQTGQDAERTNTRAKSLGEFIKELARDAEAVNEKAIKLNETLGTRDEAFERNLEGLQKEIDQMIKELRRKNLETQKEIAEDELVAAEALLKKVKKLFGESRGENEEMEKDLREKLADYKNKVDDAWDLLREATDKIREANRLFAVNQKNMTALEKKKEAVESGKRQIENTLKEGNDILDEANRLADEINSIIDYVEDIQTKLPPMSEELNDKIDDLSQEIKDRKLAEKVSQAESHAAQLNDSSAVLDGILDEAKNISFNATAAFKAYSNIKDYIDEAEKVAKEAKDLAHEATKLATGPRGLLKEDAKGCLQKSFRILNEAKKLANDVKENEDHLNGLKTRIENADARNGDLLRTLNDTLGKLSAIPNDTAAKLQAVKDKARQANDTAKDVLAQITELHQNLDGLKKNYNKLADSVAKTNAVVKDPSKNTVADADATVKNLEQEADRLIDKLKPIKELEDNLKKNISEIKELINQARKQANSIKVSVSSGGDCIRTYKPEIKKGSYNNIVVNVKTAVADNLLFYLGSAKFIDFLAIEMRKGKVSFLWDVGSGVGRVEYPDLTIDDSYWYRIVASRTGRNGTISVRALDGPKASIVPSTHHSTSPPGYTILDVDANAMLFVGGLTGKLKKADAVRVITFTGCMGETYFDNKPIGLWNFREKEGDCKGCTVSPQVEDSEGTIQFDGEGYALVSRPIRWYPNISTVMFKFRTFSSSALLMYLATRDLRDFMSVELTDGHIKVSYDLGSGMASVVSNQNHNDGKWKSFTLSRIQKQANISIVDIDTNQEENIATSSSGNNFGLDLKADDKIYFGGLPTLRNLSMKARPEVNLKKYSGCLKDIEISRTPYNILSSPDYVGVTKGCSLENVYTVSFPKPGFVELSPVPIDVGTEINLSFSTKNESGIILLGSGGTPAPPRRKRRQTGQAYYAILLNRGRLEVHLSTGARTMRKIVIRPEPNLFHDGREHSVHVERTRGIFTVQVDENRRYMQNLTVEQPIEVKKLFVGGAPPEFQPSPLRNIPPFEGCIWNLVINSVPMDFARPVSFKNADIGRCAHQKLREDEDGAAPAEIVIQPEPVPTPAFPTPTPVLTHGPCAAESEPALLIGSKQFGLSRNSHIAIAFDDTKVKNRLTIELEVRTEAESGLLFYMARINHADFATVQLRNGLPYFSYDLGSGDTHTMIPTKINDGQWHKIKIMRSKQEGILYVDGASNRTISPKKADILDVVGMLYVGGLPINYTTRRIGPVTYSIDGCVRNLHMAEAPADLEQPTSSFHVGTCFANAQRGTYFDGTGFAKAVGGFKVGLDLLVEFEFRTTTTTGVLLGISSQKMDGMGIEMIDEKLMFHVDNGAGRFTAVYDAGVPGHLCDGQWHKVTANKIKHRIELTVDGNQVEAQSPNPASTSADTNDPVFVGGFPDDLKQFGLTTSIPFRGCIRSLKLTKGTGKPLEVNFAKALELRGVQPVSCPAN

SEQ ID NO: 7648 - protein, 3118 aa, Homo sapiens
MPGAAGVLLLLLLSGGLGGVQAQRPQQQRQSQAHQQRGLFPAVLNLASNALITTNATCGEKGPEMYCKLVEHVPGQPVRNPQCRICNQNSSNPNQRHPITNAIDGKNTWWQSPSIKNGIEYHYVTITLDLQQVFQIAYVIVKAANSPRPGNWILERSLDDVEYKPWQYHAVTDTECLTLYNIYPRTGPPSYAKDDEVICTSFYSKIHPLENGEIHISLINGRPSADDPSPELLEFTSARYIRLRFQRIRTLNADLMMFAHKDPREIDPIVTRRYYYSVKDISVGGMCICYGHARACPLDPATNKSRCECEHNTCGDSCDQCCPGFHQKPWRAGTFLTKTECEACNCHGKAEECYYDENVARRNLSLNIRGKYIGGGVCINCTQNTAGINCETCTDGFFRPKGVSPNYPRPCQPCHCDPIGSLNEVCVKDEKHARRGLAPGSCHCKTGFGGVSCDRCARGYTGYPDCKACNCSGLGSKNEDPCFGPCICKENVEGGDCSRCKSGFFNLQEDNWKGCDECFCSGVSNRCQSSYWTYGKIQDMSGWYLTDLPGRIRVAPQQDDLDSPQQISISNAEARQALPHSYYWSAPAPYLGNKLPAVGGQLTFTISYDLEEEEEDTERVLQLMIILEGNDLSISTAQDEVYLHPSEEHTNVLLLKEESFTIHGTHFPVRRKEFMTVLANLKRVLLQITYSFGMDAIFRLSSVNLESAVSYPTDGSIAAAVEVCQCPPGYTGSSCESCWPRHRRVNGTIFGGICEPCQCFGHAESCDDVTGECLNCKDHTGGPYCDKCLPGFYGEPTKGTSEDCQPCACPLNIPSNNFSPTCHLDRSLGLICDGCPVGYTGPRCERCAEGYFGQPSVPGGSCQPCQCNDNLDFSIPGSCDSLSGSCLICKPGTTGRYCELCADGYFGDAVDAKNCQPCRCNAGGSFSEVCHSQTGQCECRANVQGQRCDKCKAGTFGLQSARGCVPCNCNSFGSKSFDCEESGQCWCQPGVTGKKCDRCAHGYFNFQEGGCTACECSHLGNNCDPKTGRCICPPNTIGEKCSKCAPNTWGHSITTGCKACNCSTVGSLDFQCNVNTGQCNCHPKFSGAKCTECSRGHWNYPRCNLCDCFLPGTDATTCDSETKKCSCSDQTGQCTCKVNVEGIHCDRCRPGKFGLDAKNPLGCSSCYCFGTTTQCSEAKGLIRTWVTLKAEQTILPLVDEALQHTTTKGIVFQHPEIVAHMDLMREDLHLEPFYWKLPEQFEGKKLMAYGGKLKYAIYFEAREETGFSTYNPQVIIRGGTPTHARIIVRHMAAPLIGQLTRHEIEMTEKEWKYYGDDPRVHRTVTREDFLDILYDIHYILIKATYGNFMRQSRISEISMEVAEQGRGTTMTPPADLIEKCDCPLGYSGLSCEACLPGFYRLRSQPGGRTPGPTLGTCVPCQCNGHSSLCDPETSICQNCQHHTAGDFCERCALGYYGIVKGLPNDCQQCACPLISSSNNFSPSCVAEGLDDYRCTACPRGYEGQYCERCAPGYTGSPGNPGGSCQECECDPYGSLPVPCDPVTGFCTCRPGATGRKCDGCKHWHAREGWECVFCGDECTGLLLGDLARLEQMVMSINLTGPLPAPYKMLYGLENMTQELKHLLSPQRAPERLIQLAEGNLNTLVTEMNELLTRATKVTADGEQTGQDAERTNTRAKSLGEFIKELARDAEAVNEKAIKLNETLGTRDEAFERNLEGLQKEIDQMIKELRRKNLETQKEIAEDELVAAEALLKKVKKLFGESRGENEEMEKDLREKLADYKNKVDDAWDLLREATDKIREANRLFAVNQKNMTALEKKKEAVESGKRQIENTLKEGNDILDEANRLADEINSIIDYVEDIQTKLPPMSEELNDKIDDLSQEIKDRKLAEKVSQAESHAAQLNDSSAVLDGILDEAKNISFNATAAFKAYSNIKDYIDEAEKVAKEAKDLAHEATKLATGPRGLLKEDAKGCLQKSFRILNEAKKLANDVKENEDHLNGLKTRIENADARNGDLLRTLNDTLGKLSAIPNDTAAKLQAVKDKARQANDTAKDVLAQITELHQNLDGLKKNYNKLADSVAKTNAVVKDPSKNNAVADADATVKNLEQEADRLIDKLKPIKELEDNLKKNISEIKELINQARKQANSIKVSVSSGGDCIRTYKPEIKKGSYNNIVVNVKTAVADNLLFYLGSAKFIDFLAIEMRKGKVSFLWDVGSGVGRVEYPDLTIDDSYWYRIVASRTGRNGTISVRALDGPKASIVPSTHHSTSPPGYTILDVDANAMLFVGGLTGKLKKADAVRVITFTGCMGETYFDNKPIGLWNFREKEGDCKGCTVSPQVEDSEGTIQFDGEGYALVSRPIRWYPNISTVMFKFRTFSSSALLMYLATRDLRDFMSVELTDGHIKVSYDLGSGMASVVSNQNHNDGKWKSFTLSRIQKQANISIVDIDTNQEENIATSSSGNNFGLDLKADDKIYFGGLPTLRNLRPEVNLKKYSGCLKDIEISRTPYNILSSPDYVGVTKGCSLENVYTVSFPKPGFVELSPVPIDVGTEINLSFSTKNESGIILLGSGGTPAPPRRKRRQTGQAYYAILLNRGRLEVHLSTGARTMRKIVIRPEPNLFHDGREHSVHVERTRGIFTVQVDENRRYMQNLTVEQPIEVKKLFVGGAPPEFQPSPLRNIPPFEGCIWNLVINSVPMDFARPVSFKNADIGRCAHQKLREDEDGAAPAEIVIQPEPVPTPAFPTPTPVLTHGPCAAESEPALLIGSKQFGLSRNSHIAIAFDDTKVKNRLTIELEVRTEAESGLLFYMARINHADFATVQLRNGLPYFSYDLGSGDTHTMIPTKINDGQWHKIKIMRSKQEGILYVDGASNRTISPKKADILDVVGMLYVGGLPINYTTRRIGPVTYSIDGCVRNLHMAEAPADLEQPTSSFHVGTCFANAQRGTYFDGTGFAKAVGGFKVGLDLLVEFEFRTTTTTGVLLGISSQKMDGMGIEMIDEKLMFHVDNGAGRFTAVYDAGVPGHLCDGQWHKVTANKIKHRIELTVDGNQVEAQSPNPASTSADTNDPVFVGGFPDDLKQFGLTTSIPFRGCIRSLKLTKGTGKPLEVNFAKALELRGVQPVSCPAN

SEQ ID NO: 7649 - protein, 184 aa, Homo sapiens
  VARIANT 1: note = misc_feature - Xaa can be any naturally occurring amino acid
XCRCNAGGSFSEVCHSQTGQCECRANVQGQRCDKCKPNMWRDPEKRFCVLCDCDPVGSVSPQCDITGRCVCKSGFVGKQCNLGRQVHQQEEQPRRAQRVLGSPQRWAIGSSSGCPRGAYRAPAPAGTFGLQSARGCVPCNCNSFGSKSFDCEESGQCWCQPGVTGKKCDRCAHGYFNFQEGGCT

SEQ ID NO: 7650 - protein, 94 aa, Homo sapiens
LVRSASFSRGGQLSFTDLGLPPTDHLQASFGFQTFQPSGILLDHQTWTRNLQVTLEDGYIELSTSDSGGPIFKSPQTYMDGLLHYVSVISDNSG

SEQ ID NO: 7651 - protein, 3333 aa, Homo sapiens
MAAAARPRGRALGPVLPPTPLLLLVLRVLPACGATARDPGAAAGLSLHPTYFNLAEAARIWATATCGERGPGEGRPQPELYCKLVGGPTAPGSGHTIQGQFCDYCNSEDPRKAHPVTNAIDGSERWWQSPPLSSGTQYNRVNLTLDLGQLFHVAYILIKFANSPRPDLWVLERSVDFGSTYSPWQYFAHSKVDCLKEFGREANMAVTRDDDVLCVTEYSRIVPLENGEVVVSLINGRPGAKNFTFSHTLREFTKATNIRLRFLRTNTLLGHLISKAQRDPTVTRRYYYSIKDISIGGQCVCNGHAEVCNINNPEKLFRCECQHHTCGETCDRCCTGYNQRRWRPAAWEQSHECEACNCHGHASNCYYDPDVERQQASLNTQGIYAGGGVCINCQHNTAGVNCEQCAKGYYRPYGVPVDAPDGCIPCSCDPEHADGCEQGSGRCHCKPNFHGDNCEKCAIGYYNFPFCLRIPIFPVSTPSSEDPVAGDIKGCDCNLEGVLPEICDAHGRCLCRPGVEGPRCDTCRSGFYSFPICQACWCSALGSYQMPCSSVTGQCECRPGVTGQRCDRCLSGAYDFPHCQGSSSACDPAGTINSNLGYCQCKLHVEGPTCSRCKLLYWNLDKENPSGCSECKCHKAGTVSGTGECRQGDGDCHCKSHVGGDSCDTCEDGYFALEKSNYFGCQGCQCDIGGALSSMCSGPSGVCQCREHVVGKVCQRPENNYYFPDLHHMKYEIEDGSTPNGRDLRFGFDPLAFPEFSWRGYAQMTSVQNDVRITLNVGKSSGSLFRVILRYVNPGTEAVSGHITIYPSWGAAQSKEIIFLPSKEPAFVTVPGNGFADPFSITPGIWVACIKAEGVLLDYLVLLPRDYYEASVLQLPVTEPCAYAGPPQENCLLYQHLPVTRFPCTLACEARHFLLDGEPRPVAVRQPTPAHPVMVDLSGREVELHLRLRIPQVGHYVVVVEYSTEAAQLFVVDVNVKSSGSVLAGQVNIYSCNYSVLCRSAVIDHMSRIAMYELLADADIQLKGHMARFLLHQVCIIPIEEFSAEYVRPQVHCIASYGRFVNQSATCVSLAHETPPTALILDVLSGRPFPHLPQQSSPSVDVLPGVTLKAPQNQVTLRGRVPHLGRYVFVIHFYQAAHPTFPAQVSVDGGWPRAGSFHASFCPHVLGCRDQVIAEGQIEFDISEPEVAATVKVPEGKSLVLVRVLVVPAENYDYQILHKKSMDKSLEFITNCGKNSFYLDPQTASRFCKNSARSLVAFYHKGALPCECHPTGATGPHCSPEGGQCPCQPNVIGRQCTRCATGHYGFPRCKPCSCGRRLCEEMTGQCRCPPRTVRPQCEVCETHSFSFHPMAGCEGCNCSRRGTIEAAMPECDRDSGQCRCKPRITGRQCDRCASGFYRFPECVPCNCNRDGTEPGVCDPGTGACLCKENVEGTECNVCREGSFHLDPANLKGCTSCFCFGVNNQCHSSHKRRTKFVDMLGWHLETADRVDIPVSFNPGSNSMVADLQELPATIHSASWVAPTSYLGDKVSSYGGYLTYQAKSFGLPGDMVLLEKKPDVQLTGQHMSIIYEETNTPRPDRLHHGRVHVVEGNFRHASSRAPVSREELMTVLSRLADVRIQGLYFTETQRLTLSEVGLEEASDTGSGRIALAVEICACPPAYAGDSCQGCSPGYYRDHKGLYTGRCVPCNCNGHSNQCQDGSGICVNCQHNTAGEHCERCQEGYYGNAVHGSCRACPCPHTNSFATGCVVNGGDVRCSCKAGYTGTQCERCAPGYFGNPQKFGGSCQPCSCNSNGQLGSCHPLTGDCINQEPKDSSPAEECDDCDSCVMTLLNDLATMGEQLRLVKSQLQGLSASAGLLEQMRHMETQAKDLRNQLLNYRSAISNHGSKIEGLERELTDLNQEFETLQEKAQVNSRKAQTLNNNVNRATQSAKELDVKIKNVIRNVHILLKQISGTDGEGNNVPSGDFSREWAEAQRMMRELRNRNFGKHLREAEADKRESQLLLNRIRTWQKTHQGENNGLANSIRDSLNEYEAKLSDLRARLQEAAAQAKQANGLNQENERALGAIQRQVKEINSLQSDFTKYLTTADSSLLQTNIALQLMEKSQKEYEKLAASLNEARQELSDKVRELSRSAGKTSLVEEAEKHARSLQELAKQLEEIKRNASGDELVRCAVDAATAYENILNAIKAAEDAANRAASASESALQTVIKEDLPRKAKTLSSNSDKLLNEAKMTQKKLKQEVSPALNNLQQTLNIVTVQKEVIDTNLTTLRDGLHGIQRGDIDAMISSAKSMVRKANDITDEVLDGLNPIQTDVERIKDTYGRTQNEDFKKALTDADNSVNKLTNKLPDLWRKIESINQQLLPLGNISDNMDRIRELIQQARDAASKVAVPMRFNGKSGVEVRLPNDLEDLKGYTSLSLFLQRPNSRENGGTENMFVMYLGNKDASRDYIGMAVVDGQLTCVYNLGDREAELQVDQILTKSETKEAVMDRVKFQRIYQFARLNYTKGATSSKPETPGVYDMDGRNSNTLLNLDPENVVFYVGGYPPDFKLPSRLSFPPYKGCIELDDLNENVLSLYNFKKTFNLNTTEVEPCRRRKEESDKNYFEGTGYARVPTQPHAPIPTFGQTIQTTVDRGLLFFAENGDRFISLNIEDGKLMVRYKLNSELPKERGVGDAINNGRDHSIQIKIGKLQKRMWINVDVQNTIIDGEVFDFSTYYLGGIPIAIRERFNISTPAFRGCMKNLKKTSGVVRLNDTVGVTKKCSEDWKLVRSASFSRGGQLSFTDLGLPPTDHLQASFGFQTFQPSGILLDHQTWTRNLQVTLEDGYIELSTSDSGGPIFKSPQTYMDGLLHYVSVISDNSGLRLLIDDQLLRNSKRLKHISSSRQSLRLGGSNFEGCISNVFVQRLSLSPEVLDLTSNSLKRDVSLGGCSLNKPPFLMLLKGSTRFNKTKTFRINQLLQDTPVASPRSVKVWQDACSPLPKTQANHGALQFGDIPTSHLLFKLPQELLKPRSQFAVDMQTTSSRGLVFHTGTKNSFMALYLSKGRLVFALGTDGKKLRIKSKEKCNDGKWHTVVFGHDGEKGRLVVDGLRAREGSLPGNSTISIRAPVYLGSPPSGKPKSLPTNSFVGCLKNFQLDSKPLYTPSSSFGVSSCLGGPLEKGIYFSEEGGHVVLAHSVLLGPEFKLVFSIRPRSLTGILIHIGSQPGKHLCVYLEAGKVTASMDSGAGGTSTSVTPKQSLCDGQWHSVAVTIKQHILHLELDTDSSYTAGQIPFPPASTQEPLHLGGAPANLTTLRIPVWKSFFGCLRNIHVNHIPVPVTEALEVQGPVSLNGCPDQ

SEQ ID NO: 7652 - protein, 3277 aa, Homo sapiens
MAAAARPRGRALGPVLPPTPLLLLVLRVLPACGATARDPGAAAGLSLHPTYFNLAEAARIWATATCGERGPGEGRPQPELYCKLVGGPTAPGSGHTIQGQFCDYCNSEDPRKAHPVTNAIDGSERWWQSPPLSSGTQYNRVNLTLDLGQLFHVAYILIKFANSPRPDLWVLERSVDFGSTYSPWQYFAHSKVDCLKEFGREANMAVTRDDDVLCVTEYSRIVPLENGEVVVSLINGRPGAKNFTFSHTLREFTKATNIRLRFLRTNTLLGHLISKAQRDPTVTRRYYYSIKDISIGGQCVCNGHAEVCNINNPEKLFRCECQHHTCGETCDRCCTGYNQRRWRPAAWEQSHECEACNCHGHASNCYYDPDVERQQASLNTQGIYAGGGVCINCQHNTAGVNCEQCAKGYYRPYGVPVDAPDGCIPCSCDPEHADGCEQGSGRCHCKPNFHGDNCEKCAIGYYNFPFCLRIPIFPVSTPSSEDPVAGDIKGCDCNLEGVLPEICDAHGRCLCRPGVEGPRCDTCRSGFYSFPICQACWCSALGSYQMPCSSVTGQCECRPGVTGQRCDRCLSGAYDFPHCQGSSSACDPAGTINSNLGYCQCKLHVEGPTCSRCKLLYWNLDKENPSGCSECKCHKAGTVSGTGECRQGDGDCHCKSHVGGDSCDTCEDGYFALEKSNYFGCQGCQCDIGGALSSMCSGPSGVCQCREHVVGKVCQRPENNYYFPDLHHMKYEIEDGSTPNGRDLRFGFDPLAFPEFSWRGYAQMTSVQNDVRITLNVGKSSGSLFRVILRYVNPGTEAVSGHITIYPSWGAAQSKEIIFLPSKEPAFVTVPGNGFADPFSITPGIWVACIKAEGVLLDYLVLLPRDYYEASVLQLPVTEPCAYAGPPQENCLLYQHLPVTRFPCTLACEARHFLLDGEPRPVAVRQPTPAHPVMVDLSGREVELHLRLRIPQVGHYVVVVEYSTEAAQLFVVDVNVKSSGSVLAGQVNIYSCNYSVLCRSAVIDHMSRIAMYELLADADIQLKGHMARFLLHQVCIIPIEEFSAEYVRPQVHCIASYGRFVNQSATCVSLAHETPPTALILDVLSGRPFPHLPQQSSPSVDVLPGVTLKAPQNQVTLRGRVPHLGRYVFVIHFYQAAHPTFPAQVSVDGGWPRAGSFHASFCPHVLGCRDQVIAEGQIEFDISEPEVAATVKVPEGKSLVLVRVLVVPAENYDYQILHKKSMDKSLEFITNCGKNSFYLDPQTASRFCKNSARSLVAFYHKGALPCECHPTGATGPHCSPEGGQCPCQPNVIGRQCTRCATGHYGFPRCKPCSCGRRLCEEMTGQCRCPPRTVRPQCEVCETHSFSFHPMAGCEGCNCSRRGTIEAAMPECDRDSGQCRCKPRITGRQCDRCASGFYRFPECVPCNCNRDGTEPGVCDPGTGACLCKENVEGTECNVCREGSFHLDPANLKGCTSCFCFGVNNQCHSSHKRRTKFVDMLGWHLETADRVDIPVSFNPGSNSMVADLQELPATIHSASWVAPTSYLGDKVSSYGGYLTYQAKSFGLPGDMVLLEKKPDVQLTGQHMSIIYEETNTPRPDRLHHGRVHVVEGNFRHASSRAPVSREELMTVLSRLADVRIQGLYFTETQRLTLSEVGLEEASDTGSGRIALAVEICACPPAYAGDSCQGCSPGYYRDHKGLYTGRCVPCNCNGHSNQCQDGSGICVNCQHNTAGEHCERCQEGYYGNAVHGSCRACPCPHTNSFATGCVVNGGDVRCSCKAGYTGTQCERCAPGYFGNPQKFGGSCQPCSCNSNGQLGSCHPLTGDCINQEPKDSSPAEECDDCDSCVMTLLNDLATMGEQLRLVKSQLQGLSASAGLLEQMRHMETQAKDLRNQLLNYRSAISNHGSKIEGLERELTDLNQEFETLQEKAQVNSRKAQTLNNNVNRATQSAKELDVKIKNVIRNVHMLNRIRTWQKTHQGENNGLANSIRDSLNEYEAKLSDLRARLQEAAAQAKQANGLNQENERALGAIQRQVKEINSLQSDFTKYLTTADSSLLQTNIALQLMEKSQKEYEKLAASLNEARQELSDKVRELSRSAGKTSLVEEAEKHARSLQELAKQLEEIKRNASGDELVRCAVDAATAYENILNAIKAAEDAANRAASASESALQTVIKEDLPRKAKTLSSNSDKLLNEAKMTQKKLKQEVSPALNNLQQTLNIVTVQKEVIDTNLTTLRDGLHGIQRGDIDAMISSAKSMVRKANDITDEVLDGLNPIQTDVERIKDTYGRTQNEDFKKALTDADNSVNKLTNKLPDLWRKIESINQQLLPLGNISDNMDRIRELIQQARDAASKVAVPMRFNGKSGVEVRLPNDLEDLKGYTSLSLFLQRPNSRENGGTENMFVMYLGNKDASRDYIGMAVVDGQLTCVYNLGDREAELQVDQILTKSETKEAVMDRVKFQRIYQFARLNYTKGATSSKPETPGVYDMDGRNSNTLLNLDPENVVFYVGGYPPDFKLPSRLSFPPYKGCIELDDLNENVLSLYNFKKTFNLNTTEVEPCRRRKEESDKNYFEGTGYARVPTQPHAPIPTFGQTIQTTVDRGLLFFAENGDRFISLNIEDGKLMVRYKLNSELPKERGVGDAINNGRDHSIQIKIGKLQKRMWINVDVQNTIIDGEVFDFSTYYLGGIPIAIRERFNISTPAFRGCMKNLKKTSGVVRLNDTVGVTKKCSEDWKLVRSASFSRGGQLSFTDLGLPPTDHLQASFGFQTFQPSGILLDHQTWTRNLQVTLEDGYIELSTSDSGGPIFKSPQTYMDGLLHYVSVISDNSGLRLLIDDQLLRNSKRLKHISSSRQSLRLGGSNFEGCISNVFVQRLSLSPEVLDLTSNSLKRDVSLGGCSLNKPPFLMLLKGSTRFNKTKTFRINQLLQDTPVASPRSVKVWQDACSPLPKTQANHGALQFGDIPTSHLLFKLPQELLKPRSQFAVDMQTTSSRGLVFHTGTKNSFMALYLSKGRLVFALGTDGKKLRIKSKEKCNDGKWHTVVFGHDGEKGRLVVDGLRAREGSLPGNSTISIRAPVYLGSPPSGKPKSLPTNSFVGCLKNFQLDSKPLYTPSSSFGVSSCLGGPLEKGIYFSEEGGHVVLAHSVLLGPEFKLVFSIRPRSLTGILIHIGSQPGKHLCVYLEAGKVTASMDSGAGGTSTSVTPKQSLCDGQWHSVAVTIKQHILHLELDTDSSYTAGQIPFPPASTQEPLHLGGAPANLTTLRIPVWKSFFGCLRNIHVNHIPVPVTEALEVQGPVSLNGCPDQ

SEQ ID NO: 7653 - protein, 576 aa, Homo sapiens
MAAAARPRGRALGPVLPPTPLLLLVLRVLPACGATARDPGAAAGLSLHPTYFNLAEAARIWATATCGERGPGEGRPQPELYCKLVGGPTAPGSGHTIQGQFCDYCNSEDPRKAHPVTNAIDGSERWWQSPPLSSGTQYNRVNLTLDLGQLFHVAYILIKFANSPRPDLWVLERSVDFGSTYSPWQYFAHSKVDCLKEFGREANMAVTRDDDVLCVTEYSRIVPLENGEVVVSLINGRPGAKNFTFSHTLREFTKATNIRLRFLRTNTLLGHLISKAQRDPTVTRRYYYSIKDISIGGQCVCNGHAEVCNINNPEKLFRCECQHHTCGETCDRCCTGYNQRRWRPAAWEQSHECEACNCHGHASNCYYDPDVERQQASLNTQGIYAGGGVCINCQHNTAGVNCEQCAKGYYRPYGVPVDAPDGCIPCSCDPEHADGCEQGSGRCHCKPNFHGDNCEKCAIGYYNFPFCLRIPIFPVSTPSSEDPVAGDIKGCDCNLEGVLPEICDAHGRCLCRPGVEGPRCDTCRSGFYSFPICQGPSEKVAIYKPESRPSAETEPASTWILDFPASRTGEINFYCL

SEQ ID NO: 7654 - protein, 1724 aa, Homo sapiens
MPPAVRRSACSMGWLWIFGAALGQCLGYSSQQQRVPFLQPPGQSQLQASYVEFRPSQGCSPGYYRDHKGLYTGRCVPCNCNGHSNQCQDGSGICVNCQHNTAGEHCERCQEGYYGNAVHGSCRACPCPHTNSFATGCVVNGGDVRCSCKAGYTGTQCERCAPGYFGNPQKFGGSCQPCSCNSNGQLGSCHPLTGDCINQEPKDSSPAEECDDCDSCVMTLLNDLATMGEQLRLVKSQLQGLSASAGLLEQMRHMETQAKDLRNQLLNYRSAISNHGSKIEGLERELTDLNQEFETLQEKAQVNSRKAQTLNNNVNRATQSAKELDVKIKNVIRNVHILLKQISGTDGEGNNVPSGDFSREWAEAQRMMRELRNRNFGKHLREAEADKRESQLLLNRIRTWQKTHQGENNGLANSIRDSLNEYEAKLSDLRARLQEAAAQAKQANGLNQENERALGAIQRQVKEINSLQSDFTKYLTTADSSLLQTNIALQLMEKSQKEYEKLAASLNEARQELSDKVRELSRSAGKTSLVEEAEKHARSLQELAKQLEEIKRNASGDELVRCAVDAATAYENILNAIKAAEDAANRAASASESALQTVIKEDLPRKAKTLSSNSDKLLNEAKMTQKKLKQEVSPALNNLQQTLNIVTVQKEVIDTNLTTLRDGLHGIQRGDIDAMISSAKSMVRKANDITDEVLDGLNPIQTDVERIKDTYGRTQNEDFKKALTDADNSVNKLTNKLPDLWRKIESINQQLLPLGNISDNMDRIRELIQQARDAASKVAVPMRFNGKSGVEVRLPNDLEDLKGYTSLSLFLQRPNSRENGGTENMFVMYLGNKDASRDYIGMAVVDGQLTCVYNLGDREAELQVDQILTKSETKEAVMDRVKFQRIYQFARLNYTKGATSSKPETPGVYDMDGRNSNTLLNLDPENVVFYVGGYPPDFKLPSRLSFPPYKGCIELDDLNENVLSLYNFKKTFNLNTTEVEPCRRRKEESDKNYFEGTGYARVPTQPHAPIPTFGQTIQTTVDRGLLFFAENGDRFISLNIEDGKLMVRYKLNSELPKERGVGDAINNGRDHSIQIKIGKLQKRMWINVDVQNTIIDGEVFDFSTYYLGGIPIAIRERFNISTPAFRGCMKNLKKTSGVVRLNDTVGVTKKCSEDWKLVRSASFSRGGQLSFTDLGLPPTDHLQASFGFQTFQPSGILLDHQTWTRNLQVTLEDGYIELSTSDSGGPIFKSPQTYMDGLLHYVSVISDNSGLRLLIDDQLLRNSKRLKHISSSRQSLRLGGSNFEGCISNVFVQRLSLSPEVLDLTSNSLKRDVSLGGCSLNKPPFLMLLKGSTRFNKTKTFRINQLLQDTPVASPRSVKVWQDACSPLPKTQANHGALQFGDIPTSHLLFKLPQELLKPRSQFAVDMQTTSSRGLVFHTGTKNSFMALYLSKGRLVFALGTDGKKLRIKSKEKCNDGKWHTVVFGHDGEKGRLVVDGLRAREGSLPGNSTISIRAPVYLGSPPSGKPKSLPTNSFVGCLKNFQLDSKPLYTPSSSFGVSSCLGGPLEKGIYFSEEGGHVVLAHSVLLGPEFKLVFSIRPRSLTGILIHIGSQPGKHLCVYLEAGKVTASMDSGAGGTSTSVTPKQSLCDGQWHSVAVTIKQHILHLELDTDSSYTAGQIPFPPASTQEPLHLGGAPANLTTLRIPVWKSFFGCLRNIHVNHIPVPVTEALEVQGPVSLNGCPDQ

SEQ ID NO: 7655 - protein, 1668 aa, Homo sapiens
MPPAVRRSACSMGWLWIFGAALGQCLGYSSQQQRVPFLQPPGQSQLQASYVEFRPSQGCSPGYYRDHKGLYTGRCVPCNCNGHSNQCQDGSGICVNCQHNTAGEHCERCQEGYYGNAVHGSCRACPCPHTNSFATGCVVNGGDVRCSCKAGYTGTQCERCAPGYFGNPQKFGGSCQPCSCNSNGQLGSCHPLTGDCINQEPKDSSPAEECDDCDSCVMTLLNDLATMGEQLRLVKSQLQGLSASAGLLEQMRHMETQAKDLRNQLLNYRSAISNHGSKIEGLERELTDLNQEFETLQEKAQVNSRKAQTLNNNVNRATQSAKELDVKIKNVIRNVHMLNRIRTWQKTHQGENNGLANSIRDSLNEYEAKLSDLRARLQEAAAQAKQANGLNQENERALGAIQRQVKEINSLQSDFTKYLTTADSSLLQTNIALQLMEKSQKEYEKLAASLNEARQELSDKVRELSRSAGKTSLVEEAEKHARSLQELAKQLEEIKRNASGDELVRCAVDAATAYENILNAIKAAEDAANRAASASESALQTVIKEDLPRKAKTLSSNSDKLLNEAKMTQKKLKQEVSPALNNLQQTLNIVTVQKEVIDTNLTTLRDGLHGIQRGDIDAMISSAKSMVRKANDITDEVLDGLNPIQTDVERIKDTYGRTQNEDFKKALTDADNSVNKLTNKLPDLWRKIESINQQLLPLGNISDNMDRIRELIQQARDAASKVAVPMRFNGKSGVEVRLPNDLEDLKGYTSLSLFLQRPNSRENGGTENMFVMYLGNKDASRDYIGMAVVDGQLTCVYNLGDREAELQVDQILTKSETKEAVMDRVKFQRIYQFARLNYTKGATSSKPETPGVYDMDGRNSNTLLNLDPENVVFYVGGYPPDFKLPSRLSFPPYKGCIELDDLNENVLSLYNFKKTFNLNTTEVEPCRRRKEESDKNYFEGTGYARVPTQPHAPIPTFGQTIQTTVDRGLLFFAENGDRFISLNIEDGKLMVRYKLNSELPKERGVGDAINNGRDHSIQIKIGKLQKRMWINVDVQNTIIDGEVFDFSTYYLGGIPIAIRERFNISTPAFRGCMKNLKKTSGVVRLNDTVGVTKKCSEDWKLVRSASFSRGGQLSFTDLGLPPTDHLQASFGFQTFQPSGILLDHQTWTRNLQVTLEDGYIELSTSDSGGPIFKSPQTYMDGLLHYVSVISDNSGLRLLIDDQLLRNSKRLKHISSSRQSLRLGGSNFEGCISNVFVQRLSLSPEVLDLTSNSLKRDVSLGGCSLNKPPFLMLLKGSTRFNKTKTFRINQLLQDTPVASPRSVKVWQDACSPLPKTQANHGALQFGDIPTSHLLFKLPQELLKPRSQFAVDMQTTSSRGLVFHTGTKNSFMALYLSKGRLVFALGTDGKKLRIKSKEKCNDGKWHTVVFGHDGEKGRLVVDGLRAREGSLPGNSTISIRAPVYLGSPPSGKPKSLPTNSFVGCLKNFQLDSKPLYTPSSSFGVSSCLGGPLEKGIYFSEEGGHVVLAHSVLLGPEFKLVFSIRPRSLTGILIHIGSQPGKHLCVYLEAGKVTASMDSGAGGTSTSVTPKQSLCDGQWHSVAVTIKQHILHLELDTDSSYTAGQIPFPPASTQEPLHLGGAPANLTTLRIPVWKSFFGCLRNIHVNHIPVPVTEALEVQGPVSLNGCPDQ

SEQ ID NO: 7656 - protein, 59 aa, Homo sapiens
  VARIANT 1: note = misc_feature - Xaa can be any naturally occurring amino acid
XAGQVNIYSCNYRCDAMNSLLSPQRLCQVPGCIAQGKRLILSNVRGCTPTFATHLQNWG

SEQ ID NO: 7657 - protein, 1147 aa, Homo sapiens
  VARIANT 1: note = misc_feature - Xaa can be any naturally occurring amino acid
XFATGCVVNGGDVRCSCKAGYTGTQCERCAPGYFGNPQKFGGSCQPCSCNSNGQLGSCHPLTGDCINQEPKDSSPAEECDDCDSCVMTLLNDLATMGEQLRLVKSQLQGLSASAGLLEQMRHMETQAKDLRNQLLNYRSAISNHGSKIEGLERELTDLNQEFETLQEKAQVNSRKAQTLNNNVNRATQSAKELDVKIKNVIRNVHILLKQISGTDGEGNNVPSGDFSREWAEAQRMMRELRNRNFGKHLREAEADKRESQLLLNRIRTWQKTHQGENNGLANSIRDSLNEYEAKLSDLRARLQEAAAQAKQANGLNQENERALGAIQRQVKEINSLQSDFTKYLTTADSSLLQTNIALQLMEKSQKEYEKLAASLNEARQELSDKVRELSRSAGKTSLVEEAEKHARSLQELAKQLEEIKRNASGDELVRCAVDAATAYENILNAIKAAEDAANRAASASESALQTVIKEDLPRKAKTLSSNSDKLLNEAKMTQKKLKQEVSPALNNLQQTLNIVTVQKEVIDTNLTTLRDGLHGIQRGDIDAMISSAKSMVRKANDITDEVLDGLNPIQTDVERIKDTYGRTQNEDFKKALTDADNSVNKLTNKLPDLWRKIESINQQLLPLGNISDNMDRIRELIQQARDAASKVAVPMRFNGKSGVEVRLPNDLEDLKGYTSLSLFLQRPNSRENGGTENMFVMYLGNKDASRDYIGMAVVDGQLTCVYNLGDREAELQVDQILTKSETKEAVMDRVKFQRIYQFARLNYTKGATSSKPETPGVYDMDGRNSNTLLNLDPENVVFYVGGYPPDFKLPSRLSFPPYKGCIELDDLNENVLSLYNFKKTFNLNTTEVEPCRRRKEESDKNYFEGTGYARVPTQPHAPIPTFGQTIQTTVDRGLLFFAENGDRFISLNIEDGKLMVRYKLNSELPKERGVGDAINNGRDHSIQIKIGKLQKRMWINVDVQNTIIDGEVFDFSTYYLGGIPIAIRERFNISTPAFRGCMKNLKKTSGVVRLNDTVGVTKKCSEDWKLVRSASFSRGGQLSFTDLGLPPTDHLQASFGFQTFQPSGILLDHQTWTRNLQVTLEDGYIELSTSDSGGPIFKSPQTYMDGLLHYVSVISDNSGLRQEGCLRPRVRDQSWKHSETMSLRKLK

SEQ ID NO: 7658 - protein, 134 aa, Homo sapiens
  VARIANT 1: note = misc_feature - Xaa can be any naturally occurring amino acid
XFSEEGGHVVLAHSVLLGPEFKLVFSIRPRSLTGILIHIGSQPGKHLCVYLEAGKVTASMDSGAGGTSTSVTPKQSLCDGQWHSVAANLTTLRIPVWKSFFGCLRNIHVNHIPVPVTEALEVQGPVSLNGCPDQ

SEQ ID NO: 7659 - protein, 37 aa, Homo sapiens
  VARIANT 1: note = misc_feature - Xaa can be any naturally occurring amino acid
XGWTEGPGGKFAWKLHHQHQSASLPGITSIRETKGAG

SEQ ID NO: 7660 - protein, 81 aa, Homo sapiens
MALSSAWRSVLPLWLLWSAACSRAASGDDNAFPFDIEGSSAVGRQDPPETSEPRVALGRLPPAAEKCNAGFFHTLSGECVP

SEQ ID NO: 7661 - protein, 88 aa, Homo sapiens
MALSSAWRSVLPLWLLWSAACSRAASGDDNAFPFDIEGSSAVGRQDPPETSEPRVALGRLPPAAEKCNAGFFHTLSGECVPCDCNGNS

SEQ ID NO: 7662 - protein, 107 aa, Homo sapiens
MALSSAWRSVLPLWLLWSAACSRAASGDDNAFPFDIEGSSAVGRQDPPETSEPRVALGRLPPAAEKCNAGFFHTLSGECVPCDCNGNSNECLDGSGYCVHCQRNTTG

SEQ ID NO: 7663 - protein, 1823 aa, Homo sapiens
MALSSAWRSVLPLWLLWSAACSRAASGDDNAFPFDIEGSSAVGRQDPPETSEPRVALGRLPPAAEKCNAGFFHTLSGECVPCDCNGNSNECLDGSGYCVHCQRNTTGEHCEKCLDGYIGDSIRGAPQFCQPCPCPLPHLANFAESCYRKNGAVRCICNENYAGPNCERCAPGYYGNPLLIGSTCKKCDCSGNSDPNLIFEDCDEVTGQCRNCLRNTTGFKCERCAPGYYGDARIAKNCAVCNCGGGPCDSVTGECLEEGFEPPTGMDCPTISCDKCVWDLTDDLRLAALSIEEGKSGVLSVSSGAAAHRHVNEINATIYLLKTKLSERENQYALRKIQINNAENTMKSLLSDVEELVEKENQASRKGQLVQKESMDTINHASQLVEQAHDMRDKIQEINNKMLYYGEEHELSPKEISEKLVLAQKMLEEIRSRQPFFTQRELVDEEADEAYELLSQAESWQRLHNETRTLFPVVLEQLDDYNAKLSDLQEALDQALNYVRDAEDMNRATAARQRDHEKQQERVREQMEVVNMSLSTSADSLTTPRLTLSELDDIIKNASGIYAEIDGAKSELQVKLSNLSNLSHDLVQEAIDHAQDLQQEANELSRKLHSSDMNGLVQKALDASNVYENIVNYVSEANETAEFALNTTDRIYDAVSGIDTQIIYHKDESENLLNQARELQAKAESSSDEAVADTSRRVGGALARKSALKTRLSDAVKQLQAAERGDAQQRLGQSRLITEEANRTTMEVQQATAPMANNLTNWSQNLQHFDSSAYNTAVNSARDAVRNLTEVVPQLLDQLRTVEQKRPASNVSASIQRIRELIAQTRSVASKIQVSMMFDGQSAVEVHSRTSMDDLKAFTSLSLYMKPPVKRPELTETADQFILYLGSKNAKKEYMGLAIKNDNLVYVYNLGTKDVEIPLDSKPVSSWPAYFSIVKIERVGKHGKVFLTVPSLSSTAEEKFIKKGEFSGDDSLLDLDPEDTVFYVGGVPSNFKLPTSLNLPGFVGCLELATLNNDVISLYNFKHIYNMDPSTSVPCARDKLAFTQSRAASYFFDGSGYAVVRDITRRGKFGQVTRFDIEVRTPADNGLILLMVNGSMFFRLEMRNGYLHVFYDFGFSGGPVHLEDTLKKAQINDAKYHEISIIYHNDKKMILVVDRRHVKSMDNEKMKIPFTDIYIGGAPPEILQSRALRAHLPLDINFRGCMKGFQFQKKDFNLLEQTETLGVGYGCPEDSLISRRAYFNGQSFIASIQKISFFDGFEGGFNFRTLQPNGLLFYYASGSDVFSISLDNGTVIMDVKGIKVQSVDKQYNDGLSHFVISSVSPTRYELIVDKSRVGSKNPTKGKIEQTQASEKKFYFGGSPISAQYANFTGCISNAYFTRVDRDVEVEDFQRYTEKVHTSLYECPIESSPLFLLHKKGKNLSKPKASQNKKGGKSKDAPSWDPVALKLPERNTPRNSHCHLSNSPRAIEHAYQYGGTANSRQEFEHLKGDFGAKSQFSIRLRTRSSHGMIFYVSDQEENDFMTLFLAHGRLVYMFNVGHKKLKIRSQEKYNDGLWHDVIFIRERSSGRLVIDGLRVLEESLPPTEATWKIKGPIYLGGVAPGKAVKNVQINSIYSFSGCLSNLQLNGASITSASQTFSVTPCFEGPMETGTYFSTEGGYVVLDESFNIGLKFEIAFEVRPRSSSGTLVHGHSVNGEYLNVHMKNGQVIVKVNNGIRDFSTSVTPKQSLCDGRWHRITVIRDSNVVQLDVDSEVNHVVGPLNPKPIDHREPVFVGGVPESLLTPRLAPSKPFTGCIRHFVIDGHPVSFSKAALVSGAVSINSCPAA

SEQ ID NO: 7664 - protein, 1816 aa, Homo sapiens
MALSSAWRSVLPLWLLWSAACSRAASGDDNAFPFDIEGSSAVGRQDPPETSEPRVALGRLPPAAEKCNAGFFHTLSGECVPCDCNGNSNECLDGSGYCVHCQRNTTGEHCEKCLDGYIGDSIRGAPQFCQPCPCPLPHLANFAESCYRKNGAVRCICNENYAGPNCERCAPGYYGNPLLIGSTCKKCDCSGNSDPNLIFEDCDEVTGQCRNCLRNTTGFKCERCAPGYYGDARIAKNCAVCNCGGGPCDSVTGECLEEGFEPPTGCDKCVWDLTDDLRLAALSIEEGKSGVLSVSSGAAAHRHVNEINATIYLLKTKLSERENQYALRKIQINNAENTMKSLLSDVEELVEKENQASRKGQLVQKESMDTINHASQLVEQAHDMRDKIQEINNKMLYYGEEHELSPKEISEKLVLAQKMLEEIRSRQPFFTQRELVDEEADEAYELLSQAESWQRLHNETRTLFPVVLEQLDDYNAKLSDLQEALDQALNYVRDAEDMNRATAARQRDHEKQQERVREQMEVVNMSLSTSADSLTTPRLTLSELDDIIKNASGIYAEIDGAKSELQVKLSNLSNLSHDLVQEAIDHAQDLQQEANELSRKLHSSDMNGLVQKALDASNVYENIVNYVSEANETAEFALNTTDRIYDAVSGIDTQIIYHKDESENLLNQARELQAKAESSSDEAVADTSRRVGGALARKSALKTRLSDAVKQLQAAERGDAQQRLGQSRLITEEANRTTMEVQQATAPMANNLTNWSQNLQHFDSSAYNTAVNSARDAVRNLTEVVPQLLDQLRTVEQKRPASNVSASIQRIRELIAQTRSVASKIQVSMMFDGQSAVEVHSRTSMDDLKAFTSLSLYMKPPVKRPELTETADQFILYLGSKNAKKEYMGLAIKNDNLVYVYNLGTKDVEIPLDSKPVSSWPAYFSIVKIERVGKHGKVFLTVPSLSSTAEEKFIKKGEFSGDDSLLDLDPEDTVFYVGGVPSNFKLPTSLNLPGFVGCLELATLNNDVISLYNFKHIYNMDPSTSVPCARDKLAFTQSRAASYFFDGSGYAVVRDITRRGKFGQVTRFDIEVRTPADNGLILLMVNGSMFFRLEMRNGYLHVFYDFGFSGGPVHLEDTLKKAQINDAKYHEISIIYHNDKKMILVVDRRHVKSMDNEKMKIPFTDIYIGGAPPEILQSRALRAHLPLDINFRGCMKGFQFQKKDFNLLEQTETLGVGYGCPEDSLISRRAYFNGQSFIASIQKISFFDGFEGGFNFRTLQPNGLLFYYASGSDVFSISLDNGTVIMDVKGIKVQSVDKQYNDGLSHFVISSVSPTRYELIVDKSRVGSKNPTKGKIEQTQASEKKFYFGGSPISAQYANFTGCISNAYFTRVDRDVEVEDFQRYTEKVHTSLYECPIESSPLFLLHKKGKNLSKPKASQNKKGGKSKDAPSWDPVALKLPERNTPRNSHCHLSNSPRAIEHAYQYGGTANSRQEFEHLKGDFGAKSQFSIRLRTRSSHGMIFYVSDQEENDFMTLFLAHGRLVYMFNVGHKKLKIRSQEKYNDGLWHDVIFIRERSSGRLVIDGLRVLEESLPPTEATWKIKGPIYLGGVAPGKAVKNVQINSIYSFSGCLSNLQLNGASITSASQTFSVTPCFEGPMETGTYFSTEGGYVVLDESFNIGLKFEIAFEVRPRSSSGTLVHGHSVNGEYLNVHMKNGQVIVKVNNGIRDFSTSVTPKQSLCDGRWHRITVIRDSNVVQLDVDSEVNHVVGPLNPKPIDHREPVFVGGVPESLLTPRLAPSKPFTGCIRHFVIDGHPVSFSKAALVSGAVSINSCPAA

SEQ ID NO: 7665 - protein, 1816 aa, Homo sapiens; identical to SEQ ID NO: 7664

SEQ ID NO: 7666 - protein, 1816 aa, Homo sapiens; identical to SEQ ID NO: 7664

SEQ ID NO: 7667 - protein, 331 aa, Homo sapiens
MALSSAWRSVLPLWLLWSAACSRAASGDDNAFPFDIEGSSAVGRQDPPETSEPRVALGRLPPAAEKCNAGFFHTLSGECVPCDCNGNSNECLDGSGYCVHCQRNTTGEHCEKCLDGYIGDSIRGAPQFCQPCPCPLPHLANFAESCYRKNGAVRCICNENYAGPNCERCAPGYYGNPLLIGSTCKKCDCSGNSDPNLIFEDCDEVTGQCRNCLRNTTGFKCERCAPGYYGDARIAKNCAVCNCGGGPCDSVTGECLEEGFEPPTGMDCPTISCDKCVWDLTDDLRLAALSIEEGKSGVLSVSSGAAAHRHVNEINATIYLLKTKLSERENQ

SEQ ID NO: 7668 - protein, 129 aa, Homo sapiens
MALSSAWRSVLPLWLLWSAACSRAASGDDNAFPFDIEGSSAVGRQDPPETSEPRVALGRLPPAAEKCNAGFFHTLSGECVPCDCNGNSNECLDGSGYCVTTDGEDPGFSASALSFILSSQGAREARAPT

SEQ ID NO: 7669 - protein, 120 aa, Homo sapiens
MALSSAWRSVLPLWLLWSAACSRAASGDDNAFPFDIEGSSAVGRQDPPETSEPRVALGRLPPAAEVQCPCHCHPAGAPAPPRAVPHSSFSLSPPLSSPQCLESFTWARSVRKLEIKSFPL

SEQ ID NO: 7670 - protein, 120 aa, Homo sapiens; identical to SEQ ID NO: 7669

SEQ ID NO: 7671 - protein, 120 aa, Homo sapiens; identical to SEQ ID NO: 7669

SEQ ID NO: 7672 - protein, 178 aa, Homo sapiens
  VARIANT 1: note = misc_feature - Xaa can be any naturally occurring amino acid
XIFEDCDEVTGQCRNCLRNTTGFKCERCAPGYYGDARIAKNCAVCNCGGGPCDSVTGECLEEGFEPPTGMDCPTISCDKCVWDLTDDLRLAALSIEEGKSGVLSVSSGAAAHRHVNEINATIYLLKTKLSERENQYALRKIQINNAENTMKSLLSDVEELVEKHWNKPRRRLELQEGV

SEQ ID NO: 7673 - protein, 188 aa, Homo sapiens
  VARIANT 1: note = misc_feature - Xaa can be any naturally occurring amino acid
XKNASGIYAEIDGAKSELQVKLSNLSNLSHDLVQEAIDHAQDLQQEANELSRKLHSSDMNGLVQKALDASNVYENIVNYVSEANETAEFALNTTDRIYDAVSGIDTQIIYHKDESENLLNQARELQAKAESSSDEAVADTSRRVGGALARKSALKTRLSDAVKQLQAAERGKHQRELKSHLLIHWSVR

SEQ ID NO: 7674 - protein, 187 aa, Homo sapiens
  VARIANT 1: note = misc_feature - Xaa can be any naturally occurring amino acid
XSTCKKCDCSGNSDPNLIFEDCDEVTGQCRNCLRNTTGFKCERCAPGYYGDARIAKNCAVCNCGGGPCDSVTGECLEEGFEPPTGCDKCVWDLTDDLRLAALSIEEGKSGVLSVSSGAAAHRHVNEINATIYLLKTKLSERENQYALRKIQINNAENTMKSLLSDVEELVEKHWNKPRRRLELQEGV

SEQ ID NO: 7675 - protein, 38 aa, Homo sapiens
CVPGAYNFPYCEGAVWWDGTSVAAEGAGRCVFSGRPCG

SEQ ID NO: 7676 - protein, 3695 aa, Homo sapiens
MAKRLCAGSALCVRGPRGPAPLLLVGLALLGAARAREEAGGGFSLHPPYFNLAEGARIAASATCGEEAPARGSPRPTEDLYCKLVGGPVAGGDPNQTIRGQYCDICTAANSNKAHPASNAIDGTERWWQSPPLSRGLEYNEVNVTLDLGQVFHVAYVLIKFANSPRPDLWVLERSMDFGRTYQPWQFFASSKRDCLERFGPQTLERITRDDAAICTTEYSRIVPLENGEIVVSLVNGRPGAMNFSYSPLLREFTKATNVRLRFLRTNTLLGHLMGKALRDPTVTRRYYYSIKDISIGGRCVCHGHADACDAKDPTDPFRLQCTCQHNTCGGTCDRCCPGFNQQPWKPATANSANECQSCNCYGHATDCYYDPEVDRRRASQSLDGTYQGGGVCIDCQHHTTGVNCERCLPGFYRSPNHPLDSPHVCRRCNCESDFTDGTCEDLTGRCYCRPNFSGERCDVCAEGFTGFPSCYPTPSSSNDTREQVLPAGQIVNCDCSAAGTQGNACRKDPRVGRCLCKPNFQGTHCELCAPGFYGPGCQPCQCSSPGVADDRCDPDTGQCRCRVGFEGATCDRCAPGYFHFPLCQLCGCSPAGTLPEGCDEAGRCLCQPEFAGPHCDRCRPGYHGFPNCQACTCDPRGALDQLCGAGGLCRCRPGYTGTACQECSPGFHGFPSCVPCHCSAEGSLHAACDPRSGQCSCRPRVTGLRCDTCVPGAYNFPYCEAGSCHPAGLAPVDPALPEAQVPCMCRAHVEGPSCDRCKPGFWGLSPSNPEGCTRCSCDLRGTLGGVAECQPGTGQCFCKPHVCGQACASCKDGFFGLDQADYFGCRSCRCDIGGALGQSCEPRTGVCRCRPNTQGPTCSEPARDHYLPDLHHLRLELEEAATPEGHAVRFGFNPLEFENFSWRGYAQMAPVQPRIVARLNLTSPDLFWLVFRYVNRGAMSVSGRVSVREEGRSATCANCTAQSQPVAFPPSTEPAFITVPQRGFGEPFVLNPGTWALRVEAEGVLLDYVVLLPSAYYEAALLQLRVTEACTYRPSAQQSGDNCLLYTHLPLDGFPSAAGLEALCRQDNSLPRPCPTEQLSPSHPPLITCTGSDVDVQLQVAVPQPGRYALVVEYANEDARQEVGVAVHTPQRAPQQGLLSLHPCLYSTLCRGTARDTQDHLAVFHLDSEASVRLTAEQARFFLHGVTLVPIEEFSPEFVEPRVSCISSHGAFGPNSAACLPSRFPKPPQPIILRDCQVIPLPPGLPLTHAQDLTPAMSPAGPRPRPPTAVDPDAEPTLLREPQATVVFTTHVPTLGRYAFLLHGYQPAHPTFPVEVLINAGRVWQGHANASFCPHGYGCRTLVVCEGQALLDVTHSELTVTVRVPKGRWLWLDYVLVVPENVYSFGYLREEPLDKSYDFISHCAAQGYHISPSSSSLFCRNAAASLSLFYNNGARPCGCHEVGATGPTCEPFGGQCPCHAHVIGRDCSRCATGYWGFPNCRPCDCGARLCDELTGQCICPPRTIPPDCLLCQPQTFGCHPLVGCEECNCSGPGIQELTDPTCDTDSGQCKCRPNVTGRRCDTCSPGFHGYPRCRPCDCHEAGTAPGVCDPLTGQCYCKENVQGPKCDQCSLGTFSLDAANPKGCTRCFCFGATERCRSSSYTRQEFVDMEGWVLLSTDRQVVPHERQPGTEMLRADLRHVPEAVPEAFPELYWQAPPSYLGDRVSSYGGTLRYELHSETQRGDVFVPMESRPDVVLQGNQMSITFLEPAYPTPGHVHRGQLQLVEGNFRHTETRNTVSREELMMVLASLEQLQIRALFSQISSAVFLRRVALEVASPAGQGALASNVELCLCPASYRGDSCQECAPGFYRDVKGLFLGRCVPCQCHGHSDRCLPGSGVCVDCQHNTEGAHCERCQAGFVSSRDDPSAPCVSCPCPLSVPSNNFAEGCVLRGGRTQCLCKPGYAGASCERCAPGFFGNPLVLGSSCQPCDCSGNGDPNLLFSDCDPLTGACRGCLRHTTGPRCEICAPGFYGNALLPGNCTRCDCTPCGTEACDPHSGHCLCKAGVTGRRCDRCQEGHFGFDGCGGCRPCACGPAAEGSECHPQSGQCHCRPGTMGPQCRECAPGYWGLPEQGCRRCQCPGGRCDPHTGRCNCPPGLSGERCDTCSQQHQVPVPGGPVGHSIHCEVCDHCVVLLLDDLERAGALLPAIHEQLRGINASSMAWARLHRLNASIADLQSQLRSPLGPRHETAQQLEVLEQQSTSLGQDARRLGGQAVGTRDQASQLLAGTEATLGHAKTLLAAIRAVDRTLSELMSQTGHLGLANASAPSGEQLLRTLAEVERLLWEMRARDLGAPQAAAEAELAAAQRLLARVQEQLSSLWEENQALATQTRDRLAQHEAGLMDLREALNRAVDATREAQELNSRNQERLEEALQRKQELSRDNATLQATLHAARDTLASVFRLLHSLDQAKEELERLAASLDGARTPLLQRMQTFSPAGSKLRLVEAAEAHAQQLGQLALNLSSIILDVNQDRLTQRAIEASNAYSRILQAVQAAEDAAGQALQQADHTWATVVRQGLVDRAQQLLANSTALEEAMLQEQQRLGLVWAALQGARTQLRDVRAKKDQLEAHIQAAQAMLAMDTDETSKKIAHAKAVAAEAQDTATRVQSQLQAMQENVERWQGQYEGLRGQDLGQAVLDAGHSVSTLEKTLPQLLAKLSILENRGVHNASLALSASIGRVRELIAQARGAASKVKVPMKFNGRSGVQLRTPRDLADLAAYTALKFYLQGPEPEPGQGTEDRFVMYMGSRQATGDYMGVSLRDKKVHWVYQLGEAGPAVLSIDEDIGEQFAAVSLDRTLQFGHMSVTVERQMIQETKGDTVAPGAEGLLNLRPDDFVFYVGGYPSTFTPPPLLRFPGYRGCIEMDTLNEEVVSLYNFERTFQLDTAVDRPCARSKSTGDPWLTDGSYLDGTGFARISFDSQISTTKRFEQELRLVSYSGVLFFLKQQSQFLCLAVQEGSLVLLYDFGAGLKKAVPLQPPPPLTSASKAIQVFLLGGSRKRVLVRVERATVYSVEQDNDLELADAYYLGGVPPDQLPPSLRRLFPTGGSVRGCVKGIKALGKYVDLKRLNTTGVSAGCTADLLVGRAMTFHGHGFLRLALSNVAPLTGNVYSGFGFHSAQDSALLYYRASPDGLCQVSLQQGRVSLQLLRTEVKTQAGFADGAPHYVAFYSNATGVWLYVDDQLQQMKPHRGPPPELQPQPEGPPRLLLGGLPESGTIYNFSGCISNVFVQRLLGPQRVFDLQQNLGSVNVSTGCAPALQAQTPGLGPRGLQATARKASRRSRQPARHPACMLPPHLRTTRDSYQFGGSLSSHLEFVGILARHRNWPSLSMHVLPRSSRGLLLFTARLRPGSPSLALFLSNGHFVAQMEGLGTRLRAQSRQRSRPGRWHKVSVRWEKNRILLVTDGARAWSQEGPHRQHQGAEHPQPHTLFVGGLPASSHSSKLPVTVGFSGCVKRLRLHGRPLGAPTRMAGVTPCILGPLEAGLFFPGSGGVITLDLPGATLPDVGLELEVRPLAVTGLIFHLGQARTPPYLQLQVTEKQVLLRADDGAGEFSTSVTRPSVLCDGQWHRLAVMKSGNVLRLEVDAQSNHTVGPLLAAAAGAPAPLYLGGLPEPMAVQPWPPAYCGCMRRLAVNRSPVAMTRSVEVHGAVGASGCPAA

SEQ ID NO: 7677 - protein, 241 aa, Homo sapiens
RLRFLRTNTLLGHLMGKALRDPTVTRRYYYSIKDISIGGRCVCHGHADACDAKDPTDPFSSPNLSGHNRQLPCCPSPDLHSSQAGTKAQDGDGRVGAANTPHLLCPVCLLSGAAEGTAEHPPPGSPSQDGQQPWCWHRHIPGPHPESSVRLQCTCQHNTCGGTCDRCCPGFNQQPWKPATANSANECQSCNCYGHATDCYYDPEVDRRRASQSLDGTYQGGGVCIDCQHHTTGVNCERCLP

SEQ ID NO: 7678 - protein, 1810 aa, Homo sapiens
MDCPLSAPTPPPPLVRFFRAPLPACVPPTLLPVLPAALCRARVRAQEPEFSYGCAEGSCYPATGDLLIGRAQKLSVTSTCGLHKPEPYCIVSHLQEDKKCFICNSQDPYHETLNPDSHLIENVVTTFAPNRLKIWWQSENGVENVTIQLDLEAEFHFTHLIMTFKTFRPAAMLIERSSDFGKTWGVYRYFAYDCEASFPGISTGPMKKVDDIICDSRYSDIEPSTEGEVIFRALDPAFKIEDPYSPRIQNLLKITNLRIKFVKLHTLGDNLLDSRMEIREKYYYAVYDMVVRGNCFCYGHASECAPVDGFNEEVEGMVHGHCMCRHNTKGLNCELCMDFYHDLPWRPAEGRNSNACKKCNCNEHSISCHFDMAVYLATGNVSGGVCDDCQHNTMGRNCEQCKPFYYQHPERDIRDPNFCERCTCDPAGSQNEGICDSYTDFSTGLIAGQCRCKLNVEGEHCDVCKEGFYDLSSEDPFGCKSCACNPLGTIPGGNPCDSETGHCYCKRLVTGQHCDQCLPEHWGLSNDLDGCRPCDCDLGGALNNSCFAESGQCSCRPHMIGRQCNEVEPGYYFATLDHYLYEAEEANLGPGVSIVERQYIQDRIPSWTGAGFVRVPEGAYLEFFIDNIPYSMEYDILIRYEPQLPDHWEKAVITVQRPGRIPTSSRCGNTIPDDDNQVVSLSPGSRYVVLPRPVCFEKGTNYTVRLELPQYTSSDSDVESPYTLIDSLVLMPYCKSLDIFTVGGSGDGVVTNSAWETFQRYRCLENSRSVVKTPMTDVCRNIIFSISALLHQTGLACECDPQGSLSSVCDPNGGQCQCRPNVVGRTCNRCAPGTFGFGPSGCKPCECHLQGSVNAFCNPVTGQCHCFQGVYARQCDRCLPGHWGFPSCQPCQCNGHADDCDPVTGECLNCQDYTMGHNCERCLAGYYGDPIIGSGDHCRPCPCPDGPDSGRQFARSCYQDPVTLQLACVCDPGYIGSRCDDCASGYFGNPSEVGGSCQPCQCHNNIDTTDPEACDKETGRCLKCLYHTEGEHCQFCRFGYYGDALQQDCRKCVCNYLGTVQEHCNGSDCQCDKATGQCLCLPNVIGQNCDRCAPNTWQLASGTGCDPCNCNAAHSFGPSCNEFTGQCQCMPGFGGRTCSECQELFWGDPDVECRACDCDPRGIETPQCDQSTGQCVCVEGVEGPRCDKCTRGYSGVFPDCTPCHQCFALWDVIIAELTNRTHRFLEKAKALKISGVIGPYRETVDSVERKVSEIKDILAQSPAAEPLKNIGNLFEEAEKLIKDVTEMMAQVEVKLSDTTSQSNSTAKELDSLQTEAESLDNTVKELAEQLEFIKNSDIRGALDSITKYFQMSLEAEERVNASTTEPNSTVEQSALMRDRVEDVMMERESQFKEKQEEQARLLDELAGKLQSLDLSAAAEMTCGTPPGASCSETECGGPNCRTDEGERKCGGPGCGGLVTVAHNAWQKAMDLDQDVLSALAEVEQLSKMVSEAKLRADEAKQSAEDILLKTNATKEKMDKSNEELRNLIKQIRNFLTQDSADLDSIEAVANEVLKMEMPSTPQQLQNLTEDIRERVESLSQVEVILQHSAADIARAEMLLEEAKRASKSATDVKVTADMVKEALEEAEKAQVAAEKAIKQADEDIQGTQNLLTSIESETAASEETLFNASQRISELERNVEELKRKAAQNSGEAEYIEKVVYTVKQSAEDVKKTLDGELDEKYKKVENLIAKKTEESADARRKAEMLQNEAKTLLAQANSKLQLLKDLERKYEDNQRYLEDKAQELARLEGEVRSLLKDISQKVAVYSTCL

SEQ ID NO: 7679 - protein, 91 aa, Homo sapiens
MGLLQLLAFSFLALCRARVRAQEPEFSYGCAEGSCYPATGDLLIGRAQKLSVTSTCGLHKPEPYCIVSHLQEDKKCFICNSQDPYHETLNP

SEQ ID NO: 7680 - protein, 1786 aa, Homo sapiens
MGLLQLLAFSFLALCRARVRAQEPEFSYGCAEGSCYPATGDLLIGRAQKLSVTSTCGLHKPEPYCIVSHLQEDKKCFICNSQDPYHETLNPDSHLIENVVTTFAPNRLKIWWQSENGVENVTIQLDLEAEFHFTHLIMTFKTFRPAAMLIERSSDFGKTWGVYRYFAYDCEASFPGISTGPMKKVDDIICDSRYSDIEPSTEGEVIFRALDPAFKIEDPYSPRIQNLLKITNLRIKFVKLHTLGDNLLDSRMEIREKYYYAVYDMVVRGNCFCYGHASECAPVDGFNEEVEGMVHGHCMCRHNTKGLNCELCMDFYHDLPWRPAEGRNSNACKKCNCNEHSISCHFDMAVYLATGNVSGGVCDDCQHNTMGRNCEQCKPFYYQHPERDIRDPNFCERCTCDPAGSQNEGICDSYTDFSTGLIAGQCRCKLNVEGEHCDVCKEGFYDLSSEDPFGCKSCACNPLGTIPGGNPCDSETGHCYCKRLVTGQHCDQCLPEHWGLSNDLDGCRPCDCDLGGALNNSCFAESGQCSCRPHMIGRQCNEVEPGYYFATLDHYLYEAEEANLGPGVSIVERQYIQDRIPSWTGAGFVRVPEGAYLEFFIDNIPYSMEYDILIRYEPQLPDHWEKAVITVQRPGRIPTSSRCGNTIPDDDNQVVSLSPGSRYVVLPRPVCFEKGTNYTVRLELPQYTSSDSDVESPYTLIDSLVLMPYCKSLDIFTVGGSGDGVVTNSAWETFQRYRCLENSRSVVKTPMTDVCRNIIFSISALLHQTGLACECDPQGSLSSVCDPNGGQCQCRPNVVGRTCNRCAPGTFGFGPSGCKPCECHLQGSVNAFCNPVTGQCHCFQGVYARQCDRCLPGHWGFPSCQPCQCNGHADDCDPVTGECLNCQDYTMGHNCERCLAGYYGDPIIGSGDHCRPCPCPDGPDSGRQFARSCYQDPVTLQLACVCDPGYIGSRCDDCASGYFGNPSEVGGSCQPCQCHNNIDTTDPEACDKETGRCLKCLYHTEGEHCQFCRFGYYGDALQQDCRKCVCNYLGTVQEHCNGSDCQCDKATGQCLCLPNVIGQNCDRCAPNTWQLASGTGCDPCNCNAAHSFGPSCNEFTGQCQCMPGFGGRTCSECQELFWGDPDVECRACDCDPRGIETPQCDQSTGQCVCVEGVEGPRCDKCTRGYSGVFPDCTPCHQCFALWDVIIAELTNRTHRFLEKAKALKISGVIGPYRETVDSVERKVSEIKDILAQSPAAEPLKNIGNLFEEAEKLIKDVTEMMAQVEVKLSDTTSQSNSTAKELDSLQTEAESLDNTVKELAEQLEFIKNSDIRGALDSITKYFQMSLEAEERVNASTTEPNSTVEQSALMRDRVEDVMMERESQFKEKQEEQARLLDELAGKLQSLDLSAAAEMTCGTPPGASCSETECGGPNCRTDEGERKCGGPGCGGLVTVAHNAWQKAMDLDQDVLSALAEVEQLSKMVSEAKLRADEAKQSAEDILLKTNATKEKMDKSNEELRNLIKQIRNFLTQDSADLDSIEAVANEVLKMEMPSTPQQLQNLTEDIRERVESLSQVEVILQHSAADIARAEMLLEEAKRASKSATDVKVTADMVKEALEEAEKAQVAAEKAIKQADEDIQGTQNLLTSIESETAASEETLFNASQRISELERNVEELKRKAAQNSGEAEYIEKVVYTVKQSAEDVKKTLDGELDEKYKKVENLIAKKTEESADARRKAEMLQNEAKTLLAQANSKLQLLKDLERKYEDNQRYLEDKAQELARLEGEVRSLLKDISQKVAVYSTCL

SEQ ID NO: 7681 - protein, 850 aa, Homo sapiens
MGLLQLLAFSFLALCRARVRAQEPEFSYGCAEGSCYPATGDLLIGRAQKLSVTSTCGLHKPEPYCIVSHLQEDKKCFICNSQDPYHETLNPDSHLIENVVTTFAPNRLKIWWQSENGVENVTIQLDLEAEFHFTHLIMTFKTFRPAAMLIERSSDFGKTWGVYRYFAYDCEASFPGISTGPMKKVDDIICDSRYSDIEPSTEGEVIFRALDPAFKIEDPYSPRIQNLLKITNLRIKFVKLHTLGDNLLDSRMEIREKYYYAVYDMVVRGNCFCYGHASECAPVDGFNEEVEGMVHGHCMCRHNTKGLNCELCMDFYHDLPWRPAEGRNSNACKKCNCNEHSISCHFDMAVYLATGNVSGGVCDDCQHNTMGRNCEQCKPFYYQHPERDIRDPNFCERCTCDPAGSQNEGICDSYTDFSTGLIAGQCRCKLNVEGEHCDVCKEGFYDLSSEDPFGCKSCACNPLGTIPGGNPCDSETGHCYCKRLVTGQHCDQCLPEHWGLSNDLDGCRPCDCDLGGALNNSCFAESGQCSCRPHMIGRQCNEVEPGYYFATLDHYLYEAEEANLGPGVSIVERQYIQDRIPSWTGAGFVRVPEGAYLEFFIDNIPYSMEYDILIRYEPQLPDHWEKAVITVQRPGRIPTSSRCGNTIPDDDNQVVSLSPGSRYVVLPRPVCFEKGTNYTVRLELPQYTSSDSDVESPYTLIDSLVLMPYCKSLDIFTVGGSGDGVVTNSAWETFQRYRCLENSRSVVKTPMTDVCRNIIFSISALLHQTGLACECDPQGSLSSVCDPNGGQCQCRPNVVGRTCNRCAPGTFGFGPSGCKRRFLKSIVMHSFRLTQPLWQGSIAAEPMLPS

SEQ ID NO: 7682 - protein, 183 aa, Homo sapiens
MGLLQLLAFSFLETAGPGASLEWRSLETTPEPQGLSMGSPSSGKRRPPRAPAPRPQRSAGDPRACTHTHSRFPSSQISTRTLTPRMRGLPRARGFTCVALCRARVRAQEPEFSYGCAEGSCYPATGDLLIGRAQKLSVTSTCGLHKPEPYCIVSHLQEDKKCFICNSQDPYHETLNPDSHLIE

SEQ ID NO: 7683 - protein, 1798 aa, Homo sapiens
MELTSRERGRGQPLPWELRLGLLLSVLAATLAQAPAPDVPGCSRGSCYPATGDLLVGRADRLTASSTCGLNGPQPYCIVSHLQDEKKCFLCDSRRPFSARDNPHSHRIQNVVTSFAPQRRAAWWQSENGIPAVTIQLDLEAEFHFTHLIMTFKTFRPAAMLVERSADFGRTWHVYRYFSYDCGADFPGVPLAPPRHWDDVVCESRYSEIEPSTEGEVIYRVLDPAIPIPDPYSSRIQNLLKITNLRVNLTRLHTLGDNLLDPRREIREKYYYALYELVVRGNCFCYGHASECAPAPGAPAHAEGMVHGACICKHNTRGLNCEQCQDFYRDLPWRPAEDGHSHACRKCECHGHTHSCHFDMAVYLASGNVSGGVCDGCQHNTAGRHCELCRPFFYRDPTKDLRDPAVCRSCDCDPMGSQDGGRCDSHDDPALGLVSGQCRCKEHVVGTRCQQCRDGFFGLSISDRLGCRRCQCNARGTVPGSTPCDPNSGSCYCKRLVTGRGCDRCLPGHWGLSHDLLGCRPCDCDVGGALDPQCDEGTGQCHCRQHMVGRRCEQVQPGYFRPFLDHLIWEAEDTRGQVLDVVERLVTPGETPSWTGSGFVRLQEGQTLEFLVASVPKAMDYDLLLRLEPQVPEQWAELELIVQRPGPVPAHSLCGHLVPKDDRIQGTLQPHARYLIFPNPVCLEPGISYKLHLKLVRTGGSAQPETPYSGPGLLIDSLVLLPRVLVLEMFSGGDAAALERQATFERYQCHEEGLVPSKTSPSEACAPLLISLSTLIYNGALPCQCNPQGSLSSECNPHGGQCLCKPGVVGRRCDLCAPGYYGFGPTGCQACQCSHEGALSSLCEKTSGQCLCRTGAFGLRCDRCQRGQWGFPSCRPCVCNGHADECNTHTGACLGCRDHTGGEHCERCIAGFHGDPRLPYGGQCRPCPCPEGPGSQRHFATSCHQDEYSQQIVCHCRAGYTGLRCEACAPGHFGDPSRPGGRCQLCECSGNIDPMDPDACDPHTGQCLRCLHHTEGPHCAHCKPGFHGQAARQSCHRCTCNLLGTNPQQCPSPDQCHCDPSSGQCPCLPNVQGPSCDRCAPNFWNLTSGHGCQPCACHPSRARGPTCNEFTGQCHCRAGFGGRTCSECQELHWGDPGLQCHACDCDSRGIDTPQCHRFTGHCSCRPGVSGVRCDQCARGFSGIFPACHPCHACFGDWDRVVQDLAARTQRLEQRAQELQQTGVLGAFESSFWHMQEKLGIVQGIVGARNTSAASTAQLVEATEELRREIGEATEHLTQLEADLTDVQDENFNANHALSGLERDRLALNLTLRQLDQHLDLLKHSNFLGAYDSIRHAHSQSAEAERRANTSALAVPSPVSNSASARHRTEALMDAQKEDFNSKHMANQRALGKLSAHTHTLSLTDINELVCGAPGDAPCATSPCGGAGCRDEDGQPRCGGLSCNGAAATADLALGRARHTQAELQRALAEGGSILSRVAETRRQASEAQQRAQAALDKANASRGQVEQANQELQELIQSVKDFLNQEGADPDSIEMVATRVLELSIPASAEQIQHLAGAIAERVRSLADVDAILARTVGDVRRAEQLLQDARRARSWAEDEKQKAETVQAALEEAQRAQGIAQGAIRGAVADTRDTEQTLYQVQERMAGAERALSSAGERARQLDALLEALKLKRAGNSLAASTAEETAGSAQGRAQEAEQLLRGPLGDQYQTVKALAERKAQGVLAAQARAEQLRDEARDLLQAAQDKLQRLQELEGTYEENERALESKAAQLDGLEARMRSVLQAINLQVQIYNTCQ

SEQ ID NO: 7684 - protein, 1798 aa, Homo sapiens; identical to SEQ ID NO: 7683

SEQ ID NO: 7685 - protein, 151 aa, Homo sapiens
MTFKTFRPAAMLVERSADFGRTWHVYRYFSYDCGADFPGVPLAPPRHWDDVVCESRYSEIEPSTEGEVIYRVLDPAIPIPDPYSSRIQNLLKITNLRVNLTRLHTLGDNLLDPRREIREKYYYALYELVVRGNCFCYGHASECAPAPGAPA

SEQ ID NO: 7686 - protein, 160 aa, Homo sapiens
MNEIQAIAARLPNVDLVLSQTKQDIARARRLQAEAEEARSRAHAVEGQVEDVVGNLRQGTVALQEAQDTMQGTSRSLRLIQDRVAEVQQVLRPAEKLVTSMTKQLGDFWTRMEELRHQARQQGAEAVQAQQLAEGASEQALSAQEGFERIKQKYAELKDR

SEQ ID NO: 7687 - protein, 188 aa, Homo sapiens
MRPFFLLCFALPGLLHAQQACSRGACYPPVGDLLVGRTRFLRASSTCGLTKPETYCTQYGEWQMKCCKCDSRQPHNYYSHRVENVASSSGPMRWWQSQNDVNPVSLQLDLDRRFQLQEVMMEFQGPMPAGMLIERSSDFGKTWRVYQYLAADCTSTFPRVRQGRPQSWQDVRCQSLPQRPNARLNGGK

SEQ ID NO: 7688 - protein, 1172 aa, Homo sapiens [sequence omitted]

SEQ ID NO: 7689 - protein, 1172 aa, Homo sapiens [sequence omitted]

SEQ ID NO: 7690 - protein, 1172 aa, Homo sapiens [sequence omitted]

SEQ ID NO: 7691 - protein, 1761 aa, Homo sapiens
MQFQLTLFLHLGWLSYSKAQDDCNRGACHPTTGDLLVGRNTQLMASSTCGLSRAQKYCILSYLEGEQKCFICDSRFPYDPYDQPNSHTIENVIVSFEPDREKKWWQSENGLDHVSIRLDLEALFRFSHLILTFKTFRPAAMLVERSTDYGHNWKVFKYFAKDCATSFPNITSGQAQGVGDIVCDSKYSDIEPSTGGEVVLKVLDPSFEIENPYSPYIQDLVTLTNLRINFTKLHTLGDALLGRRQNDSLDKYYYALYEMIVRGSCFCNGHASECRPMQKMRGDVFSPPGMVHGQCVCQHNTDGPNCERCKDFFQDAPWRPAADLQDNACRSCSCNSHSSRCHFDMTTYLASGGLSGGVCEDCQHNTEGQHCDRCRPLFYRDPLKTISDPYACIPCECDPDGTISGGICVSHSDPALGSVAGQCLCKENVEGAKCDQCKPNHYGLSATDPLGCQPCDCNPLGSLPFLTCDVDTGQCLCLSYVTGAHCEECTVGYWGLGNHLHGCSPCDCDIGGAYSNVCSPKNGQCECRPHVTGRSCSEPAPGYFFAPLNFYLYEAEEATTLQGLAPLGSETFGQSPAVHVVLGEPVPGNPVTWTGPGFARVLPGAGLRFAVNNIPFPVDFTIAIHYETQSAADWTVQIVVNPPGGSEHCIPKTLQSKPQSFALPAATRIMLLPTPICLEPDVQYSIDVYFSQPLQGESHAHSHVLVDSLGLIPQINSLENFCSKQDLDEYQLHNCVEIASAMGPQVLPGACERLIISMSAKLHDGAVACKCHPQGSVGSSCSRLGGQCQCKPLVVGRCCDRCSTGSYDLGHHGCHPCHCHPQGSKDTVCDQVTGQCPCHGEVSGRRCDRCLAGYFGFPSCHPCPCNRFAELCDPETGSCFNCGGFTTGRNCERCIDGYYGNPSSGQPCRPCLCPDDPSSNQYFAHSCYQNLWSSDVICNCLQGYTGTQCGECSTGFYGNPRISGAPCQPCACNNNIDVTDPESCSRVTGECLRCLHNTQGANCQLCKPGHYGSALNQTCRRCSCHASGVSPMECPPGGGACLCDPVTGACPCLPNVTGLACDRCADGYWNLVPGRGCQSCDCDPRTSQSSHCDQLTGQCPCKLGYGGKRCSECQENYYGDPPGRCIPCDCNRAGTQKPICDPDTGMCRCREGVSGQRCDRCARGHSQEFPTCLQCHLCFDQWDHTISSLSKAVQGLMRLAANMEDKRETLPVCEADFKDLRGNVSEIERILKHPVFPSGKFLKVKDYHDSVRRQIMQLNEQLKAVYEFQDLKDTIERAKNEADLLLEDLQEEIDLQSSVLNASIADSSENIKKYYHISSSAEKKINETSSTINTSANTRNDLLTILDTLTSKGNLSLERLKQIKIPDIQILNEKVCGDPGNVPCVPLPCGGALCTGRKGHRKCRGPGCHGSLTLSTNALQKAQEAKSIIRNLDKQVRGLKNQIESISEQAEVSKNNALQLREKLGNIRNQSDSEEENINLFIKKVKNFLLEENVPPEDIEKVANGVLDIHLPIPSQNLTDELVKIQKHMQLCEDYRTDENRLNEEADGAQKLLVKAKAAEKAANILLNLDKTLNQLQQAQITQGRANSTITQLTANITKIKKNVLQAENQTREMKSELELAKQRSGLEDGLSLLQTKLQRHQDHAVNAKVQAESAQHQAGSLEKEFVELKKQYAILQRKTSTTGLTKETLGKVKQLKDAAEKLAGDTEAKIRRITDLERKIQDLNLSRQAKADQLRILEDQVVAIKNEIVEQEKKYARCYS

SEQ ID NO: 7692 - protein, 1761 aa, Homo sapiens; identical to SEQ ID NO: 7691

SEQ ID NO: 7693 - protein, 772 aa, Homo sapiens
MQFQLTLFLHLGWLSYSKAQDDCNRGACHPTTGDLLVGRNTQLMASSTCGLSRAQKYCILSYLEGEQKCFICDSRFPYDPYDQPNSHTIENVIVSFEPDREKKWWQSENGLDHVSIRLDLEALFRFSHLILTFKTFRPAAMLVERSTDYGHNWKVFKYFAKDCATSFPNITSGQAQGVGDIVCDSKYSDIEPSTGGEVVLKVLDPSFEIENPYSPYIQDLVTLTNLRINFTKLHTLGDALLGRRQNDSLDKYYYALYEMIVRGSCFCNGHASECRPMQKMRGDVFSPPGMVHGQCVCQHNTDGPNCERCKDFFQDAPWRPAADLQDNACRSCSCNSHSSRCHFDMTTYLASGGLSGGVCEDCQHNTEGQHCDRCRPLFYRDPLKTISDPYACIPCECDPDGTISGGICVSHSDPALGSVAGQCLCKENVEGAKCDQCKPNHYGLSATDPLGCQPCDCNPLGSLPFLTCDVDTGQCLCLSYVTGAHCEECTVGYWGLGNHLHGCSPCDCDIGGAYSNVCSPKNGQCECRPHVTGRSCSEPAPGYFFAPLNFYLYEAEEATTLQGLAPLGSETFGQSPAVHVVLGEPVPGNPVTWTGPGFARVLPGAGLRFAVNNIPFPVDFTIAIHYETQSAADWTVQIVVNPPGGSEHCIPKTLQSKPQSFALPAATRIMLLPTPICLEPDVQYSIDVYFSQPLQGESHAHSHVLVDSAAVQWHNLGSLQPPPPECKQFSCFSFPSSWDYRHPPPHLANFCIFSRDGVSPHWPGWSQTPDLR

SEQ ID NO: 7694 - protein, 749 aa, Homo sapiens
NIDVTDPESCSRVTGECLRCLHNTQGANCQLCKPGHYGSALNQTCRRCSCHASGVSPMECPPGGGACLCDPVTGACPCLPNVTGLACDRCADGYWNLVPGRGCQSCDCDPRTSQSSHCDQLTGQCPCKLGYGGKRCSECQENYYGDPPGRCIPCDCNRAGTQKPICDPDTGMCRCREGVSGQRCDRCARGHSQEFPTCLQCHLCFDQWDHTISSLSKAVQGLMRLAANMEDKRETLPVCEADFKDLRGNVSEIERILKHPVFPSGKFLKVKDYHDSVRRQIMQLNEQLKAVYEFQDLKDTIERAKNEADLLLEDLQEEIDLQSSVLNASIADSSENIKKYYHISSSAEKKINETSSTINTSANTRNDLLTILDTLTSKGNLSLERLKQIKIPDIQILNEKVCGDPGNVPCVPLPCGGALCTGRKGHRKCRGPGCHGSLTLSTNALQKAQEAKSIIRNLDKQVRGLKNQIESISEQAEVSKNNALQLREKLGNIRNQSDSEEENINLFIKKVKNFLLEENVPPEDIEKVANGVLDIHLPIPSQNLTDELVKIQKHMQLCEDYRTDENRLNEEADGAQKLLVKAKAAEKAANILLNLDKTLNQLQQAQITQGRANSTITQLTANITKIKKNVLQAENQTREMKSELELAKQRSGLEDGLSLLQTKLQRHQDHAVNAKVQAESAQHQAGSLEKEFVELKKQYAILQRKTSTTGLTKETLGKVKQLKDAAEKLAGDTEAKIRRITGCFQNSAR

SEQ ID NO: 7695 - protein, 38 aa, Homo sapiens
MKNEFDKLVCNCKHNTYGVDCEKCLPFFNDRPWRRATA

SEQ ID NO: 7696 - protein, 1609 aa, Homo sapiens
MRGSHRAAPALRPRGRLWPVLAVLAAAAAAGCAQAAMDECTDEGGRPQRCMPEFVNAAFNVTVVATNTCGTPPEEYCVQTGVTGVTKSCHLCDAGQPHLQHGAAFLTDYNNQADTTWWQSQTMLAGVQYPSSINLTLHLGKAFDITYVRLKFHTSRPESFAIYKRTREDGPWIPYQYYSGSCENTYSKANRGFIRTGGDEQQALCTDEFSDISPLTGGNVAFSTLEGRPSAYNFDNSPVLQEWVTATDIRVTLNRLNTFGDEVFNDPKVLKSYYYAISDFAVGGRCKCNGHASECMKNEFDKLVCNCKHNTYGVDCEKCLPFFNDRPWRRATAESASECLPCDCNGRSQECYFDPELYRSTGHGGHCTNCQDNTDGAHCERCRENFFRLGNNEACSSCHCSPVGSLSTQCDSYGRCSCKPGVMGDKCDRCQPGFHSLTEAGCRPCSCDPSGSIDECNIETGRCVCKDNVEGFNCERCKPGFFNLESSNPRGCTPCFCFGHSSVCTNAVGYSVYSISSTFQIDEDGWRAEQRDGSEASLEWSSERQDIAVISDSYFPRYFIAPAKFLGKQVLSYGQNLSFSFRVDRRDTRLSAEDLVLEGAGLRVSVPLIAQGNSYPSETTVKYVFRLHEATDYPWRPALTPFEFQKLLNNLTSIKIRGTYSERSAGYLDDVTLASARPGPGVPATWVESCTCPVGYGGQFCEMCLSGYRRETPNLGPYSPCVLCACNGHSETCDPETGVCNCRDNTAGPHCEKCSDGYYGDSTAGTSSDCQPCPCPGGSSCAVVPKTKEVVCTNCPTGTTGKRCELCDDGYFGDPLGRNGPVRLCRLCQCSDNIDPNAVGNCNRLTGECLKCIYNTAGFYCDRCKDGFFGNPLAPNPADKCKACNCNLYGTMKQQSSCNPVTGQCECLPHVTGQDCGACDPGFYNLQSGQGCERCDCHALGSTNGQCDIRTGQCECQPGITGQHCERCEVNHFGFGPEGCKPCDCHPEGSLSLQCKDDGRCECREGFVGNRCDQCEENYFYNRSWPGCQECPACYRLVKDKVADHRVKLQELESLIANLGTGDEMVTDQAFEDRLKEAEREVMDLLREAQDVKDVDQNLMDRLQRVNNTLSSQISRLQNIRNTIEETGNLAEQARAHVENTERLIEIASRELEKAKVAAANVSVTQPESTGDPNNMTLLAEEARKLAERHKQEADDIVRVAKTANDTSTEAYNLLLRTLAGENQTAFEIEELNRKYEQAKNISQDLEKQAARVHEEAKRAGDKAVEIYASVAQLSPLDSETLENEANNIKMEAENLEQLIDQKLKDYEDLREDMRGKELEVKNLLEKGKTEQQTADQLLARADAAKALAEEAAKKGRDTLQEANDILNNLKDFDRRVNDNKTAAEEALRKIPAINQTITEANEKTREAQQALGSAAADATEAKNKAHEAERIASAVQKNATSTKAEAERTFAEVTDLDNEVNNMLKQLQEAEKELKRKQDDADQDMMMAGMASQAAQEAEINARKAKNSVTSLLSIINDLLEQLGQLDTVDLNKLNEIEGTLNKAKDEMKVSDLDRKVSDLENEAKKQEAAIMDYNRDIEEIMKDIRNLEDIRKTLPSGCFNTPSIEKP

SEQ ID NO: 7697 - protein, 1193 aa, Homo sapiens
MPALWLGCCLCFSLLLPAARATSRREVCDCNGKSRQCIFDRELHRQTGNGFRCLNCNDNTDGIHCEKCKNGFYRHRERDRCLPCNCNSKGSLSARCDNSGRCSCKPGVTGARCDRCLPGFHMLTDAGCTQDQRLLDSKCDCDPAGIAGPCDAGRCVCKPAVTGERCDRCRSGYYNLDGGNPEGCTQCFCYGHSASCRSSAEYSVHKITSTFHQDVDGWKAVQRNGSPAKLQWSQRHQDVFSSAQRLDPVYFVAPAKFLGNQQVSYGQSLSFDYRVDRGGRHPSAHDVILEGAGLRITAPLMPLGKTLPCGLTKTYTFRLNEHPSNNWSPQLSYFEYRRLLRNLTALRIRATYGEYSTGYIDNVTLISARPVSGAPAPWVEQCICPVGYKGQFCQDCASGYKRDSARLGPFGTCIPCNCQGGGACDPDTGDCYSGDENPDIECADCPIGFYNDPHDPRSCKPCPCHNGFSCSVMPETEEVVCNNCPPGVTGARCELCADGYFGDPFGEHGPVRPCQPCQCNNNVDPSASGNCDRLTGRCLKCIHNTAGIYCDQCKAGYFGDPLAPNPADKCRACNCNPMGSEPVGCRSDGTCVCKPGFGGPNCEHGAFSCPACYNQVKIQMDQFMQQLQRMEALISKAQGGDGVVPDTELEGRMQQAEQALQDILRDAQISEGASRSLGLQLAKVRSQENSYQSRLDDLKMTVERVRALGSQYQNRVRDTHRLITQMQLSLAESEASLGNTNIPASDHYVGPNGFKSLAQEATRLAESHVESASNMEQLTRETEDYSKQALSLVRKALHEGVGSGSGSPDGAVVQGLVEKLEKTKSLAQQLTREATQAEIEADRSYQHSLRLLDSVSRLQGVSDQSFQVEEAKRIKQKADSLSSLVTRHMDEFKRTQKNLGNWKEEAQQLLQNGKSGREKSDQLLSRANLAKSRAQEALSMGNATFYEVESILKNLREFDLQVDNRKAEAEEAMKRLSYISQKVSDASDKTQQAERALGSAAADAQRAKNGAGEALEISSEIEQEIGSLNLEANVTADGALAMEKGLASLKSEMREVEGELERKELEFDTNMDAVQMVITEAQKVDTRAKNAGVTIQDTLNTLDGLLHLMDQPLSVDEEGLVLLEQKLSRAKTQINSQLRPMMSELEERARQQRGHLHLLETSIDGILADVKNLENIRDNLPPGCYNTQALEQQ

SEQ ID NO: 7698 - protein, 1111 aa, Homo sapiens
MPALWLGCCLCFSLLLPAARATSRREVCDCNGKSRQCIFDRELHRQTGNGFRCLNCNDNTDGIHCEKCKNGFYRHRERDRCLPCNCNSKGSLSARCDNSGRCSCKPGVTGARCDRCLPGFHMLTDAGCTQDQRLLDSKCDCDPAGIAGPCDAGRCVCKPAVTGERCDRCRSGYYNLDGGNPEGCTQCFCYGHSASCRSSAEYSVHKITSTFHQDVDGWKAVQRNGSPAKLQWSQRHQDVFSSAQRLDPVYFVAPAKFLGNQQVSYGQSLSFDYRVDRGGRHPSAHDVILEGAGLRITAPLMPLGKTLPCGLTKTYTFRLNEHPSNNWSPQLSYFEYRRLLRNLTALRIRATYGEYSTGYIDNVTLISARPVSGAPAPWVEQCICPVGYKGQFCQDCASGYKRDSARLGPFGTCIPCNCQGGGACDPDTGDCYSGDENPDIECADCPIGFYNDPHDPRSCKPCPCHNGFSCSVMPETEEVVCNNCPPGVTGARCELCADGYFGDPFGEHGPVRPCQPCQCNNNVDPSASGNCDRLTGRCLKCIHNTAGIYCDQCKAGYFGDPLAPNPADKCRACNCNPMGSEPVGCRSDGTCVCKPGFGGPNCEHGAFSCPACYNQVKIQMDQFMQQLQRMEALISKAQGGDGVVPDTELEGRMQQAEQALQDILRDAQISEGASRSLGLQLAKVRSQENSYQSRLDDLKMTVERVRALGSQYQNRVRDTHRLITQMQLSLAESEASLGNTNIPASDHYVGPNGFKSLAQEATRLAESHVESASNMEQLTRETEDYSKQALSLVRKALHEGVGSGSGSPDGAVVQGLVEKLEKTKSLAQQLTREATQAEIEADRSYQHSLRLLDSVSRLQGVSDQSFQVEEAKRIKQKADSLSSLVTRHMDEFKRTQKNLGNWKEEAQQLLQNGKSGREKSDQLLSRANLAKSRAQEALSMGNATFYEVESILKNLREFDLQVDNRKAEAEEAMKRLSYISQKVSDASDKTQQAERALGSAAADAQRAKNGAGEALEISSEIEQEIGSLNLEANVTADGALAMEKGLASLKSEMREVEGELERKELEFDTNMDAVQMVITEAQKVDTRAKNAGVTIQDTLNTLDGLLHLMGM

SEQ ID NO: 7699 - protein, 1575 aa, Homo sapiens
MAAAALLLGLALLAPRAAGAGMGACYDGAGRPQRCLPVFENAAFGRLAQASHTCGSPPEDFCPHVGAAGAGAHCQRCDAADPQRHHNASYLTDFHSQDESTWWQSPSMAFGVQYPTSVNITLRLGKAYEITYVRLKFHTSRPESFAIYKRSRADGPWEPYQFYSASCQKTYGRPEGQYLRPGEDERVAFCTSEFSDISPLSGGNVAFSTLEGRPSAYNFEESPGLQEWVTSTELLISLDRLNTFGDDIFKDPKVLQSYYYAVSDFSVGGRCKCNGHASECGPDVAGQLACRCQHNTTGTDCERCLPFFQDRPWARGTAEAAHECLPCNCSGRSEECTFDRELFRSTGHGGRCHHCRDHTAGPHCERCQENFYHWDPRMPCQPCDCQSAGSLHLQCDDTGTCACKPTVTGWKCDRCLPGFHSLSEGGCRPCTCNPAGSLDTCDPRSGRCPCKENVEGNLCDRCRPGTFNLQPHNPAGCSSCFCYGHSKVCASTAQFQVHHILSDFHQGAEGWWARSVGGSEHPPQWSPNGVLLSPEDEEELTAPEKFLGDQRFSYGQPLILTFRVPPGDSPLPVQLRLEGTGLALSLRHSSLSGPQDAGHPREVELRFHLQETSEDVAPPLPPFHFQRLLANLTSLRLRVSPGPSPAGPVFLTEVRLTSARPGLSPPASWVEICSCPTGYTGQFCESCAPGYKREMPQGGPYASCVPCTCNQHGTCDPNTGICVCSHHTEGPSCERCLPGFYGNPFAGQADDCQPCPCPGQSACTTIPESREVVCTHCPPGQRGRRCEVCDDGFFGDPLGLFGHPQPCHQCQCSGNVDPNAVGNCDPLSGHCLRCLHNTTGDHCEHCQEGFYGSALAPRPADKCMPCSCHPQGSVSEQMPCDPVTGQCSCLPHVTARDCSRCYPGFFDLQPGRGCRSCKCHPLGSQEDQCHPKTGQCTCRPGVTGQACDRCQLGFFGFSIKGCRACRCSPLGAASAQCHENGTCVCRPGFEGYKCDRCHDNFFLTADGTHCQQCPSCYALVKEEAAKLKARLTLTEGWLQGSDCGSPWGPLDILLGEAPRGDVYQGHHLLPGAREAFLEQMMSLEGAVKAAREQLQRLNKGARCAQAGSQKTCTQLADLEAVLESSEEEILHAAAILASLEIPQEGPSQPTKWSHLATEARALARSHRDTATKIAATAWRALLASNTSYALLWNLLEGRVALETQRDLEDRYQEVQAAQKALRTAVAEVLPEAESVLATVQQVGADTAPYLALLASPGALPQKSRAEDLGLKAKALEKTVASWQHMATEAARTLQTAAQATLRQTEPLTKLHQEARAALTQASSSVQAATVTVMGARTLLADLEGMKLQFPRPKDQAALQRKADSVSDRLLADTRKKTKQAERMLGNAAPLSSSAKKKGREAEVLAKDSAKLAKALLRERKQAHRRASRLTSQTQATLQQASQQVLASEARRQELEEAERVGAGLSEMEQQIRESRISLEKDIETLSELLARLGSLDTHQAPAQALNETQWALERLRLQLGSPGSLQRKLSLLEQESQQQELQIQGFESDLAEIRADKQNLEAILHSLPENCASWQ

SEQ ID NO: 7700 - protein, 257 aa, Homo sapiens
  VARIANT 1: note = misc_feature - Xaa can be any naturally occurring amino acid
XTLQTAAQATLRQTEPLTKLHQEARAALTQASSSVQAATVTVMGARTLLADLEDTRKKTKQAERMLGNAAPLSSSAKKKGREAEVLAKDSAKLAKALLRERKQAHRRASRLTSQTQATLQQASQQVLASEARRQELEEAERVGAGLSEMEQQIRESRISLEKDIETLSELLARLGSLDTHQAPAQALNETQWALERLRLQLGSPGSLQRKLSLLEQESQQQELQIQGFESDLAEIRADKQNLEAILHSLPENCASWQ

SEQ ID NO: 7701 - protein, 180 aa, Homo sapiens
MPRQLSAAAALFASLAVILHDGSQMRAKAFPETRDYSQPTAAATVQDIKKPVQQPAKQAPHQTLAARFMDGHITFQTAATVKIPTTTPATTKNTATTSPITYTLVTTQATPNNSHTAPPVTEVTVGPSLAPYSLPPTITPPAHTTGTSSSTVSHTTGNTTQPSNQTTLPATLSIALHKST

SEQ ID NO: 7702 - protein, 416 aa, Homo sapiens
MPRQLSAAAALFASLAVILHDGSQMRAKAFPETRDYSQPTAAATVQDIKKPVQQPAKQAPHQTLAARFMDGHITFQTAATVKIPTTTPATTKNTATTSPITYTLVTTQATPNNSHTAPPVTEVTVGPSLAPYSLPPTITPPAHTTGTSSSTVSHTTGNTTQPSNQTTLPATLSIALHKSTTGQKPVQPTHAPGTTAAAHNTTRTAAPASTVPGPTLAPQPSSVKTGIYQVLNGSRLCIKAEMGIQLIVQDKESVFSPRRYFNIDPNATQASGNCGTRKSNLLLNFQGGFVNLTFTKDEESYYISEVGAYLTVSDPETIYQGIKHAVVMFQTAVGHSFKCVSEQSLQLSAHLQVKTTDVQLQAFDFEDDHFGNVDECSSDYTIVLPVIGAIVVGLCLMGMGVYKIRLRCQSSGYQRI

SEQ ID NO: 7703 - protein, 143 aa, Homo sapiens
MRAKAFPETRDYSQPTAAATVQDIKKPVQQPAKQAPHQTLAARFMDGHITFQTAATVKIPTTTPATTKNTATTSPITYTLVTTQATPNNSHTAPPVTEVTVGPSLAPYSLPPTITPPAHTTGTSSSTVSHTTGNTTQPSNQTT

SEQ ID NO: 7704 - protein, 392 aa, Homo sapiens
MRAKAFPETRDYSQPTAAATVQDIKKPVQQPAKQAPHQTLAARFMDGHITFQTAATVKIPTTTPATTKNTATTSPITYTLVTTQATPNNSHTAPPVTEVTVGPSLAPYSLPPTITPPAHTTGTSSSTVSHTTGNTTQPSNQTTLPATLSIALHKSTTGQKPVQPTHAPGTTAAAHNTTRTAAPASTVPGPTLAPQPSSVKTGIYQVLNGSRLCIKAEMGIQLIVQDKESVFSPRRYFNIDPNATQASGNCGTRKSNLLLNFQGGFVNLTFTKDEESYYISEVGAYLTVSDPETIYQGIKHAVVMFQTAVGHSFKCVSEQSLQLSAHLQVKTTDVQLQAFDFEDDHFGNVDECSSDYTIVLPVIGAIVVGLCLMGMGVYKIRLRCQSSGYQRI

SEQ ID NO: 7705 - protein, 690 aa, Homo sapiens
MLPRGRPRALGAAALLLLLLLLGFLLFDGRLRRAAALDGDPGAGPGDHNRSDCGPQPPPPPKCELLHVAIVCAGHNSSRDVITLVKSMLFYRKNPLHLHLVTDAVARNILETLFHTWMVPAVRVSFYHADQLKPQVSWIPNKHYSGLYGLMKLVLPSALPAELARVIVLDTDVTFASDISELWALFAHFSDTQAIGLVENQSDWYLGNLWKNHRPWPALGRGFNTGVILLRLDRLRQAGWEQMWRLTARRELLSLPATSLADQDIFNAVIKEHPGLVQRLPCVWNVQLSDHTLAERCYSEASDLKVIHWNSPKKLRVKNKHVEFFRNFYLTFLEYDGNLLRRELFVCPSQPPPGAEQLQQALAQLDEEDPCFEFRQQQLTVHRVHVTFLPHEPPPPRPHDVTLVAQLSMDRLQMLEALCRHWPGPMSLALYLTDAEAQQFLHFVEASPVLAARQDVAYHVVYREGPLYPVNQLRNVALAQALTPYVFLSDIDFLPAYSLYDYLRASIEQLGLGSRRKAALVVPAFETLRYRFSFPHSKVELLALLDAGTLYTFRYHEWPRGHAPTDYARWREAQAPYRVQWAANYEPYVVVPRDCPRYDPRFVGFGWNKVAHIVELDAQEYELLVLPEAFTIHLPHAPSLDISRFRSSPTYRDCLQALKDEFHQDLSRHHGAAALKYLPALQQPQSPARG

SEQ ID NO: 7706 - protein, 721 aa, Homo sapiens
MLPRGRPRALGAAALLLLLLLLGFLLFGGDLGCERREPGGRAGAPGCFPGPLMPRVPPDGRLRRAAALDGDPGAGPGDHNRSDCGPQPPPPPKCELLHVAIVCAGHNSSRDVITLVKSMLFYRKNPLHLHLVTDAVARNILETLFHTWMVPAVRVSFYHADQLKPQVSWIPNKHYSGLYGLMKLVLPSALPAELARVIVLDTDVTFASDISELWALFAHFSDTQAIGLVENQSDWYLGNLWKNHRPWPALGRGFNTGVILLRLDRLRQAGWEQMWRLTARRELLSLPATSLADQDIFNAVIKEHPGLVQRLPCVWNVQLSDHTLAERCYSEASDLKVIHWNSPKKLRVKNKHVEFFRNFYLTFLEYDGNLLRRELFVCPSQPPPGAEQLQQALAQLDEEDPCFEFRQQQLTVHRVHVTFLPHEPPPPRPHDVTLVAQLSMDRLQMLEALCRHWPGPMSLALYLTDAEAQQFLHFVEASPVLAARQDVAYHVVYREGPLYPVNQLRNVALAQALTPYVFLSDIDFLPAYSLYDYLRASIEQLGLGSRRKAALVVPAFETLRYRFSFPHSKVELLALLDAGTLYTFRYHEWPRGHAPTDYARWREAQAPYRVQWAANYEPYVVVPRDCPRYDPRFVGFGWNKVAHIVELDAQEYELLVLPEAFTIHLPHAPSLDISRFRSSPTYRDCLQALKDEFHQDLSRHHGAAALKYLPALQQPQSPARG

SEQ ID NO: 7707 - protein, 721 aa, Homo sapiens; identical to SEQ ID NO: 7706

SEQ ID NO: 7708 - protein, 721 aa, Homo sapiens; identical to SEQ ID NO: 7706

SEQ ID NO: 7709 - protein, 158 aa, Homo sapiens
WNSPKKLRVKNKHVEFFRNFYLTFLEYDGNLLRRELFVCPSQPPPGAEQLQQALAQLDEEDPCFEFRQQQLTVHRVHVTFLPHEPPPPRPHDVTLVAQLSMDRTWPTMWCTVRGPYTPSTSFATWPWPRPSRLTSSSVTLTSCLPILSTTTSGPPLSS

SEQ ID NO: 7710 - protein, 109 aa, Homo sapiens
  VARIANT 1: note = misc_feature - Xaa can be any naturally occurring amino acid
XLLDAGTLYTFRNMSSWCCPRPSPSICPTLQAWTSPASAPAPPIVTASRPSRTNSTRTCPATMGLLPSNTSQPCSSPRALPEAEAGPALPLILALGRHQGNLPSAIPAI

SEQ ID NO: 7711 - protein, 166 aa, Homo sapiens
IPRSPQPLGGSHRTPSSRRDSDGANSVASYENEEPACEDADEDEDDYHNPGYLVVLPDSTPATSTAAPSAPALSTPGIRDSAFSMESIDDYVNVPESGESAEASLDGSREYVNVSQELHPGAAKTEPVEAESVLEPGLPGTAELGSWKWLWGPHMASCPCSSLTTA

SEQ ID NO: 7712 - protein, 269 aa, Homo sapiens
MEATAASWQVAVPVLGGASRPLGPRGAASLLRAPLQMEEAILVPCVLGLLLLPILAMLMALCVHCHRLPGSYDSTSSDSLYPRGIQFKRPHTVAPWPPAYPPVTSYPPLSQPDLLPIPRSPQPLGGSHRTPSSRRDSDGANSVASYENEEPACEDADEDEDDYHNPGYLVVLPDSTPATSTAAPSAPALSTPGIRDSAFSMESIDDYVNVPESGESAEASLDGSREYVNVSQELHPGAAKTEPAALSSQEAEEVEEEGAPDYENLQELN

SEQ ID NO: 7713 - protein, 85 aa, Homo sapiens
MEEAILVPCVLGLLLLPILAMLMALCVHCHRLPGSYDSTSSDSLYPRGIQFKRPHTVAPWPPAYPPVTSYPPLSQPDLLPIPHDP

SEQ ID NO: 7714 - protein, 85 aa, Homo sapiens; identical to SEQ ID NO: 7713

SEQ ID NO: 7715 - protein, 233 aa, Homo sapiens
MEEAILVPCVLGLLLLPILAMLMALCVHCHRLPGSYDSTSSDSLYPRGIQFKRPHTVAPWPPAYPPVTSYPPLSQPDLLPIPRSPQPLGGSHRTPSSRRDSDGANSVASYENEEPACEDADEDEDDYHNPGYLVVLPDSTPATSTAAPSAPALSTPGIRDSAFSMESIDDYVNVPESGESAEASLDGSREYVNVSQELHPGAAKTEPAALSSQEAEEVEEEGAPDYENLQELN

SEQ ID NO: 7716 - protein, 262 aa, Homo sapiens
MEEAILVPCVLGLLLLPILAMLMALCVHCHRLPGSYDSTSSDSLYPRGIQFKRPHTVAPWPPAYPPVTSYPPLSQPDLLPIPRSPQPLGGSHRTPSSRRDSDGANSVASYENEGASGIRGAQAGWGVWGPSWTRLTPVSLPPEPACEDADEDEDDYHNPGYLVVLPDSTPATSTAAPSAPALSTPGIRDSAFSMESIDDYVNVPESGESAEASLDGSREYVNVSQELHPGAAKTEPAALSSQEAEEVEEEGAPDYENLQELN

SEQ ID NO: 7717 - protein, 252 aa, Homo sapiens
MEEAILVPCVLGLLLLPILAMLMALCVHCHRLPGSYDSTSSDSLYPRGIQFKRPHTVAPWPPAYPPVTSYPPLSQPDLLPIPRSPQPLRDSDGANSVASYENEGASGIRGAQAGWGVWGPSWTRLTPVSLPPEPACEDADEDEDDYHNPGYLVVLPDSTPATSTAAPSAPALSTPGIRDSAFSMESIDDYVNVPESGESAEASLDGSREYVNVSQELHPGAAKTEPAALSSQEAEEVEEEGAPDYENLQELN

SEQ ID NO: 7718 - protein, 232 aa, Homo sapiens
MEEAILVPCVLGLLLLPILAMLMALCVHCHRLPGSYDSTSSDSLYPRGIQFKRPHTVAPWPPAYPPVTSYPPLSQPDLLPIPSPQPLGGSHRTPSSRRDSDGANSVASYENEEPACEDADEDEDDYHNPGYLVVLPDSTPATSTAAPSAPALSTPGIRDSAFSMESIDDYVNVPESGESAEASLDGSREYVNVSQELHPGAAKTEPAALSSQEAEEVEEEGAPDYENLQELN

SEQ ID NO: 7719 - protein, 232 aa, Homo sapiens; identical to SEQ ID NO: 7718

SEQ ID NO: 7720 - protein, 261 aa, Homo sapiens
MEEAILVPCVLGLLLLPILAMLMALCVHCHRLPGSYDSTSSDSLYPRGIQFKRPHTVAPWPPAYPPVTSYPPLSQPDLLPIPSPQPLGGSHRTPSSRRDSDGANSVASYENEGASGIRGAQAGWGVWGPSWTRLTPVSLPPEPACEDADEDEDDYHNPGYLVVLPDSTPATSTAAPSAPALSTPGIRDSAFSMESIDDYVNVPESGESAEASLDGSREYVNVSQELHPGAAKTEPAALSSQEAEEVEEEGAPDYENLQELN

SEQ ID NO: 7721 - protein, 100 aa, Homo sapiens
MSSGTELLWPGAALLVLLGVAASLCVRCSRPGAKRREDQQSFTGSRTYSLVGQAWPGPLADMAPTRKDKLLQFYPSLEDPASSRYQNFSKGSRHGSEEAY

SEQ ID NO: 7722 - protein, 58 aa, Homo sapiens
MSSGTELLWPGAALLVLLGVAASLCVRCSRPGAKRSEKIYQQRSLREDQQSFTGSRTY

SEQ ID NO: 7723 - protein, 64 aa, Homo sapiens
MSSGTELLWPGAALLVLLGVAASLCVRCSRPGAKRSEKIYQQRSLREDQQSFTGSRTYSLVGQA

SEQ ID NO: 7724 - protein, 100 aa, Homo sapiens
MSSGTELLWPGAALLVLLGVAASLCVRCSRPGAKRSEKIYQQRSLREDQQSFTGSRTYSLVGQAWPGPLADMAPTRKDKLLQFYPSLEDPASSRYQNFSK

SEQ ID NO: 7725 - protein, 111 aa, Homo sapiens
MSSGTELLWPGAALLVLLGVAASLCVRCSRPGAKRSEKIYQQRSLREDQQSFTGSRTYSLVGQAWPGPLADMAPTRKDKLLQFYPSLEDPASSRYQNFSKGSRHGSEEAYI

SEQ ID NO: 7726 - protein, 243 aa, Homo sapiens
MSSGTELLWPGAALLVLLGVAASLCVRCSRPGAKRSEKIYQQRSLREDQQSFTGSRTYSLVGQAWPGPLADMAPTRKDKLLQFYPSLEDPASSRYQNFSKGSRHGSEEAYIDPIAMEYYNWGRFSKPPEDDDANSYENVLICKQKTTETGAQQEGIGGLCRGDLSLSLALKTGPTSGLCPSASPEEDEESEDYQNSASIHQWRESRKVMGQLQREASPGPVGSPDEEDGEPDYVNGEVAATEA

SEQ ID NO: 7727 - protein, 243 aa, Homo sapiens; identical to SEQ ID NO: 7726

SEQ ID NO: 7728 - protein, 243 aa, Homo sapiens; identical to SEQ ID NO: 7726

SEQ ID NO: 7729 - protein, 243 aa, Homo sapiens; identical to SEQ ID NO: 7726

SEQ ID NO: 7730 - protein, 481 aa, Homo sapiens
MGALARALPSILLALLLTSTPEALGANPGLVARITDKGLQYAAQEGLLALQSELLRITLPDFTGDLRIPHVGRGRYEFHSLNIHSCELLHSALRPVPGQGLSLSISDSSIRVQGRWKVRKSFFKLQGSFDVSVKGISISVNLLLGSESSGRPTVTASSCSSDIADVEVDMSGDLGWLLNLFHNQIESKFQKVLESRICEMIQKSVSSDLQPYLQTLPVTTEIDSFADIDYSLVEAPRATAQMLEVMFKGEIFHRNHRSPVTLLAAVMSLPEEHNKMVYFAISDYVFNTASLVYHEEGYLNFSITDDMIPPDSNIRLTTKSFRPFVPRLARLYPNMNLELQGSVPSAPLLNFSPGNLSVDPYMEIDAFVLLPSSSKEPVFRLSVATNVSATLTFNTSKITGFLKPGKVKVELKESKVGLFNAELLEALLNYYILNTFYPKFNDKLAEGFPLPLLKRVQLYDLGLQIHKDFLFLGANVQYMRV

SEQ ID NO: 7731 - protein, 255 aa, Homo sapiens
MCYRKTEDFFTIWLDLNMFLPLGVDCWIDNTRVVYNRSSGLVSNAPGVQIRVPGFGKTYSVEYLDSSKLAGYLHTLVQNLVNNGYVRDETVRAAPYDWRLEPGQQEEYYRKLAGLVEEMHAAYGKPVFLIGHSLGCLHLLYFLLRQPQAWKDRFIDGFISLGAPWGGSIKPMLVLASGDNQGIPIMSSIKLKEEQRITTTSPWMFPSRMAWPEDHVFISTPSFNYTGRDFQRFFADLHFEEGWYMWLQSRDLLAG

SEQ ID NO: 7732 - protein, 93 aa, Homo sapiens
MGPPGSPWQWVTLLLGLLLPPAAPFWLLNVLFPPHTTPKAELSNHTRPVILARSQAGQTRCGELDVLPQDRGLLHHLAGSQHVPTPWGRLLDR

SEQ ID NO: 7733 - protein, 440 aa, Homo sapiens
MGPPGSPWQWVTLLLGLLLPPAAPFWLLNVLFPPHTTPKAELSNHTRPVILVPGCLGNQLEAKLDKPDVVNWMCYRKTEDFFTIWLDLNMFLPLGVDCWIDNTRVVYNRSSGLVSNAPGVQIRVPGFGKTYSVEYLDSSKLAGYLHTLVQNLVNNGYVRDETVRAAPYDWRLEPGQQEEYYRKLAGLVEEMHAAYGKPVFLIGHSLGCLHLLYFLLRQPQAWKDRFIDGFISLGAPWGGSIKPMLVLASGDNQGIPIMSSIKLKEEQRITTTSPWMFPSRMAWPEDHVFISTPSFNYTGRDFQRFFADLHFEEGWYMWLQSRDLLAGLPAPGVEVYCLYGVGLPTPRTYIYDHGFPYTDPVGVLYEDGDDTVATRSTELCGLWQGRQPQPVHLLPLHGIQHLNMVFSNLTLEHINAILLGAYRQGPPASPTASPEPPPPE

SEQ ID NO: 7734 - protein, 61 aa, Homo sapiens
SPRPGRTALLMASSLLGLPGVAPSSPCWSWPQECLCPGMCFTEDGSARARARPPEAPPALP

SEQ ID NO: 7735 - protein, 138 aa, Homo sapiens
VQIRVPGFGKTYSVEYLDSSKLAGYLHTLVQNLVNNGYVRDETVRAAPYDWRLEPGQQEEYYRKLAGLVEEMHAAYGKPVFLIGHSLGCLHLLYFLLRQPQAWKDRFIDGFISLGAPWGGSIKPMLVLASETGSHCIA

SEQ ID NO: 7736 - protein, 80 aa, Homo sapiens
  VARIANT 1: note = misc_feature - Xaa can be any naturally occurring amino acid
XEYYRKLAGLVEEMHAAYGKPVFLIGHSLGCLHLLYFLLRQPQAWKDRFIDGFISLGAPWGGSIKPMLVLASGSGTRAQH

SEQ ID NO: 7737 - protein, 107 aa, Homo sapiens
  VARIANT 1: note = misc_feature - Xaa can be any naturally occurring amino acid
XLPLGVDCWIDNTRVVYNRSSGLVSNAPGVQIRVPGFGKTYSVEYLDSSKLAGPPATACAPAAPARDTASQHGLQQPDPGAHQCHPAGCLPPGSPCIPDCQPRAPAS

SEQ ID NO: 7738 - protein, 176 aa, Homo sapiens
MKPLLLAVSLGLIAALQAHHLLASDEEIQDVSGTWYLKAMTVDREFPEMNLESVTPMTLTTLEGGNLEAKVTMLISGRCQEVKAVLEKTDEPGKYTADGGKHVAYIIRSHVKDHYIFYCEGELHGKPVRGVKLVGRDPKNNLEALEDFEKAAGARGLSTESILIPRQSETCSPGSD

SEQ ID NO: 7739 - protein, 176 aa, Homo sapiens; identical to SEQ ID NO: 7738

SEQ ID NO: 7740 - protein, 86 aa, Homo sapiens
MRQGLLVLALVLVLVLVLAAGSQVQEWYPRESHALNWNKFSGFWYILATATDAQGFLPARDKRKLGASVVKVNKVGQLRVLLAFRR

SEQ ID NO: 7741 - protein, 187 aa, Homo sapiens
MRQGLLVLALVLVLVLVLAAGSQVQEWYPRESHALNWNKFSGFWYILATATDAQGFLPARDKRKLGASVVKVNKVGQLRVLLAFRRGQGCGRAQPRHPGTSGHLWASLSVKGVKAFHVLSTDYSYGLVYLRLGRATQNYKNLLLFHRQNVSSFQSLKEFMDACDILGLSKAAVILPKDASRTHTILP

SEQ ID NO: 7742 - protein, 164 aa, Homo sapiens
MRQGLLVLALVLVLVLVLAAGSQVQEWYPRESHALNWNKFSGFWYILATATDAQGFLPARDKRKLGASVVKVNKVGQLRVLLAFRRLKGCQSQEVILRKDGKKPVFGNACAYAAGPREGQEGDRQNVSSFQSLKEFMDACDILGLSKAAVILPKDASRTHTILP

SEQ ID NO: 7743 - protein, 200 aa, Homo sapiens
MRQGLLVLALVLVLVLVLAAGSQVQEWYPRESHALNWNKFSGFWYILATATDAQGFLPARDKRKLGASVVKVNKVGQLRVLLAFRRLKGCQSQEVILRKDGKKPVFGNACAYAAGPREGQEGVKGVKAFHVLSTDYSYGLVYLRLGRATQNYKNLLLFHRQNVSSFQSLKEFMDACDILGLSKAAVILPKDASRTHTILP

SEQ ID NO: 7744 - protein, 75 aa, Homo sapiens
MRQGLLVLALVLVLVLVLAAGSQVQEWYPRESHALNWNKGQEEAGGVRGKGEQSGPAPRAPRLQTIGRMFRASRV

SEQ ID NO: 7745 - protein, 37 aa, Homo sapiens
  VARIANT 1: note = misc_feature - Xaa can be any naturally occurring amino acid
XTDAQGFLPARDKRKLGASVVKVNKVGQLRVLLAFRR

SEQ ID NO: 7746 - protein, 102 aa, Homo sapiens
ALLNAFTATFELSDDGRFEVWNAMTRGQHCDTWSYVLIPAAQPGQFTVDHGVGRSWLLPPGTLDQFICLGRAQGLSDDNIVFPDVTGGALDLSSLPWVAAPA

SEQ ID NO: 7747 - protein, 192 aa, Homo sapiens
MRLLCGLWLWLSLLKVLQAQTPTPLPLPPPMQSFQGNQFQGEWFVLGLAGNSFRPEHRALLNAFTATFELSDDGRFEVWNAMTRGQHCDTWSYVLIPAAQPGQFTVDHGVEPGADREETRVVDSDYTQFALMLSRRHTSRLAVLRISLLGRSWLLPPGTLDQFICLGRAQGLSDDNIVFPDVTGWSPQASVC

SEQ ID NO: 7748 - protein, 90 aa, Homo sapiens
TFELSDDGRFEVWNAMTRGQHCDTWSYVLIPAAQPGQFTVDHGVDTRAGWPSSGSACWAGAGCCLPGRWTSSSAWAELRASRMTTSSSQM

SEQ ID NO: 7749 - protein, 184 aa, Homo sapiens
MMSFLLGAILTLLWAPTAQAEVLLQPDFNAEKFSGLWYVVSMASDCRVFLGKKDHLSMSTRAIRPTEEGGLHVHMEFPGADGCNQVDAEYLKVGSEGHFRVPALGYLDVRIVDTDYSSFAVLYIYKELEGALSTMVQLYSRTQDVSPQALKSFQDFYPTLGLPKDMMVMLPQSDACNPESKEAP

SEQ ID NO: 7750 - protein, 200 aa, Homo sapiens
MPLGLLWLGLALLGALHAQAQDSTSDLIPAPPLSKVPLQQNFQDNQFQGKWYVVGLAGNAILREDKDPQKMYATIYELKEDKSYNVTSVLFREKAQKCDYWIRTFVPGCQPGEFTLGNIKSYPGLTSYLVRVVSTNYNQHAMVFFKKVSQNREYFKITLYGRTKELTSELKENFIRFSKSLGLPENHIVFPVPIDQCIDG

SEQ ID NO: 7751 - protein, 198 aa, Homo sapiens
MPLGLLWLGLALLGALHAQAQDSTSDLIPAPPLSKVPLQQNFQDNQFQGKWYVVGLAGNAILREDKDPQKMYATIYELKEDKSYNVTSVLFRKKKCDYWIRTFVPGCQPGEFTLGNIKSYPGLTSYLVRVVSTNYNQHAMVFFKKVSQNREYFKITLYGRTKELTSELKENFIRFSKSLGLPENHIVFPVPIDQCIDG

SEQ ID NO: 7752 - protein, 198 aa, Homo sapiens; identical to SEQ ID NO: 7751

SEQ ID NO: 7753 - protein, 78 aa, Homo sapiens
MDLIKRNSGWVFENPSIGVLELWVLATNFRDYAIIFTQLEFGDEPFNTVELYSLTETASQEAMGLFTKWSRSLGFLSQ

SEQ ID NO: 7754 - protein, 163 aa, Homo sapiens
MGGLLLAAFLALVSVPRAQAVWLGRLDPEQLLGPWYVLAVASREKGFAMEKDMKNVVGVVVTLTPENNLRTLSSQHGLGGCDQSVMDLIKRNSGWVFENPSIGVLELWVLATNFRDYAIIFTQLEFGDEPFNTVELYSLTETASQEAMGLFTKWSRSLGFLSQ

SEQ ID NO: 7755 - protein, 152 aa, Homo sapiens
MEELDRQKIGGFWREVGVASDQSLVLTAPKRVEGLFLTLSGSNLTVKVAYNSSGSCEIEKIVGSEIDSTGKFAFPGHREIHVLDTDYEGYAILRVSLMWRGRNFRVLKYFTRSLEDKDRLGFWKFRELTADTGLYLAARPGRCAELLKEELI

SEQ ID NO: 7756 - protein, 175 aa, Homo sapiens
MPGAAEALPTVTVTLVAGAVPPASGALTAHCIGGFWREVGVASDQSLVLTAPKRVEGLFLTLSGSNLTVKVAYNSSGSCEIEKIVGSEIDSTGKFAFPGHREIHVLDTDYEGYAILRVSLMWRGRNFRVLKYFTRSLEDKDRLGFWKFRELTADTGLYLAARPGRCAELLKEELI

SEQ ID NO: 7757 - protein, 176 aa, Homo sapiens [sequence omitted]

SEQ ID NO: 7758 - protein, 176 aa, Homo sapiens
MALLLLSLGLSLIAAQEFDPHTVMQRNYNVARVSGVWYSIFMASDDLNRIKENGDLRVFVRNIEHLKNGSLIFDFEYMVQGECVAVVVVCEKTEKNGEYSINYEGQNTVAVSETDYRLFITFHLQNFRNGTETHTLALYETCEKYGLGSQNIIDLTNKDPCYSKHYRSPPRPPMRW

SEQ ID NO: 7759 - protein, 518 aa, Homo sapiens
MDEKCSFCNLQREAVSDCIPSLDSSQSTPTEELSSQGQSNTDKIECQAENYLNALFRKKDLPQNCDPNIPLVAQELMKKMIRQFAIEYISKSGKTQENRNGSIGPSIVCKSIQMNQAENSLQEEQEGPLDLTVNRMQEQNTQQGDGVLDLSTKKTSIKSEESSICDPSSENSVAGRLHRNREDYVERSAEFADGLLSKALKDIQSGALDINKAGILYGIPQKTLLLHLEALPAGKPASFKNKTRDFHDSYSYKDSKETCAVLQKVALWARAQAERTEKSKLNLLETSEIKFPTASTYLHQLTLQKMVTQFKEKNESLQYETSNPTVQLKIPQLRVSSVSKSQPDGSGLLDVMYQVSKTSSVLEGSALQKLKNILPKQNKIECSGPVTHSSVDSYFLHGDLSPLCLNSKNGTVDGTSENTEDGLDRKDSKQPRKKRGRYRQYDHEIMEEAIAMVMSGKMSVSKAQGIYGVPHSTLEYKVKERSGTLKTPPKKKLRLPDTGLYNMTDSGTGSCKNSSKPV

SEQ ID NO: 7760 - protein, 318 aa, Homo sapiens
MDKGRERMAAAAAAAAAAAAAAQCRSPRCAAERRGFRRELDSWRHRLMHCVGFESILEGLYGPRLRRDLSLFEDCEPEELTDWSMDEKCSFCNLQREAVSDCIPSLDSSQSTPTEELSSQGQSNTDKIECQAENYLNALFRKKDLPQNCDPNIPLVAQELMKKMIRQFAIEYISKSGKTQENRNGSIGPSIVCKSIQMNQAENSLQEEQEGPLDLTVNRMQEQNTQQGDGVLDLSTKKTSIKSEESSICDPSSENSVAGMLQVKTDEKLNVSDENTASCPLSPIKMCLNRPIEWNLNLTTASLTSCTVHNQNLKSEEK

SEQ ID NO: 7761 - protein, 602 aa, Homo sapiens
MDKGRERMAAAAAAAAAAAAAAQCRSPRCAAERRGFRRELDSWRHRLMHCVGFESILEGLYGPRLRRDLSLFEDCEPEELTDWSMDEKCSFCNLQREAVSDCIPSLDSSQSTPTEELSSQGQSNTDKIECQAENYLNALFRKKDLPQNCDPNIPLVAQELMKKMIRQFAIEYISKSGKTQENRNGSIGPSIVCKSIQMNQAENSLQEEQEGPLDLTVNRMQEQNTQQGDGVLDLSTKKTSIKSEESSICDPSSENSVAGRLHRNREDYVERSAEFADGLLSKALKDIQSGALDINKAGILYGIPQKTLLLHLEALPAGKPASFKNKTRDFHDSYSYKDSKETCAVLQKVALWARAQAERTEKSKLNLLETSEIKFPTASTYLHQLTLQKMVTQFKEKNESLQYETSNPTVQLKIPQLRVSSVSKSQPDGSGLLDVMYQVSKTSSVLEGSALQKLKNILPKQNKIECSGPVTHSSVDSYFLHGDLSPLCLNSKNGTVDGTSENTEDGLDRKDSKQPRKKRGRYRQYDHEIMEEAIAMVMSGKMSVSKAQGIYGVPHSTLEYKVKERSGTLKTPPKKKLRLPDTGLYNMTDSGTGSCKNSSKPV

SEQ ID NO: 7762 - protein, 1871 aa, Homo sapiens
MDKGRERMAAAAAAAAAAAAAAQCRSPRCAAERRGFRRELDSWRHRLMHCVGFESILEGLYGPRLRRDLSLFEDCEPEELTDWSMDEKCSFCNLQREAVSDCIPSLDSSQSTPTEELSSQGQSNTDKIECQAENYLNALFRKKDLPQNCDPNIPLVAQELMKKMIRQFAIEYISKSGKTQENRNGSIGPSIVCKSIQMNQAENSLQEEQEGPLDLTVNRMQEQNTQQGDGVLDLSTKKTSIKSEESSICDPSSENSVAGSTVDAKSEEATKMEKRKSALNKVLESLCIHHQQQVLAMLKFLVQEQNAASLCCCNTSCVVSSESQKPLIEDDLCGLFCSCEYRLAERGCLQNEKQSPGLEPLPVCIKDLHCLSCQTVTVEHVKPVVNRGIADSYNSHRCCSGLLPNIHSTKSAFRSPLLSKEVCDLSVTLKDACRSRSPSPPPLSPIETEGFEKLKDVISEISALENNKLEANINQPPSLTPAEISSNKSDHQDKILKTKKSSNSYSLLSNDSNNSTTNHEKGETAVIFQDLMDRINEKLKSIETTDMTSLVKLSSSDYNTYNDLKLGDFITSLLHNAKASDYSFMELLSQHDKKVENKIIQTRFRKRQETLFAMRNSSDSPMFRRQSLQIKRELASLDENFTRKKYTEKSSRKLTQNNEISSSDKGEFYHDQGPSLQNSKRLQGKNHAETSFSPNYALQSLQLPLHSSETNLSFNEFSESFKTTSPEKMSIRKPQEKSADGKQFLQNDRKNPKLGNTQTLLRNDVSGLLSRTKRNIVPPGWYSVYVTNNYVFKKSPKAKKVSESTTKNDPVKNIHIESSHNIDLNKIAMNSNLQVVVKRLEDTISIAKKSWNNQPLSEGYKASKKLIEIDGKDQHADRNMTLTLNRMTCKEQSLSKSVVASGNIINSHCMPTVDLNNKRLENLKKSSILDMGRLISSVENVPAKYEGTESSSVSNYSSPIKLMFLSEVKSSEGVKYTLTSVGTSHSNVVLPSEKPTTHHVTEEKTETNEDISNANSENYHSSHYDTDTFQRELNKFSHAKETAGSSTMFIGDINSDKPQEEPKDNSSSATDPSFKRKPGRPKKIGPQVVKQIKRPIGRPPKPKIDQTNITVCQNEPFSAGRKSPECLISEVKEGIYKKSITVTVIYGRSRRTKRHVSEGRVNISNLMSLNNNAGDFPTEYNSPRNISEDKIDLGERISAVASLTTESEILGSGFEYVRPIKNKSVIPQPSKNIIRPNQKPLAISRKPGRPAKVKISGISVTINRTSPQEREVSISSCLPPLEQDNTSGKNLPEEKYDQQCTQMDKIRHTEADIFKNGSKRMIATVPLRHSIRDRKPSLHFLHSLASSSSLIYRNALLHKSYKLHLQKNKSQKEKHRHSKMKIAYKDTPRNRLSRNAKKCLEDNKLVPISEVSLDPIISSNPLLRWWATSASNDSLLEELNNRFEQITNAWVQVSGDEAENCIHKKREHIENDHFKVASPLETCLLELEVSPVKMLFQKKYDLNELCTWFMQTTETQSLSLVRKANARNPLEVINTRGIKLGTKYSDFNASPFRKHFKKFALSSPSKSAEKLHILHKVANSPLLNVKSNLAIARLKRTEFKRLHHERWKREGKLHNHGTVDWNSKRRNLRFFCQNQFLNKTEGETNADIPLQGKSIVDNQCVLPPEIRGDLQQRVVMPDFKIHASFENKFKSEAKENGTNCSQKDFQKGPRLENVCPNSWRSKTLKDCRIFLRKLNCLEHRNTFKLNTIIYSPESTDSGNTHQTHMEESKRFTLRSHSARQNSFKKQSKEIENANTNNPSADEFADHLGNSKLSKCVNFDKNPDSFEVLSNLNKRKRPPWKITEMSTKRHKRQSCNSGQMANYFSKSLACYK

SEQ ID NO: 7763 - protein, 79 aa, Homo sapiens
MDKGRERMAAAAAAAAAAAAAAQCRSPRCAAERRGFRRELDSWRHRLMHCVGFESILEGLYGPRLRRDLSLFEGLYTIS

SEQ ID NO: 7764 - protein, 77 aa, Homo sapiens
  VARIANT 1: note = misc_feature - Xaa can be any naturally occurring amino acid
XGRERMAAAAAAAAAAAAAAQCRSPRCAAERRGFRRELDSWRHRLMHCVGFESILEGLYGPRLRRDLSLFEGLYTIS

SEQ ID NO: 7765 - protein, 692 aa, Homo sapiens
MGPWGWKLRWTVALLLAAAGTAVGDRCERNEFQCQDGKCISYKWVCDGSAECQDGSDESQETCLSVTCKSGDFSCGGRVNRCIPQFWRCDGQVDCDNGSDEQGCLTLCEGPNKFKCHSGECITLDKVCNMARDCRDWSDEPIKECGTNECLDNNGGCSHVCNDLKIGYECLCPDGFQLVAQRRCEDIDECQDPDTCSQLCVNLEGGYKCQCEEGFQLDPHTKACKAVGSIAYLFFTNRHEVRKMTLDRSEYTSLIPNLRNVVALDTEVASNRIYWSDLSQRMICSTQLDRAHGVSSYDTVISRDIQAPDGLAVDWIHSNIYWTDSVLGTVSVADTKGVKRKTLFRENGSKPRAIVVDPVHGFMYWTDWGTPAKIKKGGLNGVDIYSLVTENIQWPNGITLDLLSGRLYWVDSKLHSISSIDVNGGNRKTILEDEKRLAHPFSLAVFEDKVFWTDIINEAIFSANRLTGSDVNLLAENLLSPEDMVLFHNLTQPRGVNWCERTTLSNGGCQYLCLPAPQINPHSPKFTCACPDGMLLARDMRSCLTEAEAAVATQETSTVRLKVSSTAVRTQHTTTRPVPDTSRLPGATPGLTTVEIVTMSHQALGDVAGRGNEKKPSSVRALSIVLPIVLLVFLCLGVFLLWKNWRLKNINSINFDNPVYQKTTEDEVHICHNQDGYSYPSRQMVSLEDDVA

SEQ ID NO: 7766 - protein, 860 aa, Homo sapiens [sequence omitted]

SEQ ID NO: 7767 - protein, 858 aa, Homo sapiens
MGPWGWKLRWTVALLLAAAGTAVGDRCERNEFQCQDGKCISYKWVCDGSAECQDGSDESQETCLSVTCKSGDFSCGGRVNRCIPQFWRCDGQVDCDNGSDEQGCPPKTCSQDEFRCHDGKCISRQFVCDSDRDCLDGSDEASCPVLTCGPASFQCNSSTCIPQLWACDNDPDCEDGSDEWPQRCRGLYVFQGDSSPCSAFEFHCLSGECIHSSWRCDGGPDCKDKSDEENCAVATCRPDEFQCSDGNCIHGSRQCDREYDCKDMSDEVGCVNVTLCEGPNKFKCHSGECITLDKVCNMARDCRDWSDEPIKECGTNECLDNNGGCSHVCNDLKIGYECLCPDGFQLVAQRRCEDIDECQDPDTCSQLCVNLEGGYKCQCEEGFQLDPHTKACKAVGSIAYLFFTNRHEVRKMTLDRSEYTSLIPNLRNVVALDTEVASNRIYWSDLSQRMICSTQLDRAHGVSSYDTVISRDIQAPDGLAVDWIHSNIYWTDSVLGTVSVADTKGVKRKTLFRENGSKPRAIVVDPVHGFMYWTDWGTPAKIKKGGLNGVDIYSLVTENIQWPNGITLDLLSGRLYWVDSKLHSISSIDVNGGNRKTILEDEKRLAHPFSLAVFEDKVFWTDIINEAIFSANRLTGSDVNLLAENLLSPEDMVLFHNLTQPRGVNWCERTTLSNGGCQYLCLPAPQINPHSPKFTCACPDGMLLARDMRSCLTEAEAAVATQETSTVRLKVSSTAVRTQHTTTRPVPDTSRLPGATPGLTTVEIVTMSHQALGDVAGRGNEKKPSSVRALSIVLPIVLLVFLCLGVFLLWKNWRLKNINSINFDNPVYQKTTEDEVHICHNQDGYSYPSMVSLEDDVA

SEQ ID NO: 7768 - protein, 948 aa, Homo sapiens
MGPWGWKLRWTVALLLAAAGTAVGDRCERNEFQCQDGKCISYKWVCDGSAECQDGSDESQETCLSVTCKSGDFSCGGRVNRCIPQFWRCDGQVDCDNGSDEQGCPPKTCSQDEFRCHDGKCISRQFVCDSDRDCLDGSDEASCPVLTCGPASFQCNSSTCIPQLWACDNDPDCEDGSDEWPQRCRGLYVFQGDSSPCSAFEFHCLSGECIHSSWRCDGGPDCKDKSDEENCAVATCRPDEFQCSDGNCIHGSRQCDREYDCKDMSDEVGCVNVTLCEGPNKFKCHSGECITLDKVCNMARDCRDWSDEPIKECGTNECLDNNGGCSHVCNDLKIGYECLCPDGFQLVAQRRCEDIDECQDPDTCSQLCVNLEGGYKCQCEEGFQLDPHTKACKAVGSIAYLFFTNRHEVRKMTLDRSEYTSLIPNLRNVVALDTEVASNRIYWSDLSQRMICSTQLDRAHGVSSYDTVISRDIQAPDGLAVDWIHSNIYWTDSVLGTVSVADTKGVKRKTLFRENGSKPRAIVVDPVHGFMYWTDWGTPAKIKKGGLNGVDIYSLVTENIQWPNGITLDLLSGRLYWVDSKLHSISSIDVNGGNRKTILEDEKRLAHPFSLAVFEDKVFWTDIINEAIFSANRLTGSDVNLLAENLLSPEDMVLFHNLTQPRGVNWCERTTLSNGGCQYLCLPAPQINPHSPKFTCACPDGMLLARDMRSCLTEAEAAVATQETSTVRLKVSSTAVRTQHTTTRPVPDTSRLPGATPGLTTVEIVTMSHQALGDVAGRGNEKKPSSVRALSIVLPIATELGLWSRGQLCDRACLSLQCSSSSFAWGSSFYGRTGGLRTSTASTLTTPSIRRPQRMRSTFATTRTATATPRDRWSVWRMTWREHLPGVPSLPRTLPETSPALFYSKTEKTKALPARALFYIFIHLGGRTGFGQCPCNGLGWDFGFFLSS

SEQ ID NO: 7769 - protein, 682 aa, Homo sapiens
MGPWGWKLRWTVALLLAAAGTAVGDRCERNEFQCQDGKCISYKWVCDGSAECQDGSDESQETCLSVTCKSGDFSCGGRVNRCIPQFWRCDGQVDCDNGSDEQGCPVATCRPDEFQCSDGNCIHGSRQCDREYDCKDMSDEVGCVNVTLCEGPNKFKCHSGECITLDKVCNMARDCRDWSDEPIKECGTNECLDNNGGCSHVCNDLKIGYECLCPDGFQLVAQRRCEDIDECQDPDTCSQLCVNLEGGYKCQCEEGFQLDPHTKACKAVGSIAYLFFTNRHEVRKMTLDRSEYTSLIPNLRNVVALDTEVASNRIYWSDLSQRMICSTQLDRAHGVSSYDTVISRDIQAPDGLAVDWIHSNIYWTDSVLGTVSVADTKGVKRKTLFRENGSKPRAIVVDPVHGFMYWTDWGTPAKIKKGGLNGVDIYSLVTENIQWPNGITLDLLSGRLYWVDSKLHSISSIDVNGGNRKTILEDEKRLAHPFSLAVFEDKVFWTDIINEAIFSANRLTGSDVNLLAENLLSPEDMVLFHNLTQPREAEAAVATQETSTVRLKVSSTAVRTQHTTTRPVPDTSRLPGATPGLTTVEIVTMSHQALGDVAGRGNEKKPSSVRALSIVLPIVLLVFLCLGVFLLWKNWRLKNINSINFDNPVYQKTTEDEVHICHNQDGYSYPSRQMVSLEDDVA

SEQ ID NO: 7770 - protein, 819 aa, Homo sapiens
MGPWGWKLRWTVALLLAAAGTAVGDRCERNEFQCQDGKCISYKWVCDGSAECQDGSDESQETCSPKTCSQDEFRCHDGKCISRQFVCDSDRDCLDGSDEASCPVLTCGPASFQCNSSTCIPQLWACDNDPDCEDGSDEWPQRCRGLYVFQGDSSPCSAFEFHCLSGECIHSSWRCDGGPDCKDKSDEENCAVATCRPDEFQCSDGNCIHGSRQCDREYDCKDMSDEVGCVNVTLCEGPNKFKCHSGECITLDKVCNMARDCRDWSDEPIKECGTNECLDNNGGCSHVCNDLKIGYECLCPDGFQLVAQRRCEDIDECQDPDTCSQLCVNLEGGYKCQCEEGFQLDPHTKACKAVGSIAYLFFTNRHEVRKMTLDRSEYTSLIPNLRNVVALDTEVASNRIYWSDLSQRMICSTQLDRAHGVSSYDTVISRDIQAPDGLAVDWIHSNIYWTDSVLGTVSVADTKGVKRKTLFRENGSKPRAIVVDPVHGFMYWTDWGTPAKIKKGGLNGVDIYSLVTENIQWPNGITLDLLSGRLYWVDSKLHSISSIDVNGGNRKTILEDEKRLAHPFSLAVFEDKVFWTDIINEAIFSANRLTGSDVNLLAENLLSPEDMVLFHNLTQPRGVNWCERTTLSNGGCQYLCLPAPQINPHSPKFTCACPDGMLLARDMRSCLTEAEAAVATQETSTVRLKVSSTAVRTQHTTTRPVPDTSRLPGATPGLTTVEIVTMSHQALGDVAGRGNEKKPSSVRALSIVLPIVLLVFLCLGVFLLWKNWRLKNINSINFDNPVYQKTTEDEVHICHNQDGYSYPSRQMVSLEDDVA

SEQ ID NO: 7771 - protein, 945 aa, Homo sapiens
  VARIANT 1: note = misc_feature - Xaa can be any naturally occurring amino acid
XGRPGVPPRFLSQRRRQVPGPRSRLRDIHESPSVILGPPGEVPGFRCALWRHLRPHLVLGGALAPPAPIKFTEGPPATLKASVPYEVETLPQNLPAPPWSAAEIFSHVGDRCERNEFQCQDGKCISYKWVCDGSAECQDGSDESQETCLSVTCKSGDFSCGGRVNRCIPQFWRCDGQVDCDNGSDEQGCPPKTCSQDEFRCHDGKCISRQFVCDSDRDCLDGSDEASCPVLTCGPASFQCNSSTCIPQLWACDNDPDCEDGSDEWPQRCRGLYVFQGDSSPCSAFEFHCLSGECIHSSWRCDGGPDCKDKSDEENCAVATCRPDEFQCSDGNCIHGSRQCDREYDCKDMSDEVGCVNVTLCEGPNKFKCHSGECITLDKVCNMARDCRDWSDEPIKECGTNECLDNNGGCSHVCNDLKIGYECLCPDGFQLVAQRRCEDIDECQDPDTCSQLCVNLEGGYKCQCEEGFQLDPHTKACKAVGSIAYLFFTNRHEVRKMTLDRSEYTSLIPNLRNVVALDTEVASNRIYWSDLSQRMICSTQLDRAHGVSSYDTVISRDIQAPDGLAVDWIHSNIYWTDSVLGTVSVADTKGVKRKTLFRENGSKPRAIVVDPVHGFMYWTDWGTPAKIKKGGLNGVDIYSLVTENIQWPNGITLDLLSGRLYWVDSKLHSISSIDVNGGNRKTILEDEKRLAHPFSLAVFEDKVFWTDIINEAIFSANRLTGSDVNLLAENLLSPEDMVLFHNLTQPRGVNWCERTTLSNGGCQYLCLPAPQINPHSPKFTCACPDGMLLARDMRSCLTEAEAAVATQETSTVRLKVSSTAVRTQHTTTRPVPDTSRLPGATPGLTTVEIVTMSHQALGDVAGRGNEKKPSSVRALSIVLPIVLLVFLCLGVFLLWKNWRLKNINSINFDNPVYQKTTEDEVHICHNQDGYSYPSRQMVSLEDDVA

SEQ ID NO: 7772 - protein, 309 aa, Homo sapiens
  VARIANT 1: note = misc_feature - Xaa can be any naturally occurring amino acid
XLDGSDEASCPVLTCGPASFQCNSSTCIPQLWACDNDPDCEDGSDEWPQRCRGLYVFQGDSSPCSAFEFHCLSGECIHSSWRCDGGPDCKDKSDEENCAVATCRPDEFQCSDGNCIHGSRQCDREYDCKDMSDEVGCVNVTLCEGPNKFKCHSGECITLDKVCNMARDCRDWSDEPIKECDIDECQDPDTCSQLCVNLEGGYKCQCEEGFQLDPHTKACKAVGSIAYLFFTNRHEVRKMTLDRSEYTSLIPNLRNVVALDTEVASNRIYWSDLSQRMICSTQLDRAHGVSSYDTVISRDIQAPDGLAVD

SEQ ID NO: 7773 - protein, 170 aa, Homo sapiens
  VARIANT 1: note = misc_feature - Xaa can be any naturally occurring amino acid
XNVVALDTEVASNRIYWSDLSQRMICSTQLDRAHGVSSYDTVISRDIQAPDGLAVDWIHSNIYWTDSVLGTVSVADTKGVKRKTLFRENGSKPRAIVVDPVHGFMYWTDWGTPAKIKKGGLNGVDIYSLVTENIQWPNGITLGQSILDRYHQRSHFQCQPPHRFRCQLVG

SEQ ID NO: 7774 - protein, 272 aa, Homo sapiens
MEACCLLQLPQRLLLLGAAALTATALETADLAELCGQTWQGDGLLLRSHAASRRFYFVAPDTDCGLWVQAAAPGDRIRFQFRFFLVYSLTPAPPALNTSSPAPADPCAPGSYLQFYEGPPGAPRPLGSPLCGLNIPVPVASSGPFLGLRLVTRGRQPRVDFVGEVTSFRLGPCGAYFRCQNGRCIPSSLVCDPWGMDNCGDGSDQGSWSPADCRGPSPVPSQTGSTDAHTSRSLTPSPALGSAGSLWIAAERSSPAGRDPTRQDAALEGSTE

SEQ ID NO: 7775 - protein, 272 aa, Homo sapiens; identical to SEQ ID NO: 7774

SEQ ID NO: 7776 - protein, 77 aa, Homo sapiens
MWHLKLCAVLMIFLLLLGQIDGSPIPEVSSAKRRPRRMTPFWRGVSLRPIGASCRDDSECITRLCRKRRCSLSVAQE

SEQ ID NO: 7777 - protein, 131 aa, Homo sapiens
MFSTKALLLAGLISTALAGPWANICAGKSSNEIRTCDRHGCGQYSAQRSQRPHQGVDILCSAGSTVYAPFTGMIVGQEKPYQNKNAINNGVRISGREITTDTPIFNNYYPDQSAAVNIKTRSSTSKKMMTH

SEQ ID NO: 7778 - protein, 151 aa, Homo sapiens
MFSTKALLLAGLISTALAGPWANICAGKSSNEIRTCDRHGCGQYSAQRSQRPHQGVDILCSAGSTVYAPFTGMIVGQEKPYQNKNAINNGVRISGRGFCVKMFYIKPIKYKGPIKKGEKLGTLLPLQKVYPGIQSHVHIENCDSSDPTAYL

SEQ ID NO: 7779 - protein, 111 aa, Homo sapiens
MFSTKALLLAGLISTALAGPWANICAGKSSNEIRTCDRHGCGQYSAQRSQRPHQGVDILCSAGSTVYAPFTGMIVGQEKPYQNKNAINNGVRISGRGKRGGVYTWGASWRC

SEQ ID NO: 7780 - protein, 79 aa, Homo sapiens
MIVGQEKPYQNKNAINNGVRISGRGFCVKMFYIKPIKYKGPIKKGEKLGTLLPLQKVYPGIQSHVHIENCDSSDPTAYL

SEQ ID NO: 7781 - protein, 64 aa, Homo sapiens
MEQRLPPNSELVQAVLRLFQEPVPKAALHRHGRLSPRSARARVTVEWLRVRDDGSNRTSLIDSR

SEQ ID NO: 7782 - protein, 366 aa, Homo sapiens
MQPLWLCWALWVLPLASPGAALTGEQLLGSLLRQLQLKEVPTLDRADMEELVIPTHVRAQYVALLQRSHGDRSRGKRFSQSFREVAGRFLALEASTHLLVFGMEQRLPPNSELVQAVLRLFQEPVPKAALHRHGRLSPRSARARVTVEWLRVRDDGSNRTSLIDSRLVSVHESGWKAFDVTEAVNFWQQLSRPRQPLLLQVSVQREHLGPLASGAHKLVRFASQGAPAGLGEPQLELHTLDLGDYGAQGDCDPEAPMTEGTRCCRQEMYIDLQGMKWAENWVLEPPGFLAYECVGTCRQPPEALAFKWPFLGPRQCIASETDSLPMIVSIKEGGRTRPQVVSLPNMRVQKCSCASDGALVPRRLQP

SEQ ID NO: 7783 - protein, 332 aa, Homo sapiens
MWPLWLCWALWVLPLAGPGAALTEEQLLGSLLRQLQLSEVPVLDRADMEKLVIPAHVRAQYVVLLRRSHGDRSRGKRFSQSFREVAGRFLASEAALHRHGRLSPRSAQARVTVEWLRVRDDGSNRTSLIDSRLVSVHESGWKAFDVTEAVNFWQQLSRPRQPLLLQVSVQREHLGPLASGAHKLVRFASQGAPAGLGEPQLELHTLDLRDYGAQGDCDPEAPMTEGTRCCRQEMYIDLQGMKWAKNWVLEPPGFLAYECVGTCQQPPEALAFNWPFLGPRQCIASETASLPMIVSIKEGGRTRPQVVSLPNMRVQKCSCASDGALVPRRLQP

SEQ ID NO: 7784 - protein, 366 aa, Homo sapiens
MWPLWLCWALWVLPLAGPGAALTEEQLLGSLLRQLQLSEVPVLDRADMEKLVIPAHVRAQYVVLLRRSHGDRSRGKRFSQSFREVAGRFLASEASTHLLVFGMEQRLPPNSELVQAVLRLFQEPVPKAALHRHGRLSPRSAQARVTVEWLRVRDDGSNRTSLIDSRLVSVHESGWKAFDVTEAVNFWQQLSRPRQPLLLQVSVQREHLGPLASGAHKLVRFASQGAPAGLGEPQLELHTLDLRDYGAQGDCDPEAPMTEGTRCCRQEMYIDLQGMKWAKNWVLEPPGFLAYECVGTCQQPPEALAFNWPFLGPRQCIASETASLPMIVSIKEGGRTRPQVVSLPNMRVQKCSCASDGALVPRRLQP

SEQ ID NO: 7785 - protein, 167 aa, Homo sapiens
MHWGTLCGFLWLWPYLFYVQAVPIQKVQDDTKTLIKTIVTRINDISHTQSVSSKQKVTGLDFIPGLHPILTLSKMDQTLAVYQQILTSMPSRNVIQISNDLENLRDLLHVLAFSKSCHLPWASGLETLDSLGGVLEASGYSTEVVALSRLQGSLQDMLWQLDLSPGC

SEQ ID NO: 7786 - protein, 308 aa, Homo sapiens
MDEQTGRLRLDTYCMSAKQIWAWSKCSGRLWDEHMKWMEGWTDRWTDGWMDGWMDEWSPTPALRSYGGGLSQQTFIFTDGEDEALARHTGNVVITNCSAAHSRQALSCKMAVEYDRFIESGRKWFCHVDDDNYVNLRALLRLLASYPHTRDVYVGKPSLDRPIQAMERVSENKVRPVHFWFATGGAGFCISRGLALKMSPWASGGHFMNTAERIRLPDDCTIGYIVEALLGVPLIRSGLFHSHLENLQQVPTSELHEQVTLSYGMFENKRNAVHVKGPFSVEADPSRFRSIHCHLYPDTPWCPRTAIF

SEQ ID NO: 7787 - protein, 248 aa, Homo sapiens
MKGCLLKADFLLQTFIFTDGEDEALARHTGNVVITNCSAAHSRQALSCKMAVEYDRFIESGRKWFCHVDDDNYVNLRALLRLLASYPHTRDVYVGKPSLDRPIQAMERVSENKVRPVHFWFATGGAGFCISRGLALKMSPWASGGHFMNTAERIRLPDDCTIGYIVEALLGVPLIRSGLFHSHLENLQQVPTSELHEQVTLSYGMFENKRNAVHVKGPFSVEADPSRFRSIHCHLYPDTPWCPRTAIF

SEQ ID NO: 7788 - protein, 379 aa, Homo sapiens
MLKRCGRRLLLALAGALLACLLVLTADPPPPPLPAERGRRALRSLAGPAGAAPAPGLGAAAAAPGALVRDVHSLSEYFSLLTRARRDAGPPPGAAPRPADGHPRPLAEPLAPRDVFIAVKTTKKFHRARLDLLLETWISRHKEMTFIFTDGEDEALARHTGNVVITNCSAAHSRQALSCKMAVEYDRFIESGRKWFCHVDDDNYVNLRALLRLLASYPHTRDVYVGKPSLDRPIQAMERVSENKVRPVHFWFATGGAGFCISRGLALKMSPWASGGHFMNTAERIRLPDDCTIGYIVEALLGVPLIRSGLFHSHLENLQQVPTSELHEQVTLSYGMFENKRNAVHVKGPFSVEADPSRFRSIHCHLYPDTPWCPRTAIF

SEQ ID NO: 7789 - protein, 361 aa, Homo sapiens
MLKRCGRRLLLALAGALLACLLVLTADPPPPPLPAERGRRALRSLAGPAGAAPAPGLGAAAAAPGALVRDVHSLSEYFSLLTRARRDAGPPPGAAPRPADGHPRPLAEPLAPRDVFIAVKTTKKFHRARLDLLLETWISRHKEMTFIFTDGEDEALARHTGNVVITNCSAAHSRQALSCKMAVEYDRFIESGRKWFCHVDDDNYVNLRALLRLLASYPHTRDVYVGKPSLDRPIQAMERVSENKVRPVHFWFATGGAGFCISRGLALKMSPWASGGHFMNTAERIRLPDDCTIGYIVEALLGVPLIRSGLFHSHLENLQQVPTSELHEQVTLSYGMFENKRNAVHVKGPFSVEADPSRWGN

SEQ ID NO: 7790 - protein, 250 aa, Homo sapiens
MTPGRCCLAADIQVETFIFTDGEDEALARHTGNVVITNCSAAHSRQALSCKMAVEYDRFIESGRKWFCHVDDDNYVNLRALLRLLASYPHTRDVYVGKPSLDRPIQAMERVSENKVRPVHFWFATGGAGFCISRGLALKMSPWASGGHFMNTAERIRLPDDCTIGYIVEALLGVPLIRSGLFHSHLENLQQVPTSELHEQVTLSYGMFENKRNAVHVKGPFSVEADPSRFRSIHCHLYPDTPWCPRTAIF

SEQ ID NO: 7791 - protein, 250 aa, Homo sapiens; identical to SEQ ID NO: 7790

SEQ ID NO: 7792 - protein, 18 aa, Homo sapiens
MTPPRLFWVWLLVAGTQA

SEQ ID NO: 7793 - protein, 41 aa, Homo sapiens
MTPPRLFWVWLLVAGTQAPGIPSDDDLEVPGGSPGFRRERW

SEQ ID NO: 7794 - protein, 41 aa, Homo sapiens; identical to SEQ ID NO: 7793

SEQ ID NO: 7795 - protein, 62 aa, Homo sapiens
MTPPRLFWVWLLVAGTQGELSPWEIPKAEVWKAGAPWGCSELQGDILPGARGPAVSQIFSPA

SEQ ID NO: 7796 - protein, 62 aa, Homo sapiens; identical to SEQ ID NO: 7795

SEQ ID NO: 7797 - protein, 144 aa, Homo sapiens
MTPPRLFWVWLLVAGTQGSGPIMLDEVQCTGTEASLADCKSLGWLKSNCRHERDAGVVCTNETRSTHTLDLSRELSEALGQIFDSQRGCDLSISVNVQGEDALGFCGHTVILTANLEAQALWKEPGSNVTMSVDAECVPMVRDL

SEQ ID NO: 7798 - protein, 48 aa, Homo sapiens
MTPPRLFWVWLLVAGTQGVNDGDMRLADGGATNQGRVEIFYRGPWPDL

SEQ ID NO: 7799 - protein, 113 aa, Homo sapiens
MTPPRLFWVWLLVAGTQGVNDGDMRLADGGATNQGRVEIFYRGQWGTVCDNLWDLTDASVVCRALGFENATQALGRAAFGQGRACCLTGRLQVPGLAEEQLQARERRWCGLHQ

SEQ ID NO: 7800 - protein, 88 aa, Homo sapiens
MTPPRLFWVWLLVAGTQGVNDGDMRLADGGATNQGRVEIFYRGQWGTVCDNLWDLTDASVVCRALGFENATQALGRAAFGQGSGPIML

SEQ ID NO: 7801 - protein, 209 aa, Homo sapiens
MTPPRLFWVWLLVAGTQGVNDGDMRLADGGATNQGRVEIFYRGQWGTVCDNLWDLTDASVVCRALGFENATQALGRAAFGQGSGPIMLDEVQCTGTEASLADCKSLGWLKSNCRHERDAGVVCTNETRSTHTLDLSRELSEALGQIFDSQRGCDLSISVNVQGEDALGFCGHTVILTANLEAQALWKEPGSNVTMSVDAECVPMVRDLL

SEQ ID NO: 7802 - protein, 210 aa, Homo sapiens
MTPPRLFWVWLLVAGTQGVNDGDMRLADGGATNQGRVEIFYRGQWGTVCDNLWDLTDASVVCRALGFENATQALGRAAFGQGSGPIMLDEVQCTGTEASLADCKSLGWLKSNCRHERDAGVVCTNETRSTHTLDLSRELSEALGQIFDSQRGCDLSISVNVQGEDALGFCGHTVILTANLEAQALWKEPGSNVTMSVDAECVPMVRDLLR

SEQ ID NO: 7803 - protein, 585 aa, Homo sapiens
MTPPRLFWVWLLVAGTQGVNDGDMRLADGGATNQGRVEIFYRGQWGTVCDNLWDLTDASVVCRALGFENATQALGRAAFGQGSGPIMLDEVQCTGTEASLADCKSLGWLKSNCRHERDAGVVCTNETRSTHTLDLSRELSEALGQIFDSQRGCDLSISVNVQGEDALGFCGHTVILTANLEAQALWKEPGSNVTMSVDAECVPMVRDLLRYFYSRRIDITLSSVKCFHKLASAYGARQLQGYCASLFAILLPQDPSFQMPLDLYAYAVATGDALLEKLCLQFLAWNFEALTQAEAWPSVPTDLLQLLLPRSDLAVPSELALLKAVDTWSWGERASHEEVEGLVEKIRFPMMLPEELFELQFNLSLYWSHEALFQKKTLQALEFHTVPFQLLARYKGLNLTEDTYKPRIYTSPTWSAFVTDSSWSARKSQLVYQSRRGPLVKYSSDYFQAPSDYRYYPYQSFQTPQHPSFLFQDKRVSWSLVYLPTIQSCWNYGFSCSSDELPVLGLTKSGGSDRTIAYENKALMLCEGLFVADVTDFEGWKAAIPSALDTNSSKSTSSFPCPAGHFNGFRTVIRPFYLTNSSGVD

SEQ ID NO: 7804 - protein, 259 aa, Homo sapiens
MTPPRLFWVWLLVAGTQGVNDGDMRLADGGATNQGRVEIFYRGQWGTVCDNLWDLTDASVVCRALGFENATQALGRAAFGQGSGPIMLDEVQCTGTEASLADCKSLGWLKSNCRHERDAGVVCTNETRSTHTLDLSRELSEALGQIFDSQRGCDLSISVNVQGEDALGFCGHTVILTANLEAQALWKEPGSNVTMSVDAECVPMVRDLLRYFYSRRIDITLSSVKCFHKLASAYGARQLQGYCASLFAILLPQDPSFQM

SEQ ID NO: 7805 - protein, 131 aa, Homo sapiens
MTPPRLFWVWLLVAGTQGVNDGDMRLADGGATNQGRVEIFYRGQWGTVCDNLWDLTDASVVCRALGFENATQALGRAAFGQGSGPIMLDEVQCTGTEASLADCKSLGWLKSNCRHERDAGVVCTNGAFQSE

SEQ ID NO: 7806 - protein, 205 aa, Homo sapiens
MTPPRLFWVWLLVAGTQGVNDGDMRLADGGATNQGRVEIFYRGQWGTVCDNLWDLTDASVVCRALGFENATQALGRAAFGQGSGPIMLDEVQCTGTEASLADCKSLGWLKSNCRHERDAGVVCTNGTSTPEGLTSPCRQSSASTSWPLPMGPGSCRATAQASLPSSSPRTPRSRCPWTCMPMQWPQGTPCWRSSAYSSWPGTSRP

SEQ ID NO: 7807 - protein, 52 aa, Homo sapiens
MESERSKRMGNACIPLKRIAYFLCLLSALLLTEGKKPAKPKCPAILCEIWFY

SEQ ID NO: 7808 - protein, 72 aa, Homo sapiens
MESERSKRMGNACIPLKRIAYFLCLLSALLLTEGKKPAKPKCPAVCTCTKDNALCENARSIPRTVPPDVISL

SEQ ID NO: 7809 - protein, 72 aa, Homo sapiens; identical to SEQ ID NO: 7808

SEQ ID NO: 7810 - protein, 72 aa, Homo sapiens; identical to SEQ ID NO: 7808

SEQ ID NO: 7811 - protein, 72 aa, Homo sapiens; identical to SEQ ID NO: 7808

SEQ ID NO: 7812 - protein, 72 aa, Homo sapiens; identical to SEQ ID NO: 7808

SEQ ID NO: 7813 - protein, 533 aa, Homo sapiens
MESERSKRMGNACIPLKRIAYFLCLLSALLLTEGKKPAKPKCPAVCTCTKDNALCENARSIPRTVPPDVISLLFTSNSFDVISDDAFIGLPHLEYLFIENNNIKSISRHTFRGLKSLIHLSLANNNLQTLPKDIFKGLDSLTNVDLRGNSFNCDCKLKWLVEWLGHTNATVEDIYCEGPPEYKKRKINSLSSKDFDCIITEFAKSQDLPYQSLSIDTFSYLNDEYVVIAQPFTGKCIFLEWDHVEKTFRNYDNITGTSTVVCKPIVIETQLYVIVAQLFGGSHIYKRDSFANKFIKIQDIEILKIRKPNDIETFKIENNWYFVVADSSKAGFTTIYKWNGNGFYSHQSLHAWYRDTDVEYLEIVRTPQTLRTPHLILSSSSQRPVIYQWNKATQLFTNQTDIPNMEDVYAVKHFSVKGDVYICLTRFIGDSKVMKWGGSSFQDIQRMPSRGSMVFQPLQINNYQYAILGSDYSFTQVYNWDAEKAKFVKFQELNVQAPRSFTHVSINKRNFLFASSFKGNTQIYKHVIVDLSA

SEQ ID NO: 7814 - protein, 96 aa, Homo sapiens
MESERSKRMGNACIPLKRIAYFLCLLSALLLTEGKKPAKPKCPAVCTCTKDNALCENARSIPRTVPPDVISLSFVRSGFTEISEGSFLFTPSLQLL

SEQ ID NO: 7815 - protein, 96 aa, Homo sapiens; identical to SEQ ID NO: 7814

SEQ ID NO: 7816 - protein, 236 aa, Homo sapiens
MESERSKRMGNACIPLKRIAYFLCLLSALLLTEGKKPAKPKCPAVCTCTKDNALCENARSIPRTVPPDVISLSFVRSGFTEISEGSFLFTPSLQLLLFTSNSFDVISDDAFIGLPHLEYLFIENNNIKSISRHTFRGLKSLIHLFRETQTQAENLHCRGAGAPQMAVGDAFLAAEPGGTETNAVFEPVWSALERRLSSGFHSHNRRFSWVNDENTKGQEMVIISVKKEWPSAFENT

SEQ ID NO: 7817 - protein, 151 aa, Homo sapiens
MESERSKRMGNACIPLKRIAYFLCLLSALLLTEGKKPAKPKCPAVCTCTKDNALCENARSIPRTVPPDVISLSFVRSGFTEISEGSFLFTPSLQLLLFTSNSFDVISDDAFIGLPHLEYLFIENNNIKSISRHTFRGLKSLIHLRDGVGRI

SEQ ID NO: 7818 - protein, 168 aa, Homo sapiens
MESERSKRMGNACIPLKRIAYFLCLLSALLLTEGKKPAKPKCPAVCTCTKDNALCENARSIPRTVPPDVISLSFVRSGFTEISEGSFLFTPSLQLLLFTSNSFDVISDDAFIGLPHLEYLFIENNNIKSISRHTFRGLKSLIHLSLANNNLQTLPKDIFKGLDSLTNV

SEQ ID NO: 7819 - protein, 168 aa, Homo sapiens; identical to SEQ ID NO: 7818

SEQ ID NO: 7820 - protein, 557 aa, Homo sapiens
MESERSKRMGNACIPLKRIAYFLCLLSALLLTEGKKPAKPKCPAVCTCTKDNALCENARSIPRTVPPDVISLSFVRSGFTEISEGSFLFTPSLQLLLFTSNSFDVISDDAFIGLPHLEYLFIENNNIKSISRHTFRGLKSLIHLSLANNNLQTLPKDIFKGLDSLTNVDLRGNSFNCDCKLKWLVEWLGHTNATVEDIYCEGPPEYKKRKINSLSSKDFDCIITEFAKSQDLPYQSLSIDTFSYLNDEYVVIAQPFTGKCIFLEWDHVEKTFRNYDNITGTSTVVCKPIVIETQLYVIVAQLFGGSHIYKRDSFANKFIKIQDIEILKIRKPNDIETFKIENNWYFVVADSSKAGFTTIYKWNGNGFYSHQSLHAWYRDTDVEYLEIVRTPQTLRTPHLILSSSSQRPVIYQWNKATQLFTNQTDIPNMEDVYAVKHFSVKGDVYICLTRFIGDSKVMKWGGSSFQDIQRMPSRGSMVFQPLQINNYQYAILGSDYSFTQVYNWDAEKAKFVKFQELNVQAPRSFTHVSINKRNFLFASSFKGNTQIYKHVIVDLSA

SEQ ID NO: 7821 - protein, 291 aa, Homo sapiens
MESERSKRMGNACIPLKRIAYFLCLLSALLLTEGKKPAKPKCPAVCTCTKDNALCENARSIPRTVPPDVISLSFVRSGFTEISEGSFLFTPSLQLLLFTSNSFDVISDDAFIGLPHLEYLFIENNNIKSISRHTFRGLKSLIHLSLANNNLQTLPKDIFKGLDSLTNVDLRGNSFNCDCKLKWLVEWLGHTNATVEDIYCEGPPEYKKRKINSLSSKDFDCIITEFAKSQDLPYQSLSIDTFSYLNDEYVVIAQPFTGKCIFLEWDHVEKTFRNYDNITVLREIHRFTNMS

SEQ ID NO: 7822 - protein, 287 aa, Homo sapiens
MESERSKRMGNACIPLKRIAYFLCLLSALLLTEGKKPAKPKCPAVCTCTKDNALCENARSIPRTVPPDVISLSFVRSGFTEISEGSFLFTPSLQLLLFTSNSFDVISDDAFIGLPHLEYLFIENNNIKSISRHTFRGLKSLIHLSLANNNLQTLPKDIFKGLDSLTNVDLRGNSFNCDCKLKWLVEWLGHTNATVEDIYCEGPPEYKKRKINSLSSKDFDCIITEFAKSQDLPYQSLSIDTFSYLNDEYVVIAQPFTGKCIFLEWDHVEKTFRNYDNITGQSCWCPQ

SEQ ID NO: 7823 - protein, 281 aa, Homo sapiens
MESERSKRMGNACIPLKRIAYFLCLLSALLLTEGKKPAKPKCPAVCTCTKDNALCENARSIPRTVPPDVISLSFVRSGFTEISEGSFLFTPSLQLLLFTSNSFDVISDDAFIGLPHLEYLFIENNNIKSISRHTFRGLKSLIHLSLANNNLQTLPKDIFKGLDSLTNVDLRGNSFNCDCKLKWLVEWLGHTNATVEDIYCEGPPEYKKRKINSLSSKDFDCIITEFAKSQDLPYQSLSIDTFSYLNDEYVVIAQPFTGKCIFLEWDHVEKTFRNYDNITGS

SEQ ID NO: 7824 - protein, 509 aa, Homo sapiens
MESERSKRMGNACIPLKRIAYFLCLLSALLLTEGKKPAKPKCPAVCTCTKDNALCENARSIPRTVPPDVISLSFVRSGFTEISEGSFLFTPSLQLLSLANNNLQTLPKDIFKGLDSLTNVDLRGNSFNCDCKLKWLVEWLGHTNATVEDIYCEGPPEYKKRKINSLSSKDFDCIITEFAKSQDLPYQSLSIDTFSYLNDEYVVIAQPFTGKCIFLEWDHVEKTFRNYDNITGTSTVVCKPIVIETQLYVIVAQLFGGSHIYKRDSFANKFIKIQDIEILKIRKPNDIETFKIENNWYFVVADSSKAGFTTIYKWNGNGFYSHQSLHAWYRDTDVEYLEIVRTPQTLRTPHLILSSSSQRPVIYQWNKATQLFTNQTDIPNMEDVYAVKHFSVKGDVYICLTRFIGDSKVMKWGGSSFQDIQRMPSRGSMVFQPLQINNYQYAILGSDYSFTQVYNWDAEKAKFVKFQELNVQAPRSFTHVSINKRNFLFASSFKGNTQIYKHVIVDLSA

SEQ ID NO: 7825 - protein, 100 aa, Homo sapiens
MKWGGSSFQDIQRMPSRGSMVFQPLQINNYQYAILGSDYSFTQVYNWDAEKAKFVKFQELNVQAPRSFTHVSINKRNFLFASSFKGNTQIYKHVIVDLSA

SEQ ID NO: 7826 - protein, 545 aa, Homo sapiens
MALRRGGCGALGLLLLLLGAACLIPRSAQVRRLARCPATCSCTKESIICVGSSWVPRIVPGDISSLSLVNGTFSEIKDRMFSHLPSLQLLLLNSNSFTIIRDDAFAGLFHLEYLFIEGNKIETISRNAFRGLRDLTHLSLANNHIKALPRDVFSDLDSLIELDLRGNKFECDCKAKWLYLWLKMTNSTVSDVLCIGPPEYQEKKLNDVTSFDYECTTTDFVVHQTLPYQSVSVDTFNSKNDVYVAIAQPSMENCMVLEWDHIEMNFRSYDNITGQSIVGCKAILIDDQVFVVVAQLFGGSHIYKYDESWTKFVKFQDIEVSRISKPNDIELFQIDDETFFVIADSSKAGLSTVYKWNSKGFYSYQSLHEWFRDTDAEFVDIDGKSHLILSSRSQVPIILQWNKSSKKFVPHGDIPNMEDVLAVKSFRMQNTLYLSLTRFIGDSRVMRWNSKQFVEIQALPSRGAMTLQPFSFKDNHYLALGSDYTFSQIYQWDKEKQLFKKFKEIYVQAPRSFTAVSTDRRDFFFASSFKGKTKIFEHIIVDLSL

SEQ ID NO: 7827 - protein, 256 aa, Homo sapiens
  VARIANT 1: note = misc_feature - Xaa can be any naturally occurring amino acid
XLGLLLLLLGAACLIPRSAQVRRLARCPATCSCTKESIICVGSSWVPRIVPGDISSLSLVNGTFSEIKDRMFSHLPSLQLLLLNSNSFTIIRDDAFAGLFHLEYLFIEGNKIETISRNAFRGLRDLTHLSLANNHIKALPRDVFSDLDSLIELDLRGNKFECDCKAKWLYLWLKMTNSTVSDVLCIGPPEYQEKKLNDVTSFDYECTTTDKQEEICEGKIQNLNARVVMNCSRPSSAFRKHTGNGRVAFFLPHGVR

SEQ ID NO: 7828 - protein, 134 aa, Homo sapiens
MAGLRARGGPGPGLLALSALGFCLMLQVSAKRPPKTPPCPPSCSCTRDTAFCVDSKAVPRNLPSEVISLTALADPTVLTRVSPQDPGECRLLRDPGWSVLPPPAAAVLVTQLQQVYTDWRQRLHRTVAPAVSLH

SEQ ID NO: 7829 - protein, 548 aa, Homo sapiens
MAGLRARGGPGPGLLALSALGFCLMLQVSAKRPPKTPPCPPSCSCTRDTAFCVDSKAVPRNLPSEVISLTLVNAAFSEIQDGAFSHLPLLQFLLLNSNKFTLIGDNAFTGLSHLQYLFIENNDIWALSKFTFRGLKSLTHLSLANNNLQTLPRDIFRPLDILNDLDLRGNSLNCDCKVKWLVEWLAHTNTTVAPIYCASPPRFQEHKVQDLPLREFDCITTDFVLYQTLAFPAVSAEPFLYSSDLYLALAQPGVSACTILKWDYVERQLRDYDRIPAPSAVHCKPMVVDSQLYVVVAQLFGGSYIYHWDPNTTRFTRLQDIDPQRVRKPNDLEAFRIDGDWYFAVADSSKAGATSLYRWHQNGFYSHQALHPWHRDTDLEFVDGEGKPRLIVSSSSQAPVIYQWSRTQKQFVAQGEVTQVPDAQAVKHFRAGRDSYLCLSRYIGDSKILRWEGTRFSEVQALPSRGSLALQPFLVGGRRYLALGSDFSFTQIYQWDEGRQKFVRFQELAVQAPRAFCYMPAGDAQLLLAPSFKGQTLVYRHIVVDLSA

SEQ ID NO: 7830 - protein, 524 aa, Homo sapiens
MAGLRARGGPGPGLLALSALGFCLMLQVSAKRPPKTPPCPPSCSCTRDTAFCVDSKAVPRNLPSEVISLTLVNAAFSEIQDGAFSHLPLLQFLLLNSNKFTLIGDNAFTGLSHLQYLSLANNNLQTLPRDIFRPLDILNDLDLRGNSLNCDCKVKWLVEWLAHTNTTVAPIYCASPPRFQEHKVQDLPLREFDCITTDFVLYQTLAFPAVSAEPFLYSSDLYLALAQPGVSACTILKWDYVERQLRDYDRIPAPSAVHCKPMVVDSQLYVVVAQLFGGSYIYHWDPNTTRFTRLQDIDPQRVRKPNDLEAFRIDGDWYFAVADSSKAGATSLYRWHQNGFYSHQALHPWHRDTDLEFVDGEGKPRLIVSSSSQAPVIYQWSRTQKQFVAQGEVTQVPDAQAVKHFRAGRDSYLCLSRYIGDSKILRWEGTRFSEVQALPSRGSLALQPFLVGGRRYLALGSDFSFTQIYQWDEGRQKFVRFQELAVQAPRAFCYMPAGDAQLLLAPSFKGQTLVYRHIVVDLSA

SEQ ID NO: 7831 - protein, 198 aa, Homo sapiens
MCPCRDRTLVNAAFSEIQDGAFSHLPLLQFLLLNSNKFTLIGDNAFTGLSHLQYLFIENNDIWALSKFTFRGLKSLTHLSLANNNLQTLPRDIFRPLDILNDLDLRGNSLNCDCKVKWLVEWLAHTNTTVAPIYCASPPRFQEHKVQDLPLREFDCITTDFVLYQTLAFPAVSAEPFLYSSDLYLALAQPGVSACTIL

SEQ ID NO: 7832 - protein, 537 aa, Homo sapiens
MGGAGILLLLLAGAGVVVAWRPPKGKCPLRCSCSKDSALCEGSPDLPVSFSPTLLSLSLVRTGVTQLKAGSFLRIPSLHLLLFTSNSFSVIEDDAFAGLSHLQYLFIEDNEIGSISKNALRGLRSLTHLSLANNHLETLPRFLFRGLDTLTHVDLRGNPFQCDCRVLWLLQWMPTVNASVGTGACAGPASLSHMQLHHLDPKTFKCRAIELSWFQTVGESALSVEPFSYQGEPHIVLAQPFAGRCLILSWDYSLQRFRPEEELPAASVVSCKPLVLGPSLFVLAARLWGGSQLWARPSPGLRLAPTQTLAPRRLLRPNDAELLWLEGQPCFVVADASKAGSTTLLCRDGPGFYPHQSLHAWHRDTDAEALELDGRPHLLLASASQRPVLFHWTGGRFERRTDIPEAEDVYATRHFQAGGDVFLCLTRYIGDSMVMRWDGSMFRLLQQLPSRGAHVFQPLLIARDQLAILGSDFAFSQVLRLEPDKGLLEPLQELGPPALVAPRAFAHITMAGRRFLFAACFKGPTQIYQHHEIDLSA

SEQ ID NO: 7833 - protein, 494 aa, Homo sapiens
MGGAGILLLLLAGAGVVVAWRPPKGKCPLRCSCSKDSALCEGSPDLPVSFSPTLLSLSLVRTGVTQLKAGSFLRIPSLHLLLFTSNSFSVIEDDAFAGLSHLQYLFIEDNEIGSISKNALRGLRSLTHLSLANNHLETLPRFLFRGLDTLTHVDLRGNPFQCDCRVLWLLQWMPTVNASVGTGACAGPASLSHMQLHHLDPKTFKCRAIELSWFQTVGESALSVEPFSYQGEPHIVLAQPFAGRCLILSWDYSLQRFRPEEELPGEPPPRPSACPAACLAGLTCLPTSPQRPPWCPASHWCWARASSCWLPACGGAHSCGPGPVPACAWPQRRPWPRGGCCGPMTPSSCGWKGNPASWWPMPPRRAAPRCCAATGPAFTRTRACTPGTGTRTLRPWSWTAGPTCCWPRLPSGPCSSTGPVAASRDAQTSPRPRMSMPHATSRLVGTCSCASHATLGTPWSCAGTAPCFVCCSNFPRAVPTSSSHCSSPGTSWPS

SEQ ID NO: 7834 - protein, 261 aa, Homo sapiens
MGGAGILLLLLAGAGVVVAWRPPKGKCPLRCSCSKDSALCEGSPDLPVSFSPTLLSLSLVRTGVTQLKAGSFLRIPSLHLLLFTSNSFSVIEDDAFAGLSHLQYLFIEDNEIGSISKNALRGLRSLTHLSLANNHLETLPRFLFRGLDTLTHVDLRGNPFQCDCRVLWLLQWMPTVNASVGTGACAGPASLSHMQLHHLDPKTFKCRAIGGGLSRWGGRREIWGKGCQGQEARLTPCPAISRSGKTLSKQHCLPEPQFSHL

SEQ ID NO: 7835 - protein, 378 aa, Homo sapiens
  VARIANT 1: note = misc_feature - Xaa can be any naturally occurring amino acid
XVIEDDAFAGLSHLQYLFIEDNEIGSISKNALRGLRSLTHLSLANNHLETLPRFLFRGLDTLTHVDLRGNPFQCDCRVLWLLQWMPTVNASVGTGACAGPASLSHMQLHHLDPKTFKCRAIELSWFQTVGESALSVEPFSYQGEPHIVLAQPFAGRCLILSWDYSLQRFRPEEELPAASVVSCKPLVLGPSLFVLAARLWGGSQLWARPSPGLRLAPTQTLAPRRLLRPNDAELLWLEGQPCFVVADASKAGSTTLLCRDGPGFYPHQSLHAWHRDTDAEALELDGRPHLLLASASQRPVLFHWTGGRFERRTDIPEAEDVYATRHFQAGGDVFLCLTRYIGDSMVRLGLGAGGWLFSTDPILHTKPLNSDLPSHADL

SEQ ID NO: 7836 - protein, 19 aa, Homo sapiens
MVWKVAVFLSVALGIGAVP

SEQ ID NO: 7837 - protein, 57 aa, Homo sapiens
MVWKVAVFLSVALGIGAVPIDDPEDGGKHWVVIVAGSNGWYNYRHQADACHAYQIIH

SEQ ID NO: 7838 - protein, 58 aa, Homo sapiens
MVWKVAVFLSVALGIGAVPIDDPEDGGKHWVVIVAGSNGWYNYRHQADACHAYQIIHR

SEQ ID NO: 7839 - protein, 135 aa, Homo sapiens
MVWKVAVFLSVALGIGAVPIDDPEDGGKHWVVIVAGSNGWYNYRHQADACHAYQIIHRNGIPDEQIVVMINPTPGIVINRPNGTDVYQGVPKDYTGEDVTPQNFLAVLRGDAEAVKGIGSGKVLKSGPQDHVFIY

SEQ ID NO: 7840 - protein, 78 aa, Homo sapiens
MVWKVAVFLSVALGIGAVPIDDPEDGGKHWVVIVAGSNGWYNYRHQADACHAYQIIHRNGIPDEQIVVMMYDDIAYSE

SEQ ID NO: 7841 - protein, 78 aa, Homo sapiens; identical to SEQ ID NO: 7840

SEQ ID NO: 7842 - protein, 223 aa, Homo sapiens
MVWKVAVFLSVALGIGAVPIDDPEDGGKHWVVIVAGSNGWYNYRHQADACHAYQIIHRNGIPDEQIVVMMYDDIAYSEDNPTPGIVINRPNGTDVYQGVPKDYTGEDVTPQNFLAVLRGDAEAVKGIGSGKVLKSGPQDHVFIYFTDHGSTGILVFPNEDLHVKDLNETIHYMYKHKMYRKMVFYIEACESGSMMNHLPDNINGRWLGRRPRPGLASRLLRHR

SEQ ID NO: 7843 - protein, 433 aa, Homo sapiens
MVWKVAVFLSVALGIGAVPIDDPEDGGKHWVVIVAGSNGWYNYRHQADACHAYQIIHRNGIPDEQIVVMMYDDIAYSEDNPTPGIVINRPNGTDVYQGVPKDYTGEDVTPQNFLAVLRGDAEAVKGIGSGKVLKSGPQDHVFIYFTDHGSTGILVFPNEDLHVKDLNETIHYMYKHKMYRKMVFYIEACESGSMMNHLPDNINVYATTAANPRESSYACYYDEKRSTYLGDWYSVNWMEDSDVEDLTKETLHKQYHLVKSHTNTSHVMQYGNKTISTMKVMQFQGMKRKASSPVPLPPVTHLDLTPSPDVPLTIMKRKLMNTNDLEESRQLTEEIQRHLDARHLIEKSVRKIVSLLAASEAEVEQLLSERAPLTGHSCYPEALLHFRTHCFNWHSPTYEYALRHLYVLVNLCEKPYPLHRIKLSMDHVCLGHY

SEQ ID NO: 7844 - protein, 433 aa, Homo sapiens; identical to SEQ ID NO: 7843

SEQ ID NO: 7845 - protein, 376 aa, Homo sapiens
MVWKVAVFLSVALGIGAVPIDDPEDGGKHWVVIVAGSNGWYNYRHQADACHAYQIIHRNGIPDEQIVVMMYDDIAYSEDNPTPGIVINRPNGTDVYQGVPKDYTGEDVTPQNFLAVLRGDAEAVKGIGSGKVLKSGPQDHVFIYFTDHGSTGILVFPNEDLHVKDLNETIHYMYKHKMYRKMVFYIEACESGSMMNHLPDNINVYATTAANPRESSYACYYDEKRSTYLGDWYSVNWMEDSDVEDLTKETLHKQYHLVKSHTNTSHVMQYGNKTISTMKVMQFQGMKRKASSPVPLPPVTHLDLTPSPDVPLTIMKRKLMNTNDLEESRQLTEEIQRHLDYEYALRHLYVLVNLCEKPYPLHRIKLSMDHVCLGHY

SEQ ID NO: 7846 - protein, 372 aa, Homo sapiens
MVWKVAVFLSVALGIGAVPIDDPEDGGKHWVVIVAGSNGWYNYRHQADACHAYQIIHRNGIPDEQIVVMMYDDIAYSEDNPTPGIVINRPNGTDVYQGVPKDYTGEDVTPQNFLAVLRGDAEAVKGIGSGKVLKSGPQDHVFIYFTDHGSTGILVFPNEDLHVKDLNETIHYMYKHKMYRKMVFYIEACESGSMMNHLPDNINVYATTAANPRESSYACYYDEKRSTYLGDWYSVNWMEDSDVEDLTKETLHKQYHLVKSHTNTSHVMQYGNKTISTMKVMQFQGMKRKASSPVPLPPVTHLDLTPSPDVPLTIMKRKLMNTNDLEESRQLTEEIQRHLDDKIVHGPRVPWSLLKSCLLEAFPSVSAPPTVC

SEQ ID NO: 7847 - protein, 117 aa, Homo sapiens
MVWKVAVFLSVALGIGAVPIDDPEDGGKHWVVIVAGSNGWYNYRHQADACHAYQIIHRNGIPDEQIVVMMYDDIAYSEDNPTPGIVINRPNGTDVYQGVPKDYTGEWPPGSRVHLLH

SEQ ID NO: 7848 - protein, 48 aa, Homo sapiens
MVWKVAVFLSVALGIGAVPIDDPEDGGKHWVVIVAGSNGWYNYRHQEL

SEQ ID NO: 7849 - protein, 91 aa, Homo sapiens
  VARIANT 1: note = misc_feature - Xaa can be any naturally occurring amino acid
XPTPGIVINRPNGTDVYQGVPKDYTGEDVTPQNFLAVLRGGVRSLRCSGPPGEPPLQGSLQDLLHKMTCSLLPASPVFSEKLQIRVGKALY

SEQ ID NO: 7850 - protein, 951 aa, Homo sapiens
MPGPLGLLCFLALGLLGSAGPSGAAPPLCAAPCSCDGDRRVDCSGKGLTAVPEGLSAFTQALDISMNNITQLPEDAFKNFPFLEELQLAGNDLSFIHPKALSGLKELKVLTLQNNQLKTVPSEAIRGLSALQSLRLDANHITSVPEDSFEGLVQLRHLWLDDNSLTEVPVHPLSNLPTLQALTLALNKISSIPDFAFTNLSSLVVLHLHNNKIRSLSQHCFDGLDNLETLDLNYNNLGEFPQAIKALPSLKELGFHSNSISVIPDGAFDGNPLLRTIHLYDNPLSFVGNSAFHNLSDLHSLVIRGASMVQQFPNLTGTVHLESLTLTGTKISSIPNNLCQEQKMLRTLDLSYNNIRDLPSFNGCHALEEISLQRNQIYQIKEGTFQGLISLRILDLSRNLIHEIHSRAFATLGPITNLDVSFNELTSFPTEGLNGLNQLKLVGNFKLKEALAAKDFVNLRSLSVPYAYQCCAFWGCDSYANLNTEDNSLQDHSVAQEKGTADAANVTSTLENEEHSQIIIHCTPSTGAFKPCEYLLGSWMIRLTVWFIFLVALFFNLLVILTTFASCTSLPSSKLFIGLISVSNLFMGIYTGILTFLDAVSWGRFAEFGIWWETGSGCKVAGFLAVFSSESAIFLLMLATVERSLSAKDIMKNGKSNHLKQFRVAALLAFLGATVAGCFPLFHRGEYSASPLCLPFPTGETPSLGFTVTLVLLNSLAFLLMAVIYTKLYCNLEKEDLSENSQSSMIKHVAWLIFTNCIFFCPVAFFSFAPLITAISISPEIMKSVTLIFFPLPACLNPVLYVFFNPKFKEDWKLLKRRVTKKSGSVSVSISSQGGCLEQDFYYDCGMYSHLQGNLTVCDCCESFLLTKPVSCKHLIKSHSCPALAVASCQRPEGYWSDCGTQSAHSDYADEEDSFVSDSSDQVQACGRACFYQSRGFPLVRYAYNLPRVKD

SEQ ID NO: 7851 - protein, 158 aa, Homo sapiens
MPGPLGLLCFLALGLLGSAGPSGAAPPLCAAPCSCDGDRRVDCSGKGLTAVPEGLSAFTQALDISMNNITQLPEDAFKNFPFLEELRLDANHITSVPEDSFEGLVQLRHLWLDDNSLTEVPVHPLSNLPTLQALTLALNKISSIPDFAFTNLSSLVVL

SEQ ID NO: 7852 - protein, 927 aa, Homo sapiens
MPGPLGLLCFLALGLLGSAGPSGAAPPLCAAPCSCDGDRRVDCSGKGLTAVPEGLSAFTQALQLAGNDLSFIHPKALSGLKELKVLTLQNNQLKTVPSEAIRGLSALQSLRLDANHITSVPEDSFEGLVQLRHLWLDDNSLTEVPVHPLSNLPTLQALTLALNKISSIPDFAFTNLSSLVVLHLHNNKIRSLSQHCFDGLDNLETLDLNYNNLGEFPQAIKALPSLKELGFHSNSISVIPDGAFDGNPLLRTIHLYDNPLSFVGNSAFHNLSDLHSLVIRGASMVQQFPNLTGTVHLESLTLTGTKISSIPNNLCQEQKMLRTLDLSYNNIRDLPSFNGCHALEEISLQRNQIYQIKEGTFQGLISLRILDLSRNLIHEIHSRAFATLGPITNLDVSFNELTSFPTEGLNGLNQLKLVGNFKLKEALAAKDFVNLRSLSVPYAYQCCAFWGCDSYANLNTEDNSLQDHSVAQEKGTADAANVTSTLENEEHSQIIIHCTPSTGAFKPCEYLLGSWMIRLTVWFIFLVALFFNLLVILTTFASCTSLPSSKLFIGLISVSNLFMGIYTGILTFLDAVSWGRFAEFGIWWETGSGCKVAGFLAVFSSESAIFLLMLATVERSLSAKDIMKNGKSNHLKQFRVAALLAFLGATVAGCFPLFHRGEYSASPLCLPFPTGETPSLGFTVTLVLLNSLAFLLMAVIYTKLYCNLEKEDLSENSQSSMIKHVAWLIFTNCIFFCPVAFFSFAPLITAISISPEIMKSVTLIFFPLPACLNPVLYVFFNPKFKEDWKLLKRRVTKKSGSVSVSISSQGGCLEQDFYYDCGMYSHLQGNLTVCDCCESFLLTKPVSCKHLIKSHSCPALAVASCQRPEGYWSDCGTQSAHSDYADEEDSFVSDSSDQVQACGRACFYQSRGFPLVRYAYNLPRVKD

SEQ ID NO: 7853 - protein, 141 aa, Homo sapiens
MEMLQGLLLLLLLSMGGAWASREPLRPWCHPINAILAVEKEGCPVCITVNTTICAGYCPTMMRVLQAVLPPLPQVVCTYRDVRFESIRLPGCPRGVDPVVSFPVALSCRCGPCRRSTSDCGGPKDHPLTCDHPQLSGLLFL

SEQ ID NO: 7854 - protein, 699 aa, Homo sapiens
MKQRFSALQLLKLLLLLQPPLPRALREALCPEPCNCVPDGALRCPGPTAGLTRLSLAYLPVKVIPSQAFRGLNEVIKIEISQIDSLERIEANAFDNLLNLSEILIQNTKNLRYIEPGAFINLPRLKYLSICNTGIRKFPDVTKVFSSESNFILEICDNLHITTIPGNAFQGMNNESVTLKLYGNGFEEVQSHAFNGTTLTSLELKENVHLEKMHNGAFRGATGPKTLDISSTKLQALPSYGLESIQRLIATSSYSLKKLPSRETFVNLLEATLTYPSHCCAFRNLPTKEQNFSHSISENFSKQCESTVRKVNNKTLYSSMLAESELSGWDYEYGFCLPKTPRCAPEPDAFNPCEDIMGYDFLRVLIWLINILAIMGNMTVLFVLLTSRYKLTVPRFLMCNLSFADFCMGLYLLLIASVDSQTKGQYYNHAIDWQTGSGCSTAGFFTVFASELSVYTLTVITLERWHTITYAIHLDQKLRLRHAILIMLGGWLFSSLIAMLPLVGVSNYMKVSICFPMDVETTLSQVYILTILILNVVAFFIICACYIKIYFAVRNPELMATNKDTKIAKKMAILIFTDFTCMAPISFFAISAAFKVPLITVTNSKVLLVLFYPINSCANPFLYAIFTKTFQRDFFLLLSKFGCCKRRAELYRRKDFSAYTSNCKNGFTGSNKPSQSTLKLSTLHCQGTALLDKTRYTEC

SEQ ID NO: 7855 - protein, 672 aa, Homo sapiens
MKQRFSALQLLKLLLLLQPPLPRALREALCPEPCNCVPDGALRCPGPTAGLTRLSLAYLPVKVIPSQAFRGLNEVIKIEISQIDSLERIEANAFDNLLNLSEILIQNTKNLRYIEPGAFINLPRLKYLSICNTGIRKFPDVTKVFSSESNFILEICDNLHITTIPGNAFQGMNNESVTLKLYGNGFEEVQSHAFNGTTLTSLELKENVHLEKMHNGAFRGATGPKTLDISSTKLQALPSYGLESIQRLIATSSYSLKKLPSRETFVNLLEATLTYPSHCCAFRNLPTKDYSSMLAESELSGWDYEYGFCLPKTPRCAPEPDAFNPCEDIMGYDFLRVLIWLINILAIMGNMTVLFVLLTSRYKLTVPRFLMCNLSFADFCMGLYLLLIASVDSQTKGQYYNHAIDWQTGSGCSTAGFFTVFASELSVYTLTVITLERWHTITYAIHLDQKLRLRHAILIMLGGWLFSSLIAMLPLVGVSNYMKVSICFPMDVETTLSQVYILTILILNVVAFFIICACYIKIYFAVRNPELMATNKDTKIAKKMAILIFTDFTCMAPISFFAISAAFKVPLITVTNSKVLLVLFYPINSCANPFLYAIFTKTFQRDFFLLLSKFGCCKRRAELYRRKDFSAYTSNCKNGFTGSNKPSQSTLKLSTLHCQGTALLDKTRYTEC

SEQ ID NO: 7856 - protein, 325 aa, Homo sapiens
MKQRFSALQLLKLLLLLQPPLPRALREALCPEPCNCVPDGALRCPGPTAGLTRLSLAYLPVKVIPSQAFRGLNEVIKIEISQIDSLERIEANAFDNLLNLSEILIQNTKNLRYIEPGAFINLPRLKYLSICNTGIRKFPDVTKVFSSESNFILEICDNLHITTIPGNAFQGMNNESVTLKLYGNGFEEVQSHAFNGTTLTSLELKENVHLEKMHNGAFRGATGPKTLDISSTKLQALPSYGLESIQRLIATSSYSLKKLPSRETFVNLLEATLTYPSHCCAFRNLPTKEQNFSHSISENFSKQCESTVRKVNNKTLSKPRINGYQ

SEQ ID NO: 7857 - protein, 329 aa, Homo sapiens
MKQRFSALQLLKLLLLLQPPLPRALREALCPEPCNCVPDGALRCPGPTAGLTRLSLAYLPVKVIPSQAFRGLNEVIKIEISQIDSLERIEANAFDNLLNLSEILIQNTKNLRYIEPGAFINLPRLKYLSICNTGIRKFPDVTKVFSSESNFILEICDNLHITTIPGNAFQGMNNESVTLKLYGNGFEEVQSHAFNGTTLTSLELKENVHLEKMHNGAFRGATGPKTLDISSTKLQALPSYGLESIQRLIATSSYSLKKLPSRETFVNLLEATLTYPSHCCAFRNLPTKEQNFSHSISENFSKQCESTVRKVNNKTLLLHGALSAAHSLS

SEQ ID NO: 7858 - protein, 175 aa, Homo sapiens
NCVPDGALRCPGPTAGLTRLSLAYLPVKVIPSQAFRGLNEVIKIEISQIDSLERIEANAFDNLLNLSEILIQNTKNLRYIEPGAFINLPRLKYLSICNTGIRKFPDVTKVFSSESNFILEICDNLHITTIPGNAFQGMNNESVTLPWQNCDEAIKELTLKEKRENMDWNDSEMKR

SEQ ID NO: 7859 - protein, 202 aa, Homo sapiens
MKVLAAGVVPLLLVLHWKHGAGSPLPITPVNATCAIRHPCHNNLMNQIRSQLAQLNGSANALFILYYTAQGEPFPNNLDKLCGPNVTDFPPFHANGTEKAKLVELYRIVVYLGTSLGNITRDQKILNPSALSLHSKLNATADILRGLLSNVLCRLCSKYHVGHVDVTYGPDTSGKDVFQKKKLGCQLLGKYKQIIAVLAQAF

SEQ ID NO: 7860 - protein, 88 aa, Homo sapiens
MKVLAAVHSPGGAVPQQPGQAMWPQRDGLPALPRQRHGEGQAGGAVPHSRVPWHLPGQHHPGPEDPQPQCPQPPQQAQRHRRHPARPP

SEQ ID NO: 7861 - protein, 75 aa, Homo sapiens
MMDIYVCLKRPSWMVDNKRMRTASNFQWLLSTFILLYLMNQVNSQKKGAPHDLKCVTNNLQVWNCSWKAPSGTGR

SEQ ID NO: 7862 - protein, 126 aa, Homo sapiens
MMDIYVCLKRPSWMVDNKRMRTASNFQWLLSTFILLYLMNQVNSQKKGAPHDLKCVTNNLQVWNCSWKAPSGTGRGTDYEVCIENRSRSCYQLEKTSIKIPALSHGDYEITINSLHDFGSSTSKFT

SEQ ID NO: 7863 - protein, 1097 aa, Homo sapiens
MMDIYVCLKRPSWMVDNKRMRTASNFQWLLSTFILLYLMNQVNSQKKGAPHDLKCVTNNLQVWNCSWKAPSGTGRGTDYEVCIENRSRSCYQLEKTSIKIPALSHGDYEITINSLHDFGSSTSKFTLNEQNVSLIPDTPEILNLSADFSTSTLYLKWNDRGSVFPHRSNVIWEIKVLRKESMELVKLVTHNTTLNGKDTLHHWSWASDMPLECAIHFVEIRCYIDNLHFSGLEEWSDWSPVKNISWIPDSQTKVFPQDKVILVGSDITFCCVSQEKVLSALIGHTNCPLIHLDGENVAIKIRNISVSASSGTNVVFTTEDNIFGTVIFAGYPPDTPQQLNCETHDLKEIICSWNPGRVTALVGPRATSYTLVESFSGKYVRLKRAEAPTNESYQLLFQMLPNQEIYNFTLNAHNPLGRSQSTILVNITEKVYPHTPTSFKVKDINSTAVKLSWHLPGNFAKINFLCEIEIKKSNSVQEQRNVTIKGVENSSYLVALDKLNPYTLYTFRIRCSTETFWKWSKWSNKKQHLTTEASPSKGPDTWREWSSDGKNLIIYWKPLPINEANGKILSYNVSCSSDEETQSLSEIPDPQHKAEIRLDKNDYIISVVAKNSVGSSPPSKIASMEIPNDDLKIEQVVGMGKGILLTWHYDPNMTCDYVIKWCNSSRSEPCLMDWRKVPSNSTETVIESDEFRPGIRYNFFLYGCRNQGYQLLRSMIGYIEELAPIVAPNFTVEDTSADSILVKWEDIPVEELRGFLRGYLFYFGKGERDTSKMRVLESGRSDIKVKNITDISQKTLRIADLQGKTSYHLVLRAYTDGGVGPEKSMYVVTKENSVGLIIAILIPVAVAVIVGVVTSILCYRKREWIKETFYPDIPNPENCKALQFQKSVCEGSSALKTLEMNPCTPNNVEVLETRSAFPKIEDTEIISPVAERPEDRSDAEPENHVVVSYCPPIIEEEIPNPAADEAGGTAQVIYIDVQSMYQPQAKPEEEQENDPVGGAGYKPQMHLPINSTVEDIAAEEDLDKTAGYRPQANVNTWNLVSPDSPRSIDSNSEIVSFGSPCSINSRQFLIPPKDEDSPKSNGGGWSFTNFFQNKPND

SEQ ID NO: 7864 - protein, 1097 aa, Homo sapiens; identical to SEQ ID NO: 7863

SEQ ID NO: 7865 - protein, 66 aa, Homo sapiens
  VARIANT 1: note = misc_feature - Xaa can be any naturally occurring amino acid
XWSNKKQHLTTEASPSKGPDTWREWSSDGKNLIIYWKMRKHSPFLKSLILSTKQRYDLIRMTTSSA

SEQ ID NO: 7866 - protein, 289 aa, Homo sapiens
MTPIVTVLICLRLSLGPRTHVQAGTLPKPTLWAEPGSVITQGSPVTLWCQGILETQEYRLYREKKTAPWITRIPQEIVKKGQFPIPSITWEHTGRYRCFYGSHTAGWSEPSDPLELVVTGAYIKPTLSALPSPVVTSGGNVTLHCVSQVAFGSFILCKEGEDEHPQCLNSQPRTHGWSRAIFSVGPVSPSRRWSYRCYAYDSNSPHVWSLPSDLLELLVLGAAETLSPPQNKSDSKAGAANTLSPSQNKTASHPQDYTVENLIRMGIAGLVLVVLGILLFEAQHSQRSL

SEQ ID NO: 7867 - protein, 489 aa, Homo sapiens
MTPIVTVLICLRLSLGPRTHVQAGTLPKPTLWAEPGSVITQGSPVTLWCQGILETQEYRLYREKKTAPWITRIPQEIVKKGQFPIPSITWEHTGRYRCFYGSHTAGWSEPSDPLELVVTGAYIKPTLSALPSPVVTSGGNVTLHCVSQVAFGSFILCKEGEDEHPQCLNSQPRTHGWSRAIFSVGPVSPSRRWSYRCYAYDSNSPHVWSLPSDLLELLVLGVSKKPSLSVQPGPIVAPGESLTLQCVSDVSYDRFVLYKEGERDFLQLPGPQPQAGLSQANFTLGPVSRSYGGQYRCSGAYNLSSEWSAPSDPLDILIAGQFRGRPFISVHPGPTVASGENVTLLCQSWGPFHTFLLTKAGAADAPLRLRSIHEYPKYQAEFPMSPVTSAHSGTYRCYGSLSSNPYLLSHPSDSLELMVSGAAETLSPPQNKSDSKAGAANTLSPSQNKTASHPQDYTVENLIRMGIAGLVLVVLGILLFEAQHSQRSL

SEQ ID NO: 7868 - protein, 454 aa, Homo sapiens
MTPILTVLICLGHLPKPTLWAEPGSVIIQGSPVTLRCQGSLQAEEYHLYRENKSASWVRRIQEPGKNGQFPIPSITWEHAGRYHCQYYSHNHSSEYSDPLELVVTGAYSKPTLSALPSPVVTSGGNVTLQCVSQVAFDGFILCKEGEDEHPQRLNSHSHARGWSWAIFSVGPVSPSRRWSYRCYAYDSNSPYVWSLPSDLLELLVPGVSKKPSLSVQPGPMVAPGESLTLQCVSDVGYDRFVLYKEGERDFLQRPGWQPQAGLSQANFTLGPVSPSHGGQYRCYSAHNLSSEWSAPSDPLDILITGQFYDRPSLSVQPVPTVAPGKNVTLLCQSRGQFHTFLLTKEGAGHPPLHLRSEHQAQQNQAEFRMGPVTSAHVGTYRCYSSLSSNPYLLSLPSDPLELVVSASLGQHPQDYTVENLIRMGVAGLVLVVLGILLFEAQHSQRSLQDAAGR

SEQ ID NO: 7869 - protein, 203 aa, Homo sapiens
MTPILTVLICLGLSLGPRTHVQAGHLPKPTLWAEPGSVIIQGSPVTLRCQGSLQAEEYHLYRENKSASWVRRIQEPGKNGQFPIPSITWEHAGRYHCQYYSHNHSSEHQAQQNQAEFRMGPVTSAHVGTYRCYSSLSSNPYLLSLPSDPLELVVSASLGQHPQDYTVENLIRMGVAGLVLVVLGILLFEAQHSQRSLQDAAGR

SEQ ID NO: 7870 - protein, 466 aa, Homo sapiens
MTPILTVLICLGLSLGPRTHVQAGHLPKPTLWAEPGSVIIQGSPVTLRCQGSLQAEEYHLYRENKSASWVRRIQEPGKNGQFPIPSITWEHAGRYHCQYYSHNHSSEYSDPLELVVTGAYSKPTLSALPSPVVTSGGNVTLQCVSQVAFDGFILCKEGEDEHPQRLNSHSHARGWSWAIFSVGPVSPSRRWSYRCYAYDSNSPYVWSLPSDLLELLVPGVSKKPSLSVQPGPMVAPGESLTLQCVSDVGYDRFVLYKEGERDFLQRPGWQPQAGLSQANFTLGPVSPSHGGQYRCYSAHNLSSEWSAPSDPLDILITGQFYDRPSLSVQPVPTVAPGKNVTLLCQSRGQFHTFLLTKEGAGHPPLHLRSEHQAQQNQAEFRMGPVTSAHVGTYRCYSSLSSNPYLLSLPSDPLELVVSASLGQHPQDYTVENLIRMGVAGLVLVVLGILLFEAQHSQRSLQDAAGR

SEQ ID NO: 7871 - protein, 483 aa, Homo sapiens
MTPILTVLICLGLSLGPRTHVQAGHLPKPTLWAEPGSVIIQGSPVTLRCQGSLQAEEYHLYRENKSASWVRRIQEPGKNGQFPIPSITWEHAGRYHCQYYSHNHSSEYSDPLELVVTGAYSKPTLSALPSPVVTSGGNVTLQCVSQVAFDGFILCKEGEDEHPQRLNSHSHARGWSWAIFSVGPVSPSRRWSYRCYAYDSNSPYVWSLPSDLLELLVPGVSKKPSLSVQPGPMVAPGESLTLQCVSDVGYDRFVLYKEGERDFLQRPGWQPQAGLSQANFTLGPVSPSHGGQYRCYSAHNLSSEWSAPSDPLDILITGQFYDRPSLSVQPVPTVAPGKNVTLLCQSRGQFHTFLLTKEGAGHPPLHLRSEHQAQQNQAEFRMGPVTSAHVGTYRCYSSLSSNPYLLSLPSDPLELVVSEAAETLSPSQNKTDSTTTSLGQHPQDYTVENLIRMGVAGLVLVVLGILLFEAQHSQRSLQDAAGR

SEQ ID NO: 7872 - protein, 483 aa, Homo sapiens; identical to SEQ ID NO: 7871

SEQ ID NO: 7873 - protein, 327 aa, Homo sapiens
MTPILTVLICLGLSLGPRTHVQAGHLPKPTLWAEPGSVIIQGSPVTLRCQGSLQAEEYHLYRENKSASWVRRIQEPGKNGQFPIPSITWEHAGRYHCQYYSHNHSSEYSDPLELVVTGAYSKPTLSALPSPVVTSGGNVTLQCVSQVAFDGFILCKEGEDEHPQRLNSHSHARGWSWAIFSVGPVSPSRRWSYRCYAYDSNSPYVWSLPSDLLELLVPGVSKKPSLSVQPGPMVAPGESLTLQCVSDVGYDRFVLYKEGERDFLQRPGWQPQAGLSQANFTLGPVSPSHGGQYRCYSAHNLSSEWSAPSDPLDILITGQFYDRPSLS

SEQ ID NO: 7874 - protein, 85 aa, Homo sapiens
  VARIANT 1: note = misc_feature - Xaa can be any naturally occurring amino acid
XSLPSDPLELVVSEPLSISPSPTPAGSLGHLKTREEAAWASVGSDCDEAGVHPRCAPLERSTPAVGAAHTAPPVLTWRPLCSGHP

SEQ ID NO: 7875 - protein, 158 aa, Homo sapiens
MTPALTALLCLGLSLGPRTRMQAGPFPKPTLWAEPGSVISWGSPVTIWCQGSLEAQEYQLDKEGSPEPWDRNNPLEPKNKARFSIPSMTQHHAGRYRCHYYSSAGWSEPSDPLELVMTGFYNKPTLSALPSPVVASGGNMTLRCGSQKGYHHFVLMKE

SEQ ID NO: 7876 - protein, 632 aa, Homo sapiens
MTPALTALLCLGLSLGPRTRMQAGPFPKPTLWAEPGSVISWGSPVTIWCQGSLEAQEYQLDKEGSPEPWDRNNPLEPKNKARFSIPSMTQHHAGRYRCHYYSSAGWSEPSDPLELVMTGFYNKPTLSALPSPVVASGGNMTLRCGSQKGYHHFVLMKEGEHQLPRTLDSQQLHSGGFQALFPVGPVTPSHRWRFTCYYYYTNTPWVWSHPSDPLEILPSGVSRKPSLLTLQGPVLAPGQSLTLQCGSDVGYDRFVLYKEGERDFLQRPGQQPQAGLSQANFTLGPVSRSYGGQYRCYGAHNLSSEWSAPSDPLDILITGQIYDTVSLSAQPGPTVASGENMTLLCQSRGYFDTFLLTKEGAAHPPLRLRSMYGAHKYQAEFPMSPVTSAHAGTYRCYGSRSSNPHLLSFPSEPLELMVSGHSGGSSLPPTGPPSTPGLGRYLEVLIGVSVAFVLLLFLLLFLLLLRQRHSKHRTSDQRKTDFQRPAGAAETEPKDRGLLRRSSPAADVQEENLYAAVKDTQSEDRVELDSQQSPHDEDPQAVTYAPVKHSSPRREMASPPSSLSGEFLDTKDRQVEEDRQMDTEAAASEASQDVTYAQLHSLTLRRKATEPPPSQEGEPPAEPSIYATLAIH

SEQ ID NO: 7877 - protein, 643 aa, Homo sapiens
MTPALTALLCLGLSLGPRTRMQAGPFPKPTLWAEPGSVISWGSPVTIWCQGSLEAQEYQLDKEGSPEPWDRNNPLEPKNKARFSIPSMTQHHAGRYRCHYYSSAGWSEPSDPLELVMTGFYNKPTLSALPSPVVASGGNMTLRCGSQKGYHHFVLMKEGEHQLPRTLDSQQLHSGGFQALFPVGPVTPSHRWRFTCYYYYTNTPWVWSHPSDPLEILPSGVSRKPSLLTLQGPVLAPGQSLTLQCGSDVGYDRFVLYKEGERDFLQRPGQQPQAGLSQANFTLGPVSRSYGGQYRCYGAHNLSSEWSAPSDPLDILITGQIYDTVSLSAQPGPTVASGENMTLLCQSRGYFDTFLLTKEGAAHPPLRLRSMYGAHKYQAEFPMSPVTSAHAGTYRCYGSRSSNPHLLSFPSEPLELMVSGPEDQPLNPPGSGPQNAPGLGSGAGTRAAGLGRYLEVLIGVSVAFVLLLFLLLFLLLLRQRHSKHRTSDQRKTDFQRPAGAAETEPKDRGLLRRSSPAADVQEENLYAAVKDTQSEDRVELDSQSPHDEDPQAVTYAPVKHSSPRREMASPPSSLSGEFLDTKDRQVEEDRQMDTEAAASEASQDVTYAQLHSLTLRRKATEPPPSQEGEPPAEPSIYATLAIH

SEQ ID NO: 7878 - protein, 631 aa, Homo sapiens
MTPALTALLCLGLSLGPRTRMQAGPFPKPTLWAEPGSVISWGSPVTIWCQGSLEAQEYQLDKEGSPEPWDRNNPLEPKNKARFSIPSMTQHHAGRYRCHYYSSAGWSEPSDPLELVMTGFYNKPTLSALPSPVVASGGNMTLRCGSQKGYHHFVLMKEGEHQLPRTLDSQQLHSGGFQALFPVGPVTPSHRWRFTCYYYYTNTPWVWSHPSDPLEILPSGVSRKPSLLTLQGPVLAPGQSLTLQCGSDVGYDRFVLYKEGERDFLQRPGQQPQAGLSQANFTLGPVSRSYGGQYRCYGAHNLSSEWSAPSDPLDILITGQIYDTVSLSAQPGPTVASGENMTLLCQSRGYFDTFLLTKEGAAHPPLRLRSMYGAHKYQAEFPMSPVTSAHAGTYRCYGSRSSNPHLLSFPSEPLELMVSGHSGGSSLPPTGPPSTPGLGRYLEVLIGVSVAFVLLLFLLLFLLLLRQRHSKHRTSDQRKTDFQRPAGAAETEPKDRGLLRRSSPAADVQEENLYAAVKDTQSEDRVELDSQSPHDEDPQAVTYAPVKHSSPRREMASPPSSLSGEFLDTKDRQVEEDRQMDTEAAASEASQDVTYAQLHSLTLRRKATEPPPSQEGEPPAEPSIYATLAIH

SEQ ID NO: 7879 - protein, 191 aa, Homo sapiens
MTPALTALLCLGLSLGPRTRMQAGPFPKPTLWAEPGSVISWGSPVTIWCQGSLEAQEYQLDKEGSPEPWDRNNPLEPKNKARFSIPSMTQHHAGRYRCHYYSSAGWSEPSDPLELVMTGFYNKPTLSALPSPVVASGGNMTLRCGSQKGYHHFVLMKEGEHQLPRTLDSQQLHSGGFQALFPVGPVTPSHS

SEQ ID NO: 7880 - protein, 253 aa, Homo sapiens [sequence omitted]

SEQ ID NO: 7881 - protein, 131 aa, Homo sapiens
MGLPVSWAPPALWVLGCCALLLSLWALCTACRRPEDAVAPRKRARRQRARLQGSATAAEAQVGHQTARAAPGPAQQQGPAACQHGSPAPTLAGGVQGHHRTAGSPLCLPTPGAAPGSAGSCSHRRVRWPRG

SEQ ID NO: 7882 - protein, 176 aa, Homo sapiens
MGLPVSWAPPALWVLGCCALLLSLWALCTACRRPEDAVAPRKRARRQRARLQGSATAAEAQVGHQTARAAPGPAQQQGPAACQHGSPAPTLAGGVQGHHRTAGSPLCLPTPGAAPGSAGSCSHRRVRWPRGHLFQRGAGGPSRGQPGGQPCGGRVCPRPEAQRDPSQSPRATAGED

SEQ ID NO: 7883 - protein, 107 aa, Homo sapiens
MGLPVSWAPPALWVLGCCALLLSLWALCTACRRPEDAVAPRKRARRQRARLQGSATAAEASLLRRTHLCSLSKSDTRLHELHRGPRSSRALRPASMDLLRPHWLEVS

SEQ ID NO: 7884 - protein, 295 aa, Homo sapiens
MGLPVSWAPPALWVLGCCALLLSLWALCTACRRPEDAVAPRKRARRQRARLQGSATAAEASLLRRTHLCSLSKSDTRLHELHRGPRSSRALRPASMDLLRPHWLEVSRDITGPQAAPSAFPHQELPRALPAAAATAGCAGLEATYSNVGLAALPGVSLAASPVVAEYARVQKRKGTHRSPQEPQQGKTEVTPAAQVDVLYSRVCKPKRRDPGPTTDPLDPKGQGAILALAGDLAYQTLPLRALDVDSGPLENVYESIRELGDPAGRSSTCGAGTPPASSCPSLGRGWRPLPASLP

SEQ ID NO: 7885 - protein, 211 aa, Homo sapiens
MGLPVSWAPPALWVLGCCALLLSLWALCTACRRPEDAVAPRKRARRQRARLQGSATAAEAVSARLSRGPGWGPQGTDQPSSPPVPTEADPPLLPQQVGHQTARAAPGPAQQQGPAACQHGSPAPTLAGGVQGHHRTAGSPLCLPTPGAAPGSAGSCSHRRVRWPRGHLFQRGAGGPSRGQPGGQPCGGRVCPRPEAQRDPSQSPRATAGED

SEQ ID NO: 7886 - protein, 4 aa, Homo sapiens
MLAG

SEQ ID NO: 7887 - protein, 12 aa, Homo sapiens
MLAGGVRSMPSP

SEQ ID NO: 7888 - protein, 19 aa, Homo sapiens
MLAGGVRSMPSPLLACWQP

SEQ ID NO: 7889 - protein, 35 aa, Homo sapiens
MLAGGVRSMPSPLLACWQPILLLVLGSVLSGSATG

SEQ ID NO: 7890 - protein, 55 aa, Homo sapiens
MLAGGVRSMPSPLLACWQPILLLVLGSVLSGSATGCPPRCECSAQDRAVLCHRKR

SEQ ID NO: 7891 - protein, 72 aa, Homo sapiens
MLAGGVRSMPSPLLACWQPILLLVLGSVLSGSATGCPPRCECSAQDRAVLCHRKRFVAVPEGIPTETRLLDL

SEQ ID NO: 7892 - protein, 125 aa, Homo sapiens
MLAGGVRSMPSPLLACWQPILLLVLGSVLSGSATGCPPRCECSAQDRAVLCHRKRFVAVPEGIPTETRLLDLGKNRIKTLNQDEFASFPHLEELELNENIVSAVEPGAFNNLFNLRTLGLRSNRL

SEQ ID NO: 7893 - protein, 179 aa, Homo sapiens
MLAGGVRSMPSPLLACWQPILLLVLGSVLSGSATGCPPRCECSAQDRAVLCHRKRFVAVPEGIPTETRLLDLGKNRIKTLNQDEFASFPHLEELELNENIVSAVEPGAFNNLFNLRTLGLRSNRLKLIPLGVFTGLSNLTKLDISENKIVILLDYMFQDLYNLKSLEVGDNDLVYISHR

SEQ ID NO: 7894 - protein, 614 aa, Homo sapiens
MLAGGVRSMPSPLLACWQPILLLVLGSVLSGSATGCPPRCECSAQDRAVLCHRKRFVAVPEGIPTETRLLDLGKNRIKTLNQDEFASFPHLEELELNENIVSAVEPGAFNNLFNLRTLGLRSNRLKLIPLGVFTGLSNLTKLDISENKIVILLDYMFQDLYNLKSLEVGDNDLVYISHRAFSGLNSLEQLTLEKCNLTSIPTEALSHLHGLIVLRLRHLNINAIRDYSFKRLYRLKVLEISHWPYLDTMTPNCLYGLNLTSLSITHCNLTAVPYLAVRHLVYLRFLNLSYNPISTIEGSMLHELLRLQEIQLVGGQLAVVEPYAFRGLNYLRVLNVSGNQLTTLEESVFHSVGNLETLILDSNPLACDCRLLWVFRRRWRLNFNRQQPTCATPEFVQGKEFKDFPDVLLPNYFTCRRARIRDRKAQQVFVDEGHTVQFVCRADGDPPPAILWLSPRKHLVSAKSNGRLTVFPDGTLEVRYAQVQDNGTYLCIAANAGGNDSMPAHLHVRSYSPDWPHQPNKTFAFISNQPGEGEANSTRATVPFPFDIKTLIIATTMGFISFLGVVLFCLVLLFLWSRGKGNTKHNIEIEYVPRKSDAGISSADAPRKFNMKMI

SEQ ID NO: 7895 - protein, 620 aa, Homo sapiens
MQVSKRMLAGGVRSMPSPLLACWQPILLLVLGSVLSGSATGCPPRCECSAQDRAVLCHRKRFVAVPEGIPTETRLLDLGKNRIKTLNQDEFASFPHLEELELNENIVSAVEPGAFNNLFNLRTLGLRSNRLKLIPLGVFTGLSNLTKLDISENKIVILLDYMFQDLYNLKSLEVGDNDLVYISHRAFSGLNSLEQLTLEKCNLTSIPTEALSHLHGLIVLRLRHLNINAIRDYSFKRLYRLKVLEISHWPYLDTMTPNCLYGLNLTSLSITHCNLTAVPYLAVRHLVYLRFLNLSYNPISTIEGSMLHELLRLQEIQLVGGQLAVVEPYAFRGLNYLRVLNVSGNQLTTLEESVFHSVGNLETLILDSNPLACDCRLLWVFRRRWRLNFNRQQPTCATPEFVQGKEFKDFPDVLLPNYFTCRRARIRDRKAQQVFVDEGHTVQFVCRADGDPPPAILWLSPRKHLVSAKSNGRLTVFPDGTLEVRYAQVQDNGTYLCIAANAGGNDSMPAHLHVRSYSPDWPHQPNKTFAFISNQPGEGEANSTRATVPFPFDIKTLIIATTMGFISFLGVVLFCLVLLFLWSRGKGNTKHNIEIEYVPRKSDAGISSADAPRKFNMKMI

SEQ ID NO: 7896 - protein, 326 aa, Homo sapiens
MVQLEQKVSKRMLAGGVRSMPSPLLACWQPILLLVLGSVLSGSATGCPPRCECSAQDRAVLCHRKRFVAVPEGIPTETRLLDLGKNRIKTLNQDEFASFPHLEELELNENIVSAVEPGAFNNLFNLRTLGLRSNRLKLIPLGVFTGLSNLTKLDISENKIVILLDYMFQDLYNLKSLEVGDNDLVYISHRAFSGLNSLEQLTLEKCNLTSIPTEALSHLHGLIVLRLRHLNINAIRDYSFKRLYRLKVLEISHWPYLDTMTPNCLYGLNLTSLSITHCNLTAVPYLAVRHLVYLRFLNLSYNPISTIEGSMLHELLRLQEIQLVGG

SEQ ID NO: 7897 - protein, 343 aa, Homo sapiens
MACLEFVPFDVQMCLEFLPSGPKPVVFLQHGLLADSSNWVTNLANSSLGFILADAGFDVWMGNSRGNTWSRKHKTLSVSQDEFWAFSYDEMAKYDLPASINFILNKTGQEQVYYVGHSQGTTIGFIAFSQIPELAKRIKMFFALGPVASVAFCTSPMAKLGRLPDHLIKDLFGDKEFLPQSAFLKWLGTHVCTHVILKELCGNLCFLLCGFNERNLNMSRVDVYTTHSPAGTSVQNMLHWSQAVKFQKFQAFDWGSSAKNYFHYNQSYPPTYNVKDMLVPTAVWSGGHDWLADVYDVNILLTQITNLVFHESIPEWEHLDFIWGLDAPWRLYNKIINLMRKYQ

SEQ ID NO: 7898 - protein, 283 aa, Homo sapiens
MGNSRGNTWSRKHKTLSVSQDEFWAFSYDEMAKYDLPASINFILNKTGQEQVYYVGHSQGTTIGFIAFSQIPELAKRIKMFFALGPVASVAFCTSPMAKLGRLPDHLIKDLFGDKEFLPQSAFLKWLGTHVCTHVILKELCGNLCFLLCGFNERNLNMSRVDVYTTHSPAGTSVQNMLHWSQAVKFQKFQAFDWGSSAKNYFHYNQSYPPTYNVKDMLVPTAVWSGGHDWLADVYDVNILLTQITNLVFHESIPEWEHLDFIWGLDAPWRLYNKIINLMRKYQ

SEQ ID NO: 7899 - protein, 219 aa, Homo sapiens
MKMRFLGLVVCLVLWTLHSEGSGGKLTAVDPETNMNVSEIISYWGFPSEEYLVETEDGYILCLNRIPHGRKNHSDKGPKPVVFLQHGLLADSSNWVTNLANSSLGFILADAGFDVWMGNSRGNTWSRKHKTLSVSQDEFWAFSYDEMAKYDLPASINFILNKTGQEQVYYVGHSQGTTIGFIAFSQIPELAKRIKMFFALGPVASVAFCTSPMAKLGRL

SEQ ID NO: 7900 - protein, 399 aa, Homo sapiens
MKMRFLGLVVCLVLWTLHSEGSGGKLTAVDPETNMNVSEIISYWGFPSEEYLVETEDGYILCLNRIPHGRKNHSDKGPKPVVFLQHGLLADSSNWVTNLANSSLGFILADAGFDVWMGNSRGNTWSRKHKTLSVSQDEFWAFSYDEMAKYDLPASINFILNKTGQEQVYYVGHSQGTTIGFIAFSQIPELAKRIKMFFALGPVASVAFCTSPMAKLGRLPDHLIKDLFGDKEFLPQSAFLKWLGTHVCTHVILKELCGNLCFLLCGFNERNLNMSRVDVYTTHSPAGTSVQNMLHWSQAVKFQKFQAFDWGSSAKNYFHYNQSYPPTYNVKDMLVPTAVWSGGHDWLADVYDVNILLTQITNLVFHESIPEWEHLDFIWGLDAPWRLYNKIINLMRKYQ

SEQ ID NO: 7901 - protein, 290 aa, Homo sapiens
MKMRFLGLVVCLVLWTLHSEGSGGKLTAVDPETNMNVSEIISYWGFPSEEYLVETEDGYILCLNRIPHGRKNHSDKGPKPVVFLQHGLLADSSNWVTNLANSSLGFILADAGFDVWMGNSRGNTWSRKHKTLSVSQDEFWAFSYDEMAKYDLPASINFILNKTGQEQVYYVGHSQGTTIGFIAFSQIPELAKRIKMFFALGPVASVAFCTSPMAKLGRLPDHLIKDLFGDKEFLPQSAFLKWLGTHVCTHVILKELCGNLCFLLCGFNERNLNMSRVDVYTTHSPAGTSV

SEQ ID NO: 7902 - protein, 438 aa, Homo sapiens
MDTSPLCFSILLVLCIFIQSSALGQSLKPEPFGRRAQAVETNKTLHEMKTRFLLFGETNQGCQIRINHPDTLQECGFNSSLPLVMIIHGWSESVQLSRSHVHLIGYSLGAHVSGFAGSSIGGTHKIGRITGLDAAGPLFEGSAPSNRLSPDDANFVDAIHTFTREHMGLSVGIKQPIGHYDFYPNGGSFQPGCHFLELYRHIAQHGFNAITQTIKCSHERSVHLFIDSLLHAGTQSMAYPCGDMNSFSQGLCLSCKKGRCNTLGYHVRQEPRSKSKRLFLVTRAQSPFKVYHYQFKIQFINQTETPIQTTFTMSLLGTKEKMQKIPITLGKGIASNKTYSFLITLDVDIGELIMIKFKWENSAVWANVWDTVQTIIPWSTGPRHSGLVLKTIRVKAGETQQRMTFCSENTDDLLLRPTQEKIFVKCEIKSKTSKRKIR

SEQ ID NO: 7903 - protein, 499 aa, Homo sapiens
MDTSPLCFSILLVLCIFIQSSALGQSLKPEPFGRRAQAVETNKTLHEMKTRFLLFGETNQGCQIRINHPDTLQECGFNSSLPLVMIIHGWSVDGVLENWIWQMVAALKSQPAQPVNVGLVDWITLAHDHYTIAVRNTRLVGKEVAALLRWLEESVQLSRSHVHLIGYSLGAHVSGFAGSSIGGTHKIGRITGLDAAGPLFEGSAPSNRLSPDDANFVDAIHTFTREHMGLSVGIKQPIGHYDFYPNGGSFQPGCHFLELYRHIAQHGFNAITQTIKCSHERSVHLFIDSLLHAGTQSMAYPCGDMNSFSQGLCLSCKKGRCNTLGYHVRQEPRSKSKRLFLVTRAQSPFKVYHYQFKIQFINQTETPIQTTFTMSLLGTKEKMQKIPITLGKGIASNKTYSFLITLDVDIGELIMIKFKWENSAVWANVWDTVQTIIPWSTGPRHSGLVLKTIRVKAGETQQRMTFCSENTDDLLLRPTQEKIFVKCEIKSKTSKRKIR

SEQ ID NO: 7904 - protein, 499 aa, Homo sapiens; identical to SEQ ID NO: 7903

SEQ ID NO: 7905 - protein, 499 aa, Homo sapiens
MDTSPLCFSILLVLCIFIQSSALGQSLKPEPFGRRAQAVETNKTLHEMKTRFLLFGETNQGCQIRINHPDTLQECGFNSSLPLVMIIHGWSVDGVLENWIWQMVAALKSQPAQPVNVGLVDWITLAHDHYTIAVRNTRLVGKEVAALLRWLEESVQLSRSHVHLIGYSLGAHVSGFAGSSIGGTHKIGRITGLDAAGPLFEGSAPSNRLSPDDANFVDAIHTFTREHMGLSVGIKQPIGHYDFYPNGGSFQPGCHFLELYRHIAQHGFNAITQTIKCSHERSVHLFIDSLLHAGTQSMAYPCGDMNSFSQGLCLSCKKGRCNTLGYHVRQEPRSKSKRLFLVTRAQSPFKVYHYQFKIQFINQTETPIQTTFTMSLLGTKEKMQKIPITLGKGIASNKTYSFLITLDVDIGELIMIKFKWENSAVWANVWDTVQTIIPWSTGPRHSGLVLKTIRVKAGETQQRSPNRINLGRLNCSLLFCTELFSHDSLAHWSSAASEL

SEQ ID NO: 7906 - protein, 375 aa, Homo sapiens
MFSNANSRSKMWLLLTMASLISVLGTTHGLFGKLHPGSPEVTMNISQMITYWGYPNEEYEVVTEDGYILEVNRIPYGKKNSGNTDAGYDVWLGNSRGNTWARRNLYYSPDSVEFWAFSFDEMAKYDLPATIDFIVKKTGQKQLHYVGHSQGTTIGFIAFSTNPSLAKRIKTFYALAPVATVKYTKSLINKLRFVPQSLFKFIFGDKIFYPHNFFDQFLATEVCSREMLNLLCSNALFIICGFDSKNFNTSRLDVYLSHNPAGTSVQNMFHWTQAVKSGKFQAYDWGSPVQNRMHYDQSQPPYYNVTAMNVPIAVWNGGKDLLADPQDVGLLLPKLPNLIYHKEIPFYNHLDFIWAMDAPQEVYNDIVSMISEDKK

SEQ ID NO: 7907 - protein, 408 aa, Homo sapiens
MFSNANSRSKMWLLLTMASLISVLGTTHGLFGKLHPGSPEVTMNISQMITYWGYPNEEYEVVTEDGYILEVNRIPYGKKNSGNTGQRPVVFLQHGLLASATNWISNLPNNSLAFILADAGYDVWLGNSRGNTWARRNLYYSPDSVEFWAFSFDEMAKYDLPATIDFIVKKTGQKQLHYVGHSQGTTIGFIAFSTNPSLAKRIKTFYALAPVATVKYTKSLINKLRFVPQSLFKFIFGDKIFYPHNFFDQFLATEVCSREMLNLLCSNALFIICGFDSKNFNTSRLDVYLSHNPAGTSVQNMFHWTQAVKSGKFQAYDWGSPVQNRMHYDQSQPPYYNVTAMNVPIAVWNGGKDLLADPQDVGLLLPKLPNLIYHKEIPFYNHLDFIWAMDAPQEVYNDIVSMISEDKK

SEQ ID NO: 7908 - protein, 365 aa, Homo sapiens
MWLLLTMASLISVLGTTHGLFGKLHPGSPEVTMNISQMITYWGYPNEEYEVVTEDGYILEVNRIPYGKKNSGNTDAGYDVWLGNSRGNTWARRNLYYSPDSVEFWAFSFDEMAKYDLPATIDFIVKKTGQKQLHYVGHSQGTTIGFIAFSTNPSLAKRIKTFYALAPVATVKYTKSLINKLRFVPQSLFKFIFGDKIFYPHNFFDQFLATEVCSREMLNLLCSNALFIICGFDSKNFNTSRLDVYLSHNPAGTSVQNMFHWTQAVKSGKFQAYDWGSPVQNRMHYDQSQPPYYNVTAMNVPIAVWNGGKDLLADPQDVGLLLPKLPNLIYHKEIPFYNHLDFIWAMDAPQEVYNDIVSMISEDKK

SEQ ID NO: 7909 - protein, 398 aa, Homo sapiens
MWLLLTMASLISVLGTTHGLFGKLHPGSPEVTMNISQMITYWGYPNEEYEVVTEDGYILEVNRIPYGKKNSGNTGQRPVVFLQHGLLASATNWISNLPNNSLAFILADAGYDVWLGNSRGNTWARRNLYYSPDSVEFWAFSFDEMAKYDLPATIDFIVKKTGQKQLHYVGHSQGTTIGFIAFSTNPSLAKRIKTFYALAPVATVKYTKSLINKLRFVPQSLFKFIFGDKIFYPHNFFDQFLATEVCSREMLNLLCSNALFIICGFDSKNFNTSRLDVYLSHNPAGTSVQNMFHWTQAVKSGKFQAYDWGSPVQNRMHYDQSQPPYYNVTAMNVPIAVWNGGKDLLADPQDVGLLLPKLPNLIYHKEIPFYNHLDFIWAMDAPQEVYNDIVSMISEDKK

SEQ ID NO: 7910 - protein, 188 aa, Homo sapiens
LCYCFAAGSPVPFGPEGRLEDKLHKPKATQTEVKPSVRFNLRTSKDPEHEGCYLSVGHSQPLEDCSFNMTAKTFFIIHGWTMSGIFENWLHKLVSALHTREKDANVVVVDWLPLAHQLYTDAVNNTRVVGHSIARMLDWLQVLGDERESPVTSRISNPIFLRNAGHASVAMNFWSLIKIFEIKSFIEL

SEQ ID NO: 7911 - protein, 390 aa, Homo sapiens
MLSFSRDRLPSGRRVSGKCPPPPLGMAVGRGGSGCPEEGSGRKLELLESQLPAERAREEAGPSVRRPRDKLHKPKATQTEVKPSVRFNLRTSKDPEHEGCYLSVGHSQPLEDCSFNMTAKTFFIIHGWTMSGIFENWLHKLVSALHTREKDANVVVVDWLPLAHQLYTDAVNNTRVVGHSIARMLDWLQEKDDFSLGNVHLIGYSLGAHVAGYAGNFVKGTVGRITGLDPAGPMFEGADIHKRLSPDDADFVDVLHTYTRSFGLSIGIQMPVGHIDIYPNGGDFQPGCGLNDVLGSIAYGTITEVVKCEHERAVHLFVDSLVNQDKPSFAFQCTDSNRFKKGICLSCRKNRCNSIGYNAKKMRNKRNSKMYLKTRAGMPFRGNLQSLECP

SEQ ID NO: 7912 - protein, 426 aa, Homo sapiens
MSNSVPLLCFWSLCYCFAAGSPVPFGPEGRLEDKLHKPKATQTEVKPSVRFNLRTSKDPEHEGCYLSVGHSQPLEDCSFNMTAKTFFIIHGWTMSGIFENWLHKLVSALHTREKDANVVVVDWLPLAHQLYTDAVNNTRVVGHSIARMLDWLQEKDDFSLGNVHLIGYSLGAHVAGYAGNFVKGTVGRITAITEVVKCEHERAVHLFVDSLVNQDKPSFAFQCTDSNRFKKGICLSCRKNRCNSIGYNAKKMRNKRNSKMYLKTRAGMPFRVYHYQMKIHVFSYKNMGEIEPTFYVTLYGTNADSQTLPLEIVERIEQNATNTFLVYTEEDLGDLLKIQLTWEGASQSWYNLWKEFRSYLSQPRNPGRELNIRRIRVKSGETQRKLTFCTEDPENTSISPGRELWFRKCRDGWRMKNETSPTVELP

SEQ ID NO: 7913 - protein, 500 aa, Homo sapiens
MSNSVPLLCFWSLCYCFAAGSPVPFGPEGRLEDKLHKPKATQTEVKPSVRFNLRTSKDPEHEGCYLSVGHSQPLEDCSFNMTAKTFFIIHGWTMSGIFENWLHKLVSALHTREKDANVVVVDWLPLAHQLYTDAVNNTRVVGHSIARMLDWLQEKDDFSLGNVHLIGYSLGAHVAGYAGNFVKGTVGRITGLDPAGPMFEGADIHKRLSPDDADFVDVLHTYTRSFGLSIGIQMPVGHIDIYPNGGDFQPGCGLNDVLGSIAYGTITEVVKCEHERAVHLFVDSLVNQDKPSFAFQCTDSNRFKKGICLSCRKNRCNSIGYNAKKMRNKRNSKMYLKTRAGMPFRVYHYQMKIHVFSYKNMGEIEPTFYVTLYGTNADSQTLPLEIVERIEQNATNTFLVYTEEDLGDLLKIQLTWEGASQSWYNLWKEFRSYLSQPRNPGRELNIRRIRVKSGETQRKLTFCTEDPENTSISPGRELWFRKCRDGWRMKNETSPTVELP

SEQ ID NO: 7914 - protein, 354 aa, Homo sapiens
MSNSVPLLCFWSLCYCFAAGSPVPFGPEGRLEDKLHKPKATQTEVKPSVRFNLRTSKDPEHEGCYLSVGHSQPLEDCSFNMTAKTFFIIHGWTMSGIFENWLHKLVSALHTREKDANVVVVDWLPLAHQLYTDAVNNTRVVGHSIARMLDWLQEKDDFSLGNVHLIGYSLGAHVAGYAGNFVKGTVGRITGLDPAGPMFEGADIHKRLSPDDADFVDVLHTYTRSFGLSIGIQMPVGHIDIYPNGGDFQPGCGLNDVLGSIAYGTITEVVKCEHERAVHLFVDSLVNQDKPSFAFQCTDSNRFKKGICLSCRKNRCNSIGYNAKKMRNKRNSKMYLKTRAGMPFRGNLQSLECP

SEQ ID NO: 7915 - protein, 24 aa, Homo sapiens
MTAKTFFIIHGWTMSGIFENWLHK

SEQ ID NO: 7916 - protein, 417 aa, Homo sapiens
MLRFYLFISLLCLSRSDAEETCPSFTRLSFHSAVVGTGLNVRLMLYTRKNLTCAQTINSSAFGNLNVTKKTTFIVHGFRPTGSPPVWMDDLVKGLLSVEDMNVVVVDWNRGATTLIYTHASSKTRKVAMVLKEFIDQMLAEGASLDDIYMIGVSLGAHISGFVGEMYDGWLGRITALGYKEPLGNIDFYPNGGLDQPGCPKTILGGFQYFKCDHQRSVYLYLSSLRESCTITAYPCDSYQDYRNGKCVSCGTSQKESCPLLGYYADNWKDHLRGKDPPMTKAFFDTAEESPFCMYHYFVDIITWNKNVRRGDITIKLRDKAGNTTESKINHEPTTFQKYHQVSLLARFNQDLDKVAAISLMFSTGSLIGPRYKLRILRMKLRSLAHPERPQLCRYDLVLMENVETVFQPILCPELQL

SEQ ID NO: 7917 - protein, 451 aa, Homo sapiens
MLRFYLFISLLCLSRSDAEETCPSFTRLSFHSAVVGTGLNVRLMLYTRKNLTCAQTINSSAFGNLNVTKKTTFIVHGFRPTGSPPVWMDDLVKGLLSVEDMNVVVVDWNRGATTLIYTHASSKTRKVAMVLKEFIDQMLAEGASLDDIYMIGVSLGAHISGFVGEMYDGWLGRITGLDPAGPLFNGKPHQDRLDPSDAQFVDVIHSDTDALGYKEPLGNIDFYPNGGLDQPGCPKTILGGFQYFKCDHQRSVYLYLSSLRESCTITAYPCDSYQDYRNGKCVSCGTSQKESCPLLGYYADNWKDHLRGKDPPMTKAFFDTAEESPFCMYHYFVDIITWNKNVRRGDITIKLRDKAGNTTESKINHEPTTFQKYHQVSLLARFNQDLDKVAAISLMFSTGSLIGPRYKLRILRMKLRSLAHPERPQLCRYDLVLMENVETVFQPILCPELQL

SEQ ID NO: 7918 - protein, 47 aa, Homo sapiens
MLRFYLFISLLCLSRSDASLDMNEESPLFEEGFLQSEIWEIKLIPPK

SEQ ID NO: 7919 - protein, 86 aa, Homo sapiens
  VARIANT 1: note = misc_feature - Xaa can be any naturally occurring amino acid
XDIYMIGVSLGAHISGFVGEMYDGWLGRITGFQYFKCDHQRSVYLYLSSLRESCTITAYPCDSYQDYRNGKCVSCGTSQKESCPLL

SEQ ID NO: 7920 - protein, 73 aa, Homo sapiens
  VARIANT 1: note = misc_feature - Xaa can be any naturally occurring amino acid
XSPFCMYHYFVDIITWNKNVRRGDITIKLRDKAGNTTESKINQISNRPKVQAQDSPNEVKVPCPSGEASAVSV

SEQ ID NO: 7921 - protein, 399 aa, Homo sapiens
MWQLLAAACWMLLLGSMYGYDKKGNNANPEANMNISQIISYWGYPYEEYDVTTKDGYILGIYRIPHGRGCPGRTAPKPAVYLQHGLIASASNWICNLPNNSLAFLLADSGYDVWLGNSRGNTWSRKHLKLSPKSPEYWAFSLDEMAKYDLPATINFIIEKTGQKRLYYVGHSQGTTIAFIAFSTNPELAKKIKIFFALAPVVTVKYTQSPMKKLTTLSRRVVKVLFGDKMFHPHTLFDQFIATKVCNRKLFRRICSNFLFTLSGFDPQNLNMSRLDVYLSHNPAGTSVQNMLHWAQAVNSGQLQAFDWGNSDQNMMHFHQLTPPLYNITKMEVPTAIWNGGQDIVADPKDVENLLPQIANLIYYKLIPHYNHVDFYLGEDAPQEIYQDLIILMEEYLQN

SEQ ID NO: 7922 - protein, 423 aa, Homo sapiens
MLETLSRQWIVSHRMEMWLLILVAYMFQRNVNSVHMPTKAVDPEAFMNISEIIQHQGYPCEEYEVATEDGYILSVNRIPRGLVQPKKTGSRPVVLLQHGLVGGASNWISNLPNNSLGFILADAGFDVWMGNSRGNAWSRKHKTLSIDQDEFWAFSYDEMARFDLPAVINFILQKTGQEKIYYVGYSQGTTMGFIAFSTMPELAQKIKMYFALAPIATVKHAKSPGTKFLLLPDMMIKGLFGKKEFLYQTRFLRQLVIYLCGQVILDQICSNIMLLLGGFNTNNMNMSRASVYAAHTLAGTSVQNILHWSQAVNSGELRAFDWGSETKNLEKCNQPTPVRYRVRDMTVPTAMWTGGQDWLSNPEDVKMLLSEVTNLIYHKNIPEWAHVDFIWGLDAPHRMYNEIIHLMQQEETNLSQGRCEAVL

SEQ ID NO: 7923 - protein, 383 aa, Homo sapiens
MTRPLDRKQSEIIQHQGYPCEEYEVATEDGYILSVNRIPRGLVQPKKTGSRPVVLLQHGLVGGASNWISNLPNNSLGFILADAGFDVWMGNSRGNAWSRKHKTLSIDQDEFWAFSYDEMARFDLPAVINFILQKTGQEKIYYVGYSQGTTMGFIAFSTMPELAQKIKMYFALAPIATVKHAKSPGTKFLLLPDMMIKGLFGKKEFLYQTRFLRQLVIYLCGQVILDQICSNIMLLLGGFNTNNMNMSRASVYAAHTLAGTSVQNILHWSQAVNSGELRAFDWGSETKNLEKCNQPTPVRYRVRDMTVPTAMWTGGQDWLSNPEDVKMLLSEVTNLIYHKNIPEWAHVDFIWGLDAPHRMYNEIIHLMQQEETNLSQGRCEAVL

SEQ ID NO: 7924 - protein, 398 aa, Homo sapiens
MMWLLLTTTCLICGTLNAGGFLDLENEVNPEVWMNTSEIIIYNGYPSEEYEVTTEDGYILLVNRIPYGRTHARSTGPRPVVYMQHALFADNAYWLENYANGSLGFLLADAGYDVWMGNSRGNTWSRRHKTLSETDEKFWAFSFDEMAKYDLPGVIDFIVNKTGQEKLYFIGHSLGTTIGFVAFSTMPELAQRIKMNFALGPTISFKYPTGIFTRFFLLPNSIIKAVFGTKGFFLEDKKTKIASTKICNNKILWLICSEFMSLWAGSNKKNMNQSRMDVYMSHAPTGSSVHNILHIKQLYHSDEFRAYDWGNDADNMKHYNQSHPPIYDLTAMKVPTAIWAGGHDVLVTPQDVARILPQIKSLHYFKLLPDWNHFDFVWGLDAPQRMYSEIIALMKAYS

SEQ ID NO: 7925 - protein, 288 aa, Homo sapiens
MAAEGWIWRWGWGRRCLGRPGLLGPGPGPTTPLFLLLLLGSVTADITDGNSEHLKREHSLIKPYQGVGSSSMPLWDFQGSTMLTSQYVRLTPDERSKEGSIWNHQPCFLKDWEMHVHFKVHGTGKKNLHGDGIALWYTRDRLVPDNFHGLAIFLDTYPNDETTERVFPYISVMVNNGSLSYDHSKDGRWTELAGCTADFRNRDHDTFLAVRYSRGRLTVMTDLEDKNEWKNCIDITGVRLPTGYYFGASAGTGDLSDNHDIISMKLFQLMVEHTPDEESIDWTKIEPS

SEQ ID NO: 7926 - protein, 203 aa, Homo sapiens
MAAEGWIWRWGWGRRCLGRPGLLGPGPGPTTPLFLLLLLGSVTADITDGNSEHLKREHSLIKPYQGVGSSSMPLWDFQGSTMLTSQYVRLTPDERSKEGSIWNHQPCFLKDWEMHVHFKVHGTGKKNLHGDGIALWYTRDRLVPGPVFGSKDNFHGLAIFLDTYPNDETTEHRLDQDRAQRQLPQVAQRQRGRPHGELPQRAP

SEQ ID NO: 7927 - protein, 356 aa, Homo sapiens
MAAEGWIWRWGWGRRCLGRPGLLGPGPGPTTPLFLLLLLGSVTADITDGNSEHLKREHSLIKPYQGVGSSSMPLWDFQGSTMLTSQYVRLTPDERSKEGSIWNHQPCFLKDWEMHVHFKVHGTGKKNLHGDGIALWYTRDRLVPGPVFGSKDNFHGLAIFLDTYPNDETTERVFPYISVMVNNGSLSYDHSKDGRWTELAGCTADFRNRDHDTFLAVRYSRGRLTVMTDLEDKNEWKNCIDITGVRLPTGYYFGASAGTGDLSDNHDIISMKLFQLMVEHTPDEESIDWTKIEPSVNFLKSPKDNVDDPTGNFRSGPLTGWRVFLLLLCALLGIVVCAVVGAVVFQKRQERNKRFY

SEQ ID NO: 7928 - protein, 325 aa, Homo sapiens
MAAEGWIWRWGWGRRCLGRPGLLGPGPGPTTPLFLLLLLGSVTADITDGNSEHLKREHSLIKPYQGVGSSSMPLWDFQGSTMLTSQYVRLTPDERSKEGSIWNHQPCFLKDWEMHVHFKVHGTGKKNLHGDGIALWYTRDRLVPGPVFGSKDNFHGLAIFLDTYPNDETTERVFPYISVMVNNGSLSYDHSKDGRWTELAGCTADFRNRDHDTFLAVRYSRGRLTVMTDLEDKNEWKNCIDITGVRLPTGYYFGASAGTGDLSDNHDIISMKLFQLMVEHTPDEESIDWTKIEPSVNFLKSPKAPPFLLPQTTWTTPRGTSAAGP

SEQ ID NO: 7929 - protein, 192 aa, Homo sapiens
MPLWDFQGSTMLTSQYVRLTPDERSKEGSIWNHQPCFLKDWEMHVHFKVHGTGKKNLHGDGIALWYTRDRLVPGPVFGSKDNFHGLAIFLDTYPNDETTERVFPYISVMVNNGSLSYDHSKDGRWTELAGCTADFRNRDHDTFLAVRYSRGRLTVMTDLEDKNEWKNCIDITGVRLPTGYYFGASAGTGDLS

SEQ ID NO: 7930 - protein, 144 aa, Homo sapiens
MAIGDHILQQNVNGQTISLYRFLPNIVMQANSTVTVWAAASEAKHQPPSDFLWKEQDKFRASPDCITILCKPNGQAIAWYTPIHWKQAWEKLDADVEFNRCSVVSPTFRKRVFQWTASTATITKEKQDQPKKDISNYQVEQAQV

SEQ ID NO: 7931 - protein, 291 aa, Homo sapiens
MIGDGEDYFLSLFGDSKKLTAHSNYTQKTLKYFSMILEEVGQFTSSSLGDVEIAEVNVKGLFVKLINSSLDKEMAIGDHILQQNVNGQTISLYRFLPNIVMQANSTVTVWAAASEAKHQPPSDFLWKEQDKFRASPDCITILCKPNGQAIAWYTPIHWKQAWEKLDADVEFNRCSVVSPTFRKRVFQWTASTATITKEKQDQPKKDISNYQVEQAQVLLKREKEIPPTVFPNRSPWCQNPYVSAHPYCPLIEPHNTSTAGGRLDRQPRTRSTRPNRASGSKKKKTSESQKQ

SEQ ID NO: 7932 - protein, 369 aa, Homo sapiens
MKDTQDIQEASKAMQNKVHEQEDKNEKQKQREDKLGVYSLVHFSPKMLGSVATTLPLSSSNSSGMPLGYYLSSPQISRVTISTTGQLTSKATVGSCSRVENSLDASPFSVPKKQDESPMIGDGEDYFLSLFGDSKKLTAHSNYTQKTLKYFSMILEEVGQFTSSSLGDVEIAEVNVKGLFVKLINSSLDKEMAIGDHILQQNVNGQTISLYRFLPNIVMQANSTVTAIAWYTPIHWKQAWEKLDADVEFNRCSVVSPTFRKRVFQWTASTATITKEKQDQPKKDISNYQVEQAQVLLKREKEIPPTVFPNRSPWCQNPYVSAHPYCPLIEPHNTSTAGGRLDRQPRTRSTRPNRASGSKKKKTSESQKQ

SEQ ID NO: 7933 - protein, 409 aa, Homo sapiens
MKDTQDIQEASKAMQNKVHEQEDKNEKQKQREDKLGVYSLVHFSPKMLGSVATTLPLSSSNSSGMPLGYYLSSPQISRVTISTTGQLTSKATVGSCSRVENSLDASPFSVPKKQDESPMIGDGEDYFLSLFGDSKKLTAHSNYTQKTLKYFSMILEEVGQFTSSSLGDVEIAEVNVKGLFVKLINSSLDKEMAIGDHILQQNVNGQTISLYRFLPNIVMQANSTVTVWAAASEAKHQPPSDFLWKEQDKFRASPDCITILCKPNGQAIAWYTPIHWKQAWEKLDADVEFNRCSVVSPTFRKRVFQWTASTATITKEKQDQPKKDISNYQVEQAQVLLKREKEIPPTVFPNRSPWCQNPYVSAHPYCPLIEPHNTSTAGGRLDRQPRTRSTRPNRASGSKKKKTSESQKQ

SEQ ID NO: 7934 - protein, 388 aa, Homo sapiens
MLEGSWINRREDKLGVYSLVHFSPKMLGSVATTLPLSSSNSSGMPLGYYLSSPQISRVTISTTGQLTSKATVGSCSRVENSLDASPFSVPKKQDESPMIGDGEDYFLSLFGDSKKLTAHSNYTQKTLKYFSMILEEVGQFTSSSLGDVEIAEVNVKGLFVKLINSSLDKEMAIGDHILQQNVNGQTISLYRFLPNIVMQANSTVTVWAAASEAKHQPPSDFLWKEQDKFRASPDCITILCKPNGQAIAWYTPIHWKQAWEKLDADVEFNRCSVVSPTFRKRVFQWTASTATITKEKQDQPKKDISNYQVEQAQVLLKREKEIPPTVFPNRSPWCQNPYVSAHPYCPLIEPHNTSTAGGRLDRQPRTRSTRPNRASGSKKKKTSESQKQ

SEQ ID NO: 7935 - protein, 72 aa, Homo sapiens
MLGSVATTLPLSSSNSSGMPLGYYLSSPQISRVTISTTGQLTSKATVGSCSRVENSLDASPFSVPKKQDESP

SEQ ID NO: 7936 - protein, 166 aa, Homo sapiens
MLGSVATTLPLSSSNSSGMPLGYYLSSPQISRVTISTTGQLTSKATVGSCSRVENSLDASPFSVPKKQDESPMIGDGEDYFLSLFGDSKKLTAHSNYTQKTLKYFSMILEEVGQFTSSSLGDVEIAEVNVKGLFVKLINSSLDKEMAIGDHILQQNVNGQTISLYR

SEQ ID NO: 7937 - protein, 170 aa, Homo sapiens
MLGSVATTLPLSSSNSSGMPLGYYLSSPQISRVTISTTGQLTSKATVGSCSRVENSLDASPFSVPKKQDESPMIGDGEDYFLSLFGDSKKLTAHSNYTQKTLKYFSMILEEVGQFTSSSLGDVEIAEVNVKGLFVKLINSSLDKEMAIGDHILQQNVNGQTISLYRFLPN

SEQ ID NO: 7938 - protein, 325 aa, Homo sapiens
MQQPVRAGDIGVSRVQTHHNASPFSVPKKQDESPMIGDGEDYFLSLFGDSKKLTAHSNYTQKTLKYFSMILEEVGQFTSSSLGDVEIAEVNVKGLFVKLINSSLDKEMAIGDHILQQNVNGQTISLYRFLPNIVMQANSTVTVWAAASEAKHQPPSDFLWKEQDKFRASPDCITILCKPNGQAIAWYTPIHWKQAWEKLDADVEFNRCSVVSPTFRKRVFQWTASTATITKEKQDQPKKDISNYQVEQAQVLLKREKEIPPTVFPNRSPWCQNPYVSAHPYCPLIEPHNTSTAGGRLDRQPRTRSTRPNRASGSKKKKTSESQKQ

SEQ ID NO: 7939 - protein, 105 aa, Homo sapiens
QWTASTATITKEKQDQPKKDISNYQVEQAQVLLKREKEIPPTVFPNRSPWCQNPYVSAHPYCPLIEPHNTSTAGGRLDRQPRTRSTRPNRASGSKKKKTSESQKQ

SEQ ID NO: 7940 - protein, 163 aa, Homo sapiens
  VARIANT 1: note = misc_feature - Xaa can be any naturally occurring amino acid
XDKFRASPDCITILCKPNGQAIAWYTPIHWKQAWEKLDADVEFNRCSVVSPTFRKRVFQWTASTATITKEKQDQPKKDISNYQVEQAQVLLKREKEIPPTVFPNRSPWCQNPYVSAHPYCPLIEPHNTSTAGGRLDRQPRTRSTRPNRASGSKKKKTSESQKQ

SEQ ID NO: 7941 - protein, 632 aa, Homo sapiens
MKALLLLVLPWLSPANYIDNVGNLHFLYSELCKGASHYGLTKDRKRRSQDGCPDGCASLTATAPSPEVSAAATISLMTDEPGLDNPAYVSSAEDGQPAISPVDSGRSNRTRARPFERSTIRSRSFKKINRALSVLRRTKSGSAVANHADQGRENSENTTAPEVFPRLYHLIPDGEITSIKINRVDPSESLSIRLVGGSETPLVHIIIQHIYRDGVIARDGRLLPGDIILKVNGMDISNVPHNYAVRLLRQPCQVLWLTVMREQKFRSRNNGQAPDAYRPRDDSFHVILNKSSPEEQLGIKLVRKVDEPGVFIFNVLDGGVAYRHGQLEENDRVLAINGHDLRYGSPESAAHLIQASERRVHLVVSRQVRQRSPDIFQEAGWNSNGSWSPGPGERSNTPKPLHPTITCHEKVVNIQKDPGESLGMTVAGGASHREWDLPIYVISVEPGGVISRDGRIKTGDILLNVDGVELTEVSRSEAVALLKRTSSSIVLKALEVKEYEPQEDCSSPAALDSNHNMAPPSDWSPSWVMWLELPRCLYNCKDIVLRRNTAGSLGFCIVGGYEEYNGNKPFFIKSIVEGTPAYNDGRIRCGDILLAVNGRSTSGMIHACLARLLKELKGRITLTIVSWPGTFL

SEQ ID NO: 7942 - protein, 6 aa, Homo sapiens
MNQPES

SEQ ID NO: 7943 - protein, 16 aa, Homo sapiens
MNQPESANDPEPLCAV

SEQ ID NO: 7944 - protein, 90 aa, Homo sapiens
MNQPESANDPEPLCAVCGQAHSLEENHFYSYPEEVDDDLICHICLQALLDPLDTPCGHTYCTLCLTNFLVEKDFCPMDRKPLVLQHCKKS

SEQ ID NO: 7945 - protein, 99 aa, Homo sapiens
MNQPESANDPEPLCAVCGQAHSLEENHFYSYPEEVDDDLICHICLQALLDPLDTPCGHTYCTLCLTNFLVEKDFCPMDRKPLVLQHCKKSSILVNKLLN

SEQ ID NO: 7946 - protein, 126 aa, Homo sapiens
MNQPESANDPEPLCAVCGQAHSLEENHFYSYPEEVDDDLICHICLQALLDPLDTPCGHTYCTLCLTNFLVEKDFCPMDRKPLVLQHCKKSSILVNKLLNKLLVTCPFREHCTQVLQRCDLEHHFQT

SEQ ID NO: 7947 - protein, 728 aa, Homo sapiens
MNQPESANDPEPLCAVCGQAHSLEENHFYSYPEEVDDDLICHICLQALLDPLDTPCGHTYCTLCLTNFLVEKDFCPMDRKPLVLQHCKKSSILVNKLLNKLLVTCPFREHCTQVLQRCDLEHHFQTSCKGASHYGLTKDRKRRSQDGCPDGCASLTATAPSPEVSAAATISLMTDEPGLDNPAYVSSAEDGQPAISPVDSGRSNRTRARPFERSTIRSRSFKKINRALSVLRRTKSGSAVANHADQGRENSENTTAPEVFPRLYHLIPDGEITSIKINRVDPSESLSIRLVGGSETPLVHIIIQHIYRDGVIARDGRLLPGDIILKVNGMDISNVPHNYAVRLLRQPCQVLWLTVMREQKFRSRNNGQAPDAYRPRDDSFHVILNKSSPEEQLGIKLVRKVDEPGVFIFNVLDGGVAYRHGQLEENDRVLAINGHDLRYGSPESAAHLIQASERRVHLVVSRQVRQRSPDIFQEAGWNSNGSWSPGPGERSNTPKPLHPTITCHEKVVNIQKDPGESLGMTVAGGASHREWDLPIYVISVEPGGVISRDGRIKTGDILLNVDGVELTEVSRSEAVALLKRTSSSIVLKALEVKEYEPQEDCSSPAALDSNHNMAPPSDWSPSWVMWLELPRCLYNCKDIVLRRNTAGSLGFCIVGGYEEYNGNKPFFIKSIVEGTPAYNDGRIRCGDILLAVNGRSTSGMIHACLARLLKELKGRITLTIVSWPGTFL

SEQ ID NO: 7948 - protein, 417 aa, Homo sapiens
MRFAWTVLLLGPLQLCALVHCAPPAAGQQQPPREPPAAPGAWRQQIQWENNGQVFSLLSLGSQYQPQRRRDPGAAVPGAANASAQQPRTPILLIRDNRTAAARTRTAGSSGVTAGRPRPTARHWFQAGYSTSRAREAGASRAENQTAPGEVPALSNLRPPSRVDGMVGDDPYNPYKYSDDNPYYNYYDTYERPRPGGRYRPGYGTGYFQYGLPDLVADPYYIQASTYVQKMSMYNLRCAAEENCLASTAYRADVRDYDHRVLLRFPQRVKNQGTSDFLPSRPRYSWEWHSCHQHYHSMDEFSHYDLLDANTQRRVAEGHKASFCLEDTSCDYGYHRRFACTAHTQGLSPGCYDTYGADIDCQWIDITDVKPGNYILKVSVNPSYLVPESDYTNNVVRCDIRYTGHHAYASGCTISPY

SEQ ID NO: 7949 - protein, 417 aa, Homo sapiens; identical to SEQ ID NO: 7948

SEQ ID NO: 7950 - protein, 61 aa, Homo sapiens
YNPYKYSDDNPYYNYYDTYERPRPGGRYRPGYGTGYFQYVQHTGQMSEIMITGCCSDFPKE

SEQ ID NO: 7951 - protein, 574 aa, Homo sapiens
MALARGSRQLGALVWGACLCVLVHGQQAQPGQGSDPARWRQLIQWENNGQVYSLLNSGSEYVPAGPQRSESSSRVLLAGAPQAQQRRSHGSPRRRQAPSLPLPGRVGSDTVRGQARHPFGFGQVPDNWREVAVGDSTGMARARTSVSQQRHGGSASSVSASAFASTYRQQPSYPQQFPYPQAPFVSQYENYDPASRTYDQGFVYYRPAGGGVGAGAAAVASAGVIYPYQPRARYEEYGGGEELPEYPPQGFYPAPERPYVPPPPPPPDGLDRRYSHSLYSEGTPGFEQAYPDPGPEAAQAHGGDPRLGWYPPYANPPPEAYGPPRALEPPYLPVRSSDTPPPGGERNGAQQGRLSVGSVYRPNQNGRGLPDLVPDPNYVQASTYVQRAHLYSLRCAAEEKCLASTAYAPEATDYDVRVLLRFPQRVKNQGTADFLPNRPRHTWEWHSCHQHYHSMDEFSHYDLLDAATGKKVAEGHKASFCLEDSTCDFGNLKRYACTSHTQGLSPGCYDTYNADIDCQWIDITDVQPGNYILKVHVNPKYIVLESDFTNNVVRCNIHYTGRYVSATNCKIVQS

SEQ ID NO: 7952 - protein, 431 aa, Homo sapiens
MALARGSRQLGALVWGACLCVLVHGQQAQPGQGSDPARWRQLIQWENNGQVYSLLNSGSEYVPAGPQRSESSSRVLLAGAPQAQQRRSHGSPRRRQAPSLPLPGRVGSDTVRGQARHPFGFGQVPDNWREVAVGDSTGMARARTSVSQQRHGGSASSVSASAFASTYRQQPSYPQQFPYPQAPFVSQYENYDPASRTYDQGFVYYRPAGGGVGAGAAAVASAGVIYPYQPRARYEEYGGGEELPEYPPQGFYPAPERPYVPPPPPPPDGLDRRYSHSLYSEGTPGFEQAYPDPGPEAAQAHGGDPRLGWYPPYANPPPEAYGPPRALEPPYLPVRSSDTPPPGGERNGAQQGRLSVGSVYRPNQNGRVTPAQTPACPGRKVEGQEQDGQAPGSGTSWGTRDHKDGGSLQTSPGRLTPGLAGERARASLRSP

SEQ ID NO: 7953 - protein, 258 aa, Homo sapiens
MEASKVLDKSKAAAIGDQSRPLCSRKGLSGGGSGGGPPWRARSQPGHCGSLKPKSSCCFCTPPVPPSCAGPLRGIISPKTGMERPLCSHLCSCLAMLALLSPLSLAQYDSWPHYPEYFQQPAPEYHQPQAPANVAKIQLRLAGQKRKHSEGRVEVYYDGQWGTVCDDDFSIHAAHVVCRELGYVEAKSWTASSSYGKGEGPIWLDNLHCTGNEATLAACTSNGWGVTDCKHTEDVGVVCSDKRIPGFKFDNSLINQIE

SEQ ID NO: 7954 - protein, 218 aa, Homo sapiens
MEASKVLDKSKAAESSCCFCTPPVPPSCAGPLRGIISPKTGMERPLCSHLCSCLAMLALLSPLSLAQYDSWPHYPEYFQQPAPEYHQPQAPANVAKIQLRLAGQKRKHSEGRVEVYYDGQWGTVCDDDFSIHAAHVVCRELGYVEAKSWTASSSYGKGEGPIWLDNLHCTGNEATLAACTSNGWGVTDCKHTEDVGVVCSDKRIPGFKFDNSLINQIE

SEQ ID NO: 7955 - protein, 101 aa, Homo sapiens
MERPLCSHLCSCLAMLALLSPLSLAQYDSWPHYPEYFQQPAPEYHQPQAPANVAKIQLHLVLARRCQQQQSGHEWSEVLGNGAVPGALPPRRGGRGLPPGR

SEQ ID NO: 7956 - protein, 96 aa, Homo sapiens
MERPLCSHLCSCLAMLALLSPLSLAQYDSWPHYPEYFQQPAPEYHQPQAPANVAKIQLRLAGQKRKHSEGRVEVYYDGQWGTVCDDDFSIHAAHVV

SEQ ID NO: 7957 - protein, 139 aa, Homo sapiens
MERPLCSHLCSCLAMLALLSPLSLAQYDSWPHYPEYFQQPAPEYHQPQAPANVAKIQLRLAGQKRKHSEGRVEVYYDGQWGTVCDDDFSIHAAHVVCRELGYVEAKSWTASSSYGKGEGPIWLDNLHCTGNEATLAACT

SEQ ID NO: 7958 - protein, 151 aa, Homo sapiens
MERPLCSHLCSCLAMLALLSPLSLAQYDSWPHYPEYFQQPAPEYHQPQAPANVAKIQLRLAGQKRKHSEGRVEVYYDGQWGTVCDDDFSIHAAHVVCRELGYVEAKSWTASSSYGKGEGPIWLDNLHCTGNEATLAACTSNGWGVTDCKHT

SEQ ID NO: 7959 - protein, 774 aa, Homo sapiens
MERPLCSHLCSCLAMLALLSPLSLAQYDSWPHYPEYFQQPAPEYHQPQAPANVAKIQLRLAGQKRKHSEGRVEVYYDGQWGTVCDDDFSIHAAHVVCRELGYVEAKSWTASSSYGKGEGPIWLDNLHCTGNEATLAACTSNGWGVTDCKHTEDVGVVCSDKRIPGFKFDNSLINQIENLNIQVEDIRIRAILSTYRKRTPVMEGYVEVKEGKTWKQICDKHWTAKNSRVVCGMFGFPGERTYNTKVYKMFASRRKQRYWPFSMDCTGTEAHISSCKLGPQVSLDPMKNVTCENGLPAVVSCVPGQVFSPDGPSRFRKAYKPEQPLVRLRGGAYIGEGRVEVLKNGEWGTVCDDKWDLVSASVVCRELGFGSAKEAVTGSRLGQGIGPIHLNEIQCTGNEKSIIDCKFNAESQGCNHEEDAGVRCNTPAMGLQKKLRLNGGRNPYEGRVEVLVERNGSLVWGMVCGQNWGIVEAMVVCRQLGLGFASNAFQETWYWHGDVNSNKVVMSGVKCSGTELSLAHCRHDGEDVACPQGGVQYGAGVACSETAPDLVLNAEMVQQTTYLEDRPMFMLQCAMEENCLSASAAQTDPTTGYRRLLRFSSQIHNNGQSDFRPKNGRHAWIWHDCHRHYHSMEVFTHYDLLNLNGTKVAEGHKASFCLEDTECEGDIQKNYECANFGDQGITMGCWDMYRHDIDCQWVDITDVPPGDYLFQVVINPNFEVAESDYSNNIMKCRSRYDGHRIWMYNCHIGGSFSEETEKKFEHFSGLLNNQLSPQ

SEQ ID NO: 7960 - protein, 67 aa, Homo sapiens
RIRAILSTYRKRTPVMEGYVEVKEGKTWKQICDKHWTAKNSRVVCGMFGFPGERTYNTKVYNNPWCD

SEQ ID NO: 7961 - protein, 207 aa, Homo sapiens
  VARIANT 1: note = misc_feature - Xaa can be any naturally occurring amino acid
XENGLPAVVSCVPGQVFSPDGPSRFRKAYKPEQDRVSLQQPLVRLRGGAYIGEGRVEVLKNGEWGTVCDDKWDLVSASVVCRELGFGSAKEAVTGSRLGQGIGPIHLNEIQCTGNEKSIIDCKFNAESQGCNHEEDAGVRCNTPAMGLQKKLRLNGGRNPYEGRVEVLVERNGSLVWGMVCGQNWGIVEAMVVCRQLGLGFASNAFQ

SEQ ID NO: 7962 - protein, 586 aa, Homo sapiens
MRPVSVWQWSPWGLLLCLLCSSCLGSPSPSTGPEKKAGSQGLRFRLAGFPRKPYEGRVEIQRAGEWGTICDDDFTLQAAHILCRELGFTEATGWTHSAKYGPGTGRIWLDNLSCSGTEQSVTECASRGWGNSDCTHDEDAGVICKDQRLPGFSDSNVIEARVRLKGGAHPGEGRVEVLKASTWGTVCDRKWDLHAASVVCRELGFGSAREALSGARMGQGMGAIHLSEVRCSGQELSLWKCPHKNITAEDCSHSQDAGVRCNLPYTGAETRIRLSGGRSQHEGRVEVQIGGPGPLRWGLICGDDWGTLEAMVACRQLGLGYANHGLQETWYWDSGNITEVVMSGVRCTGTELSLDQCAHHGTHITCKRTGTRFTAGVICSETASDLLLHSALVQETAYIEDRPLHMLYCAAEENCLASSARSANWPYGHRRLLRFSSQIHNLGRADFRPKAGRHSWVWHECHGHYHSMDIFTHYDILTPNGTKVAEGHKASFCLEDTECQEDVSKRYECANFGEQGITVGCWDLYRHDIDCQWIDITDVKPGNYILQVVINPNFEVAESDFTNNAMKCNCKYDGHRIWVHNCHIGI

SEQ ID NO: 7963 - protein, 608 aa, Homo sapiens
MRPVSVWQWSPWGLLLCLLCSSCLGSPSPSTGPEKKAGSQGLRFRLAGFPRKPYEGRVEIQRAGEWGTICDDDFTLQAAHILCRELGFTEATGWTHSAKYGPGTGRIWLDNLSCSGTEQSVTECASRGWGNSDCTHDEDAGVICKDQRLPGFSDSNVIEARVRLKGGAHPGEGRVEVLKASTWGTVCDRKWDLHAASVVCRELGFGSAREALSGARMGQGMGAIHLSEVRCSGQELSLWKCPHKNITAEDCSHSQDAGVRCNLPYTGAETRIRLSGGRSQHEGRVEVQIGGPGPLRWGLICGDDWGTLEAMVACRQLGLGYANHGLQETWYWDSGNITEVVMSGVRCTGTELSLDQCAHHGTHITCKRTGTRFTAGVICSETASDLLLHSALVQETAYIEDRPLHMLYCAAEENCLASSARSANWPYGHRRLLRFSSQIHNLGRADFRPKAGRHSWVWHECHGHYHSMDIFTHYDILTPNGTKVAEGHKASFCLEDTECQEDVSKRYECANFGEQGITVGCWDLYRHDIDCQWIDITDVKPGNYILQVVINPNFEVAESDFTNNAMKCNCKYDGHRIWVHNCHIGDAFSEEANRRFERYPGQTSNQII

SEQ ID NO: 7964 - protein, 753 aa, Homo sapiens
MRPVSVWQWSPWGLLLCLLCSSCLGSPSPSTGPEKKAGSQGLRFRLAGFPRKPYEGRVEIQRAGEWGTICDDDFTLQAAHILCRELGFTEATGWTHSAKYGPGTGRIWLDNLSCSGTEQSVTECASRGWGNSDCTHDEDAGVICKDQRLPGFSDSNVIEVEHHLQVEEVRIRPAVGWGRRPLPVTEGLVEVRLPDGWSQVCDKGWSAHNSHVVCGMLGFPSEKRVNAAFYRLLAQRQQHSFGLHGVACVGTEAHLSLCSLEFYRANDTARCPGGGPAVVSCVPGPVYAASSGQKKQQQSKPQGEARVRLKGGAHPGEGRVEVLKASTWGTVCDRKWDLHAASVVCRELGFGSAREALSGARMGQGMGAIHLSEVRCSGQELSLWKCPHKNITAEDCSHSQDAGVRCNLPYTGAETRIRLSGGRSQHEGRVEVQIGGPGPLRWGLICGDDWGTLEAMVACRQLGLGYANHGLQETWYWDSGNITEVVMSGVRCTGTELSLDQCAHHGTHITCKRTGTRFTAGVICSETASDLLLHSALVQETAYIEDRPLHMLYCAAEENCLASSARSANWPYGHRRLLRFSSQIHNLGRADFRPKAGRHSWVWHECHGHYHSMDIFTHYDILTPNGTKVAEGHKASFCLEDTECQEDVSKRYECANFGEQGITVGCWDLYRHDIDCQWIDITDVKPGNYILQVVINPNFEVAESDFTNNAMKCNCKYDGHRIWVHNCHIGDAFSEEANRRFERYPGQTSNQII

SEQ ID NO: 7965 - protein, 303 aa, Homo sapiens
MRPVSVWQWSPWGLLLCLLCSSCLGSPSPSTGPEKKAGSQGLRFRLAGFPRKPYEGRVEIQRAGEWGTICDDDFTLQAAHILCRELGFTEATGWTHSAKYGPGTGRIWLDNLSCSGTEQSVTECASRGWGNSDCTHDEDAGVICKDQRLPGFSDSNVIEVEHHLQVEEVRIRPAVGWGRRPLPVTEGLVEVRLPDGWSQVCDKGWSAHNSHVVCGMLGFPSEKRVNAAFYRLLAQRQQHSFGLHGVACVGTEAHLSLCSLEFYRANDTARCPGGGPAVVSCVPGPVYAASSGQKKQQQSKPQG

SEQ ID NO: 7966 - protein, 471 aa, Homo sapiens
MRPVSVWQWSPWGLLLCLLCSSCLGSPSPSTGPEKKAGSQGLRFRLAGFPRKPYEGRVEIQRAGEWGTICDDDFTLQAAHILCRELGFTEATGWTHSAKYGPGTGRIWLDNLSCSGTEQSVTECASRGWGNSDCTHDEDAGVICKDQRLPGFSDSNVIEVEHHLQVEEVRIRPAVGWGRRPLPVTEGLVEVRLPDGWSQVCDKGWSAHNSHVVCGMLGFPSEKRVNAAFYRLLAQRQQHSFGLHGVACVGTEAHLSLCSLEFYRANDTARCPGGGPAVVSCVPGPVYAASSGQKKQQQSKPQGEARVRLKGGAHPGEGRVEVLKASTWGTVCDRKWDLHAASVVCRELGFGSAREALSGARMGQDVSKRYECANFGEQGITVGCWDLYRHDIDCQWIDITDVKPGNYILQVVINPNFEVAESDFTNNAMKCNCKYDGHRIWVHNCHIGDAFSEEANRRFERYPGQTSNQII

SEQ ID NO: 7967 - protein, 697 aa, Homo sapiens
MRPVSVWQWSPWGLLLCLLCSSCLGSPSPSTGPEKKAGSQGLRFRLAGFPRKPYEGRVEIQRAGEWGTICDDDFTLQAAHILCRELGFTEATGWTHSAKYGPGTGRIWLDNLSCSGTEQSVTECASRGWGNSDCTHDEDAGVICKDQRLPGFSDSNVIEVEHHLQVEEVRIRPAVGWGRRPLPVTEGLVEVRLPDGWSQVCDKGWSAHNSHVVCGMLGFPSEKRVNAAFYRLLAQRQQHSFGLHGVACVGTEAHLSLCSLEFYRANDTARCPGGGPAVVSCVPGPVYAASSGQKKQQQSKPQGEARVRLKGGAHPGEGRVEVLKASTWGTVCDRKWDLHAASVVCRELGFGSAREALSGARMGQGMGAIHLSEVRCSGQELSLWKCPHKNITAEDCSHSQDAGVRCNLPYTGAETRETWYWDSGNITEVVMSGVRCTGTELSLDQCAHHGTHITCKRTGTRFTAGVICSETASDLLLHSALVQETAYIEDRPLHMLYCAAEENCLASSARSANWPYGHRRLLRFSSQIHNLGRADFRPKAGRHSWVWHECHGHYHSMDIFTHYDILTPNGTKVAEGHKASFCLEDTECQEDVSKRYECANFGEQGITVGCWDLYRHDIDCQWIDITDVKPGNYILQVVINPNFEVAESDFTNNAMKCNCKYDGHRIWVHNCHIGDAFSEEANRRFERYPGQTSNQII

SEQ ID NO: 7968 - protein, 180 aa, Homo sapiens
  VARIANT 1: note = misc_feature - Xaa can be any naturally occurring amino acid
XRQRLERPQQPRGLRDAGLPQRKEGQRGLLQARVRLKGGAHPGEGRVEVLKASTWGTVCDRKWDLHAASVVCRELGFGSAREALSGARMGQGMGAIHLSEVRCSGQELSLWKCPHKNITAEDCSHSQDAGVRCNLPYTGAETRIRLSGGRSQHEGRVEVQIGGPGPLRWGLICGDDWGTL

SEQ ID NO: 7969 - protein, 756 aa, Homo sapiens
MAWSPPATLFLFLLLLGQPPPSRPQSLGTTKLRLVGPESKPEEGRLEVLHQGQWGTVCDDNFAIQEATVACRQLGFEAALTWAHSAKYGQGEGPIWLDNVRCVGTESSLDQCGSNGWGVSDCSHSEDVGVICHPRRHRGYLSETVSNALGPQGRRLEEVRLKPILASAKQHSPVTEGAVEVKYEGHWRQVCDQGWTMNNSRVVCGMLGFPSEVPVDSHYYRKVWDLKMRDPKSRLKSLTNKNSFWIHQVTCLGTEPHMANCQVQVAPARGKLRPACPGGMHAVVSCVAGPHFRPPKTKPQRKGSWAEEPRVRLRSGAQVGEGRVEVLMNRQWGTVCDHRWNLISASVVCRQLGFGSAREALFGARLGQGLGPIHLSEVRCRGYERTLSDCPALEGSQNGCQHENDAAVRCNVPNMGFQNQVRLAGGRIPEEGLLEVQVEVNGVPRWGSVCSENWGLTEAMVACRQLGLGFAIHAYKETWFWSGTPRAQEVVMSGVRCSGTELALQQCQRHGPVHCSHGGGRFLAGVSCMDSAPDLVMNAQLVQETAYLEDRPLSQLYCAHEENCLSKSADHMDWPYGYRRLLRFSTQIYNLGRTDFRPKTGRDSWVWHQCHRHYHSIEVFTHYDLLTLNGSKVAEGHKASFCLEDTNCPTGLQRRYACANFGEQGVTVGCWDTYRHDIDCQWVDITDVGPGNYIFQVIVNPHYEVAESDFSNNMLQCRCKYDGHRVWLHNCHTGNSYPANAELSLEQEQRLRNNLI

SEQ ID NO: 7970 - protein, 2040 aa, Homo sapiens
MEHKEVVLLLLLFLKSAAPEQSHVVQDCYHGDGQSYRGTYSTTVTGRTCQAWSSMTPHQHNRTTENYPNAGLIMNYCRNPDAVAAPYCYTRDPGVRWEYCNLTQCSDAEGTAVAPPTVTPVPSLEAPSEQAPTEQRPGVQECYHGNGQSYRGTYSTTVTGRTCQAWSSMTPHSHSRTPEYYPNAGLIMNYCRNPDAVAAPYCYTRDPGVRWEYCNLTQCSDAEGTAVAPPTVTPVPSLEAPSEQAPTEQRPGVQECYHGNGQSYRGTYSTTVTGRTCQAWSSMTPHSHSRTPEYYPNAGLIMNYCRNPDAVAAPYCYTRDPGVRWEYCNLTQCSDAEGTAVAPPTVTPVPSLEAPSEQAPTEQRPGVQECYHGNGQSYRGTYSTTVTGRTCQAWSSMTPHSHSRTPEYYPNAGLIMNYCRNPDAVAAPYCYTRDPGVRWEYCNLTQCSDAEGTAVAPPTVTPVPSLEAPSEQAPTEQRPGVQECYHGNGQSYRGTYSTTVTGRTCQAWSSMTPHSHSRTPEYYPNAGLIMNYCRNPDAVAAPYCYTRDPGVRWEYCNLTQCSDAEGTAVAPPTVTPVPSLEAPSEQAPTEQRPGVQECYHGNGQSYRGTYSTTVTGRTCQAWSSMTPHSHSRTPEYYPNAGLIMNYCRNPDAVAAPYCYTRDPGVRWEYCNLTQCSDAEGTAVAPPTVTPVPSLEAPSEQAPTEQRPGVQECYHGNGQSYRGTYSTTVTGRTCQAWSSMTPHSHSRTPEYYPNAGLIMNYCRNPDAVAAPYCYTRDPGVRWEYCNLTQCSDAEGTAVAPPTVTPVPSLEAPSEQAPTEQRPGVQECYHGNGQSYRGTYSTTVTGRTCQAWSSMTPHSHSRTPEYYPNAGLIMNYCRNPDPVAAPYCYTRDPSVRWEYCNLTQCSDAEGTAVAPPTITPIPSLEAPSEQAPTEQRPGVQECYHGNGQSYQGTYFITVTGRTCQAWSSMTPHSHSRTPAYYPNAGLIKNYCRNPDPVAAPWCYTTDPSVRWEYCNLTRCSDAEWTAFVPPNVILAPSLEAFFEQALTEETPGVQDCYYHYGQSYRGTYSTTVTGRTCQAWSSMTPHQHSRTPENYPNAGLTRNYCRNPDAEIRPWCYTMDPSVRWEYCNLTQCLVTESSVLATLTVVPDPSTEASSEEAPTEQSPGVQDCYHGDGQSYRGSFSTTVTGRTCQSWSSMTPHWHQRTTEYYPNGGLTRNYCRNPDAEISPWCYTMDPNVRWEYCNLTQCPVTESSVLATSTAVSEQAPTEQSPTVQDCYHGDGQSYRGSFSTTVTGRTCQSWSSMTPHWHQRTTEYYPNGGLTRNYCRNPDAEIRPWCYTMDPSVRWEYCNLTQCPVMESTLLTTPTVVPVPSTELPSEEAPTENSTGVQDCYRGDGQSYRGTLSTTITGRTCQSWSSMTPHWHRRIPLYYPNAGLTRNYCRNPDAEIRPWCYTMDPSVRWEYCNLTRCPVTESSVLTTPTVAPVPSTEAPSEQAPPEKSPVVQDCYHGDGRSYRGISSTTVTGRTCQSWSSMIPHWHQRTPENYPNAGLTENYCRNPDSGKQPWCYTTDPCVRWEYCNLTQCSETESGVLETPTVVPVPSMEAHSEAAPTEQTPVVRQCYHGNGQSYRGTFSTTVTGRTCQSWSSMTPHRHQRTPENYPNDGLTMNYCRNPDADTGPWCFTMDPSIRWEYCNLTRCSDTEGTVVAPPTVIQVPSLGPPSEQDCMFGNGKGYRGKKATTVTGTPCQEWAAQEPHRHSTFIPGTNKWAGLEKNYCRNPDGDINGPWCYTMNPRKLFDYCDIPLCASSSFDCGKPQVEPKKCPGSIVGGCVAHPHSWPWQVSLRTRFGKHFCGGTLISPEWVLTAAHCLKKSSRPSSYKVILGAHQEVNLESHVQEIEVSRLFLEPTQADIALLKLSRPAVITDKVMPACLPSPDYMVTARTECYITGWGETQGTFGTGLLKEAQLLVIENEVCNHYKYICAEHLARGTDSCQGDSGGPLVCFEKDKYILQGVTSWGLGCARPNKPGVYARVSRFVTWIEGMMRNN

SEQ ID NO: 7971 - protein, 571 aa, Homo sapiens
SGLIMNYCRNPDAVAAPYCYTRDPGVRWEYCNLTQCSDAEGTAVAPPTVTPVPSLEAPSEQAPTEQRPGVQECYHGNGQSYRGTYSTTVTGRTCQAWSSMTPHSHSRTPEYYPNAGLIMNYCRNPDAVAAPYCYTRDPGVRWEYCNLTQCSDAEGTAVAPPTVTPVPSLEAPSEQAPTEQRPGVQECYHGNGQSYRGTYSTTVTGRTCQAWSSMTPHSHSRTPEYYPNAGLIMNYCRNPDAVAAPYCYTRDPGVRWEYCNLTQCSDAEGTAVAPPTVTPVPSLEAPSEQAPTEQRPGVQECYHGNGQSYRGTYSTTVTGRTCQAWSSMTPHSHSRTPEYYPNAGLIMNYCRNPDAVAAPYCYTRDPGVRWEYCNLTQCSDAEGTAVAPPTVTPVPSLEAPSEQAPTEQRPGVQECYHGNGQSYRGTYSTTVTGRTCQAWSSMTPHSHSRTPEYYPNAGLIMNYCRNPDAVAAPYCYTRDPGVRWEYCNLTQCSDAEGTAVAPPTVTPVPSLEAPSEQAPTEQRPGVQECYHGNGQSYRGTYSTTVTGRTCQAWSSMTPHSHSRTPEYYPNA

SEQ ID NO: 7972 - protein, 613 aa, Homo sapiens
SGLIMNYCRNPDAVAAPYCYTRDPGVRWEYCNLTQCSDAEGTAVAPPTVTPVPSLEAPSEQAPTEQRPGVQECYHGNGQSYRGTYSTTVTGRTCQAWSSMTPHSHSRTPEYYPNAGLIMNYCRNPDPVAAPYCYTRDPSVRWEYCNLTQCSDAEGTAVAPPTITPIPSLEAPSEQAPTEQRPGVQECYHGNGQSYQGTYFITVTGRTCQAWSSMTPHSHSRTPAYYPNAGLIKNYCRNPDPVAAPWCYTTDPSVRWEYCNLTRCSDAEWTAFVPPNVILAPSLEAFFEQALTEETPGVQDCYYHYGQSYRGTYSTTVTGRTCQAWSSMTPHQHSRTPENYPNAGLTRNYCRNPDAEIRPWCYTMDPSVRWEYCNLTQCLVTESSVLATLTVVPDPSTEASSEEAPTEQSPGVQDCYHGDGQSYRGSFSTTVTGRTCQSWSSMTPHWHQRTTEYYPNGGLTRNYCRNPDAEISPWCYTMDPNVRWEYCNLTQCPVTESSVLATSTAVSEQAPTEQSPTVQDCYHGDGQSYRGSFSTTVTGRTCQSWSSMTPHWHQRTTEYYPNGGLTRNYCRNPDAEIRPWCYTMDPSVRWEYCNLTQCPVMESTLLTTPTVVP

SEQ ID NO: 7973 - protein, 39 aa, Homo sapiens
MESKALLVLTLAVWLQSLTASRGGVAAADLILKLQIFKF

SEQ ID NO: 7974 - protein, 106 aa, Homo sapiens
MESKALLVLTLAVWLQSLTASRGGVAAADQRRDFIDIESKFALRTPEDTAEDTCHLIPGVAESVATCHFNHSSKTFMVIHGWTVTGMYESWVPKLVAALYKREPDS

SEQ ID NO: 7975 - protein, 130 aa, Homo sapiens
MESKALLVLTLAVWLQSLTASRGGVAAADQRRDFIDIESKFALRTPEDTAEDTCHLIPGVAESVATCHFNHSSKTFMVIHGWTVTGMYESWVPKLVAALYKREPDSNVIVVDWLSRAQEHYPVSAGYTKL

SEQ ID NO: 7976 - protein, 475 aa, Homo sapiens
MESKALLVLTLAVWLQSLTASRGGVAAADQRRDFIDIESKFALRTPEDTAEDTCHLIPGVAESVATCHFNHSSKTFMVIHGWTVTGMYESWVPKLVAALYKREPDSNVIVVDWLSRAQEHYPVSAGYTKLVGQDVARFINWMEEEFNYPLDNVHLLGYSLGAHAAGIAGSLTNKKVNRITGLDPAGPNFEYAEAPSRLSPDDADFVDVLHTFTRGSPGRSIGIQKPVGHVDIYPNGGTFQPGCNIGEAIRVIAERGLGDVDQLVKCSHERSIHLFIDSLLNEENPSKAYRCSSKEAFEKGLCLSCRKNRCNNLGYEINKVRAKRSSKMYLKTRSQMPYKVFHYQVKIHFSGTESETHTNQAFEISLYGTVAESENIPFTLPEVSTNKTYSFLIYTEVDIGELLMLKLKWKSDSYFSWSDWWSSPGFAIQKIRVKAGETQKKVIFCSREKVSHLQKGKAPAVFVKCHDKSLNKKSG

SEQ ID NO: 7977 - protein, 115 aa, Homo sapiens
MVIHGWTVTGMYESWVPKLVAALYKREPDSNVIVVDWLSRAQEHYPVSAGYTKLVGQDVARFINWMEEEFNYPLDNVHLLGYSLGAHAAGIAGSLTNKKVNRITGLDPAGPNFEY

SEQ ID NO: 7978 - protein, 117 aa, Homo sapiens
FPPNDPKAGTQGKCMPFFRAGFVCPTPPYKSLAREQINALTSFLDASFVYSSEPSLASRLRNLSSPLGLMAVNQEVSDHGLPYLPYDSKKPSPCEFINTTARVPCFLAGKETEAQKC

SEQ ID NO: 7979 - protein, 95 aa, Homo sapiens
GCGAPAPVVRCDPCSPYRTITGDCNNRRKPALGAANRALARWLPAEYEDGLSLPFGWTPGKTRNGFPLPLAREVSNKIVGYLNEEGVLDQNRSTL

SEQ ID NO: 7980 - protein, 712 aa, Homo sapiens
MRVLLHLPALLASLILLQAAASTTRAQTTRTSAISDTVSQAKVQVNKAFLDSRTRLKTAMSSETPTSRQLSEYLKHAKGRTRTAIRNGQVWEESLKRLRQKASLTNVTDPSLDLTSLSLEVGCGAPAPVVRCDPCSPYRTITGDCNNRRKPALGAANRALARWLPAEYEDGLSLPFGWTPGKTRNGFPLPLAREVSNKIVGYLNEEGVLDQNRSLLFMQWGQIVDHDLDFAPDTELGSSEYSKAQCDEYCIQGDNCFPIMFPPNDPKAGTQGKCMPFFRAGFVCPTPPYKSLAREQINALTSFLDASFVYSSEPSLASRLRNLSSPLGLMAVNQEVSDHGLPYLPYDSKKPSPCEFINTTARVPCFLAGDSRASEHILLATSHTLFLREHNRLARELKRLNPQWDGEKLYQEARKILGAFVQIITFRDYLPILLGDHMQKWIPPYQGYSESVDPRISNVFTFAFRFGHLEVPSSMFRLDENYQPWGPEPELPLHTLFFNTWRMVKDGGIDPLVRGLLAKKSKLMKQNKMMTGELRNKLFQPTHRIHGFDLAAINTQRCRDHGQPGYNSWRAFCDLSQPQTLEELNTVLKSKMLAKKLLGLYGTPDNIDIWIGAIAEPLVERGRVGPLLACLLGKQFQQIRDGDRFWWENPGVFTNEQKDSLQKMSFSRLVCDNTRITKVPRDPFWANSYPYDFVDCSAIDKLDLSPWASVKN

SEQ ID NO: 7981 - protein, 629 aa, Homo sapiens
MRVLLHLPALLASLILLQAAASTTRDPSLDLTSLSLEVGCGAPAPVVRCDPCSPYRTITGDCNNRRKPALGAANRALARWLPAEYEDGLSLPFGWTPGKTRNGFPLPLAREVSNKIVGYLNEEGVLDQNRSLLFMQWGQIVDHDLDFAPDTELGSSEYSKAQCDEYCIQGDNCFPIMFPPNDPKAGTQGKCMPFFRAGFVCPTPPYKSLAREQINALTSFLDASFVYSSEPSLASRLRNLSSPLGLMAVNQEVSDHGLPYLPYDSKKPSPCEFINTTARVPCFLAGDSRASEHILLATSHTLFLREHNRLARELKRLNPQWDGEKLYQEARKILGAFVQIITFRDYLPILLGDHMQKWIPPYQGYSESVDPRISNVFTFAFRFGHLEVPSSMFRLDENYQPWGPEPELPLHTLFFNTWRMVKDGGIDPLVRGLLAKKSKLMKQNKMMTGELRNKLFQPTHRIHGFDLAAINTQRCRDHGQPGYNSWRAFCDLSQPQTLEELNTVLKSKMLAKKLLGLYGTPDNIDIWIGAIAEPLVERGRVGPLLACLLGKQFQQIRDGDRFWWENPGVFTNEQKDSLQKMSFSRLVCDNTRITKVPRDPFWANSYPYDFVDCSAIDKLDLSPWASVKN

SEQ ID NO: 7982 - protein, 629 aa, Homo sapiens; identical to SEQ ID NO: 7981

SEQ ID NO: 7983 - protein, 123 aa, Homo sapiens
MSSETPTSRQLSEYLKHAKGRTRTAIRNGQVWEESLKRLRQKASLTNVTDPSLDLTSLSLEVGCGAPAPVVRCDPCSPYRTITGDCNNRRKPALGAANRALARWLPAEYEDGLSLPFGWTPGK

SEQ ID NO: 7984 - protein, 653 aa, Homo sapiens
MSSETPTSRQLSEYLKHAKGRTRTAIRNGQVWEESLKRLRQKASLTNVTDPSLDLTSLSLEVGCGAPAPVVRCDPCSPYRTITGDCNNRRKPALGAANRALARWLPAEYEDGLSLPFGWTPGKTRNGFPLPLAREVSNKIVGYLNEEGVLDQNRSLLFMQWGQIVDHDLDFAPDTELGSSEYSKAQCDEYCIQGDNCFPIMFPPNDPKAGTQGKCMPFFRAGFVCPTPPYKSLAREQINALTSFLDASFVYSSEPSLASRLRNLSSPLGLMAVNQEVSDHGLPYLPYDSKKPSPCEFINTTARVPCFLAGDSRASEHILLATSHTLFLREHNRLARELKRLNPQWDGEKLYQEARKILGAFVQIITFRDYLPILLGDHMQKWIPPYQGYSESVDPRISNVFTFAFRFGHLEVPSSMFRLDENYQPWGPEPELPLHTLFFNTWRMVKDGGIDPLVRGLLAKKSKLMKQNKMMTGELRNKLFQPTHRIHGFDLAAINTQRCRDHGQPGYNSWRAFCDLSQPQTLEELNTVLKSKMLAKKLLGLYGTPDNIDIWIGAIAEPLVERGRVGPLLACLLGKQFQQIRDGDRFWWENPGVFTNEQKDSLQKMSFSRLVCDNTRITKVPRDPFWANSYPYDFVDCSAIDKLDLSPWASVKN

SEQ ID NO: 7985 - protein, 69 aa, Homo sapiens
MKNPMLEVVSLLLEKLLLISNFTLFSSGAAGEDKGRNSFYETSSFHRGDVLEVPRTHLTHYGIYLGDNR

SEQ ID NO: 7986 - protein, 230 aa, Homo sapiens
MKNPMLEVVSLLLEKLLLISNFTLFSSGAAGEDKGRNSFYETSSFHRGDVLEVPRTHLTHYGIYLGDNRVAHMMPDILLALTDDMGRTQKVVSNKRLILGVIVKVASIRVDTVEDFAYGANILVNHLDESLQKKALLNEEVARRAEKLLGFTPYSLLWNNCEHFVTYCRYGTPISPQSDKFCETVKIIIRDQRSVLASAVLGLASIVCTGLVSYTTLPAIFIPFFLWMAG

SEQ ID NO: 7987 - protein, 230 aa, Homo sapiens; identical to SEQ ID NO: 7986

SEQ ID NO: 7988 - protein, 214 aa, Homo sapiens
AVLDFVKQKASQSPQKQHPLLDGVDGECPFPSRRSQHTDDSALCMSDDRPNALLSSPATETGHASPLPPSAAPTTDSTDSITGQNSRQREEELELIDQLRKHIEYRLKVSLPCDLGAALTDGVVLCHLANHVRPRSVPSIHVPSPAVPKLTMAKCRRNVENFLEACRKIGVPQEQLCLPLHILEEKGLSQVAVTVQALLELAPPKQQQHQLSAV

SEQ ID NO: 7989 - protein, 712 aa, Homo sapiens
MAAAGLVAVAAAAEYSGTVASGGNLPGVHCGPSSGAGPGFGPGSWSRSLDRALEEAAVTGVLSLSGRKLREFPRGAANHDLTDTTRADLSRNRLSEIPIEACHFVSLENLNLYQNCIRYIPEAILNLQALTFLNISRNQLSTLPVHLCNLPLKVLIASNNKLVSLPEEIGHLRHLMELDVSCNEIQTIPSQIGNLEALRDLNVRRNHLVHLPEELAELPLIRLDFSCNKITTIPVCYRNLRHLQTITLDNNPLQSPPAQICIKGKVHIFKYLNIQACKIAPDLPDYDRRPLGFGSCHEELYSSRPYGALDSGFNSVDSGDKRWSGNEPTDEFSDLPLRVAEITKEQRLRRESQYQENRGSLVVTNGGVEHDLDQIDYIDSCTAEEEEAEVRQPKGPDPDSLSSQFMAYIEQRRISHEGSPVKPVAIREFQKTEDMRRYLHQNRVPAEPSSLLSLSASHNQLSHTDLELHQRREQLVERTRREAQLAALQYEEEKIRTKQIQRDAVLDFVKQKASQSPQKQHPLLDGVDGECPFPSRRSQHTDDSALCMSLSGLNQVGCAATLPHSSAFTPLKSDDRPNALLSSPATETVHHSPAYSFPAAIQRNQPQRPESFLFRAGVRAETNKGHASPLPPSAAPTTDSTDSITGQNSRQREEELELIDQLRKHIEYRLKVSLPCDLGAALTDGVVLCHLANHVRPRSVPSIHVPSPAVVS

SEQ ID NO: 7990 - protein, 725 aa, Homo sapiens
MAAAGLVAVAAAAEYSGTVASGGNLPGVHCGPSSGAGPGFGPGSWSRSLDRALEEAAVTGVLSLSGRKLREFPRGAANHDLTDTTRADLSRNRLSEIPIEACHFVSLENLNLYQNCIRYIPEAILNLQALTFLNISRNQLSTLPVHLCNLPLKVLIASNNKLVSLPEEIGHLRHLMELDVSCNEIQTIPSQIGNLEALRDLNVRRNHLVHLPEELAELPLIRLDFSCNKITTIPVCYRNLRHLQTITLDNNPLQSPPAQICIKGKVHIFKYLNIQACKIAPDLPDYDRRPLGFGSCHEELYSSRPYGALDSGFNSVDSGDKRWSGNEPTDEFSDLPLRVAEITKEQRLRRESQYQENRGSLVVTNGGVEHDLDQIDYIDSCTAEEEEAEGSPVKPVAIREFQKTEDMRRYLHQNRVPAEPSSLLSLSASHNQLSHTDLELHQRREQLVERTRREAQLAALQYEEEKIRTKQIQRDAVLDFVKQKASQSPQKQHPLLDGVDGECPFPSRRSQHTDDSALCMSDDRPNALLSSPATETVHHSPAYSFPAAIQRNQPQRPESFLFRAGVRAETNKGHASPLPPSAAPTTDSTDSITGQNSRQREEELELIDQLRKHIEYRLKVSLPCDLGAALTDGVVLCHLANHVRPRSVPSIHVPSPAVPKLTMAKCRRNVENFLEACRKIGVPQEQLCLPLHILEEKGLSQVAVTVQALLELAPPKQQQHQLSAV

SEQ ID NO: 7991 - protein, 803 aa, Homo sapiens
MAAAGLVAVAAAAEYSGTVASGGNLPGVHCGPSSGAGPGFGPGSWSRSLDRALEEAAVTGVLSLSGRKLREFPRGAANHDLTDTTRADLSRNRLSEIPIEACHFVSLENLNLYQNCIRYIPEAILNLQALTFLNISRNQLSTLPVHLCNLPLKVLIASNNKLVSLPEEIGHLRHLMELDVSCNEIQTIPSQIGNLEALRDLNVRRNHLVHLPEELAELPLIRLDFSCNKITTIPVCYRNLRHLQTITLDNNPLQSPPAQICIKGKVHIFKYLNIQACKIAPDLPDYDRRPLGFGSCHEELYSSRPYGALDSGFNSVDSGDKRWSGNEPTDEFSDLPLRVAEITKEQRLRRESQYQENRGSLVVTNGGVEHDLDQIDYIDSCTAEEEEAEVRQPKGPDPDSLSSQFMAYIEQRRISHEGSPVKPVAIREFQKTEDMRRYLHQNRVPAEPSSLLSLSASHNQLSHTDLELHQRREQLVERTRREAQLAALQYEEEKIRTKQIQRDAVLDFVKQKASQSPQKQHPLLDGVDGECPFPSRRSQHTDDSALCMSLSGLNQVGCAATLPHSSAFTPLKSDDRPNALLSSPATETVHHSPAYSFPAAIQRNQPQRPESFLFRAGVRAETNKGHASPLPPSAAPTTDSTDSITGQNSRQREEELELIDQLRKHIEYRLKVSLPCDLGAALTDGVVLCHLANHVRPRSVPSIHVPSPAVPKLTMAKCRRNVENFLEACRKIGVPQDNLCSPSDILQLNLSVKRTVETLLSLGAHSEESSFVCLSLQLLGFVAFYCTVMLTLCVLYYWLFPAR

SEQ ID NO: 7992 - protein, 777 aa, Homo sapiens
MAAAGLVAVAAAAEYSGTVASGGNLPGVHCGPSSGAGPGFGPGSWSRSLDRALEEAAVTGVLSLSGRKLREFPRGAANHDLTDTTRADLSRNRLSEIPIEACHFVSLENLNLYQNCIRYIPEAILNLQALTFLNISRNQLSTLPVHLCNLPLKVLIASNNKLVSLPEEIGHLRHLMELDVSCNEIQTIPSQIGNLEALRDLNVRRNHLVHLPEELAELPLIRLDFSCNKITTIPVCYRNLRHLQTITLDNNPLQSPPAQICIKGKVHIFKYLNIQACKIAPDLPDYDRRPLGFGSCHEELYSSRPYGALDSGFNSVDSGDKRWSGNEPTDEFSDLPLRVAEITKEQRLRRESQYQENRGSLVVTNGGVEHDLDQIDYIDSCTAEEEEAEVRQPKGPDPDSLSSQFMAYIEQRRISHEGSPVKPVAIREFQKTEDMRRYLHQNRVPAEPSSLLSLSASHNQLSHTDLELHQRREQLVERTRREAQLAALQYEEEKIRTKQIQRDAVLDFVKQKASQSPQKQHPLLDGVDGECPFPSRRSQHTDDSALCMSLSGLNQVGCAATLPHSSAFTPLKSDDRPNALLSSPATETVHHSPAYSFPAAIQRNQPQRPESFLFRAGVRAETNKGHASPLPPSAAPTTDSTDSITGQNSRQREEELELIDQLRKHIEYRLKVSLPCDLGAALTDGVVLCHLANHVRPRSVPSIHVPSPAVPKLTMAKCRRNVENFLEACRKIGVPQEQLCLPLHILEEKGLSQVAVTVQALLELAPPKQQQHQLSAV

SEQ ID NO: 7993 - protein, 803 aa, Homo sapiens; identical to SEQ ID NO: 7991

SEQ ID NO: 7994 - protein, 623 aa, Homo sapiens
MAAAGLVAVAAAAEYSGTVASGGNLPGVHCGPSSGAGPGFGPGSWSRSLDRALEEAAVTGVLSLSGRKLREFPRGAANHDLTDTTRAELAELPLIRLDFSCNKITTIPVCYRNLRHLQTITLDNNPLQSPPAQICIKGKVHIFKYLNIQACKIAPDLPDYDRRPLGFGSCHEELYSSRPYGALDSGFNSVDSGDKRWSGNEPTDEFSDLPLRVAEITKEQRLRRESQYQENRGSLVVTNGGVEHDLDQIDYIDSCTAEEEEAEGSPVKPVAIREFQKTEDMRRYLHQNRVPAEPSSLLSLSASHNQLSHTDLELHQRREQLVERTRREAQLAALQYEEEKIRTKQIQRDAVLDFVKQKASQSPQKQHPLLDGVDGECPFPSRRSQHTDDSALCMSLSGLNQVGCAATLPHSSAFTPLKSDDRPNALLSSPATETVHHSPAYSFPAAIQRNQPQRPESFLFRAGVRAETNKGHASPLPPSAAPTTDSTDSITGQNSRQREEELELIDQLRKHIEYRLKVSLPCDLGAALTDGVVLCHLANHVRPRSVPSIHVPSPAVPKLTMAKCRRNVENFLEACRKIGVPQEQLCLPLHILEEKGLSQVAVTVQALLELAPPKQQQHQLSAV

SEQ ID NO: 7995 - protein, 92 aa, Homo sapiens
MAAAGLVAVAAAAEYSGTVASGGNLPGVHCGPSSGAGPGFGPGSWSRSLDRALEEAAVTGVLSLSGRKLREFPRGAANHDLTDTTRAGCELQ

SEQ ID NO: 7996 - protein, 227 aa, Homo sapiens
YEEEKIRTKQIQRDAVLDFVKQKASQSPQKQHPLLDGVDGECPFPSRRSQHTDDSALCMSLSGLNQVGCAATLPHSSAFTPLKSDDRPNALLSSPATETGHASPLPPSAAPTTDSTDSITGQNSRQREEELELIDQLRKHIEYRLKVSLPCDLGAALTDGVVLCHLANHVRPRSVPSIHVPSPAVPKLTMAKCRRNVENFLEACRKIGVPQDNLCSPSDILQLNLSV

SEQ ID NO: 7997 - protein, 159 aa, Homo sapiens
MAGPGWTLLLLLLLLLLLGSMAGYGPQKKLNLSHKGIGEPCRRHEECQSNCCTINSLAPHTLCTPKTIFLQCLPWRKPNGYRCSHDSECQSSCCVRNNSPQELCTPQSVFLQCVPWRKPNGDFCSSHQECHSQCCIQLREYSPFRCIPRTGILAQCLPL

SEQ ID NO: 7998 - protein, 139 aa, Homo sapiens
MAGPGWTLLLLLLLLLLLGSMAGYGPQKKLNLSHKGIGEPCRRHEECQSNCCTINSLAPHTLCTPKTIFLQCLPWRKVSPMGTDARTTQSARAAAASATTARRSCARPKASSCSVCPGASPTATSAAAIRSVTASAASS

SEQ ID NO: 7999 - protein, 46 aa, Homo sapiens
MAGPGWTLLLLLLLLLLLGSMAGYGPQKKLNLSHKKLLRKPKFEGW

SEQ ID NO: 8000 - protein, 61 aa, Homo sapiens
MAGPGWTLLLLLLLLLLLGSMAGYGPQKKLNLSHKPRAPSTDLPEPRQSGFVPETSQETQV

SEQ ID NO: 8001 - protein, 635 aa, Homo sapiens
MAPPLLLLLLASGAAACPLPCVCQNLSESLSTLCAHRGLLFVPPNVDRRTVELRLADNFIQALGPPDFRNMTGLVDLTLSRNAITRIGARAFGDLESLRSLHLDGNRLVELGTGSLRGPVNLQHLILSGNQLGRIAPGAFDDFLESLEDLDLSYNNLRQVPWAGIGAMPALHTLNLDHNLIDALPPGAFAQLGQLSRLDLTSNRLATLAPDPLFSRGRDAEASPAPLVLSFSGNPLHCNCELLWLRRLARPDDLETCASPPGLAGRYFWAVPEGEFSCEPPLIARHTQRLWVLEGQRATLRCRALGDPAPTMHWVGPDDRLVGNSSRARAFPNGTLEIGVTGAGDAGGYTCIATNPAGEATARVELRVLALPHGGNSSAEGGRPGPSDIAASARTAAEGEGTLESEPAVQVTEVTATSGLVSWGPGRPADPVWMFQIQYNSSEDETLIYRIVPASSHHFLLKHLVPGADYDLCLLALSPAAGPSDLTATRLLGCAHFSTLPASPLCHALQAHVLGGTLTVAVGGVLVAALLVFTVALLVRGRGAGNGRLPLKLSHVQSQTNGGPSPTPKAHPPRSPPPRPQRSCSLDLGDAGCYGYARRLGGAWARRSHSVHGGLLGAGCRGVGGSAERLEESVV

SEQ ID NO: 8002 - protein, 418 aa, Homo sapiens
MAPPLLLLLLASGAAACPLPCVCQNLSESLSTLCAHRGLLFVPPNVDRRTVELRLADNFIQALGPPDFRNMTGLVDLTLSRNAITRIGARAFGDLESLRSLHLDGNRLVELGTGSLRGPVNLQHLILSGNQLGRIAPGAFDDFLESLEDLDLSYNNLRQVPWAGIGAMPALHTLNLDHNLIDALPPGAFAQLGQLSRLDLTSNRLATLAPDPLFSRGRDAEASPAPLVLSFSGNPLHCNCELLWLRRLARPDDLETCASPPGLAGRYFWAVPEGEFSCEPPLIARHTQRLWVLEGQRATLRCRALGDPAPTMHWVGPDDRLVGNSSRARAFPNGTLEIGVTGAGDAGGYTCIATNPAGEATARVELRVLALPHGGNSRPGAAAWPGSPSLVFILSTSGSPVYLEGQGALSSVLASRPG

SEQ ID NO: 8003 - protein, 719 aa, Homo sapiens
MEKILFYLFLIGIAVKAQICPKRCVCQILSPNLATLCAKKGLLFVPPNIDRRTVELRLADNFVTNIKRKDFANMTSLVDLTLSRNTISFITPHAFADLRNLRALHLNSNRLTKITNDMFSGLSNLHHLILNNNQLTLISSTAFDDVFALEELDLSYNNLETIPWDAVEKMVSLHTLSLDHNMIDNIPKGTFSHLHKMTRLDVTSNKLQKLPPDPLFQRAQVLATSGIISPSTFALSFGGNPLHCNCELLWLRRLSREDDLETCASPPLLTGRYFWSIPEEEFLCEPPLITRHTHEMRVLEGQRATLRCKARGDPEPAIHWISPEGKLISNATRSLVYDNGTLDILITTVKDTGAFTCIASNPAGEATQIVDLHIIKLPHLLNSTNHIHEPDPGSSDISTSTKSGSNTSSSNGDTKLSQDKIVVAEATSSTALLKFNFQRNIPGIRMFQIQYNGTYDDTLVYRMIPPTSKTFLVNNLAAGTMYDLCVLAIYDDGITSLTATRVVGCIQFTTEQDYVRCHFMQSQFLGGTMIIIIGGIIVASVLVFIIILMIRYKVCNNNGQHKVTKVSNVYSQTNGAQIQGCSVTLPQSVSKQAVGHEENAQCCKATSDNVIQSSETCSSQDSSTTTSALPPSWTSSTSVSQKQKRKTGTKPSTEPQNEAVTNVESQNTNRNNSTALQLASRPPDSVTEGPTSKRAHIKPNALLTNVDQIVQETQRLELI

SEQ ID NO: 8004 - protein, 466 aa, Homo sapiens
MEKILFYLFLIGIAVKAQICPKRCVCQILSPNLATLCAKKGLLFVPPNIDRRTVELRLADNFVTNIKRKDFANMTSLVDLTLSRNTISFITPHAFADLRNLRALHLNSNRLTKITNDMFSGLSNLHHLILNNNQLTLISSTAFDDVFALEELDLSYNNLETIPWDAVEKMVSLHTLSLDHNMIDNIPKGTFSHLHKMTRLDVTSNKLQKLPPDPLFQRAQVLATSGIISPSTFALSFGGNPLHCNCELLWLRRLSREDDLETCASPPLLTGRYFWSIPEEEFLCEPPLITRHTHEMRVLEGQRATLRCKARGDPEPAIHWISPEGKLISNATRSLVYDNGTLDILITTVKDTGAFTCIASNPAGEATQIVDLHIIKLPHLLNSTNHIHEPDPGSSDISTSTKSGSNTSSSNGDTKLSQDKIVVAEATSSTALLKFNFQRNIPGIRMFQIQYNGTYDDTLVYRCFAD

SEQ ID NO: 8005 - protein, 465 aa, Homo sapiens
MEKILFYLFLIGIAVKAQICPKRCVCQILSPNLATLCAKKGLLFVPPNIDRRTVELRLADNFVTNIKRKDFANMTSLVDLTLSRNTISFITPHAFADLRNLRALHLNSNRLTKITNDMFSGLSNLHHLILNNNQLTLISSTAFDDVFALEELDLSYNNLETIPWDAVEKMVSLHTLSLDHNMIDNIPKGTFSHLHKMTRLDVTSNKLQKLPPDPLFQRAQVLATSGIISPSTFALSFGGNPLHCNCELLWLRRLSREDDLETCASPPLLTGRYFWSIPEEEFLCEPPLITRHTHEMRVLEGQRATLRCKARGDPEPAIHWISPEGKLISNATRSLVYDNGTLDILITTVKDTGAFTCIASNPAGEATQIVDLHIIKLPHLLNSTNHIHEPDPGSSDISTSTKSGSNTSSSNGDTKLSQDKIVVAEATSSTALLKFNFQRNIPGIRMFQIQYNGTYDDTLVYRGWS

SEQ ID NO: 8006 - protein, 347 aa, Homo sapiens
MSSWSRQRPKSPGGIQPHVSRTLFLLLLLAASAWGVTLSPKDCQVFRSDHGSSISCQPPAEIPGYLPADTVHLAVEFFNLTHLPANLLQGASKLQELHLSSNGLESLSPEFLRPVPQLRVLDLTRNALTGLPPGLFQASATLDTLVLKENQLEVLEVSWLHGLKALGHLDLSGNRLRKLPPGLLANFTLLRTLDLGENQLETLPPDLLRGPLQLERLHLEGNKLQVLGKDLLLPQPDLRYLFLNGNKLARVAAGAFQGLRQLDMLDLSNNSLASVPEGLWASLGQPNWDMRDGFDISGNPWICDQNLSDLYRWLQAQKDKMFSQNDTRCAGPEAVKGQTLLAVAKSQ

SEQ ID NO: 8007 - protein, 4544 aa, Homo sapiens
MLTPPLLLLLPLLSALVAAAIDAPKTCSPKQFACRDQITCISKGWRCDGERDCPDGSDEAPEICPQSKAQRCQPNEHNCLGTELCVPMSRLCNGVQDCMDGSDEGPHCRELQGNCSRLGCQHHCVPTLDGPTCYCNSSFQLQADGKTCKDFDECSVYGTCSQLCTNTDGSFICGCVEGYLLQPDNRSCKAKNEPVDRPPVLLIANSQNILATYLSGAQVSTITPTSTRQTTAMDFSYANETVCWVHVGDSAAQTQLKCARMPGLKGFVDEHTINISLSLHHVEQMAIDWLTGNFYFVDDIDDRIFVCNRNGDTCVTLLDLELYNPKGIALDPAMGKVFFTDYGQIPKVERCDMDGQNRTKLVDSKIVFPHGITLDLVSRLVYWADAYLDYIEVVDYEGKGRQTIIQGILIEHLYGLTVFENYLYATNSDNANAQQKTSVIRVNRFNSTEYQVVTRVDKGGALHIYHQRRQPRVRSHACENDQYGKPGGCSDICLLANSHKARTCRCRSGFSLGSDGKSCKKPEHELFLVYGKGRPGIIRGMDMGAKVPDEHMIPIENLMNPRALDFHAETGFIYFADTTSYLIGRQKIDGTERETILKDGIHNVEGVAVDWMGDNLYWTDDGPKKTISVARLEKAAQTRKTLIEGKMTHPRAIVVDPLNGWMYWTDWEEDPKDSRRGRLERAWMDGSHRDIFVTSKTVLWPNGLSLDIPAGRLYWVDAFYDRIETILLNGTDRKIVYEGPELNHAFGLCHHGNYLFWTEYRSGSVYRLERGVGGAPPTVTLLRSERPPIFEIRMYDAQQQQVGTNKCRVNNGGCSSLCLATPGSRQCACAEDQVLDADGVTCLANPSYVPPPQCQPGEFACANSRCIQERWKCDGDNDCLDNSDEAPALCHQHTCPSDRFKCENNRCIPNRWLCDGDNDCGNSEDESNATCSARTCPPNQFSCASGRCIPISWTCDLDDDCGDRSDESASCAYPTCFPLTQFTCNNGRCININWRCDNDNDCGDNSDEAGCSHSCSSTQFKCNSGRCIPEHWTCDGDNDCGDYSDETHANCTNQATRPPGGCHTDEFQCRLDGLCIPLRWRCDGDTDCMDSSDEKSCEGVTHVCDPSVKFGCKDSARCISKAWVCDGDNDCEDNSDEENCESLACRPPSHPCANNTSVCLPPDKLCDGNDDCGDGSDEGELCDQCSLNNGGCSHNCSVAPGEGIVCSCPLGMELGPDNHTCQIQSYCAKHLKCSQKCDQNKFSVKCSCYEGWVLEPDGESCRSLDPFKPFIIFSNRHEIRRIDLHKGDYSVLVPGLRNTIALDFHLSQSALYWTDVVEDKIYRGKLLDNGALTSFEVVIQYGLATPEGLAVDWIAGNIYWVESNLDQIEVAKLDGTLRTTLLAGDIEHPRAIALDPRDGILFWTDWDASLPRIEAASMSGAGRRTVHRETGSGGWPNGLTVDYLEKRILWIDARSDAIYSARYDGSGHMEVLRGHEFLSHPFAVTLYGGEVYWTDWRTNTLAKANKWTGHNVTVVQRTNTQPFDLQVYHPSRQPMAPNPCEANGGQGPCSHLCLINYNRTVSCACPHLMKLHKDNTTCYEFKKFLLYARQMEIRGVDLDAPYYNYIISFTVPDIDNVTVLDYDAREQRVYWSDVRTQAIKRAFINGTGVETVVSADLPNAHGLAVDWVSRNLFWTSYDTNKKQINVARLDGSFKNAVVQGLEQPHGLVVHPLRGKLYWTDGDNISMANMDGSNRTLLFSGQKGPVGLAIDFPESKLYWISSGNHTINRCNLDGSGLEVIDAMRSQLGKATALAIMGDKLWWADQVSEKMGTCSKADGSGSVVLRNSTTLVMHMKVYDESIQLDHKGTNPCSVNNGDCSQLCLPTSETTRSCMCTAGYSLRSGQQACEGVGSFLLYSVHEGIRGIPLDPNDKSDALVPVSGTSLAVGIDFHAENDTIYWVDMGLSTISRAKRDQTWREDVVTNGIGRVEGIAVDWIAGNIYWTDQGFDVIEVARLNGSFRYVVISQGLDKPRAITVHPEKGYLFWTEWGQYPRIERSRLDGTERVVLVNVSISWPNGISVDYQDGKLYWCDARTDKIERIDLETGENREVVLSSNNMDMFSVSVFEDFIYWSDRTHANGSIKRGSKDNATDSVPLRTGIGVQLKDIKVFNRDRQKGTNVCAVANGGCQQLCLYRGRGQRACACAHGMLAEDGASCREYAGYLLYSERTILKSIHLSDERNLNAPVQPFEDPEHMKNVIALAFDYRAGTSPGTPNRIFFSDIHFGNIQQINDDGSRRITIVENVGSVEGLAYHRGWDTLYWTSYTTSTITRHTVDQTRPGAFERETVITMSGDDHPRAFVLDECQNLMFWTNWNEQHPSIMRAALSGANVLTLIEKDIRTPNGLAIDHRAEKLYFSDATLDKIERCEYDGSHRYVILKSEPVHPFGLAVYGEHIFWTDWVRRAVQRANKHVGSNMKLLRVDIPQQPMGIIAVANDTNSCELSPCRINNGGCQDLCLLTHQGHVNCSCRGGRILQDDLTCRAVNSSCRAQDEFECANGECINFSLTCDGVPHCKDKSDEKPSYCNSRRCKKTFRQCSNGRCVSNMLWCNGADDCGDGSDEIPCNKTACGVGEFRCRDGTCIGNSSRCNQFVDCEDASDEMNCSATDCSSYFRLGVKGVLFQPCERTSLCYAPSWVCDGANDCGDYSDERDCPGVKRPRCPLNYFACPSGRCIPMSWTCDKEDDCEHGEDETHCNKFCSEAQFECQNHRCISKQWLCDGSDDCGDGSDEAAHCEGKTCGPSSFSCPGTHVCVPERWLCDGDKDCADGADESIAAGCLYNSTCDDREFMCQNRQCIPKHFVCDHDRDCADGSDESPECEYPTCGPSEFRCANGRCLSSRQWECDGENDCHDQSDEAPKNPHCTSQEHKCNASSQFLCSSGRCVAEALLCNGQDDCGDSSDERGCHINECLSRKLSGCSQDCEDLKIGFKCRCRPGFRLKDDGRTCADVDECSTTFPCSQRCINTHGSYKCLCVEGYAPRGGDPHSCKAVTDEEPFLIFANRYYLRKLNLDGSNYTLLKQGLNNAVALDFDYREQMIYWTDVTTQGSMIRRMHLNGSNVQVLHRTGLSNPDGLAVDWVGGNLYWCDKGRDTIEVSKLNGAYRTVLVSSGLREPRALVVDVQNGYLYWTDWGDHSLIGRIGMDGSSRSVIVDTKITWPNGLTLDYVTERIYWADAREDYIEFASLDGSNRHVVLSQDIPHIFALTLFEDYVYWTDWETKSINRAHKTTGTNKTLLISTLHRPMDLHVFHALRQPDVPNHPCKVNNGGCSNLCLLSPGGGHKCACPTNFYLGSDGRTCVSNCTASQFVCKNDKCIPFWWKCDTEDDCGDHSDEPPDCPEFKCRPGQFQCSTGICTNPAFICDGDNDCQDNSDEANCDIHVCLPSQFKCTNTNRCIPGIFRCNGQDNCGDGEDERDCPEVTCAPNQFQCSITKRCIPRVWVCDRDNDCVDGSDEPANCTQMTCGVDEFRCKDSGRCIPARWKCDGEDDCGDGSDEPKEECDERTCEPYQFRCKNNRCVPGRWQCDYDNDCGDNSDEESCTPRPCSESEFSCANGRCIAGRWKCDGDHDCADGSDEKDCTPRCDMDQFQCKSGHCIPLRWRCDADADCMDGSDEEACGTGVRTCPLDEFQCNNTLCKPLAWKCDGEDDCGDNSDENPEECARFVCPPNRPFRCKNDRVCLWIGRQCDGTDNCGDGTDEEDCEPPTAHTTHCKDKKEFLCRNQRCLSSSLRCNMFDDCGDGSDEEDCSIDPKLTSCATNASICGDEARCVRTEKAAYCACRSGFHTVPGQPGCQDINECLRFGTCSQLCNNTKGGHLCSCARNFMKTHNTCKAEGSEYQVLYIADDNEIRSLFPGHPHSAYEQAFQGDESVRIDAMDVHVKAGRVYWTNWHTGTISYRSLPPAAPPTTSNRHRRQIDRGVTHLNISGLKMPRGIAIDWVAGNVYWTDSGRDVIEVAQMKGENRKTLISGMIDEPHAIVVDPLRGTMYWSDWGNHPKIETAAMDGTLRETLVQDNIQWPTGLAVDYHNERLYWADAKLSVIGSIRLNGTDPIVAADSKRGLSHPFSIDVFEDYIYGVTYINNRVFKIHKFGHSPLVNLTGGLSHASDVVLYHQHKQPEVTNPCDRKKCEWLCLLSPSGPVCTCPNGKRLDNGTCVPVPSPTPPPDAPRPGTCNLQCFNGGSCFLNARRQPKCRCQPRYTGDKCELDQCWEHCRNGGTCAASPSGMPTCRCPTGFTGPKCTQQVCAGYCANNSTCTVNQGNQPQCRCLPGFLGDRCQYRQCSGYCENFGTCQMAADGSRQCRCTAYFEGSRCEVNKCSRCLEGACVVNKQSGDVTCNCTDGRVAPSCLTCVGHCSNGGSCTMNSKMMPECQCPPHMTGPRCEEHVFSQQQPGHIASILIPLLLLLLLVLVAGVVFWYKRRVQGAKGFQHQRMTNGAMNVEIGNPTYKMYEGGEPDDVGGLLDADFALDPDKPTNFTNPVYATLYMGGHGSRHSLASTDEKRELLGRGPEDEIGDPLA

SEQ ID NO: 8008 - protein, 292 aa, Homo sapiens
MLTPPLLLLLPLLSALVAAAIDAPKTCSPKQFACRDQITCISKGWRCDGERDCPDGSDEAPEICPQSKAQRCQPNEHNCLGTELCVPMSRLCNGVQDCMDGSDEGPHCRELQGNCSRLGCQHHCVPTLDGPTCYCNSSFQLQADGKTCKDFDECSVYGTCSQLCTNTDGSFICGCVEGYLLQPDNRSCKAKNEPVDRPPVLLIANSQNILATYLSGAQVSTITPTSTRQTTAMDFSYANETVCWVHVGDSAAQTQLKCARMPGLKGFVDEHTINISLSLHLCVFSKSQQEMG

SEQ ID NO: 8009 - protein, 296 aa, Homo sapiens
MLTPPLLLLLPLLSALVAAAIDAPKTCSPKQFACRDQITCISKGWRCDGERDCPDGSDEAPEICPQSKAQRCQPNEHNCLGTELCVPMSRLCNGVQDCMDGSDEGPHCRELQGNCSRLGCQHHCVPTLDGPTCYCNSSFQLQADGKTCKDFDECSVYGTCSQLCTNTDGSFICGCVEGYLLQPDNRSCKAKNEPVDRPPVLLIANSQNILATYLSGAQVSTITPTSTRQTTAMDFSYANETVCWVHVGDSAAQTQLKCARMPGLKGFVDEHTINISLSLHRRSRKRAQENEVTQHG

SEQ ID NO: 8010 - protein, 439 aa, Homo sapiens
MLTPPLLLLLPLLSALVAAAIDAPKTCSPKQFACRDQITCISKGWRCDGERDCPDGSDEAPEICPQSKAQRCQPNEHNCLGTELCVPMSRLCNGVQDCMDGSDEGPHCRELQGNCSRLGCQHHCVPTLDGPTCYCNSSFQLQADGKTCKDFDECSVYGTCSQLCTNTDGSFICGCVEGYLLQPDNRSCKAKNEPVDRPPVLLIANSQNILATYLSGAQVSTITPTSTRQTTAMDFSYANETVCWVHVGDSAAQTQLKCARMPGLKGFVDEHTINISLSLHHVEQMAIDWLTGNFYFVDDIDDRIFVCNRNGDTCVTLLDLELYNPKGIALDPAMGKVFFTDYGQIPKVERCDMDGQNRTKLVDSKIVFPHGITLDLVSRLVYWADAYLDYIEVVDYEGKGRQTIIQGILVRELLSEVLWGNHDPGPSGEGGSLCRGTVL

SEQ ID NO: 8011 - protein, 183 aa, Homo sapiens
NGQDNCGDGEDERDCPEVTCAPNQFQCSITKRCIPRVWVCDRDNDCVDGSDEPANCTQMTCGVDEFRCKDSGRCIPARWKCDGEDDCGDGSDEPKEECGEPRPHSRRKTVYLDERTCEPYQFRCKNNRCVPGRWQCDYDNDCGDNSDEESCTPRPCSESEFSCANGRCIAGRWKCDGDHDCAD

SEQ ID NO: 8012 - protein, 139 aa, Homo sapiens
  VARIANT 1: note = misc_feature - Xaa can be any naturally occurring amino acid
XRPGAFERETVITMSGDDHPRAFVLDECQNLMFWTNWNEQHPSIMRAALSGANVLTLIEKDIRTPNGLAIDHRAEKLYFSDATLDKIERCEYDGSHRYVNSLHAESTTVAARTCVCSLTRAMSTAHAEGAESSRMTSPA

SEQ ID NO: 8013 - protein, 500 aa, Homo sapiens
MASVAQESAGSQRRLPPRHGALRGLLLLCLWLPSGRAALPPAAPLSELHAQLSGVEQLLEEFRRQLQQERPQEELELELRAGGGPQEDCPGPGSGGYSAMPDAIIRTKDSLAAGASFLRAPAAVRGWRQCVAACCSEPRCSVAVVELPRRPAPPAAVLGCYLFNCTARGRNVCKFALHSGYSSYSLSRAPDGAALATARASPRQEKDAPPLSKAGQDVVLHLPTDGVVLDGRESTDDHAIVQYEWALLQGDPSVDMKVPQSGTLKLSHLQEGTYTFQLTVTDTAGQRSSDNVSVTVLRAAYSTGGCLHTCSRYHFFCDDGCCIDITLACDGVQQCPDGSDEDFCQNLGLDRKMVTHTAASPALPRTTGPSEDAGGDSLVEKSQKATAPNKPPALSNTEKRNHSAFWGPESQIIPVMPDSSSSGKNRKEESYIFESKGDGGGGEHPAPETGAVLPLALGLAITALLLLMVACRLRLVKQKLKKARPITSEESDYLINGMYL

SEQ ID NO: 8014 - protein, 325 aa, Homo sapiens
MASVAQESAGSQRRLPPRHGALRGLLLLCLWLPSGRAALPPAAPLSELHAQLSGVEQLLEEFRRQLQQERPQEELELELRAGGGPQEDCPGPGSGGYSAMPDAIIRTKDSLAAGASFLRAPAAVRGWRQCVAACCSEPRCSVAVVELPRRPAPPAAVLGCYLFNCTARGRNVCKFALHSGYSSYSLSRAPDGAALATARASPRQEKDAPPLSKAGQDVVLHLPTDGVVLDGRESTDDHAIVQYEWALLQGDPSVDMKVPQSGTLKLSHLQEGTYTFQLTVTDTAGQRSSDNVSVTVLRAAYSTGDGWSICCICSKREAKEFSETS

SEQ ID NO: 8015 - protein, 4599 aa, Homo sapiens
MSEFLLALLTLSGLLPIARVLTVGADRDQQLCDPGEFLCHDHVTCVSQSWLCDGDPDCPDDSDESLDTCPEEVEIKCPLNHIACLGTNKCVHLSQLCNGVLDCPDGYDEGVHCQELLSNCQQLNCQYKCTMVRNSTRCYCEDGFEITEDGRSCKDQDECAVYGTCSQTCRNTHGSYTCSCVEGYLMQPDNRSCKAKIEPTDRPPILLIANFETIEVFYLNGSKMATLSSVNGNEIHTLDFIYNEDMICWIESRESSNQLKCIQITKAGGLTDEWTINILQSFHNVQQMAIDWLTRNLYFVDHVGDRIFVCNSNGSVCVTLIDLELHNPKAIAVDPIAGKLFFTDYGNVAKVERCDMDGMNRTRIIDSKTEQPAALALDLVNKLVYWVDLYLDYVGVVDYQGKNRHTVIQGRQVRHLYGITVFEDYLYATNSDNYNIVRINRFNGTDIHSLIKIENAWGIRIYQKRTQPTVRSHACEVDPYGMPGGCSHICLLSSSYKTRTCRCRTGFNLGSDGRSCKRPKNELFLFYGKGRPGIVRGMDLNTKIADEYMIPIENLVNPRALDFHAETNYIYFADTTSFLIGRQKIDGTERETILKDDLDNVEGIAVDWIGNNLYWTNDGHRKTINVARLEKASQSRKTLLEGEMSHPRGIVVDPVNGWMYWTDWEEDEIDDSVGRIEKAWMDGFNRQIFVTSKMLWPNGLTLDFHTNTLYWCDAYYDHIEKVFLNGTHRKIVYSGRELNHPFGLSHHGNYVFWTDYMNGSIFQLDLITSEVTLLRHERPPLFGLQIYDPRKQQGDNMCRVNNGGCSTLCLAIPGGRVCACADNQLLDENGTTCTFNPGEALPHICKAGEFRCKNRHCIQARWKCDGDDDCLDGSDEDSVNCFNHSCPDDQFKCQNNRCIPKRWLCDGANDCGSNEDESNQTCTARTCQVDQFSCGNGRCIPRAWLCDREDDCGDQTDEMASCEFPTCEPLTQFVCKSGRCISSKWHCDSDDDCGDGSDEVGCVHSCFDNQFRCSSGRCIPGHWACDGDNDCGDFSDEAQINCTKEEIHSPAGCNGNEFQCHPDGNCVPDLWRCDGEKDCEDGSDEKGCNGTIRLCDHKTKFSCWSTGRCINKAWVCDGDIDCEDQSDEDDCDSFLCGPPKHPCANDTSVCLQPEKLCNGKKDCPDGSDEGYLCDECSLNNGGCSNHCSVVPGRGIVCSCPEGLQLNKDNKTCEIVDYCSNHLKCSQVCEQHKHTVKCSCYEGWKLDVDGESCTSVDPFEAFIIFSIRHEIRRIDLHKRDYSLLVPGLRNTIALDFHFNQSLLYWTDVVEDRIYRGKLSESGGVSAIEVVVEHGLATPEGLTVDWIAGNIYWIDSNLDQIEVAKLDGSLRTTLIAGAMEHPRAIALDPRYGILFWTDWDANFPRIESASMSGAGRKTIYKDMKTGAWPNGLTVDHFEKRIVWTDARSDAIYSALYDGTNMIEIIRGHEYLSHPFAVSLYGSEVYWTDWRTNTLSKANKWTGQNVSVIQKTSAQPFDLQIYHPSRQPQAPNPCAANDGKGPCSHMCLINHNRSAACACPHLMKLSSDKKTCYEMKKFLLYARRSEIRGVDIDNPYFNFITAFTVPDIDDVTVIDFDASEERLYWTDIKTQTIKRAFINGTGLETVISRDIQSIRGLAVDWVSRNLYWISSEFDETQINVARLDGSLKTSIIHGIDKPQCLAAHPVRGKLYWTDGNTINMANMDGSNSKILFQNQKEPVGLSIDYVENKLYWISSGNGTINRCNLDGGNLEVIESMKEELTKATALTIMDKKLWWADQNLAQLGTCSKRDGRNPTILRNKTSGVVHMKVYDKEAQQGSNSCQLNNGGCSQLCLPTSETTRTCMCTVGYYLQKNRMSCQGIESFLMYSVHEGIRGIPLEPSDKMDALMPISGTSFAVGIDFHAENDTIYWTDMGFNKISRAKRDQTWKEDIITNGLGRVEGIAVDWIAGNIYWTDHGFNLIEVARLNGSFRYVIISQGLDQPRSIAVHPEKGLLFWTEWGQMPCIGKARLDGSEKVVLVSMGIAWPNGISIDYEENKLYWCDARTDKIERIDLETGGNREMVLSGSNVDMFSVAVFGAYIYWSDRAHANGSVRRGHKNDATETITMRTGLGVNLKEVKIFNRVREKGTNVCARDNGGCKQLCLYRGNSRRTCACAHGYLAEDGVTCLRHEGYLLYSGRTILKSIHLSDETNLNSPIRPYENPRYFKNVIALAFDYNQRRKGTNRIFYSDAHFGNIQLIKDNWEDRQVIVENVGSVEGLAYHRAWDTLYWTSSTTSSITRHTVDQTRPGAFDREAVITMSEDDHPHVLALDECQNLMFWTNWNEQHPSIMRSTLTGKNAQVVVSTDILTPNGLTIDYRAEKLYFSDGSLGKIERCEYDGSQRHVIVKSGPGTFLSLAVYDNYIFWSDWGRRAILRSNKYTGGDTKILRSDIPHQPMGIIAVANDTNSCELSPCALLNGGCHDLCLLTPNGRVNCSCRGDRILLEDNRCVTKNSSCNAYSEFECGNGECIDYQLTCDGIPHCKDKSDEKLLYCENRSCRRGFKPCYNRRCIPHGKLCDGENDCGDNSDELDCKVSTCATVEFRCADGTCIPRSARCNQNIDCADASDEKNCNNTDCTHFYKLGVKTTGFIRCNSTSLCVLPTWICDGSNDCGDYSDELKCPVQNKHKCEENYFSCPSGRCILNTWICDGQKDCEDGRDEFHCDSSCSWNQFACSAQKCISKHWICDGEDDCGDGLDESDSICGAITCAADMFSCQGSRACVPRHWLCDGERDCPDGSDELSTAGCAPNNTCDENAFMCHNKVCIPKQFVCDHDDDCGDGSDESPQCGYRQCGTEEFSCADGRCLLNTQWQCDGDFDCPDHSDEAPLNPKCKSAEQSCNSSFFMCKNGRCIPSGGLCDNKDDCGDGSDERNCHINECLSKKVSGCSQDCQDLPVSYKCKCWPGFQLKDDGKTCVDIDECSSGFPCSQQCINTYGTYKCLCTDGYEIQPDNPNGCKSLSDEEPFLILADHHEIRKISTDGSNYTLLKQGLNNVIAIDFDYREEFIYWIDSSRPNGSRINRMCLNGSDIKVVHNTAVPNALAVDWIGKNLYWSDTEKRIIEVSKLNGLYPTILVSKRLKFPRDLSLDPQAGYLYWIDCCEYPHIGRVGMDGTNQSVVIETKISRPMALTIDYVNRRLYWADENHIEFSNMDGSHRHKVPNQDIPGVIALTLFEDYIYWTDGKTKSLSRAHKTSGADRLSLIYSWHAITDIQVYHSYRQPDVSKHLCMINNGGCSHLCLLAPGKTHTCACPTNFYLAADNRTCLSNCTASQFRCKTDKCIPFWWKCDTVDDCGDGSDEPDDCPEFRCQPGRFQCGTGLCALPAFICDGENDCGDNSDELNCDTHVCLSGQFKCTKNQKCIPVNLRCNGQDDCGDEEDERDCPENSCSPDYFQCKTTKHCISKLWVCDEDPDCADASDEANCDKKTCGPHEFQCKNNNCIPDHWRCDSQNDCSDNSDEENCKPQTCTLKDFLCANGDCVSSRFWCDGDFDCADGSDERNCETSCSKDQFRCSNGQCIPAKWKCDGHEDCKYGEDEKSCEPASPTCSSREYICASDGCISASLKCNGEYDCADGSDEMDCVTECKEDQFRCKNKAHCIPIRWLCDGIHDCVDGSDEENCERGGNICRADEFLCNNSLCKLHFWVCDGEDDCGDNSDEAPDMCVKFLCPSTRPHRCRNNRICLQSEQMCNGIDECGDNSDEDHCGGKLTYKARPCKKDEFACSNKKCIPMDLQCDRLDDCGDGSDEQGCRIAPTEYTCEDNVNPCGDDAYCNQIKTSVFCRCKPGFQRNMKNRQCEDLNECLVFGTCSHQCINVEGSYKCVCDQNFQERNNTCIAEGSEDQVLYIANDTDILGFIYPFNYSGDHQQISHIEHNSRITGMDVYYQRDMIIWSTQFNPGGIFYKRIHGREKRQANSGLICPEFKRPRDIAVDWVAGNIYWTDHSRMHWFSYYTTHWTSLRYSINVGQLNGPNCTRLLTNMAGEPYAIAVNPKRGMMYWTVVGDHSHIEEAAMDGTLRRILVQKNLQRPTGLAVDYFSERIYWADFELSIIGSVLYDGSNSVVSVSSKQGLLHPHRIDIFEDYIYGAGPKNGVFRVQKFGHGSVEYLALNIDKTKGVLISHRYKQLDLPNPCLDLACEFLCLLNPSGATCVCPEGKYLINGTCNDDSLLDDSCKLTCENGGRCILNEKGDLRCHCWPSYSGERCEVNHCSNYCQNGGTCVPSVLGRPTCSCALGFTGPNCGKTVCEDFCQNGGTCIVTAGNQPYCHCQPEYTGDRCQYYVCHHYCVNSESCTIGDDGSVECVCPTRYEGPKCEVDKCVRCHGGHCIINKDSEDIFCNCTNGKIASSCQLCDGYCYNGGTCQLDPETNVPVCLCSTNWSGTQCERPAPKSSKSDHISTRSIAIIVPLVLLVTLITTLVIGLVLCKRKRRTKTIRRQPIINGGINVEIGNPSYNMYEVDHDHNDGGLLDPGFMIDPTKARYIGGGPSAFKLPHTAPPIYLNSDLKGPLTAGPTNYSNPVYAKLYMDGQNCRNSLGSVDERKELLPKKIEIGIRETVA

SEQ ID NO: 8016 - protein, 782 aa, Homo sapiens [sequence omitted]

SEQ ID NO: 8017 - protein, 280 aa, Homo sapiens
  VARIANT 1: note = misc_feature - Xaa can be any naturally occurring amino acid
XRPTCSCALGFTGPNCGKTVCEDFCQNGGTCIVTAGNQPYCHCQPEYTGDRCQYYVCHHYCVNSESCTIGDDGSVECVCPTRYEGPKCEVDKCVRCHGGHCIINKDSEDIFCNCTNGKIASSCQLCDGYCYNGGTCQLDPETNVPVCLCSVGFKSQRCDQKENPCDHYCQNEGICTLTAFNEPRCKCSTNWSGTQCERPAPKSSKSDHISTRSIAIIVPLVLLVTLITTLVIGLVLCKRKRRTKTIRRQPIINGGINVEIGNPSYNMYEVDHDHNDGGLL

SEQ ID NO: 8018 - protein, 798 aa, Homo sapiens
  VARIANT 1: note = misc_feature - Xaa can be any naturally occurring amino acid
XSNKKCIPMDLQCDRLDDCGDGSDEQGCRIAPTEYTCEDNVNPCGDDAYCNQIKTSVFCRCKPGFQRNMKNRQCEDLNECLVFGTCSHQCINVEGSYKCVCDQNFQERNNTCIAEGSEDQVLYIANDTDILGFIYPFNYSGDHQQISHIEHNSRITGMDVYYQRDMIIWSTQFNPGGIFYKRIHGREKRQANSGLICPEFKRPRDIAVDWVAGNIYWTDHSRMHWFSYYTTHWTSLRYSINVGQLNGPNCTRLLTNMAGEPYAIAVNPKRGMMYWTVVGDHSHIEEAAMDGTLRRILVQKNLQRPTGLAVDYFSERIYWADFELSIIGSVLYDGSNSVVSVSSKQGLLHPHRIDIFEDYIYGAGPKNGVFRVQKFGHGSVEYLALNIDKTKGVLISHRYKQLDLPNPCLDLACEFLCLLNPSGATCVCPEGKYLINGTCNDDSLLDDSCKLTCENGGRCILNEKGDLRCHCWPSYSGERCEVNHCSNYCQNGGTCVPSVLGRPTCSCALGFTGPNCGKTVCEDFCQNGGTCIVTAGNQPYCHCQPEYTGDRCQYYVCHHYCVNSESCTIGDDGSVECVCPTRYEGPKCEVDKCVRCHGGHCIINKDSEDIFCNCTNGKIASSCQLCDGYCYNGGTCQLDPETNVPVCLCSTNWSGTQCERPAPKSSKSDHISTRSIAIIVPLVLLVTLITTLVIGLVLCKRKRRTKTIRRQPIINGGINVEIGNPSYNMYEVDHDHNDGGLLDPGFMIDPTKPTNYSNPVYAKLYMDGQNCRNSLGSVDERKELLPKKIEIGIRETVA

SEQ ID NO: 8019 - protein, 4655 aa, Homo sapiens
MDRGPAAVACTLLLALVACLAPASGQECDSAHFRCGSGHCIPADWRCDGTKDCSDDADEIGCAVVTCQQGYFKCQSEGQCIPNSWVCDQDQDCDDGSDERQDCSQSTCSSHQITCSNGQCIPSEYRCDHVRDCPDGADENDCQYPTCEQLTCDNGACYNTSQKCDWKVDCRDSSDEINCTEICLHNEFSCGNGECIPRAYVCDHDNDCQDGSDEHACNYPTCGGYQFTCPSGRCIYQNWVCDGEDDCKDNGDEDGCESGPHDVHKCSPREWSCPESGRCISIYKVCDGILDCPGREDENNTSTGKYCSMTLCSALNCQYQCHETPYGGACFCPPGYIINHNDSRTCVEFDDCQIWGICDQKCESRPGRHLCHCEEGYILERGQYCKANDSFGEASIIFSNGRDLLIGDIHGRSFRILVESQNRGVAVGVAFHYHLQRVFWTDTVQNKVFSVDINGLNIQEVLNVSVETPENLAVDWVNNKIYLVETKVNRIDMVNLDGSYRVTLITENLGHPRGIAVDPTVGYLFFSDWESLSGEPKLERAFMDGSNRKDLVKTKLGWPAGVTLDMISKRVYWVDSRFDYIETVTYDGIQRKTVVHGGSLIPHPFGVSLFEGQVFFTDWTKMAVLKANKFTETNPQVYYQASLRPYGVTVYHSLRQPYATNPCKDNNGGCEQVCVLSHRTDNDGLGFRCKCTFGFQLDTDERHCIAVQNFLIFSSQVAIRGIPFTLSTQEDVMVPVSGNPSFFVGIDFDAQDSTIFFSDMSKHMIFKQKIDGTGREILAANRVENVESLAFDWISKNLYWTDSHYKSISVMRLADKTRRTVVQYLNNPRSVVVHPFAGYLFFTDWFRPAKIMRAWSDGSHLLPVINTTLGWPNGLAIDWAASRLYWVDAYFDKIEHSTFDGLDRRRLGHIEQMTHPFGLAIFGEHLFFTDWRLGAIIRVRKADGGEMTVIRSGIAYILHLKSYDVNIQTGSNACNQPTHPNGDCSHFCFPVPNFQRVCGCPYGMRLASNHLTCEGDPTNEPPTEQCGLFSFPCKNGRCVPNYYLCDGVDDCHDNSDEQLCGTLNNTCSSSAFTCGHGECIPAHWRCDKRNDCVDGSDEHNCPTHAPASCLDTQYTCDNHQCISKNWVCDTDNDCGDGSDEKNCNSTETCQPSQFNCPNHRCIDLSFVCDGDKDCVDGSDEVGCVLNCTASQFKCASGDKCIGVTNRCDGVFDCSDNSDEAGCPTRPPGMCHSDEFQCQEDGICIPNFWECDGHPDCLYGSDEHNACVPKTCPSSYFHCDNGNCIHRAWLCDRDNDCGDMSDEKDCPTQPFRCPSWQWQCLGHNICVNLSVVCDGIFDCPNGTDESPLCNGNSCSDFNGGCTHECVQEPFGAKCLCPLGFLLANDSKTCEDIDECDILGSCSQHCYNMRGSFRCSCDTGYMLESDGRTCKVTASESLLLLVASQNKIIADSVTSQVHNIYSLVENGSYIVAVDFDSISGRIFWSDATQGKTWSAFQNGTDRRVVFDSSIILTETIAIDWVGRNLYWTDYALETIEVSKIDGSHRTVLISKNLTNPRGLALDPRMNEHLLFWSDWGHHPRIERASMDGSMRTVIVQDKIFWPCGLTIDYPNRLLYFMDSYLDYMDFCDYNGHHRRQVIASDLIIRHPYALTLFEDSVYWTDRATRRVMRANKWHGGNQSVVMYNIQWPLGIVAVHPSKQPNSVNPCAFSRCSHLCLLSSQGPHFYSCVCPSGWSLSPDLLNCLRDDQPFLITVRQHIIFGISLNPEVKSNDAMVPIAGIQNGLDVEFDDAEQYIYWVENPGEIHRVKTDGTNRTVFASISMVGPSMNLALDWISRNLYSTNPRTQSIEVLTLHGDIRYRKTLIANDGTALGVGFPIGITVDPARGKLYWSDQGTDSGVPAKIASANMDGTSVKTLFTGNLEHLECVTLDIEEQKLYWAVTGRGVIERGNVDGTDRMILVHQLSHPWGIAVHDSFLYYTDEQYEVIERVDKATGANKIVLRDNVPNLRGLQVYHRRNAAESSNGCSNNMNACQQICLPVPGGLFSCACATGFKLNPDNRSCSPYNSFIVVSMLSAIRGFSLELSDHSETMVPVAGQGRNALHVDVDVSSGFIYWCDFSSSVASDNAIRRIKPDGSSLMNIVTHGIGENGVRGIAVDWVAGNLYFTNAFVSETLIEVLRINTTYRRVLLKVTVDMPRHIVVDPKNRYLFWADYGQRPKIERSFLDCTNRTVLVSEGIVTPRGLAVDRSDGYVYWVDDSLDIIARIRINGENSEVIRYGSRYPTPYGITVFENSIIWVDRNLKKIFQASKEPENTEPPTVIRDNINWLRDVTIFDKQVQPRSPAEVNNNPCLENNGGCSHLCFALPGLHTPKCDCAFGTLQSDGKNCAISTENFLIFALSNSLRSLHLDPENHSPPFQTINVERTVMSLDYDSVSDRIYFTQNLASGVGQISYATLSSGIHTPTVIASGIGTADGIAFDWITRRIYYSDYLNQMINSMAEDGSNRTVIARVPKPRAIVLDPCQGYLYWADWDTHAKIERATLGGNFRVPIVNSSLVMPSGLTLDYEEDLLYWVDASLQRIERSTLTGVDREVIVNAAVHAFGLTLYGQYIYWTDLYTQRIYRANKYDGSGQIAMTTNLLSQPRGINTVVKNQKQQCNNPCEQFNGGCSHICAPGPNGAECQCPHEGNWYLANNRKHCIVDNGERCGASSFTCSNGRCISEEWKCDNDNDCGDGSDEMESVCALHTCSPTAFTCANGRCVQYSYRCDYYNDCGDGSDEAGCLFRDCNATTEFMCNNRRCIPREFICNGVDNCHDNNTSDEKNCPDRTCQSGYTKCHNSNICIPRVYLCDGDNDCGDNSDENPTYCTTHTCSSSEFQCASGRCIPQHWYCDQETDCFDASDEPASCGHSERTCLADEFKCDGGRCIPSEWICDGDNDCGDMSDEDKRHQCQNQNCSDSEFLCVNDRPPDRRCIPQSWVCDGDVDCTDGYDENQNCTRRTCSENEFTCGYGLCIPKIFRCDRHNDCGDYSDERGCLYQTCQQNQFTCQNGRCISKTFVCDEDNDCGDGSDELMHLCHTPEPTCPPHEFKCDNGRCIEMMKLCNHLDDCLDNSDEKGCGINECHDPSISGCDHNCTDTLTSFYCSCRPGYKLMSDKRTCVDIDECTEMPFVCSQKCENVIGSYICKCAPGYLREPDGKTCRQNSNIEPYLIFSNRYYLRNLTIDGYFYSLILEGLDNVVALDFDRVEKRLYWIDTQRQVIERMFLNKTNKETIINHRLPAAESLAVDWVSRKLYWLDARLDGLFVSDLNGGHRRMLAQHCVDANNTFCFDNPRGLALHPQYGYLYWADWGHRAYIGRVGMDGTNKSVIISTKLEWPNGITIDYTNDLLYWADAHLGYIEYSDLEGHHRHTVYDGALPHPFAITIFEDTIYWTDWNTRTVEKGNKYDGSNRQTLVNTTHRPFDIHVYHPYRQPIVSNPCGTNNGGCSHLCLIKPGGKGFTCECPDDFRTLQLSGSTYCMPMCSSTQFLCANNEKCIPIWWKCDGQKDCSDGSDELALCPQRFCRLGQFQCSDGNCTSPQTLCNAHQNCPDGSDEDRLLCENHHCDSNEWQCANKRCIPESWQCDTFNDCEDNSDEDSSHCASRTCRPGQFRCANGRCIPQAWKCDVDNDCGDHSDEPIEECMSSAHLCDNFTEFSCKTNYRCIPKWAVCNGVDDCRDNSDEQGCEERTCHPVGDFRCKNHHCIPLRWQCDGQNDCGDNSDEENCAPRECTESEFRCVNQQCIPSRWICDHYNDCGDNSDERDCEMRTCHPEYFQCTSGHCVHSELKCDGSADCLDASDEADCPTRFPDGAYCQATMFECKNHVCIPPYWKCDGDDDCGDGSDEELHLCLDVPCNSPNRFRCDNNRCIYSHEVCNGVDDCGDGTDETEEHCRKPTPKPCTEYEYKCGNGHCIPHDNVCDDADDCGDWSDELGCNKGKERTCAENICEQNCTQLNEGGFICSCTAGFETNVFDRTSCLDINECEQFGTCPQHCRNTKGSYECVCADGFTSMSDRPGKRCAAEGSSPLLLLPDNVRIRKYNLSSERFSEYLQDEEYIQAVDYDWDPKDIGLSVVYYTVRGEGSRFGAIKRAYIPNFESGRNNLVQEVDLKLKYVMQPDGIAVDWVGRHIYWSDVKNKRIEVAKLDGRYRKWLISTDLDQPAAIAVNPKLGLMFWTDWGKEPKIESAWMNGEDRNILVFEDLGWPTGLSIDYLNNDRIYWSDFKEDVIETIKYDGTDRRVIAKEAMNPYSLDIFEDQLYWISKEKGEVWKQNKFGQGKKEKTLVVNPWLTQVRIFHQLRYNKSVPNLCKQICSHLCLLRPGGYSCACPQGSSFIEGSTTECDAAIELPINLPPPCRCMHGGNCYFDETDLPKCKCPSGYTGKYCEMAFSKGISPGTTAVAVLLTILLIVVIGALAIAGFFHYRRTGSLLPALPKLPSLSSLVKPSENGNGVTFRSGADLNMDIGVSGFGPETAIDRSMAMSEDFVMEMGKQPIIFENPMYSARDSAVKVVQPIQVTVSENVDNKNYGSPINPSEIVPETNPTSPAADGTQVTKWNLFKRKSKQTTNFENPIYAQMENEQKESVAATPPPSPSLPAKPKPPSRRDPTPTYSATEDTFKDTANLVKEDSEV

SEQ ID NO: 8020 - protein, 1225 aa, Homo sapiens
MDRGPAAVACTLLLALVACLAPASGQECDSAHFRCGSGHCIPADWRCDGTKDCSDDADEIGCAVVTCQQGYFKCQSEGQCIPNSWVCDQDQDCDDGSDERQDCSQSTCSSHQITCSNGQCIPSEYRCDHVRDCPDGADENDCQYPTCEQLTCDNGACYNTSQKCDWKVDCRDSSDEINCTEICLHNEFSCGNGECIPRAYVCDHDNDCQDGSDEHACNYPTCGGYQFTCPSGRCIYQNWVCDGEDDCKDNGDEDGCESGPHDVHKCSPREWSCPESGRCISIYKVCDGILDCPGREDENNTSTGKYCSMTLCSALNCQYQCHETPYGGACFCPPGYIINHNDSRTCVEFDDCQIWGICDQKCESRPGRHLCHCEEGYILERGQYCKANDSFGEASIIFSNGRDLLIGDIHGRSFRILVESQNRGVAVGVAFHYHLQRVFWTDTVQNKVFSVDINGLNIQEVLNVSVETPENLAVDWVNNKIYLVETKVNRIDMVNLDGSYRVTLITENLGHPRGIAVDPTVGKTVVHGGSLIPHPFGVSLFEGQVFFTDWTKMAVLKANKFTETNPQVYYQASLRPYGVTVYHSLRQPYATNPCKDNNGGCEQVCVLSHRTDNDGLGFRCKCTFGFQLDTDERHCIGREILAANRVENVESLAFDWISKNLYWTDSHYKSISVMRLADKTRRTVVQYLNNPRSVVVHPFAGYLFFTDWFRPAKIMRAWSDGSHLLPVINTTLGWPNGLAIDWAASRLYWVDAYFDKIEHSTFDGLDRRRLGHIEQMTHPFGLAIFGEHLFFTDWRLGAIIRVRKADGGEMTVIRSGIAYILHLKSYDVNIQTGSNACNQPTHPNGDCSHFCFPVPNFQRVCGCPYGMRLASNHLTCEGDPTNEPPTEQCGLFSFPCKNGRCVPNYYLCDGVDDCHDNSDEQLCGTLNNTCSSSAFTCGHGECIPAHWRCDKRNDCVDGSDEHNCPTHAPASCLDTQYTCDNHQCISKNWVCDTDNDCGDGSDEKNCNSTETCQPSQFNCPNHRCIDLSFVCDGDKDCVDGSDEVGCVLNCTASQFKCASGDKCIGVTNRCDGVFDCSDNSDEAGCPTRPPGMCHSDEFQCQEDGICIPNFWECDGHPDCLYGSDEHNACVPKTCPSSYFHCDNGNCIHRAWLCDRDNDCGDMSDEKDCPTQPFRCPSWQWQCLGHNICVNLSVVCDGIFDCPNGTDESPLCSKFPDHSLLAINSF

SEQ ID NO: 8021 - protein, 1905 aa, Homo sapiens
MRRQWGALLLGALLCAHGLASSPECACGRSHFTCAVSALGECTCIPAQWQCDGDNDCGDHSDEDGCILPTCSPLDFHCDNGKCIRRSWVCDGDNDCEDDSDEQDCPPRECEEDEFPCQNGYCIRSLWHCDGDNDCGDNSDEQCDMRKCSDKEFRCSDGSCIAEHWYCDGDTDCKDGSDEENCPSAVPAPPCNLEEFQCAYGRCILDIYHCDGDDDCGDWSDESDCSSHQPCRSGEFMCDSGLCINAGWRCDGDADCDDQSDERNCTTSMCTAEQFRCHSGRCVRLSWRCDGEDDCADNSDEENCENTGSPQCALDQFLCWNGRCIGQRKLCNGVNDCGDNSDESPQQNCRPRTGEENCNVNNGGCAQKCQMVRGAVQCTCHTGYRLTEDGHTCQDVNECAEEGYCSQGCTNSEGAFQCWCETGYELRPDRRSCKALGPEPVLLFANRIDIRQVLPHRSEYTLLLNNLENAIALDFHHRRELVFWSDVTLDRILRANLNGSNVEEVVSTGLESPGGLAVDWVHDKLYWTDSGTSRIEVANLDGAHRKVLLWQNLEKPRAIALHPMEGTIYWTDWGNTPRIEASSMDGSGRRIIADTHLFWPNGLTIDYAGRRMYWVDAKHHVIERANLDGSHRKAVISQGLPHPFAITVFEDSLYWTDWHTKSINSANKFTGKNQEIIRNKLHFPMDIHTLHPQRQPAGKNRCGDNNGGCTHLCLPSGQNYTCACPTGFRKISSHACAQSLDKFLLFARRMDIRRISFDTEDLSDDVIPLADVRSAVALDWDSRDDHVYWTDVSTDTISRAKWDGTGQEVVVDTSLESPAGLAIDWVTNKLYWTDAGTDRIEVANTDGSMRTVLIWENLDRPRDIVVEPMGGYMYWTDWGASPKIERAGMDASGRQVIISSNLTWPNGLAIDYGSQRLYWADAGMKTIEFAGLDGSKRKVLIGSQLPHPFGLTLYGERIYWTDWQTKSIQSADRLTGLDRETLQENLENLMDIHVFHRRRPPVSTPCAMENGGCSHLCLRSPNPSGFSCTCPTGINLLSDGKTCSPGMNSFLIFARRIDIRMVSLDIPYFADVVVPINITMKNTIAIGVDPQEGKVYWSDSTLHRISRANLDGSQHEDIITTGLQTTDGLAVDAIGRKVYWTDTGTNRIEVGNLDGSMRKVLVWQNLDSPRAIVLYHEMGFMYWTDWGENAKLERSGMDGSDRAVLINNNLGWPNGLTVDKASSQLLWADAHTERIEAADLNGANRHTLVSPVQHPYGLTLLDSYIYWTDWQTRSIHRADKGTGSNVILVRSNLPGLMDMQAVDRAQPLGFNKCGSRNGGCSHLCLPRPSGFSCACPTGIQLKGDGKTCDPSPETYLLFSSRGSIRRISLDTSDHTDVHVPVPELNNVISLDYDSVDGKVYYTDVFLDVIRRADLNGSNMETVIGRGLKTTDGLAVDWVARNLYWTDTGRNTIEASRLDGSCRKVLINNSLDEPRAIAVFPRKGYLFWTDWGHIAKIERANLDGSERKVLINTDLGWPNGLTLDYDTRRIYWVDAHLDRIESADLNGKLRQVLVSHVSHPFALTQQDRWIYWTDWQTKSIQRVDKYSGRNKETVLANVEGLMDIIVVSPQRQTGTNACGVNNGGCTHLCFARASDFVCACPDEPDSRPCSLVPGLVPPAPRATGMSEKSPVLPNTPPTTLYSSTTRTRTSLEEVEGRCSERDARLGLCARSNDAVPAAPGEGLHISYAIGGLLSILLILVVIAALMLYRHKKSKFTDPGMGNLTYSNPSYRTSTQEVKIEAIPKPAMYNQLCYKKEGGPDHNYTKEKIKIVEGICLLSGDDAEWDDLKQLRSSRGGLLRDHVCMKTDTVSIQASSGSLDDTETEQLLQEEQSECSSVHTAATPERRGSLPDTGWKHERKLSSESQV

SEQ ID NO: 8022 - protein, 133 aa, Homo sapiens
MRRQWGALLLGALLCAHVLPTCSPLDFHCDNGKCIRRSWVCDGDNDCEDDSDEQDCPPRECEEDEFPCQNGYCIRSLWHCDGDNDCGDNSDEQCDMRKCSDKEFRCSDGSCIAEHWYCDGDTDCKDGSDEENC

SEQ ID NO: 8023 - protein, 357 aa, Homo sapiens
MAPRRVRSFLRGLPALLLLLLFLGPWPAASHGGKYSREKNQPKPSPKRESGEEFRMEKLNQLWEKAQRLHLPPVRLAELHADLKIQERDELAWKKLKLDGLDEDGEKEARLIRNLNVILAKYGLDGKKDARQVTSNSLSGTQEDGLDDPRLEKLWHKAKTSGKFSGEELDKLWREFLHHKEKVHEYNVLLETLSRTEEIHENVISPSDLSDIKGSVLHSRHTELKEKLRSINQGLDRLRRVSHQGYSTEAEFEEPRVIDLWDLAQSANLTDKELEAFREELKHFEAKIEKHNHYQKQLEIAHEKLRHAESVGDGERVSRSREKHALLEGRTKELGYTVKKHLQDLSGRISRARHNEL

SEQ ID NO: 8024 - protein, 105 aa, Homo sapiens
MAPRRVRSFLRGLPALLLLLLFLGPWPAASHGGKYSREKNQPKPSPKRESGEEFRMEKLNQLWEKAQRNLPVASLLRGQFLAVSWSVLLVAHRLLPFVRSCIFLP

SEQ ID NO: 8025 - protein, 104 aa, Homo sapiens
MRVVTIVILLCFCKAAELRKASPGSVRSRVNHGRAGGGRRGSNPVKRYAPGLPCDVYTYLHEKYLDCQERKLVYVLPGWPQDLLHMLLARNKIRTLKNNMFSKF

SEQ ID NO: 8026 - protein, 313 aa, Homo sapiens
MRVVTIVILLCFCKAAELRKASPGSVRSRVNHGRAGGGRRGSNPVKRYAPGLPCDVYTYLHEKYLDCQERKLVYVLPGWPQDLLHMLLARNKIRTLKNNMFSKFKKLKSLDLQQNEISKIESEAFFGLNKLTTLLLQHNQIKVLTEEVFIYTPLLSYLRLYDNPWHCTCEIETLISMLQIPRNRNLGNYAKCESPQEQKNKKLRQIKSEQLCNEEEKEQLDPKPQVSGRPPVIKPEVDSTFCHNYVFPIQTLDCKRKELKKVPNNIPPDIVKLDLSYNKINQLRPKEFEDVHELKKLNLSSNGIEFIDPGSLR

SEQ ID NO: 8027 - protein, 441 aa, Homo sapiens
MRVVTIVILLCFCKAAELRKASPGSVRSRVNHGRAGGGRRGSNPVKRYAPGLPCDVYTYLHEKYLDCQERKLVYVLPGWPQDLLHMLLARNKIRTLKNNMFSKFKKLKSLDLQQNEISKIESEAFFGLNKLTTLLLQHNQIKVLTEEVFIYTPLLSYLRLYDNPWHCTCEIETLISMLQIPRNRNLGNYAKCESPQEQKNKKLRQIKSEQLCNEEEKEQLDPKPQVSGRPPVIKPEVDSTFCHNYVFPIQTLDCKRKELKKVPNNIPPDIVKLDLSYNKINQLRPKEFEDVHELKKLNLSSNGIEFIDPAAFLGLTHLEELDLSNNSLQNFDYGVLEDLYFLKLLWLRDNPWRCDYNIHYLYYWLKHHYNVHFNGLECKTPEEYKGWSVGKYIRSYYEECPKDKLPAYPESFDQDTEDDEWEKKHRDHTAKKQSVIITIVG

SEQ ID NO: 8028 - protein, 186 aa, Homo sapiens
MRPQILLLLALLTLGLAAQHQDKVPCKMVDKKVSCQVLGLLQVPSVLPPDTETLDLSGNQLRSILASPLGFYTALRHLDLSTNEISFLQPGAFQALTHLEHLSLAHNRLAMATALSAGGLGPLPRVTSLDLSGNSLYSGLLERLLGEAPSLHTLSLAENSLTRLTRHTFRDMPALEQLDLHSNVLM

SEQ ID NO: 8029 - protein, 662 aa, Homo sapiens
MRPQILLLLALLTLGLAAQHQDKVPCKMVDKKVSCQVLGLLQVPSVLPPDTETLDLSGNQLRSILASPLGFYTALRHLDLSTNEISFLQPGAFQALTHLEHLSLAHNRLAMATALSAGGLGPLPRVTSLDLSGNSLYSGLLERLLGEAPSLHTLSLAENSLTRLTRHTFRDMPALEQLDLHSNVLMDIEDGAFEGLPRLTHLNLSRNSLTCISDFSLQQLRVLDLSCNSIEAFQTASQPQAEFQLTWLDLRENKLLHFPDLAALPRLIYLNLSNNLIRLPTGPPQDSKGIHAPSEGWSALPLSAPSGNASGRPLSQLLNLDLSYNEIELIPDSFLEHLTSLCFLNLSRNCLRTFEARRLGSLPCLMLLDLSHNALETLELGARALGSLRTLLLQGNALRDLPPYTFANLASLQRLNLQGNRVSPCGGPDEPGPSGCVAFSGITSLRSLSLVDNEIELLRAGAFLHTPLTELDLSSNPGLEVATGALGGLEASLEVLALQGNGLMVLQVDLPCFICLKRLNLAENRLSHLPAWTQAVSLEVLDLRNNSFSLLPGSAMGGLETSLRRLYLQGNPLSCCGNGWLAAQLHQGRVDVDATQDLICRFSSQEEVSLSHVRPEDCEKGGLKNINLIIILTFILVSAILLTTLAACCCVRRQKFNQQYKA

SEQ ID NO: 8030 - protein, 662 aa, Homo sapiens; identical to SEQ ID NO: 8029

SEQ ID NO: 8031 - protein, 662 aa, Homo sapiens; identical to SEQ ID NO: 8029

SEQ ID NO: 8032 - protein, 55 aa, Homo sapiens
MNLVDLWLTRSLSMCLLLQSFVLMILCFHSASMCPKGCLCSSSGGLNVTCSNANL

SEQ ID NO: 8033 - protein, 163 aa, Homo sapiens
MNLVDLWLTRSLSMCLLLQSFVLMILCFHSASMCPKGCLCSSSGGLNVTCSNANLKEIPRDLPPETVLLYLDSNQITSIPNEIFKDLHQLRVLNLSKNGIEFIDEHAFKGVAETLQTLDLSDNRIQSVHKNAFNNLKARARIANNPWHCDCTLQQVLRSMASN

SEQ ID NO: 8034 - protein, 259 aa, Homo sapiens
MNLVDLWLTRSLSMCLLLQSFVLMILCFHSASMCPKGCLCSSSGGLNVTCSNANLKEIPRDLPPETVLLYLDSNQITSIPNEIFKDLHQLRVLNLSKNGIEFIDEHAFKGVAETLQTLDLSDNRIQSVHKNAFNNLKARARIANNPWHCDCTLQQVLRSMASNHETAHNVICKTSVLDEHAGRPFLNAANDADLCNLPKKTTDYAMLVTMFGWFTMVISYVVYYVRQNQEDARRHLEYLKSLPSRQKKADEPDDISTVV

SEQ ID NO: 8035 - protein, 259 aa, Homo sapiens; identical to SEQ ID NO: 8034

SEQ ID NO: 8036 - protein, 259 aa, Homo sapiens; identical to SEQ ID NO: 8034

SEQ ID NO: 8037 - protein, 238 aa, Homo sapiens
MARARGSPCPPLPPGRMSWPHGALLFLWLFSPPLGAGGGGVAVTSAAGGGSPPATSCPVACSCSNQASRVICTRRDLAEVPASIPVNTRYLNLQENGIQVIRTDTFKHLRHLEILQLSKNLVRKIEVGAFNGLPSLNTLELFDNRLTTVPTQAFEYLSKLRELWLRNNPIESIPSYAFNRVPSLRRLDLGELKRLEYISEAAFEGLVNLRYLNLGMCNLKDIPNLTALVRLEELELSG

SEQ ID NO: 8038 - protein, 713 aa, Homo sapiens
MARARGSPCPPLPPGRMSWPHGALLFLWLFSPPLGAGGGGVAVTSAAGGGSPPATSCPVACSCSNQASRVICTRRDLAEVPASIPVNTRYLNLQENGIQVIRTDTFKHLRHLEILQLSKNLVRKIEVGAFNGLPSLNTLELFDNRLTTVPTQAFEYLSKLRELWLRNNPIESIPSYAFNRVPSLRRLDLGELKRLEYISEAAFEGLVNLRYLNLGMCNLKDIPNLTALVRLEELELSGNRLDLIRPGSFQGLTSLRKLWLMHAQVATIERNAFDDLKSLEELNLSHNNLMSLPHDLFTPLHRLERVHLNHNPWHCNCDVLWLSWWLKETVPSNTTCCARCHAPAGLKGRYIGELDQSHFTCYAPVIVEPPTDLNVTEGMAAELKCRTGTSMTSVNWLTPNGTLMTHGSYRVRISVLHDGTLNFTNVTVQDTGQYTCMVTNSAGNTTASATLNVSAVDPVAAGGTGSGGGGPGGSGGVGGGSGGYTYFTTVTVETLETQPGEEALQPRGTEKEPPGPTTDGVWGGGRPGDAAGPASSSTTAPAPRSSRPTEKAFTVPITDVTENALKDLDDVMKTTKIIIGCFVAITFMAAVMLVAFYKLRKQHQLHKHHGPTRTVEIINVEDELPAASAVSVAAAAAVASGGGVGGDSHLALPALERDHLNHHHYVAAAFKAHYSSNPSGGGCGGKGPPGLNSIHEPLLFKSGSKENVQETQI

SEQ ID NO: 8039 - protein, 713 aa, Homo sapiens; identical to SEQ ID NO: 8038

SEQ ID NO: 8040 - protein, 71 aa, Homo sapiens
MCGLQFSLPCLRLFLVVTCYLLLLLHKEILGCSSVCQLCTGRQINCRNLGLSSIPKNFPESTVFLLASKGP

SEQ ID NO: 8041 - protein, 622 aa, Homo sapiens
MCGLQFSLPCLRLFLVVTCYLLLLLHKEILGCSSVCQLCTGRQINCRNLGLSSIPKNFPESTVFLYLTGNNISYINESELTGLHSLVALYLDNSNILYVYPKAFVQLRHLYFLFLNNNFIKRLDPGIFKGLLNLRNLYLQYNQVSFVPRGVFNDLVSVQYLNLQRNRLTVLGSGTFVGMVALRILDLSNNNILRISESGFQHLENLACLYLGSNNLTKVPSNAFEVLKSLRRLSLSHNPIEAIQPFAFKGLANLEYLLLKNSRIRNVTRDGFSGINNLKHLILSHNDLENLNSDTFSLLKNLIYLKLDRNRIISIDNDTFENMGASLKILNLSFNNLTALHPRVLKPLSSLIHLQANSNPWECNCKLLGLRDWLASSAITLNIYCQNPPSMRGRALRYINITNCVTSSINVSRAWAVVKSPHIHHKTTALMMAWHKVTTNGSPLENTETENITFWERIPTSPAGRFFQENAFGNPLETTAVLPVQIQLTTSVTLNLEKNSALPNDAASMSGKTSLICTQEVEKLNEAFDILLAFFILACVLIIFLIYKVVQFKQKLKASENSRENRLEYYSFYQSARYNVTASICNTSPNSLESPGLEQIRLHKQIVPENEAQVILFEHSAL

SEQ ID NO: 8042 - protein, 708 aa, Homo sapiens
MKDMPLRIHVLLGLAITTLVQAVDKKVDCPRLCTCEIRPWFTPRSIYMEASTVDCNDLGLLTFPARLPANTQILLLQTNNIAKIEYSTDFPVNLTGLDLSQNNLSSVTNINVKKMPQLLSVYLEENKLTELPEKCLSELSNLQELYINHNLLSTISPGAFIGLHNLLRLHLNSNRLQMINSKWFDALPNLEILMIGENPIIRIKDMNFKPLINLRSLVIAGINLTEIPDNALVGLENLESISFYDNRLIKVPHVALQKVVNLKFLDLNKNPINRIRRGDFSNMLHLKELGINNMPELISIDSLAVDNLPDLRKIEATNNPRLSYIHPNAFFRLPKLESLMLNSNALSALYHGTIESLPNLKEISIHSNPIRCDCVIRWMNMNKTNIRFMEPDSLFCVDPPEFQGQNVRQVHFRDMMEICLPLIAPESFPSNLNVEAGSYVSFHCRATAEPQPEIYWITPSGQKLLPNTLTDKFYVHSEGTLDINGVTPKEGGLYTCIATNLVGADLKSVMIKVDGSFPQDNNGSLNIKIRDIQANSVLVSWKASSKILKSSVKWTAFVKTENSHAAQSARIPSDVKVYNLTHLNPSTEYKICIDIPTIYQKNRKKCVNVTTKGLHPDQKEYEKNNTTTLMACLGGLLGIIGVICLISCLSPEMNCDGGHSYVRNYLQKPTFALGELYPPLINLWEAGKEKSTSLKVKATVIGLPTNMS

SEQ ID NO: 8043 - protein, 708 aa, Homo sapiens; identical to SEQ ID NO: 8042

SEQ ID NO: 8044 - protein, 273 aa, Homo sapiens
MKDMPLRIHVLLGLAITTLVQAVDKKVDCPRLCTCEIRPWFTPRSIYMEASTVDCNDLGLLTFPARLPANTQILLLQTNNIAKIEYSTDFPVNLTGLDLSQNNLSSVTNINVKKMPQLLSVYLEENKLTELPEKCLSELSNLQELYINHNLLSTISPGAFIGLHNLLRLHLNSNRLQMINSKWFDALPNLEILMIGENPIIRIKDMNFKPLINLRSLVIAGINLTEIPDNALVGLENLESISFYDNRLIKVPHVALQKVVNLKFLDLNKNPIN

SEQ ID NO: 8045 - protein, 708 aa, Homo sapiens; identical to SEQ ID NO: 8042

SEQ ID NO: 8046 - protein, 109 aa, Homo sapiens
MDFLLLGLCLYWLLRRPSGVVLCLLGACFQMLPAAPSGCPQLCRCEGRLLYCEALNLTEAPHNLSGLLGLSLRYNSLSELRAGQFTGLMQLTWLYLDHNHICSVQGDAF

SEQ ID NO: 8047 - protein, 183 aa, Homo sapiens
MDFLLLGLCLYWLLRRPSGVVLCLLGACFQMLPAAPSGCPQLCRCEGRLLYCEALNLTEAPHNLSGLLGLSLRYNSLSELRAGQFTGLMQLTWLYLDHNHICSVQGDAFQKLRRVKELTLSSNQITQLPNTTFRPMPNLRSVDLSYNKLQALAPDLFHGLRKLTTLHMRANAIQFVPVRIFQD

SEQ ID NO: 8048 - protein, 223 aa, Homo sapiens
MDFLLLGLCLYWLLRRPSGVVLCLLGACFQMLPAAPSGCPQLCRCEGRLLYCEALNLTEAPHNLSGLLGLSLRYNSLSELRAGQFTGLMQLTWLYLDHNHICSVQGDAFQKLRRVKELTLSSNQITQLPNTTFRPMPNLRSVDLSYNKLQALAPDLFHGLRKLTTLHMRANAIQFVPVRIFQDCRSLKFLDIGYNQLKSLARNSFAGLFKLTELHLEHNDLVK

SEQ ID NO: 8049 - protein, 522 aa, Homo sapiens
MDFLLLGLCLYWLLRRPSGVVLCLLGACFQMLPAAPSGCPQLCRCEGRLLYCEALNLTEAPHNLSGLLGLSLRYNSLSELRAGQFTGLMQLTWLYLDHNHICSVQGDAFQKLRRVKELTLSSNQITQLPNTTFRPMPNLRSVDLSYNKLQALAPDLFHGLRKLTTLHMRANAIQFVPVRIFQDCRSLKFLDIGYNQLKSLARNSFAGLFKLTELHLEHNDLVKVNFAHFPRLISLHSLCLRRNKVAIVVSSLDWVWNLEKMDLSGNEIEYMEPHVFETVPHLQSLQLDSNRLTYIEPRILNSWKSLTSITLAGNLWDCGRNVCALASWLNNFQGRYDGNLQCASPEYAQGEDVLDAVYAFHLCEDGAEPTSGHLLSAVTNRSDLGPPASSATTLADGGEGQHDGTFEPATVALPGGEHAENAVQIHKVVTGTMALIFSFLIVVLVLYVSWKCFPASLRQLRQCFVTQRRKQKQKQTMHQMAAMSAQEYYVDYKPNHIEGALVIINEYGSCTCHQQPARECEV

SEQ ID NO: 8050 - protein, 522 aa, Homo sapiens; identical to SEQ ID NO: 8049

SEQ ID NO: 8051 - protein, 522 aa, Homo sapiens; identical to SEQ ID NO: 8049

SEQ ID NO: 8052 - protein, 522 aa, Homo sapiens; identical to SEQ ID NO: 8049

SEQ ID NO: 8053 - protein, 38 aa, Homo sapiens
MAVISAPRALLWPSEAADLAFTFQLPADYPSTPVLGLS

SEQ ID NO: 8054 - protein, 516 aa, Homo sapiens
MGLHFKWPLGAPMLAAIYAMSMVLKMLPALGMACPPKCRCEKLLFYCDSQGFHSVPNATDKGSLGLSLRHNHITELERDQFASFSQLTWLHLDHNQISTVKEDAFQGLYKLKELILSSNKIFYLPNTTFTQLINLQNLDLSFNQLSSLHPELFYGLRKLQTLHLRSNSLRTIPVRLFWDCRSLEFLDLSTNRLRSLARNGFAGLIKLRELHLEHNQLTKINFAHFLRLSSLHTLFLQWNKISNLTCGMEWTWGTLEKLDLTGNEIKAIDLTVFETMPNLKILLMDNNKLNSLDSKILNSLRSLTTVGLSGNLWECSARICALASWLGSFQGRWEHSILCHSPDHTQGEDILDAVHGFQLCWNLSTTVTVMATTYRDPTTEYTKRISSSSYHVGDKEIPTTAGIAVTTEEHFPEPDNAIFTQRVITGTMALLFSFFFIIFIVFISRKCCPPTLRRIRQCSMVQNHRQLRSQTRLHMSNMSDQGPYNEYEPTHEGPFIIINGYGQCKCQQLPYKECEV

SEQ ID NO: 8055 - protein, 77 aa, Homo sapiens
MVFISRKCCPPTLRRIRQCSMVQNHRQLRSQTRLHMSNMSDQGPYNEYEPTHEGPFIIINGYGQCKCQQLPYKECEV

SEQ ID NO: 8056 - protein, 590 aa, Homo sapiens
MGFHLITQLKGMSVVLVLLPTLLLVMLTGAQRACPKNCRCDGKIVYCESHAFADIPENISGGSQGLSLRFNSIQKLKSNQFAGLNQLIWLYLDHNYISSVDEDAFQGIRRLKELILSSNKITYLHNKTFHPVPNLRNLDLSYNKLQTLQSEQFKGLRKLIILHLRSNSLKTVPIRVFQDCRNLDFLDLGYNRLRSLSRNAFAGLLKLKELHLEHNQFSKINFAHFPRLFNLRSIYLQWNRIRSISQGLTWTWSSLHNLDLSGNDIQGIEPGTFKCLPNLQKLNLDSNKLTNISQETVNAWISLISITLSGNMWECSRSICPLFYWLKNFKGNKESTMICAGPKHIQGEKVSDAVETYNICSEVQVVNTERSHLVPQTPQKPLIIPRPTIFKPDVTQSTFETPSPSPGFQIPGAEQEYEHVSFHKIIAGSVALFLSVAMILLVIYVSWKRYPASMKQLQQHSLMKRRRKKARESERQMNSPLQEYYVDYKPTNSETMDISVNGSGPCTYTISGSRECEMPHHMKPLPYYSYDQPVIGYCQAHQPLHVTKGYETVSPEQDESPGLELGRDHSFIATIARSAAPAIYLERIAN

SEQ ID NO: 8057 - protein, 518 aa, Homo sapiens
MGFHLITQLKGMSVVLVLLPTLLLVMLTGAQRACPKNCRCDGKIVYCESHAFADIPENISGGSQGLSLRFNSIQKLKSNQFAGLNQLIWLYLDHNYISSVDEDAFQGIRRLKELILSSNKITYLHNKTFHPVPNLRNLDLSYNKLQTLQSEQFKGLRKLIILHLRSNSLKTVPIRVFQDCRNLDFLDLGYNRLRSLSRNAFAGLLKLKELHLEHNQFSKINFAHFPRLFNLRSIYLQWNRIRSISQGLTWTWSSLHNLDLSGNDIQGIEPGTFKCLPNLQKLNLDSNKLTNISQETVNAWISLISITLSGNMWECSRSICPLFYWLKNFKGNKESTMICAGPKHIQGEKVSDAVETYNICSEVQVVNTERSHLVPQTPQKPLIIPRPTIFKPDVTQSTFETPSPSPGFQIPGAEQEYEHVSFHKIIAGSVALFLSVAMILLVIYVSWKRYPASMKQLQQHSLMKRRRKKARESERQMNSPLQEYYVDYKPTNSETMDISVNGSGPCTYTISGSRECEV

SEQ ID NO: 8058 - protein, 590 aa, Homo sapiens; identical to SEQ ID NO: 8056

SEQ ID NO: 8059 - protein, 591 aa, Homo sapiens
MPGFHLITQLKGMSVVLVLLPTLLLVMLTGAQRACPKNCRCDGKIVYCESHAFADIPENISGGSQGLSLRFNSIQKLKSNQFAGLNQLIWLYLDHNYISSVDEDAFQGIRRLKELILSSNKITYLHNKTFHPVPNLRNLDLSYNKLQTLQSEQFKGLRKLIILHLRSNSLKTVPIRVFQDCRNLDFLDLGYNRLRSLSRNAFAGLLKLKELHLEHNQFSKINFAHFPRLFNLRSIYLQWNRIRSISQGLTWTWSSLHNLDLSGNDIQGIEPGTFKCLPNLQKLNLDSNKLTNISQETVNAWISLISITLSGNMWECSRSICPLFYWLKNFKGNKESTMICAGPKHIQGEKVSDAVETYNICSEVQVVNTERSHLVPQTPQKPLIIPRPTIFKPDVTQSTFETPSPSPGFQIPGAEQEYEHVSFHKIIAGSVALFLSVAMILLVIYVSWKRYPASMKQLQQHSLMKRRRKKARESERQMNSPLQEYYVDYKPTNSETMDISVNGSGPCTYTISGSRECEMPHHMKPLPYYSYDQPVIGYCQAHQPLHVTKGYETVSPEQDESPGLELGRDHSFIATIARSAAPAIYLERIAN

SEQ ID NO: 8060 - protein, 519 aa, Homo sapiens
MPGFHLITQLKGMSVVLVLLPTLLLVMLTGAQRACPKNCRCDGKIVYCESHAFADIPENISGGSQGLSLRFNSIQKLKSNQFAGLNQLIWLYLDHNYISSVDEDAFQGIRRLKELILSSNKITYLHNKTFHPVPNLRNLDLSYNKLQTLQSEQFKGLRKLIILHLRSNSLKTVPIRVFQDCRNLDFLDLGYNRLRSLSRNAFAGLLKLKELHLEHNQFSKINFAHFPRLFNLRSIYLQWNRIRSISQGLTWTWSSLHNLDLSGNDIQGIEPGTFKCLPNLQKLNLDSNKLTNISQETVNAWISLISITLSGNMWECSRSICPLFYWLKNFKGNKESTMICAGPKHIQGEKVSDAVETYNICSEVQVVNTERSHLVPQTPQKPLIIPRPTIFKPDVTQSTFETPSPSPGFQIPGAEQEYEHVSFHKIIAGSVALFLSVAMILLVIYVSWKRYPASMKQLQQHSLMKRRRKKARESERQMNSPLQEYYVDYKPTNSETMDISVNGSGPCTYTISGSRECEV

SEQ ID NO: 8061 - protein, 24 aa, Homo sapiens
MSVVLVLLPTLLLVMLTGAQRACP

SEQ ID NO: 8062 - protein, 93 aa, Homo sapiens
MLAPGSSPGQRGRLALQWRQVSWITCWIALYAVEALPTCPFSCKCDSRSLEVDCSGLGLTTVPPDVPAATRTLLLLNNKLSALPSWAFANLSS

SEQ ID NO: 8063 - protein, 96 aa, Homo sapiens
MLAPGSSPGQRGRLALQWRQVSWITCWIALYAVEALPTCPFSCKCDSRSLEVDCSGLGLTTVPPDVPAATRTLLLLNNKLSALPSWAFANLSSLQR

SEQ ID NO: 8064 - protein, 370 aa, Homo sapiens
MLAPGSSPGQRGRLALQWRQVSWITCWIALYAVEALPTCPFSCKCDSRSLEVDCSGLGLTTVPPDVPAATRTLLLLNNKLSALPSWAFANLSSLQRLDLSNNFLDRLPRSIFGDLTNLTELQLRNNSIRTLDRDLLRHSPLLRHLDLSINGLAQLPPGLFDGLLALRSLSLRSNRLQNLDRLTFEPLANLQLLQVGDNPWECDCNLREFKHWMEWFSYRGGRLDQLACTLPKELRGKDMRMVPMEMFNYCSQLEDENSSAGLDIPGPPCTKASPEPAKPKPGAEPEPEPSTACPQKQRHRPASVRRAMGTVIIAGVVCGVVCIMMVVAAAYGCIYASLMAKYHRELKKRQPLMGDPEGEHEDQKQISSVA

SEQ ID NO: 8065 - protein, 370 aa, Homo sapiens; identical to SEQ ID NO: 8064

SEQ ID NO: 8066 - protein, 370 aa, Homo sapiens; identical to SEQ ID NO: 8064

SEQ ID NO: 8067 - protein, 114 aa, Homo sapiens
DSVRTVRVVATKQGNAVTLGDYYQGRRITITGNADLTFDQTAWGDSGVYYCSVVSAQDLQGNNEAYAELIVLGRTSGVAELLPGFQAGPIEVYAAGKAATSGVPSIYAPSTYAH

SEQ ID NO: 8068 - protein, 493 aa, Homo sapiens
MALLAGGLSRGLGSHPAAAGRDAVVFVWLLLSTWCTAPARAIQVTVSNPYHVVILFQPVTLPCTYQMTSTPTQPIVIWKYKSFCRDRIADAFSPASVDNQLNAQLAAGNPGYNPYVECQDSVRTVRVVATKQGNAVTLGDYYQGRRITITGMYAAGKAATSGVPSIYAPSTYAHLSPAKTPPPPAMIPMGPAYNGYPGGYPGDVDRSSSAGGQGSYVPLLRDTDSSVASEVRSGYRIQASQQDDSMRVLYYMEKELANFDPSRPGPPSGRVERAMSEVTSLHEDDWRSRPSRGPALTPIRDEEWGGHSPRSPRGWDQEPAREQAGGGWRARRPRARSVDALDDLTPPSTAESGSRSPTSNGGRSRAYMPPRSRSRDDLYDQDDSRDFPRSRDPHYDDFRSRERPPADPRSHHHRTRDPRDNGSRSGDLPYDGRLLEEAVRKKGSEERRRPHKEEEEEAYYPPAPPPYSETDSQASRERRLKKNLALSRESLVV

SEQ ID NO: 8069 - protein, 601 aa, Homo sapiens
MALLAGGLSRGLGSHPAAAGRDAVVFVWLLLSTWCTAPARAIQVTVSNPYHVVILFQPVTLPCTYQMTSTPTQPIVIWKYKSFCRDRIADAFSPASVDNQLNAQLAAGNPGYNPYVECQDSVRTVRVVATKQGNAVTLGDYYQGRRITITGNADLTFDQTAWGDSGVYYCSVVSAQDLQGNNEAYAELIVLGRTSGVAELLPGFQAGPIEDWLFVVVVCLAAFLIFLLLGICWCQCCPHTCCCYVRCPCCPDKCCCPEALYAAGKAATSGVPSIYAPSTYAHLSPAKTPPPPAMIPMGPAYNGYPGGYPGDVDRSSSAGGQGSYVPLLRDTDSSVASEVRSGYRIQASQQDDSMRVLYYMEKELANFDPSRPGPPSGRVERAMSEVTSLHEDDWRSRPSRGPALTPIRDEEWGGHSPRSPRGWDQEPAREQAGGGWRARRPRARSVDALDDLTPPSTAESGSRSPTSNGGRSRAYMPPRSRSRDDLYDQDDSRDFPRSRDPHYDDFRSRERPPADPRSHHHRTRDPRDNGSRSGDLPYDGRLLEEAVRKKGSEERRRPHKEEEEEAYYPPAPPPYSETDSQASRERRLKKNLALSRESLVV

SEQ ID NO: 8070 - protein, 591 aa, Homo sapiens
MQQDGLGVGTRNGSGKGRSVHPSWPWCAPRPLRYFGRDARARRAQTAAMALAIQVTVSNPYHVVILFQPVTLPCTYQMTSTPTQPIVIWKYKSFCRDRIADAFSPASVDNQLNAQLAAGNPGYNPYVECQDSVRTVRVVATKQGNAVTLGDYYQGRRITITGNADLTFDQTAWGDSGVYYCSVVSAQDLQGNNEAYAELIVLGRTSGVAELLPGFQAGPIEDWLFVVVVCLAAFLIFLLLGICWCQCCPHTCCCYVRCPCCPDKCCCPEALYAAGKAATSGVPSIYAPSTYAHLSPAKTPPPPAMIPMGPAYNGYPGGYPGDVDRSSSVRSGYRIQASQQDDSMRVLYYMEKELANFDPSRPGPPSGRVERAMSEVTSLHEDDWRSRPSRGPALTPIRDEEWGGHSPRSPRGWDQEPAREQAGGGWRARRPRARSVDALDDLTPPSTAESGSRSPTSNGGRSRAYMPPRSRSRDDLYDQDDSRDFPRSRDPHYDDFRSRERPPADPRSHHHRTRDPRDNGSRSGDLPYDGRLLEEAVRKKGSEERRRPHKEEEEEAYYPPAPPPYSETDSQASRERRLKKNLALSRESLVV

SEQ ID NO: 8071 - protein, 630 aa, Homo sapiens
MQQDGLGVGTRNGSGKGRSVHPSWPWCAPRPLRYFGRDARARRAQTAAMALLAGGLSRGLGSHPAAAGRDAVVFVWLLLSTWCTAPARAIQVTVSNPYHVVILFQPVTLPCTYQMTSTPTQPIVIWKYKSFCRDRIADAFSPASVDNQLNAQLAAGNPGYNPYVECQDSVRTVRVVATKQGNAVTLGDYYQGRRITITGNADLTFDQTAWGDSGVYYCSVVSAQDLQGNNEAYAELIVLDWLFVVVVCLAAFLIFLLLGICWCQCCPHTCCCYVRCPCCPDKCCCPEALYAAGKAATSGVPSIYAPSTYAHLSPAKTPPPPAMIPMGPAYNGYPGGYPGDVDRSSSAGGQGSYVPLLRDTDSSVASEVRSGYRIQASQQDDSMRVLYYMEKELANFDPSRPGPPSGRVERAMSEVTSLHEDDWRSRPSRGPALTPIRDEEWGGHSPRSPRGWDQEPAREQAGGGWRARRPRARSVDALDDLTPPSTAESGSRSPTSNGGRSRAYMPPRSRSRDDLYDQDDSRDFPRSRDPHYDDFRSRERPPADPRSHHHRTRDPRDNGSRSGDLPYDGRLLEEAVRKKGSEERRRPHKEEEEEAYYPPAPPPYSETDSQASRERRLKKNLALSRESLVV

SEQ ID NO: 8072 - protein, 629 aa, Homo sapiens
MQQDGLGVGTRNGSGKGRSVHPSWPWCAPRPLRYFGRDARARRAQTAAMALLAGGLSRGLGSHPAAAGRDAVVFVWLLLSTWCTAPARAIQVTVSNPYHVVILFQPVTLPCTYQMTSTPTQPIVIWKYKSFCRDRIADAFSPASVDNQLNAQLAAGNPGYNPYVECQDSVRTVRVVATKQGNAVTLGDYYQGRRITITGNADLTFDQTAWGDSGVYYCSVVSAQDLQGNNEAYAELIVLDWLFVVVVCLAAFLIFLLLGICWCQCCPHTCCCYVRCPCCPDKCCCPEALYAAGKAATSGVPSIYAPSTYAHLSPAKTPPPPAMIPMGPAYNGYPGGYPGDVDRSSSAGGQGSYVPLLRDTDSSVASVRSGYRIQASQQDDSMRVLYYMEKELANFDPSRPGPPSGRVERAMSEVTSLHEDDWRSRPSRGPALTPIRDEEWGGHSPRSPRGWDQEPAREQAGGGWRARRPRARSVDALDDLTPPSTAESGSRSPTSNGGRSRAYMPPRSRSRDDLYDQDDSRDFPRSRDPHYDDFRSRERPPADPRSHHHRTRDPRDNGSRSGDLPYDGRLLEEAVRKKGSEERRRPHKEEEEEAYYPPAPPPYSETDSQASRERRLKKNLALSRESLVV

SEQ ID NO: 8073 - protein, 649 aa, Homo sapiens
MQQDGLGVGTRNGSGKGRSVHPSWPWCAPRPLRYFGRDARARRAQTAAMALLAGGLSRGLGSHPAAAGRDAVVFVWLLLSTWCTAPARAIQVTVSNPYHVVILFQPVTLPCTYQMTSTPTQPIVIWKYKSFCRDRIADAFSPASVDNQLNAQLAAGNPGYNPYVECQDSVRTVRVVATKQGNAVTLGDYYQGRRITITGNADLTFDQTAWGDSGVYYCSVVSAQDLQGNNEAYAELIVLGRTSGVAELLPGFQAGPIEDWLFVVVVCLAAFLIFLLLGICWCQCCPHTCCCYVRCPCCPDKCCCPEALYAAGKAATSGVPSIYAPSTYAHLSPAKTPPPPAMIPMGPAYNGYPGGYPGDVDRSSSAGGQGSYVPLLRDTDSSVASEVRSGYRIQASQQDDSMRVLYYMEKELANFDPSRPGPPSGRVERAMSEVTSLHEDDWRSRPSRGPALTPIRDEEWGGHSPRSPRGWDQEPAREQAGGGWRARRPRARSVDALDDLTPPSTAESGSRSPTSNGGRSRAYMPPRSRSRDDLYDQDDSRDFPRSRDPHYDDFRSRERPPADPRSHHHRTRDPRDNGSRSGDLPYDGRLLEEAVRKKGSEERRRPHKEEEEEAYYPPAPPPYSETDSQASRERRLKKNLALSRESLVV

SEQ ID NO: 8074 - protein, 649 aa, Homo sapiens; identical to SEQ ID NO: 8073

SEQ ID NO: 8075 - protein, 581 aa, Homo sapiens
MQQDGLGVGTRNGSGKGRSVHPSWPWCAPRPLRYFGRDARARRAQTAAMALLAGGLSRGLGSHPAAAGRDAVVFVWLLLSTWCTAPARAIQVTVSNPYHVVILFQPVTLPCTYQMTSTPTQPIVIWKYKSFCRDRIADAFSPASVDNQLNAQLAAGNPGYNPYVECQDSVRTVRVVATKQGNAVTLGDYYQGRRITITGNADLTFDQTAWGDSGVYYCSVVSAQDLQGNNEAYAELIVLVYAAGKAATSGVPSIYAPSTYAHLSPAKTPPPPAMIPMGPAYNGYPGGYPGDVDRSSSAGGQGSYVPLLRDTDSSVASEVRSGYRIQASQQDDSMRVLYYMEKELANFDPSRPGPPSGRVERAMSEVTSLHEDDWRSRPSRGPALTPIRDEEWGGHSPRSPRGWDQEPAREQAGGGWRARRPRARSVDALDDLTPPSTAESGSRSPTSNGGRSRAYMPPRSRSRDDLYDQDDSRDFPRSRDPHYDDFRSRERPPADPRSHHHRTRDPRDNGSRSGDLPYDGRLLEEAVRKKGSEERRRPHKEEEEEAYYPPAPPPYSETDSQASRERRLKKNLALSRESLVV

SEQ ID NO: 8076 - protein, 51 aa, Homo sapiens
MQQDGLGVGTRNGSGKGRSVHPSWPWCAPRPLSSCQGHPGDRVQPLPRGDP

SEQ ID NO: 8077 - protein, 139 aa, Homo sapiens
MTSTPTQPIVIWKYKSFCRDRIADAFSPASVDNQLNAQLAAGNPGYNPYVECQDSVRTVRVVATKQGNAVTLGDYYQGRRITITGNADLTFDQTAWGDSGVYYCSVVSAQDLQGNNEAYAELIVLDWLFVVVVCLAAFL

SEQ ID NO: 8078 - protein, 35 aa, Homo sapiens
MLSRNDAPSVLVPGPGLLRAGTPLCISAEAASAQQ

SEQ ID NO: 8079 - protein, 36 aa, Homo sapiens
MLSRNDDICIYGGLGLGGLLLLAVVLLSACLCWLHR

SEQ ID NO: 8080 - protein, 66 aa, Homo sapiens
MLSRNDDICIYGGLGLGGLLLLAVVLLSACLCWLHRRAPSVLVPGPGLLRAGTPLCISAEAASAQQ

SEQ ID NO: 8081 - protein, 44 aa, Homo sapiens
MLSRNDDICIYGGLGLGGLLLLAVVLLSACLCWLHRREAASAQQ

SEQ ID NO: 8082 - protein, 59 aa, Homo sapiens
MLSRNDDICIYGGLGLGGLLLLAVVLLSACLCWLHRRGPGLLRAGTPLCISAEAASAQQ

SEQ ID NO: 8083 - protein, 97 aa, Homo sapiens
MLSRNDDICIYGGLGLGGLLLLAVVLLSACLCWLHRRVKRLERSWAQGSSEQELHYASLQRLPVPSSEGPDLRGRDKRGTKEDPRADYACIAENKPT

SEQ ID NO: 8084 - protein, 104 aa, Homo sapiens
MLSRNDDICIYGGLGLGGLLLLAVVLLSACLCWLHRRVKRLERSWHLLSWSQAQGSSEQELHYASLQRLPVPSSEGPDLRGRDKRGTKEDPRADYACIAENKPT

SEQ ID NO: 8085 - protein, 66 aa, Homo sapiens
MLSRNDDICIYGGLGLGGLLLLAVVLLSACLCWLHRRVKRLERSWRLPVPSSEGPDLRGRDKRGTK

SEQ ID NO: 8086 - protein, 13 aa, Homo sapiens
MLSRNDEAASAQQ

SEQ ID NO: 8087 - protein, 28 aa, Homo sapiens
MLSRNDGPGLLRAGTPLCISAEAASAQQ

SEQ ID NO: 8088 - protein, 28 aa, Homo sapiens
MLSRNDGPGLLRAGTPLCISAEAASAQQ

SEQ ID NO: 8089 - protein, 28 aa, Homo sapiens
MLSRNDGPGLLRAGTPLCISAEAASAQQ

SEQ ID NO: 8090 - protein, 66 aa, Homo sapiens
MLSRNDVKRLERSWAQGSSEQELHYASLQRLPVPSSEGPDLRGRDKRGTKEDPRADYACIAENKPT

SEQ ID NO: 8091 - protein, 66 aa, Homo sapiens; identical to SEQ ID NO: 8090

SEQ ID NO: 8092 - protein, 73 aa, Homo sapiens
MLSRNDVKRLERSWHLLSWSQAQGSSEQELHYASLQRLPVPSSEGPDLRGRDKRGTKEDPRADYACIAENKPT

SEQ ID NO: 8093 - protein, 51 aa, Homo sapiens
MLSRNDVKRLERSWRLPVPSSEGPDLRGRDKRGTKEDPRADYACIAENKPT

SEQ ID NO: 8094 - protein, 60 aa, Homo sapiens
  VARIANT 1: note = misc_feature - Xaa can be any naturally occurring amino acid
XDICIYGGLGLGGLLLLAVVLLSACLCWLHRREAGEELGPGLLRAGTPLCISAEAASAQQ

SEQ ID NO: 8095 - protein, 35 aa, Homo sapiens
  VARIANT 1: note = misc_feature - Xaa can be any naturally occurring amino acid
XGGLLLLAVVLLSACLCWLHRREAGEELEAASAQQ

SEQ ID NO: 8096 - protein, 205 aa, Homo sapiens
MTPPERLFLPRVCGTTLHLLLLGLLLVLLPGAQGLPGVGLTPSAAQTARQHPKMHLAHSTLKPAAHLIGDPSKQNSLLWRANTDRAFLQDGFSLSNNSLLVPTSGIYFVYSQVVFSGKAYSPKATSSPLYLAHEVQLFSSQYPFHVPLLSSQKMVYPGLQEPWLHSMYHGAAFQLTQGDQLSTHTDGIPHLVLSPSTVFFGAFAL

SEQ ID NO: 8097 - protein, 205 aa, Homo sapiens; identical to SEQ ID NO: 8096

SEQ ID NO: 8098 - protein, 270 aa, Homo sapiens
ECQHRHLCAHGQCRNTEGSFQCVCDQGYRASGLGDHCEDINECLEDKSVCQRGDCINTAGSYDCTCPDGFQLDDNKTCQDINECEHPGLCGPQGECLNTEGSFHCVCQQGFSISADGRTCEDVNECELLSGVCGEAFCENVEGSFLCVCADENQEYSPMTGQCRSRTSTDLDVDVDQPKEEKKECYYNLNDASLCDNVLAPNVTKQECCCTSGVGWGDNCEIFPCPVLGTAEFTEMCPKGKGFVPAGESSSEAGGENYKDADECLLFGQE

SEQ ID NO: 8099 - protein, 1721 aa, Homo sapiens
MAGAWLRWGLLLWAGLLASSAHGRLRRITYVVHPGPGLAAGALPLSGPPRSRTFNVALNARYSRSSAAAGAPSRASPGVPSERTRRTSKPGGAALQGLRPPPPPPPEPARPAVPGGQLHPNPGGHPAAAPFTKQGRQVVRSKVPQETQSGGGSRLQVHQKQQLQGVNVCGGRCCHGWSKAPGSQRCTKPSCVPPCQNGGMCLRPQLCVCKPGTKGKACETIAAQDTSSPVFGGQSPGAASSWGPPEQAAKHTSSKKADTLPRVSPVAQMTLTLKPKPSVGLPQQIHSQVTPLSSQSVVIHHGQTQEYVLKPKYFPAQKGISGEQSTEGSFPLRYVQDQVAAPFQLSNHTGRIKVVFTPSICKVTCTKGSCQNSCEKGNTTTLISENGHAADTLTATNFRVVICHLPCMNGGQCSSRDKCQCPPNFTGKLCQIPVHGASVPKLYQHSQQPGKALGTHVIHSTHTLPLTVTSQQGVKVKFPPNIVNIHVKHPPEASVQIHQVSRIDGPTGQKTKEAQPGQSQVSYQGLPVQKTQTIHSTYSHQQVIPHVYPVAAKTQLGRCFQETIGSQCGKALPGLSKQEDCCGTVGTSWGFNKCQKCPKKPSYHGYNQMMECLPGYKRVNNTFCQDINECQLQGVCPNGECLNTMGSYRCTCKIGFGPDPTFSSCVPDPPVISEEKGPCYRLVSSGRQCMHPLSVHLTKQLCCCSVGKAWGPHCEKCPLPGTAAFKEICPGGMGYTVSGVHRRRPIHHHVGKGPVFVKPKNTQPVAKSTHPPPLPAKEEPVEALTFSREHGPGVAEPEVATAPPEKEIPSLDQEKTKLEPGQPQLSPGISTIHLHPQFPVVIEKTSPPVPVEVAPEASTSSASQVIAPTQVTEINECTVNPDICGAGHCINLPVRYTCICYEGYRFSEQQRKCVDIDECTQVQHLCSQGRCENTEGSFLCICPAGFMASEEGTNCIDVDECLRPDVCGEGHCVNTVGAFRCEYCDSGYRMTQRGRCEDIDECLNPSTCPDEQCVNSPGSYQCVPCTEGFRGWNGQCLDVDECLEPNVCANGDCSNLEGSYMCSCHKGYTRTPDHKHCRDIDECQQGNLCVNGQCKNTEGSFRCTCGQGYQLSAAKDQCEDIDECQHRHLCAHGQCRNTEGSFQCVCDQGYRASGLGDHCEDINECLEDKSVCQRGDCINTAGSYDCTCPDGFQLDDNKTCQDINECEHPGLCGPQGECLNTEGSFHCVCQQGFSISADGRTCEDIDECVNNTVCDSHGFCDNTAGSFRCLCYQGFQAPQDGQGCVDVNECELLSGVCGEAFCENVEGSFLCVCADENQEYSPMTGQCRSRTSTDLDVDVDQPKEEKKECYYNLNDASLCDNVLAPNVTKQECCCTSGVGWGDNCEIFPCPVLGTAEFTEMCPKGKGFVPAGESSSEAGGENYKDADECLLFGQEICKNGFCLNTRPGYECYCKQGTYYDPVKLQCFDMDECQDPSSCIDGQCVNTEGSYNCFCTHPMVLDASEKRCIRPAESNEQIEETDVYQDLCWEHLSDEYVCSRPLVGKQTTYTECCCLYGEAWGMQCALCPLKDSDDYAQLCNIPVTGRRQPYGRDALVDFSEQYTPEADPYFIQDRFLNSFEELQAEECGILNGCENGRCVRVQEGYTCDCFDGYHLDTAKMTCVDVNECDELNNRMSLCKNAKCINTDGSYKCLCLPGYVPSDKPNYCTPLNTALNLEKDSDLE

SEQ ID NO: 8100 - protein, 1395 aa, Homo sapiens
MDTKLMCLLFFFSLPPLLVSNHTGRIKVVFTPSICKVTCTKGSCQNSCEKGNTTTLISENGHAADTLTATNFRVVICHLPCMNGGQCSSRDKCQCPPNFTGKLCQIPVHGASVPKLYQHSQQPGKALGTHVIHSTHTLPLTVTSQQGVKVKFPPNIVNIHVKHPPEASVQIHQVSRIDGPTGQKTKEAQPGQSQVSYQGLPVQKTQTIHSTYSHQQVIPHVYPVAAKTQLGRCFQETIGSQCGKALPGLSKQEDCCGTVGTSWGFNKCQKCPKKPSYHGYNQMMECLPGYKRVNNTFCQDINECQLQGVCPNGECLNTMGSYRCTCKIGFGPDPTFSSCVPDPPVISEEKGPCYRLVSSGRQCMHPLSVHLTKQLCCCSVGKAWGPHCEKCPLPGTAAFKEICPGGMGYTVSGVHRRRPIHHHVGKGPVFVKPKNTQPVAKSTHPPPLPAKEEPVEALTFSREHGPGVAEPEVATAPPEKEIPSLDQEKTKLEPGQPQLSPGISTIHLHPQFPVVIEKTSPPVPVEVAPEASTSSASQVIAPTQVTEINECTVNPDICGAGHCINLPVRYTCICYEGYRFSEQQRKCVDIDECTQVQHLCSQGRCENTEGSFLCICPAGFMASEEGTNCIDVDECLRPDVCGEGHCVNTVGAFRCEYCDSGYRMTQRGRCEDIDECLNPSTCPDEQCVNSPGSYQCVPCTEGFRGWNGQCLDVDECLEPNVCANGDCSNLEGSYMCSCHKGYTRTPDHKHCRDIDECQQGNLCVNGQCKNTEGSFRCTCGQGYQLSAAKDQCEDIDECQHRHLCAHGQCRNTEGSFQCVCDQGYRASGLGDHCEDINECLEDKSVCQRGDCINTAGSYDCTCPDGFQLDDNKTCQDINECEHPGLCGPQGECLNTEGSFHCVCQQGFSISADGRTCEDIDECVNNTVCDSHGFCDNTAGSFRCLCYQGFQAPQDGQGCVDVNECELLSGVCGEAFCENVEGSFLCVCADENQEYSPMTGQCRSRTSTDLDVDVDQPKEEKKECYYNLNDASLCDNVLAPNVTKQECCCTSGVGWGDNCEIFPCPVLGTAEFTEMCPKGKGFVPAGESSSEAGGENYKDADECLLFGQEICKNGFCLNTRPGYECYCKQGTYYDPVKLQCFDMDECQDPSSCIDGQCVNTEGSYNCFCTHPMVLDASEKRCIRPAESNEQIEETDVYQDLCWEHLSDEYVCSRPLVGKQTTYTECCCLYGEAWGMQCALCPLKDSDDYAQLCNIPVTGRRQPYGRDALVDFSEQYTPEADPYFIQDRFLNSFEELQAEECGILNGCENGRCVRVQEGYTCDCFDGYHLDTAKMTCVDVNECDELNNRMSLCKNAKCINTDGSYKCLCLPGYVPSDKPNYCTPLNTALNLEKDSDLE

SEQ ID NO: 8101 - protein, 1353 aa, Homo sapiens
MDTKLMCLLFFFSLPPLLVSNHTGRIKVVFTPSICKVTCTKGSCQNSCEKGNTTTLISENGHAADTLTATNFRVVICHLPCMNGGQCSSRDKCQCPPNFTGKLCQIPVHGASVPKLYQHSQQPGKALGTHVIHSTHTLPLTVTSQQGVKVKFPPNIVNIHVKHPPEASVQIHQVSRIDGPTGQKTKEAQPGQSQVSYQGLPVQKTQTIHSTYSHQQVIPHVYPVAAKTQLGRCFQETIGSQCGKALPGLSKQEDCCGTVGTSWGFNKCQKCPKKPSYHGYNQMMECLPGYKRVNNTFCQDINECQLQGVCPNGECLNTMGSYRCTCKIGFGPDPTFSSCVPDPPVISEEKGPCYRLVSSGRQCMHPLSVHLTKQLCCCSVGKAWGPHCEKCPLPGTAAFKEICPGGMGYTVSGVHRRRPIHHHVGKGPVFVKPKNTQPVAKSTHPPPLPAKEEPVEALTFSREHGPGVAEPEVATAPPEKEIPSLDQEKTKLEPGQPQLSPGISTIHLHPQFPVVIEKTSPPVPVEVAPEASTSSASQVIAPTQVTEINECTVNPDICGAGHCINLPVRYTCICYEGYRFSEQQRKCVDIDECTQVQHLCSQGRCENTEGSFLCICPAGFMASEEGTNCIDVDECLRPDVCGEGHCVNTVGAFRCEYCDSGYRMTQRGRCEDIDECLNPSTCPDEQCVNSPGSYQCVPCTEGFRGWNGQCLDVDECLEPNVCANGDCSNLEGSYMCSCHKGYTRTPDHKHCRDIDECQQGNLCVNGQCKNTEGSFRCTCGQGYQLSAAKDQCEDIDECQHRHLCAHGQCRNTEGSFQCVCDQGYRASGLGDHCEDINECLEDKSVCQRGDCINTAGSYDCTCPDGFQLDDNKTCQDINECEHPGLCGPQGECLNTEGSFHCVCQQGFSISADGRTCEDVNECELLSGVCGEAFCENVEGSFLCVCADENQEYSPMTGQCRSRTSTDLDVDVDQPKEEKKECYYNLNDASLCDNVLAPNVTKQECCCTSGVGWGDNCEIFPCPVLGTAEFTEMCPKGKGFVPAGESSSEAGGENYKDADECLLFGQEICKNGFCLNTRPGYECYCKQGTYYDPVKLQCFDMDECQDPSSCIDGQCVNTEGSYNCFCTHPMVLDASEKRCIRPAESNEQIEETDVYQDLCWEHLSDEYVCSRPLVGKQTTYTECCCLYGEAWGMQCALCPLKDSDDYAQLCNIPVTGRRQPYGRDALVDFSEQYTPEADPYFIQDRFLNSFEELQAEECGILNGCENGRCVRVQEGYTCDCFDGYHLDTAKMTCVDVNECDELNNRMSLCKNAKCINTDGSYKCLCLPGYVPSDKPNYCTPLNTALNLEKDSDLE

SEQ ID NO: 8102 - protein, 1342 aa, Homo sapiens
MDTKLMCLLFFFSLPPLLVSNHTGRIKVVFTPSICKVTCTKGSCQNSCEKGNTTTLISENGHAADTLTATNFRVVICHLPCMNGGQCSSRDKCQCPPNFTGKLCQIPVHGASVPKLYQHSQQPGKALGTHVIHSTHTLPLTVTSQQGVKVKFPPNIVNIHVKHPPEASVQIHQVSRIDGPTGQKTKEAQPGQSQVSYQGLPVQKTQTIHSTYSHQQVIPHVYPVAAKTQLGRCFQETIGSQCGKALPGLSKQEDCCGTVGTSWGFNKCQKCPKKPSYHGYNQMMECLPGYKRVNNTFCQDINECQLQGVCPNGECLNTMGSYRCTCKIGFGPDPTFSSCVPDPPVISEEKGPCYRLVSSGRQCMHPLSVHLTKQLCCCSVGKAWGPHCEKCPLPGTAKEEPVEALTFSREHGPGVAEPEVATAPPEKEIPSLDQEKTKLEPGQPQLSPGISTIHLHPQFPVVIEKTSPPVPVEVAPEASTSSASQVIAPTQVTEINECTVNPDICGAGHCINLPVRYTCICYEGYRFSEQQRKCVDIDECTQVQHLCSQGRCENTEGSFLCICPAGFMASEEGTNCIDVDECLRPDVCGEGHCVNTVGAFRCEYCDSGYRMTQRGRCEDIDECLNPSTCPDEQCVNSPGSYQCVPCTEGFRGWNGQCLDVDECLEPNVCANGDCSNLEGSYMCSCHKGYTRTPDHKHCRDIDECQQGNLCVNGQCKNTEGSFRCTCGQGYQLSAAKDQCEDIDECQHRHLCAHGQCRNTEGSFQCVCDQGYRASGLGDHCEDINECLEDKSVCQRGDCINTAGSYDCTCPDGFQLDDNKTCQDINECEHPGLCGPQGECLNTEGSFHCVCQQGFSISADGRTCEDIDECVNNTVCDSHGFCDNTAGSFRCLCYQGFQAPQDGQGCVDVNECELLSGVCGEAFCENVEGSFLCVCADENQEYSPMTGQCRSRTSTDLDVDVDQPKEEKKECYYNLNDASLCDNVLAPNVTKQECCCTSGVGWGDNCEIFPCPVLGTAEFTEMCPKGKGFVPAGESSSEAGGENYKDADECLLFGQEICKNGFCLNTRPGYECYCKQGTYYDPVKLQCFDMDECQDPSSCIDGQCVNTEGSYNCFCTHPMVLDASEKRCIRPAESNEQIEETDVYQDLCWEHLSDEYVCSRPLVGKQTTYTECCCLYGEAWGMQCALCPLKDSDDYAQLCNIPVTGRRQPYGRDALVDFSEQYTPEADPYFIQDRFLNSFEELQAEECGILNGCENGRCVRVQEGYTCDCFDGYHLDTAKMTCVDVNECDELNNRMSLCKNAKCINTDGSYKCLCLPGYVPSDKPNYCTPLNTALNLEKDSDLE

SEQ ID NO: 8103 - protein, 1340 aa, Homo sapiens
MDTKLMCLLFFFSLPPLLVSNHTGRIKVVFTPSICKVTCTKGSCQNSCEKGNTTTLISENGHAADTLTATNFRVVICHLPCMNGGQCSSRDKCQCPPNFTGKLCQIPVHGASVPKLYQHSQQPGKALGTHVIHSTHTLPLTVTSQQGVKVKFPPNIVNIHVKHPPEASVQIHQVSRIDGPTGQKTKEAQPGQSQVSYQGLPVQKTQTIHSTYSHQQVIPHVYPVAAKTQLGRCFQETIGSQCGKALPGLSKQEDCCGTVGTSWGFNKCQKCPKKPSYHGYNQMMECLPGYKRVNNTFCQDINECQLQGVCPNGECLNTMGSYRCTCKIGFGPDPTFSSCVPDPPVISEEKGPCYRLVSSGRQCMHPLSVHLTKQLCCCSVGKAWGPHCEKCPLPGTAKEEPVEALTFSREHGPGVAEPEVATAPPEKEIPSLDQEKTKLEPGQPQLSPGISTIHLHPQFPVVIEKTSPPVPVEVAPEASTSSASQVIAPTQVTEINECTVNPDICGAGHCINLPVRYTCICYEGYRFSEQQRKCVDIDECTQVQHLCSQGRCENTEGSFLCICPAGFMASEEGTNCIDVDECLRPDVCGEGHCVNTVGAFRCEYCDSGYRMTQRGRCEDIDECLNPSTCPDEQCVNSPGSYQCVPCTEGFRGWNGQCLDVDECLEPNVCANGDCSNLEGSYMCSCHKGYTRTPDHKHCRDIDECQQGNLCVNGQCKNTEGSFRCTCGQGYQLSAAKDQCEDIDECQHRHLCAHGQCRNTEGSFQCVCDQGYRASGLGDHCEDINECLEDKSVCQRGDCINTAGSYDCTCPDGFQLDDNKTCQDINECEHPGLCGPQGECLNTEGSFHCVCQQGFSISADGRTCEDIDECVNNTVCDSHGFCDNTAGSFRCLCYQGFQAPQDGQGCVDVNECELLSGVCGEAFCENVEGSFLCVCADENQEYSPMTGQCRSRTSTDVDVDQPKEEKKECYYNLNDASLCDNVLAPNVTKQECCCTSGVGWGDNCEIFPCPVLGTAEFTEMCPKGKGFVPAGESSSEAGGENYKDADECLLFGQEICKNGFCLNTRPGYECYCKQGTYYDPVKLQCFDMDECQDPSSCIDGQCVNTEGSYNCFCTHPMVLDASEKRCIRPAESNEQIEETDVYQDLCWEHLSDEYVCSRPLVGKQTTYTECCCLYGEAWGMQCALCPLKDSDDYAQLCNIPVTGRRQPYGRDALVDFSEQYTPEADPYFIQDRFLNSFEELQAEECGILNGCENGRCVRVQEGYTCDCFDGYHLDTAKMTCVDVNECDELNNRMSLCKNAKCINTDGSYKCLCLPGYVPSDKPNYCTPLNTALNLEKDSDLE

SEQ ID NO: 8104 - protein, 219 aa, Homo sapiens
MGSYRCTCKIGFGPDPTFSSCVPDPPVISEEKGPCYRLVSSGRQCMHPLSVHLTKQLCCCSVGKAWGPHCEKCPLPGTGKGPVFVKPKNTQPVAKSTHPPPLPAKEEPVEALTFSREHGPGVAEPEVATAPPEKEIPSLDQEKTKLEPGQPQLSPGISTIHLHPQFPVVIEKTSPPVPVEVAPEASTSSASQVIAPTQVTEINECTVNPDICGAGHCIN

SEQ ID NO: 8105 - protein, 101 aa, Homo sapiens
MNGGQCSSRDKCQCPPNFTGKLCQIPVHGASVPKLYQHSQQPGKALGTHVIHSTHTLPLTVTSQQGVKVKFPPNIVNIHVKHPPEASVQIHQVSRIDGPTG

SEQ ID NO: 8106 - protein, 221 aa, Homo sapiens
SSGRQCMHPLSVHLTKQLCCCSVGKAWGPHCEKCPLPGTAAFKEICPGGMGYTVSGVHRRRPIHHHVGKGPVFVKPKNTQPVAKSTHPPPLPAKEEPVEALTFSREHGPGVAEPEVATAPPEKEIPSLDQEKTKLEPGQPQLSPGISTIHLHPQFPGIVIEKTSPPVPVEVAPEASTSSASQVIAPTQVTEINECTVNPDICGAGHCINLPVRYTCICYEG

SEQ ID NO: 8107 - protein, 267 aa, Homo sapiens
  VARIANT 1: note = misc_feature - Xaa can be any naturally occurring amino acid
XGRCEDIDECLNPSTCPDEQCVNSPGSYQCVPCTEGFRGWNGQCLDIDECQQGNLCVNGQCKNTEGSFRCTCGQGYQLSAAKDQCEDIDECQHRHLCAHGQCRNTEGSFQCVCDQGYRASGLGDHCEDINECLEDKSVCQRGDCINTAGSYDCTCPDGFQLDDNKTCQDINECEHPGLCGPQGECLNTEGSFHCVCQQGFSISADGRTCEDIDECVNNTVCDSHGFCDNTAGSFRCLCYQGFQAPQDGQGCVDVNECELLSGVCGEA

SEQ ID NO: 8108 - protein, 1821 aa, Homo sapiens
MRPRTKARSPGRALRNPWRGFLPLTLALFVGAGHAQRDPVGRYEPAGGDANRLRRPGGSYPAAAAAKVYSLFREQDAPVAGLQPVERAQPGWGSPRRPTEAEARRPSRAQQSRRVQPPAQTRRSTPLGQQQPAPRTRAAPALPRLGTPQRSGAAPPTPPRGRLTGRNVCGGQCCPGWTTANSTNHCIKPVCEPPCQNRGSCSRPQLCVCRSGFRGARCEEVIPDEEFDPQNSRLAPRRWAERSPNLRRSSAAGEGTLARAQPPAPQSPPAPQSPPAGTLSGLSQTHPSQQHVGLSRTVRLHPTATASSQLSSNALPPGPGLEQRDGTQQAVPLEHPSSPWGLNLTEKIKKIKIVFTPTICKQTCARGHCANSCERGDTTTLYSQGGHGHDPKSGFRIYFCQIPCLNGGRCIGRDECWCPANSTGKFCHLPIPQPDREPPGRGSRPRALLEAPLKQSTFTLPLSNQLASVNPSLVKVHIHHPPEASVQIHQVAQVRGGVEEALVENSVETRPPPWLPASPGHSLWDSNNIPARSGEPPRPLPPAAPRPRGLLGRCYLNTVNGQCANPLLELTTQEDCCGSVGAFWGVTLCAPCPPRPASPVIENGQLECPQGYKRLNLTHCQDINECLTLGLCKDAECVNTRGSYLCTCRPGLMLDPSRSRCVSDKAISMLQGLCYRSLGPGTCTLPLAQRITKQICCCSRVGKAWGSECEKCPLPGTEAFREICPAGHGYTYASSDIRLSMRKAEEEELARPPREQGQRSSGALPGPAERQPLRVVTDTWLEAGTIPDKGDSQAGQVTTSVTHAPAWVTGNATTPPMPEQGIAEIQEEQVTPSTDVLVTLSTPGIDRCAAGATNVCGPGTCVNLPDGYRCVCSPGYQLHPSQAYCTDDNECLRDPCKGKGRCINRVGSYSCFCYPGYTLATSGATQECQDINECEQPGVCSGGQCTNTEGSYHCECDQGYIMVRKGHCQDINECRHPGTCPDGRCVNSPGSYTCLACEEGYRGQSGSCVDVNECLTPGVCAHGKCTNLEGSFRCSCEQGYEVTSDEKGCQDVDECASRASCPTGLCLNTEGSFACSACENGYWVNEDGTACEDLDECAFPGVCPSGVCTNTAGSFSCKDCDGGYRPSPLGDSCEDVDECEDPQSSCLGGECKNTVGSYQCLCPQGFQLANGTVCEDVNECMGEEHCAPHGECLNSHGSFFCLCAPGFVSAEGGTSCQDVDECATTDPCVGGHCVNTEGSFNCLCETGFQPSPESGECVDIDECEDYGDPVCGTWKCENSPGSYRCVLGCQPGFHMAPNGDCIDIDECANDTMCGSHGFCDNTDGSFRCLCDQGFEISPSGWDCVDVNECELMLAVCGAALCENVEGSFLCLCASDLEEYDAQEGHCRPRGAGGQSMSEAPTGDHAPAPTRMDCYSGQKGHAPCSSVLGRNTTQAECCCTQGASWGDACDLCPSEDSAEFSEICPSGKGYIPVEGAWTFGQTMYTDADECVIFGPGLCPNGRCLNTVPGYVCLCNPGFHYDASHKKCEDHDECQDLACENGECVNTEGSFHCFCSPPLTLDLSQQRCMNSTSSTEDLPDHDIHMDICWKKVTNDVCSEPLRGHRTTYTECCCQDGEAWSQQCALCPPRSSEVYAQLCNVARIEAEREAGVHFRPGYEYGPGPDDLHYSIYGPDGAPFYNYLGPEDTVPEPAFPNTAGHSADRTPILESPLQPSELQPHYVASHPEPPAGFEGLQAEECGILNGCENGRCVRVREGYTCDCFEGFQLDAAHMACVDVNECDDLNGPAVLCVHGYCENTEGSYRCHCSPGYVAEAGPPHCTAKE

SEQ ID NO: 8109 - protein, 1769 aa, Homo sapiens
MRPRTKARSPGRALRNPWRGFLPLTLALFVGAGHAQRDPVGRYEPAGGDANRLRRPGGSYPAAAAAKVYSLFREQDAPVAGLQPVERAQPGWGSPRRPTEAEARRPSRAQQSRRVQPPAQTRRSTPLGQQQPAPRTRAAPALPRLGTPQRSGAAPPTPPRGRLTGRNVCGGQCCPGWTTANSTNHCIKPVCEPPCQNRGSCSRPQLCVCRSGFRGARCEEVIPDEEFDPQNSRLAPRRWAERSPNLRRSSAAGEGTLARAQPPAPQSPPAPQSPPAGTLSGLSQTHPSQQHVGLSRTVRLHPTATASSQLSSNALPPGPGLEQRDGTQQAVPLEHPSSPWGLNLTEKIKKIKIVFTPTICKQTCARGHCANSCERGDTTTLYSQGGHGHDPKSGFRIYFCQIPCLNGGRCIGRDECWCPANSTGKFCHLPIPQPDREPPGRGSRPRALLEAPLKQSTFTLPLSNQLASVNPSLVKVHIHHPPEASVQIHQVAQVRGGVEEALVENSVETRPPPWLPASPGHSLWDSNNIPARSGEPPRPLPPAAPRPRGLLGRCYLNTVNGQCANPLLELTTQEDCCGSVGAFWGVTLCAPCPPRPASPVIENGQLECPQGYKRLNLTHCQDINECLTLGLCKDAECVNTRGSYLCTCRPGLMLDPSRSRCVSDKAISMLQGLCYRSLGPGTCTLPLAQRITKQICCCSRVGKAWGSECEKCPLPGTEAFREICPAGHGYTYASSDIRLSMRKAEEEELARPPREQGQRSSGALPGPAERQPLRVVTDTWLEAGTIPDKGDSQAGQVTTSVTHAPAWVTGNATTPPMPEQGIAEIQEEQVTPSTDVLVTLSTPGIDRCAAGATNVCGPGTCVNLPDGYRCVCSPGYQLHPSQAYCTDDNECLRDPCKGKGRCINRVGSYSCFCYPGYTLATSGATQECQDINECEQPGVCSGGQCTNTEGSYHCECDQGYIMVRKGHCQDINECRHPGTCPDGRCVNSPGSYTCLACEEGYRGQSGSCVDVNECLTPGVCAHGKCTNLEGSFRCSCEQGYEVTSDEKGCQDVDECASRASCPTGLCLNTEGSFACSACENGYWVNEDGTACEDLDECAFPGVCPSGVCTNTAGSFSCKDCDGGYRPSPLGDSCEDVDECEDPQSSCLGGECKNTVGSYQCLCPQGFQLANGTVCEDVNECMGEEHCAPHGECLNSHGSFFCLCAPGFVSAEGGTSCQDVDECATTDPCVGGHCVNTEGSFNCLCETGFQPSPESGECVDIDECEDYGDPVCGTWKCENSPGSYRCVLGCQPGFHMAPNGDCIDIDECANDTMCGSHGFCDNTDGSFRCLCDQGFEISPSGWDCVDVNECELMLAVCGAALCENVEGSFLCLCASDLEEYDAQEGHCRPRGAGGQSMSEAPTGDHAPAPTRMDCYSGQKGHAPCSSVLGRNTTQAECCCTQGASWGDACDLCPSEDSAEFSEICPSGKGYIPVEGAWTFGQTMYTDADECVIFGPGLCPNGRCLNTVPGYVCLCNPGFHYDASHKKCEDHDECQDLACENGECVNTEGSFHCFCSPPLTLDLSQQRCMNSTSSTEDLPDHDIHMDICWKKVTNDVCSEPLRGHRTTYTECCCQDGEAWSQQCALCPPRSSEVYAQLCNVARIEAEREAGVHFRPGYEYGPGPDDLHYSIYGPDGAPFYNYLGPEDTVPEPAFPNTAGHSADRTPILESPLQPSELQPHYVASHPGLCCCKTGEEVGTKAVSLPSPPPASHIASRSPQPASKGFRRRSAAS

SEQ ID NO: 8110 - protein, 1777 aa, Homo sapiens
MRPRTKARSPGRALRNPWRGFLPLTLALFVGAGHAQRDPVGRYEPAGGDANRLRRPGGSYPAAAAAKVYSLFREQDAPVAGLQPVERAQPGWGSPRRPTEAEARRPSRAQQSRRVQPPAQTRRSTPLGQQQPAPRTRAAPALPRLGTPQRSGAAPPTPPRGRLTGRNVCGGQCCPGWTTANSTNHCIKPVCEPPCQNRGSCSRPQLCVCRSGFRGARCEEVIPDEEFDPQNSRLAPRRWAERSPNLRRSSAAGEGTLARAQPPAPQSPPAPQSPPAGTLSGLSQTHPSQQHVGLSRTVRLHPTATASSQLSSNALPPGPGLEQRDGTQQAVPLEHPSSPWGLNLTEKIKKIKIVFTPTICKQTCARGHCANSCERGDTTTLYSQGGHGHDPKSGFRIYFCQIPCLNGGRCIGRDECWCPANSTGKFCHLPIPQPDREPPGRGSRPRALLEAPLKQSTFTLPLSNQLASVNPSLVKVHIHHPPEASVQIHQVAQVRGGVEEALVENSVETRPPPWLPASPGHSLWDSNNIPARSGEPPRPLPPAAPRPRGLLGRCYLNTVNGQCANPLLELTTQEDCCGSVGAFWGVTLCAPCPPRPASPVIENGQLECPQGYKRLNLTHCQDINECLTLGLCKDAECVNTRGSYLCTCRPGLMLDPSRSRCVSDKAISMLQGLCYRSLGPGTCTLPLAQRITKQICCCSRVGKAWGSECEKCPLPGTEAFREICPAGHGYTYASSDIRLSMRKAEEEELARPPREQGQRSSGALPGPAERQPLRVVTDTWLEAGTIPDKGDSQAGQVTTSVTHAPAWVTGNATTPPMPEQGIAEIQEEQVTPSTDVLVTLSTPGIDRCAAGATNVCGPGTCVNLPDGYRCVCSPGYQLHPSQAYCTDDNECLRDPCKGKGRCINRVGSYSCFCYPGYTLATSGATQECQDINECEQPGVCSGGQCTNTEGSYHCECDQGYIMVRKGHCQDINECRHPGTCPDGRCVNSPGSYTCLACEEGYRGQSGSCVDVNECLTPGVCAHGKCTNLEGSFRCSCEQGYEVTSDEKGCQDVDECASRASCPTGLCLNTEGSFACSACENGYWVNEDGTACEDLDECAFPGVCPSGVCTNTAGSFSCKDCDGGYRPSPLGDSCEDVDECEDPQSSCLGGECKNTVGSYQCLCPQGFQLANGTVCEDVNECMGEEHCAPHGECLNSHGSFFCLCAPGFVSAEGGTSCQDVDECATTDPCVGGHCVNTEGSFNCLCETGFQPSPESGECVDIDECANDTMCGSHGFCDNTDGSFRCLCDQGFEISPSGWDCVDVNECELMLAVCGAALCENVEGSFLCLCASDLEEYDAQEGHCRPRGAGGQSMSEAPTGDHAPAPTRMDCYSGQKGHAPCSSVLGRNTTQAECCCTQGASWGDACDLCPSEDSAEFSEICPSGKGYIPVEGAWTFGQTMYTDADECVIFGPGLCPNGRCLNTVPGYVCLCNPGFHYDASHKKCEDHDECQDLACENGECVNTEGSFHCFCSPPLTLDLSQQRCMNSTSSTEDLPDHDIHMDICWKKVTNDVCSEPLRGHRTTYTECCCQDGEAWSQQCALCPPRSSEVYAQLCNVARIEAEREAGVHFRPGYEYGPGPDDLHYSIYGPDGAPFYNYLGPEDTVPEPAFPNTAGHSADRTPILESPLQPSELQPHYVASHPEPPAGFEGLQAEECGILNGCENGRCVRVREGYTCDCFEGFQLDAAHMACVDVNECDDLNGPAVLCVHGYCENTEGSYRCHCSPGYVAEAGPPHCTAKE

SEQ ID NO: 8111 - protein, 233 aa, Homo sapiens
  VARIANT 1: note = misc_feature - Xaa can be any naturally occurring amino acid
XTEGSFACSACENGYWVNEDGTACEDLDECAFPGVCPSGVCTNTAGSFSCKDCDGGYRPSPLGDSCEDVDECEDPQSSCLGGECKNTVGSYQCLCPQGFQLANGTVCEDVNECMGEEHCAPHGECLNSHGSFFCLCAPGFVSAEGGTSCQDIDECEDYGDPVCGTWKCENSPGSYRCVLGCQPGFHMAPNGDCIDIDECANDTMCGSHGFCDNTDGSFRCLCDQGFEISPSGW

SEQ ID NO: 8112 - protein, 144 aa, Homo sapiens
FQDTLPKQPCGSNPLPGLTKQEDCCGSIGTAWGQSKCHKCPQLQYTGVQKPGPVRGEVGADCPQGYKRLNSTHCQADKPEEKSLCFRLVSPEHQCQHPLTTRLTRQLCCCSVGKAWGARCQRCPTDGTAAFKEICPAGKGYHIL

SEQ ID NO: 8113 - protein, 140 aa, Homo sapiens
LNECAKPHLCGDGGFCINFPGHYKCNCYPGYRLKASRPPVCEDIDECRDPSSCPDGKCENKPGSFKCIACQPGYRSQGGGACRDVNECAEGSPCSPGWCENLPGSFRCTCAQGYAPAPDGRSCLGERQHPRPGPPPPPTR

SEQ ID NO: 8114 - protein, 124 aa, Homo sapiens
MERAPERRDVCWSQRGEDGMCAGPLAGPALTFDDCCCRQGRGWGAQCRPCPPRGAGSHCPTSQSESNSFWDTSPLLLGKPPRDEDSSEEDSDECRCVSGRCVPRPGGAVCECPGGFQLDASRAR

SEQ ID NO: 8115 - protein, 306 aa, Homo sapiens
MLFGSEICKEGKCVNTQPGYECYCKQGFYYDGNLLECVDVDECLDESNCRNGVCENTRGGYRCACTPPAEYSPAQRQCLSPEEMDVDECQDPAACRPGRCVNLPGSYRCECRPPWVPGPSGRDCQLPESPAERAPERRDVCWSQRGEDGMCAGPLAGPALTFDDCCCRQGRGWGAQCRPCPPRGAGSHCPTSQSESNSFWDTSPLLLGKPPRDEDSSEEDSDECRCVSGRCVPRPGGAVCECPGGFQLDASRARCVDIDECRELNQRGLLCKSERCVNTSGSFRCVCKAGFARSRPHGACVPQRRR

SEQ ID NO: 8116 - protein, 222 aa, Homo sapiens
MLFGSEICKEGKCVNTQPGYECYCKQGFYYDGNLLECVDVDECLDESNCRNGVCENTRGGYRCACTPPAEYSPAQRQCLSPEEMERAPERRDVCWSQRGEDGMCAGPLAGPALTFDDCCCRQGRGWGAQCRPCPPRGAGSHCPTSQSESNSFWDTSPLLLGKPPRDEDSSEEDSDECRCVSGRCVPRPGGAVCECPGGFQLDASRARCVDIDECRELNQRGL

SEQ ID NO: 8117 - protein, 259 aa, Homo sapiens
MLFGSEICKEGKCVNTQPGYECYCKQGFYYDGNLLECVDVDECLDESNCRNGVCENTRGGYRCACTPPAEYSPAQRQCLSPEEMERAPERRDVCWSQRGEDGMCAGPLAGPALTFDDCCCRQGRGWGAQCRPCPPRGAGSHCPTSQSESNSFWDTSPLLLGKPPRDEDSSEEDSDECRCVSGRCVPRPGGAVCECPGGFQLDASRARCVDIDECRELNQRGLLCKSERCVNTSGSFRCVCKAGFARSRPHGACVPQRRR

SEQ ID NO: 8118 - protein, 733 aa, Homo sapiens
MPAETDECRLNQNICGHGECVPGPPDYSCHCNPGYRSHPQHRYCVDVNECEAEPCGPGRGICMNTGGSYNCHCNRGYRLHVGAGGRSCVDLNECAKPHLCGDGGFCINFPGHYKCNCYPGYRLKASRPPVCEDIDECRDPSSCPDGKCENKPGSFKCIACQPGYRSQGGGACRDVNECAEGSPCSPGWCENLPGSFRCTCAQGYAPAPDGRSCLDVDECEAGDVCDNGICSNTPGSFQCQCLSGYHLSRDRSHCEDIDECDFPAACIGGDCINTNGSYRCLCPQGHRLVGGRKCQDIDECSQDPSLCLPHGACKNLQGSYVCVCDEGFTPTQDQHGCEEVEQPHHKKECYLNFDDTVFCDSVLATNVTQQECCCSLGAGWGDHCEIYPCPVYSSAEFHSLCPDGKGYTQDNNIVNYGIPAHRDIDECMLFGSEICKEGKCVNTQPGYECYCKQGFYYDGNLLECVDVDECLDESNCRNGVCENTRGGYRCACTPPAEYSPAQRQCLSPEEMDVDECQDPAACRPGRCVNLPGSYRCECRPPWVPGPSGRDCQLPESPAERAPERRDVCWSQRGEDGMCAGPLAGPALTFDDCCCRQGRGWGAQCRPCPPRGAGSHCPTSQSESNSFWDTSPLLLGKPPRDEDSSEEDSDECRCVSGRCVPRPGGAVCECPGGFQLDASRARCVDIDECRELNQRGLLCKSERCVNTSGSFRCVCKAGFARSRPHGACVPQRRR

SEQ ID NO: 8119 - protein, 1256 aa, Homo sapiens
MPGPRGAAGGLAPEMRGAGAAGLLALLLLLLLLLLGLGGRVEGGPAGERGAGGGGALARERFKVVFAPVICKRTCLKGQCRDSCQQGSNMTLIGENGHSTDTLTGSGFRVVVCPLPCMNGGQCSSRNQCLCPPDFTGRFCQVPAGGAGGGTGGSGPGLSRTGALSTGALPPLAPEGDSVASKHAIYAVQVIADPPGPGEGPPAQHAAFLVPLGPGQISAEVQAPPPVVNVRVHHPPEASVQVHRIESSNAESAAPSQHLLPHPKPSHPRPPTQKPLGRCFQDTLPKQPCGSNPLPGLTKQEDCCGSIGTAWGQSKCHKCPQLQYTGVQKPGPVRGEVGADCPQGYKRLNSTHCQDINECAMPGVCRHGDCLNNPGSYRCVCPPGHSLGPSRTQCIADKPEEKSLCFRLVSPEHQCQHPLTTRLTRQLCCCSVGKAWGARCQRCPTDGTAAFKEICPAGKGYHILTSHQTLTIQGESDFSLFLHPDGPPKPQQLPESPSQAPPPEDTEEERGVTTDSPVSEERSVQQSHPTATTTPARPYPELISRPSPPTMRWFLPDLPPSRSAVEIAPTQVTETDECRLNQNICGHGECVPGPPDYSCHCNPGYRSHPQHRYCVDVNECEAEPCGPGRGICMNTGGSYNCHCNRGYRLHVGAGGRSCVDLNECAKPHLCGDGGFCINFPGHYKCNCYPGYRLKASRPPVCEDIDECRDPSSCPDGKCENKPGSFKCIACQPGYRSQGGGACRDVNECAEGSPCSPGWCENLPGSFRCTCAQGYAPAPDGRSCLDVDECEAGDVCDNGICSNTPGSFQCQCLSGYHLSRDRSHCEDIDECDFPAACIGGDCINTNGSYRCLCPQGHRLVGGRKCQDIDECSQDPSLCLPHGACKNLQGSYVCVCDEGFTPTQDQHGCEEVEQPHHKKECYLNFDDTVFCDSVLATNVTQQECCCSLGAGWGDHCEIYPCPVYSSAEFHSLCPDGKGYTQDNNIVNYGIPAHRDIDECMLFGSEICKEGKCVNTQPGYECYCKQGFYYDGNLLECVDVDECLDESNCRNGVCENTRGGYRCACTPPAEYSPAQRQCLSPEEMERAPERRDVCWSQRGEDGMCAGPLAGPALTFDDCCCRQGRGWGAQCRPCPPRGAGSHCPTSQSESNSFWDTSPLLLGKPPRDEDSSEEDSDECRCVSGRCVPRPGGAVCECPGGFQLDASRARCVDIDECRELNQRGLLCKSERCVNTSGSFRCVCKAGFARSRPHGACVPQRRR

SEQ ID NO: 8120 - protein, 1303 aa, Homo sapiens
MPGPRGAAGGLAPEMRGAGAAGLLALLLLLLLLLLGLGGRVEGGPAGERGAGGGGALARERFKVVFAPVICKRTCLKGQCRDSCQQGSNMTLIGENGHSTDTLTGSGFRVVVCPLPCMNGGQCSSRNQCLCPPDFTGRFCQVPAGGAGGGTGGSGPGLSRTGALSTGALPPLAPEGDSVASKHAIYAVQVIADPPGPGEGPPAQHAAFLVPLGPGQISAEVQAPPPVVNVRVHHPPEASVQVHRIESSNAESAAPSQHLLPHPKPSHPRPPTQKPLGRCFQDTLPKQPCGSNPLPGLTKQEDCCGSIGTAWGQSKCHKCPQLQYTGVQKPGPVRGEVGADCPQGYKRLNSTHCQDINECAMPGVCRHGDCLNNPGSYRCVCPPGHSLGPSRTQCIADKPEEKSLCFRLVSPEHQCQHPLTTRLTRQLCCCSVGKAWGARCQRCPTDGTAAFKEICPAGKGYHILTSHQTLTIQGESDFSLFLHPDGPPKPQQLPESPSQAPPPEDTEEERGVTTDSPVSEERSVQQSHPTATTTPARPYPELISRPSPPTMRWFLPDLPPSRSAVEIAPTQVTETDECRLNQNICGHGECVPGPPDYSCHCNPGYRSHPQHRYCVDVNECEAEPCGPGRGICMNTGGSYNCHCNRGYRLHVGAGGRSCVDLNECAKPHLCGDGGFCINFPGHYKCNCYPGYRLKASRPPVCEDIDECRDPSSCPDGKCENKPGSFKCIACQPGYRSQGGGACRDVNECAEGSPCSPGWCENLPGSFRCTCAQGYAPAPDGRSCLDVDECEAGDVCDNGICSNTPGSFQCQCLSGYHLSRDRSHCEDIDECDFPAACIGGDCINTNGSYRCLCPQGHRLVGGRKCQDIDECSQDPSLCLPHGACKNLQGSYVCVCDEGFTPTQDQHGCEEVEQPHHKKECYLNFDDTVFCDSVLATNVTQQECCCSLGAGWGDHCEIYPCPVYSSAEFHSLCPDGKGYTQDNNIVNYGIPAHRDIDECMLFGSEICKEGKCVNTQPGYECYCKQGFYYDGNLLECVDVDECLDESNCRNGVCENTRGGYRCACTPPAEYSPAQRQCLSPEEMDVDECQDPAACRPGRCVNLPGSYRCECRPPWVPGPSGRDCQLPESPAERAPERRDVCWSQRGEDGMCAGPLAGPALTFDDCCCRQGRGWGAQCRPCPPRGAGSHCPTSQSESNSFWDTSPLLLGKPPRDEDSSEEDSDECRCVSGRCVPRPGGAVCECPGGFQLDASRARCVDIDECRELNQRGLLCKSERCVNTSGSFRCVCKAGFARSRPHGACVPQRRR

SEQ ID NO: 8121 - protein, 116 aa, Homo sapiens
MPGPRGAAGGLAPEMRGAGAAGLLALLLLLLLLLLGLGGRVEGGPAGERGAGGGGALARERFKVVFAPVICKRTCLKGQCRDSCQQGSNMTLIGENGHSTDTLTGSGFRWCALSPA

SEQ ID NO: 8122 - protein, 1137 aa, Homo sapiens
MTLIGENGHSTDTLTGSGFRVVVCPLPCMNGGQCSSRNQCLCPPDFTGRFCQVPAGGAGGGTGGSGPGLSRTGALSTGALPPLAPEGDSVASKHAIYAVQVIADPPGPGEGPPAQHAAFLVPLGPGQISAEVQAPPPVVNVRVHHPPEASVQVHRIESSNAESAAPSQHLLPHPKPSHPRPPTQKPLGRCFQDTLPKQPCGSNPLPGLTKQEDCCGSIGTAWGQSKCHKCPQLQYTGVQKPGPVRGEVGADCPQGYKRLNSTHCQDINECAMPGVCRHGDCLNNPGSYRCVCPPGHSLGPSRTQCIADKPEEKSLCFRLVSPEHQCQHPLTTRLTRQLCCCSVGKAWGARCQRCPTDGTAAFKEICPAGKGYHILTSHQTLTIQGESDFSLFLHPDGPPKPQQLPESPSQAPPPEDTEEERGVTTDSPVSEERSVQQSHPTATTTPARPYPELISRPSPPTMRWFLPDLPPSRSAVEIAPTQVTETDECRLNQNICGHGECVPGPPDYSCHCNPGYRSHPQHRYCVDVNECEAEPCGPGRGICMNTGGSYNCHCNRGYRLHVGAGGRSCVDLNECAKPHLCGDGGFCINFPGHYKCNCYPGYRLKASRPPVCEDIDECRDPSSCPDGKCENKPGSFKCIACQPGYRSQGGGACRDVNECAEGSPCSPGWCENLPGSFRCTCAQGYAPAPDGRSCLDVDECEAGDVCDNGICSNTPGSFQCQCLSGYHLSRDRSHCEDIDECDFPAACIGGDCINTNGSYRCLCPQGHRLVGGRKCQDIDECSQDPSLCLPHGACKNLQGSYVCVCDEGFTPTQDQHGCEEVEQPHHKKECYLNFDDTVFCDSVLATNVTQQECCCSLGAGWGDHCEIYPCPVYSSAEFHSLCPDGKGYTQDNNIVNYGIPAHRDIDECMLFGSEICKEGKCVNTQPGYECYCKQGFYYDGNLLECVDVDECLDESNCRNGVCENTRGGYRCACTPPAEYSPAQRQCLSPEEMDVDECQDPAACRPGRCVNLPGSYRCECRPPWVPGPSGRDCQLPESPAERAPERRDVCWSQRGEDGMCAGPLAGPALTFDDCCCRQGRGWGAQCRPCPPRGAGSHCPTSQSESNSFWDTSPLLLGKPPRDEDSSEEDSDECRCVSG

SEQ ID NO: 8123 - protein, 907 aa, Homo sapiens
  VARIANT 1: note = misc_feature - Xaa can be any naturally occurring amino acid
XFAPVICKRTCLKGQCRDSCQQGSNMTLIGENGHSTDTLTGSGFRVADKPEEKSLCFRLVSPEHQCQHPLTTRLTRQLCCCSVGKAWGARCQRCPTDGTAAFKEICPAGKGYHILTSHQTLTIQGESDFSLFLHPDGPPKPQQLPESPSQAPPPEDTEEERGVTTDSPVSEERSVQQSHPTATTTPARPYPELISRPSPPTMRWFLPDLPPSRSAVEIAPTQVTETDECRLNQNICGHGECVPGPPDYSCHCNPGYRSHPQHRYCVDVNECEAEPCGPGRGICMNTGGSYNCHCNRGYRLHVGAGGRSCVDLNECAKPHLCGDGGFCINFPGHYKCNCYPGYRLKASRPPVCEDIDECRDPSSCPDGKCENKPGSFKCIACQPGYRSQGGGACRDVNECAEGSPCSPGWCENLPGSFRCTCAQGYAPAPDGRSCLDVDECEAGDVCDNGICSNTPGSFQCQCLSGYHLSRDRSHCEDIDECDFPAACIGGDCINTNGSYRCLCPQGHRLVGGRKCQDIDECSQDPSLCLPHGACKNLQGSYVCVCDEGFTPTQDQHGCEEVEQPHHKKECYLNFDDTVFCDSVLATNVTQQECCCSLGAGWGDHCEIYPCPVYSSAEFHSLCPDGKGYTQDNNIVNYGIPAHRDIDECMLFGSEICKEGKCVNTQPGYECYCKQGFYYDGNLLECVDVDECLDESNCRNGVCENTRGGYRCACTPPAEYSPAQRQCLSPEEMERAPERRDVCWSQRGEDGMCAGPLAGPALTFDDCCCRQGRGWGAQCRPCPPRGAGSHCPTSQSESNSFWDTSPLLLGKPPRDEDSSEEDSDECRCVSGRCVPRPGGAVCECPGGFQLDASRARCVDIDECRELNQRGLLCKSERCVNTSGSFRCVCKAGFARSRPHGACVPQRRR

SEQ ID NO: 8124 - protein, 69 aa, Homo sapiens
  VARIANT 1: note = misc_feature - Xaa can be any naturally occurring amino acid
XFAPVICKRTCLKGQCRDSCQQGSNMTLIGENGHSTDTLTGSGFRVGPAPRGECARPSPARGLSPGAPH

SEQ ID NO: 8125 - protein, 303 aa, Homo sapiens
ECLNTDGSFACTCAPGYRPGPRGASCLDVDECSEEDLCQSGICTNTDGSFECICPPGHRAGPDLASCLDVDECRERGPALCGSQRCENSPGSYRCVRDCDPGYHAGPEGTCDDVNECETLQGVCGAALCENVEGSFLCVCPNSPEEFDPMTGRCVPPRTSADVDECQLFRDQVCKSGVCVNTAPGYSCYCSNGYYYHTQRLECIDNDECADEEPACEGGRCVNTVGSYHCTCEPPLVLDGSQRRCVSNESQSLDDNLGVCWQEVGADLVCSHPRLDRQATYTECCCLYGEAWGMDCALCPAQD

SEQ ID NO: 8126 - protein, 1557 aa, Homo sapiens
MAGGVRLLWVSLLVLLAQLGPQPGLGRLGERLRVRFTPVVCGLRCVHGPTGSRCTPTCAPRNATSVDSGAPGGAAPGGPGFRAFLCPLICHNGGVCVKPDRCLCPPDFAGKFCQLHSSGARPPAPAVPGLTRSVYTMPLANHRDDEHGVASMVSVHVEHPQEASVVVHQVERVSGPWEEADAEAVARAEAAARAEAAAPYTVLAQSAPREDGYSDASGFGYCFRELRGGECASPLPGLRTQEVCCRGAGLAWGVHDCQLCSERLGNSERVSAPDGPCPTGFERVNGSCEDVDECATGGRCQHGECANTRGGYTCVCPDGFLLDSSRSSCISQHVISEAKGPCFRVLRDGGCSLPILRNITKQICCCSRVGKAWGRGCQLCPPFGSEGFREICPAGPGYHYSASDLRYNTRPLGQEPPRVSLSQPRTLPATSRPSAGFLPTHRLEPRPEPRPDPRPGPELPLPSIPAWTGPEIPESGPSSGMCQRNPQVCGPGRCISRPSGYTCACDSGFRLSPQGTRCIDVDECRRVPPPCAPGRCENSPGSFRCVCGPGFRAGPRAAECLDVDECHRVPPPCDLGRCENTPGSFLCVCPAGYQAAPHGASCQDVDECTQSPGLCGRGACKNLPGSFRCVCPAGFRGSACEEDVDECAQEPPPCGPGRCDNTAGSFHCACPAGFRSRGPGAPCQDVDECARSPPPCTYGRCENTEGSFQCVCPMGFQPNTAGSECEDVDECENHLACPGQECVNSPGSFQCRTCPSGHHLHRGRCTDVDECSSGAPPCGPHGHCTNTEGSFRCSCAPGYRAPSGRPGPCADVNECLEGDFCFPHGECLNTDGSFACTCAPGYRPGPRGASCLDVDECSEEDLCQSGICTNTDGSFECICPPGHRAGPDLASCLDVDECRERGPALCGSQRCENSPGSYRCVRDCDPGYHAGPEGTCDDVDECQEYGPEICGAQRCENTPGSYRCTPACDPGYQPTPGGGCQDVDECRNRSFCGAHAVCQNLPGSFQCLCDQGYEGARDGRHCVDVNECETLQGVCGAALCENVEGSFLCVCPNSPEEFDPMTGRCVPPRTSAGTFPGSQPQAPASPVLPARPPPPPLPRRPSTPRQGPVGSGRRECYFDTAAPDACDNILARNVTWQECCCTVGEGWGSGCRIQQCPGTETAEYQSLCPHGRGYLAPSGDLSLRRDVDECQLFRDQVCKSGVCVNTAPGYSCYCSNGYYYHTQRLECIDNDECADEEPACEGGRCVNTVGSYHCTCEPPLVLDGSQRRCVSNESQSLDDNLGVCWQEVGADLVCSHPRLDRQATYTECCCLYGEAWGMDCALCPAQDSDDFEALCNVLRPPAYSPPRPGGFGLPYEYGPDLGPPYQGLPYGPELYPPPALPYDPYPPPPGPFARREAPYGAPRFDMPDFEDDGGPYGESEAPAPPGPGTRWPYRSRDTRRSFPEPEEPPEGGSYAGSLAEPYEELEAEECGILDGCTNGRCVRVPEGFTCRCFDGYRLDMTRMACVDINECDEAEAASPLCVNARCLNTDGSFRCICRPGFAPTHQPHHCAPARPRA

SEQ ID NO: 8127 - protein, 44 aa, Homo sapiens
MGDVKALLFVAAARARRLGGAAASEPSAGSEAASPKSVQAPSGA

SEQ ID NO: 8128 - protein, 1587 aa, Homo sapiens
MGDVKALLFVAAARARRLGGAAASESLAVSEAFCRVRSCQPKKCAGPQRCLNPVPAVPSPSPSVRKRQVSLNWQPLTLQEARALLKRRRPRGPGGRGLLRRRPPQRAPAGKAPVLCPLICHNGGVCVKPDRCLCPPDFAGKFCQLHSSGARPPAPAVPGLTRSVYTMPLANHRDDEHGVASMVSVHVEHPQEASVVVHQVERVSGPWEEADAEAVARAEAAARAEAAAPYTVLAQSAPREDGYSDASGFGYCFRELRGGECASPLPGLRTQEVCCRGAGLAWGVHDCQLCSERLGNSERVSAPDGPCPTGFERVNGSCEDVDECATGGRCQHGECANTRGGYTCVCPDGFLLDSSRSSCISQHVISEAKGPCFRVLRDGGCSLPILRNITKQICCCSRVGKAWGRGCQLCPPFGSEGFREICPAGPGYHYSASDLRYNTRPLGQEPPRVSLSQPRTLPATSRPSAGFLPTHRLEPRPEPRPDPRPGPELPLPSIPAWTGPEIPESGPSSGMCQRNPQVCGPGRCISRPSGYTCACDSGFRLSPQGTRCIDVDECRRVPPPCAPGRCENSPGSFRCVCGPGFRAGPRAAECLDVDECHRVPPPCDLGRCENTPGSFLCVCPAGYQAAPHGASCQDVDECTQSPGLCGRGACKNLPGSFRCVCPAGFRGSACEEDVDECAQEPPPCGPGRCDNTAGSFHCACPAGFRSRGPGAPCQDVDECARSPPPCTYGRCENTEGSFQCVCPMGFQPNTAGSECEDVDECENHLACPGQECVNSPGSFQCRTCPSGHHLHRGRCTDVDECSSGAPPCGPHGHCTNTEGSFRCSCAPGYRAPSGRPGPCADVNECLEGDFCFPHGECLNTDGSFACTCAPGYRPGPRGASCLDVDECSEEDLCQSGICTNTDGSFECICPPGHRAGPDLASCLDVDECRERGPALCGSQRCENSPGSYRCVRDCDPGYHAGPEGTCDDVDECQEYGPEICGAQRCENTPGSYRCTPACDPGYQPTPGGGCQDVDECRNRSFCGAHAVCQNLPGSFQCLCDQGYEGARDGRHCVDVNECETLQGVCGAALCENVEGSFLCVCPNSPEEFDPMTGRCVPPRTSAGTFPGSQPQAPASPVLPARPPPPPLPRRPSTPRQGPVGSGRRECYFDTAAPDACDNILARNVTWQECCCTVGEGWGSGCRIQQCPGTETAEYQSLCPHGRGYLAPSGDLSLRRDVDECQLFRDQVCKSGVCVNTAPGYSCYCSNGYYYHTQRLECIDNDECADEEPACEGGRCVNTVGSYHCTCEPPLVLDGSQRRCVSNESQSLDDNLGVCWQEVGADLVCSHPRLDRQATYTECCCLYGEAWGMDCALCPAQDSDDFEALCNVLRPPAYSPPRPGGFGLPYEYGPDLGPPYQGLPYGPELYPPPALPYDPYPPPPGPFARREAPYGAPRFDMPDFEDDGGPYGESEAPAPPGPGTRWPYRSRDTRRSFPEPEEPPEGGSYAGSLAEPYEELEAEECGILDGCTNGRCVRVPEGFTCRCFDGYRLDMTRMACVDINECDEAEAASPLCVNARCLNTDGSFRCICRPGFAPTHQPHHCAPARPRA

SEQ ID NO: 8129 - protein, 44 aa, Homo sapiens
MLQPQALLFVAAARARRLGGAAASEPSAGSEAASPKSVQAPSGA

SEQ ID NO: 8130 - protein, 1624 aa, Homo sapiens
MPRPGTSGRRPLLLVLLLPLFAAATSAASPSPSPSQVVEVPGVPSRPASVAVCRCCPGQTSRRSRCIRAFCRVRSCQPKKCAGPQRCLNPVPAVPSPSPSVRKRQVSLNWQPLTLQEARALLKRRRPRGPGGRGLLRRRPPQRAPAGKAPVLCPLICHNGGVCVKPDRCLCPPDFAGKFCQLHSSGARPPAPAVPGLTRSVYTMPLANHRDDEHGVASMVSVHVEHPQEASVVVHQVERVSGPWEEADAEAVARAEAAARAEAAAPYTVLAQSAPREDGYSDASGFGYCFRELRGGECASPLPGLRTQEVCCRGAGLAWGVHDCQLCSERLGNSERVSAPDGPCPTGFERVNGSCEDVDECATGGRCQHGECANTRGGYTCVCPDGFLLDSSRSSCISQHVISEAKGPCFRVLRDGGCSLPILRNITKQICCCSRVGKAWGRGCQLCPPFGSEGFREICPAGPGYHYSASDLRYNTRPLGQEPPRVSLSQPRTLPATSRPSAGFLPTHRLEPRPEPRPDPRPGPELPLPSIPAWTGPEIPESGPSSGMCQRNPQVCGPGRCISRPSGYTCACDSGFRLSPQGTRCIDVDECRRVPPPCAPGRCENSPGSFRCVCGPGFRAGPRAAECLDVDECHRVPPPCDLGRCENTPGSFLCVCPAGYQAAPHGASCQDVDECTQSPGLCGRGACKNLPGSFRCVCPAGFRGSACEEDVDECAQEPPPCGPGRCDNTAGSFHCACPAGFRSRGPGAPCQDVDECARSPPPCTYGRCENTEGSFQCVCPMGFQPNTAGSECEDVDECENHLACPGQECVNSPGSFQCRTCPSGHHLHRGRCTDVDECSSGAPPCGPHGHCTNTEGSFRCSCAPGYRAPSGRPGPCADVNECLEGDFCFPHGECLNTDGSFACTCAPGYRPGPRGASCLDVDECSEEDLCQSGICTNTDGSFECICPPGHRAGPDLASCLDVDECRERGPALCGSQRCENSPGSYRCVRDCDPGYHAGPEGTCDDVDECQEYGPEICGAQRCENTPGSYRCTPACDPGYQPTPGGGCQDVDECRNRSFCGAHAVCQNLPGSFQCLCDQGYEGARDGRHCVDVNECETLQGVCGAALCENVEGSFLCVCPNSPEEFDPMTGRCVPPRTSAGTFPGSQPQAPASPVLPARPPPPPLPRRPSTPRQGPVGSGRRECYFDTAAPDACDNILARNVTWQECCCTVGEGWGSGCRIQQCPGTETAEYQSLCPHGRGYLAPSGDLSLRRDVDECQLFRDQVCKSGVCVNTAPGYSCYCSNGYYYHTQRLECIDNDECADEEPACEGGRCVNTVGSYHCTCEPPLVLDGSQRRCVSNESQSLDDNLGVCWQEVGADLVCSHPRLDRQATYTECCCLYGEAWGMDCALCPAQDSDDFEALCNVLRPPAYSPPRPGGFGLPYEYGPDLGPPYQGLPYGPELYPPPALPYDPYPPPPGPFARREAPYGAPRFDMPDFEDDGGPYGESEAPAPPGPGTRWPYRSRDTRRSFPEPEEPPEGGSYAGSLAEPYEELEAEECGILDGCTNGRCVRVPEGFTCRCFDGYRLDMTRMACVDINECDEAEAASPLCVNARCLNTDGSFRCICRPGFAPTHQPHHCAPARPRA

SEQ ID NO: 8131 - protein, 70 aa, Homo sapiens
MSARTAPFSWSGGKLRPKDQETLASGHTSWKALLFVAAARARRLGGAAASEPSAGSEAASPKSVQAPSGA

SEQ ID NO: 8132 - protein, 145 aa, Homo sapiens
PPGPGTRWPYRSRDTRRSFPEPEEPPEGGSYAGSLAEPYEELEAEECGILDGCTNGRCVRVPEGFTCRCFDGYRLDMTRMACVAFSSDRCLPSADINECDEAEAASPLCVNARCLNTDGSFRCICRPGFAPTHQPHHCAPARPRA

SEQ ID NO: 8133 - protein, 252 aa, Homo sapiens
  VARIANT 1: note = misc_feature - Xaa can be any naturally occurring amino acid
XFRCSCAPGYRAPSGRPGPCADVNECLEGDFCFPHGECLNTDGSFACTCAPGYRPGPRGASCLDVDECSEEDLCQSGICTNTDGSFECICPPGHRAGPDLASCLDVDECRERGPALCGSQRCENSPGSYRCVRDCDPGYHAGPEGTCDDVDECRNRSFCGAHAVCQNLPGSFQCLCDQGYEGARDGRHCVDVNECETLQGVCGAALCENVEGSFLCVCPNSPEEFDPMTGRCVPPRTSAGTFPGSQPQAPAS

SEQ ID NO: 8134 - protein, 182 aa, Homo sapiens
  VARIANT 1: note = misc_feature - Xaa can be any naturally occurring amino acid
XGPEICGAQRCENTPGSYRCTPACDPGYQPTPGGGCQDVDECRNRSFCGAHAVCQNLPGSFQCLCDQGYEGARDGRHCVDVNECETLQGVCGAALCENVEGSFLCVCPNSPEEFDPMTGRCVPPRTSADVDECQLFRDQVCKSGVCVNTAPGYSCYCSNGYYYHTQRLECIDNDECADEEPA

SEQ ID NO: 8135 - protein, 224 aa, Homo sapiens
  VARIANT 1: note = misc_feature - Xaa can be any naturally occurring amino acid
XNTDGSFACTCAPGYRPGPRGASCLDVDECSEEDLCQSGICTNTDGSFECICPPGHRAGPDLASCLDVDECRERGPALCGSQRCENSPGSYRCVRDCDPGYHAGPEGTCDDVDECQEYGPEICGAQRCENTPGSYRCTPACDPGYQPTPGGGCQDVNECETLQGVCGAALCENVEGSFLCVCPNSPEEFDPMTGRCVPPRTSAGTFPGSQPQAPASPVLPARPP

SEQ ID NO: 8136 - protein, 674 aa, Homo sapiens
  VARIANT 1: note = misc_feature - Xaa can be any naturally occurring amino acid
XNTEGSFQCVCPMGFQPNTAGSECEDVDECENHLACPGQECVNSPGSFQCRTCPSGHHLHRGRCTDVDECSSGAPPCGPHGHCTNTEGSFRCSCAPGYRAPSGRPGPCADVNECLEGDFCFPHGECLNTDGSFACTCAPGYRPGPRGASCLDVDECSEEDLCQSGICTNTDGSFECICPPGHRAGPDLASCLDVDECRERGPALCGSQRCENSPGSYRCVRDCDPGYHAGPEGTCDDVNECETLQGVCGAALCENVEGSFLCVCPNSPEEFDPMTGRCVPPRTSAGTFPGSQPQAPASPVLPARPPPPPLPRRPSTPRQGPVGSGRRECYFDTAAPDACDNILARNVTWQECCCTVGEGWGSGCRIQQCPGTETAEYQSLCPHGRGYLAPSGDLSLRRDVDECQLFRDQVCKSGVCVNTAPGYSCYCSNGYYYHTQRLECIDNDECADEEPACEGGRCVNTVGSYHCTCEPPLVLDGSQRRCVSNESQSLDDNLGVCWQEVGADLVCSHPRLDRQATYTECCCLYGEAWGMDCALCPAQDSDDFEALCNVLRPPAYSPPRPGGFGLPYEYGPDLGPPYQGLPYGPELYPPPALPYDPYPPPPGPFARREAPYGAPRFDMPDFEDDGGPYGESEAPAPPGPGTRWPYRSRDTRRSFPEPEEPPEGGSYAGSLAEP

SEQ ID NO: 8137 - protein, 94 aa, Homo sapiens
  VARIANT 1: note = misc_feature - Xaa can be any naturally occurring amino acid
XRFDMPDFEDDGGPYGESEAEECGILDGCTNGRCVRVPEGFTCRCFDGYRLDMTRMACVDINECDEAEAASPLCVNARCLNTDGSFRCICRPGF

SEQ ID NO: 8138 - protein, 957 aa, Homo sapiens
  VARIANT 1: note = misc_feature - Xaa can be any naturally occurring amino acid
XVDECRRVPPPCAPGRCENSPGSFRCVCGPGFRAGPRAAECLDVDECHRVPPPCDLGRCENTPGSFLCVCPAGYQAAPHGASCQDVDECARSPPPCTYGRCENTEGSFQCVCPMGFQPNTAGSECEDVDECENHLACPGQECVNSPGSFQCRTCPSGHHLHRGRCTDVDECSSGAPPCGPHGHCTNTEGSFRCSCAPGYRAPSGRPGPCADVNECLEGDFCFPHGECLNTDGSFACTCAPGYRPGPRGASCLDVDECSEEDLCQSGICTNTDGSFECICPPGHRAGPDLASCLDVDECRERGPALCGSQRCENSPGSYRCVRDCDPGYHAGPEGTCDDVDECQEYGPEICGAQRCENTPGSYRCTPACDPGYQPTPGGGCQDVDECRNRSFCGAHAVCQNLPGSFQCLCDQGYEGARDGRHCVDVNECETLQGVCGAALCENVEGSFLCVCPNSPEEFDPMTGRCVPPRTSAGTFPGSQPQAPASPVLPARPPPPPLPRRPSTPRQGPVGSGRRECYFDTAAPDACDNILARNVTWQECCCTVGEGWGSGCRIQQCPGTETAEYQSLCPHGRGYLAPSGDLSLRRDVDECQLFRDQVCKSGVCVNTAPGYSCYCSNGYYYHTQRLECIDNDECADEEPACEGGRCVNTVGSYHCTCEPPLVLDGSQRRCVSNESQSLDDNLGVCWQEVGADLVCSHPRLDRQATYTECCCLYGEAWGMDCALCPAQDSDDFEALCNVLRPPAYSPPRPGGFGLPYEYGPDLGPPYQGLPYGPELYPPPALPYDPYPPPPGPFARREAPYGAPRFDMPDFEDDGGPYGESEAPAPPGPGTRWPYRSRDTRRSFPEPEEPPEGGSYAGSLAEPYEELEAEECGILDGCTNGRCVRVPEGFTCRCFDGYRLDMTRMACVDINECDEAEAASPLCVNARCLNTDGSFRCICRPGFAPTHQPHHCAPARPRA

SEQ ID NO: 8139 - protein, 191 aa, Homo sapiens
  VARIANT 1: note = misc_feature - Xaa can be any naturally occurring amino acid
XVDECSEEDLCQSGICTNTDGSFECICPPGHRAGPDLASCLDVDECRERGPALCGSQRCENSPGSYRCVRDCDPGYHAGPEGTCDDVDECQEYGPEICGAQRCENTPGSYRCTPACDPGYQPTPGGGCQDVNECETLQGVCGAALCENVEGSFLCVCPNSPEEFDPMTGRCVPPRTSADVDECQLFRDQVC

SEQ ID NO: 8140 - protein, 189 aa, Homo sapiens
  VARIANT 1: note = misc_feature - Xaa can be any naturally occurring amino acid
XVDECSEEDLCQSGICTNTDGSFECICPPGHRAGPDLASCLDVDECRERGPALCGSQRCENSPGSYRCVRDCDPGYHAGPEGTCDDVDECRNRSFCGAHAVCQNLPGSFQCLCDQGYEGARDGRHCVDVNECETLQGVCGAALCENVEGSFLCVCPNSPEEFDPMTGRCVPPRTSAGTFPGSQPQAPAS

SEQ ID NO: 8141 - protein, 416 aa, Homo sapiens
MEATGISLASQLKVPPYASENQTCRDQEKEYYEPQHRICCSRCPPGTYVSAKCSRIRDTVCATCAENSYNEHWNYLTICQLCRPCDPVMGLEEIAPCTSKRKTQCRCQPGMFCAAWALECTHCELLSDCPPGTEAELKDEVGKGNNHCVPCKAGHFQNTSSPSARCQPHTRCENQGLVEAAPGTAQSDTTCKNPLEPLPPEMSGTMLMLAVLLPLAFFLLLATVFSCIWKSHPSLCRKLGSLLKRRPQGEGPNPVAGSWEPPKAHPYFPDLVQPLLPISGDVSPVSTGLPAAPVLEAGVPQQQSPLDLTREPQLEPGEQSQVAHGTNGIHVTGGSMTITGNIYIYNGPVLGGPPGPGDLPATPEPPYPIPEEGDPGPPGLSTPHQEDGKAWHLAETEHCGATPSNRGPRNQFITHD

SEQ ID NO: 8142 - protein, 148 aa, Homo sapiens
MGLEEIAPCTSKRKTQCRCQPGMFCAAWALECTHCELLSDCPPGTEAELKDEVGKGNNHCVPCKAGHFQNTSSPSARCQPHTRCENQGLVEAAPGTAQSDTTCKNPLEPLPPEMSEPALSKGVENLQALLYQAATGSSEASFPTLSPL

SEQ ID NO: 8143 - protein, 292 aa, Homo sapiens
MGLEEIAPCTSKRKTQCRCQPGMFCAAWALECTHCELLSDCPPGTEAELKDEVGKGNNHCVPCKAGHFQNTSSPSARCQPHTRCENQGLVEAAPGTAQSDTTCKNPLEPLPPEMSGSLLKRRPQGEGPNPVAGSWEPPKAHPYFPDLVQPLLPISGDVSPVSTGLPAAPVLEAGVPQQQSPLDLTREPQLEPGEQSQVAHGTNGIHVTGGSMTITGNIYIYNGPVLGGPPGPGDLPATPEPPYPIPEEGDPGPPGLSTPHQEDGKAWHLAETEHCGATPSNRGPRNQFITHD

SEQ ID NO: 8144 - protein, 74 aa, Homo sapiens
MGLEEIAPCTSKRKTQCRCQPGMFCAAWALECTHCELLSDCPPGTEAELKGVRTKVWWRQLQALPSPTQPAKIH

SEQ ID NO: 8145 - protein, 218 aa, Homo sapiens
MLLPWATSAPGLAWGPLVLGLFGLLAASQPQAVPPYASENQTCRDQEKEYYEPQHRICCSRCPPAKCSRIRDTVCATCAENSYNEHWNYLTICQLCRPCDPVMGLEEIAPCTSKRKTQCRCQPGMFCAAWALECTHCELLSDCPPGTEAELKDEVGKGNNHCVPCKAGHFQNTSSPSARCQPHTRCENQGLVEAAPGTAQSDTTCKNPLEPLPPEMSG

SEQ ID NO: 8146 - protein, 435 aa, Homo sapiens
MLLPWATSAPGLAWGPLVLGLFGLLAASQPQAVPPYASENQTCRDQEKEYYEPQHRICCSRCPPGTYVSAKCSRIRDTVCATCAENSYNEHWNYLTICQLCRPCDPVMGLEEIAPCTSKRKTQCRCQPGMFCAAWALECTHCELLSDCPPGTEAELKDEVGKGNNHCVPCKAGHFQNTSSPSARCQPHTRCENQGLVEAAPGTAQSDTTCKNPLEPLPPEMSGTMLMLAVLLPLAFFLLLATVFSCIWKSHPSLCRKLGSLLKRRPQGEGPNPVAGSWEPPKAHPYFPDLVQPLLPISGDVSPVSTGLPAAPVLEAGVPQQQSPLDLTREPQLEPGEQSQVAHGTNGIHVTGGSMTITGNIYIYNGPVLGGPPGPGDLPATPEPPYPIPEEGDPGPPGLSTPHQEDGKAWHLAETEHCGATPSNRGPRNQFITHD

SEQ ID NO: 8147 - protein, 696 aa, Homo sapiens
MGLCLAGRRRSVQWCAVSQPEATKCFQWQRNMRKVRGPPVSCIKRDSPIQCIQAIAENRADAVTLDGGFIYEAGLAPYKLRPVAAEVYGTERQPRTHYYAVAVVKKGGSFQLNELQGLKSCHTGLRRTAGWNVPIGTLRPFLNWTGPPEPIEAAVARFFSASCVPGADKGQFPNLCRLCAGTGENKCAFSSQEPYFSYSGAFKCLRDGAGDVAFIRESTVFEDLSDEAERDEYELLCPDNTRKPVDKFKDCHLARVPSHAVVARSVNGKEDAIWNLLRQAQEKFGKDKSPKFQLFGSPSGQKDLLFKDSAIGFSRVPPRIDSGLYLGSGYFTAIQNLRKSEEEVAARRARVVWCAVGEQELRKCNQWSGLSEGSVTCSSASTTEDCIALVLKGEADAMSLDGGYVYTAGKCGLVPVLAENYKSQQSSDPDPNCVDRPVEGYLAVAVVRRSDTSLTWNSVKGKKSCHTAVDRTAGWNIPMGLLFNQTGSCKFDEYFSQSCAPGSDPRSNLCALCIGDEQGENKCVPNSNERYYGYTGAFRCLAENAGDVAFVKDVTVLQNTDGNNNEAWAKDLKLADFALLCLDGKRKPVTEARSCHLAMAPNHAVVSRMDKVERLKQVLLHQQAKFGRNGSDCPDKFCLFQSETKNLLFNDNTECLARLHGKTTYEKYLGPQYVAGITNLKKCSTSPLLEACEFLR

SEQ ID NO: 8148 - protein, 182 aa, Homo sapiens
MKLVFLVLLFLGALGFLWMPFIRQPGLCLAGRRRSVQWCAVSQPEATKCFQWQRNMRKVRGPPVSCIKRDSPIQCIQAIAENRADAVTLDGGFIYEAGLAPYKLRPVAAEVYGTERQPRTHYYAVAVVKKGGSFQLNELQGLKSCHTGLRRTAGWNVPIGTLRPFLNWTGPPEPIEAAVARF

SEQ ID NO: 8149 - protein, 710 aa, Homo sapiens
MKLVFLVLLFLGALGLCLAGRRRSVQWCAVSQPEATKCFQWQRNMRKVRGPPVSCIKRDSPIQCIQAIAENRADAVTLDGGFIYEAGLAPYKLRPVAAEVYGTERQPRTHYYAVAVVKKGGSFQLNELQGLKSCHTGLRRTAGWNVPIGTLRPFLNWTGPPEPIEAAVARFFSASCVPGADKGQFPNLCRLCAGTGENKCAFSSQEPYFSYSGAFKCLRDGAGDVAFIRESTVFEDLSDEAERDEYELLCPDNTRKPVDKFKDCHLARVPSHAVVARSVNGKEDAIWNLLRQAQEKFGKDKSPKFQLFGSPSGQKDLLFKDSAIGFSRVPPRIDSGLYLGSGYFTAIQNLRKSEEEVAARRARVVWCAVGEQELRKCNQWSGLSEGSVTCSSASTTEDCIALVLKGEADAMSLDGGYVYTAGKCGLVPVLAENYKSQQSSDPDPNCVDRPVEGYLAVAVVRRSDTSLTWNSVKGKKSCHTAVDRTAGWNIPMGLLFNQTGSCKFDEYFSQSCAPGSDPRSNLCALCIGDEQGENKCVPNSNERYYGYTGAFRCLAENAGDVAFVKDVTVLQNTDGNNNEAWAKDLKLADFALLCLDGKRKPVTEARSCHLAMAPNHAVVSRMDKVERLKQVLLHQQAKFGRNGSDCPDKFCLFQSETKNLLFNDNTECLARLHGKTTYEKYLGPQYVAGITNLKKCSTSPLLEACEFLRK

SEQ ID NO: 8150 - protein, 708 aa, Homo sapiens
MKLVFLVLLFLGALGLCLAGRRRSVQWCAVSQPEATKCFQWQRNMRKVRGPPVSCIKRDSPIQCIQAIAENRADAVTLDGGFIYEAGLAPYKLRPVAAEVYGTERQPRTHYYAVAVVKKGGSFQLNELQGLKSCHTGLRRTAGWNVPIGTLRPFLNWTGPPEPIEAAVARFFSASCVPGADKGQFPNLCRLCAGTGENKCAFSSQEPYFSYSGAFKCLRDGAGDVAFIRESTVFEDLSDEAERDEYELLCPDNTRKPVDKFKDCHLARVPSHAVVARSVNGKEDAIWNLLRQAQEKFGKDKSPKFQLFGSPSGQKDLLFKDSAIGFSRVPPRIDSGLYLGSGYFTAIQNLRKSEEEVAARRARVVWCAVGEQELRKCNQWSGLSEGSVTCSSASTTEDCIALKGEADAMSLDGGYVYTAGKCGLVPVLAENYKSQQSSDPDPNCVDRPVEGYLAVAVVRRSDTSLTWNSVKGKKSCHTAVDRTAGWNIPMGLLFNQTGSCKFDEYFSQSCAPGSDPRSNLCALCIGDEQGENKCVPNSNERYYGYTGAFRCLAENAGDVAFVKDVTVLQNTDGNNNEAWAKDLKLADFALLCLDGKRKPVTEARSCHLAMAPNHAVVSRMDKVERLKQVLLHQQAKFGRNGSDCPDKFCLFQSETKNLLFNDNTECLARLHGKTTYEKYLGPQYVAGITNLKKCSTSPLLEACEFLRK

SEQ ID NO: 8151 - protein, 666 aa, Homo sapiens
MRKVRGPPVSCIKRDSPIQCIQAIAENRADAVTLDGGFIYEAGLAPYKLRPVAAEVYGTERQPRTHYYAVAVVKKGGSFQLNELQGLKSCHTGLRRTAGWNVPIGTLRPFLNWTGPPEPIEAAVARFFSASCVPGADKGQFPNLCRLCAGTGENKCAFSSQEPYFSYSGAFKCLRDGAGDVAFIRESTVFEDLSDEAERDEYELLCPDNTRKPVDKFKDCHLARVPSHAVVARSVNGKEDAIWNLLRQAQEKFGKDKSPKFQLFGSPSGQKDLLFKDSAIGFSRVPPRIDSGLYLGSGYFTAIQNLRKSEEEVAARRARVVWCAVGEQELRKCNQWSGLSEGSVTCSSASTTEDCIALVLKGEADAMSLDGGYVYTAGKCGLVPVLAENYKSQQSSDPDPNCVDRPVEGYLAVAVVRRSDTSLTWNSVKGKKSCHTAVDRTAGWNIPMGLLFNQTGSCKFDEYFSQSCAPGSDPRSNLCALCIGDEQGENKCVPNSNERYYGYTGAFRCLAENAGDVAFVKDVTVLQNTDGNNNEAWAKDLKLADFALLCLDGKRKPVTEARSCHLAMAPNHAVVSRMDKVERLKQVLLHQQAKFGRNGSDCPDKFCLFQSETKNLLFNDNTECLARLHGKTTYEKYLGPQYVAGITNLKKCSTSPLLEACEFLRK

SEQ ID NO: 8152 - protein, 864 aa, Homo sapiens
MGCWGQLLVWFGAAGAILCSSPGSQETFLRSSPLPLASPSPRDPKVSAPPSILEPASPLNSPGTEGSWLFSTCGASGRHGPTQTQCDGAYAGTSVVVTVGAAGQLRGVQLWRVPGPGQYLISAYGAAGGKGAKNHLSRAHGVFVSAIFSLGLGESLYILVGQQGEDACPGGSPESQLVCLGESRAVEEHAAMDGSEGVPGSRRWAGGGGGGGGATYVFRVRAGELEPLLVAAGGGGRAYLRPRDRGRTQASPEKLENRSEAPGSGGRGGAAGGGGGWTSRAPSPQAGRSLQEGAEGGQGCSEAWATLGWAAAGGFGGGGGACTAGGGGGGYRGGDASETDNLWADGEDGVSFIHPSSELFLQPLAVTENHGEVEIRRHLNCSHCPLRDCQWQAELQLAECLCPEGMELAVDNVTCMDLHKPPGPLVLMVAVVATSTLSLLMVCGVLILVKQKKWQGLQEMRLPSPELELSKLRTSAIRTAPNPYYCQVGLGPAQSWPLPPGVTEVSPANVTLLRALGHGAFGEVYEGLVIGLPGDSSPLQVAIKTLPELCSPQDELDFLMEALIISKFRHQNIVRCVGLSLRATPRLILLELMSGGDMKSFLRHSRPHLGQPSPLVMRDLLQLAQDIAQGCHYLEENHFIHRDIAARNCLLSCAGPSRVAKIGDFGMARDIYRASYYRRGDRALLPVKWMPPEAFLEGIFTSKTDSWSFGVLLWEIFSLGYMPYPGRTNQEVLDFVVGGGRMDPPRGCPGPVYRIMTQCWQHEPELRPSFASILERLQYCTQDPDVLNSLLPMELGPTPEEEGTSGLGNRSLECLRPPQPQELSPEKLKSWGGSPLGPWLSSGLKPLKSRGLQPQNLWNPTYRS

SEQ ID NO: 8153 - protein, 803 aa, Homo sapiens
MGCWGQLLVWFGAAGAILCSSPGSQETFLRSSPLPLASPSPRDPKVSAPPSILEPASPLNSPGTEGSWLFSTCGASGRHGPTQTQCDGAYAGTSVVVTVGAAGQLRGVQLWRVPGPGQYLISAYGAAGGKGAKNHLSRAHGVFVSAIFSLGLGESLYILVGQQGEDACPGGSPESQLVCLGESRAVEEHAAMDGSEGVPGSRRWAGGGGGGGGATYVFRVRAGELEPLLVAAGGGGRAYLRPRDRGRTQASPEKLENRSEAPGSGGRGGAAGGDASETDNLWADGEDGVSFIHPSSELFLQPLAVTENHGEVEIRRHLNCSHCPLRDCQWQAELQLAECLCPEGMELAVDNVTCMDLHKPPGPLVLMVAVVATSTLSLLMVCGVLILVKQKKWQGLQEMRLPSPELELSKLRTSAIRTAPNPYYCQVGLGPAQSWPLPPGVTEVSPANVTLLRALGHGAFGEVYEGLVIGLPGDSSPLQVAIKTLPELCSPQDELDFLMEALIISKFRHQNIVRCVGLSLRATPRLILLELMSGGDMKSFLRHSRPHLGQPSPLVMRDLLQLAQDIAQGCHYLEENHFIHRDIAARNCLLSCAGPSRVAKIGDFGMARDIYRASYYRRGDRALLPVKWMPPEAFLEGIFTSKTDSWSFGVLLWEIFSLGYMPYPGRTNQEVLDFVVGGGRMDPPRGCPGPVYRIMTQCWQHEPELRPSFASILERLQYCTQDPDVLNSLLPMELGPTPEEEGTSGLGNRSLECLRPPQPQELSPEKLKSWGGSPLGPWLSSGLKPLKSRGLQPQNLWNPTYRS

SEQ ID NO: 8154 - protein, 734 aa, Homo sapiens
MGCWGQLLVWFGAAGAILCSSPGSQETFLRSSPLPLASPSPRDPKVSAPPSILEPASPLNSPGTEGSWLFSTCGASGRHGPTQTQCDGAYAGTSVVVTVGAAGQLRGVQLWRVPGPGQYLISAYGAAGGKGAKNHLSRAHGVFVSAIFSLGLGESLYILVGQQGEDACPGGSPESQLVCLGESRAVEEHAAMDGSEGVPGSRRWAGGGGGGGGATYVFRVRAGELEPLLVAAGGGGRAYLRPRDRGRTQASPEKLENRSEAPGSGGRGGAAGGDASETDNLWADGEDGVSFIHPSSELFLQPLAVTENHGEVEIRRHLNCSHCPLRDCQWQAELQLAECLCPEGMELAVDNVTCMDLHKPPGPLVLMVAVVATSTLSLLMVCGVLILGGAWPGPVLASATRCHRGFPSQCYSAQTLPELCSPQDELDFLMEALIISKFRHQNIVRCVGLSLRATPRLILLELMSGGDMKSFLRHSRPHLGQPSPLVMRDLLQLAQDIAQGCHYLEENHFIHRDIAARNCLLSCAGPSRVAKIGDFGMARDIYRASYYRRGDRALLPVKWMPPEAFLEGIFTSKTDSWSFGVLLWEIFSLGYMPYPGRTNQEVLDFVVGGGRMDPPRGCPGPVYRIMTQCWQHEPELRPSFASILERLQYCTQDPDVLNSLLPMELGPTPEEEGTSGLGNRSLECLRPPQPQELSPEKLKSWGGSPLGPWLSSGLKPLKSRGLQPQNLWNPTYRS

SEQ ID NO: 8155 - protein, 562 aa, Homo sapiens
MGCWGQLLVWFGAAGGDASETDNLWADGEDGVSFIHPSSELFLQPLAVTENHGEVEIRRHLNCSHCPLRDCQWQAELQLAECLCPEGMELAVDNVTCMDLHKPPGPLVLMVAVVATSTLSLLMVCGVLILGTKRLAGTVDSRLLLSMKQKKWQGLQEMRLPSPELELSKLRTSAIRTAPNPYYCQVGLGPAQSWPLPPGVTEVSPANVTLLRALGHGAFGEVYEGLVIGLPGDSSPLQVAIKTLPELCSPQDELDFLMEALIISKFRHQNIVRCVGLSLRATPRLILLELMSGGDMKSFLRHSRPHLGQPSPLVMRDLLQLAQDIAQGCHYLEENHFIHRDIAARNCLLSCAGPSRVAKIGDFGMARDIYRASYYRRGDRALLPVKWMPPEAFLEGIFTSKTDSWSFGVLLWEIFSLGYMPYPGRTNQEVLDFVVGGGRMDPPRGCPGPVYRIMTQCWQHEPELRPSFASILERLQYCTQDPDVLNSLLPMELGPTPEEEGTSGLGNRSLECLRPPQPQELSPEKLKSWGGSPLGPWLSSGLKPLKSRGLQPQNLWNPTYRS

SEQ ID NO: 8156 - protein, 338 aa, Homo sapiens
MSLSAFTLFLALIGGTSGQYYDYDFPLSIYGQSSPNCAPECNCPESYPSAMYCDELKLKSVPMVPPGIKYLYLRNNQIDHIDEKAFENVTDLQWLILDHNLLENSKIKGRVFSKLKQLKKLHINHNNLTESVGPLPKSLEDLQLTHNKITKLGSFEGLVNLTFIHLQHNRLKEDAVSAAFKGLKSLEYLDLSFNQIARLPSGLPVSLLTLYLDNNKISNIPDEYFKRFNALQYLRLSHNELADSGIPGNSFNVSSLVELDLSYNKLKNIPTVNENLENYYLEVNQLEKFDIKSFCKILGPLSYSKIKHLRLDGNRISETSLPPDMYECLRVANEVTLN

SEQ ID NO: 8157 - protein, 176 aa, Homo sapiens
MKFSPAHYLLPLLPALVLSTRQDYEELEKQLKEVFKERSTILRQLTKTSRELDGIKVNLQSLKNDEQSAKTDVQKLLELGQKQREEMKSLQEALQNQLKETSEKAEKHQATINFLKTEVERKSKMIRDLQNEAQQLTDLEQKLAVAKNELEKAALDRESQMKAMKETVQLCLTSVF

SEQ ID NO: 8158 - protein, 346 aa, Homo sapiens
MKFSPAHYLLPLLPALVLSTRQDYEELEKQLKEVFKERSTILRQLTKTSRELDGIKVNLQSLKNDEQSAKTDVQKLLELGQKQREEMKSLQEALQNQLKETSEKAEKHQATINFLKTEVERKSKMIRDLQNENKSLKNKLLSGNKLCGIHAEESKKIQAQLKELRYGKKDLLFKAQQLTDLEQKLAVAKNELEKAALDRESQMKAMKETVQLCLTSVFRDQPPPPLSLITSNPTRMLLPPRNIASKLPDAAAKSKPQQSASGNNESSQVESTKEGNPSTTACDSQDEGRPCSMKHKESPPSNATAETEPIPQKLQMPPCSECEVKKAPEKPLTSFEGMAAREEKIL

SEQ ID NO: 8159 - protein, 260 aa, Homo sapiens
MKSLQEALQNQLKETSEKAEKHQATINFLKTEVERKSKMIRDLQNENKSLKNKLLSGNKLCGIHAEESKKIQAQLKELRYGKKDLLFKAQQLTDLEQKLAVAKNELEKAALDRESQMKAMKETVQLCLTSVFRDQPPPPLSLITSNPTRMLLPPRNIASKLPDAAAKSKPQQSASGNNESSQVESTKEGNPSTTACDSQDEGRPCSMKHKESPPSNATAETEPIPQKLQMPPCSECEVKKAPEKPLTSFEGMAAREEKIL

SEQ ID NO: 8160 - protein, 260 aa, Homo sapiens; identical to SEQ ID NO: 8159

SEQ ID NO: 8161 - protein, 978 aa, Homo sapiens
MGPPSSSGFYVSRAVALLLAGLVAALLLALAVLAALYGHCERVPPSELPGLRDLEAESSPPLRQKPTPTPKPSSARELAVTTTPSNWRPPGPWDQLRLPPWLVPLHYDLELWPQLRPDELPAGSLPFTGRVNITVRCTVATSRLLLHSLFQDCERAEVRGPLSPDDVWFALDTEYMVLELSEPLKPGSSYELQLSFSGLVKEDLREGLFLNVYTDQGERRALLASQLEPTFARYVFPCFDEPALKATFNITMIHHPSYVALSNMPKLGQSEKEDVNGSKWTVTTFSTTPHMPTYLVAFVICDYDHVNRTERGKEIRIWARKDAIANGSADFALNITGPIFSFLEDLFNISYSLPKTDIIALPSFDNHAMENWGLMIFDESGLLLEPKDQLTEKKTLISYVVSHEIGHQWFGNLVTMNWWNNIWLNEGFASYFEFEVINYFNPKLPRNEIFFSNILHNILREDHALVTRAVAMKVENFKTSEIQELFDIFTYSKGASMARMLSCFLNEHLFVSALKSYLKTFSYSNAEQDDLWRHFQMAIDDQSTVILPATIKNIMDSWTHQSGFPVITLNVSTGVMKQEPFYLENIKNRTLLTSNDTWIVPILWIKNGTTQPLVWLDQSSKVFPEMQVSDSDHDWVILNLNMTGYYRVNYDKLGWKKLNQQLEKDPKAIPVIHRLQLIDDAFSLSKNNYIEIETALELTKYLAEEDEIIVWHTVLVNLVTRDLVSEVNIYDIYSLLKRYLLKRLNLIWNIYSTIIRENVLALQDDYLALISLEKLFVTACWLGLEDCLQLSKELFAKWVDHPENEIPYPIKDVVLCYGIALGSDKEWDILLNTYTNTTNKEEKIQLAYAMSCSKDPWILNRYMEYAISTSPFTSNETNIIEVVASSEVGRYVAKDFLVNNWQAVSKRYGTQSLINLIYTIGRTVTTDLQIVELQQFFSNMLEEHQRIRVHANLQTIKNENLKNKKLSARIAAWLRRNT

SEQ ID NO: 8162 - protein, 990 aa, Homo sapiens
MGPPSSSGFYVSRAVALLLAGLVAALLLALAVLAALYGHCERVPPSELPGLRDLEAESSPPLRQKPTPTPKPSSARELAVTTTPSNWRPPGPWDQLRLPPWLVPLHYDLELWPQLRPDELPAGSLPFTGRVNITVRCTVATSRLLLHSLFQDCERAEVRGPLSPGTGNATVGRVPVDDVWFALDTEYMVLELSEPLKPGSSYELQLSFSGLVKEDLREGLFLNVYTDQGERRALLASQLEPTFARYVFPCFDEPALKATFNITMIHHPSYVALSNMPKLGQSEKEDVNGSKWTVTTFSTTPHMPTYLVAFVICDYDHVNRTERGKEIRIWARKDAIANGSADFALNITGPIFSFLEDLFNISYSLPKTDIIALPSFDNHAMENWGLMIFDESGLLLEPKDQLTEKKTLISYVVSHEIGHQWFGNLVTMNWWNNIWLNEGFASYFEFEVINYFNPKLPRNEIFFSNILHNILREDHALVTRAVAMKVENFKTSEIQELFDIFTYSKGASMARMLSCFLNEHLFVSALKSYLKTFSYSNAEQDDLWRHFQMAIDDQSTVILPATIKNIMDSWTHQSGFPVITLNVSTGVMKQEPFYLENIKNRTLLTSNDTWIVPILWIKNGTTQPLVWLDQSSKVFPEMQVSDSDHDWVILNLNMTGYYRVNYDKLGWKKLNQQLEKDPKAIPVIHRLQLIDDAFSLSKNNYIEIETALELTKYLAEEDEIIVWHTVLVNLVTRDLVSEVNIYDIYSLLKRYLLKRLNLIWNIYSTIIRENVLALQDDYLALISLEKLFVTACWLGLEDCLQLSKELFAKWVDHPENEIPYPIKDVVLCYGIALGSDKEWDILLNTYTNTTNKEEKIQLAYAMSCSKDPWILNRYMEYAISTSPFTSNETNIIEVVASSEVGRYVAKDFLVNNWQAVSKRYGTQSLINLIYTIGRTVTTDLQIVELQQFFSNMLEEHQRIRVHANLQTIKNENLKNKKLSARIAAWLRRNT

SEQ ID NO: 8163 - protein, 701 aa, Homo sapiens
MGPPSSSGFYVSRAVALLLAGLVAALLLALAVLAALYGHCERVPPSELPGLRDLEAESSPPLRQKPTPTPKPSSARELAVTTTPSNWRPPGPWDQLRLPPWLVPLHYDLELWPQLRPDELPAGSLPFTGRVNITVRCTVATSRLLLHSLFQDCERAEVRGPLSPGTGNATVGRVPVDDVWFALDTEYMVLELSEPLKPGSSYELQLSFSGLVKEDLREGLFLNVYTDQGERRALLASQLEPTFARYVFPCFDEPALKATFNITMIHHPSYVALSNMPKLGQSEKEDVNGSKWTVTTFSTTPHMPTYLVAFVICDYDHVNRTERGKEIRIWARKDAIANGSADFALNITGPIFSFLEDLFNISYSLPKTDIIALPSFDNHAMENWGLMIFDESGLLLEPKDQLTEKKTLISYVVSHEIGHQWFGNLVTMNWWNNIWLNEGFASYFEFEVINYFNPKLPRNEIFFSNILHNILREDHALVTRAVAMKVENFKTSEIQELFDIFTYSKGASMARMLSCFLNEHLFVSALKSYLKTFSYSNAEQDDLWRHFQMAIDDQSTVILPATIKNIMDSWTHQSGFPVITLNVSTGVMKQEPFYLENIKNRTLLTSNDTWIVPILWIKNGTTQPLVWLDQSSKVFPEMQVSDSDHDWVILNLNMTGYYRVNYDKLGWKKLNQQLEKDPKAIPVIHRLQLIDDAFSLSKGTY

SEQ ID NO: 8164 - protein, 226 aa, Homo sapiens
MKVENFKTSEIQELFDIFTYSKGASMARMLSCFLNEHLFVSALKSYLKTFSYSNAEQDDLWRHFQMAIDDQSTVILPATIKNIMDSWTHQSGFPVITLNVSTGVMKQEPFYLENIKNRTLLTSNDTWIVPILWIKNGTTQPLVWLDQSSKVFPEMQVSDSDHDWVILNLNMTGYYRVNYDKLGWKKLNQQLEKDPKAIPVIHRLQLIDDAFSLSNLQDFGHLKVPN

SEQ ID NO: 8165 - protein, 198 aa, Homo sapiens
MKVENFKTSEIQELFDIFTYSKGASMARMLSCFLNEHLFVSALKSYLKTFSYSNAEQDDLWRHFQMAIDDQSTVILPATIKNIMDSWTHQSGFPVITLNVSTGVMKQEPFYLENIKNRTLLTSNDTWIVPILWIKNGTTQPLVWLDQSSKVFPEMQVSDSDHDWVILNLNMTGYYRVNYDKLGWKKLNQQLEKDPKMR

SEQ ID NO: 8166 - protein, 198 aa, Homo sapiens; identical to SEQ ID NO: 8165

SEQ ID NO: 8167 - protein, 66 aa, Homo sapiens
MKIFLPVLLAALLGVERASSLMCFSCLNQKSNLYCLKPTICSDQDNYCVTVSASAGIASFPMQGIS

SEQ ID NO: 8168 - protein, 66 aa, Homo sapiens; identical to SEQ ID NO: 8167

SEQ ID NO: 8169 - protein, 73 aa, Homo sapiens
MKIFLPVLLAALLGVERASSLMCFSCLNQKSNLYCLKPTICSDQDNYCVTVSASAGIGECQASDRAFLPWPSP

SEQ ID NO: 8170 - protein, 66 aa, Homo sapiens
MKIFLPVLLAALLGVERASSLMCFSCLNQKSNLYCLKPTICSDQDNYCVTVSASAGIGGFAGGTDS

SEQ ID NO: 8171 - protein, 131 aa, Homo sapiens
MKIFLPVLLAALLGVERASSLMCFSCLNQKSNLYCLKPTICSDQDNYCVTVSASAGIGNLVTFGHSLSKTCSPACPIPEGVNVGVASMGISCCQSFLCNFSAADGGLRASVTLLGAGLLLSLLPALLRFGP

SEQ ID NO: 8172 - protein, 131 aa, Homo sapiens; identical to SEQ ID NO: 8171

SEQ ID NO: 8173 - protein, 131 aa, Homo sapiens; identical to SEQ ID NO: 8171

SEQ ID NO: 8174 - protein, 131 aa, Homo sapiens; identical to SEQ ID NO: 8171

SEQ ID NO: 8175 - protein, 131 aa, Homo sapiens; identical to SEQ ID NO: 8171

SEQ ID NO: 8176 - protein, 131 aa, Homo sapiens; identical to SEQ ID NO: 8171

SEQ ID NO: 8177 - protein, 131 aa, Homo sapiens; identical to SEQ ID NO: 8171

SEQ ID NO: 8178 - protein, 41 aa, Homo sapiens
MKIFLPVLLAALLGVEREEQSVLPEADHLLRPGQLLRDCVC

SEQ ID NO: 8179 - protein, 41 aa, Homo sapiens; identical to SEQ ID NO: 8178

SEQ ID NO: 8180 - protein, 147 aa, Homo sapiens
MTSGIPGCGGACVLPSRAPLRRRDPQHCSPTLSEAPLLRAHTQTRLLTRGLPTPNTTRTVQVSVTVTPTWSPVRPRQDRLLWFVTSRQDGHPLQNEDLLASAAGCPSGCGASQLADVLLLLEPEEQSVLPEADHLLRPGQLLRDCVC

SEQ ID NO: 8181 - protein, 201 aa, Homo sapiens
MKVHMLVGVLVMVGFTVGKVPVPDIRTCHFCLVEDPSVGCISGSEKCTISSSSLCMVITIYYDVKVRFIVRGCGQYISYRCQEKRNTYFAEYWYQAQCCQYDYCNSWSSPQLQSSLPEPHDRPLALPLSDSQIQWFYQALNLSLPLPNFHAGTEPDGLDPMVTLSLNLGLSFAELRRMYLFLNSSGLLVLPQAGLLTPHPS

SEQ ID NO: 8182 - protein, 146 aa, Homo sapiens
MVITIYYDVKVRFIVRGCGQYISYRCQEKRNTYFAEYWYQAQCCQYDYCNSWSSPQLQSSLPEPHDRPLALPLSDSQIQWFYQALNLSLPLPNFHAGTEPDGLDPMVTLSLNLGLSFAELRRMYLFLNSSGLLVLPQAGLLTPHPS

SEQ ID NO: 8183 - protein, 133 aa, Homo sapiens
MKPQFVGILLSSLLGAALGNRMRCYNCGGSPSSSCKEAVTTCGEGRPQPGLEQIKLPGNPPVTLIHQHPACVAAHHCNQVETESVGDVTYPAHRDCYLGDLCNSAVASHVAPAGILAAAATALTCLLPGLWSG

SEQ ID NO: 8184 - protein, 174 aa, Homo sapiens
MKPQFVGILLSSLLGAALGNRMRCYNCGGSPSSSCKEAVTTCGEGRPQPGLEQIKLPGNRRCFLRGLKIPLGSLKSHLLCPRRQVLKPGVQHPSFILSLSPSDLDSPTSSLRRSPSLQSSGDRVGGRRDLSSPQGLLPGRPVQQRRGKPCGPCRHFGCSSYRPDLSLARTVERI

SEQ ID NO: 8185 - protein, 66 aa, Homo sapiens
MGTSSIFLCVLFLCGALGLTMSPARGRLRCYICGFTKPCHPVPTECRDDEACGISIGTSDQSEITE

SEQ ID NO: 8186 - protein, 125 aa, Homo sapiens
MGTSSIFLCVLFLCGALGLTMSPARGRLRCYICGFTKPCHPVPTECRDDEACGISIGTSGKSCLSRAQCPLPGYATYWLHSYTLWHHCCEQDLCNIAASPQQLTSLLASLPLFVASFAGRGHLLH

SEQ ID NO: 8187 - protein, 100 aa, Homo sapiens
MGTSSIFLCVLFLCGALGLTMSPARGRLRCYICGFTKPCHPVPTECRDDEACGISIGTSGRTLVQWPFSRRLPTSIHPAFPVAPASACLFHPTDQSEITE

SEQ ID NO: 8188 - protein, 88 aa, Homo sapiens
MLQLYKSRDLGVQITSPRFLSLCLAMGTSSIFLCVLFLCGALGLTMSPARGRLRCYICGFTKPCHPVPTECRDDEACGISIGTSDAHC

SEQ ID NO: 8189 - protein, 161 aa, Homo sapiens
MLAPQRTRAPSPRAAPRPTRSMLPAAMKGLGLALLAVLLCSAPAHGLWCQDCTLTTNSSHCTPKQCQPSDTVCASVRITDPSSSRKDHSVNKMCASSCDFVKRHFFSDYLMGFINSGILKVDVDCCEKDLCNGAAGAGHSPWALAGGLLLSLGPALLWAGP

SEQ ID NO: 8190 - protein, 161 aa, Homo sapiens; identical to SEQ ID NO: 8189

SEQ ID NO: 8191 - protein, 140 aa, Homo sapiens
MLPAAMKGLGLALLAVLLCSAPAHGLWCQDCTLTTNSSHCTPKQCQPSDTVCASVRITDPSSSRKDHSVNKMCASSCDFVKRHFFSDYLMGFINSGILKVDVDCCEKDLCNGAAGAGHSPWALAGGLLLSLGPALLWAGP

SEQ ID NO: 8192 - protein, 140 aa, Homo sapiens; identical to SEQ ID NO: 8191

SEQ ID NO: 8193 - protein, 165 aa, Homo sapiens
MALLALLLVVALPRVWTDANLTARQRDPEDSQRTDEGDNRVWCHVCERENTFECQNPRRCKWTEPYCVIAAVKIFPRFFMVAKQCSAGCAAMERPKPEEKRFLLEEPMPFFYLKCCKIRYCNLEGPPINSSVFKEYAGSMGESCGGLWLAILLLLASIAAGLSLS

SEQ ID NO: 8194 - protein, 100 aa, Homo sapiens
MALLALLLVVALPRVWTDANLTARQRDPEDSQRTDEGDNRVWCHVCERENTFECQNPRRCKWTEPYCVIAAVRRSSGLVNSDSAQQSLSSPSVSTKLVGC

SEQ ID NO: 8195 - protein, 85 aa, Homo sapiens
MALLALLLVVALPRVWTDANLTARQRDPEDSQRTDEGDNRVWCHVCERENTFECQNPRRCKWTEPYCVIAAVSEYLRSCWGPKGR

SEQ ID NO: 8196 - protein, 105 aa, Homo sapiens
MALLALLLVVALPRVWTDANLTARQRDPEDSQRTDEGDNRVWCHVCERENTFECQNPRRCKWTEPYCVIAAVTVLRWLCSDGETQARGEAVSPGRAHALLLPQVL

SEQ ID NO: 8197 - protein, 138 aa, Homo sapiens
MERLVLTLCTLPLAVASAGCATTPARNLSCYQCFKVSSWTECPPTWCSPLDQVCISNEVVVSFKWSVRVLLSKRCAPRCPNDNMKFEWSPAPMVQGVITRRCCSWALCNRALTPQEGRWALRGGLLLQVGLSLLRALL

SEQ ID NO: 8198 - protein, 162 aa, Homo sapiens
MKGFTATLFLWTLIFPSCSGGGGGKAWPTHVVCSDSGLEVLYQSCDPLQDFGFSVEKCSKQLKSNINIRFGIILREDIKELFLDLALMSQGSSVLNFSYPICEAALPKFSFCGRRKGEQIYYAGPVNNPEFTIPQGEYQVLLELYTEKRSTVACANATIMCS

SEQ ID NO: 8199 - protein, 162 aa, Homo sapiens; identical to SEQ ID NO: 8198

SEQ ID NO: 8200 - protein, 160 aa, Homo sapiens [sequence omitted]

SEQ ID NO: 8201 - protein, 130 aa, Homo sapiens
MLPFLFFSTLFSSIFTEAQKQYWVCNSSDASISYTYCGRDLKQLYFNLYITVNTMNLPKRKEVICRGSDDDYSFCRALKGETVNTTISFSFKGIKFSKGKYKCVVEAISGSPEEMLFCLEFVILHQPNSN

SEQ ID NO: 8202 - protein, 194 aa, Homo sapiens
MSALWLLLGLLALMDLSESSNWGCYGNIQSLDTPGASCGIGRRHGLNYCGVRASERLAEIDMPYLLKYQPMMQTIGQKYCMDPAVIAGVLSRKSPGDKILVNMGDRTSMVQDPGSQAPTSWISESQVSQTTEVLTTRIKEIQRRFPTWTPDQYLRGGLCAYSGGAGYVRSSQDLSCDFCNDVLARAKYLKRHGF

SEQ ID NO: 8203 - protein, 194 aa, Homo sapiens; identical to SEQ ID NO: 8202

SEQ ID NO: 8204 - protein, 169 aa, Homo sapiens
MLSSVVFWGLIALIGTSRGSYPFSHSMKPHLHPRLYHGCYGDIMTMKTSGATCDANSVMNCGIRGSEMFAEMDLRAIKPYQTLIKEVGQRHCVDPAVIAAIISRESHGGSVLQDGWDHRGLKFGLMQLDKQTYHPVGAWDSKEHLSQATGILTERIKAIQKKFPTWSVA

SEQ ID NO: 8205 - protein, 178 aa, Homo sapiens
MLSSVVFWGLIALIGTSRGSYPFSHSMKPHLHPRLYHGCYGDIMTMKTSGATCDANSVMNCGIRGSEMFAEMDLRAIKPYQTLIKEVGQRHCVDPAVIAAIISRESHGGSVLQDGWDHRGLKFGLMQLDKQTYHPVGAWDSKEHLSQATGILTERIKAIQKKFPTWSVAQHLKGFFLL

SEQ ID NO: 8206 - protein, 178 aa, Homo sapiens; identical to SEQ ID NO: 8205

SEQ ID NO: 8207 - protein, 212 aa, Homo sapiens
MLSSVVFWGLIALIGTSRGSYPFSHSMKPHLHPRLYHGCYGDIMTMKTSGATCDANSVMNCGIRGSEMFAEMDLRAIKPYQTLIKEVGQRHCVDPAVIAAIISRESHGGSVLQDGWDHRGLKFGLMQLDKQTYHPVGAWDSKEHLSQATGILTERIKAIQKKFPTWSVAQHLKGGLSAFKSGIEAIATPSDIDNDFVNDIIARAKFYKRQSF

SEQ ID NO: 8208 - protein, 212 aa, Homo sapiens; identical to SEQ ID NO: 8207

SEQ ID NO: 8209 - protein, 182 aa, Homo sapiens
MLSSVVFWGLIALIGTSRGSYPFSHSMKPHLHPRLYHGCYGDIMTMKTSGATCDANSVMNCGIRGSEMFAEMDLRAIKPYQTLIKEVGQRHCVDPAVIAAIISRESHGGSVLQDGWDHRGLKFGLMQLDKQTYHPVGAWDSKEHLSQATGILTERIKAIQKKFPTWSVAQHLKGRLYSEYFV

SEQ ID NO: 8210 - protein, 82 aa, Homo sapiens
MTPLLTLILVVLMGLPLAQALDCHVCAYNGDNCFNPMRCPAMVAYCMTTRTYYTPTRMKVSKSCVPRCFETVYDGYSKHAST

SEQ ID NO: 8211 - protein, 84 aa, Homo sapiens
MTPLLTLILVVLMGLPLAQALDCHVCAYNGDNCFNPMRCPAMVAYCMTTRTYYTPTRMKVSKSCVPRCFETVYDGYSKHASTTS

SEQ ID NO: 8212 - protein, 116 aa, Homo sapiens
MTPLLTLILVVLMGLPLAQALDCHVCAYNGDNCFNPMRCPAMVAYCMTTRTYYTPTRMKVSKSCVPRCFETVYDGYSKHASTTSCCQYDLCNGTGLATPATLALAPILLATLWGLL

SEQ ID NO: 8213 - protein, 116 aa, Homo sapiens; identical to SEQ ID NO: 8212

SEQ ID NO: 8214 - protein, 116 aa, Homo sapiens; identical to SEQ ID NO: 8212

SEQ ID NO: 8215 - protein, 89 aa, Homo sapiens
MCQKEVMEQSAGIMYRKSCASSAACLIASAGYQSFCSPGKLNSVCISCCNTPLCNGPRPKKRGSSASALRPGLRTTILFLKLALFSAHC

SEQ ID NO: 8216 - protein, 39 aa, Homo sapiens
MWVLGIAATFCGLFLLPGENTQRPAAEARLCAANPVLPV

SEQ ID NO: 8217 - protein, 141 aa, Homo sapiens
MWVLGIAATFCGLFLLPGFALQIQCYQCEEFQLNNDCSSPEFIVNCTVNVQDMCQKEVMEQSAGIMYRKSCASSAACLIASAGYQSFCSPGKLNSVCISCCNTPLCNGPRPKKRGSSASALRPGLRTTILFLKLALFSAHC

SEQ ID NO: 8218 - protein, 125 aa, Homo sapiens
MRGTRLALLALVLAACGELAPALRCYVCPEPTGVSDCVTIATCTTNETMCKTTLYSREIVYPFQGDSTVTKSCASKCKPSDVDGIGQTLPVSCCNTELCNVDGAPALNSLHCGALTLLPLLSLRL

SEQ ID NO: 8219 - protein, 246 aa, Homo sapiens
MGPQHLRLVQLFCLLGAISTLPRAGALLCYEATASRFRAVAFHNWKWLLMRNMVCKLQEGCEETLVFIETGTARGVVGFKGCSSSSSYPAQISYLVSPPGVSIASYSRVCRSYLCNNLTNLEPFVKLKASTPKSITSASCSCPTCVGEHMKDCLPNFVTTNSCPLAASTCYSSTLKFQAGFLNTTFLLMGCAREHNQLLADFHHIGSIKVTEVLNILEKSQIVGAASSRQDPAWGVVLGLLFAFRD

SEQ ID NO: 8220 - protein, 211 aa, Homo sapiens
MGPQHLRLVQLFCLLGAISTLPRMSCGAGCYKTQKGTARGVVGFKGCSSSSSYPAQISYLVSPPGVSIASYSRVCRSYLCNNLTNLEPFVKLKASTPKSITSASCSCPTCVGEHMKDCLPNFVTTNSCPLAASTCYSSTLKFQAGFLNTTFLLMGCAREHNQLLADFHHIGSIKVTEVLNILEKSQIVGAASSRQDPAWGVVLGLLFAFRD

SEQ ID NO: 8221 - protein, 211 aa, Homo sapiens; identical to SEQ ID NO: 8220

SEQ ID NO: 8222 - protein, 53 aa, Homo sapiens
MEPGPALAWLLLLSLLADCLKAAQSRDFTVKDIIYLHPSTTPYPGGFKCFTCE

SEQ ID NO: 8223 - protein, 171 aa, Homo sapiens
MEPGPALAWLLLLSLLADCLKAAQSRDFTVKDIIYLHPSTTPYPGGFKCFTCEKAADNYECNRWAPDIYCPRETRYCYTQHTMEVTGNSISVTKRCVPLEECLSTGCRDSEHEGHKVCTSCCEGNICNLPLPRNETDATFATTSPINQTNGHPRCMSVIVSCLWLWLGLML

SEQ ID NO: 8224 - protein, 171 aa, Homo sapiens; identical to SEQ ID NO: 8223

SEQ ID NO: 8225 - protein, 76 aa, Homo sapiens
MEPGPALAWLLLLSLLADCLKAAQSRDFTVKDIIYLHPSTTPYPGGFKCFTCEKAADNYECNRWAPDIYCPRGTMI

SEQ ID NO: 8226 - protein, 76 aa, Homo sapiens; identical to SEQ ID NO: 8225

SEQ ID NO: 8227 - protein, 50 aa, Homo sapiens
MLCERHCTEEDENHSKPNKGNAEEIFSAEYWKVRFPASRISGNVNEQHEA

SEQ ID NO: 8228 - protein, 74 aa, Homo sapiens
MLLITLSANLFTVPERSLTTTFSFSRCERHCTEEDENHSKPNKGNAEEIFSAEYWKVRFPASRISGNVNEQHEA

SEQ ID NO: 8229 - protein, 207 aa, Homo sapiens
MLLITLSANLFTVPERSLTTTFSFSRYKSSDRPAHKVSMLLLCHALAIAVVQIVIFSESWAFAKNINFYNVRPPLDPTPFPNSFKCFTCENAGDNYNCNRWAEDKWCPQNTQYCLTVHHFTSHGRSTSITKKCASRSECHFVGCHHSRDSEHTECRSCCEGMICNVELPTNHTNAVFAVMHAQRTSGSSAPTLYLPVLAWVFVLPLL

SEQ ID NO: 8230 - protein, 54 aa, Homo sapiens
MLYKSSDRPAHKVSMLLLCHALAIAVVQIVIFSESWAFAKNINFYNVRPPLDHK

SEQ ID NO: 8231 - protein, 183 aa, Homo sapiens
MLYKSSDRPAHKVSMLLLCHALAIAVVQIVIFSESWAFAKNINFYNVRPPLDPTPFPNSFKCFTCENAGDNYNCNRWAEDKWCPQNTQYCLTVHHFTSHGRSTSITKKCASRSECHFVGCHHSRDSEHTECRSCCEGMICNVELPTNHTNAVFAVMHAQRTSGSSAPTLYLPVLAWVFVLPLL

SEQ ID NO: 8232 - protein, 183 aa, Homo sapiens; identical to SEQ ID NO: 8231

SEQ ID NO: 8233 - protein, 183 aa, Homo sapiens
MRYKSSDRPAHKVSMLLLCHALAIAVVQIVIFSESWAFAKNINFYNVRPPLDPTPFPNSFKCFTCENAGDNYNCNRWAEDKWCPQNTQYCLTVHHFTSHGRSTSITKKCASRSECHFVGCHHSRDSEHTECRSCCEGMICNVELPTNHTNAVFAVMHAQRTSGSSAPTLYLPVLAWVFVLPLL

SEQ ID NO: 8234 - protein, 237 aa, Homo sapiens
MKGILVAGITAVLVAAVESLSCVQCNSWEKSCVNSIASECPSHANTSCISSSASSSLETPVRLYQNMFCSAENCSEETHITAFTVHVSAEEHFHFVSQCCQGKECSNTSDALDPPLKNVSSNAECPACYESNGTSCHGKPWKCYEEEQCVFLVAELKNDIESKSLVLKGCSNVSNATCQFLSGENKTLGGVIFRKFECANVNSLTPTSAPTTSHNVGSKASLYLLALASLLLRGLLP

SEQ ID NO: 8235 - protein, 54 aa, Homo sapiens
  VARIANT 1: note = misc_feature - Xaa can be any naturally occurring amino acid
XPPLKNVSSNAECPACYESNGTSCHGKPWKCYEEEQCVFLVAELKNGTPGDGAD

SEQ ID NO: 8236 - protein, 148 aa, Homo sapiens
MKALIVLGLVLLSVTVQGKVFERCELARTLKRLGMDGYRGISLANWMCLAKWESGYNTRATNYNAGDRSTDYGIFQINSRYWCNDGKTPGAVNACHLSCSALLQDNIADAVACAKRVVRDPQGIRAWVAWRNRCQNRDVRQYVQGCGV

SEQ ID NO: 8237 - protein, 104 aa, Homo sapiens
MKALIVLGLVLLSVTVQGKVFERCELARTLKRLGMDGYRGISLANWMCLAKWESGYNTRATNYNAGDRSTDYGIFQINSRYWCNDGKTPGAVNACHLSCSGKTS

SEQ ID NO: 8238 - protein, 137 aa, Homo sapiens
MKALIVLGLVLLSVTVQGKVFERCELARTLKRLGMDGYRGISLANWMCLAKWESGYNTRATNYNAGDRSTDYGIFQINSRYWCNDGKTPGAVNACHLSCSGWHGEIVVKTEMSVSMFKVVECNSRIFLLQLILSLSH

SEQ ID NO: 8239 - protein, 146 aa, Homo sapiens
MKASVVLSLLGYLVVPSGAYILGRCTVAKKLHDGGLDYFEGYSLENWVCLAYFESKFNPMAIYENTREGYTGFGLFQMRGSDWCGDHGRNRCHMSCSALLNPNLEKTIKCAKTIVKGKEGMGAWPTWSRYCQYSDTLARWLDGCKL

SEQ ID NO: 8240 - protein, 146 aa, Homo sapiens; identical to SEQ ID NO: 8239

SEQ ID NO: 8241 - protein, 148 aa, Homo sapiens
MTKALLIYLVSSFLALNQASLISRCDLAQVLQLEDLDGFEGYSLSDWLCLAFVESKFNISKINENADGSFDYGLFQINSHYWCNDYKSYSENLCHVDCQDLLNPNLLAGIHCAKRIVSGARGMNNWVEWRLHCSGRPLFYWLTGCRLR

SEQ ID NO: 8242 - protein, 148 aa, Homo sapiens; identical to SEQ ID NO: 8241

SEQ ID NO: 8243 - protein, 86 aa, Homo sapiens
  VARIANT 1: note = misc_feature - Xaa can be any naturally occurring amino acid
XLEDLDGFEGYSLSDWLCLAFVESKFNISKINENADGSFDYGLFQINSHYWCNDYKSYSENLCHVDCQGIHCAKRIVSGARGMNNW

SEQ ID NO: 8244 - protein, 148 aa, Homo sapiens
LLLLLAVAVRESWQTEEKTCDLDNFNPVSEERGKVQDCFYLFEMDSSLACSPEISHLSVGSILLVTFASLVAVYVVGGFLYQRLVVGAKGMEQFPHLAFWQDLGNLVADGCDFVCRSKPRNVPAAYRGVGDDQLGEESEERDDHLLPM

SEQ ID NO: 8245 - protein, 92 aa, Homo sapiens
MFPFYSCWRTGLLLLLLAVAVRESWQTEEKTCDLVGEKGKESEKELALVKRLKPLFNKSFESTVGQGSDTYIYIFRVCREAGNHTSGAGLVQ

SEQ ID NO: 8246 - protein, 109 aa, Homo sapiens
MFPFYSCWRTGLLLLLLAVAVRESWQTEEKTCDLVGEKGKESEKELALVKRLKPLFNKSFESTVGQGSDTYIYIFRVCREAGNHTSGAGLVQINKSNGKETVVGRLNET

SEQ ID NO: 8247 - protein, 133 aa, Homo sapiens
MFPFYSCWRTGLLLLLLAVAVRESWQTEEKTCDLVGEKGKESEKELALVKRLKPLFNKSFESTVGQGSDTYIYIFRVCREAGNHTSGAGLVQINKSNGKETVVGRLNETHIFNGSLHHWLLFMLLGGSYTSDW

SEQ ID NO: 8248 - protein, 191 aa, Homo sapiens
MFPFYSCWRTGLLLLLLAVAVRESWQTEEKTCDLVGEKGKESEKELALVKRLKPLFNKSFESTVGQGSDTYIYIFRVCREAGNHTSGAGLVQINKSNGKETVVGRLNETHIFNGSNWIMLIYKGGDEYDNHCGKEQRRAVVMISCNRHTLADGCDFVCRSKPRNVPAAYRGVGDDQLGEESEERDDHLLPM

SEQ ID NO: 8249 - protein, 277 aa, Homo sapiens
MFPFYSCWRTGLLLLLLAVAVRESWQTEEKTCDLVGEKGKESEKELALVKRLKPLFNKSFESTVGQGSDTYIYIFRVCREAGNHTSGAGLVQINKSNGKETVVGRLNETHIFNGSNWIMLIYKGGDEYDNHCGKEQRRAVVMISCNRHTLADNFNPVSEERGKVQDCFYLFEMDSSLACSPEISHLSVGSILLVTFASLVAVYVVGGFLYQRLVVGAKGMEQFPHLAFWQDLGNLVADGCDFVCRSKPRNVPAAYRGVGDDQLGEESEERDDHLLPM

SEQ ID NO: 8250 - protein, 25 aa, Homo sapiens
MLIYKGGDEYDNHCGKEQRRAVVMI

SEQ ID NO: 8251 - protein, 85 aa, Homo sapiens
VVGGFLYQRLVVGAKGMEQFPHLAFWQDLGNLVAACGFDLFFNLLERERKQKWDIEGSAVLCAGCGMLLHLSLLLAQGSVFLPTF

SEQ ID NO: 8252 - protein, 104 aa, Homo sapiens
  VARIANT 1: note = misc_feature - Xaa can be any naturally occurring amino acid
XFNKSFESTVGQGSDTYIYIFRVCREAGNHTSGAGLVQINKSNGKETVVGRLNETHIFNGSNWIMLIYKGGDEYDNHCGKEQRRAVVMISCNRHTLAESKHLTT

SEQ ID NO: 8253 - protein, 122 aa, Homo sapiens
  VARIANT 1: note = misc_feature - Xaa can be any naturally occurring amino acid
XGGDEYDNHCGKEQRRAVVMISCNRHTLADNFNPVSEERGKVQDCFYLFEMDSSLACSPEISHLSVGSILLVTFASLVAVYVVGGFLYQRLVVGAKGMEQFPHLAFWQDLGNLVAVSNRAAG

SEQ ID NO: 8254 - protein, 96 aa, Homo sapiens
  VARIANT 1: note = misc_feature - Xaa can be any naturally occurring amino acid
XILLVTFASLVAVYVVGGFLYQRLVVGAKGMEQFPHLAFWQDLGNLVAKGNGSRSGTSRALLSSALGVECCCTCPFCWLREVSSCPHFCGERFLIL

SEQ ID NO: 8255 - protein, 157 aa, Homo sapiens
MEDLGENTMVLSTLRSLNNFISQRVEGGSGLDISTSAPGSLQMQYQQSMQLEERAEQIRSKSHLIQVEREKMQMELSHKRARVELERAASTSARNYEREVDRNQELLTRIRQLQEREAGAEEKMQEQLERNRQCQQNLDAASKRLREKEDSLAQAGE

SEQ ID NO: 8256 - protein, 718 aa, Homo sapiens
MEDLGENTMVLSTLRSLNNFISQRVEGGSGLDISTSAPGSLQMQYQQSMQLEERAEQIRSKSHLIQVEREKMQMELSHKRARVELERAASTSARNYEREVDRNQELLTRIRQLQEREAGAEEKMQEQLERNRQCQQNLDAASKRLREKEDSLAQAGETINALKGRISELQWSVMDQEMRVKRLESEKQELQEQLDLQHKKCQEANQKIQELQASQEARADHEQQIKDLEQKLSLQEQDAAIVKNMKSELVRLPRLERELKQLREESAHLREMRETNGLLQEELEGLQRKLGRQEKMQETLVGLELENERLLAKLQSWERLDQTMGLSIRTPEDLSRFVVELQQRELALKDKNSAVTSSARGLEKARQQLQEELRQVSGQLLEERKKRETHEALARRLQKRVLLLTKERDGMRAILGSYDSELTPAEYSPQLTRRMREAEDMVQKVHSHSAEMEAQLSQALEELGGQKQRADMLEMELKMLKSQSSSAEQSFLFSREEADTLRLKVEELEGERSRLEEEKRMLEAQLERRALQGDYDQSRTKVLHMSLNPTSVARQRLREDHSQLQAECERLRGLLRAMERGGTVPADLEAAAASLPSSKEVAELKKQVESAELKNQRLKEVFQTKIQEFRKACYTLTGYQIDITTENQYRLTSLYAEHPGDCLIFKATSPSGSKMQLLETEFSHTVGELIEVHLRRQDSIPAFLSSLTLELFSRQTVA

SEQ ID NO: 8257 - protein, 718 aa, Homo sapiens; identical to SEQ ID NO: 8256

SEQ ID NO: 8258 - protein, 718 aa, Homo sapiens; identical to SEQ ID NO: 8256

SEQ ID NO: 8259 - protein, 144 aa, Homo sapiens
MEDLGENTMVLSTLRSLNNFISQRVEGGSGLDISTSAPGSLQMQYQQSMQREVDRNQELLTRIRQLQEREAGAEEKMQEQLERNRQCQQNLDAASKRLREKEDSLAQAGETINALKGRISELQWSVMDQEMRVKRLESEKQELQ

SEQ ID NO: 8260 - protein, 626 aa, Homo sapiens
MLPARGCVRKRTVWPRLARVLIVTLLTLELSYAPLPCQLSGVPYNTGDPVGRWARPCIWPCPWHTTINALKGRISELQWSVMDQEMRVKRLESEKQELQEQLDLQHKKCQEANQKIQELQASQEARADHEQQIKDLEQKLSLQEQDAAIVKNMKSELVRLPRLERELKQLREESAHLREMRETNGLLQEELEGLQRKLGRQEKMQETLVGLELENERLLAKLQSWERLDQTMGLSIRTPEDLSRFVVELQQRELALKDKNSAVTSSARGLEKARQQLQEELRQVSGQLLEERKKRETHEALARRLQKRVLLLTKERDGMRAILGSYDSELTPAEYSPQLTRRMREAEDMVQKVHSHSAEMEAQLSQALEELGGQKQRADMLEMELKMLKSQSSSAEQSFLFSREEADTLRLKVEELEGERSRLEEEKRMLEAQLERRALQGDYDQSRTKVLHMSLNPTSVARQRLREDHSQLQAECERLRGLLRAMERGGTVPADLEAAAASLPSSKEVAELKKQVESAELKNQRLKEVFQTKIQEFRKACYTLTGYQIDITTENQYRLTSLYAEHPGDCLIFKATSPSGSKMQLLETEFSHTVGELIEVHLRRQDSIPAFLSSLTLELFSRQTVA

SEQ ID NO: 8261 - protein, 205 aa, Homo sapiens
MQEQLERNRQCQQNLDAASKRLREKEDSLAQAGETINALKGRISELQWSVMDQEMRVKRLESEKQELQEQLDLQHKKCQEANQKIQELQASQEARADHEQQIKDLEQKLSLQEQDAAIVKNMKSELVRLPRLERELKQLREESAHLREMRETNGLLQEELEGLQRKLGRQEKMQETLVGLELENERLLAKLQSWERLDQTMGLSI

SEQ ID NO: 8262 - protein, 213 aa, Homo sapiens
MQMELSHKRARVELERAASTSARNYEREVDRNQELLTRIRQLQEREAGAEEKMQEQLERNRQCQQNLDAASKRLREKEDSLAQAGETINALKGRISELQWSVMDQEMRVKRLESEKQELQEQLDLQHKKCQEANQKIQELQASQEARADHEQQIKDLEQKLSLQEQDAAIVKNMKSELVRLPRLERELKQLREESAHLREMRETNGLLQEELE

SEQ ID NO: 8263 - protein, 41 aa, Homo sapiens
MRAILGSYDSELTPAEYSPQLTRRMREAEDMVQKVHSHSAE

SEQ ID NO: 8264 - protein, 80 aa, Homo sapiens
MRAILGSYDSELTPAEYSPQLTRRMREAEDMVQKVHSHSAEMEAQLSQALEELGGQKQRADMLEMELKMLKSQSSSAEQS

SEQ ID NO: 8265 - protein, 266 aa, Homo sapiens
MRELEFAKLECCLAWQLQASRRELEMELKMLKSQSSSAEQSFLFSREEADTLRLKVEELEGERSRLEEEKRMLEAQLERRALQGDYDQSRTKVLHMSLNPTSVARQRLREDHSQLQAECERLRGLLRAMERGGTVPADLEAAAASLPSSKEVAELKKQVESAELKNQRLKEVFQTKIQEFRKACYTLTGYQIDITTENQYRLTSLYAEHPGDCLIFKATSPSGSKMQLLETEFSHTVGELIEVHLRRQDSIPAFLSSLTLELFSRQ

SEQ ID NO: 8266 - protein, 122 aa, Homo sapiens
MSLNPTSVARQRLREDHSQLQAECERLRGLLRAMERGGTVPADLEAAAASLPSSKEVAELKKQVESAELKNQRLKEVFQTKIQEFRKACYTLTGYQIDITTENQYRLTSLYAEHPGDCLIFK

SEQ ID NO: 8267 - protein, 199 aa, Homo sapiens
MVSLRPCLPGLPTQHLEEPCPGDYSARGLEKARQQLQEELRQVSGQLLEERKKRETHEALARRLQKRVLLLTKERDGMRAILGSYDSELTPAEYSPQLTRRMREAEDMVQKVHSHSAEMEAQLSQALEELGGQKQRADMLEMELKMLKSQSSSAEQSFLFSREEADTLRLKVEELEGERSRLEEEKRMLEAQLERRALQ

SEQ ID NO: 8268 - protein, 58 aa, Homo sapiens
MIFLTALPLFWIMISASRGGHWGAWMPSSISAFEGTCVSIPCRFDFPDELRPAVVHGV

SEQ ID NO: 8269 - protein, 158 aa, Homo sapiens
MIFLTALPLFWIMISASRGGHWGAWMPSSISAFEGTCVSIPCRFDFPDELRPAVVHGVWYFNSPYPKNYPPVVFKSRTQVVHESFQGRSRLLGDLGLRNCTLLLSNVSPELGGKYYFRGDLGGYNQYTFSEHSVLDIVNTPNIVVPPEVVAGTEVEVS

SEQ ID NO: 8270 - protein, 582 aa, Homo sapiens
MIFLTALPLFWIMISASRGGHWGAWMPSSISAFEGTCVSIPCRFDFPDELRPAVVHGVWYFNSPYPKNYPPVVFKSRTQVVHESFQGRSRLLGDLGLRNCTLLLSNVSPELGGKYYFRGDLGGYNQYTFSEHSVLDIVNTPNIVVPPEVVAGTEVEVSCMVPDNCPELRPELSWLGHEGLGEPAVLGRLREDEGTWVQVSLLHFVPTREANGHRLGCQASFPNTTLQFEGYASMDVKYPPVIVEMNSSVEAIEGSHVSLLCGADSNPPPLLTWMRDGTVLREAVAESLLLELEEVTPAEDGVYACLAENAYGQDNRTVGLSVMYAPWKPTVNGTMVAVEGETVSILCSTQSNPDPILTIFKEKQILSTVIYESELQLELPAVSPEDDGEYWCVAENQYGQRATAFNLSVEFAPVLLLESHCAAARDTVQCLCVVKSNPEPSVAFELPSRNVTVNESEREFVYSERSGLVLTSILTLRGQAQAPPRVICTARNLYGAKSLELPFQGAHRLMWAKIGPVGAVVAFAILIAIVCYITQTRRKKNVTESPSFSAGDNPPVLFSSDFRISGAPEKYESKEVSTLESH

SEQ ID NO: 8271 - protein, 626 aa, Homo sapiens
MIFLTALPLFWIMISASRGGHWGAWMPSSISAFEGTCVSIPCRFDFPDELRPAVVHGVWYFNSPYPKNYPPVVFKSRTQVVHESFQGRSRLLGDLGLRNCTLLLSNVSPELGGKYYFRGDLGGYNQYTFSEHSVLDIVNTPNIVVPPEVVAGTEVEVSCMVPDNCPELRPELSWLGHEGLGEPAVLGRLREDEGTWVQVSLLHFVPTREANGHRLGCQASFPNTTLQFEGYASMDVKYPPVIVEMNSSVEAIEGSHVSLLCGADSNPPPLLTWMRDGTVLREAVAESLLLELEEVTPAEDGVYACLAENAYGQDNRTVGLSVMYAPWKPTVNGTMVAVEGETVSILCSTQSNPDPILTIFKEKQILSTVIYESELQLELPAVSPEDDGEYWCVAENQYGQRATAFNLSVEFAPVLLLESHCAAARDTVQCLCVVKSNPEPSVAFELPSRNVTVNESEREFVYSERSGLVLTSILTLRGQAQAPPRVICTARNLYGAKSLELPFQGAHRLMWAKIGPVGAVVAFAILIAIVCYITQTRRKKNVTESPSFSAGDNPPVLFSSDFRISGAPEKYESERRLGSERRLLGLRGEPPELDLSYSHSDLGKRPTKDSYTLTEELAEYAEIRVK

SEQ ID NO: 8272 - protein, 131 aa, Homo sapiens
MPSSISAFEGTCVSIPCRFDFPDELRPAVVHGVWYFNSPYPKNYPPVVFKSRTQVVHESFQGRSRLLGDLGLRNCTLLLSNVSPELGGKYYFRGDLGGYNQYTFSEHSVLDIVNTPNIVVPPEVVAGTEVE

SEQ ID NO: 8273 - protein, 601 aa, Homo sapiens
MPSSISAFEGTCVSIPCRFDFPDELRPAVVHGVWYFNSPYPKNYPPVVFKSRTQVVHESFQGRSRLLGDLGLRNCTLLLSNVSPELGGKYYFRGDLGGYNQYTFSEHSVLDIVNTPNIVVPPEVVAGTEVEVSCMVPDNCPELRPELSWLGHEGLGEPAVLGRLREDEGTWVQVSLLHFVPTREANGHRLGCQASFPNTTLQFEGYASMDVKYPPVIVEMNSSVEAIEGSHVSLLCGADSNPPPLLTWMRDGTVLREAVAESLLLELEEVTPAEDGVYACLAENAYGQDNRTVGLSVMYAPWKPTVNGTMVAVEGETVSILCSTQSNPDPILTIFKEKQILSTVIYESELQLELPAVSPEDDGEYWCVAENQYGQRATAFNLSVEFAPVLLLESHCAAARDTVQCLCVVKSNPEPSVAFELPSRNVTVNESEREFVYSERSGLVLTSILTLRGQAQAPPRVICTARNLYGAKSLELPFQGAHRLMWAKIGPVGAVVAFAILIAIVCYITQTRRKKNVTESPSFSAGDNPPVLFSSDFRISGAPEKYESERRLGSERRLLGLRGEPPELDLSYSHSDLGKRPTKDSYTLTEELAEYAEIRVK

SEQ ID NO: 8274 - protein, 134 aa, Homo sapiens
MAARWRFWCVSVTMVVALLIVCDVPSASAQRKKEMVLSEKVSQLMEWTNKRPVIRMNGDKFRRLVKAPPRNYSVIVMFTALQLHRQCVVCKQADEEFQILANSWRYSSAFTNRIFFAMVDFDEGSDVFQMFQVF

SEQ ID NO: 8275 - protein, 335 aa, Homo sapiens
MAARWRFWCVSVTMVVALLIVCDVPSASAQRKKEMVLSEKVSQLMEWTNKRPVIRMNGDKFRRLVKAPPRNYSVIVMFTALQLHRQCVVCKQADEEFQILANSWRYSSAFTNRIFFAMVDFDEGSDVFQMLNMNSAPTFINFPAKGKPKRGDTYELQVRGFSAEQIARWIADRTDVNIRVIRPPNYAGPLMLGLLLAVIGGLVYLRRSNMEFLFNKTGWAFAALCFVLAMTSGQMWNHIRGPPYAHKNPHTGHVNYIHGSSQAQFVAETHIVLLFNGGVTLGMVLLCEAATSDMDIGKRKIMCVAGIGLVVLFFSWMLSIFRSKYHGYPYSFLMS

SEQ ID NO: 8276 - protein, 367 aa, Homo sapiens
MRKGKGPICLFSRPTLRPSRSKVSLIEGRGANMAARWRFWCVSVTMVVALLIVCDVPSASAQRKKEMVLSEKVSQLMEWTNKRPVIRMNGDKFRRLVKAPPRNYSVIVMFTALQLHRQCVVCKQADEEFQILANSWRYSSAFTNRIFFAMVDFDEGSDVFQMLNMNSAPTFINFPAKGKPKRGDTYELQVRGFSAEQIARWIADRTDVNIRVIRPPNYAGPLMLGLLLAVIGGLVYLRRSNMEFLFNKTGWAFAALCFVLAMTSGQMWNHIRGPPYAHKNPHTGHVNYIHGSSQAQFVAETHIVLLFNGGVTLGMVLLCEAATSDMDIGKRKIMCVAGIGLVVLFFSWMLSIFRSKYHGYPYSFLMS

SEQ ID NO: 8277 - protein, 367 aa, Homo sapiens; identical to SEQ ID NO: 8276

SEQ ID NO: 8278 - protein, 234 aa, Homo sapiens
MGPGGRVARLLAPLMWRRAVSSVAGSAVGAEPGLRLLAVQRLPVGAAFCRACQTPNFVRGLHSEPGLEERAEGTVNEGRPESDAADHTGPKFDIDMMVSLLRQENARDICVIQVPPEMRYTDYFVIVSGTSTRHLHAMAFYVVKMYKHLKCKRDPHVKIEGKDTDDWLCVDFGSMVIHLMLPETREIYELEKLWTLRSYDDQLAQIAPETVPEDFILGIEDDTSSVTPVELKCE

SEQ ID NO: 8279 - protein, 686 aa, Homo sapiens
MLLRGVLLALQALQLAGALDLPAGSCAFEESTCGFDSVLASLPWILNEEGHYIYVDTSFGKQGEKAVLLSPDLQAEEWSCLRLVYQITTSSESLSDPSQLNLYMRFEDESFDRLLWSAKEPSDSWLIASLDLQNSSKKFKILIEGVLGQGNTASIALFEIKMTTGYCIECDFEENHLCGFVNRWNPNVNWFVGGGSIRNVHSILPQDHTFKSELGHYMYVDSVYVKHFQEVAQLISPLTTAPMAGCLSFYYQIQQGNDNVFSLYTRDVAGLYEEIWKADRPGNAAWNLAEVEFSAPYPMEVIFEVAFNGPKGGYVALDDISFSPVHCQNQTELLFSAVEASCNFEQDLCNFYQDKEGPGWTRVKVKPNMYRAGDHTTGLGYYLLANTKFTSQPGYIGRLYGPSLPGNLQYCLRFHYAIYGFLKMSDTLAVYIFEENHVVQEKIWSVLESPRGVWMQAEITFKKPMPTKVVFMSLCKSFWDCGLVALDDITIQLGSCSSSEKLPPPPGECTFEQDECTFTQEKRNRSSWHRRRGETPTSYTGPKGDHTTGVGYYMYIEASHMVYGQKARLLSRPLRGVSGKHCLTFFYHMYGGGTGLLSVYLKKEEDSEESLLWRRRGEQSISWLRALIEYSCERQHQIIFEAIRGVSIRSDIAIDDVKFQAGPCGEMEDTTQQSSGYSEDLNEIEY

SEQ ID NO: 8280 - protein, 165 aa, Homo sapiens [sequence omitted]

SEQ ID NO: 8281 - protein, 1010 aa, Homo sapiens
MGAYARASGVCARGCLDSAGPWTMSRALRPPLPPLCFFLLLLAAAGARAGGYETCPTVQPNMLNVHLLPHTHDDVGWLKTVDQYFYGIKNDIQHAGVQYILDSVISALLADPTRRFIYVEIAFFSRWWHQQTNATQEVVRDLVRQGRLEFANGGWVMNDEAATHYGAIVDQMTLGLRFLEDTFGNDGRPRVAWHIDPFGHSREQASLFAQMGFDGFFFGRLDYQDKWVRMQKLEMEQVWRASTSLKPPTADLFTGVLPNGYNPPRNLCWDVLCVDQPLVEDPRSPEYNAKELVDYFLNVATAQGRYYRTNHTVMTMGSDFQYENANMWFKNLDKLIRLVNAQAKGSSVHVLYSTPACYLWELNKANLTWSVKHDDFFPYADGPHQFWTGYFSSRPALKRYERLSYNFLQVCNQLEALVGLAANVGPYGSGDSAPLNEAMAVLQHHDAVSGTSRQHVANDYARQLAAGWGPCEVLLSNALARLRGFKDHFTFCQQLNISICPLSQTAARFQVIVYNPLGRKVNWMVRLPVSEGVFVVKDPNGRTVPSDVVIFPSSDSQAHPPELLFSASLPALGFSTYSVAQVPRWKPQARAPQPIPRRSWSPALTIENEHIRATFDPDTGLLMEIMNMNQQLLLPVRQTFFWYNASIGDNESDQASGAYIFRPNQQKPLPVSRWAQIHLVKTPLVQEVHQNFSAWCSQVVRLYPGQRHLELEWSVGPIPVGDTWGKEVISRFDTPLETKGRFYTDSNGREILERRRDYRPTWKLNQTEPVAGNYYPVNTRIYITDGNMQLTVLTDRSQGGSSLRDGSLELMVHRRLLKDDGRGVSEPLMENGSGAWVRGRHLVLLDTAQAAAAGHRLLAEQEVLAPQVVLAPGGGAAYNLGAPPRTQFSGLRRDLPPSVHLLTLASWGPEMVLLRLEHQFAVGEDSGRNLSAPVTLNLRDLFSTFTITRLQETTLVANQLREAASRLKWTTNTGPTPHQTPYQLDPANITLEPMEIRTFLASVQWKEVDG

SEQ ID NO: 8282 - protein, 1011 aa, Homo sapiens
MGAYARASGVCARGCLDSAGPWTMSRALRPPLPPLCFFLLLLAAAGARAGGYETCPTVQPNMLNVHLLPHTHDDVGWLKTVDQYFYGIKNDIQHAGVQYILDSVISALLADPTRRFIYVEIAFFSRWWHQQTNATQEVVRDLVRQGRLEFANGGWVMNDEAATHYGAIVDQMTLGLRFLEDTFGNDGRPRVAWHIDPFGHSREQASLFAQMGFDGFFFGRLDYQDKWVRMQKLEMEQVWRASTSLKPPTADLFTGVLPNGYNPPRNLCWDVLCVDQPLVEDPRSPEYNAKELVDYFLNVATAQGRYYRTNHTVMTMGSDFQYENANMWFKNLDKLIRLVNAQQAKGSSVHVLYSTPACYLWELNKANLTWSVKHDDFFPYADGPHQFWTGYFSSRPALKRYERLSYNFLQVCNQLEALVGLAANVGPYGSGDSAPLNEAMAVLQHHDAVSGTSRQHVANDYARQLAAGWGPCEVLLSNALARLRGFKDHFTFCQQLNISICPLSQTAARFQVIVYNPLGRKVNWMVRLPVSEGVFVVKDPNGRTVPSDVVIFPSSDSQAHPPELLFSASLPALGFSTYSVAQVPRWKPQARAPQPIPRRSWSPALTIENEHIRATFDPDTGLLMEIMNMNQQLLLPVRQTFFWYNASIGDNESDQASGAYIFRPNQQKPLPVSRWAQIHLVKTPLVQEVHQNFSAWCSQVVRLYPGQRHLELEWSVGPIPVGDTWGKEVISRFDTPLETKGRFYTDSNGREILERRRDYRPTWKLNQTEPVAGNYYPVNTRIYITDGNMQLTVLTDRSQGGSSLRDGSLELMVHRRLLKDDGRGVSEPLMENGSGAWVRGRHLVLLDTAQAAAAGHRLLAEQEVLAPQVVLAPGGGAAYNLGAPPRTQFSGLRRDLPPSVHLLTLASWGPEMVLLRLEHQFAVGEDSGRNLSAPVTLNLRDLFSTFTITRLQETTLVANQLREAASRLKWTTNTGPTPHQTPYQLDPANITLEPMEIRTFLASVQWKEVDG

SEQ ID NO: 8283 - protein, 172 aa, Homo sapiens
MGAYARASGVCARGCLDSAGPWTMSRALRPPLPPLCFFLLLLAAAGARAGGYEVCVFGVPVQTCPTVQPNMLNVHLLPHTHDDVGWLKTVDQYFYGIKNDIQHAGVQYILDSVISALLADPTRRFIYVEIAFFSRWWHQQTNATQEVVRDLVRQGRLEFANGGWVMNDEAAT

SEQ ID NO: 8284 - protein, 140 aa, Homo sapiens
  VARIANT 1: note = misc_feature - Xaa can be any naturally occurring amino acid
XLAAGWGPCEVLLSNALARLRGFKDHFTFCQQLNISICPLSQTAARFQVIVYNPLGRKVNWMVRLPVSEGVFVVKDPNGRTVPSDLRQPGAPSGAAVLSLTARPGLQHLFSSPGASLEAPGPRTTAHPQKILVPCFNHRK

SEQ ID NO: 8285 - protein, 67 aa, Homo sapiens
  VARIANT 1: note = misc_feature - Xaa can be any naturally occurring amino acid
XSDVVIFPSSDSQAHPPELLFSASLPALGFSTYSVAQVPRWKPQARAPQPIPRRSWSPALTIENEGC

SEQ ID NO: 8286 - protein, 1009 aa, Homo sapiens
MGQLCWLPLLAPLLLLRPPGVQSAGPIRAFVVPHSHMDVGWVYTVQESMRAYAANVYTSVVEELARGQQRRFIAVEQEFFRLWWDGVASDQQKYQVRQLLEEGRLEFVIGGQVMHDEAVTHLDDQILQLTEGHGFLYETFGIRPQFSWHVDPFGASATTPTLFALAGFNAHLGSRIDYDLKAAMQEARGLQFVWRGSPSLSERQEIFTHIMDQYSYCTPSHIPFSNRSGFYWNGVAVFPKPPQDGVYPNMSEPVTPANINLYAEALVANVKQRAAWFRTPHVLWPWGCDKQFFNASVQFANMDPLLDHINSHAAELGVSVQYATLGDYFRALHALNVTWRVRDHHDFLPYSTEPFQAWTGFYTSRSSLKGLARRASALLYAGESMFTRYLWPAPRGHLDPTWALQQLQQLRWAVSEVQHHDAITGTESPKVRDMYATHLASGMLGMRKLMASIVLDELQPQAPMAASSDAGPAGHFASVYNPLAWTVTTIVTLTVGFPGVRVTDEAGHPVPSQIQNSTETPSAYDLLILTTIPGLSYRHYNIRPTAGAQEGTQEPAATVASTLQFGRRLRRRTSHAGRYLVPVANDCYIVLLDQDTNLMHSIWERQSNRTVRVTQEFLEYHVNGDVKQGPISDNYLFTPGKAAVPAWEAVEMEIVAGQLVTEIRQYFYRNMTAQNYTYAIRSRLTHVPQGHDGELLCHRIEQEYQAGPLELNREAVLRTSTNLNSQQVIYSDNNGYQMQRRPYVSYVNNSIARNYYPMVQSAFMEDGKSRLVLLSERAHGISSQGNGQVEVMLHRRLWNNFDWDLGYNLTLNDTSVVHPVLWLLLGSWSLTTALRQRSALALQHRPVVLFGDLAGTAPKLPGPQQQEAVTLPPNLHLQILSIPGWRYSSNHTEHSQNLRKGHRGEAQADLRRVLLRLYHLYEVGEDPVLSQPVTVNLEAVLQALGSVVAVEERSLTGTWDLSMLHRWSWRTGPGRHRGDTTSPSRPPGGPIITVHPKEIRTFFIHFQQQ

SEQ ID NO: 8287 - protein, 958 aa, Homo sapiens
MGQLCWLPLLAPLLLLRPPGVQSAGPIRAFVVPHSHMDVGWVYTVQESMRAYAANVYTSVVEELARGQQRRFIAVEQEFFRLWWDGVASDQQKYQVRQLLEEGRLEFVIGGQVMHDEAVTHLDDQILQLTEGHGFLYETFGIRPQFSWHVDPFGASATTPTLFALAGFNAHLGSRIDYDLKAAMQEARGLQFVWRGSPSLSERQEIFTHIMDQYSYCTPSHIPFSNRSGFYWNGVAVFPKPPQDGVYPNMSEPVTPANINLYAELGVSVQYATLGDYFRALHALNVTWRVRDHHDFLPYSTEPFQAWTGFYTSRSSLKGLARRASALLYAGESMFTRYLWPAPRGHLDPTWALQQLQQLRWAVSEVQHHDAITGTESPKVRDMYATHLASGMLGMRKLMASIVLDELQPQAPMAASSDAGPAGHFASVYNPLAWTVTTIVTLTVGFPGVRVTDEAGHPVPSQIQNSTETPSAYDLLILTTIPGLSYRHYNIRPTAGAQEGTQEPAATVASTLQFGRRLRRRTSHAGRYLVPVANDCYIVLLDQDTNLMHSIWERQSNRTVRVTQEFLEYHVNGDVKQGPISDNYLFTPGKAAVPAWEAVEMEIVAGQLVTEIRQYFYRNMTAQNYTYAIRSRLTHVPQGHDGELLCHRIEQEYQAGPLELNREAVLRTSTNLNSQQVIYSDNNGYQMQRRPYVSYVNNSIARNYYPMVQSAFMEDGKSRLVLLSERAHGISSQGNGQVEVMLHRRLWNNFDWDLGYNLTLNDTSVVHPVLWLLLGSWSLTTALRQRSALALQHRPVVLFGDLAGTAPKLPGPQQQEAVTLPPNLHLQILSIPGWRYSSNHTEHSQNLRKGHRGEAQADLRRVLLRLYHLYEVGEDPVLSQPVTVNLEAVLQALGSVVAVEERSLTGTWDLSMLHRWSWRTGPGRHRGDTTSPSRPPGGPIITVHPKEIRTFFIHFQQQ

SEQ ID NO: 8288 - protein, 953 aa, Homo sapiens
  VARIANT 1: note = misc_feature - Xaa can be any naturally occurring amino acid
XQLCWLPLLAPLLLLRPPGVQSAGPIRAFVVPHSHMDVGWVYTVQESMRAYAANVYTSVVEELARGQQRRFIAVEQEFFRLWWDGVASDQQKYQVRQLLEEGRLEFVIGGQVMHDEAVTHLDDQILQLTEGHGFLYETFGIRPQFSWHVDPFGASATTPTLFALAGFNAHLGSRIDYDLKAAMQEARGLQFVWRGSPSLSERQEIFTHIMDQYSYCTPSHIPFSNRSGFYWNGVAVFPKPPQDGVYPNMSEPVTPANINLYAEALVANVKQRAAWFRTPHVLWPWGCDKQFFNASVQFANMDPLLDHINSHAAELGVSVQYATLGDYFRALHALNVTWRVRDHHDFLPYSTEPFQAWTGFYTSRSSLKGLARRASALLYAGESMFTRYLWPAPRGHLDPTWALQQLQQLRWAVSEVQHHDAITGTESPKVRDMYATHLASGMLGMRKLMASIVLDELQPQAPMAASSDAGPAGHFASVYNPLAWTVTTIVTLTVGFPGVRVTDEAGHPVPSQIQNSTETPSAYDLLILTTIPGLSYRHYNIRPTAGAQEGTQEPAATVASTLQFGRRLRRRTSHAGRYLVPVANDCYIVLLDQDTNLMHSIWERQSNRTVRVTQEFLEYHVNGDVKQGPISDNYLFTPGKAAVPAWEAVEMEIVAGQLVTEIRQYFYRNMTAQNYTYAIRSRLTHVPQGHDGELLCHRIEQEYQAGPLELNREAVLRTSTNLNSQQVIYSDNNGYQMQRRPYVSYVNNSIARNYYPMVQSAFMEDGKSRLVLLSERAHGISSQGNGQVEVMLHRRLWNNFDWDLGYNLTLNDTSVVHPVLWLLLGSWSLTTALRQRSALALQHRPVVLFGDLAGTAPKLPGPQQQEAVTLPPNLHLQILSIPGWRYSSNHTEHSQNLRKGHRGEAQADLRRVLLRLYHLYEVGEDPVLSQPVTVNLEVNFPTPIQTISQGSKP

SEQ ID NO: 8289 - protein, 822 aa, Homo sapiens
MRLHLLLLLALCGAGTTAAELSYSLRGNWSICNGNGSLELPGAVPGCVHSALFQQGLIQDSYYRFNDLNYRWVSLDNWTYSKEFKIPFEISKWQKVNLILEGVDTVSKILFNEVTIGETDNMFNRYEQCSFSWDWGPSFPTQGIWKDVRIEAYNICHLNYFTFSPIYDKSAQEWNLEIESTFDVVSSKPVGGQVIVAIPKLQTQQTYSIELQPGKRIVELFVNISKNITVETWWPHGHGNQTGYNMTVLFELDGGLNIEKSAKVYFRTVELIEEPIKGSPGLSFYFKINGFPIFLKGSNWIPADSFQDRVTSELLRLLLQSVVDANMNTLRVWGGGIYEQDEFYELCDELGIMVWQDFMFACALYPTDQGFLDSVTAEVAYQIKRLKSHPSIIIWSGNNENEEALMMNWYHISFTDRPIYIKDYVTLYVKNIRELVLAGDKSRPFITSSPTNGAETVAEAWVSQNPNSNYFGDVHFYDYISDCWNWKVFPKARFASEYGYQSWPSFSTLEKVSSTEDWSFNSKFSLHRQHHEGGNKQMLYQAGLHFKLPQSTDPLRTFKDTIYLTQVMQAQCVKTETEFYRRSRSEIVDQQGHTMGALYWQLNDIWQAPSWASLEYGGKWKMLHYFAQNFFAPLLPVGFENENTFYIYGVSDLHSDYSMTLSVRVHTWSSLEPVCSRVTERFVMKGGEAVCLYEEPVSELLRRCGNCTRESCVVSFYLSADHELLSPTNYHFLSSPKEAVGLCKAQITAIISQQGDIFVFDLETSAVAPFVWLDVGSIPGRFSDNGFLMTEKTRTILFYPWEPTSKNELEQSFHVTSLTDIY

SEQ ID NO: 8290 - protein, 879 aa, Homo sapiens
MRLHLLLLLALCGAGTTAAELSYSLRGNWSICNGNGSLELPGAVPGCVHSALFQQGLIQDSYYRFNDLNYRWVSLDNWTYSKEFKIPFEISKWQKVNLILEGVDTVSKILFNEVTIGETDNMFNRYSFDITNVVRDVNSIELRFQSAVLYAAQQSKAHTRYQVPPDCPPLVQKGECHVNFVRKEQCSFSWDWGPSFPTQGIWKDVRIEAYNICHLNYFTFSPIYDKSAQEWNLEIESTFDVVSSKPVGGQVIVAIPKLQTQQTYSIELQPGKRIVELFVNISKNITVETWWPHGHGNQTGYNMTVLFELDGGLNIEKSAKVYFRTVELIEEPIKGSPGLSFYFKINGFPIFLKGSNWIPADSFQDRVTSELLRLLLQSVVDANMNTLRVWGGGIYEQDEFYELCDELGIMVWQDFMFACALYPTDQGFLDSVTAEVAYQIKRLKSHPSIIIWSGNNENEEALMMNWYHISFTDRPIYIKDYVTLYVKNIRELVLAGDKSRPFITSSPTNGAETVAEAWVSQNPNSNYFGDVHFYDYISDCWNWKVFPKARFASEYGYQSWPSFSTLEKVSSTEDWSFNSKFSLHRQHHEGGNKQMLYQAGLHFKLPQSTDPLRTFKDTIYLTQVMQAQCVKTETEFYRRSRSEIVDQQGHTMGALYWQLNDIWQAPSWASLEYGGKWKMLHYFAQNFFAPLLPVGFENENTFYIYGVSDLHSDYSMTLSVRVHTWSSLEPVCSRVTERFVMKGGEAVCLYEEPVSELLRRCGNCTRESCVVSFYLSADHELLSPTNYHFLSSPKEAVGLCKAQITAIISQQGDIFVFDLETSAVAPFVWLDVGSIPGRFSDNGFLMTEKTRTILFYPWEPTSKNELEQSFHVTSLTDIY

SEQ ID NO: 8291 - protein, 509 aa, Homo sapiens
MRLHLLLLLALCGAGTTAAELSYSLRGNWSICNGNGSLELPGAVPGCVHSALFQQGLIQDSYYRFNDLNYRWVSLDNWTYSKEFKIPFEISKWQKVNLILEGVDTVSKILFNEVTIGETDNMFNRYSFDITNVVRDVNSIELRFQSAVLYAAQQSKAHTRYQVPPDCPPLVQKGECHVNFVRKEQCSFSWDWGPSFPTQGIWKDVRIEAYNICHLNYFTFSPIYDKSAQEWNLEIESTFDVVSSKPVGGQVIVAIPKLQTQQTYSIELQPGKRIVELFVNISKNITVETWWPHGHGNQTGYNMTVLFELDGGLNIEKSAKVYFRTVELIEEPIKGSPGLSFYFKINGFPIFLKGSNWIPADSFQDRVTSELLRLLLQSVVDANMNTLRVWGGGIYEQDEFYELCDELGIMVWQDFMFACALYPTDQGFLDSVTAEVAYQIKRLKSHPSIIIWSGNNENEEALMMNWYHISFTDRPIYIKDYVTLYVKNIRELVLACGKMPDTIDLTNTC

SEQ ID NO: 8292 - protein, 886 aa, Homo sapiens
MRLHLLLLLALCGAGTTAAELSYSLRGNWSICNGNGSLELPGAVPGCVHSALFQQGLIQDSYYRFNDLNYRWVSLDNWTYSKEFKIPFEISKWQKVNLILEGVDTVSKILFNEVTIGETDNMFNRYSFDITNVVRDVNSIELRFQSAVLYAAQQSKAHTRYQVPPDCPPLVQKGECHVNFVRKEQCSFSWDWGPSFPTQGIWKDVRIEAYNICHLNYFTFSPIYDKSAQEWNLEIESTFDVVSSKPVGGQVIVAIPKLQTQQTYSIELQPGKRIVELFVNISKNITVETWWPHGHGNQTGYNMTVLFELDGGLNIEKSAKVYFRTVELIEEPIKGSPGLSFYFKINGFPIFLKGSNWIPADSFQDRVTSELLRLLLQSVVDANMNTLRVWGGGIYEQDEFYELCDELGIMVWQDFMFACALYPTDQGFLDSVTAEVAYQIKRLKSHPSIIIWSGNNENEEALMMNWYHISFTDRPIYIKDYVTLYVKNIRELVLAGDKSRPFITSSPTNGAETVAEAWVSQNPNSNYFGDVHFYDYISDCWNWKVFPKARFASEYGYQSWPSFSTLEKVSSTEDWSFNSKFSLHRQHHEGGNKQMLYQAGLHFKLPQSTDPLRTFKDTIYLTQVMQAQCVKTETEFYRRSRSEIVDQQGHTMGALYWQLNDIWQAPSWASLEYGGKWKMLHYFAQNFFAPLLPVGFENENTFYIYGVSDLHSDYSMTLSVRVHTWSSLEPVCSRVTERFVMKGGEAVCLYEEPVSELLRRCGNCTRESCVVSFYLSADHELLSPTNYHFLSSPKEAVGLCKAQITGASLNPRLCSQTYREEISNPTKITSISMTPASLSALVLEQQKLMLPWQLPGQAGMSRMNLVPVAALGPSLEQLGGHHLSAR

SEQ ID NO: 8293 - protein, 397 aa, Homo sapiens
MRLHLLLLLALCGAGTTAAELSYSLRGNWSICNGNGSLELPGAVPGCVHSALFQQGLIQDSYYRFNDLNYRWVSLDNWTYSKEFKIPFEISKWQKVNLILEGVDTVSKILFNEVTIGETDNMFNRYSFDITNVVRDVNSIELRFQSAVLYAAQQSKAHTRYQVPPDCPPLVQKGECHVNFVRKEQCSFSWDWGPSFPTQGIWKDVRIEAYNICHLNYFTFSPIYDKSAQEWNLEIESTFDVVSSKPVGGQVIVAIPKLQTQQTYSIELQPGKRIVELFVNISKNITVETWWPHGHGNQTGYNMTVLFELDGGLNIEKSAKVYFRTVELIEEPIKGSPGLSFYFKINGFPIFLKGSNWIPADSFQDRVTSEFWGWVGCGPSAQLGQLVTAPFTVCCGC

SEQ ID NO: 8294 - protein, 413 aa, Homo sapiens
MRLHLLLLLALCGAGTTAAELSYSLRGNWSICNGNGSLELPGAVPGCVHSALFQQGLIQDSYYRFNDLNYRWVSLDNWTYSKEFKIPFEISKWQKVNLILEGVDTVSKILFNEVTIGETDNMFNRYSFDITNVVRDVNSIELRFQSAVLYAAQQSKAHTRYQVPPDCPPLVQKGECHVNFVRKEQCSFSWDWGPSFPTQGIWKDVRIEAYNICHLNYFTFSPIYDKSAQEWNLEIESTFDVVSSKPVGGQVIVAIPKLQTQQTYSIELQPGKRIVELFVNISKNITVETWWPHGHGNQTGYNMTVLFELDGGLNIEKSAKVYFRTVELIEEPIKGSPGLSFYFKINGFPIFLKGSNWIPADSFQDRVTSELLRLLLQSVVDANMNTLRVWGGGIYEQDEFYELCDELGIMVCI

SEQ ID NO: 8295 - protein, 879 aa, Homo sapiens; identical to SEQ ID NO: 8290

SEQ ID NO: 8296 - protein, 365 aa, Homo sapiens
MRLHLLLLLALCGAGTTAAELSYSLRGNWSICNGNGSLELPGAVPGCVHSALFQQGLIQDSYYRFNDLNYRWVSLDNWTYSKEFKIPFEISKWQKVNLILEGVDTVSKILFNEVTIGETDNMFNRYSFDITNVVRDVNSIELRFQSAVLYAAQQSKAHTRYQVPPDCPPLVQKGECHVNFVRKEQCSFSWDWGPSFPTQGIWKDVRIEAYNICHLNYFTFSPIYDKSAQEWNLEIESTFDVVSSKPVGGQVIVAIPKLQTQQTYSIELQPGKRIVELFVNISKNITVETWWPHGHGNQTGYNMTVLFELDGGLNIEKSAKSWRLESKIKVSAELCSFRRLWERILPCPFQFLIIAGNPWLVDASL

SEQ ID NO: 8297 - protein, 925 aa, Homo sapiens
MRLHLLLLLALCGAGTTAAELSYSLRGNWSICNGNGSLELPGAVPGCVHSALFQQGLIQDSYYRFNDLNYRWVSLDNWTYSKEFKIPFEISKWQKVNLILEGVDTVSKILFNEVTIGETDNMFNRYSFDITNVVRDVNSIELRFQSAVLYAAQQSKAHTRYQVPPDCPPLVQKGECHVNFVRKEQCSFSWDWGPSFPTQGIWKDVRIEAYNICHLNYFTFSPIYDKSAQEWNLEIESTFDVVSSKPVGGQVIVAIPKLQTQQTYSIELQPGKRIVELFVNISKNITVETWWPHGHGNQTGYNMTVLFELDGGLNIEKSAKVYFRTVELIEEPIKGSPGLSFYFKINGFPIFLKGSNWIPADSFQDRVTSELFHKKMKFFSRHSHGIIGSIFFLFKCSSPLPAGAGLAVVLQPNWANWLRLLLQSVVDANMNTLRVWGGGIYEQDEFYELCDELGIMVWQDFMFACALYPTDQGFLDSVTAEVAYQIKRLKSHPSIIIWSGNNENEEALMMNWYHISFTDRPIYIKDYVTLYVKNIRELVLAGDKSRPFITSSPTNGAETVAEAWVSQNPNSNYFGDVHFYDYISDCWNWKVFPKARFASEYGYQSWPSFSTLEKVSSTEDWSFNSKFSLHRQHHEGGNKQMLYQAGLHFKLPQSTDPLRTFKDTIYLTQVMQAQCVKTETEFYRRSRSEIVDQQGHTMGALYWQLNDIWQAPSWASLEYGGKWKMLHYFAQNFFAPLLPVGFENENTFYIYGVSDLHSDYSMTLSVRVHTWSSLEPVCSRVTERFVMKGGEAVCLYEEPVSELLRRCGNCTRESCVVSFYLSADHELLSPTNYHFLSSPKEAVGLCKAQITAIISQQGDIFVFDLETSAVAPFVWLDVGSIPGRFSDNGFLMTEKTRTILFYPWEPTSKNELEQSFHVTSLTDIY

SEQ ID NO: 8298 - protein, 62 aa, Homo sapiens
MRLHLLLLLALCGAGTTAAELSYSLRGNWSICNGNGSLELPGAVPGCVHSALFQQGLIQKEQ

SEQ ID NO: 8299 - protein, 68 aa, Homo sapiens
MRLHLLLLLALCGAGTTAAELSYSLRGNWSICNGNGSLELPGAVPGCVHSALFQQGLIQSLTLSPRLE

SEQ ID NO: 8300 - protein, 199 aa, Homo sapiens
MSKAEWDTDQWKTENYINESTEAQSKQKEQKSSEDSYYRFNDLNYRWVSLDNWTYSKEFKIPFEISKWQKVNLILEGVDTVSKILFNEVTIGETDNMFNRYSFDITNVVRDVNSIELRFQSAVLYAAQQSKAHTRYQVPPDCPPLVQKGECHVNFVRKEQCSFSWDWGPSFPTQGIWKDVRIEAYNICHLNYFTFSPIY

SEQ ID NO: 8301 - protein, 215 aa, Homo sapiens
SKILFNEVTIGETDNMFNRYSFDITNVVRDVNSIELRFQSAVLYAAQQSKAHTRYQVPPDCPPLVQKGECHVNFVRKEQCSFSWDWGPSFPTQGIWKDVRIEAYNICHLNYFTFSPIYDKSAQEWNLEIESTFDVVSSKPVGGQVIVAIPKLQTQQTYSIELQPGKRIVELFVNISKNITVETWWPHGHGNQTGYNMTVLFELDGGLNIEKSAKL

SEQ ID NO: 8302 - protein, 230 aa, Homo sapiens
  VARIANT 1: note = misc_feature - Xaa can be any naturally occurring amino acid
XDCPPLVQKGECHVNFVRKEQCSFSWDWGPSFPTQGIWKDVRIEAYNICHLNYFTFSPIYDKSAQEWNLEIESTFDVVSSKPVGGQVIVAIPKLQTQQTYSIELQPGKRIVELFVNISKNITVETWWPHGHGNQTGYNMTVLFELDGGLNIEKSAKVYFRTVELIEEPIKGSPGLSFYFKINGFPIFLKGSNWIPADSFQDRVTSEFWGWVGCGPSAQLGQLVSLPWCLC

SEQ ID NO: 8303 - protein, 263 aa, Homo sapiens
MADDNGEPSDDLVPAILDTAHQYSIQVAFHIQPYKGRDDITVHDNIKYIIDTYGSHGAFYRYKNSMGKSLPLFYIYDSYLTSPEAWAHLLTPNGPHSIRNTPYDGVFIALLVEEGHTHDILAAGFDGMYTYFASNGFSFGSSHQNWKAVKNFCDANNLMFIPSVGPGYIDTSIRPWNNHNTRNRVNGKYYETALQAALTVRPEIVSITSFNEWHEGTQIEKAIPKKTPTRLYLDYLPHQPSLYLELTRRWAEHFIKEKEQWLM

SEQ ID NO: 8304 - protein, 250 aa, Homo sapiens
MARRRRRACIALFLVLLFAFGTLMGLRTLKAPDGLPALGPGLELAPFERRPEGAPAPAARAPAAPAAPPPPPPPPRTADPGGSPGPAPAEAEPAPVQSLRVYSDLHAFYYSWYGSPRREGHYIHWDHVMVPHWDPKISASYPRGRHSPPDDLGSSFYPELGPYSSRDPEVLREHMTQLKEAAIGVLVLSWYPPGMADDNGEPSDDLVPAILDTAHQYSIQVAFHIQPYKGRDDITVHDNIKYIIDTTGKL

SEQ ID NO: 8305 - protein, 457 aa, Homo sapiens
MARRRRRACIALFLVLLFAFGTLMGLRTLKAPDGLPALGPGLELAPFERRPEGAPAPAARAPAAPAAPPPPPPPPRTADPGGSPGPAPAEAEPAPVQSLRVYSDLHAFYYSWYGSPRREGHYIHWDHVMVPHWDPKISASYPRGRHSPPDDLGSSFYPELGPYSSRDPEVLREHMTQLKEAAIGVLVLSWYPPGMADDNGEPSDDLVPAILDTAHQYSIQVAFHIQPYKGRDDITVHDNIKYIIDTYGSHGAFYRYKNSMGKSLPLFYIYDSYLTSPEAWAHLLTPNGPHSIRNTPYDGVFIALLVEEGHTHDILAAGFDGMYTYFASNGFSFGSSHQNWKAVKNFCDANNLMFIPSVGPGYIDTSIRPWNNHNTRNRVNGKYYETALQAALTVRPEIVSITSFNEWHEGTQIEKAIPKKTPTRLYLDYLPHQPSLYLELTRRWAEHFIKEKEQWLM

SEQ ID NO: 8306 - protein, 235 aa, Homo sapiens
MITGSPQMTWCPPFWTPPISTASRYGSHGAFYRYKNSMGKSLPLFYIYDSYLTSPEAWAHLLTPNGPHSIRNTPYDGVFIALLVEEGHTHDILAAGFDGMYTYFASNGFSFGSSHQNWKAVKNFCDANNLMFIPSVGPGYIDTSIRPWNNHNTRNRVNGKYYETALQAALTVRPEIVSITSFNEWHEGTQIEKAIPKKTPTRLYLDYLPHQPSLYLELTRRWAEHFIKEKEQWLM

SEQ ID NO: 8307 - protein, 130 aa, Homo sapiens
VYSDLHAFYYSWYGSPRREGHYIHWDHVMVPHWDPKISASYPRGRHSPPDDLGSSFYPELGPYSSRDPEVLREHMTQLKEAAIGVLVLSWYPPGMADDNGEPSDDLVPAILDTAHQYSIQVWLPWCILPL

SEQ ID NO: 8308 - protein, 185 aa, Homo sapiens
MRRMRRMWATQGLAVALALSVLPGSRALRPGDCEVCISYLGRFYQDLKDRDVTFSPATIENELIKFCREARGKENRLCYYIGATDDAATKIINEVSKPLAHHIPVEKICEKLKKKDSQICELKYDKQIDLSTVDLKKLRVKELKKILDDWGETCKGCAEKSDYIRKINELMPKYAPKAASARTDL

SEQ ID NO: 8309 - protein, 71 aa, Homo sapiens
  VARIANT 1: note = misc_feature - Xaa can be any naturally occurring amino acid
XATQGLAVALALSVLPGSRALRPGDCEVCISYLGRFYQDLKDRDVTFSPATIENELIKFCREARGKENRLV

SEQ ID NO: 8310 - protein, 397 aa, Homo sapiens
MFFGGEGSLTYTLGIRGNEPVYTSTQEDCINSCCSTKNISGDKACNLMIFDTRKTARQPNCYLFFCPNEEACPLKPAKGLMSYRIITDFPSLTRNLPSQELPQEDSLLHGQFSQAVTPLAHHHTDYSKPTDISWRDTLSQKFGSSDHLEKLFKMDEASAQLLAYKEKGHSQSSQFSSDQEIAHLLPENVSALPATVAVASPHTTSATPKPATLLPTNASVTPSGTSQPQLATTAPPVTTVTSQPPTTLISTVFTRAAATLQAMATTAVLTTTFQAPTDSKGSLETIPFTEISNLTLNTGNVYNPTALSMSNVESSTMNKTASWEGREASPGSSSQGSVPENQYGLPFEKWLLIGSLLFGVLFLVIGLVLLGRILSESLRRKRYSRLDYLINGIYVDI

SEQ ID NO: 8311 - protein, 57 aa, Homo sapiens
MFFGGEGSLTYTLVIICFLTLRLSASQNCLKKSLEDVVIDIQSSLSKGIRGNEPVYT

SEQ ID NO: 8312 - protein, 431 aa, Homo sapiens
MFFGGEGSLTYTLVIICFLTLRLSASQNCLKKSLEDVVIDIQSSLSKGIRGNEPVYTSTQEDCINSCCSTKNISGDKACNLMIFDTRKTARQPNCYLFFCPNEEACPLKPAKGLMSYRIITDFPSLTRNLPSQELPQEDSLLHGQFSQAVTPLAHHHTDYSKPTDISWRDTLSQKFGSSDHLEKLFKMDEASAQLLAYKEKGHSQSSQFSSDQEIAHLLPENVSALPATVAVASPHTTSATPKPATLLPTNASVTPSGTSQPQLATTAPPVTTVTSQPPTTLISTVFTRAAATLQAMATTAVLTTTFQAPTDSKGSLETIPFTEISNLTLNTGNVYNPTALSMSNVESSTMNKTASWEGREASPGSSSQGSVPENQYGLPFEKWLLIGSLLFGVLFLVIGLVLLGRILSESLRRKRYSRLDYLINGIYVDI

SEQ ID NO: 8313 - protein, 350 aa, Homo sapiens
MIFDTRKTARQPNCYLFFCPNEEACPLKPAKGLMSYRIITDFPSLTRNLPSQELPQEDSLLHGQFSQAVTPLAHHHTDYSKPTDISWRDTLSQKFGSSDHLEKLFKMDEASAQLLAYKEKGHSQSSQFSSDQEIAHLLPENVSALPATVAVASPHTTSATPKPATLLPTNASVTPSGTSQPQLATTAPPVTTVTSQPPTTLISTVFTRAAATLQAMATTAVLTTTFQAPTDSKGSLETIPFTEISNLTLNTGNVYNPTALSMSNVESSTMNKTASWEGREASPGSSSQGSVPENQYGLPFEKWLLIGSLLFGVLFLVIGLVLLGRILSESLRRKRYSRLDYLINGIYVDI

SEQ ID NO: 8314 - protein, 832 aa, Homo sapiens
MELTGLEVALVLILQKVENGDLSNKILKITDFGLAREWHRTTKMSAAGTYAWMAPEVIRASMFSKGSDVWSYGVLLWELLTGEVPFRGIDGLAVAYGVAMNKLALPIPSTCPEPFAKLMEDCWNPDPHSRPSFTNILDQLTTIEESGFFEMPKDSFHCLQDNWKHEIQEMFDQLRAKEKELRTWEEELTRAALQQKNQEELLRRREQELAEREIDILERELNIIIHQLCQEKPRVKKRKGKFRKSRLKLKDGNRISLPSDFQHKFTVQASPTMDKRKSLINSRSSPPASPTIIPRLRAIQLTPGESSKTWGRSSVVPKEEGEEEEKRAPKKKGRTWGPGTLGQKELASGDEGLKSLVDGYKQWSSSAPNLVKGPRSSPALPGFTSLMEMALLAASWVVPIDIEEDEDSEGPGSGESRLQHSPSQSYLCIPFPRGEDGDGPSSDGIHEEPTPVNSATSTPQLTPTNSLKRGGAHHRRCEVALLGCGAVLAATGLGFDLLEAGKCQLLPLEEPEPPAREEKKRREGLFQRSSRPRRSTSPPSRKLFKKEEPMLLLGDPSASLTLLSLSSISECNSTRSLLRSDSDEIVVYEMPVSPVEAPPLSPCTHNPLVNVRVERFKRDPNQSLTPTHVTLTTPSQPSSHRRTPSDGALKPETLLASRSPSSNGLSPSPGAGMLKTPSPSRDPGEFPRLPDPNVVFPPTPRRWNTQQDSTLERPKTLEFLPRPRPSANRQRLDPWWFVSPSHARSTSPANSSSTETPSNLDSCFASSSSTVEERPGLPALLPFQAGPLPPTERTLLDLDAEGQSQDSTVPLCRAELNTHRPAPYEIQQEFWS

SEQ ID NO: 8315 - protein, 880 aa, Homo sapiens
MELTGLEVALVLILQKVENGDLSNKILKITDFGLAREWHRTTKMSAAGTYAWMAPEVIRASMFSKGSDVWSYGVLLWELLTGEVPFRGIDGLAVAYGVAMNKLALPIPSTCPEPFAKLMEDCWNPDPHSRPSFTNILDQLTTIEESGFFEMPKDSFHCLQDNWKHEIQEMFDQLRAKEKELRTWEEELTRAALQQKNQEELLRRREQELAEREIDILERELNIIIHQLCQEKPRVKKRKGKFRKSRLKLKDGNRISLPSDFQHKFTVQASPTMDKRKSLINSRSSPPASPTIIPRLRAIQCETVSQISWGQNTQGHLSPALSSHRLVQACSIHNFCHLSSTMCIYMHILTPGESSKTWGRSSVVPKEEGEEEEKRAPKKKGRTWGPGTLGQKELASGDEGLKSLVDGYKQWSSSAPNLVKGPRSSPALPGFTSLMEMALLAASWVVPIDIEEDEDSEGPGSGESRLQHSPSQSYLCIPFPRGEDGDGPSSDGIHEEPTPVNSATSTPQLTPTNSLKRGGAHHRRCEVALLGCGAVLAATGLGFDLLEAGKCQLLPLEEPEPPAREEKKRREGLFQRSSRPRRSTSPPSRKLFKKEEPMLLLGDPSASLTLLSLSSISECNSTRSLLRSDSDEIVVYEMPVSPVEAPPLSPCTHNPLVNVRVERFKRDPNQSLTPTHVTLTTPSQPSSHRRTPSDGALKPETLLASRSPSSNGLSPSPGAGMLKTPSPSRDPGEFPRLPDPNVVFPPTPRRWNTQQDSTLERPKTLEFLPRPRPSANRQRLDPWWFVSPSHARSTSPANSSSTETPSNLDSCFASSSSTVEERPGLPALLPFQAGPLPPTERTLLDLDAEGQSQDSTVPLCRAELNTHRPAPYEIQQEFWS

SEQ ID NO: 8316 - protein, 1081 aa, Homo sapiens
MEPSRALLGCLASAAAAAPPGEDGAGAGAEEEEEEEEEAAAAVGPGELGCDAPLPYWTAVFEYEAAGEDELTLRLGDVVEVLSKDSQVSGDEGWWTGQLNQRVGIFPSNYVTPRSAFSSRCQPGGEDPSCYPPIQLLEIDFAELTLEEIIGIGGFGKVYRAFWIGDEVAVKAARHDPDEDISQTIENVRQEAKLFAMLKHPNIIALRGVCLKEPNLCLVMEFARGGPLNRVLSGKRIPPDILVNWAVQIARGMNYLHDEAIVPIIHRDLKSSNILILQKVENGDLSNKILKITDFGLAREWHRTTKMSAAGTYAWMAPEVIRASMFSKGSDVWSYGVLLWELLTGEVPFRGIDGLAVAYGVAMNKLALPIPSTCPEPFAKLMEDCWNPDPHSRPSFTNILDQLTTIEESGFFEMPKDSFHCLQDNWKHEIQEMFDQLRAKEKELRTWEEELTRAALQQKNQEELLRRREQELAEREIDILERELNIIIHQLCQEKPRVKKRKGKFRKSRLKLKDGNRISLPSDFQHKFTVQASPTMDKRKSLINSRSSPPASPTIIPRLRAIQLTPGESSKTWGRSSVVPKEEGEEEEKRAPKKKGRTWGPGTLGQKELASGDEGLKSLVDGYKQWSSSAPNLVKGPRSSPALPGFTSLMEMEDEDSEGPGSGESRLQHSPSQSYLCIPFPRGEDGDGPSSDGIHEEPTPVNSATSTPQLTPTNSLKRGGAHHRRCEVALLGCGAVLAATGLGFDLLEAGKCQLLPLEEPEPPAREEKKRREGLFQRSSRPRRSTSPPSRKLFKKEEPMLLLGDPSASLTLLSLSSISECNSTRSLLRSDSDEIVVYEMPVSPVEAPPLSPCTHNPLVNVRVERFKRDPNQSLTPTHVTLTTPSQPSSHRRTPSDGALKPETLLASRSPSSNGLSPSPGAGMLKTPSPSRDPGEFPRLPDPNVVFPPTPRRWNTQQDSTLERPKTLEFLPRPRPSANRQRLDPWWFVSPSHARSTSPANSSSTETPSNLDSCFASSSSTVEERPGLPALLPFQAGPLPPTERTLLDLDAEGQSQDSTVPLCRAELNTHRPAPYEIQQEFWS

SEQ ID NO: 8317 - protein, 1118 aa, Homo sapiens
MEPSRALLGCLASAAAAAPPGEDGAGAGAEEEEEEEEEAAAAVGPGELGCDAPLPYWTAVFEYEAAGEDELTLRLGDVVEVLSKDSQVSGDEGWWTGQLNQRVGIFPSNYVTPRSAFSSRCQPGGEDPSCYPPIQLLEIDFAELTLEEIIGIGGFGKVYRAFWIGDEVAVKAARHDPDEDISQTIENVRQEAKLFAMLKHPNIIALRGVCLKEPNLCLVMEFARGGPLNRVLSGKRIPPDILVNWAVQIARGMNYLHDEAIVPIIHRDLKSSNILILQKVENGDLSNKILKITDFGLAREWHRTTKMSAAGTYAWMAPEVIRASMFSKGSDVWSYGVLLWELLTGEVPFRGIDGLAVAYGVAMNKLALPIPSTCPEPFAKLMEDCWNPDPHSRPSFTNILDQLTTIEESGFFEMPKDSFHCLQDNWKHEIQEMFDQLRAKEKELRTWEEELTRAALQQKNQEELLRRREQELAEREIDILERELNIIIHQLCQEKPRVKKRKGKFRKSRLKLKDGNRISLPSDFQHKFTVQASPTMDKRKSLINSRSSPPASPTIIPRLRAIQLTPGESSKTWGRSSVVPKEEGEEEEKRAPKKKGRTWGPGTLGQKELASGDEGSPQRREKANGLSTPSESPHFHLGLKSLVDGYKQWSSSAPNLVKGPRSSPALPGFTSLMEMALLAASWVVPIDIEEDEDSEGPGSGESRLQHSPSQSYLCIPFPRGEDGDGPSSDGIHEEPTPVNSATSTPQLTPTNSLKRGGAHHRRCEVALLGCGAVLAATGLGFDLLEAGKCQLLPLEEPEPPAREEKKRREGLFQRSSRPRRSTSPPSRKLFKKEEPMLLLGDPSASLTLLSLSSISECNSTRSLLRSDSDEIVVYEMPVSPVEAPPLSPCTHNPLVNVRVERFKRDPNQSLTPTHVTLTTPSQPSSHRRTPSDGALKPETLLASRSPSSNGLSPSPGAGMLKTPSPSRDPGEFPRLPDPNVVFPPTPRRWNTQQDSTLERPKTLEFLPRPRPSANRQRLDPWWFVSPSHARSTSPANSSSTETPSNLDSCFASSSSTVEERPGLPALLPFQAGPLPPTERTLLDLDAEGQSQDSTVPLCRAELNTHRPAPYEIQQEFWS

SEQ ID NO: 8318 - protein, 1104 aa, Homo sapiens
MEPSRALLGCLASAAAAAPPGEDGAGAGAEEEEEEEEEAAAAVGPGELGCDAPLPYWTAVFEYEAAGEDELTLRLGDVVEVLSKDSQVSGDEGWWTGQLNQRVGIFPSNYVTPRSAFSSRCQPGGEDPSCYPPIQLLEIDFAELTLEEIIGIGGFGKVYRAFWIGDEVAVKAARHDPDEDISQTIENVRQEAKLFAMLKHPNIIALRGVCLKEPNLCLVMEFARGGPLNRVLSGKRIPPDILVNWAVQIARGMNYLHDEAIVPIIHRDLKSSNILILQKVENGDLSNKILKITDFGLAREWHRTTKMSAAGTYAWMAPEVIRASMFSKGSDVWSYGVLLWELLTGEVPFRGIDGLAVAYGVAMNKLALPIPSTCPEPFAKLMEDCWNPDPHSRPSFTNILDQLTTIEESGFFEMPKDSFHCLQDNWKHEIQEMFDQLRAKEKELRTWEEELTRAALQQKNQEELLRRREQELAEREIDILERELNIIIHQLCQEKPRVKKRKGKFRKSRLKLKDGNRISLPSDFQHKFTVQASPTMDKRKSLINSRSSPPASPTIIPRLRAIQLTPGESSKTWGRSSVVPKEEGEEEEKRAPKKKGRTWGPGTLGQKELASGDEGSPQRREKANGLSTPSESPHFHLGLKSLVDGYKQWSSSAPNLVKGPRSSPALPGFTSLMEMEDEDSEGPGSGESRLQHSPSQSYLCIPFPRGEDGDGPSSDGIHEEPTPVNSATSTPQLTPTNSLKRGGAHHRRCEVALLGCGAVLAATGLGFDLLEAGKCQLLPLEEPEPPAREEKKRREGLFQRSSRPRRSTSPPSRKLFKKEEPMLLLGDPSASLTLLSLSSISECNSTRSLLRSDSDEIVVYEMPVSPVEAPPLSPCTHNPLVNVRVERFKRDPNQSLTPTHVTLTTPSQPSSHRRTPSDGALKPETLLASRSPSSNGLSPSPGAGMLKTPSPSRDPGEFPRLPDPNVVFPPTPRRWNTQQDSTLERPKTLEFLPRPRPSANRQRLDPWWFVSPSHARSTSPANSSSTETPSNLDSCFASSSSTVEERPGLPALLPFQAGPLPPTERTLLDLDAEGQSQDSTVPLCRAELNTHRPAPYEIQQEFWS

SEQ ID NO: 8319 - protein, 837 aa, Homo sapiens
MSAAGTYAWMAPEVIRASMFSKGSDVWSYGVLLWELLTGEVPFRGIDGLAVAYGVAMNKLALPIPSTCPEPFAKLMEDCWNPDPHSRPSFTNILDQLTTIEESGFFEMPKDSFHCLQDNWKHEIQEMFDQLRAKEKELRTWEEELTRAALQQKNQEELLRRREQELAEREIDILERELNIIIHQLCQEKPRVKKRKGKFRKSRLKLKDGNRISLPSDFQHKFTVQASPTMDKRKSLINSRSSPPASPTIIPRLRAIQCETVSQISWGQNTQGHLSPALSSHRLVQACSIHNFCHLSSTMCIYMHILTPGESSKTWGRSSVVPKEEGEEEEKRAPKKKGRTWGPGTLGQKELASGDEGLKSLVDGYKQWSSSAPNLVKGPRSSPALPGFTSLMEMALLAASWVVPIDIEEDEDSEGPGSGESRLQHSPSQSYLCIPFPRGEDGDGPSSDGIHEEPTPVNSATSTPQLTPTNSLKRGGAHHRRCEVALLGCGAVLAATGLGFDLLEAGKCQLLPLEEPEPPAREEKKRREGLFQRSSRPRRSTSPPSRKLFKKEEPMLLLGDPSASLTLLSLSSISECNSTRSLLRSDSDEIVVYEMPVSPVEAPPLSPCTHNPLVNVRVERFKRDPNQSLTPTHVTLTTPSQPSSHRRTPSDGALKPETLLASRSPSSNGLSPSPGAGMLKTPSPSRDPGEFPRLPDPNVVFPPTPRRWNTQQDSTLERPKTLEFLPRPRPSANRQRLDPWWFVSPSHARSTSPANSSSTETPSNLDSCFASSSSTVEERPGLPALLPFQAGPLPPTERTLLDLDAEGQSQDSTVPLCRAELNTHRPAPYEIQQEFWS

SEQ ID NO: 8320 - protein, 55 aa, Homo sapiens
MFGQIQSPGYPDSYPSDSEVTWNITVPDGFRIKLYFMHFNLESSYLCEYDYVKVE

SEQ ID NO: 8321 - protein, 354 aa, Homo sapiens
MFGQIQSPGYPDSYPSDSEVTWNITVPDGFRIKLYFMHFNLESSYLCEYDYVKVETEDQVLATFCGRETTDTEQTPGQEVVLSPGSFMSITFRSDFSNEERFTGFDAHYMAVDVDECKEREDEELSCDHYCHNYIGGYYCSCRFGYILHTDNRTCRVECSDNLFTQRTGVITSPDFPNPYPKSSECLYTIELEEGFMVNLQFEDIFDIEDHPEVPCPYDYIKIKVGPKVLGPFCGEKAPEPISTQSHSVLILFHSDNSGENRGWRLSYRAAGNECPELQPPVHGKIEPSQAKYFFKDQVLVSCDTGYKVLKDNVEMDTFQIECLKDGTWSNKIPTCKKNEIDLESELKSEQVTE

SEQ ID NO: 8322 - protein, 118 aa, Homo sapiens
MPANSRDTQGPQNKDKASRTPHRARAHRWLLLYYALCFSLSKASAHTVELNNMFGQIQSPGYPDSYPSDSEVTWNITVPDGFRIKLYFMHFNLESSYLCEYDYVKVETEDQVLATFCG

SEQ ID NO: 8323 - protein, 205 aa, Homo sapiens [sequence omitted]

SEQ ID NO: 8324 - protein, 380 aa, Homo sapiens
MRWLLLYYALCFSLSKASAHTVELNNMFGQIQSPGYPDSYPSDSEVTWNITVPDGFRIKLYFMHFNLESSYLCEYDYVKVETEDQVLATFCGRETTDTEQTPGQEVVLSPGSFMSITFRSDFSNEERFTGFDAHYMAVDVDECKEREDEELSCDHYCHNYIGGYYCSCRFGYILHTDNRTCRVECSDNLFTQRTGVITSPDFPNPYPKSSECLYTIELEEGFMVNLQFEDIFDIEDHPEVPCPYDYIKIKVGPKVLGPFCGEKAPEPISTQSHSVLILFHSDNSGENRGWRLSYRAAGNECPELQPPVHGKIEPSQAKYFFKDQVLVSCDTGYKVLKDNVEMDTFQIECLKDGTWSNKIPTCKKNEIDLESELKSEQVTE

SEQ ID NO: 8325 - protein, 728 aa, Homo sapiens
MRWLLLYYALCFSLSKASAHTVELNNMFGQIQSPGYPDSYPSDSEVTWNITVPDGFRIKLYFMHFNLESSYLCEYDYVKVETEDQVLATFCGRETTDTEQTPGQEVVLSPGSFMSITFRSDFSNEERFTGFDAHYMAVDVDECKEREDEELSCDHYCHNYIGGYYCSCRFGYILHTDNRTCRVECSDNLFTQRTGVITSPDFPNPYPKSSECLYTIELEEGFMVNLQFEDIFDIEDHPEVPCPYDYIKIKVGPKVLGPFCGEKAPEPISTQSHSVLILFHSDNSGENRGWRLSYRAAGNECPELQPPVHGKIEPSQAKYFFKDQVLVSCDTGYKVLKDNVEMDTFQIECLKDGTWSNKIPTCKIVDCRAPGELEHGLITFSTRNNLTTYKSEIKYSCQEPYYKMLNNNTGIYTCSAQGVWMNKVLGRSLPTCLPECGQPSRSLPSLVKRIIGGRNAEPGLFPWQALIVVEDTSRVPNDKWFGSGALLSASWILTAAHVLRSQRRDTTVIPVSKEHVTVYLGLHDVRDKSGAVNSSAARVVLHPDFNIQNYNHDIALVQLQEPVPLGPHVMPVCLPRLEPEGPAPHMLGLVAGWGISNPNVTVDEIISSGTRTLSDVLQYVKLPVVPHAECKTSYESRSGNYSVTENMFCAGYYEGGKDTCLGDSGGAFVIFDDLSQRWVVQGLVSWGGPEECGSKQVYGVYTKVSNYVDWVWEQMGLPQSVVEPQVER

SEQ ID NO: 8326 - protein, 699 aa, Homo sapiens
MRWLLLYYALCFSLSKASAHTVELNNMFGQIQSPGYPDSYPSDSEVTWNITVPDGFRIKLYFMHFNLESSYLCEYDYVKVETEDQVLATFCGRETTDTEQTPGQEVVLSPGSFMSITFRSDFSNEERFTGFDAHYMAVDVDECKEREDEELSCDHYCHNYIGGYYCSCRFGYILHTDNRTCRVECSDNLFTQRTGVITSPDFPNPYPKSSECLYTIELEEGFMVNLQFEDIFDIEDHPEVPCPYDYIKIKVGPKVLGPFCGEKAPEPISTQSHSVLILFHSDNSGENRGWRLSYRAAGNECPELQPPVHGKIEPSQAKYFFKDQVLVSCDTGYKVLKDNVEMDTFQIECLKDGTWSNKIPTCKIVDCRAPGELEHGLITFSTRNNLTTYKSEIKYSCQEPYYKMLNNNTGIYTCSAQGVWMNKVLGRSLPTCLPVCGLPKFSRKLMARIFNGRPAQKGTTPWIAMLSHLNGQPFCGGSLLGSSWIVTAAHCLHQSLDPEDPTLRDSDLLSPSDFKIILGKHWRLRSDENEQHLGVKHTTLHPQYDPNTFENDVALVELLESPVLNAFVMPICLPEGPQQEGAMVIVSGWGKQFLQRFPETLMEIEIPIVDHSTCQKAYAPLKKKVTRDMICAGEKEGGKDACAGDSGGPMVTLNRERGQWYLVGTVSWGDDCGKKDRYGVYSYIHHNKDWIQRVTGVRN

SEQ ID NO: 8327 - protein, 615 aa, Homo sapiens
MSITFRSDFSNEERFTGFDAHYMAVDVDECKEREDEELSCDHYCHNYIGGYYCSCRFGYILHTDNRTCRVECSDNLFTQRTGVITSPDFPNPYPKSSECLYTIELEEGFMVNLQFEDIFDIEDHPEVPCPYDYIKIKVGPKVLGPFCGEKAPEPISTQSHSVLILFHSDNSGENRGWRLSYRAAGNECPELQPPVHGKIEPSQAKYFFKDQVLVSCDTGYKVLKDNVEMDTFQIECLKDGTWSNKIPTCKIVDCRAPGELEHGLITFSTRNNLTTYKSEIKYSCQEPYYKMLNNNTGIYTCSAQGVWMNKVLGRSLPTCLPECGQPSRSLPSLVKRIIGGRNAEPGLFPWQALIVVEDTSRVPNDKWFGSGALLSASWILTAAHVLRSQRRDTTVIPVSKEHVTVYLGLHDVRDKSGAVNSSAARVVLHPDFNIQNYNHDIALVQLQEPVPLGPHVMPVCLPRLEPEGPAPHMLGLVAGWGISNPNVTVDEIISSGTRTLSDVLQYVKLPVVPHAECKTSYESRSGNYSVTENMFCAGYYEGGKDTCLGDSGGAFVIFDDLSQRWVVQGLVSWGGPEECGSKQVYGVYTKVSNYVDWVWEQMGLPQSVVEPQVER

SEQ ID NO: 8328 - protein, 686 aa, Homo sapiens
MRLLTLLGLLCGSVATPLGPKWPEPVFGRLASPGFPGEYANDQERRWTLTAPPGYRLRLYFTHFDLELSHLCEYDFVKLSSGAKVLATLCGQESTDTERAPGKDTFYSLGSSLDITFRSDYSNEKPFTGFEAFYAAEDIDECQVAPGEAPTCDHHCHNHLGGFYCSCRAGYVLHRNKRTCSALCSGQVFTQRSGELSSPEYPRPYPKLSSCTYSISLEEGFSVILDFVESFDVETHPETLCPYDFLKIQTDREEHGPFCGKTLPHRIETKSNTVTITFVTDESGDHTGWKIHYTSTAQPCPYPMAPPNGHVSPVQAKYILKDSFSIFCETGYELLQGHLPLKSFTAVCQKDGSWDRPMPACSIVDCGPPDDLPSGRVEYITGPGVTTYKAVIQYSCEETFYTMKVNDGKYVCEADGFWTSSKGEKSLPVCEPVCGLSARTTGGRIYGGQKAKPGDFPWQVLILGGTTAAGALLYDNWVLTAAHAVYEQKHDASALDIRMGTLKRLSPHYTQAWSEAVFIHEGYTHDAGFDNDIALIKLNNKVVINSNITPICLPRKEAESFMRTDDIGTASGWGLTQRGFLARNLMYVDIPIVDHQKCTAAYEKPPYPRGSVTANMLCAGLESGGKDSCRGDSGGALVFLDSETERWFVGGIVSWGSMNCGEAGQYGVYTKVINYIPWIENIISDF

SEQ ID NO: 8329 - protein, 185 aa, Homo sapiens
MRLLTLLGLLCGSVATPLGPKWPEPVFGRLASPGFPGEYANDQERRWTLTAPPGYRLRLYFTHFDLELSHLCEYDFVKLSSGAKVLATLCGQESTDTERAPGKDTFYSLGSSLDITFRSDYSNEKPFTGFEAFYAAEDIDECQVAPGEAPTCDHHCHNHLGGFYCSCRAGYVLHRNKRTCSEQSL

SEQ ID NO: 8330 - protein, 496 aa, Homo sapiens
MRVLSGTSLMLCSLLLLLQALCSPGLAPQSRGHLCRTRPTDLVFVVDSSRSVRPVEFEKVKVFLSQVIESLDVGPNATRVGMVNYASTVKQEFSLRAHVSKAALLQAVRRIQPLSTGTMTGLAIQFAITKAFGDAEGGRSRSPDISKVVIVVTDGRPQDSVQDVSARARASGVELFAIGVGSVDKATLRQIASEPQDEHVDYVESYSVIEKLSRKFQEAFCVVSDLCATGDHDCEQVCISSPGSYTCACHEGFTLNSDGKTCNVCSGGGGSSATDLVFLIDGSKSVRPENFELVKKFISQIVDTLDVSDKLAQVGLVQYSSSVRQEFPLGRFHTKKDIKAAVRNMSYMEKGTMTGAALKYLIDNSFTVSSGARPGAQKVGIVFTDGRSQDYINDAAKKAKDLGFKMFAVGVGNAVEDELREIASEPVAEHYFYTADFKTINQIGKKLQKKICVEEDPCACESLVKFQAKVEGLLQALTRKLEAVSKRLAILENTVV

SEQ ID NO: 8331 - protein, 115 aa, Homo sapiens
MEDHNCEQLCVNVPGSFVCQCYSGYALAEDGKRCVAVDYCASENHGCEHECVNADGSYLCQCHEGFALNPDKKTCTKIDYCASSNHGCQHECVNTDDSYSCHCLKGFTLNPDKKT

SEQ ID NO: 8332 - protein, 672 aa, Homo sapiens
MEDHNCEQLCVNVPGSFVCQCYSGYALAEDGKRCVAVDYCASENHGCEHECVNADGSYLCQCHEGFALNPDKKTCTKIDYCASSNHGCQHECVNTDDSYSCHCLKGFTLNPDKKTCRRINYCALNKPGCEHECVNMEESYYCRCHRGYTLDPNGKTCSRVDHCAQQDHGCEQLCLNTEDSFVCQCSEGFLINEDLKTCSRVDYCLLSDHGCEYSCVNMDRSFACQCPEGHVLRSDGKTCAKLDSCALGDHGCEHSCVSSEDSFVCQCFEGYILREDGKTCRRKDVCQAIDHGCEHICVNSDDSYTCECLEGFRLAEDGKRCRRKDVCKSTHHGCEHICVNNGNSYICKCSEGFVLAEDGRRCKKCTEGPIDLVFVIDGSKSLGEENFEVVKQFVTGIIDSLTISPKAARVGLLQYSTQVHTEFTLRNFNSAKDMKKAVAHMKYMGKGSMTGLALKHMFERSFTQGEGARPLSTRVPRAAIVFTDGRAQDDVSEWASKAKANGITMYAVGVGKAIEEELQEIASEPTNKHLFYAEDFSTMDEISEKLKKGICEALEDSDGRQDSPAGELPKTVQQPTESEPVTINIQDLLSCSNFAVQHRYLFEEDNLLRSTQKLSHSTKPSGSPLEEKHDQCKCENLIMFQNLANEEVRKLTQRLEEMTQRMEALENRLRYR

SEQ ID NO: 8333 - protein, 956 aa, Homo sapiens
MEKMLAGCFLLILGQIVLLPAEARERSRGRSISRGRHARTHPQTALLESSCENKRADLVFIIDSSRSVNTHDYAKVKEFIVDILQFLDIGPDVTRVGLLQYGSTVKNEFSLKTFKRKSEVERAVKRMRHLSTGTMTGLAIQYALNIAFSEAEGARPLRENVPRVIMIVTDGRPQDSVAEVAAKARDTGILIFAIGVGQVDFNTLKSIGSEPHEDHVFLVANFSQIETLTSVFQKKLCTAHMCSTLEHNCAHFCINIPGSYVCRCKQGYILNSDQTTCRIQDLCAMEDHNCEQLCVNVPGSFVCQCYSGYALAEDGKRCVAVDYCASENHGCEHECVNADGSYLCQCHEGFALNPDKKTCTKIDYCASSNHGCQHECVNTDDSYSCHCLKGFTLNPDKKTCRRINYCALNKPGCEHECVNMEESYYCRCHRGYTLDPNGKTCSRVDHCAQQDHGCEQLCLNTEDSFVCQCSEGFLINEDLKTCSRVDYCLLSDHGCEYSCVNMDRSFACQCPEGHVLRSDGKTCAKLDSCALGDHGCEHSCVSSEDSFVCQCFEGYILREDGKTCRRKDVCQAIDHGCEHICVNSDDSYTCECLEGFRLAEDGKRCRRKDVCKSTHHGCEHICVNNGNSYICKCSEGFVLAEDGRRCKKCTEGPIDLVFVIDGSKSLGEENFEVVKQFVTGIIDSLTISPKAARVGLLQYSTQVHTEFTLRNFNSAKDMKKAVAHMKYMGKGSMTGLALKHMFERSFTQGEGARPLSTRVPRAAIVFTDGRAQDDVSEWASKAKANGITMYAVGVGKAIEEELQEIASEPTNKHLFYAEDFSTMDEISEKLKKGICEALEDSDGRQDSPAGELPKTVQQPTESEPVTINIQDLLSCSNFAVQHRYLFEEDNLLRSTQKLSHSTKPSGSPLEEKHDQCKCENLIMFQNLANEEVRKLTQRLEEMTQRMEALENRLRYR

SEQ ID NO: 8334 - protein, 915 aa, Homo sapiens
MEKMLAGCFLLILGQIVLLPAEARERSRGRSISRGRHARTHPQTALLESSCENKRADLVFIIDSSRSVNTHDYAKVKEFIVDILQFLDIGPDVTRVGLLQYGSTVKNEFSLKTFKRKSEVERAVKRMRHLSTGTMTGLAIQYALNIAFSEAEGARPLRENVPRVIMIVTDGRPQDSVAEVAAKARDTGILIFAIGVGQVDFNTLKSIGSEPHEDHVFLVANFSQIETLTSVFQKKLCTAHMCSTLEHNCAHFCINIPGSYVCRCKQGYILNSDQTTCRIQDLCAMEDHNCEQLCVNVPGSFVCQCYSGYALAEDGKRCVAVDYCASENHGCEHECVNADGSYLCQCHEGFALNPDKKTCTRINYCALNKPGCEHECVNMEESYYCRCHRGYTLDPNGKTCSRVDHCAQQDHGCEQLCLNTEDSFVCQCSEGFLINEDLKTCSRVDYCLLSDHGCEYSCVNMDRSFACQCPEGHVLRSDGKTCAKLDSCALGDHGCEHSCVSSEDSFVCQCFEGYILREDGKTCRRKDVCQAIDHGCEHICVNSDDSYTCECLEGFRLAEDGKRCRRKDVCKSTHHGCEHICVNNGNSYICKCSEGFVLAEDGRRCKKCTEGPIDLVFVIDGSKSLGEENFEVVKQFVTGIIDSLTISPKAARVGLLQYSTQVHTEFTLRNFNSAKDMKKAVAHMKYMGKGSMTGLALKHMFERSFTQGEGARPLSTRVPRAAIVFTDGRAQDDVSEWASKAKANGITMYAVGVGKAIEEELQEIASEPTNKHLFYAEDFSTMDEISEKLKKGICEALEDSDGRQDSPAGELPKTVQQPTESEPVTINIQDLLSCSNFAVQHRYLFEEDNLLRSTQKLSHSTKPSGSPLEEKHDQCKCENLIMFQNLANEEVRKLTQRLEEMTQRMEALENRLRYR

SEQ ID NO: 8335 - protein, 956 aa, Homo sapiens; identical to SEQ ID NO: 8333

SEQ ID NO: 8336 - protein, 937 aa, Homo sapiens
MEKMLAGCFLLILGQIVLLPAEARERSRGRSISRGRHARTHPQTALLESSCENKRADLVFIIDSSRSVNTHDYAKVKEFIVDILQFLDIGPDVTRVGLLQYGSTVKNEFSLKTFKRKSEVERAVKRMRHLSTGTMTGLAIQYALNIAFSEAEGARPLRENVPRVIMIVTDGRPQDSVAEVAAKARDTGILIFAIGVGQVDFNTLKSIGSEPHEDHVFLVANFSQIETLTSVFQKKLCTAHMCSTLEHNCAHFCINIPGSYVCRCKQGYILNSDQTTCRIQDLCAMEDHNCEQLCVNVPGSFVCQCYSGYALAEDGKRCVAVDYCASENHGCEHECVNADGSYLCQCHEGFALNPDKKTCTKIDYCASSNHGCQHECVNTDDSYSCHCLKGFTLNPDKKTCRRINYCALNKPGCEHECVNMEESYYCRCHRGYTLDPNGKTCSRVDHCAQQDHGCEQLCLNTEDSFVCQCSEGFLINEDLKTCSRVDYCLLSDHGCEYSCVNMDRSFACQCPEGHVLRSDGKTCAKLDSCALGDHGCEHSCVSSEDSFVCQCFEGYILREDGKTCRRKDVCQAIDHGCEHICVNSDDSYTCECLEGFRLAEDGKRCRRKDVCKSTHHGCEHICVNNGNSYICKCSEGFVLAEDGRRCKKCTEGPIDLVFVIDGSKSLGEENFEVVKQFVTGIIDSLTISPKAARVGLLQYSTQVHTEFTLRNFNSAKDMKKAVAHMKYMGKGSMTGLALKHMFERSFTQGEGARPLSTRVPRAAIVFTDGRAQDDVSEWASKAKANGITMYAVGVGKAIEEELQEIASEPTNKHLFYAEDFSTMDEISEKLKKGICEALEDSDGRQDSPAGELPKTVQQPTVQHRYLFEEDNLLRSTQKLSHSTKPSGSPLEEKHDQCKCENLIMFQNLANEEVRKLTQRLEEMTQRMEALENRLRYR

SEQ ID NO: 8337 - protein, 195 aa, Homo sapiens
QCYSGYALAEDGKRCVAVDYCASENHGCEHECVNADGSYLCQCHEGFALNPDKKTCTKIDYCASSNHGCQHECVNTDDSYSCHCLKGFTLNPDKKTCRSLPFFPSGINYCALNKPGCEHECVNMEESYYCRCHRGYTLDPNGKTCSRVDHCAQQDHGCEQLCLNTEDSFVCQCSEGFLINEDLKTCSRVDYCLLS

SEQ ID NO: 8338 - protein, 720 aa, Homo sapiens
  VARIANT 1: note = misc_feature - Xaa can be any naturally occurring amino acid
XAEVAAKARDTGILIFAIGVGQVDFNTLKSIGSEPHEDHVFLVANFSQIETLTSVFQKKLCTAHMCSTLEHNCAHFCINIPGSYVCRCKQGYILNSDQTTCRTVDYCASENHGCEHECVNADGSYLCQCHEGFALNPDKKTCTKIDYCASSNHGCQHECVNTDDSYSCHCLKGFTLNPDKKTCRRINYCALNKPGCEHECVNMEESYYCRCHRGYTLDPNGKTCSRVDHCAQQDHGCEQLCLNTEDSFVCQCSEGFLINEDLKTCSRVDYCLLSDHGCEYSCVNMDRSFACQCPEGHVLRSDGKTCAKLDSCALGDHGCEHSCVSSEDSFVCQCFEGYILREDGKTCRRKDVCQAIDHGCEHICVNSDDSYTCECLEGFRLAEDGKRCRRKDVCKSTHHGCEHICVNNGNSYICKCSEGFVLAEDGRRCKKCTEGPIDLVFVIDGSKSLGEENFEVVKQFVTGIIDSLTISPKAARVGLLQYSTQVHTEFTLRNFNSAKDMKKAVAHMKYMGKGSMTGLALKHMFERSFTQGEGARPLSTRVPRAAIVFTDGRAQDDVSEWASKAKANGITMYAVGVGKAIEEELQEIASEPTNKHLFYAEDFSTMDEISEKLKKGICEALEDSDGRQDSPAGELPKTVQQPTVQHRYLFEEDNLLRSTQKLSHSTKPSGSPLEEKHDQCKCENLIMFQNLANEEVRKLTQRLEEMTQRMEALENRLRYR

SEQ ID NO: 8339 - protein, 183 aa, Homo sapiens
  VARIANT 1: note = misc_feature - Xaa can be any naturally occurring amino acid
XDSCALGDHGCEHSCVSSEDSFVCQCFEGYILREDGKTCRRKDVCQAIDHGCEHICVNSDDSYTCECLEGFRLAEDGKRCRKCTEGPIDLVFVIDGSKSLGEENFEVVKQFVTGIIDSLTISPKAARVGLLQYSTQVHTEFTLRNFNSAKDMKKAVAHMKYMGKGSMTGLALKHMFERSFTQG

SEQ ID NO: 8340 - protein, 131 aa, Homo sapiens
  VARIANT 1: note = misc_feature - Xaa can be any naturally occurring amino acid
XEDSDGRQDSPAGELPKTVQQPTESEPVTINIQDLLSCSNFAVQHRYLFEEDNLLRSTQKLSHSTKPSGSPLEEKHDQCKCENLIMFQNLANEEVRKLTQRYILFLHYASVWNAKNIIKTSHTLCRFYQLK

SEQ ID NO: 8341 - protein, 176 aa, Homo sapiens
  VARIANT 1: note = misc_feature - Xaa can be any naturally occurring amino acid
XFTQGEGARPLSTRVPRAAIVFTDGRAQDDVSEWASKAKANGITMYAVGVGKAIEEELQEIASEPTNKHLFYAEDFSTMDEISEKLKKGICEALEDSDGRQDSPAGELPKTVQQPTVQHRYLFEEDNLLRSTQKLSHSTKPSGSPLEEKHDQCKCENLIMFQNLANEEQRSSLSAL

SEQ ID NO: 8342 - protein, 181 aa, Homo sapiens
  VARIANT 1: note = misc_feature - Xaa can be any naturally occurring amino acid
XSIGSEPHEDHVFLVANFSQIETLTSVFQKKLCIQDLCAMEDHNCEQLCVNVPGSFVCQCYSGYALAEDGKRCVAVDYCASENHGCEHECVNADGSYLCQCHEGFALNPDKKTCTKIDYCASSNHGCQHECVNTDDSYSCHCLKGFTLNPDKKTCRRINYCALNKPGCEHECVNMEESYYC

SEQ ID NO: 8343 - protein, 155 aa, Homo sapiens
  VARIANT 1: note = misc_feature - Xaa can be any naturally occurring amino acid
XVDYCLLSDHGCEYSCVNMDRSFACQCPEGHVLRSDGKTCAKLDSCALGDHGCEHSCVSSEDSFVCQCFEGYILREDGKTCRRKDVCQAIDHGCEHICVNSDDSYTCECLEGFRLAEDGKRCRSKMSANQPTMAANTFVLIMGIPTSANAQRDLF

SEQ ID NO: 8344 - protein, 444 aa, Homo sapiens
MPRPAPARRLPGLLLLLWPLLLLPSAAPDPVARPGFRRLETRGPGGSPGRRPSPAAPDGAPASGTSEPGRARGAGVCKSRPLDLVFIIDSSRSVRPLEFTKVKTFVSRIIDTLDIGPADTRVAVVNYASTVKIEFQLQAYTDKQSLKQAVGRITPLSTGTMSGLAIQTAMDEAFTVEAGAREPSSNIPKVAIIVTDGRPQDQVNEVAARAQASGIELYAVGVDRADMASLKMMASEPLEEHVFYVETYGVIEKLSSRFQETFCALDRCALNTHGCEHICVNDRSGSYHCECYEGYTLNEDRKTCSAQDKCALGTHGCQHICVNDRTGSHHCECYEGYTLNADKKTCSVRDKCALGSHGCQHICVSDGAASYHCDCYPGYTLNEDKKTCSATEEARRLVSTEDACGCEATLAFQDKVSSYLQRLNTKLDDILEKLKINEYGQIHR

SEQ ID NO: 8345 - protein, 486 aa, Homo sapiens
MPRPAPARRLPGLLLLLWPLLLLPSAAPDPVARPGFRRLETRGPGGSPGRRPSPAAPDGAPASGTSEPGRARGAGVCKSRPLDLVFIIDSSRSVRPLEFTKVKTFVSRIIDTLDIGPADTRVAVVNYASTVKIEFQLQAYTDKQSLKQAVGRITPLSTGTMSGLAIQTAMDEAFTVEAGAREPSSNIPKVAIIVTDGRPQDQVNEVAARAQASGIELYAVGVDRADMASLKMMASEPLEEHVFYVETYGVIEKLSSRFQETFCALDPCVLGTHQCQHVCISDGEGKHHCECSQGYTLNADKKTCSALDRCALNTHGCEHICVNDRSGSYHCECYEGYTLNEDRKTCSAQDKCALGTHGCQHICVNDRTGSHHCECYEGYTLNADKKTCSVRDKCALGSHGCQHICVSDGAASYHCDCYPGYTLNEDKKTCSATEEARRLVSTEDACGCEATLAFQDKVSSYLQRLNTKLDDILEKLKINEYGQIHR

SEQ ID NO: 8346 - protein, 581 aa, Homo sapiens
MRGLLCWPVLLLLLQPWETQLQLTGPRCHTGPLDLVFVIDSSRSVRPFEFETMRQFLMGLLRGLNVGPNATRVGVIQYSSQVQSVFPLRAFSRREDMERAIRDLVPLAQGTMTGLAIQYAMNVAFSVAEGARPPEERVPRVAVIVTDGRPQDRVAEVAAQARARGIEIYAVGVQRADVGSLRAMASPPLDEHVFLVESFDLIQEFGLQFQSRLCAIDLCAEGTHGCEHHCVNSPGSYFCHCQVGFVLQQDQRSCRAIDYCSFGNHSCQHECVSTPGGPRCHCREGHDLQPDGRSCQVRDLCNGVDHGCEFQCVSEGLSYRCLCPEGRQLQADGKSCNRCREGHVDLVLLVDGSKSVRPQNFELVKRFVNQIVDFLDVSPEGTRVGLVQFSSRVRTEFPLGRYGTAAEVKQAVLAVEYMERGTMTGLALRHMVEHSFSEAQGARPRALNVPRVGLVFTDGRSQDDISVWAARAKEEGIVMYAVGVGKAVEAELREIASEPAELHVSYAPDFGTMTHLLENLRGSICPEEGISAGTELRSPCECESLVEFQGRTLGALESLTLNLAQLTARLEDLENQLANQK

SEQ ID NO: 8347 - protein, 581 aa, Homo sapiens; identical to SEQ ID NO: 8346

SEQ ID NO: 8348 - protein, 540 aa, Homo sapiens
MRGLLCWPVLLLLLQPWETQLQLTGPRCHTGPLDLVFVIDSSRSVRPFEFETMRQFLMGLLRGLNVGPNATRVGVIQYSSQVQSVFPLRAFSRREDMERAIRDLVPLAQGTMTGLAIQYAMNVAFSVAEGARPPEERVPRVAVIVTDGRPQDRVAEVAAQARARGIEIYAVGVQRADVGSLRAMASPPLDEHVFLVESFDLIQEFGLQFQSRLCAIDYCSFGNHSCQHECVSTPGGPRCHCREGHDLQPDGRSCQVRDLCNGVDHGCEFQCVSEGLSYRCLCPEGRQLQADGKSCNRCREGHVDLVLLVDGSKSVRPQNFELVKRFVNQIVDFLDVSPEGTRVGLVQFSSRVRTEFPLGRYGTAAEVKQAVLAVEYMERGTMTGLALRHMVEHSFSEAQGARPRALNVPRVGLVFTDGRSQDDISVWAARAKEEGIVMYAVGVGKAVEAELREIASEPAELHVSYAPDFGTMTHLLENLRGSICPEEGISAGTELRSPCECESLVEFQGRTLGALESLTLNLAQLTARLEDLENQLANQK

SEQ ID NO: 8349 - protein, 622 aa, Homo sapiens
MRGLLCWPVLLLLLQPWETQLQLTGPRCHTGPLDLVFVIDSSRSVRPFEFETMRQFLMGLLRGLNVGPNATRVGVIQYSSQVQSVFPLRAFSRREDMERAIRDLVPLAQGTMTGLAIQYAMNVAFSVAEGARPPEERVPRVAVIVTDGRPQDRVAEVAAQARARGIEIYAVGVQRADVGSLRAMASPPLDEHVFLVESFDLIQEFGLQFQSRLCGKDQCAEGGHGCQHQCVNAWAMFHCTCNPGYKLAADNKSCLAIDLCAEGTHGCEHHCVNSPGSYFCHCQVGFVLQQDQRSCRAIDYCSFGNHSCQHECVSTPGGPRCHCREGHDLQPDGRSCQVRDLCNGVDHGCEFQCVSEGLSYRCLCPEGRQLQADGKSCNRCREGHVDLVLLVDGSKSVRPQNFELVKRFVNQIVDFLDVSPEGTRVGLVQFSSRVRTEFPLGRYGTAAEVKQAVLAVEYMERGTMTGLALRHMVEHSFSEAQGARPRALNVPRVGLVFTDGRSQDDISVWAARAKEEGIVMYAVGVGKAVEAELREIASEPAELHVSYAPDFGTMTHLLENLRGSICPEEGISAGTELRSPCECESLVEFQGRTLGALESLTLNLAQLTARLEDLENQLANQK

SEQ ID NO: 8350 - protein, 499 aa, Homo sapiens
MRGLLCWPVLLLLLQPWETQLQLTGPRCHTGPLDLVFVIDSSRSVRPFEFETMRQFLMGLLRGLNVGPNATRVGVIQYSSQVQSVFPLRAFSRREDMERAIRDLVPLAQGTMTGLAIQYAMNVAFSVAEGARPPEERVPRVAVIVTDGRPQDRVAEVAAQARARGIEIYAVGVQRADVGSLRAMASPPLDEHVFLVESFDLIQEFGLQFQSRLCVRDLCNGVDHGCEFQCVSEGLSYRCLCPEGRQLQADGKSCNRCREGHVDLVLLVDGSKSVRPQNFELVKRFVNQIVDFLDVSPEGTRVGLVQFSSRVRTEFPLGRYGTAAEVKQAVLAVEYMERGTMTGLALRHMVEHSFSEAQGARPRALNVPRVGLVFTDGRSQDDISVWAARAKEEGIVMYAVGVGKAVEAELREIASEPAELHVSYAPDFGTMTHLLENLRGSICPEEGISAGTELRSPCECESLVEFQGRTLGALESLTLNLAQLTARLEDLENQLANQK

SEQ ID NO: 8351 - protein, 121 aa, Homo sapiens
MDFQRGKNLRYQLLQLVEPFGVISNHLILNKINEAFIEMATTEDAQAAVDYYTTTPALVFGKPVRVHLSQKYKRIKKPEGKPDQKFDQKQELGRVIHLSNLPHSGYSDSAVLKLAEPYGKI

SEQ ID NO: 8352 - protein, 6 aa, Homo sapiens
MGDPFM

SEQ ID NO: 8353 - protein, 25 aa, Homo sapiens
MGDPFMLQQSTNPAPGILGPPPPSF

SEQ ID NO: 8354 - protein, 81 aa, Homo sapiens
MGDPFMLQQSTNPAPGILGPPPPSFHLGGPAVGPRGNLGAGNGNLQGPRHMQKGRVETSRVVHIMDFQRGKNLRYQLLQLV

SEQ ID NO: 8355 - protein, 86 aa, Homo sapiens
MGDPFMLQQSTNPAPGILGPPPPSFHLGGPAVGPRGNLGAGNGNLQGPRHMQKGRVETSRVVHIMDFQRGKNLRYQLLQLVEPFGV

SEQ ID NO: 8356 - protein, 109 aa, Homo sapiens
MGDPFMLQQSTNPAPGILGPPPPSFHLGGPAVGPRGNLGAGNGNLQGPRHMQKGRVETSRVVHIMDFQRGKNLRYQLLQLVEPFGVISNHLILNKINEAFIEMATTEDA

SEQ ID NO: 8357 - protein, 125 aa, Homo sapiens
MGDPFMLQQSTNPAPGILGPPPPSFHLGGPAVGPRGNLGAGNGNLQGPRHMQKGRVETSRVVHIMDFQRGKNLRYQLLQLVEPFGVISNHLILNKINEAFIEMATTEDAQAAVDYYTTTPALVFG

SEQ ID NO: 8358 - protein, 509 aa, Homo sapiens
MGDPFMLQQSTNPAPGILGPPPPSFHLGGPAVGPRGNLGAGNGNLQGPRHMQKGRVETSRVVHIMDFQRGKNLRYQLLQLVEPFGVISNHLILNKINEAFIEMATTEDAQAAVDYYTTTPALVFGKPVRVHLSQKYKRIKKPEGKPDQKFDQKQELGRVIHLSNLPHSGYSDSAVLKLAEPYGKIKNYILMRMKSQAFIEMETREDAMAMVDHCLKKALWFQGRCVKVDLSEKYKKLVLRIPNRGIDLLKKDKSRKRSYSPDGKESPSDKKSKTDGSQKTESSTEGKEQEEKSGEDGEKDTKDDQTEQEPNMLLESEDELLVDEEEAAALLESGSSVGDETDLANLGDVASDGKKEPSDKAVKKDGSASAAAKKKLKKVDKIEELDQENEAALENGIKNEENTEPGAESSENADDPNKDTSENADGQSDENKDDYTIPDEYRIGPYQPNVPVGIDYVIPKTGFYCKLCSLFYTNEEVAKNTHCSSLPHYQKLKKFLNKLAEERRQKKET

SEQ ID NO: 8359 - protein, 509 aa, Homo sapiens; identical to SEQ ID NO: 8358

SEQ ID NO: 8360 - protein, 559 aa, Homo sapiens
MLGAQWRRNQPSRAAEEWSQHINGASHSRRCQLLLEIYPEWNPDNDTGHTMGDPFMLQQSTNPAPGILGPPPPSFHLGGPAVGPRGNLGAGNGNLQGPRHMQKGRVETSRVVHIMDFQRGKNLRYQLLQLVEPFGVISNHLILNKINEAFIEMATTEDAQAAVDYYTTTPALVFGKPVRVHLSQKYKRIKKPEGKPDQKFDQKQELGRVIHLSNLPHSGYSDSAVLKLAEPYGKIKNYILMRMKSQAFIEMETREDAMAMVDHCLKKALWFQGRCVKVDLSEKYKKLVLRIPNRGIDLLKKDKSRKRSYSPDGKESPSDKKSKTDGSQKTESSTEGKEQEEKSGEDGEKDTKDDQTEQEPNMLLESEDELLVDEEEAAALLESGSSVGDETDLANLGDVASDGKKEPSDKAVKKDGSASAAAKKKLKKVDKIEELDQENEAALENGIKNEENTEPGAESSENADDPNKDTSENADGQSDENKDDYTIPDEYRIGPYQPNVPVGIDYVIPKTGFYCKLCSLFYTNEEVAKNTHCSSLPHYQKLKKFLNKLAEERRQKKET

SEQ ID NO: 8361 - protein, 172 aa, Homo sapiens
MLGAQWRRNQPSRAAEVSGPGGKHAAGQGPRVRREILGEEEWSQHINGASHSRRCQLLLEIYPEWNPDNDTGHTMGDPFMLQQSTNPAPGILGPPPPSFHLGGPAVGPRGNLGAGNGNLQGPRHMQKGRVETSRVVHIMDFQRGKNLRYQLLQLVEPFGVISNHLILNKINE

SEQ ID NO: 8362 - protein, 283 aa, Homo sapiens
MSKSFQQSSLSRDSQGHGRDLSAAGIGLLAAATQSLSMLLESEDELLVDEEEAAALLESGSSVGDETDLANLGDVASDGKKEPSDKAVKKDGSASAAAKKKLKKRRFPGSMEGFVTLDEVGDEEDSELQKLRKSGMAFKSGDKNDDGLVEIKVDKIEELDQENEAALENGIKNEENTEPGAESSENADDPNKDTSENADGQSDENKDDYTIPDEYRIGPYQPNVPVGIDYVIPKTGFYCKLCSLFYTNEEVAKNTHCSSLPHYQKLKKFLNKLAEERRQKKET

SEQ ID NO: 8363 - protein, 47 aa, Homo sapiens
MSKSFQQSSLSRDSQGHGRDLSAAGIGLLAAATQSLSMPASLGRMNQ

SEQ ID NO: 8364 - protein, 78 aa, Homo sapiens
MSKSFQQSSLSRDSQGHGRDLSAAGIGLLAAATQSLSMPASLGRMNQGTARLASLMNLGMSSSLNQQGAHSALSSAST

SEQ ID NO: 8365 - protein, 78 aa, Homo sapiens; identical to SEQ ID NO: 8364

SEQ ID NO: 8366 - protein, 87 aa, Homo sapiens
MSKSFQQSSLSRDSQGHGRDLSAAGIGLLAAATQSLSMPASLGRMNQGTARLASLMNLGMSSSLNQQGAHSALSSASTSSHNLQSIF

SEQ ID NO: 8367 - protein, 99 aa, Homo sapiens
MSKSFQQSSLSRDSQGHGRDLSAAGIGLLAAATQSLSMPASLGRMNQGTARLASLMNLGMSSSLNQQGAHSALSSASTSSHNLQSIFNIGSRGPLPLSS

SEQ ID NO: 8368 - protein, 100 aa, Homo sapiens
MSKSFQQSSLSRDSQGHGRDLSAAGIGLLAAATQSLSMPASLGRMNQGTARLASLMNLGMSSSLNQQGAHSALSSASTSSHNLQSIFNIGSRGPLPLSSQ

SEQ ID NO: 8369 - protein, 107 aa, Homo sapiens
MSKSFQQSSLSRDSQGHGRDLSAAGIGLLAAATQSLSMPASLGRMNQGTARLASLMNLGMSSSLNQQGAHSALSSASTSSHNLQSIFNIGSRGPLPLSSQHRGDADQ

SEQ ID NO: 8370 - protein, 847 aa, Homo sapiens
MSKSFQQSSLSRDSQGHGRDLSAAGIGLLAAATQSLSMPASLGRMNQGTARLASLMNLGMSSSLNQQGAHSALSSASTSSHNLQSIFNIGSRGPLPLSSQHRGDADQASNILASFGLSARDLDELSRYPEDKITPENLPQILLQLKRRRTEEGPTLSYGRDGRSATREPPYRVPRDDWEEKRHFRRDSFDDRGPSLNPVLDYDHGSRSQESGYYDRMDYEDDRLRDGERCRDDSFFGETSHNYHKFDSEYERMGRGPGPLQERSLFEKKRGAPPSSNIEDFHGLLPKGYPHLCSICDLPVHSNKEWSQHINGASHSRRCQLLLEIYPEWNPDNDTGHTMGDPFMLQQSTNPAPGILGPPPPSFHLGGPAVGPRGNLGAGNGNLQGPRHMQKGRVETSRVVHIMDFQRGKNLRYQLLQLVEPFGVISNHLILNKINEAFIEMATTEDAQAAVDYYTTTPALVFGKPVRVHLSQKYKRIKKPEGKPDQKFDQKQELGRVIHLSNLPHSGYSDSAVLKLAEPYGKIKNYILMRMKSQAFIEMETREDAMAMVDHCLKKALWFQGRCVKVDLSEKYKKLVLRIPNRGIDLLKKDKSRKRSYSPDGKESPSDKKSKTDGSQKTESSTEGKEQEEKSGEDGEKDTKDDQTEQEPNMLLESEDELLVDEEEAAALLESGSSVGDETDLANLGDVASDGKKEPSDKAVKKDGSASAAAKKKLKKVDKIEELDQENEAALENGIKNEENTEPGAESSENADDPNKDTSENADGQSDENKDDYTIPDEYRIGPYQPNVPVGIDYVIPKTGFYCKLCSLFYTNEEVAKNTHCSSLPHYQKLKKFLNKLAEERRQKKET

SEQ ID NO: 8371 - protein, 895 aa, Homo sapiens
MSKSFQQSSLSRDSQGHGRDLSAAGIGLLAAATQSLSMPASLGRMNQGTARLASLMNLGMSSSLNQQGAHSALSSASTSSHNLQSIFNIGSRGPLPLSSQHRGDADQASNILASFGLSARDLDELSRYPEDKITPENLPQILLQLKRRRTEEGPTLSYGRDGRSATREPPYRVPRDDWEEKRHFRRDSFDDRGPSLNPVLDYDHGSRSQESGYYDRMDYEDDRLRDGERCRDDSFFGETSHNYHKFDSEYERMGRGPGPLQERSLFEKKRGAPPSSNIEDFHGLLPKGYPHLCSICDLPVHSNKEWSQHINGASHSRRCQLLLEIYPEWNPDNDTGHTMGDPFMLQQSTNPAPGILGPPPPSFHLGGPAVGPRGNLGAGNGNLQGPRHMQKGRVETSRVVHIMDFQRGKNLRYQLLQLVEPFGVISNHLILNKINEAFIEMATTEDAQAAVDYYTTTPALVFGKPVRVHLSQKYKRIKKPEGKPDQKFDQKQELGRVIHLSNLPHSGYSDSAVLKLAEPYGKIKNYILMRMKSQAFIEMETREDAMAMVDHCLKKALWFQGRCVKVDLSEKYKKLVLRIPNRGIDLLKKDKSRKRSYSPDGKESPSDKKSKTDGSQKTESSTEGKEQEEKSGEDGEKDTKDDQTEQEPNMLLESEDELLVDEEEAAALLESGSSVGDETDLANLGDVASDGKKEPSDKAVKKDGSASAAAKKKLKKRRFPGSMEGFVTLDEVGDEEDSELQKLRKSGMAFKSGDKNDDGLVEIKVDKIEELDQENEAALENGIKNEENTEPGAESSENADDPNKDTSENADGQSDENKDDYTIPDEYRIGPYQPNVPVGIDYVIPKTGFYCKLCSLFYTNEEVAKNTHCSSLPHYQKLKKFLNKLAEERRQKKET

SEQ ID NO: 8372 - protein, 847 aa, Homo sapiens; identical to SEQ ID NO: 8370

SEQ ID NO: 8373 - protein, 895 aa, Homo sapiens; identical to SEQ ID NO: 8371

SEQ ID NO: 8374 - protein, 847 aa, Homo sapiens; identical to SEQ ID NO: 8370

SEQ ID NO: 8375 - protein, 794 aa, Homo sapiens
MSKSFQQSSLSRDSQGHGRDLSAAGIGLLAAATQSLSMPASLGRMNQGTARLASLMNLGMSSSLNQQGAHSALSSASTSSHNLQSIFNIGSRGPLPLSSQHRGDADQASNILASFGLSARDLDELSRYPEDKITPENLPQILLQLKRRRTEEGPTLSYGRDGRSATREPPYRVPRDDWEEKRHFRRDSFDDRGPSLNPVLDYDHGSRSQESGYYDRMDYEDDRLRDGERCRDDSFFGETSHNYHKFDSEYERMGRGPGPLQERSLFEKKRGAPPSSNIEDFHGLLPKGYPHLCSICDLPVHSNKEWSQHINGASHSRRCQLLLEIYPEWNPDNDTGHTMGDPFMLQQSTNPAPGILGPPPPSFHLGGPAVGPRGNLGAGNGNLQGPRHMQKGRVETSRVVHIMDFQRGKNLRYQLLQLVEPFGVISNHLILNKINEAFIEMATTEDAQAAVDYYTTTPALVFGKPVRVHLSQKYKRIKKPEGKPDQKFDQKQELGRVIHLSNLPHSGYSDSAVLKLAEPYGKIKNYILMRMKSQAFIEMETREDAMAMVDHCLKKALWFQGRCVKVDLSEKYKKLVLRIPNRGIDLLKKDKSRKRSYSPDGKESPSDKKSKTDGSQKTESSTEGKEQEEKSGEDGEKDTKDDQTEQEPNMLLESEDELLVDEEEAAALLESGSSVGDETDLANLGDVASDGKKEPSDKAVKKDGSASAAAKKKLKKVDKIEELDQENEAALENGIKNEENTEPGAESSENADDPNKDTSENADGQSDENKDDYTIPDEYRIGPYQPNVPVEISE

SEQ ID NO: 8376 - protein, 433 aa, Homo sapiens
MSKSFQQSSLSRDSQGHGRDLSAAGIGLLAAATQSLSMPASLGRMNQGTARLASLMNLGMSSSLNQQGAHSALSSASTSSHNLQSIFNIGSRGPLPLSSQHRGDADQASNILASFGLSARDLDELSRYPEDKITPENLPQILLQLKRRRTEEGPTLSYGRDGRSATREPPYRVPRDDWEEKRHFRRDSFDDRGPSLNPVLDYDHGSRSQESGYYDRMDYEDDRLRDGERCRDDSFFGETSHNYHKFDSEYERMGRGPGPLQERSLFEKKRGAPPSSNIEDFHGLLPKGYPHLCSICDLPVHSNKEWSQHINGASHSRRCQLLLEIYPEWNPDNDTGHTMGDPFMLQQSTNPAPGILGPPPPSFHLGGPAVGPRGNLGAGNGNLQGPRHMQKGRVETSRVVHIMDFQRGKNLRYQLLQLVEPFGVISNHLILNK

SEQ ID NO: 8377 - protein, 847 aa, Homo sapiens; identical to SEQ ID NO: 8370

SEQ ID NO: 8378 - protein, 334 aa, Homo sapiens
  VARIANT 1: note = misc_feature - Xaa can be any naturally occurring amino acid
XERCRDDSFFGETSHNYHKFDSEYERMGRGPGPLQERSLFEKKRGAPPSSNIEDFHGLLPKGYPHLCSICDLPVHSNKEWSQHINGASHSRRCQLLLEMGDPFMLQQSTNPAPGILGPPPPSFHLGGPAVGPRGNLGAGNGNLQGPRHMQKGRVETSRVVHIMDFQRGKNLRYQLLQLVEPFGVISNHLILNKINEAFIEMATTEDAQAAVDYYTTTPALVFGKPVRVHLSQKYKRIKKPEGKPDQKFDQKQELGRVIHLSNLPHSGYSDSAVLKLAEPYGKIKNYILMRMKSQAFIEMETREDAMAMVDHCLKKALWFQGRCVKVDLSEKYKK

SEQ ID NO: 8379 - protein, 235 aa, Homo sapiens
AIQISQQTPYWHCRLLFQLAQLHTLEKDLVSACDLLGVGAEYARVVGSEYTRALFLLSKGMLLLMERKLQEVHPLLTLCGQIVENWQGNPIQKESLRVFFLVLQVTHYLDAGQVKSVKPCLKQLQQCIQTISTLHDDEILPSNPADLFHWLPKEHMCVLVYLVTVMHSMQAGYLEKAQKYTDKALMQLEKLKSKSVLDCSPILSSFQVILLEHIIMCRLVTGHKATALQEISQVC

SEQ ID NO: 8380 - protein, 183 aa, Homo sapiens
KIRLCVHCLQAVFPFKPPQRIEARTHLQLGSVLYHHTKNSEQARSHLEKANSVDAAKPLLRKAIQISQQTPYWHCRLLFQLAQLHTLEKDLVSACDLLGVGAEYARVVGSEYTRALFLLSKGMLLLMERKLQEVHPLLTLCGQIVENWQGNPIQKESLRVFFLVLQVTHYLDAGQVKSVKPCL

SEQ ID NO: 8381 - protein, 613 aa, Homo sapiens
MAAQAAAAAQAAAAQAAQAEAADSWYLALLGFAEHFRTSSPPKIRLCVHCLQAVFPFKPPQRIEARTHLQLGSVLYHHTKNSEQARSHLEKAWLISQQIPQFEDVKFEAASLLSELYCQENSVDAAKPLLRKAIQISQQTPYWHCRLLFQLAQLHTLEKDLVSACDLLGVGAEYARVVGSEYTRALFLLSKGMLLLMERKLQEVHPLLTLCGQIVENWQGNPIQKESLRVFFLVLQVTHYLDAGQVKSVKPCLKQLQQCIQTISTLHDDEILPSNPADLFHWLPKEHMCVLVYLVTVMHSMQAGYLEKAQKYTDKALMQLEKLKMLDCSPILSSFQVILLEHIIMCRLVTGHKATALQEISQVCQLCQQSPRLFSNHAAQLHTLLGLYCVSVNCMDNAEAQFTTALRLTNHQELWAFIVTNLASVYIREGNRHQEVLYSLLERINPDHSFPVSSHCLRAAAFYVRGLFSFFQGRYNEAKRFLRETLKMSNAEDLNRLTACSLVLLGHIFYVLGNHRESNNMVVPAMQLASKIPDMSVQLWSSALLRDLNKACGNAMDAHEAAQMHQNFSQQLLQDHIEACSLPEHNLITWTDGPPPVQFQAQNGPNTSLASLL

SEQ ID NO: 8382 - protein, 202 aa, Homo sapiens
AGAGGGAAAVAAGGVVTTTASGKRIRKNHACEMCGKAFRDVYHLNRHKLSHSDEKPYQCPVCQQRFKRKDRMSYHVRSHDGAVHKPYNCSHCGKSFSRPDHLNSHVRQVHSTERPFKCEKCEAAFATKDRLRAHTVRHEEKVPCHVCGKMLSSAYISDHMKVHSQGPHHVCELCNKGTCRGLPGGPGAEGGRLARRLATDTG

SEQ ID NO: 8383 - protein, 454 aa, Homo sapiens
MDPSNWSSFIFQGHAQNPLQVGAELQSRFFASQGCAQSPFQAAPAPPPTPQAPAAEPLQVDLLPVLAAAQESAAAAAAAAAAAAAVAAAPPAPAAASTVDTAALKQPPAPPPPPPPVSAPAAEAAPPASAATIAAAAATAVVAPTSTVAVAPVASALEKKTKSKGPYICALCAKEFKNGYNLRRHEAIHTGAKAGRVPSGAMKMPTMVPLSLLSVPQLSGAGGGGGEAGAGGGAAAVAAGGVVTTTASGKRIRKNHACEMCGKAFRDVYHLNRHKLSHSDEKPYQCPVCQQRFKRKDRMSYHVRSHDGAVHKPYNCSHCGKSFSRPDHLNSHVRQVHSTERPFKCEKCEAAFATKDRLRAHTVRHEEKVPCHVCGKMLSSAYISDHMKVHSQGPHHVCELCNKGTGEVCPMAAAAAAAAAAAAAAVAAPPTAVGSLSGAEGVPVSSQPLPSQPW

SEQ ID NO: 8384 - protein, 184 aa, Homo sapiens
MFPVFPCTLLAPPFPVLGLDSRGVGGLMNSFPPPQGHAQNPLQVGAELQSRFFASQGCAQSPFQAAPAPPPTPQAPAAEPLQVDLLPVLAAAQDGGSGSSGSSSSPSHSCGLPLGGGGGACELSATSLPTLVSSKLVAGERGEWSRVPWYKLLSPLFSHQLLFPYQPRSLQKERRKKCFLRGIR

SEQ ID NO: 8385 - protein, 186 aa, Homo sapiens
MFPVFPCTLLAPPFPVLGLDSRGVGGLMNSFPPPQGHAQNPLQVGAELQSRFFASQGCAQSPFQAAPAPPPTPQAPAAEPLQVDLLPVLAAAQDGSGGSGSSGSSSSPSHSCGLPLGGGGGACELSATSLPTLVSSKLVAGERGEWSRVPWYKLLSPLFSHQLLFPYQPRSLQKERRKKCFLRGIR

SEQ ID NO: 8386 - protein, 493 aa, Homo sapiens
MFPVFPCTLLAPPFPVLGLDSRGVGGLMNSFPPPQGHAQNPLQVGAELQSRFFASQGCAQSPFQAAPAPPPTPQAPAAEPLQVDLLPVLAAAQESAAAAAAAAAAAAAVAAAPPAPAAASTVDTAALKQPPAPPPPPPPVSAPAAEAAPPASAATIAAAAATAVVAPTSTVAVAPVASALEKKTKSKGPYICALCAKEFKNGYNLRRHEAIHTGAKAGRVPSGAMKMPTMVPLSLLSVPQLSGAGGGGGEAGAGGGAAAVAAGGVVTTTASGKRIRKNHACEMCGKAFRDVYHLNRHKLSHSDEKPYQCPVCQQRFKRKDRMSYHVRSHDGAVHKPYNCSHCGKSFSRPDHLNSHVRQVHSTERPFKCEKCEAAFATKDRLRAHTVRHEEKVPCHVCGKMLSSAYISDHMKVHSQGPHHVCELCNKGFTTAAYLRIHAVKDHGLQAPRADRILCKLCSVHCKTPAQLAGHMQTHLGGAAPPVPGDAPQPQPTC

SEQ ID NO: 8387 - protein, 477 aa, Homo sapiens
MFPVFPCTLLAPPFPVLGLDSRGVGGLMNSFPPPQGHAQNPLQVGAELQSRFFASQGCAQSPFQAAPAPPPTPQAPAAEPLQVDLLPVLAAAQESAAAAAAAAAAAAAVAAAPPAPAAASTVDTAALKQPPAPPPPPPPVSAPAAEAAPPASAATIAAAAATAVVAPTSTVAVAPVASALEKKTKSKGPYICALCAKEFKNGYNLRRHEAIHTGAKAGRVPSGAMKMPTMVPLSLLSVPQLSGAGGGGGEAGAGGGAAAVAAGGVVTTTASGKRIRKNHACEMCGKAFRDVYHLNRHKLSHSDEKPYQCPVCQQRFKRKDRMSYHVRSHDGAVHKPYNCSHCGKSFSRPDHLNSHVRQVHSTERPFKCEKCEAAFATKDRLRAHTVRHEEKVPCHVCGKMLSSAYISDHMKVHSQGPHHVCELCNKGTGEVCPMAAAAAAAAAAAAAAVAAPPTAVGSLSGAEGVPVSSQPLPSQPW

SEQ ID NO: 8388 - protein, 84 aa, Homo sapiens
MFPVFPCTLLAPPFPVLGLDSRGVGGLMNSFPPPQGHAQNPLQVGAELQSRFFASQGCAQSPFQAGSPQQSRQTSALNRTALQM

SEQ ID NO: 8389 - protein, 172 aa, Homo sapiens
MFPVFPCTLLAPPFPVLGLDSRGVGGLMNSFPPPQGHAQNPLQVGAELQSRFFASQGCAQSPFQKCEAAFATKDRLRAHTVRHEEKVPCHVCGKMLSSAYISDHMKVHSQGPHHVCELCNKGTGEVCPMAAAAAAAAAAAAAAVAAPPTAVGSLSGAEGVPVSSQPLPSQPW

SEQ ID NO: 8390 - protein, 252 aa, Homo sapiens [sequence omitted]

SEQ ID NO: 8391 - protein, 79 aa, Homo sapiens
MLSSAYISDHMKVHSQGPHHVCELCNKGFTTAAYLRIHAVKDHGLQAPRADRILCKLCSVHCKTPAQLAGHMQTHLGGA

SEQ ID NO: 8392 - protein, 94 aa, Homo sapiens
MLSSAYISDHMKVHSQGPHHVCELCNKGFTTAAYLRIHAVKDHGLQAPRADRILCKLCSVHCKTPAQLAGHMQTHLGGAAPPVPGDAPQPQPTC

SEQ ID NO: 8393 - protein, 53 aa, Homo sapiens
MLSSAYISDHMKVHSQGPHHVCELCNKGTCRGLPGGPGAEGGRLARRLATDTG

SEQ ID NO: 8394 - protein, 78 aa, Homo sapiens
MLSSAYISDHMKVHSQGPHHVCELCNKGTGEVCPMAAAAAAAAAAAAAAVAAPPTAVGSLSGAEGVPVSSQPLPSQPW

SEQ ID NO: 8395 - protein, 152 aa, Homo sapiens
SFSRCARGLGRPLGRGEGGTRRRPDHLNSHVRQVHSTERPFKCEKCEAAFATKDRLRAHTVRHEEKVPCHVCGKMLSSAYISDHMKVHSQGPHHVCELCNKGTGEVCPMAAAAAAAAAAAAAAVAAPPTAVGSLSGAEGVPVSSQPLPSQPW

SEQ ID NO: 8396 - protein, 196 aa, Homo sapiens
  VARIANT 1: note = misc_feature - Xaa can be any naturally occurring amino acid
XGAVHKPYNCSHCGKSFSRPDHLNSHVRQVHSTERPFKCEKCEAAFATKDRLRAHTVRHEEKVPCHVCGKMLSSAYISDHMKVHSQGPHHVCELCNKGTGEVCPMAAAAAAAAAAAAAAVAAPPTAVGSLSGAEGVPVSSQPLPSQPCSSPGLVFSSLFPTTEEVVALAMSSCSCVPCMYPTLHPFLLRGPHYNKF

SEQ ID NO: 8397 - protein, 177 aa, Homo sapiens [sequence omitted]

SEQ ID NO: 8398 - protein, 504 aa, Homo sapiens
GMGAGPACPLPPLAGGEAFPFPSPEQGLALSGAGFPGMLGALPLPLSLGQPPPSPLLNHSLFGVLTGGGGQPPPEPLLPPPGGPGPPLAPGEPEGPSLLVASLLPPPPSDLLPPPSAPPSNLLASFLPLLALGPTAGDGEGSAEGAGGPSGEPFSGLGDLSPLLFPPLSAPPTLIALNSALLAATLDPPSGTPPQPCVLSAPQPGPPTSSVTTATTDPGASSLGKAPSNSGRPPQLLSPLLGASLLGDLSSLTSSPGALPSLLQPPGPLLSGQLGLQLLPGGGAPPPLSEASSPLACLLQSLQIPPEQPEAPCLPPESPASALEPEPARPPLSALAPPHGSPDPPVPELLTGRGSGKRGRRGGGGLRGINGEARPARGRKPGSRREPGRLALKWGTRGGFNGQMERSPRRTHHWQHNGELAEGGAEPKDPPPPGPHSEDLKVPPGVVRKSRRGRRRKYNPTRNSNSSRQDITLEPSPTARAAVPLPPRARPGRPAKNKRRKLAP

SEQ ID NO: 8399 - protein, 47 aa, Homo sapiens
MNGGNESSGADRAGGPVATSVPIGWQRCVREGAVLYIRRICNLSTVL

SEQ ID NO: 8400 - protein, 45 aa, Homo sapiens
MNGGNESSGADRAGGPVATSVPIGWQRCVREGAVLYISPSGTELS

SEQ ID NO: 8401 - protein, 53 aa, Homo sapiens
MNGGNESSGADRAGGPVATSVPIGWQRCVREGAVLYISPSGTELSSLEQTRSY

SEQ ID NO: 8402 - protein, 53 aa, Homo sapiens; identical to SEQ ID NO: 8401

SEQ ID NO: 8403 - protein, 73 aa, Homo sapiens
MNGGNESSGADRAGGPVATSVPIGWQRCVREGAVLYISPSGTELSSLEQTRSYLLSDGTCKCGLECPLNVPKV

SEQ ID NO: 8404 - protein, 148 aa, Homo sapiens
MNGGNESSGADRAGGPVATSVPIGWQRCVREGAVLYISPSGTELSSLEQTRSYLLSDGTCKCGLECPLNVPKVFNFDPLAPVTPGGAGVGPASEEDMTKLCNHRRKAVAMATLYRSMETTCSHSSPGEGASPQMFHTVSPGPPSARPP

SEQ ID NO: 8405 - protein, 1003 aa, Homo sapiens
MNGGNESSGADRAGGPVATSVPIGWQRCVREGAVLYISPSGTELSSLEQTRSYLLSDGTCKCGLECPLNVPKVFNFDPLAPVTPGGAGVGPASEEDMTKLCNHRRKAVAMATLYRSMETTCSHSSPGEGASPQMFHTVSPGPPSARPPCRVPPTTPLNGGPGSLPPEPPSVSQAFPTLAGPGGLFPPRLADPVPSGGSSSPRFLPRGNAPSPAPPPPPAISLNAPSYNWGAALRSSLVPSDLGSPPAPHASSSPPSDPPLFHCSDALTPPPLPPSNNLPAHPGPASQPPVSSATMHLPLVLGPLGGAPTVEGPGAPPFLASSLLSAAAKAQHPPLPPPSTLQGRRPRAQAPSASHSSSLRPSQRRPRRPPTVFRLLEGRGPQTPRRSRPRAPAPVPQPFSLPEPSQPILPSVLSLLGLPTPGPSHSDGSFNLLGSDAHLPPPPTLSSGSPPQPRHPIQPSLPGTTSGSLSSVPGAPAPPAASKAPVVPSPVLQSPSEGLGMGAGPACPLPPLAGGEAFPFPSPEQGLALSGAGFPGMLGALPLPLSLGQPPPSPLLNHSLFGVLTGGGGQPPPEPLLPPPGGPGPPLAPGEPEGPSLLVASLLPPPPSDLLPPPSAPPSNLLASFLPLLALGPTAGDGEGSAEGAGGPSGEPFSGLGDLSPLLFPPLSAPPTLIALNSALLAATLDPPSGTPPQPCVLSAPQPGPPTSSVTTATTDPGASSLGKAPSNSGRPPQLLSPLLGASLLGDLSSLTSSPGALPSLLQPPGPLLSGQLGLQLLPGGGAPPPLSEASSPLACLLQSLQIPPEQPEAPCLPPESPASALEPEPARPPLSALAPPHGSPDPPVPELLTGRGSGKRGRRGGGGLRGINGEARPARGRKPGSRREPGRLALKWGTRGGFNGQMERSPRRTHHWQHNGELAEGGAEPKDPPPPGPHSEDLKVPPGVVRKSRRGRRRKYNPTRNSNSSRQDITLEPSPTARAAVPLPPRARPGRPAKNKRRKLAP

SEQ ID NO: 8406 - protein, 66 aa, Homo sapiens
MTKLCNHRRKAVAMATLYRSMETTCSHSSPGEGASPQMFHTVSPGPPSARPPCRVPPTTPLNGGPG

SEQ ID NO: 8407 - protein, 27 aa, Homo sapiens
  VARIANT 1: note = misc_feature - Xaa can be any naturally occurring amino acid
XARAAVPLPPRARPGRPAKNKRRKLAP

SEQ ID NO: 8408 - protein, 190 aa, Homo sapiens
  VARIANT 1: note = misc_feature - Xaa can be any naturally occurring amino acid
XLLSGQLGLQLLPGGGAPPPLSEASSPLACLLQSLQQIPPEQPEAPCLPPESPASALEPEPARPPLSALAPPHGSPDPPVPELLTGRGSGKRGRRGGGGLRGINGEARPARGRKPGSRREPGRLALKWGTRGGFNGQMERSPRRTHHWQHNGELAEGGAEPKDPPPPGPHSEDLKVPPGVVRKSRRGRRR

SEQ ID NO: 8409 - protein, 248 aa, Homo sapiens
MSLFPSLPLLLLSMVAASYSETVTCEDAQKTCPAVIACSSPGINGFPGKDGRDGTKGEKGEPGQGLRGLQGPPGKLGPPGNPGPSGSPGPKGQKGDPGKSPDGDSSLAASERKALQTEMARIKKWLTFSLGKQVGNKFFLTNGEIMTFEKVKALCVKFQASVATPRNAAENGAIQNLIKEEAFLGITDEKTEGQFVDLTGNRLTYTNWNEGEPNNAGSDEDCVLLLKNGQWNDVPCSTSHLAVCEFPI

SEQ ID NO: 8410 - protein, 90 aa, Homo sapiens
MAMLAQQMQLANAMMPGAPLQPVPMFSVAPSLATNASAAAFNPYLGPVSPSLVPAEILPTAPMLVTGNPGVPVPAAAAAAAQKLMRTDRL

SEQ ID NO: 8411 - protein, 155 aa, Homo sapiens
MAMLAQQMQLANAMMPGAPLQPVPMFSVAPSLATNASAAAFNPYLGPVSPSLVPAEILPTAPMLVTGNPGVPVPAAAAAAAQKLMRTDRLEVCREYQRGNCNRGENDCRFAHPADSTMIDTNDNTVTVCMDYIKGRCSREKCKYFHPPAHLQAKI

SEQ ID NO: 8412 - protein, 388 aa, Homo sapiens
MAVSVTPIRDTKWLTLEVCREFQRGTCSRPDTECKFAHPSKSCQVENGRVIACFDSLKGRCSRENCKYLHPPPHLKTQLEINGRNNLIQQKNMAMLAQQMQLANAMMPGAPLQPVPMFSVAPSLATNASAAAFNPYLGPVSPSLVPAEILPTAPMLVTGNPGVPVPAAAAAAAQKLMRTDRLEVCREYQRGNCNRGENDCRFAHPADSTMIDTNDNTVTVCMDYIKGRCSREKCKYFHPPAHLQAKIKAAQYQVNQAAAAQAAATAAAMTQSAVKSLKRPLEATFDLGIPQAVLPPLPKRPALEKTNGATAVFNTGIFQYQQALANMQLQQHTAFLPPVPMVHGATPATVSAATTSATSVPFAATATANQIPIISAEHLTSHKYVTQM

SEQ ID NO: 8413 - protein, 400 aa, Homo sapiens
MAVSVTPIRDTKWLTLEVCREFQRGTCSRPDTECKFAHPSKSCQVENGRVIACFDSLKGRCSRENCKYLHPPPHLKTQLEINGRNNLIQQKNMAMLAQQMQLANAMMPGAPLQPVPMFSVAPSLATNASAAAFNPYLGPVSPSLVPAEILPTAPMLVTGNPGVPVPAAAAAAAQKLMRTDRLEVCREYQRGNCNRGENDCRFAHPADSTMIDTNDNTVTVCMDYIKGRCSREKCKYFHPPAHLQAKIKAAQYQVNQAAAAQAAATAAAMTQSAVKSLKRPLEATFDLGIPQAVLPPLPKRPALEKTNGATAVFNTGIFQYQQALANMQLQQHTAFLPPGSILCMTPATSVVPMVHGATPATVSAATTSATSVPFAATATANQIPIISAEHLTSHKYVTQM

SEQ ID NO: 8414 - protein, 370 aa, Homo sapiens
MAVSVTPIRDTKWLTLEVCREFQRGTCSRPDTECKFAHPSKSCQVENGRVIACFDSLKGRCSRENCKYLHPPPHLKTQLEINGRNNLIQQKNMAMLAQQMQLANAMMPGAPLQPVPMFSVAPSLATNASAAAFNPYLGPVSPSLVPAEILPTAPMLVTGNPGVPVPAAAAAAAQKLMRTDRLEVCREYQRGNCNRGENDCRFAHPADSTMIDTNDNTVTVCMDYIKGRCSREKCKYFHPPAHLQAKIKAAQYQVNQAAAAQAAATAAAMGIPQAVLPPLPKRPALEKTNGATAVFNTGIFQYQQALANMQLQQHTAFLPPVPMVHGATPATVSAATTSATSVPFAATATANQIPIISAEHLTSHKYVTQM

SEQ ID NO: 8415 - protein, 382 aa, Homo sapiens
MAVSVTPIRDTKWLTLEVCREFQRGTCSRPDTECKFAHPSKSCQVENGRVIACFDSLKGRCSRENCKYLHPPPHLKTQLEINGRNNLIQQKNMAMLAQQMQLANAMMPGAPLQPVPMFSVAPSLATNASAAAFNPYLGPVSPSLVPAEILPTAPMLVTGNPGVPVPAAAAAAAQKLMRTDRLEVCREYQRGNCNRGENDCRFAHPADSTMIDTNDNTVTVCMDYIKGRCSREKCKYFHPPAHLQAKIKAAQYQVNQAAAAQAAATAAAMGIPQAVLPPLPKRPALEKTNGATAVFNTGIFQYQQALANMQLQQHTAFLPPGSILCMTPATSVVPMVHGATPATVSAATTSATSVPFAATATANQIPIISAEHLTSHKYVTQM

SEQ ID NO: 8416 - protein, 340 aa, Homo sapiens
MAVSVTPIRDTKWLTLEVCREFQRGTCSRPDTECKFAHPSKSCQVENGRVIACFDSLKGRCSRENCKYLHPPPHLKTQLEINGRNNLIQQKNMAMLAQQMQLANAMMPGAPLQPVPMFSVAPSLATNASAAAFNPYLGPVSPSLVPAEILPTAPMLVTGNPGVPVPAAAAAAAQKLMRTDRLEVCREYQRGNCNRGENDCRFAHPADSTMIDTNDNTVTVCMDYIKGRCSREKCKYFHPPAHLQAKIKAAQYQVNQAAAAQAAATAAAMFPWCTVLRQPLCPQQQHLPQVFPSLQQPQPTSPILDASTLLGATSCPAAAGKMIPIISAEHLTSHKYVTQM

SEQ ID NO: 8417 - protein, 342 aa, Homo sapiens
MAVSVTPIRDTKWLTLEVCREFQRGTCSRPDTECKFAHPSKSCQVENGRVIACFDSLKGRCSRENCKYLHPPPHLKTQLEINGRNNLIQQKNMAMLAQQMQLANAMMPGAPLQPVPMFSVAPSLATNASAAAFNPYLGPVSPSLVPAEILPTAPMLVTGNPGVPVPAAAAAAAQKLMRTDRLEVCREYQRGNCNRGENDCRFAHPADSTMIDTNDNTVTVCMDYIKGRCSREKCKYFHPPAHLQAKIKAAQYQVNQAAAAQAAATAAAMGIPQAVLPPLPKRPALEKTNGATAVFNTGIFQYQQALANMQLQQHTAFLPPGSILCMTPATSVDTHNICRTSD

SEQ ID NO: 8418 - protein, 340 aa, Homo sapiens; identical to SEQ ID NO: 8416

SEQ ID NO: 8419 - protein, 342 aa, Homo sapiens; identical to SEQ ID NO: 8417

SEQ ID NO: 8420 - protein, 388 aa, Homo sapiens; identical to SEQ ID NO: 8412

SEQ ID NO: 8421 - protein, 348 aa, Homo sapiens
MAVSVTPIRDTKWLTLEVCREFQRGTCSRPDTECKFAHPSKSCQVENGRVIACFDSLKGRCSRENCKYLHPPPHLKTQLEINGRNNLIQQKNMAMLAQQMQLANAMMPGAPLQPVPMFSVAPSLATNASAAAFNPYLGPVSPSLVPAEILPTAPMLVTGNPGVPVPAAAAAAAQKLMRTDRLEVCREYQRGNCNRGENDCRFAHPADSTMIDTNDNTVTVCMDYIKGRCSREKCKYFHPPAHLQAKIKAAQYQVNQAAAAQAAATAAAMTQSAVKSLKRPLEATFDLGIPQAVLPPLPKRPALEKTNGATAVFNTGIFQYQQALANMQLQQHTAFLPPDTHNICRTSD

SEQ ID NO: 8422 - protein, 314 aa, Homo sapiens
MAVSVTPIRDTKWLTLEVCREFQRGTCSRPDTECKFAHPSKSCQVENGRVIACFDSLKGRCSRENCKYLHPPPHLKTQLEINGRNNLIQQKNMAMLAQQMQLANAMMPGAPLQPVVCREYQRGNCNRGENDCRFAHPADSTMIDTNDNTVTVCMDYIKGRCSREKCKYFHPPAHLQAKIKAAQYQVNQAAAAQAAATAAAMGIPQAVLPPLPKRPALEKTNGATAVFNTGIFQYQQALANMQLQQHTAFLPPGSILCMTPATSVVPMVHGATPATVSAATTSATSVPFAATATANQIPIISAEHLTSHKYVTQM

SEQ ID NO: 8423 - protein, 314 aa, Homo sapiens; identical to SEQ ID NO: 8422

SEQ ID NO: 8424 - protein, 302 aa, Homo sapiens
MAVSVTPIRDTKWLTLEVCREFQRGTCSRPDTECKFAHPSKSCQVENGRVIACFDSLKGRCSRENCKYLHPPPHLKTQLEINGRNNLIQQKNMAMLAQQMQLANAMMPGAPLQPVVCREYQRGNCNRGENDCRFAHPADSTMIDTNDNTVTVCMDYIKGRCSREKCKYFHPPAHLQAKIKAAQYQVNQAAAAQAAATAAAMGIPQAVLPPLPKRPALEKTNGATAVFNTGIFQYQQALANMQLQQHTAFLPPVPMVHGATPATVSAATTSATSVPFAATATANQIPIISAEHLTSHKYVTQM

SEQ ID NO: 8425 - protein, 343 aa, Homo sapiens
MGRCSRENCKYLHPPPHLKTQLEINGRNNLIQQKNMAMLAQQMQLANAMMPGAPLQPVPMFSVAPSLATNASAAAFNPYLGPVSPSLVPAEILPTAPMLVTGNPGVPVPAAAAAAAQKLMRTDRLEVCREYQRGNCNRGENDCRFAHPADSTMIDTNDNTVTVCMDYIKGRCSREKCKYFHPPAHLQAKIKAAQYQVNQAAAAQAAATAAAMTQSAVKSLKRPLEATFDLGIPQAVLPPLPKRPALEKTNGATAVFNTGIFQYQQALANMQLQQHTAFLPPGSILCMTPATSVVPMVHGATPATVSAATTSATSVPFAATATANQIPIISAEHLTSHKYVTQM

SEQ ID NO: 8426 - protein, 58 aa, Homo sapiens
MLGRCSRENCKYLHPPPHLKTQLEINGRNNLIQQKNMAMLAQQMQLANAMMPGAPLQP

SEQ ID NO: 8427 - protein, 210 aa, Homo sapiens
QQMQLANAMMPGAPLQPVPMFSVAPSLATNASAAAFNPYLGPVSPSLVPAEILPTAPMLVTGNPGVPVPAAAAAAAQKLMRTDRLEVCREYQRGNCNRGENDCRFAHPADSTMIDTNDNTVTVCMDYIKGRCSREKCKYFHPPAHLQAKIKAAQYQVNQAAAAQAAATAAAMALANMQLQQHTAFLPPGSILCMTPATSVDTHNICRTSD

SEQ ID NO: 8428 - protein, 329 aa, Homo sapiens
  VARIANT 1: note = misc_feature - Xaa can be any naturally occurring amino acid
XVSVTPIRDTKWLTLEVCREFQRGTCSRPDTECKFAHPSKSCQVENGRVIACFDSLKGRCSRENCKYLHPPPHLKTQLEINGRNNLIQQKNMAMLAQQMQLANAMMPGAPLQPVPMFSVAPSLATNASAAAFNPYLGPVSPSLVPAEILPTAPMLVTGNPGVPVPAAAAAAAQKLMRTDRLEVCREYQRGNCNRGENDCRFAHPADSTMIDTNDNTVTVCMDYIKGRCSREKCKYFHPPAHLQAKIKAAQYQVNQAAAAQAAATAAAMGIPQAVLPPLPKRPALEKTNGATAVFNTGIFQYQQALANMQLQQHTAFLPPDTHNICRTSD

SEQ ID NO: 8429 - protein, 56 aa, Homo sapiens
MAAASAVSVLLVAAERNRWHRLPSLLLPPRLSIQDAVFSQKTWNLLNFVSKKELFL

SEQ ID NO: 8430 - protein, 598 aa, Homo sapiens
MAAASAVSVLLVAAERNRWHRLPSLLLPPRTWVWRQRTMKYTTATDEAYSIGPAPSQQSYLSMEKIIQVAKTSAAQAIHPGCGFLSENMEFAELCKQEGIIFIGPPPSAIRDMGIKSTSKSIMAAAGVPVVEGYHGEDQSDQCLKEHARRIGYPVMIKAVRGGGGKGMRIVRSEQEFQEQLESARREAKKSFNDDAMLIEKFVDTPRHVEVQVFGDHHGNAVYLFERDCSVQRRHQKIIEEAPAPGIKSEVRKKLGEAAVRAAKAVNYVGAGTVEFIMDSKHNFCFMEMNTRLQVEHPVTEMITGTDLVEWQLRIAAGEKIPLSQEEITLQGHAFEARIYAEDPSNNFMPVAGPLVHLSTPRADPSTRIETGVRQGDEVSVHYDPMIAKLVVWAADRQAALTKLRYSLRQYNIVGLHTNIDFLLNLSGHPEFEAGNVHTDFIPQHHKQLLLSRKAAAKESLCQAALGLILKEKAMTDTFTLQAHDQFSPFSSSSGRRLNISYTRNMTLKDGKNNVAIAVTYNHDGSYSMQIEDKTFQVLGNLYSEGDCTYLKCSVNGVASKAKLIILENTIYLFSKEGSIEIDIPVPKYLSSVSSQET

SEQ ID NO: 8431 - protein, 47 aa, Homo sapiens
MAAASAVSVLLVAAERNRWHRLPSLLLPPRTWVWRQRTMKYTTATGR

SEQ ID NO: 8432 - protein, 47 aa, Homo sapiens; identical to SEQ ID NO: 8431

SEQ ID NO: 8433 - protein, 725 aa, Homo sapiens
MAAASAVSVLLVAAERNRWHRLPSLLLPPRTWVWRQRTMKYTTATGRNITKVLIANRGEIACRVMRTAKKLGVQTVAVYSEADRNSMHVDMADEAYSIGPAPSQQSYLSMEKIIQVAKTSAAQAIHPGCGFLSENMEFAELCKQEGIIFIGPPPSAIRDMGIKSTSKSIMAAAGVPVVEGYHGEDQSDQCLKEHARRIGYPVMIKAVRGGGGKGMRIVRSEQEFQEQLESARREAKKSFNDDAMLIEKFVDTPRHVEVQVFGDHHGNAVYLFERDCSVQRRHQKIIEEAPAPGIKSEVRKKLGEAAVRAAKAVNYVGAGTVEFIMDSKHNFCFMEMNTRLQVEHPVTEMITGTDLVEWQLRIAAGEKIPLSQEEITLQGHAFEARIYAEDPSNNFMPVAGPLVHLSTPRADPSTRIETGVRQGDEVSVHYDPMIAKLVVWAADRQAALTKLRYSLRQYNIVGLHTNIDFLLNLSGHPEFEAGNVHTDFIPQHHKQLLLSRKAAAKESLCQAALGLILKEKAMTDTFTLQAHDQFSPFSSSSGRRLNISYTRNMTLKDGKNNVAIAVTYNHDGSYSMQIEDKTFQVLGNLYSEGDCTYLKCSVNGVASKAKLIILENTIYLFSKEGSIEIDIPVPKYLSSVSSQETQGGPLAPMTGTIEKVFVKAGDKVKAGDSLMVMIAMKMEHTIKSPKDGTVKKVFYREGAQANRHTPLVEFEEEESDKRESE

SEQ ID NO: 8434 - protein, 112 aa, Homo sapiens
MAAASAVSVLLVAAERNRWHRLPSLLLPPRTWVWRQRTMKYTTATGRNITKVLIANRGEIACRVMRTAKKLGVQTVAVYSEADRNSMHVDMQDDLDFTEKIKLRFLPQNLLT

SEQ ID NO: 8435 - protein, 61 aa, Homo sapiens
MAAASAVSVLLVAAERNRWHRLPSLLLPPRTWVWRQRTMKYTTATGYPSRMRFSLRKHGIC

SEQ ID NO: 8436 - protein, 61 aa, Homo sapiens; identical to SEQ ID NO: 8435

SEQ ID NO: 8437 - protein, 616 aa, Homo sapiens
MEKIIQVAKTSAAQAIHPGCGFLSENMEFAELCKQEGIIFIGPPPSAIRDMGIKSTSKSIMAAAGVPVVEGYHGEDQSDQCLKEHARRIGYPVMIKAVRGGGGKGMRIVRSEQEFQEQLESARREAKKSFNDDAMLIEKFVDTPRHVEVQVFGDHHGNAVYLFERDCSVQRRHQKIIEEAPAPGIKSEVRKKLGEAAVRAAKAVNYVGAGTVEFIMDSKHNFCFMEMNTRLQVEHPVTEMITGTDLVEWQLRIAAGEKIPLSQEEITLQGHAFEARIYAEDPSNNFMPVAGPLVHLSTPRADPSTRIETGVRQGDEVSVHYDPMIAKLVVWAADRQAALTKLRYSLRQYNIVGLHTNIDFLLNLSGHPEFEAGNVHTDFIPQHHKQLLLSRKAAAKESLCQAALGLILKEKAMTDTFTLQAHDQFSPFSSSSGRRLNISYTRNMTLKDGKNNVAIAVTYNHDGSYSMQIEDKTFQVLGNLYSEGDCTYLKCSVNGVASKAKLIILENTIYLFSKEGSIEIDIPVPKYLSSVSSQETQGGPLAPMTGTIEKVFVKAGDKVKAGDSLMVMIAMKMEHTIKSPKDGTVKKVFYREGAQANRHTPLVEFEEEESDKRESE

SEQ ID NO: 8438 - protein, 575 aa, Homo sapiens
MEKIIQVAKTSAAQHIQSIMAAAGVPVVEGYHGEDQSDQCLKEHARRIGYPVMIKAVRGGGGKGMRIVRSEQEFQEQLESARREAKKSFNDDAMLIEKFVDTPRHVEVQVFGDHHGNAVYLFERDCSVQRRHQKIIEEAPAPGIKSEVRKKLGEAAVRAAKAVNYVGAGTVEFIMDSKHNFCFMEMNTRLQVEHPVTEMITGTDLVEWQLRIAAGEKIPLSQEEITLQGHAFEARIYAEDPSNNFMPVAGPLVHLSTPRADPSTRIETGVRQGDEVSVHYDPMIAKLVVWAADRQAALTKLRYSLRQYNIVGLHTNIDFLLNLSGHPEFEAGNVHTDFIPQHHKQLLLSRKAAAKESLCQAALGLILKEKAMTDTFTLQAHDQFSPFSSSSGRRLNISYTRNMTLKDGKNNVAIAVTYNHDGSYSMQIEDKTFQVLGNLYSEGDCTYLKCSVNGVASKAKLIILENTIYLFSKEGSIEIDIPVPKYLSSVSSQETQGGPLAPMTGTIEKVFVKAGDKVKAGDSLMVMIAMKMEHTIKSPKDGTVKKVFYREGAQANRHTPLVEFEEEESDKRESE

SEQ ID NO: 8439 - protein, 434 aa, Homo sapiens
MKYTTATGRNITKVLIANRGEIACRVMRTAKKLGVQTVAVYSEADRNSMHVDMADEAYSIGPAPSQQSYLSMEKIIQVAKTSAAQAIHPGCGFLSENMEFAELCKQEGIIFIGPPPSAIRDMGIKSTSKSIMAAAGVPVVEGYHGEDQSDQCLKEHARRIGYPVMIKAVRGGGGKGMRIVRSEQEFQEQLESARREAKKSFNDDAMLIEKFVDTPRHVEVQVFGDHHGNAVYLFERDCSVQRRHQKIIEEAPAPGIKSEVRKKLGEAAVRAAKAVNYVGAGTVEFIMDSKHNFCFMEMNTRLQVEHPVTEMITGTDLVEWQLRIAAGEKIPLSQEEITLQGHAFEARIYAEDPSNNFMPVAGPLVHLSTPRADPSTRIETGVRQGDEVSVHYDPMIAKLVVWAADRQAALTKLRYSLRQYNINSLHFRLAVEED

SEQ ID NO: 8440 - protein, 434 aa, Homo sapiens; identical to SEQ ID NO: 8439

SEQ ID NO: 8441 - protein, 119 aa, Homo sapiens
MVLPLPWLSRYHFLRLLLPSWSLAPQGSHGCCSQNPKASMEEQTSSRGNGKMTSPPRGPGTHRTAELARAEELLEQQLELYQALLEGQEGAWEAQALVLKIQKLKEQMRRHQESLGGGA

SEQ ID NO: 8442 - protein, 78 aa, Homo sapiens
LGRLNHVAIAVPDLEKAAAFYKNILGAQVDNINAAVMDLKKKKIRSLSEEVKIGAHGKPVIFLHPKDCGGVLVELEQA

SEQ ID NO: 8443 - protein, 176 aa, Homo sapiens
MARVLKAAAANAVGLFSRLQAPIPTVRASSTSQPLDQVTGSVWNLGRLNHVAIAVPDLEKAAAFYKNILGAQVSEAVPLPEHGVSVVFVNLGNTKMELLHPLGRDSPIAGFLQKNKAGGMHHICIEVDNINAAVMDLKKKKIRSLSEEVKIGAHGKPVIFLHPKDCGGVLVELEQA

SEQ ID NO: 8444 - protein, 31 aa, Homo sapiens
MELLHPLGRDSPIAGFLQKNKAGGMHHICIE

SEQ ID NO: 8445 - protein, 31 aa, Homo sapiens; identical to SEQ ID NO: 8444

SEQ ID NO: 8446 - protein, 1067 aa, Homo sapiens
MAEKGASRGTLRRLWSLPRRRRGTAGRSRPDEIMHQDIVPLCAADIQDQLKKRFAYLSGGRGQDGSPVITFPDYPAFSEIPDKEFQNVMTYLTSIPSLQDAGIGFILVIDRRRDKWTSVKASVLRIAASFPANLQLVLVLRPTGFFQRTLSDIAFKFNRDDFKMKVPVIMLSSVPDLHGYIDKSQLTEDLGGTLDYCHSRWLCQRTAIESFALMVKQTAQMLQSFGTELAETELPNDVQSTSSVLCAHTEKKDKAKEDLRLALKEGHSVLESLRELQAEGSEPSVNQDQLDNQATVQRLLAQLNETEAAFDEFWAKHQQKLEQCLQLRHFEQGFREVKAILDAASQKIATFTDIGNSLAHVEHLLRDLASFEEKSGVAVERARALSLDGEQLIGNKHYAVDSIRPKCQELRHLCDQFSAEIARRRGLLSKSLELHRRLETSMKWCDEGIYLLASQPVDKCQSQDGAEAALQEIEKFLETGAENKIQELNAIYKEYESILNQDLMEHVRKVFQKQASMEEVFHRRQASLKKLAARQTRPVQPVAPRPEALAKSPCPSPGIRRGSENSSSEGGALRRGPYRRAKSEMSESRQGRGSAGEEEESLAILRRHVMSELLDTERAYVEELLCVLEGYAAEMDNPLMAHLLSTGLHNKKDVLFGNMEEIYHFHNRIFLRELENYTDCPELVGRCFLERMEDFQIYEKYCQNKPRSESLWRQCSDCPFFQECQRKLDHKLSLDSYLLKPVQRITKYQLLLKEMLKYSRNCEGAEDLQEALSSILGILKAVNDSMHLIAITGYDGNLGDLGKLLMQGSFSVWTDHKRGHTKVKELARFKPMQRHLFLHEKAVLFCKKREENGEGYEKAPSYSYKQSLNMAAVGITENVKGDAKKFEIWYNAREEVYIVQAPTPEIKAAWVNEIRKVLTSQLQACREASQHRALEQSQSLPLPAPTSTSPSRGNSRNIKKLEERKTDPLSLEGYVSSAPLTKPPEKGKGWSKTSHSLEAPEDDGGWSSAEEQINSSDAEEDGGLGPKKLVPGKYTVVADHEKGGPDALRVRSGDVVELVQEGDEGLW

SEQ ID NO: 8447 - protein, 66 aa, Homo sapiens
MFDCWRFILCKRPGSNSYSSPQRPNEAKKEETDHQIDVSDVIRLVQDTPEATAMATAPRRSQSPGL

SEQ ID NO: 8448 - protein, 1137 aa, Homo sapiens
MFDCWRFILCKRPGSNSYSSPQRPNEAKKEETDHQIDVSDVIRLVQDTPEATAMATDEIMHQDIVPLCAADIQDQLKKRFAYLSGGRGQDGSPVITFPDYPAFSEIPDKEFQNVMTYLTSIPSLQDAGIGFILVIDRRRDKWTSVKASVLRIAASFPANLQLVLVLRPTGFFQRTLSDIAFKFNRDDFKMKVPVIMLSSVPDLHGYIDKSQLTEDLGGTLDYCHSRWLCQRTAIESFALMVKQTAQMLQSFGTELAETELPNDVQSTSSVLCAHTEKKDKAKEDLRLALKEGHSVLESLRELQAEGSEPSVNQDQLDNQATVQRLLAQLNETEAAFDEFWAKHQQKLEQCLQLRHFEQGFREVKAILDAASQKIATFTDIGNSLAHVEHLLRDLASFEEKSGVAVERARALSLDGEQLIGNKHYAVDSIRPKCQELRHLCDQFSAEIARRRGLLSKSLELHRRLETSMKWCDEGIYLLASQPVDKCQSQDGAEAALQEIEKFLETGAENKIQELNAIYKEYESILNQDLMEHVRKVFQKQASMEEVFHRRQASLKKLAARQTRPVQPVAPRPEALAKSPCPSPGIRRGSENSSSEGGALRRGPYRRAKSEMSESRQGRGSAGEEEESLAILRRHVMSELLDTERAYVEELLCVLEGYAAEMDNPLMAHLLSTGLHNKKDVLFGNMEEIYHFHNRIFLRELENYTDCPELVGRCFLERMEDFQIYEKYCQNKPRSESLWRQCSDCPFFQECQRKLDHKLSLDSYLLKPVQRITKYQLLLKEMLKYSRNCEGAEDLQEALSSILGILKAVNDSMHLIAITGYDGNLGDLGKLLMQGSFSVWTDHKRGHTKVKELARFKPMQRHLFLHEKAVLFCKKREENGEGYEKAPSYSYKQSLNMAAVGITENVKGDAKKFEIWYNAREEVYIVQAPTPEIKAAWVNEIRKVLTSQLQACREASQHRALEQSQSLPLPAPTSTSPSRGNSRNIKKLEERKTDPLSLEGYVSSAPLTKPPEKGKGWSKTSHSLEAPEDDGGWSSAEEQINSSDAEEDGGLGPKKLVPGKYTVVADHEKGGPDALRVRSGDVVELVQEGDEGLWYVRDPTTGKEGWVPASSLSVRLGPSGSAQCLSSSGKAHVPRAHP

SEQ ID NO: 8449 - protein, 64 aa, Homo sapiens
MFDCWRFILCKRPGSNSYSSPQRPNEAKKEETDHQIDVSDVIRLVQDTPEATAMATEVSASRPQ

SEQ ID NO: 8450 - protein, 97 aa, Homo sapiens
MGDGKAVRISVAEMKSYYLYSEWCSWLLSVAEDEIMHQDIVPLCAADIQDQLKKRFAYLSGGRGQDGSPVITFPDYPAFSEIPDKEFQNVMTYLTSI

SEQ ID NO: 8451 - protein, 136 aa, Homo sapiens
MHQDIVPLCAADIQDQLKKRFAYLSGGRGQDGSPVITFPDYPAFSEIPDKEFQNVMTYLTSIPSLQDAGIGFILVIDRRRDKWTSVKASVLRIAASFPANLQLVLVLRPTGFFQRTLSDIAFKFNRDDFKMKVPVI

SEQ ID NO: 8452 - protein, 1096 aa, Homo sapiens
MPLRGGAGPSPASHGPTHGPSDPRTCLPGRGAGGMRPHGRGALGCCGLCSFYTCHGAAGDEIMHQDIVPLCAADIQDQLKKRFAYLSGGRGQDGSPVITFPDYPAFSEIPDKEFQNVMTYLTSIPSLQDAGIGFILVIDRRRDKWTSVKASVLRIAASFPANLQLVLVLRPTGFFQRTLSDIAFKFNRDDFKMKVPVIMLSSVPDLHGYIDKSQLTEDLGGTLDYCHSRWLCQRTAIESFALMVKQTAQMLQSFGTELAETELPNDVQSTSSVLCAHTEKKDKAKEDLRLALKEGHSVLESLRELQAEGSEPSVNQDQLDNQATVQRLLAQLNETEAAFDEFWAKHQQKLEQCLQLRHFEQGFREVKAILDAASQKIATFTDIGNSLAHVEHLLRDLASFEEKSGVAVERARALSLDGEQLIGNKHYAVDSIRPKCQELRHLCDQFSAEIARRRGLLSKSLELHRRLETSMKWCDEGIYLLASQPVDKCQSQDGAEAALQEIEKFLETGAENKIQELNAIYKEYESILNQDLMEHVRKVFQKQASMEEVFHRRQASLKKLAARQTRPVQPVAPRPEALAKSPCPSPGIRRGSENSSSEGGALRRGPYRRAKSEMSESRQGRGSAGEEEESLAILRRHVMSELLDTERAYVEELLCVLEGYAAEMDNPLMAHLLSTGLHNKKDVLFGNMEEIYHFHNRIFLRELENYTDCPELVGRCFLERMEDFQIYEKYCQNKPRSESLWRQCSDCPFFQECQRKLDHKLSLDSYLLKPVQRITKYQLLLKEMLKYSRNCEGAEDLQEALSSILGILKAVNDSMHLIAITGYDGNLGDLGKLLMQGSFSVWTDHKRGHTKVKELARFKPMQRHLFLHEKAVLFCKKREENGEGYEKAPSYSYKQSLNMAAVGITENVKGDAKKFEIWYNAREEVYIVQAPTPEIKAAWVNEIRKVLTSQLQACREASQHRALEQSQSLPLPAPTSTSPSRGNSRNIKKLEERKTDPLSLEGYVSSAPLTKPPEKGKGWSKTSHSLEAPEDDGGWSSAEEQINSSDAEEDGGLGPKKLVPGKYTVVADHEKGGPDALRVRSGDVVELVQEGDEGLW

SEQ ID NO: 8453 - protein, 1125 aa, Homo sapiens
MRFWLRTEEMALEEMVQRLNAVSKHTDEIMHQDIVPLCAADIQDQLKKRFAYLSGGRGQDGSPVITFPDYPAFSEIPDKEFQNVMTYLTSIPSLQDAGIGFILVIDRRRDKWTSVKASVLRIAASFPANLQLVLVLRPTGFFQRTLSDIAFKFNRDDFKMKVPVIMLSSVPDLHGYIDKSQLTEDLGGTLDYCHSRWLCQRTAIESFALMVKQTAQMLQSFGTELAETELPNDVQSTSSVLCAHTEKKDKAKEDLRLALKEGHSVLESLRELQAEGSEPSVNQDQLDNQATVQRLLAQLNETEAAFDEFWAKHQQKLEQCLQLRHFEQGFREVKAILDAASQKIATFTDIGNSLAHVEHLLRDLASFEEKSGVAVERARALSLDGEQLIGNKHYAVDSIRPKCQELRHLCDQFSAEIARRRGLLSKSLELHRRLETSMKWCDEGIYLLASQPVDKCQSQDGAEAALQEIEKFLETGAENKIQELNAIYKEYESILNQDLMEHVRKVFQKQASMEEVFHRRQASLKKLAARQTRPVQPVAPRPEALAKSPCPSPGIRRGSENSSSEGGALRRGPYRRAKSEMSESRQGRGSAGEEEESLAILRRHVMSELLDTERAYVEELLCVLEGYAAEMDNPLMAHLLSTGLHNKKDVLFGNMEEIYHFHNRIFLRELENYTDCPELVGRCFLERMEDFQIYEKYCQNKPRSESLWRQCSDCPFFQECQRKLDHKLSLDSYLLKPVQRITKYQLLLKEMLKYSRNCEGAEDLQEALSSILGILKAVNDSMHLIAITGYDGNLGDLGKLLMQGSFSVWTDHKRGHTKVKELARFKPMQRHLFLHEKAVLFCKKREENGEGYEKAPSYSYKQSLNMAAVGITENVKGDAKKFEIWYNAREEVYIVQAPTPEIKAAWVNEIRKVLTSQLQACREASQHRALEQSQSLPLPAPTSTSPSRGNSRNIKKLEERKTDPLSLEGYVSSAPLTKPPEKGKGWSKTSHSLEAPEDDGGWSSAEEQINSSDAEEDGGLGPKKLVPGKYTVVADHEKGGPDALRVRSGDVVELVQEGDEGLWYVRDPTTGKEGWVPASSLSVRLGPSGSAQCLSSSESSPGSAVLSNSSSCSEGGQAPFSDLQG

SEQ ID NO: 8454 - protein, 136 aa, Homo sapiens
MTVRRLSLLCRDLWALWLLLKAGADEIMHQDIVPLCAADIQDQLKKRFAYLSGGRGQDGSPVITFPDYPAFSEIPDKEFQNVMTYLTSIPSGGQESSIRPVSCRLTWEGCRGGLSSDVLVPASRKMLRMSASHQTV

SEQ ID NO: 8455 - protein, 1123 aa, Homo sapiens
MTVRRLSLLCRDLWALWLLLKAGADEIMHQDIVPLCAADIQDQLKKRFAYLSGGRGQDGSPVITFPDYPAFSEIPDKEFQNVMTYLTSIPSLQDAGIGFILVIDRRRDKWTSVKASVLRIAASFPANLQLVLVLRPTGFFQRTLSDIAFKFNRDDFKMKVPVIMLSSVPDLHGYIDKSQLTEDLGGTLDYCHSRWLCQRTAIESFALMVKQTAQMLQSFGTELAETELPNDVQSTSSVLCAHTEKKDKAKEDLRLALKEGHSVLESLRELQAEGSEPSVNQDQLDNQATVQRLLAQLNETEAAFDEFWAKHQQKLEQCLQLRHFEQGFREVKAILDAASQKIATFTDIGNSLAHVEHLLRDLASFEEKSGVAVERARALSLDGEQLIGNKHYAVDSIRPKCQELRHLCDQFSAEIARRRGLLSKSLELHRRLETSMKWCDEGIYLLASQPVDKCQSQDGAEAALQEIEKFLETGAENKIQELNAIYKEYESILNQDLMEHVRKVFQKQASMEEVFHRRQASLKKLAARQTRPVQPVAPRPEALAKSPCPSPGIRRGSENSSSEGGALRRGPYRRAKSEMSESRQGRGSAGEEEESLAILRRHVMSELLDTERAYVEELLCVLEGYAAEMDNPLMAHLLSTGLHNKKDVLFGNMEEIYHFHNRIFLRELENYTDCPELVGRCFLERMEDFQIYEKYCQNKPRSESLWRQCSDCPFFQECQRKLDHKLSLDSYLLKPVQRITKYQLLLKEMLKYSRNCEGAEDLQEALSSILGILKAVNDSMHLIAITGYDGNLGDLGKLLMQGSFSVWTDHKRGHTKVKELARFKPMQRHLFLHEKAVLFCKKREENGEGYEKAPSYSYKQSLNMAAVGITENVKGDAKKFEIWYNAREEVYIVQAPTPEIKAAWVNEIRKVLTSQLQACREASQHRALEQSQSLPLPAPTSTSPSRGNSRNIKKLEERKTDPLSLEGYVSSAPLTKPPEKGKGWSKTSHSLEAPEDDGGWSSAEEQINSSDAEEDGGLGPKKLVPGKYTVVADHEKGGPDALRVRSGDVVELVQEGDEGLWYVRDPTTGKEGWVPASSLSVRLGPSGSAQCLSSSESSPGSAVLSNSSSCSEGGQAPFSDLQG

SEQ ID NO: 8456 - protein, 984 aa, Homo sapiens
MTVRRLSLLCRDLWALWLLLKAGADEIMHQDIVPLCAADIQDQLKKRFAYLSGGRGQDGSPVITFPDYPAFSEIPDKEFQNVMTYLTSIPSLQDAGIGFILVIDRRRDKWTSVKASVLRIAASFPANLQLVLVLRPTGFFQRTLSDIAFKFNRDDFKMKVPVIMLSSVPDLHGYIDKSQLTEDLGGTLDYCHSRWLCQRTAIESFALMVKQTAQMLQSFGTELAETELPNDVQSTSSVLCAHTEKKDKAKEDLRLALKEGHSVLESLRELQAEGSEPSVNQDQLDNQATVQRLLAQLNETEAAFDEFWAKHQQKLEQCLQLRHFEQGFREVKAILDAASQKIATFTDIGNSLAHVEHLLRDLASFEEKSGVAVERARALSLDGEQLIGNKHYAVDSIRPKCQELRHLCDQFSAEIARRRGLLSKSLELHRRLETSMKWCDEGIYLLASQPVDKCQSQDGAEAALQEIEKFLETGAENKIQELNAIYKEYESILNQDLMEHVRKVFQKQASMEEVFHRRQASLKKLAARQTRPVQPVAPRPEALAKSPCPSPGIRRGSENSSSEGGALRRGPYRRAKSEMSESRQGRGSAGEEEESLAILRRHVMSELLDTERAYVEELLCVLEGYAAEMDNPLMAHLLSTGLHNKKDVLFGNMEEIYHFHNRIFLRELENYTDCPELVGRCFLERMEDFQIYEKYCQNKPRSESLWRQCSDCPFFQECQRKLDHKLSLDSYLLKPVQRITKYQLLLKEMLKYSRNCEGAEDLQEALSSILGILKAVNDSMHLIAITGYDGNLGDLGKLLMQGSFSVWTDHKRGHTKVKELARFKPMQRHLFLHEKAVLFCKKREENGEGYEKAPSYSYKQSLNMAAVGITENVKGDAKKFEIWYNAREEVYIVQAPTPEIKAAWVNEIRKVLTSQLQACREASQHRALEQSQSLPLPAPTSTSPSRGNSRNIKKLEERKTDPLSLEGYVSSAPLTKPPEKGKEP

SEQ ID NO: 8457 - protein, 86 aa, Homo sapiens
MWLSQRVLPPLPFPADAWEPSEVLGIFSQHRSHATTSESLTWTSTGTSDARTGVILQDAGIGFILVIDRRRDKWTSVKASVLRIAN

SEQ ID NO: 8458 - protein, 93 aa, Homo sapiens
SPVITFPDYPAFSEIPDKEFQNVMTYLTSIPSILFMESAASEHWGQVAEALPFLPPGSARTAVTTSPRGPLPAPSQNVFPRSFSVTAVEFNSY

SEQ ID NO: 8459 - protein, 213 aa, Homo sapiens
TSTGTSDARTGVILQDAGIGFILVIDRRRDKWTSVKASVLRIAASFPANLQLVLVLRPTGFFQRTLSDIAFKFNRDDFKMKVPVIMLSSVPDLHGYIDKSQLTEDLGGTLDYCHSRWLCQRTAIESFALMVKQTAQMLQSFGTELAETELPNDVQSTSSVLCAHTEKKDKAKVHGGCSGWKLWGAPVSQKLRGAPVGSCGGSFVPAGVCVSST

SEQ ID NO: 8460 - protein, 336 aa, Homo sapiens
  VARIANT 1: note = misc_feature - Xaa can be any naturally occurring amino acid
XENGEGYEKAPSYSYKQSLNMAAVGITENVKGDAKKFEIWYNAREEVYIVQAPTPEIKAAWVNEIRKVLTSQLQACREASQHRALEQSQSLPLPAPTSTSPSRGNSRNIKKLEERKTDPLSLEGYVSSAPLTKPPEKGKDDTVTSSASESSALSRKRFTLQGFANLKGQKASPTSPDKKAKRHEVKSDPTPFGVRGWSKTSHSLEAPEDDGGWSSAEEQINSSDAEEDGGLGPKKLVPGKYTVVADHEKGGPDALRVRSGDVVELVQEGDEGLWYVRDPTTGKEGWVPASSLSVRLGPSGSAQCLSSSESSPGSAVLSNSSSCSEGGQAPFSDLQG

SEQ ID NO: 8461 - protein, 296 aa, Homo sapiens
  VARIANT 1: note = misc_feature - Xaa can be any naturally occurring amino acid
XHLFLHEKAVLFCKKREENGEGYEKAPSYSYKQSLNMAAVGITENVKGDAKKFEIWYNAREEVYIVQAPTPEIKAAWVNEIRKVLTSQLQACREASQHRALEQSQSLPLPAPTSTSPSRGNSRNIKKLEERKTDPLSLEGYVSSAPLTKPPEKGKGWSKTSHSLEAPEDDGGWSSAEEQINSSDAEEDGGLGPKKLVPGKYTVVADHEKGGPDALRVRSGDVVELVQEGDEGLWYVRDPTTGKEGWVPASSLSVRLGPSGSAQCLSSSESSPGSAVLSNSSSCSEGGQAPFSDLQG

SEQ ID NO: 8462 - protein, 189 aa, Homo sapiens
  VARIANT 1: note = misc_feature - Xaa can be any naturally occurring amino acid
XKKLEERKTDPLSLEGYVSSAPLTKPPEKGKASPTSPDKKAKRHEVKSDPTPFGVRGWSKTSHSLEAPEDDGGWSSAEEQINSSDAEEDGGLGPKKLVPGKYTVVADHEKGGPDALRVRSGDVVELVQEGDEGLWYVRDPTTGKEGWVPASSLSVRLGPSGSAQCLSSSESSPGSAVLSNSSSCSEGGQ

SEQ ID NO: 8463 - protein, 317 aa, Homo sapiens
  VARIANT 1: note = misc_feature - Xaa can be any naturally occurring amino acid
XLGILKAVNDSMHLIAITGYDGNLGDLGKLLMQGSFSVWTDHKRGHTKVKELARFKPMQRHLFLHEKAVLFCKKREENGEGYEKAPSYSYKQSLNMAAVGITENVKGDAKKFEIWYNAREEVYIVQAPTPEIKAAWVNEIRKVLTSQLQACREASQHRALEQSQSLPLPAPTSTSPSRGNSRNIKKLEERKTDPLSLEGYVSSAPLTKPPEKGKDDTVTSSASESSALSRKRFTLQGFANLKASPTSPDKKAKRHEVKSDPTPFGVRGWSKTSHSLEAPEDDGGWSSAEEQINSSDAEEDGGLGPKKLVPGKYTVVA

SEQ ID NO: 8464 - protein, 151 aa, Homo sapiens
  VARIANT 1: note = misc_feature - Xaa can be any naturally occurring amino acid
XQAPTPEIKAAWVNEIRKVLTSQLQACREASQHRALEQSQSLPLPAPTSTSPSRGNSRNIKKLEERKTDPLSLEGYVSSAPLTKPPEKGKDDTVTSSASESSALSRKRFTLQGFANLKGQKGWSKTSHSLEAPEDDGGWSSAEEQINSSDA

SEQ ID NO: 8465 - protein, 87 aa, Homo sapiens
  VARIANT 1: note = misc_feature - Xaa can be any naturally occurring amino acid
XSAPLTKPPEKGKGWSKTSHSLEAPEDDGGWSSAEEQINSSDAEEDGGLGPKKLVPTQPPVEPTRGCTFLRGDSPHPPTLYVIECCH

SEQ ID NO: 8466 - protein, 69 aa, Homo sapiens
  VARIANT 1: note = misc_feature - Xaa can be any naturally occurring amino acid
XSEIPDKEFQNVMTYLTSIPSLQDAGIGFILVIDRRRDKWTSVKASVLRIALRARCTESEPLHPGGSGI

SEQ ID NO: 8467 - protein, 793 aa, Homo sapiens
  VARIANT 1: note = misc_feature - Xaa can be any naturally occurring amino acid
XSQKIATFTDIGNSLAHVEHLLRDLASFEEKSGVAVERARALSLDGEQLIGNKHYAVDSIRPKCQELRHLCDQFSAEIARRRGLLSKSLELHRRLETSMKWCDEGIYLLASQPVDKCQSQDGAEAALQEIEKFLETGAENKIQELNAIYKEYESILNQDLMEHVRKVFQKQASMEEVFHRRQASLKKLAARQTRPVQPVAPRPEALAKSPCPSPGIRRGSENSSSEGGALRRGPYRRAKSEMSESRQGRGSAGEEEESLAILRRHVMSELLDTERAYVEELLCVLEGYAAEMDNPLMAHLLSTGLHNKKDVLFGNMEEIYHFHNRIFLRELENYTDCPELVGRCFLERMEDFQIYEKYCQNKPRSESLWRQCSDCPFFQECQRKLDHKLSLDSYLLKPVQRITKYQLLLKEMLKYSRNCEGAEDLQEALSSILGILKAVNDSMHLIAITGYDGNLGDLGKLLMQGSFSVWTDHKRGHTKVKELARFKPMQRHLFLHEKAVLFCKKREENGEGYEKAPSYSYKQSLNMAAVGITENVKGDAKKFEIWYNAREEVYIVQAPTPEIKAAWVNEIRKVLTSQLQACREASQHRALEQSQSLPLPAPTSTSPSRGNSRNIKKLEERKTDPLSLEGYVSSAPLTKPPEKGKASPTSPDKKAKRHEVKSDPTPFGVRGWSKTSHSLEAPEDDGGWSSAEEQINSSDAEEDGGLGPKKLVPGKYTVVADHEKGGPDALRVRSGDVVELVQEGDEGLWYVRDPTTGKEGWVPASSLSVRLGPSGSAQCLSSSGKAHVPRAHP

SEQ ID NO: 8468 - protein, 94 aa, Homo sapiens
MEHLEGVINKPEAEMSPQELQLHYFKMHDYDGNNLLDGLELSTAITHVHKEEGSEQAPLMSEDELINIIDGVLRDDDKNNDGYIDYAEFAKSLQ

SEQ ID NO: 8469 - protein, 94 aa, Homo sapiens; identical to SEQ ID NO: 8468

SEQ ID NO: 8470 - protein, 94 aa, Homo sapiens; identical to SEQ ID NO: 8468

SEQ ID NO: 8471 - protein, 127 aa, Homo sapiens
MLSVCSCRTSSGMRSQWPSARQRSSSLSTFRHIMEHLEGVINKPEAEMSPQELQLHYFKMHDYDGNNLLDGLELSTAITHVHKEEGSEQAPLMSEDELINIIDGVLRDDDKNNDGYIDYAEFAKSLQ

SEQ ID NO: 8472 - protein, 61 aa, Homo sapiens
MTMRSLLRTPFLCGLLWAFCAPGARAEEPAASFSQPGSMGLDKNTVHDQEHIMEHLEGVIN

SEQ ID NO: 8473 - protein, 146 aa, Homo sapiens
MTMRSLLRTPFLCGLLWAFCAPGARAEEPAASFSQPGSMGLDKNTVHDQEHIMEHLEGVINKPEAEMSPQELQLHYFKMHDYDGNNLLDGLELSTAITHVHKEEGSEQAPLMSEDELINIIDGVLRDDDKNNDGYIDYAEFAKSLQ

SEQ ID NO: 8474 - protein, 146 aa, Homo sapiens; identical to SEQ ID NO: 8473

SEQ ID NO: 8475 - protein, 146 aa, Homo sapiens; identical to SEQ ID NO: 8473

SEQ ID NO: 8476 - protein, 146 aa, Homo sapiens; identical to SEQ ID NO: 8473

SEQ ID NO: 8477 - protein, 146 aa, Homo sapiens; identical to SEQ ID NO: 8473

SEQ ID NO: 8478 - protein, 146 aa, Homo sapiens; identical to SEQ ID NO: 8473

SEQ ID NO: 8479 - protein, 90 aa, Homo sapiens
SQPGSMGLDKNTVHDQEHIMEHLEGVINKPEAEMSPQELQLHYFKMHDYDGNNLLDGLELSTAITHVHKEANLCTELTLRRTGTFPIKEE

SEQ ID NO: 8480 - protein, 156 aa, Homo sapiens
GPVGPQRVAEAGGGQLGSTAQGKCDKDNTEKDITQATNSHFTHGEMQDQSIWGNPSDGELIRTQPQRLPQLQTSAQVPSGEEIGKIKNGHTGLSNGNGIHHGAKHGSADNRKLSAPVSQKMHRKIQSSLSVNSDISKKSKVNAVFSQKTGSSPEVC

SEQ ID NO: 8481 - protein, 135 aa, Homo sapiens
MQDQSIWGNPSDGELIRTQPQRLPQLQTSAQVPSGEEIGKIKNGHTGLSNGNGIHHGAKHGSADNRKLSAPVSQKMHRKIQSSLSVNSDISKKSKVNAVFSQKTGSSPEDCCVHCILACLFCEFLTLCNIVLGQA

SEQ ID NO: 8482 - protein, 246 aa, Homo sapiens
MSGAGEALAPGPVGPQRVAEAGGGQLGSTAQGKCDKDNTEKDITQATNSHFTHGEMQDQSIWGNPSDGELIRTQPQRLPQLQTSAQVPSGEEIGKIKNGHTGLSNGNGIHHGAKHGSADNRKLSAPVSQKMHRKIQSSLSVNSDISKKSKVNAVFSQKTGSSPEDCCVHCILACLFCEFLTLCNIVLGQASCGICTSEACCCCCGDEMGDDCNCPCDMDCGIMDACCESSDCLEICMECCGICFPS

SEQ ID NO: 8483 - protein, 43 aa, Homo sapiens
MSGAGEALAPGPVGPQRVAEAGGGQLGSTAQGLFSRSRTAAAL

SEQ ID NO: 8484 - protein, 43 aa, Homo sapiens; identical to SEQ ID NO: 8483

SEQ ID NO: 8485 - protein, 156 aa, Homo sapiens
PQRVAEAGGGQLGSTAQGKCDKDNTEKDITQATNSHFTHGEMQDQSIWGNPSDGELIRTQPQRLPQLQTSAQVPSGEEIGKIKNGHTGLSNGNGIHHGAKHGSADNRKLSAPVSQKMHRKIQSSLSVNSDISKKSKVNAVFSQKTGSSPEDKQEFW

SEQ ID NO: 8486 - protein, 355 aa, Homo sapiens
VRGVRAATAAAVAATAASGLSRREAGGRAGAAAAVVRPPGRKCGRCRRLANFPGRKRRRRRRKGLGATTGGCGEAVSSLHPAPHSPSSVRPAGRRARRQRRGAGSAERPMSGAGEALAPGPVGPQRVAEAGGGQLGSTAQGKCDKDNTEKDITQATNSHFTHGEMQDQSIWGNPSDGELIRTQPQRLPQLQTSAQVPSGEEIGKIKNGHTGLSNGNGIHHGAKHGSADNRKLSAPVSQKMHRKIQSSLSVNSDISKKSKVNAVFSQKTGSSPEDCCVHCILACLFCEFLTLCNIVLGQASCGICTSEACCCCCGDEMGDDCNCPCDMDCGIMDACCESSDCLEICMECCGICFPS

SEQ ID NO: 8487 - protein, 355 aa, Homo sapiens; identical to SEQ ID NO: 8486

SEQ ID NO: 8488 - protein, 973 aa, Homo sapiens
MEVTCLLLLALIPFHCRGQGVYAPAQAQIVHAGQACVVKEDNISERVYTIREGDTLMLQCLVTGHPRPQVRWTKTAGSASDKFQETSVFNETLRIERIARTQGGRYYCKAENGVGVPAIKSIRVDVQYLDEPMLTVHQTVSDVRGNFYQEKTVFLRCTVNSNPPARFIWKRGSDTLSHSQDNGVDIYEPLYTQGETKVLKLKNLRPQDYASYTCQVSVRNVCGIPDKAITFRLTNTTAPPALKLSVNETLVVNPGENVTVQCLLTGGDPLPQLQWSHGPGPLPLGALAQGGTLSIPSVQARDSGYYNCTATNNVGNPAKKTVNLLVRSMKNATFQITPDVIKESENIQLGQDLKLSCHVDAVPQEKVTYQWFKNGKPARMSKRLLVTRNDPELPAVTSSLELIDLHFSDYGTYLCMASFPGAPVPDLSVEVNISSETVPPTISVPKGRAVVTVREGSPAELQCEVRGKPRPPVLWSRVDKEAALLPSGLPLEETPDGKLRLERVSRDMSGTYRCQTARYNGFNVRPREAQVQLNVQFPPEVEPSSQDVRQALGRPVLLRCSLLRGSPQRIASAVWRFKGQLLPPPPVVPAAAEAPDHAELRLDAVTRDSSGSYECSVSNDVGSAACLFQVSAKAYSPEFYFDTPNPTRSHKLSKNYSYVLQWTQREPDAVDPVLNYRLSIRQLNQHNAVVKAIPVRRVEKGQLLEYILTDLRVPHSYEVRLTPYTTFGAGDMASRIIHYTEPINSPNLSDNTCHFEDEKICGYTQDLTDNFDWTRQNALTQNPKRSPNTGPPTDISGTPEGYYMFIETSRPRELGDRARLVSPLYNASAKFYCVSFFYHMYGKHIGSLNLLVRSRNKGALDTHAWSLSGNKGNVWQQAHVPISPSGPFQIIFEGVRGPGYLGDIAIDDVTLKKGECPRKQTDPNKGARREGGGGAESGGSCAWRGFLSVEGGCLGLNRGSECLSDGNHVALTV

SEQ ID NO: 8489 - protein, 955 aa, Homo sapiens
MEVTCLLLLALIPFHCRGQGVYAPAQAQIVHAGQACVVKEDNISERVYTIREGDTLMLQCLVTGHPRPQVRWTKTAGSASDKFQETSVFNETLRIERIARTQGGRYYCKAENGVGVPAIKSIRVDVQYLDEPMLTVHQTVSDVRGNFYQEKTVFLRCTVNSNPPARFIWKRGSDTLSHSQDNGVDIYEPLYTQGETKVLKLKNLRPQDYASYTCQVSVRNVCGIPDKAITFRLTNTTAPPALKLSVNETLVVNPGENVTVQCLLTGGDPLPQLQWSHGPGPLPLGALAQGGTLSIPSVQARDSGYYNCTATNNVGNPAKKTVNLLVRSMKNATFQITPDVIKESENIQLGQDLKLSCHVDAVPQEKVTYQWFKNGKPARMSKRLLVTRNDPELPAVTSSLELIDLHFSDYGTYLCMASFPGAPVPDLSVEVNISSETVPPTISVPKGRAVVTVREGSPAELQCEVRGKPRPPVLWSRVDKEAALLPSGLPLEETPDGKLRLERVSRDMSGTYRCQTARYNGFNVRPREAQVQLNVQFPPEVEPSSQDVRQALGRPVLLRCSLLRGSPQRIASAVWRFKGQLLPPPPVVPAAAEAPDHAELRLDAVTRDSSGSYECSVSNDVGSAACLFQVSAKAYSPEFYFDTPNPTRSHKLSKNYSYVLQWTQREPDAVDPVLNYRLSIRQLNQHNAVVKAIPVRRVEKGQLLEYILTDLRVPHSYEVRLTPYTTFGAGDMASRIIHYTEPINSPNLSDNTCHFEDEKICGYTQDLTDNFDWTRQNALTQNPKRSPNTGPPTDISGTPEGYYMFIETSRPRELGDRARLVSPLYNASAKFYCVSFFYHMYGKHIGSLNLLVRSRNKGALDTHAWSLSGNKGNVWQQAHVPISPSGPFQIIFEGVRGPGYLGDIAIDDVTLKKGECPRKQTDPNKVVVMPGSGAPCQSSPQLWGPMAIFLLALQR

SEQ ID NO: 8490 - protein, 77 aa, Homo sapiens
MLQCLVTGHPRPQVRWTKTAGSASDKFQETSVFNETLRIERIARTQGGRYYCKAENGVGVPAIKSIRVDVQYLDEPM

SEQ ID NO: 8491 - protein, 129 aa, Homo sapiens
MLQCLVTGHPRPQVRWTKTAGSASDKFQETSVFNETLRIERIARTQGGRYYCKAENGVGVPAIKSIRVDVQYLDEPMLTVHQTVSDVRGNFYQEKTVFLRCTVNSNPPARFIWKRGSDTLSHSQDNGVD

SEQ ID NO: 8492 - protein, 87 aa, Homo sapiens
  VARIANT 1: note = misc_feature - Xaa can be any naturally occurring amino acid
XHKLSKNYSYVLQWTQREPDAVDPVLNYRLSIRQLNQHNAVVKAIPVRRVEKGQLLEYILTDLRVPHSYETTPATLRMRRSVAIPRT

SEQ ID NO: 8493 - protein, 160 aa, Homo sapiens
  VARIANT 1: note = misc_feature - Xaa can be any naturally occurring amino acid
XNQHNAVVKAIPVRRVEKGQLLEYILTDLRVPHSYEVRLTPYTTFGAGDMASRIIHYTEHNTCHFEDEKICGYTQDLTDNFDWTRQNALTQNPKRSPNTGPPTDISGTPEGYYMFIETSRPRELGDRARLVSPLYNASAKFYCVSFFYHMYGKHIGSLNL

SEQ ID NO: 8494 - protein, 87 aa, Homo sapiens
MQHRGFLLLTLLALLALTSAVAKKKADCKYKFENWGACDGGTGTKVRQGTLKKARYNAQCQETIRVTKPCTPKTKAKAKAKKGKGKD

SEQ ID NO: 8495 - protein, 49 aa, Homo sapiens
MQHRGFLLLTLLALLALTSAVAKKKDKVKKGGPGSECAEWAWGPCTPSS

SEQ ID NO: 8496 - protein, 131 aa, Homo sapiens
MQHRGFLLLTLLALLALTSAVAKKKDKVKKGGPGSECAEWAWGPCTPSSKDCGVGFREGTCGAQTQRIRCRVPCNWKKEFGADCKYKFENWGACDGGTGTKVRQGTLKKARYNAQCQETIRVTKPCTPKTK

SEQ ID NO: 8497 - protein, 143 aa, Homo sapiens
MQHRGFLLLTLLALLALTSAVAKKKDKVKKGGPGSECAEWAWGPCTPSSKDCGVGFREGTCGAQTQRIRCRVPCNWKKEFGADCKYKFENWGACDGGTGTKVRQGTLKKARYNAQCQETIRVTKPCTPKTKAKAKAKKGKGKD

SEQ ID NO: 8498 - protein, 143 aa, Homo sapiens; identical to SEQ ID NO: 8497

SEQ ID NO: 8499 - protein, 143 aa, Homo sapiens; identical to SEQ ID NO: 8497

SEQ ID NO: 8500 - protein, 143 aa, Homo sapiens; identical to SEQ ID NO: 8497

SEQ ID NO: 8501 - protein, 143 aa, Homo sapiens; identical to SEQ ID NO: 8497

SEQ ID NO: 8502 - protein, 156 aa, Homo sapiens
MQHRGFLLLTLLALLALTSAVAKKKDKVKKGGPGSECAEWAWGPCTPSSKDCGVGFREGTCGAQTQRIRCRVPCNWKKEFGADCKYKFENWGACDGGTGTKVRQGTLKKARYNAQCQETIRVTKPCTPKTKAKAKGQRKEKGVGLSRGAAPPPPRL

SEQ ID NO: 8503 - protein, 152 aa, Homo sapiens
MQHRGFLLLTLLALLALTSAVAKKKEEGALQCSVPGDHPRHQALHPQDQSKGQSQEREGKGLDAKPGCQGAPGVTWGLAHALPLPGPRCDPPVPSVCSLALINHALPCPSHSPAPPLSAQSGEGQGILGSLSLPQSNVSPRARFCSSPQFHY

SEQ ID NO: 8504 - protein, 123 aa, Homo sapiens
MGVTCVSQMPVAEGKSVQQTVELLTRKLEMLGAEKQGTFCVDCETYHTAASTLGSQGQTGKLMYVMHNSEYPLSCFALFENGPCLIADTNFDVLMVKLKGFFQSAKASKIETRGTRWSMAPVW

SEQ ID NO: 8505 - protein, 212 aa, Homo sapiens
MGVTCVSQMPVAEGKSVQQTVELLTRKLEMLGAEKQGTFCVDCETYHTAASTLGSQGQTGKLMYVMHNSEYPLSCFALFENGPCLIADTNFDVLMVKLKGFFQSAKASKIETRGTRYQYCDFLVKVGTVTMGPSARGISVEVEYGPCVVASDCWSLLLEFLQSFLGSHTPGAPAVFGNRHDAVYGPADTMVQYMELFNKIRKQQQVPVAGIR

SEQ ID NO: 8506 - protein, 145 aa, Homo sapiens
MGVTCVSQMPVAEGKSVQQTVELLTRKLEMLGAEKQGTFCVDCETYHTAASTLGSQGQTGKLMYVMHNSEYPLSCFALFENGPCLIADTNFDVLMVKLKGFFQSAKASKIETRGTRYQYCDFLVKVGTVTMGPSARGISVEVRPW

SEQ ID NO: 8507 - protein, 61 aa, Homo sapiens [sequence omitted]

SEQ ID NO: 8508 - protein, 140 aa, Homo sapiens
MPVAEGKSVQQTVELLTRKLEMLGAEKQGTFCVDCETYHTAASTLGSQGQTGKLMYVMHNSEYPLSCFALFENGPCLIADTNFDVLMVKLKGFFQSAKASKIETRGTRYQYCDFLVKVGTVTMGPSARGISVEVEYGPCV

SEQ ID NO: 8509 - protein, 1140 aa, Homo sapiens
MVISLNSCLSFICLLLCHWIGTASPLNLEDPNVCSHWESYSVTVQESYPHPFDQIYYTSCTDILNWFKCTRHRVSYRTAYRHGEKTMYRRKSQCCPGFYESGEMCVPHCADKCVHGRCIAPNTCQCEPGWGGTNCSSACDGDHWGPHCTSRCQCKNGALCNPITGACHCAAGFRGWRCEDRCEQGTYGNDCHQRCQCQNGATCDHVTGECRCPPGYTGAFCEDLCPPGKHGPQCEQRCPCQNGGVCHHVTGECSCPSGWMGTVCGQPCPEGRFGKNCSQECQCHNGGTCDAATGQCHCSPGYTGERCQDECPVGTYGVLCAETCQCVNGGKCYHVSGACLCEAGFAGERCEARLCPEGLYGIKCDKRCPCHLENTHSCHPMSGECACKPGWSGLYCNETCSPGFYGEACQQICSCQNGADCDSVTGKCTCAPGFKGIDCSTPCPLGTYGINCSSRCGCKNDAVCSPVDGSCTCKAGWHGVDCSIRCPSGTWGFGCNLTCQCLNGGACNTLDGTCTCAPGWRGEKCELPCQDGTYGLNCAERCDCSHADGCHPTTGHCRCLPGWSGVHCDSVCAEGRWGPNCSLPCYCKNGASCSPDDGICECAPGFRGTTCQRICSPGFYGHRCSQTCPQCVHSSGPCHHITGLCDCLPGFTGALCNEVCPSGRFGKNCAGICTCTNNGTCNPIDRSCQCYPGWIGSDCSQPCPPAHWGPNCIHTCNCHNGAFCSAYDGECKCTPGWTGLYCTQRCPLGFYGKDCALICQCQNGADCDHISGQCTCRTGFMGRHCEQKCPSGTYGYGCRQICDCLNNSTCDHITGTCYCSPGWKGARCDQAGVIIVGNLNSLSRTSTALPADSYQIGAIAGIIILVLVVLFLLALFIIYRHKQKGKESSMPAVTYTPAMRVVNADYTISGTLPHSNGGNANSHYFTNPSYHTLTQCATSPHVNNRDRMTVTKSKNNQLFVNLKNVNPGKRGPVGDCTGTLPADWKHGGYLNELGAFGLDRSYMGKSLKDLGKNSEYNSSNCSLSSSENPYATIKDPPVLIPKSSECGYVEMKSPARRDSPYAEINNSTSANRNVYEVEPTVSVVQGVFSNNGRLSQDPYDLPKNSHIPCHYDLLPVRDSSSSPKQEDSGGSSSNSSSSSE

SEQ ID NO: 8510 - protein, 567 aa, Homo sapiens
MVISLNSCLSFICLLLCHWIGTASPLNLEDPNVCSHWESYSVTVQESYPHPFDQIYYTSCTDILNWFKCTRHRVSYRTAYRHGEKTMYRRKSQCCPGFYESGEMCVPHCADKCVHGRCIAPNTCQCEPGWGGTNCSSACDGDHWGPHCTSRCQCKNGALCNPITGACHCAAGFRGWRCEDRCEQGTYGNDCHQRCQCQNGATCDHVTGECRCPPGYTGAFCEDLCPPGKHGPQCEQRCPCQNGGVCHHVTGECSCPSGWMGTVCGQPCPEGRFGKNCSQECQCHNGGTCDAATGQCHCSPGYTGERCQDECPVGTYGVLCAETCQCVNGGKCYHVSGACLCEAGFAGERCEARLCPEGLYGIKCDKRCPCHLENTHSCHPMSGECACKPGWSGLYCNETCSPGFYGEACQQICSCQNGADCDSVTGKCTCAPGFKGIDCSTPCPLGTYGINCSSRCGCKNDAVCSPVDGSCTCKAGWHGVDCSIRCPSGTWGFGCNLTCQCLNGGACNTLDGTCTCAPGWRGEKCELPCQDGTYGLNCAERCDCSHADGCHPTTGHCRCLPGWSGLF

SEQ ID NO: 8511 - protein, 1140 aa, Homo sapiens; identical to SEQ ID NO: 8509

SEQ ID NO: 8512 - protein, 567 aa, Homo sapiens; identical to SEQ ID NO: 8510

SEQ ID NO: 8513 - protein, 1229 aa, Homo sapiens
MGASRDRGLAALWCLGLLGGLARVAGTHYRYLWRGCYPCHLGQAGYPVSAGDQRPDVDECRTHNGGCQHRCVNTPGSYLCECKPGFRLHTDSRTCLAINSCALGNGGCQHHCVQLTITRHRCQCRPGFQLQEDGRHCVRRSPCANRNGSCMHRCQVVRGLARCECHVGYQLAADGKACEDVDECAAGLAQCAHGCLNTQGSFKCVCHAGYELGADGRQCYRIEMEIVNSCEANNGGCSHGCSHTSAGPLCTCPRGYELDTDQRTCIDVDDCADSPCCQQVCTNNPGGYECGCYAGYRLSADGCGCEDVDECASSRGGCEHHCTNLAGSFQCSCEAGYRLHEDRRGCSPLEEPMVDLDGELPFVRPLPHIAVLQDELPQLFQDDDVGADEEEAELRGEHTLTEKFVCLDDSFGHDCSLTCDDCRNGGTCLLGLDGCDCPEGWTGLICNETCPPDTFGKNCSFSCSCQNGGTCDSVTGACRCPPGVSGTNCEDGCPKGYYGKHCRKKCNCANRGRCHRLYGACLCDPGLYGRFCHLTCPPWAFGPGCSEECQCVQPHTQSCDKRDGSCSCKAGFRGERCQAECELGYFGPGCWQACTCPVGVACDSVSGECGKRCPAGFQGEDCGQECPVGTFGVNCSSSCSCGGAPCHGVTGQCRCPPGRTGEDCEADCPEGRWGLGCQEICPACQHAARCDPETGACLCLPGFVGSRCQDVCPAGWYGPSCQTRCSCANDGHCHPATGHCSCAPGWTGFSCQRACDTGHWGPDCSHPCNCSAGHGSCDAISGLCLCEAGYVGPRCEQQCPQGHFGPGCEQRCQCQHGAACDHVSGACTCPAGWRGTFCEHACPAGFFGLDCRSACNCTAGAACDAVNGSCLCPAGRRGPRCAEKCLPRDVRAGCRHSGGCLNGGLCDPHTGRCLCPAGWTGDKCQSPCLRGWFGEACAQRCSCPPGAACHHVTGACRCPPGFTGSGCEQGCPPGRYGPGCEQLCGCLNGGSCDAATGACRCPTGFLGTDCNLTCPQGRFGPNCTHVCGCGQGAACDPVTGTCLCPPGRAGVRCERGCPQNRFGVGCEHTCSCRNGGLCHASNGSCSCGLGWTGRHCELACPPGRYGAACHLECSCHNNSTCEPATGTCRCGPGFYGQACEHRRSGATCNLDCRRGQFGPSCTLHCDCGGGADCDPVSGQCHCVDGYMGPTCREGGPLRLPENPSLAQGSAGTLPASSRPTSRSGGPARH

SEQ ID NO: 8514 - protein, 1541 aa, Homo sapiens
MSFLEEARAAGRAVVLALVLLLLPAVPVGASVPPRPLLPLQPGMPHVCAEQELTLVGRRQPCVQALSHTVPVWKAGCGWQAWCVGHERRTVYYMGYRQVYTTEARTVLRCCRGWMQQPDEEGCLSAECSASLCFHGGRCVPGSAQPCHCPPGFQGPRCQYDVDECRTHNGGCQHRCVNTPGSYLCECKPGFRLHTDSRTCLAINSCALGNGGCQHHCVQLTITRHRCQCRPGFQLQEDGRHCVRRSPCANRNGSCMHRCQVVRGLARCECHVGYQLAADGKACEDVDECAAGLAQCAHGCLNTQGSFKCVCHAGYELGADGRQCYRIEMEIVNSCEANNGGCSHGCSHTSAGPLCTCPRGYELDTDQRTCIDVDDCADSPCCQQVCTNNPGGYECGCYAGYRLSADGCGCEDVDECASSRGGCEHHCTNLAGSFQCSCEAGYRLHEDRRGCSPLEEPMVDLDGELPFVRPLPHIAVLQDELPQLFQDDDVGADEEEAELRGEHTLTEKFVCLDDSFGHDCSLTCDDCRNGGTCLLGLDGCDCPEGWTGLICNETCPPDTFGKNCSFSCSCQNGGTCDSVTGACRCPPGVSGTNCEDGCPKGYYGKHCRKKCNCANRGRCHRLYGACLCDPGLYGRFCHLTCPPWAFGPGCSEECQCVQPHTQSCDKRDGSCSCKAGFRGERCQAECELGYFGPGCWQACTCPVGVACDSVSGECGKRCPAGFQGEDCGQECPVGTFGVNCSSSCSCGGAPCHGVTGQCRCPPGRTGEDCEADCPEGRWGLGCQEICPACQHAARCDPETGACLCLPGFVGSRCQDVCPAGWYGPSCQTRCSCANDGHCHPATGHCSCAPGWTGFSCQRACDTGHWGPDCSHPCNCSAGHGSCDAISGLCLCEAGYVGPRCEQQCPQGHFGPGCEQRCQCQHGAACDHVSGACTCPAGWRGTFCEHACPAGFFGLDCRSACNCTAGAACDAVNGSCLCPAGRRGPRCAETCPAHTYGHNCSQACACFNGASCDPVHGQCHCAPGWMGPSCLQACPAGLYGDNCRHSCLCQNGGTCDPVSGHCACPEGWAGLACEKECLPRDVRAGCRHSGGCLNGGLCDPHTGRCLCPAGWTGDKCQSPCLRGWFGEACAQRCSCPPGAACHHVTGACRCPPGFTGSGCEQACPPGSFGEDCAQMCQCPGENPACHPATGTCSCAAGYHGPSCQQRCPPGRYGPGCEQLCGCLNGGSCDAATGACRCPTGFLGTDCNLTCPQGRFGPNCTHVCGCGQGAACDPVTGTCLCPPGRAGVRCERGCPQNRFGVGCEHTCSCRNGGLCHASNGSCSCGLGWTGRHCELACPPGRYGAACHLECSCHNNSTCEPATGTCRCGPGFYGQACEHPCPPGFHGAGCQGLCWCQHGAPCDPISGRCLCPAGFHGHFCERGCEPGSFGEGCHQRCDCDGGAPCDPVTGLCLCPPGRSGATCNLDCRRGQFGPSCTLHCDCGGGADCDPVSGQCHCVDGYMGPTCREGGPLRLPENPSLAQGSAGTLPASSRPTSRSGGPARH

SEQ ID NO: 8515 - protein, 1323 aa, Homo sapiens
MSFLEEARAAGRAVVLALVLLLLPAVPVGASVPPRPLLPLQPGMPHVCAEQELTLVGRRQPCVQALSHTVPVWKAGCGWQAWCVGHERRTVYYMGYRQVYTTEARTVLRCCRGWMQQPDEEGCLSDVGECANANGGCAGRCRDTVGGFYCRWPPPSHQLQGDGETCQDVDECRTHNGGCQHRCVNTPGSYLCECKPGFRLHTDSRTCLAINSCALGNGGCQHHCVQLTITRHRCQCRPGFQLQEDGRHCVRRSPCANRNGSCMHRCQVVRGLARCECHVGYQLAADGKACEDVDECAAGLAQCAHGCLNTQGSFKCVCHAGYELGADGRQCYRIEMEIVNSCEANNGGCSHGCSHTSAGPLCTCPRGYELDTDQRTCIDVDDCADSPCCQQVCTNNPGGYECGCYAGYRLSADGCGCEDVDECASSRGGCEHHCTNLAGSFQCSCEAGYRLHEDRRGCSPLEEPMVDLDGELPFVRPLPHIAVLQDELPQLFQDDDVGADEEEAELRGEHTLTEKFVCLDDSFGHDCSLTCDDCRNGGTCLLGLDGCDCPEGWTGLICNETCPPDTFGKNCSFSCSCQNGGTCDSVTGACRCPPGVSGTNCEDGCPKGYYGKHCRKKCNCANRGRCHRLYGACLCDPGLYGRFCHLTCPPWAFGPGCSEECQCVQPHTQSCDKRDGSCSCKAGFRGERCQAECELGYFGPGCWQACTCPVGVACDSVSGECGKRCPAGFQGEDCGQECPVGTFGVNCSSSCSCGGAPCHGVTGQCRCPPGRTGEDCEADCPEGRWGLGCQEICPACQHAARCDPETGACLCLPGFVGSRCQDVCPAGWYGPSCQTRCSCANDGHCHPATGHCSCAPGWTGFSCQRACDTGHWGPDCSHPCNCSAGHGSCDAISGLCLCEAGYVGPRCEQQCPQGHFGPGCEQRCQCQHGAACDHVSGACTCPAGWRGTFCEHACPAGFFGLDCRSACNCTAGAACDAVNGSCLCPAGRRGPRCAETCPAHTYGHNCSQACACFNGASCDPVHGQCHCAPGWMGPSCLQACPAGLYGDNCRHSCLCQNGGTCDPVSGHCACPEGWAGLACEKECLPRDVRAGCRHSGGCLNGGLCDPHTGRCLCPAGWTGDKCQSPCAKGTFGPHCEGRCACRWGGPCHLATGACLCPPGWRGAPGVRMPACGAGLERPVPSAAAARLALPATTSLGPAAVPLASLAPAASRPAHPAALGRTVRRCASVPVRTRPATLPPGPAHVLLATTAPAASNDVRPGGMGQAVNSCVGVSTGAPVMRPRGPAAAPLGSSGRTATSPVRRAASAPTAPTCVGVGRGRPATL

SEQ ID NO: 8516 - protein, 248 aa, Homo sapiens
  VARIANT 1: note = misc_feature - Xaa can be any naturally occurring amino acid
XDAATGACRCPTGFLGTDCNLTCPQGRFGPNCTHVCGCGQGAACDPVTGTCLCPPGRAGVRCERGCPQNRFGVGCEHTCSCRNGGLCHASNGSCSCGLGWTGRHCELACPPGRYGAACHLECSCHNNSTCEPATGTCRCGPGFYGQACEHPCPPGFHGAGCQGLCWCQHGAPCDPISGRCLCPAGFHGHFCERDCRRGQFGPSCTLHCDCGGGADCDPVSGQCHCVDGYMGPTCREGGPLRLPENPSL

SEQ ID NO: 8517 - protein, 1274 aa, Homo sapiens
MAVRQAATAGTPGPRREEEAALLFERAHYRHDPRWLLPVTPRLCLACALELLPDPGVSLVRKKHMLSCFQDALVRHTSLVTQLVSQDQRVCIHFISVLFGLLCSMEDGSVTDLCIEVLIQITTQLKLEQTIRCLLDECHKELCNMPSMRGSLATLTLLGKLVDAIPALADELVMEHGNLMEHLLRGLVYPSEGIQASVCYLYGKLYSSPVAAEMLSGHFREKLFPLFLSILDGAQTKELQINCLGLLRQLLKYDLFVSMIMNQDGLGESAKNIEGSSGNTSLPLVLKKLLLSRDETLQVASAHCITAVLVHSPAKHASAFIHADIPEFLFEHLSSSSEVLVWSSCNCLTLLVEEPLFFSKCHTVYGIEAVVRSLQGSLKMNNIELHKQGLLLFAEILTRQPEEIKLFTSSAMCRDAGRALQEAVSSPVLEVAAEALKATSAFLRKDHQSTPPVQYGELQALLEAMLNRCAEFSQTLLSRRPLGHASSRDSEKAILQRGKFLLSTLEGFRSACRLAIEFQSEPSAQENPFTAPSAKKEDTLEAFSEFLLSACDSLCIPMVMRHLEQTTHPALMEVFLSILHNLFVIVPHMKEKFSKKLASSSFIRLTLELKARFCSGLSHSALNQVCSNFLYYMCLNLLSAPEKTGPPSKEELSAVSELLQHGLPQISSRSPESLAFLSDRQYMEGAARQRQYCILLLFYLAYIHEDRFVSEAELFEAVQSFLLSLQDQGERPPLVVFKASIYLLAICQDKDNTLRETMVSAIRKFLEGIPDLQLVYTHHPLLLRFFLLYPELMSRYGHRVLELWFFWEESSYEELDDVTSAGQPALPASLVVLFQLLRSIPSILLILLDLIYSSPVDTAHKVLISLRTFLRRNEDIQVGGLIRGHFLLILQRLLVEHGASPSGASGNLPLLLSLLSLMQLRNVSEQELDSVAMKLLHQVSKLCGKCSPTDVDILQPSFNFLYWSLHQTTPSSQKRAAAVLLSSTGLMELLEKMLALTLAKADSPRTALLCSAWLLTASFSAQQHKGSLQVHQTLSVEMDQVLKALSFPKKKAALLSAAILCFLRTALRQSFSSALVALVPSGAQPLPATKDTVLAPLRMSQVRSLVIGLQNLLVQKDPLLSQACVGCLEALLDYLDARSPDIALHVASQPWNRFLLFTLLDAGENSFLRPEILRLMTLFMRYRSSSVLSHEEVGDVLQGVALADLSTLSNTTLQALHGFFQQLQSMGHLADHSMAQTLQASLEGLPPSTSSGQPPLQDMLCLGGVAVSLSHIRN

SEQ ID NO: 8518 - protein, 238 aa, Homo sapiens
MLALTLAKADSPRTALLCSAWLLTASFSAQQHKGSLQVHQTLSVEMDQVLKALSFPKKKAALLSAAILCFLRTALRQSFSSALVALVPSGAQPLPATKDTVLAPLRMSQVRSLVIGLQNLLVQKDPLLSQACVGCLEALLDYLDARSPDIALHVASQPWNRFLLFTLLDAGENSFLRPEILRLMTLLQSMGHLADHSMAQTLQASLEGLPPSTSSGQPPLQDMLCLGGVAVSLSHIRN

SEQ ID NO: 8519 - protein, 506 aa, Homo sapiens
MNQDGLGESAKNIEGSSGNTSLPLVLKKLLLSRDETLQVASAHCITAVLVHSPAKHASAFIHADIPEFLFEHLSSSSEVLVWSSCNCLTLLVEEPLFFSKCHTVYGIEAVVRSLQGSLKMNNIELHKQGLLLFAEILTRQPEEIKLFTSSAMCRDAGRALQEAVSSPVLEVAAEALKATSAFLRKDHQSTPPVQYGELQALLEAMLNRCAEFSQTLLSRRPLGHASSRDSEKAILQRGKFLLSTLEGFRSACRLAIEFQSEPSAQENPFTAPSAKKEDTLEAFSEFLLSACDSLCIPMVMRHLEQTTHPALMEVFLSILHNLFVIVPHMKEKFSKKLASSSFIRLTLELKARFCSGLSHSALNQVCSNFLYYMCLNLLSAPEKTGPPSKEELSAVSELLQHGLPQISSRSPESLAFLSDRQYMEGAARQRQYCILLLFYLAYIHEDRFVSEAELFEAVQSFLLSLQDQGERPPLVVFKASIYLLAICQDKDNTLREQLHCSLISIS

SEQ ID NO: 8520 - protein, 63 aa, Homo sapiens
  VARIANT 1: note = misc_feature - Xaa can be any naturally occurring amino acid
XRSSSVLSHEELQSMGHLADHSMAQTLQASLEGLPPSTSSGQPPLQDMLCLGGVAVSLSHIRN

SEQ ID NO: 8521 - protein, 385 aa, Homo sapiens
MDVQKWYLRTSKLALALAIIRSKPADKSSREYTEHLAMLLSEEQSKWRSKVEILEAEVMQLRQKLLVSRLCSGSFKSGYVSSQLEAQEPKSSESTLTSMEDSGCDLSNEQRTESSDLSQHFVESCTPTHFPPLPLVKRPCAILQNPLSSHMQFLQYLLELKNLTESGNLKRDLTHFEKDSSTVSDSVFQLLDGLITFYRNPKLPFSRFWTEAVGTLASLISDYNLSSHILKKCSKKLEEFEKTLLHAILGNNHINQFQVQHYVSQSLVTLGNCSLLRKSIISLLLSEVNGFADDLGAINQEQASYDVSRYENIFYLFWVLEQLLQKETEEGNTSSIGHDDQEIKKFLQKHDETIFQLSDAFPLFTFYLWRVGILLSSAQIETLRK

SEQ ID NO: 8522 - protein, 325 aa, Homo sapiens
MAQGLRLQGSRRKGRHPLFPLLALIFEKCELATCTPREPGVAGGDVCSSESFNEDIAVFAKQIRAEKPLFSSNPELDNLMIQAIQVLRFHLLELEKVHELCDNFCHRYISCLKGKMPIDLVIDDREGGSKSDSEDITRSANLTDQPSWNRDHDDTASTRSGGTPGPSSGGHTSHSGDNSSEQGDGLDNSVASPSTGDDDDPDKDKKRHKKRGIFPKVATNIMRAWLFQHLTHPYPSEEQKKQLAQDTGLTILQVNNWFINARRRIVQPMIDQSNRAVSQGTPYNPDGQPMGGFVMDGQQHMGIRAPGPMSGMGMNMGMEGQWHYM

SEQ ID NO: 8523 - protein, 390 aa, Homo sapiens
MAQRYDDLPHYGGMDGVGIPSTMYGDPHAARSMQPVHHLNHGPPLHSHQYPHTAHTNAMAPSMGSSVNDALKRDKDAIYGHPLFPLLALIFEKCELATCTPREPGVAGGDVCSSESFNEDIAVFAKQIRAEKPLFSSNPELDNLMIQAIQVLRFHLLELEKVHELCDNFCHRYISCLKGKMPIDLVIDDREGGSKSDSEDITRSANLTDQPSWNRDHDDTASTRSGGTPGPSSGGHTSHSGDNSSEQGDGLDNSVASPSTGDDDDPDKDKKRHKKRGIFPKVATNIMRAWLFQHLTHPYPSEEQKKQLAQDTGLTILQVNNWFINARRRIVQPMIDQSNRAVSQGTPYNPDGQPMGGFVMDGQQHMGIRAPGPMSGMGMNMGMEGQWHYM

SEQ ID NO: 8524 - protein, 370 aa, Homo sapiens
MAQRYDDLPHYGGMDGVGIPSTMYGDPHAARSMQPVHHLNHGPPLHSHQYPHTAHTNAMAPSMGSSVNDALKRDKDAIYGHPLFPLLALIFEKCELATCTPREPGVAGGDVCSSESFNEDIAVFAKQIRAEKPLFSSNPELDNLMIQAIQVLRFHLLELEKVHELCDNFCHRYISCLKGKMPIDLVIDDREGGSKSDSEDITRSANLTDQPSWNRDHDDTASTRSGGTPGPSSGGHTSHSGDNSSEQGDGLDNSVASPSTGDDDDPDKDKKRHKKRGIFPKVATNIMRAWLFQHLTHPYPSEEQKKQLAQDTGLTILQVNNWFINARRRIVQPMIDQSNRAGKSPIVTVFKSRKRKPSSSHSPGGPLPGK

SEQ ID NO: 8525 - protein, 378 aa, Homo sapiens
MAQRYDDLPHYGGMDGVGIPSTMYGDPHAARSMQPVHHLNHGPPLHSHQYPHTAHTNAMAPSMGSSVNDALKRDKDAIYGHPLFPLLALIFEKCELATCTPREPGVAGGDVCSSESFNEDIAVFAKQIRAEKPLFSSNPELDNLMIQAIQVLRFHLLELEKVHELCDNFCHRYISCLKGKMPIDLVIDDREGGSKSDSEDITRSANLTDQPSWNRDHDDTASTRSGGTPGPSSGGHTSHSGDNSSEQGDGLDNSVASPSTGDDDDPDKDKKRHKKRGIFPKVATNIMRAWLFQHLTHPYPSEEQKKQLAQDTGLTILQVNNWFINARRRIVQPMIDQSNRAVSQGTPYNPDGQPMGGFVMDGQQHMGIRAPGKTLFLW

SEQ ID NO: 8526 - protein, 463 aa, Homo sapiens
MQYDDLPHYGGMDGVGIPSTMYGDPHAARSMQPVHHLNHGPPLHSHQYPHTAHTNAMAPSMGSSVNDALKRDKDAIYGHPLFPLLALIFEKCELATCTPREPGVAGGDVCSSESFNEDIAVFAKQIRAEKPLFSSNPELDNLMIQAIQVLRFHLLELEKVHELCDNFCHRYISCLKGKMPIDLVIDDREGGSKSDSEDITRSANLTDQPSWNRDHDDTASTRSGGTPGPSSGGHTSHSGDNSSEQGDGLDNSVASPSTGDDDDPDKDKKRHKKRGIFPKVATNIMRAWLFQHLTHPYPSEEQKKQLAQDTGLTILQVNNWFINARRRIVQPMIDQSNRAVSQGTPYNPDGQPMGGFVMDGQQHMGIRAPGLQSMPGEYVARGGPMGVSMGQPSYTQPQMPPHPAQLRHGPPMHTYIPGHPHHPTVMMHGGPPHPGMPMSASSPTVLNTGDPTMSGQVMDIHAQ

SEQ ID NO: 8527 - protein, 121 aa, Homo sapiens
  VARIANT 1: note = misc_feature - Xaa can be any naturally occurring amino acid
XLCFESPEISRPVFPCLQMIQAIQVLRFHLLELEKVHELCDNFCHRYISCLKGKMPIDLVIDDREGGSKSDSEDITRSANLTDQPSWNRDHDDTASTRSGGTPGPSSGGHTSHSGDNSSEQ

SEQ ID NO: 8528 - protein, 126 aa, Homo sapiens
FPKVATNIMRAWLFQHLSAGAGRHVIAPSLRLPWSPSWGAQRRSEAPVLPDVCLGLGSPSPGPRWARPWGSDCGRPGRQSDSCWWLQHPYPSEEQKKQLAQDTGLTILQVNNWFINARRRIVQPMI

SEQ ID NO: 8529 - protein, 404 aa, Homo sapiens
MARRYDELPHYPGIVDGPAALASFPETVPAVPGPYGPHRPPQPLPPGLDSDGLKREKDEIYGHPLFPLLALVFEKCELATCSPRDGAGAGLGTPPGGDVCSSDSFNEDIAAFAKQVRSERPLFSSNPELDNLMIQAIQVLRFHLLELEKGKMPIDLVIEDRDGGCREDFEDYPASCPSLPDQNNMWIRDHEDSGSVHLGTPGPSSGGLASQSGDNSSDQGDGLDTSVASPSSGGEDEDLDQERRRNKKRGIFPKVATNIMRAWLFQHLSRRSEAPVLPDVCLGLGSPSPGPRWARPWGSDCGRPGRQSDSCWWLQHPYPSEEQKKQLAQDTGLTILQVNNWFINARRRIVQPMIDQSNRTGQGAAFSPEGQPIGGYTETQPHVAVRPPGSVGMSLNLEGEWHYL

SEQ ID NO: 8530 - protein, 358 aa, Homo sapiens
MARRYDELPHYPGIVDGPAALASFPETVPAVPGPYGPHRPPQPLPPGLDSDGLKREKDEIYGHPLFPLLALVFEKCELATCSPRDGAGAGLGTPPGGDVCSSDSFNEDIAAFAKQVRSERPLFSSNPELDNLMIQAIQVLRFHLLELEKGKMPIDLVIEDRDGGCREDFEDYPASCPSLPDQNNMWIRDHEDSGSVHLGTPGPSSGGLASQSGDNSSDQGDGLDTSVASPSSGGEDEDLDQERRRNKKRGIFPKVATNIMRAWLFQHLSHPYPSEEQKKQLAQDTGLTILQVNNWFINARRRIVQPMIDQSNRTGQGAAFSPEGQPIGGYTETQPHVAVRPPGSVGMSLNLEGEWHYL

SEQ ID NO: 8531 - protein, 375 aa, Homo sapiens
MARRYDELPHYPGIVDGPAALASFPETVPAVPGPYGPHRPPQPLPPGLDSDGLKREKDEIYGHPLFPLLALVFEKCELATCSPRDGAGAGLGTPPGGDVCSSDSFNEDIAAFAKQVRSERPLFSSNPELDNLMIQAIQVLRFHLLELEKVHDLCDNFCHRYITCLKGKMPIDLVIEDRDGGCREDFEDYPASCPSLPDQNNMWIRDHEDSGSVHLGTPGPSSGGLASQSGDNSSDQGDGLDTSVASPSSGGEDEDLDQERRRNKKRGIFPKVATNIMRAWLFQHLSHPYPSEEQKKQLAQDTGLTILQVNNWFINARRRIVQPMIDQSNRTGQGAAFSPEGQPIGGYTETQPHVAVRPPGSVGMSLNLEGEWHYL

SEQ ID NO: 8532 - protein, 421 aa, Homo sapiens
MARRYDELPHYPGIVDGPAALASFPETVPAVPGPYGPHRPPQPLPPGLDSDGLKREKDEIYGHPLFPLLALVFEKCELATCSPRDGAGAGLGTPPGGDVCSSDSFNEDIAAFAKQVRSERPLFSSNPELDNLMIQAIQVLRFHLLELEKVHDLCDNFCHRYITCLKGKMPIDLVIEDRDGGCREDFEDYPASCPSLPDQNNMWIRDHEDSGSVHLGTPGPSSGGLASQSGDNSSDQGDGLDTSVASPSSGGEDEDLDQERRRNKKRGIFPKVATNIMRAWLFQHLSRRSEAPVLPDVCLGLGSPSPGPRWARPWGSDCGRPGRQSDSCWWLQHPYPSEEQKKQLAQDTGLTILQVNNWFINARRRIVQPMIDQSNRTGQGAAFSPEGQPIGGYTETQPHVAVRPPGSVGMSLNLEGEWHYL

SEQ ID NO: 8533 - protein, 421 aa, Homo sapiens; identical to SEQ ID NO: 8532

SEQ ID NO: 8534 - protein, 221 aa, Homo sapiens [sequence omitted]

SEQ ID NO: 8535 - protein, 463 aa, Homo sapiens
MCTLCTTMRGSYRRCPWISLSVCLSLCLCHCLLTPLSPSLFPPSQTLPSLPLGPPAHMSGISAWTGSSLPTEAAPGDLEGFKLGGSDTWGPQYDELPHYPGIVDGPAALASFPETVPAVPGPYGPHRPPQPLPPGLDSDGLKREKDEIYGHPLFPLLALVFEKCELATCSPRDGAGAGLGTPPGGDVCSSDSFNEDIAAFAKQVRSERPLFSSNPELDNLMIQAIQVLRFHLLELEKVHDLCDNFCHRYITCLKGKMPIDLVIEDRDGGCREDFEDYPASCPSLPDQNNMWIRDHEDSGSVHLGTPGPSSGGLASQSGDNSSDQGDGLDTSVASPSSGGEDEDLDQERRRNKKRGIFPKVATNIMRAWLFQHLSHPYPSEEQKKQLAQDTGLTILQVNNWFINARRRIVQPMIDQSNRTGQGAAFSPEGQPIGGYTETQPHVAVRPPGSVGMSLNLEGEWHYL

SEQ ID NO: 8536 - protein, 250 aa, Homo sapiens
PPPSLSTPALPPWVAPPSTPVPPQVHDLCDNFCHRYITCLKGKMPIDLVIEDRDGGCREDFEDYPASCPSLPDQNNMWIRDHEDSGSVHLGTPGPSSGGLASQSGDNSSDQGDGLDTSVASPSSGGEDEDLDQERRRNKKRGIFPKVATNIMRAWLFQHLSHPYPSEEQKKQLAQDTGLTILQVNNWFINARRRIVQPMIDQSNRTGQGAAFSPEGQPIGGYTETQPHVAVRPPGSVGMSLNLEGEWHYL

SEQ ID NO: 8537 - protein, 178 aa, Homo sapiens
  VARIANT 1: note = misc_feature - Xaa can be any naturally occurring amino acid
XGLSLPSQVRSERPLFSSNPELDNLGKMPIDLVIEDRDGGCREDFEDYPASCPSLPDQNNMWIRDHEDSGSVHLGTPGPSSGGLASQSGDNSSDQGDGLDTSVASPSSGGEDEDLDQERRRNKKRGIFPKVATNIMRAWLFQHLSRRSEAPVLPDVCLGLGSPSPGPRWARPWGSDCG

SEQ ID NO: 8538 - protein, 302 aa, Homo sapiens
MRGPSGALWLLLALRTVLGGMEVRWCATSDPEQHKCGNMSEAFREAGIQPSLLCVRGTSADHCVQLIAAQEADAITLDGGAIYEAGKEHGLKPVVGEVYDQEVGTSYYAVAVVRRSSHVTIDTLKGVKSCHTGINRTVGWNVPVGYLVESGRLSVMGCDVLKAVSDYFGGSCVPGAGETSYSESLCRLCRGDSSGEGVCDKSPLERYYDYSGAFRCLAEGAGDVAFVKHSTVLENTDESPSRRQTWTRSEEEEGECPAHEEARRTMRSSAGQAWKWAPVHRPQDESDKGEFGKRAKSRDMLG

SEQ ID NO: 8539 - protein, 738 aa, Homo sapiens
MRGPSGALWLLLALRTVLGGMEVRWCATSDPEQHKCGNMSEAFREAGIQPSLLCVRGTSADHCVQLIAAQEADAITLDGGAIYEAGKEHGLKPVVGEVYDQEVGTSYYAVAVVRRSSHVTIDTLKGVKSCHTGINRTVGWNVPVGYLVESGRLSVMGCDVLKAVSDYFGGSCVPGAGETSYSESLCRLCRGDSSGEGVCDKSPLERYYDYSGAFRCLAEGAGDVAFVKHSTVLENTDGKTLPSWGQALLSQDFELLCRDGSRADVTEWRQCHLARVPAHAVVVRADTDGGLIFRLLNEGQRLFSHEGSSFQMFSSEAYGQKDLLFKDSTSELVPIATQTYEAWLGHEYLHAMKGLLCDPNRLPPYLRWCVLSTPEIQKCGDMAVAFRRQRLKPEIQCVSAKSPQHCMERIQAEQVDAVTLSGEDIYTAGKTYGLVPAAGEHYAPEDSSNSYYVVAVVRRDSSHAFTLDELRGKRSCHAGFGSPAGWDVPVGALIQRGFIRPKDCDVLTAVSEFFNASCVPVNNPKNYPSSLCALCVGDEQGRNKCVGNSQERYYGYRGAFRCLVENAGDVAFVRHTTVFDNTNGHNSEPWAAELRSEDYELLCPNGARAEVSQFAACNLAQIPPHAVMVRPDTNIFTVYGLLDKAQDLFGDDHNKNGFKMFDSSNYHGQDLLFKDATVRAVPVGEKTTYRGWLGLDYVAALEGMSSQQCSGAAAPAPGAPLLPLLLPALAARLLPPAL

SEQ ID NO: 8540 - protein, 181 aa, Homo sapiens
MRGPSGALWLLLALRTVLGGMEVRWCATSDPEQHKCGNMSEAFREAGIQPSLLCVRGTSADHCVQLIAAQEADAITLDGGAIYEAGKEHGLKPVVGEVYDQEVGTSYYAVAVVRRSSHVTIDTLKGVKSCHTGINRTVGWNVPVGYLVESGRLSVMGCDVLKGPKRGADLHPESSQVAHQP

SEQ ID NO: 8541 - protein, 96 aa, Homo sapiens
MRVFCVGLLLFSVTWAAPTFQPQTEKTKQSCVEEQRAPQASLLQNSGSQNLPDPHPMPRPTSRSASGPVAAGVILMDLSRKKKTKTILVFTIWARE

SEQ ID NO: 8542 - protein, 556 aa, Homo sapiens
MRVFCVGLLLFSVTWAAPTFQPQTEKTKQSCVEEQRITYKGHYEKHGHYVFKCVYMSPEKKNQTDVKQEEKNKDNIGFHHLGKRINQELSSKENIVQERKKDLSLSEASENKGSSKSQNYFTNRQRLNKEYSISNKENTHNGLRMSIYPKSTGNKGFEDGDDAISKLHDQEEYGAALIRNNMQHIMGPVTAIKLLGEENKENTPRNVLNIIPASMNYAKAHSKDKKKPQRDSQAQKSPVKSKSTHRIQHNIDYLKHLSKVKKIPSDFEGSGYTDLQERGDNDISPFSGDGQPFKDIPGKGEATGPDLEGKDIQTGFAGPSEAESTHLDTKKPGYNEIPEREENGGNTIGTRDETAKEADAVDVSLVEGSNDIMGSTNFKELPGREGNRVDAGSQNAHQGKVEFHYPPAPSKEKRKEGSSDAAESTNYNEIPKNGKGSTRKGVDHSNRNQATLNEKQRFPSKGKSQGLPIPSRGLDNEIKNEMDSFNGPSHENIITHGRKYHYVPHRQNNSTRNKGMPQGKGSWGRQPHSNRRFSSRRRDDSSESSDSGSSSESDGD

SEQ ID NO: 8543 - protein, 525 aa, Homo sapiens
MRVFCVGLLLFSVTWAAPTFQPQTEKTKQSCVEEQRQEEKNKDNIGFHHLGKRINQELSSKENIVQERKKDLSLSEASENKGSSKSQNYFTNRQRLNKEYSISNKENTHNGLRMSIYPKSTGNKGFEDGDDAISKLHDQEEYGAALIRNNMQHIMGPVTAIKLLGEENKENTPRNVLNIIPASMNYAKAHSKDKKKPQRDSQAQKSPVKSKSTHRIQHNIDYLKHLSKVKKIPSDFEGSGYTDLQERGDNDISPFSGDGQPFKDIPGKGEATGPDLEGKDIQTGFAGPSEAESTHLDTKKPGYNEIPEREENGGNTIGTRDETAKEADAVDVSLVEGSNDIMGSTNFKELPGREGNRVDAGSQNAHQGKVEFHYPPAPSKEKRKEGSSDAAESTNYNEIPKNGKGSTRKGVDHSNRNQATLNEKQRFPSKGKSQGLPIPSRGLDNEIKNEMDSFNGPSHENIITHGRKYHYVPHRQNNSTRNKGMPQGKGSWGRQPHSNRRFSSRRRDDSSESSDSGSSSESDGD

SEQ ID NO: 8544 - protein, 525 aa, Homo sapiens; identical to SEQ ID NO: 8543

SEQ ID NO: 8545 - protein, 412 aa, Homo sapiens
MSIYPKSTGNKGFEDGDDAISKLHDQEEYGAALIRNNMQHIMGPVTAIKLLGEENKENTPRNVLNIIPASMNYAKAHSKDKKKPQRDSQAQKSPVKSKSTHRIQHNIDYLKHLSKVKKIPSDFEGSGYTDLQERGDNDISPFSGDGQPFKDIPGKGEATGPDLEGKDIQTGFAGPSEAESTHLDTKKPGYNEIPEREENGGNTIGTRDETAKEADAVDVSLVEGSNDIMGSTNFKELPGREGNRVDAGSQNAHQGKVEFHYPPAPSKEKRKEGSSDAAESTNYNEIPKNGKGSTRKGVDHSNRNQATLNEKQRFPSKGKSQGLPIPSRGLDNEIKNEMDSFNGPSHENIITHGRKYHYVPHRQNNSTRNKGMPQGKGSWGRQPHSNRRFSSRRRDDSSESSDSGSSSESDGD

SEQ ID NO: 8546 - protein, 412 aa, Homo sapiens; identical to SEQ ID NO: 8545

SEQ ID NO: 8547 - protein, 501 aa, Homo sapiens
MSPEKKNQTDVKQEEKNKDNIGFHHLGKRINQELSSKENIVQERKKDLSLSEASENKGSSKSQNYFTNRQRLNKEYSISNKENTHNGLRMSIYPKSTGNKGFEDGDDAISKLHDQEEYGAALIRNNMQHIMGPVTAIKLLGEENKENTPRNVLNIIPASMNYAKAHSKDKKKPQRDSQAQKSPVKSKSTHRIQHNIDYLKHLSKVKKIPSDFEGSGYTDLQERGDNDISPFSGDGQPFKDIPGKGEATGPDLEGKDIQTGFAGPSEAESTHLDTKKPGYNEIPEREENGGNTIGTRDETAKEADAVDVSLVEGSNDIMGSTNFKELPGREGNRVDAGSQNAHQGKVEFHYPPAPSKEKRKEGSSDAAESTNYNEIPKNGKGSTRKGVDHSNRNQATLNEKQRFPSKGKSQGLPIPSRGLDNEIKNEMDSFNGPSHENIITHGRKYHYVPHRQNNSTRNKGMPQGKGSWGRQPHSNRRFSSRRRDDSSESSDSGSSSESDGD

SEQ ID NO: 8548 - protein, 80 aa, Homo sapiens
MAASRWARKAVVLLCASDLLLLLLLLPPPGSCAAEGSPGTPDESTPPPRKKKKDIRDYNDADMARLLEQWEANTCPTSTH

SEQ ID NO: 8549 - protein, 234 aa, Homo sapiens
MAASRWARKAVVLLCASDLLLLLLLLPPPGSCAAEGSPGTPDESTPPPRKKKKDIRDYNDADMARLLEQWEKDDDIEEGDLPEHKRPSAPVDFSKIDPSKPESILKMTKKGKTLMMFVTVSGSPTEKETEEITSLWQGSLFNANYDVQRFIVGSDRAIFMLRDGSYAWEIKDFLVGQDRCADVTLEGQVYPGKGGGSKEKNKTKQDKGKKKKEGDLKSRSSKEENRAGNKREDL

SEQ ID NO: 8550 - protein, 234 aa, Homo sapiens; identical to SEQ ID NO: 8549

SEQ ID NO: 8551 - protein, 234 aa, Homo sapiens; identical to SEQ ID NO: 8549

SEQ ID NO: 8552 - protein, 138 aa, Homo sapiens
MAASRWARKAVVLLCASDLLLLLLLLPPPGSCAAEGSPGTPDESTPPPRKKKKDIRDYNDADMARLLEQWETPEPLPVLPEVPSTCACLSSASLIWTCFSHLSPHALVKRVWPPAKQGLGGKESPASAWLPHRGGELK

SEQ ID NO: 8553 - protein, 173 aa, Homo sapiens
LLSHDYGDIVAQELLYRYKQNRSGRLTIKSLCLSNGGIFPETHRPLLLQKLLKDGGVLSPILTRLMNFFLWDMWAGIRNNDGNLVIDSLLQYINQRKKFRRRWVGALASVTIPIHFIYGPLDPVNPYPEFLELYRKTLPRSTVSILDDHISHYPQLEDPMGFLNAYMGFINSF

SEQ ID NO: 8554 - protein, 118 aa, Homo sapiens
MREWWVQVGLLAVPLLAAYLHIPPPQLSPALHSWKSSGKFFTYKGLRIFYQDSVGVVGSPEIVVLLHGFPTSSYDWYKIWEGLTLRFHRVIALDFLGFGFSDKPRPHHYSIFEQASIV

SEQ ID NO: 8555 - protein, 160 aa, Homo sapiens
MREWWVQVGLLAVPLLAAYLHIPPPQLSPALHSWKSSGKFFTYKGLRIFYQDSVGVVGSPEIVVLLHGFPTSSYDWYKIWEGLTLRFHRVIALDFLGFGFSDKPRPHHYSIFEQASIVEALLRHLGLQNRRINLLSHDYGDIVAQELLYRYKQNRSGRLT

SEQ ID NO: 8556 - protein, 169 aa, Homo sapiens
MREWWVQVGLLAVPLLAAYLHIPPPQLSPALHSWKSSGKFFTYKGLRIFYQDSVGVVGSPEIVVLLHGFPTSSYDWYKIWEGLTLRFHRVIALDFLGFGFSDKPRPHHYSIFEQASIVEALLRHLGLQNRRINLLSHDYGDIVAQELLYRYKQNRSGRLTIKSLCLSNG

SEQ ID NO: 8557 - protein, 188 aa, Homo sapiens
MREWWVQVGLLAVPLLAAYLHIPPPQLSPALHSWKSSGKFFTYKGLRIFYQDSVGVVGSPEIVVLLHGFPTSSYDWYKIWEGLTLRFHRVIALDFLGFGFSDKPRPHHYSIFEQASIVEALLRHLGLQNRRINLLSHDYGDIVAQELLYRYKQNRSGRLTIKSLCLSNGGIFPETHRPLLLQKLLKDG

SEQ ID NO: 8558 - protein, 292 aa, Homo sapiens
MREWWVQVGLLAVPLLAAYLHIPPPQLSPALHSWKSSGKFFTYKGLRIFYQDSVGVVGSPEIVVLLHGFPTSSYDWYKIWEGLTLRFHRVIALDFLGFGFSDKPRPHHYSIFEQASIVEALLRHLGLQNRRINLLSHDYGDIVAQELLYRYKQNRSGRLTIKSLCLSNGGIFPETHRPLLLQKLLKDGGVLSPILTRLMNFFVFSRGLLQYINQRKKFRRRWVGALASVTIPIHFIYGPLDPVNPYPEFLELYRKTLPRSTVSILDDHISHYPQLEDPMGFLNAYMGFINSF

SEQ ID NO: 8559 - protein, 292 aa, Homo sapiens; identical to SEQ ID NO: 8558

SEQ ID NO: 8560 - protein, 292 aa, Homo sapiens; identical to SEQ ID NO: 8558

SEQ ID NO: 8561 - protein, 213 aa, Homo sapiens
MREWWVQVGLLAVPLLAAYLHIPPPQLSPALHSWKSSGKFFTYKGLRIFYQDSVGVVGSPEIVVLLHGFPTSSYDWYKIWEGLTLRFHRVIALDFLGFGFSDKPRPHHYSIFEQASIVEALLRHLGLQNRRINLLSHDYGDIVAQELLYRYKQNRSGRLTIKSLCLSNGGIFPETHRPLLLQKLLKDGGVLSPILTRLMNFFVFSRGLTPVFG

SEQ ID NO: 8562 - protein, 326 aa, Homo sapiens
MREWWVQVGLLAVPLLAAYLHIPPPQLSPALHSWKSSGKFFTYKGLRIFYQDSVGVVGSPEIVVLLHGFPTSSYDWYKIWEGLTLRFHRVIALDFLGFGFSDKPRPHHYSIFEQASIVEALLRHLGLQNRRINLLSHDYGDIVAQELLYRYKQNRSGRLTIKSLCLSNGGIFPETHRPLLLQKLLKDGGVLSPILTRLMNFFVFSRGLTPVFGPYTRPSESELWDMWAGIRNNDGNLVIDSLLQYINQRKKFRRRWVGALASVTIPIHFIYGPLDPVNPYPEFLELYRKTLPRSTVSILDDHISHYPQLEDPMGFLNAYMGFINSF

SEQ ID NO: 8563 - protein, 326 aa, Homo sapiens; identical to SEQ ID NO: 8562

SEQ ID NO: 8564 - protein, 326 aa, Homo sapiens; identical to SEQ ID NO: 8562

SEQ ID NO: 8565 - protein, 325 aa, Homo sapiens
MVRRDRLRRMREWWVQVGLLAVPLLAAYLHIPPPQLSPALHSWKSSGKFFTYKGLRIFYQDSVGVVGSPEIVVLLHGFPTSSYDWYKIWEGLTLRFHRVIALDFLGFGFSDKPASIVEALLRHLGLQNRRINLLSHDYGDIVAQELLYRYKQNRSGRLTIKSLCLSNGGIFPETHRPLLLQKLLKDGGVLSPILTRLMNFFVFSRGLTPVFGPYTRPSESELWDMWAGIRNNDGNLVIDSLLQYINQRKKFRRRWVGALASVTIPIHFIYGPLDPVNPYPEFLELYRKTLPRSTVSILDDHISHYPQLEDPMGFLNAYMGFINSF

SEQ ID NO: 8566 - protein, 335 aa, Homo sapiens
MVRRDRLRRMREWWVQVGLLAVPLLAAYLHIPPPQLSPALHSWKSSGKFFTYKGLRIFYQDSVGVVGSPEIVVLLHGFPTSSYDWYKIWEGLTLRFHRVIALDFLGFGFSDKPRPHHYSIFEQASIVEALLRHLGLQNRRINLLSHDYGDIVAQELLYRYKQNRSGRLTIKSLCLSNGGIFPETHRPLLLQKLLKDGGVLSPILTRLMNFFVFSRGLTPVFGPYTRPSESELWDMWAGIRNNDGNLVIDSLLQYINQRKKFRRRWVGALASVTIPIHFIYGPLDPVNPYPEFLELYRKTLPRSTVSILDDHISHYPQLEDPMGFLNAYMGFINSF

SEQ ID NO: 8567 - protein, 158 aa, Homo sapiens
AVKGEVLKVGNKSCENIHLHSEAVLCTVPNDLLKLNSELNIEWKQAISSTVLGKVIVQPDQNFTGLIAGVVSISTALLLLLGFFLWLKKRKQIKDQFPNSSQNGSCRQVQYPLTDMSPILTSGDSDISSPLLQNTVHIDLSALNPELVQAVQHVVIGP

SEQ ID NO: 8568 - protein, 214 aa, Homo sapiens
AVKLKIDLANRETSIFSYREDPIVYEIHPTKSFISGGSTITGVGKNLNSVSVPRMVINVHEAGRNFTVACQHRSNSEIICCTTPSLQQLNLQLPLKTKAFFMLDGILSKYFDLIYVHNPVFKPFEKPVMISMGNENVLEIKGNDIDPEAVKGEVLKVGNKSCENIHLHSEAVLCTVPNDLLKLNSELNIEVGFLHSSHDVNKEASVIMLFSGLK

SEQ ID NO: 8569 - protein, 1408 aa, Homo sapiens
MKAPAVLAPGILVLLFTLVQRSNGECKEALAKSEMNVNMKYQLPNFTAETPIQNVILHEHHIFLGATNYIYVLNEEDLQKVAEYKTGPVLEHPDCFPCQDCSSKANLSGGVWKDNINMALVVDTYYDDQLISCGSVNRGTCQRHVFPHNHTADIQSEVHCIFSPQIEEPSQCPDCVVSALGAKVLSSVKDRFINFFVGNTINSSYFPDHPLHSISVRRLKETKDGFMFLTDQSYIDVLPEFRDSYPIKYVHAFESNNFIYFLTVQRETLDAQTFHTRIIRFCSINSGLHSYMEMPLECILTEKRKKRSTKKEVFNILQAAYVSKPGAQLARQIGASLNDDILFGVFAQSKPDSAEPMDRSAMCAFPIKYVNDFFNKIVNKNNVRCLQHFYGPNHEHCFNRTLLRNSSGCEARRDEYRTEFTTALQRVDLFMGQFSEVLLTSISTFIKGDLTIANLGTSEGRFMQVVVSRSGPSTPHVNFLLDSHPVSPEVIVEHTLNQNGYTLVITGKKITKIPLNGLGCRHFQSCSQCLSAPPFVQCGWCHDKCVRSEECLSGTWTQQICLPAIYKVFPNSAPLEGGTRLTICGWDFGFRRNNKFDLKKTRVLLGNESCTLTLSESTMNTLKCTVGPAMNKHFNMSIIISNGHGTTQYSTFSYVDPVITSISPKYGPMAGGTLLTLTGNYLNSGNSRHISIGGKTCTLKSVSNSILECYTPAQTISTEFAVKLKIDLANRETSIFSYREDPIVYEIHPTKSFISTWWKEPLNIVSFLFCFASGGSTITGVGKNLNSVSVPRMVINVHEAGRNFTVACQHRSNSEIICCTTPSLQQLNLQLPLKTKAFFMLDGILSKYFDLIYVHNPVFKPFEKPVMISMGNENVLEIKGNDIDPEAVKGEVLKVGNKSCENIHLHSEAVLCTVPNDLLKLNSELNIEWKQAISSTVLGKVIVQPDQNFTGLIAGVVSISTALLLLLGFFLWLKKRKQIKDLGSELVRYDARVHTPHLDRLVSARSVSPTTEMVSNESVDYRATFPEDQFPNSSQNGSCRQVQYPLTDMSPILTSGDSDISSPLLQNTVHIDLSALNPELVQAVQHVVIGPSSLIVHFNEVIGRGHFGCVYHGTLLDNDGKKIHCAVKSLNRITDIGEVSQFLTEGIIMKDFSHPNVLSLLGICLRSEGSPLVVLPYMKHGDLRNFIRNETHNPTVKDLIGFGLQVAKGMKYLASKKFVHRDLAARNCMLDEKFTVKVADFGLARDMYDKEYYSVHNKTGAKLPVKWMALESLQTQKFTTKSDVWSFGVLLWELMTRGAPPYPDVNTFDITVYLLQGRRLLQPEYCPDPLYEVMLKCWHPKAEMRPSFSELVSRISAIFSTFIGEHYVHVNATYVNVKCVAPYPSLLSSEDNADDEVDTRPASFWETS

SEQ ID NO: 8570 - protein, 1390 aa, Homo sapiens
MKAPAVLAPGILVLLFTLVQRSNGECKEALAKSEMNVNMKYQLPNFTAETPIQNVILHEHHIFLGATNYIYVLNEEDLQKVAEYKTGPVLEHPDCFPCQDCSSKANLSGGVWKDNINMALVVDTYYDDQLISCGSVNRGTCQRHVFPHNHTADIQSEVHCIFSPQIEEPSQCPDCVVSALGAKVLSSVKDRFINFFVGNTINSSYFPDHPLHSISVRRLKETKDGFMFLTDQSYIDVLPEFRDSYPIKYVHAFESNNFIYFLTVQRETLDAQTFHTRIIRFCSINSGLHSYMEMPLECILTEKRKKRSTKKEVFNILQAAYVSKPGAQLARQIGASLNDDILFGVFAQSKPDSAEPMDRSAMCAFPIKYVNDFFNKIVNKNNVRCLQHFYGPNHEHCFNRTLLRNSSGCEARRDEYRTEFTTALQRVDLFMGQFSEVLLTSISTFIKGDLTIANLGTSEGRFMQVVVSRSGPSTPHVNFLLDSHPVSPEVIVEHTLNQNGYTLVITGKKITKIPLNGLGCRHFQSCSQCLSAPPFVQCGWCHDKCVRSEECLSGTWTQQICLPAIYKVFPNSAPLEGGTRLTICGWDFGFRRNNKFDLKKTRVLLGNESCTLTLSESTMNTLKCTVGPAMNKHFNMSIIISNGHGTTQYSTFSYVDPVITSISPKYGPMAGGTLLTLTGNYLNSGNSRHISIGGKTCTLKSVSNSILECYTPAQTISTEFAVKLKIDLANRETSIFSYREDPIVYEIHPTKSFISGGSTITGVGKNLNSVSVPRMVINVHEAGRNFTVACQHRSNSEIICCTTPSLQQLNLQLPLKTKAFFMLDGILSKYFDLIYVHNPVFKPFEKPVMISMGNENVLEIKGNDIDPEAVKGEVLKVGNKSCENIHLHSEAVLCTVPNDLLKLNSELNIEWKQAISSTVLGKVIVQPDQNFTGLIAGVVSISTALLLLLGFFLWLKKRKQIKDLGSELVRYDARVHTPHLDRLVSARSVSPTTEMVSNESVDYRATFPEDQFPNSSQNGSCRQVQYPLTDMSPILTSGDSDISSPLLQNTVHIDLSALNPELVQAVQHVVIGPSSLIVHFNEVIGRGHFGCVYHGTLLDNDGKKIHCAVKSLNRITDIGEVSQFLTEGIIMKDFSHPNVLSLLGICLRSEGSPLVVLPYMKHGDLRNFIRNETHNPTVKDLIGFGLQVAKGMKYLASKKFVHRDLAARNCMLDEKFTVKVADFGLARDMYDKEYYSVHNKTGAKLPVKWMALESLQTQKFTTKSDVWSFGVLLWELMTRGAPPYPDVNTFDITVYLLQGRRLLQPEYCPDPLYEVMLKCWHPKAEMRPSFSELVSRISAIFSTFIGEHYVHVNATYVNVKCVAPYPSLLSSEDNADDEVDTRPASFWETS

SEQ ID NO: 8571 - protein, 764 aa, Homo sapiens
MKAPAVLAPGILVLLFTLVQRSNGECKEALAKSEMNVNMKYQLPNFTAETPIQNVILHEHHIFLGATNYIYVLNEEDLQKVAEYKTGPVLEHPDCFPCQDCSSKANLSGGVWKDNINMALVVDTYYDDQLISCGSVNRGTCQRHVFPHNHTADIQSEVHCIFSPQIEEPSQCPDCVVSALGAKVLSSVKDRFINFFVGNTINSSYFPDHPLHSISVRRLKETKDGFMFLTDQSYIDVLPEFRDSYPIKYVHAFESNNFIYFLTVQRETLDAQTFHTRIIRFCSINSGLHSYMEMPLECILTEKRKKRSTKKEVFNILQAAYVSKPGAQLARQIGASLNDDILFGVFAQSKPDSAEPMDRSAMCAFPIKYVNDFFNKIVNKNNVRCLQHFYGPNHEHCFNRTLLRNSSGCEARRDEYRTEFTTALQRVDLFMGQFSEVLLTSISTFIKGDLTIANLGTSEGRFMQVVVSRSGPSTPHVNFLLDSHPVSPEVIVEHTLNQNGYTLVITGKKITKIPLNGLGCRHFQSCSQCLSAPPFVQCGWCHDKCVRSEECLSGTWTQQICLPAIYKVFPNSAPLEGGTRLTICGWDFGFRRNNKFDLKKTRVLLGNESCTLTLSESTMNTLKCTVGPAMNKHFNMSIIISNGHGTTQYSTFSYVDPVITSISPKYGPMAGGTLLTLTGNYLNSGNSRHISIGGKTCTLKSVSNSILECYTPAQTISTEFAVKLKIDLANRETSIFSYREDPIVYEIHPTKSFIRHVNIALIQR

SEQ ID NO: 8572 - protein, 190 aa, Homo sapiens
MKSKSKSLAECFPYDKPLIMKAPAVLAPGILVLLFTLVQRSNGECKEALAKSEMNVNMKYQLPNFTAETPIQNVILHEHHIFLGATNYIYVLNEEDLQKVAEYKTGPVLEHPDCFPCQDCSSKANLSGGVWKDNINMALVVDTYYDDQLISCGSVNRGTCQRHVFPHNHTADIQSEVHCIFSPQIEEPSQ

SEQ ID NO: 8573 - protein, 187 aa, Homo sapiens
LAPAARAGYSEERCSWRGSGLTQEPGSVGQLALACAEGAVEWLYPAGALRLTLGGPDPRARPGIACLRPVRPFAGAQVFAERAGGALELLLAEGPGPAGGRCVRWGPRERRALFLQATPHQDISRRVAAFRFELREDGRPELPPQAHGLGVDGACRPCSDAELLLAACTSDFGECPRHGGSLEPAFP

SEQ ID NO: 8574 - protein, 69 aa, Homo sapiens
MGFPAAALLCALCCGLLAPAARAGYSEERCSWRGRPRRTRTSAAAWPPSALSCARTGAPSCPRRPTVSA

SEQ ID NO: 8575 - protein, 293 aa, Homo sapiens
MGFPAAALLCALCCGLLAPAARAGYSEERCSWRGSGLTQEPGSVGQLALACAEGAVEWLYPAGALRLTLGGPDPRARPGIACLRPVRPFAGAQVFAERAGGALELLLAEGPGPAGGRCVRWGPRERRALFLQATPHQDISRRVAAFRFELREDGRPELPPQAHGLGVDGACRPCSDAELLLAACTSDFVIHGIIHGVTHDVELQESVITVVAARVLRQTPPLFQAGRSGDQGLTSIRTPLRCGVHPGPGTFLFMGWSRFGEARLGCAPRFQEFRRAYEAARAAHLHPCEVALH

SEQ ID NO: 8576 - protein, 160 aa, Homo sapiens
MLGCICQMGVQEGGPGQLIARHGPQAHVCVHSCLGGACRPCSDAELLLAACTSDFVIHGIIHGVTHDVELQESVITVVAARVLRQTPPLFQAGRSGDQGLTSIRTPLRCGVHPGPGTFLFMGWSRFGEARLGCAPRFQEFRRAYEAARAAHLHPCEVALH

SEQ ID NO: 8577 - protein, 175 aa, Homo sapiens
  VARIANT 1: note = misc_feature - Xaa can be any naturally occurring amino acid
XAVEWLYPAGALRLTLGGPDPRARPGIACLRPVRPFAGAQVFAERAGGALELLLAEGPGPAGGRCVRWGPRERRALFLQATPHQDISRRVAAFRFELREDGRPELPPQAHGLGVDGACRPCSDAELLLAACTSDFVIHGIIHGVTHDVELQESVITVGGPTALEVMGLSIRTLFT

SEQ ID NO: 8578 - protein, 311 aa, Homo sapiens
MRGAARAAWGRAGQPWPRPPAPGPPPPPLPLLLLLLAGLLGGAGAQYSSDRCSWKGSGLTHEAHRKEVEQVYLRCAAGAVEWMYPTGALIVNLRPNTFSPARHLTVCIRSFTDSSGANIYLEKTGELRLLVPDGDGRPGRVQCFGLEQGGLFVEATPQQDIGRRTTGFQYELVRRHRASDLHELSAPCRPCSDTEVLLAVCTSDFAVRGSIQQVTHEPERQDSAIHLRVSRLYRQKSRVFEPVPEGDGHWQGRVRTLLECGVRPGHGDFLFTGHMHFGEARLGCAPRFKDFQRMYRDAQERGLNPCEVGTD

SEQ ID NO: 8579 - protein, 229 aa, Homo sapiens
MYPTGALIVNLRPNTFSPARHLTVCIRSFTDSSGANIYLEKTGELRLLVPDGDGRPGRVQCFGLEQGGLFVEATPQQDIGRRTTGFQYELVRRHRASDLHELSAPCRPCSDTEVLLAVCTSDFAVRGSIQQVTHEPERQDSAIHLRVSRLYRQKSRVFEPVPEGDGHWQGRVRTLLECGVRPGHGDFLFTGHMHFGEARLGCAPRFKDFQRMYRDAQERGLNPCEVGTD

SEQ ID NO: 8580 - protein, 229 aa, Homo sapiens; identical to SEQ ID NO: 8579

SEQ ID NO: 8581 - protein, 90 aa, Homo sapiens
RTAVRGSIQQVTHEPERQDSAIHLRVSRLYRQKSRVFEPVPEGDGHWQGRVRTLLECGARLGCAPRFKDFQRMYRDAQERGLNPCEVGTD

SEQ ID NO: 8582 - protein, 456 aa, Homo sapiens
MAAALKCLLTLGRWCPGLGVAPQARALAALVPGVTQVDNKSGFLQKRPHRQHPGILKLPHVRLPQALANGAQLLLLGSAGPTMENQVQTLTSYLWSRHLPVEPEELQRRARHLEKKFLENPDLSQTEEKLRGAVLHALRKTTYHWQELSYTEGLSLVYMAARLDGGFAAVSRAFHEIRARNPAFQPQTLMDFGSGTGSVTWAAHSIWGQSLREYMCVDRSAAMLVLAEKLLKGGSESGEPYIPGVFFRQFLPVSPKVQFDVVVSAFSLSELPSKADRTEVVQTLWRKTGHFLVLVENGTKAGHSLLMDARDLVLKGKEKSPLDPRPGFVFAPCPHELPCPQLTNLACSFSQAYHPIPFSWNKKPKEEKFSMVILARGSPEEAHRWPRITQPVLKRPRHVHCHLCCPDGHMQHAVLTARRHGRDLYRCARVSSWGDLLPVLTPSAFPPSTAQDPSES

SEQ ID NO: 8583 - protein, 478 aa, Homo sapiens
MAAALKCLLTLGRWCPGLGVAPQARALAALVPGVTQVDNKSGFLQKRPHRQHPGILKLPHVRLPQALANGAQLLLLGSAGPTMENQVQTLTSYLWSRHLPVEPEELQRRARHLEKKFLENPDLSQTEEKLRGAVLHALRKTTYHWQELSYTEGLSLVYMAARLDGGFAAVSRAFHEIRARNPAFQPQTLMDFGSGTGSVTWAAHSIWGQSLREYMCVDRSAAMLVLAEKLLKGGSESGEPYIPGVFFRQFLPVSPKVQFDVVVSAFSLSELPSKADRTEVVQTLWRKTGHFLVLVENGTKAGHSLLMDARDLVLKGKEKSPLDPRPGFVFAPCPHELPCPQLTNLACSFSQAYHPIPFSWNKKPKEEKFSMVILARGSPEEAHRWPRITQPVLKRPRHVHCHLCCPDGHMQHAVLTARRHGRYGGCDQNQWDVAGSCSPRQHLFPQGFVSLCPCQLLGRSFTCAYSVCVSSIYGSGSL

SEQ ID NO: 8584 - protein, 447 aa, Homo sapiens
MAAALKCLLTLGRWCPGLGVAPQARALAALVPGVTQVDNKSGFLQKRPHRQHPGILKLPHVRLPQALANGAQLLLLGSAGPTMENQVQTLTSYLWSRHLPVEPEELQRRARHLEKKFLENPDLSQTEEKLRGAVLHALRKTTYHWQELSYTEGLSLVYMAARLDGGFAAVSRAFHEIRARNPAFQPQTLMDFGSGTGSVTWAAHSIWGQSLREYMCVDRSAAMLVLAEKLLKGGSESGEPYIPGVFFRQFLPVSPKVQFDVVVSAFSLSELPSKADRTEVVQTLWRKTGHFLVLVENGTKAGHSLLMDARDLVLKGKEKSPLDPRPGFVFAPCPHELPCPQLTNLACSFSQAYHPIPFSWNKKPKEEKFSMVILARGSPEEAHRWPRITQPVLKRPRHVHCHLCCPDGHMQHAVLTARRHGSSWGDLLPVLTPSAFPPSTAQDPSES

SEQ ID NO: 8585 - protein, 158 aa, Homo sapiens
MAAALKCLLTLGRWCPGLGVAPQARALAALVPGVTQVDNKSGFLQKRPHRQHPGILKLPHVRLPQALANGAQLLLLGSAGPTMENQVQTLTSYLWSRHLPVEPEELQRRARHLEKKFLENPGPDFQSLFSPQTYLRQRRNFVEQCYTHYVKLPTIGKN

SEQ ID NO: 8586 - protein, 158 aa, Homo sapiens; identical to SEQ ID NO: 8585

SEQ ID NO: 8587 - protein, 158 aa, Homo sapiens; identical to SEQ ID NO: 8585

SEQ ID NO: 8588 - protein, 102 aa, Homo sapiens
MENQVQTLTSYLWSRHLPVEPEELQRRARHLEKKFLENPDLSQTEEKLRGAVLHALRKTTYHWQELSYTEGLSLVYMAARLDGGFAAVSRAFHEIRARNPAF

SEQ ID NO: 8589 - protein, 140 aa, Homo sapiens
MENQVQTLTSYLWSRHLPVEPEELQRRARHLEKKFLENPDLSQTEEKLRGAVLHALRKTTYHWQELSYTEGLSLVYMAARLDGGFAAVSRAFHEIRARNPAFQPQTLMDFGSGTGSVTWAAHSIWGQSLREYMCVDRSAA

SEQ ID NO: 8590 - protein, 174 aa, Homo sapiens
MENQVQTLTSYLWSRHLPVEPEELQRRARHLEKKFLENPDLSQTEEKLRGAVLHALRKTTYHWQELSYTEGLSLVYMAARLDGGFAAVSRAFHEIRARNPAFQPQTLMDFGSGTGSVTWAAHSIWGQSLREYMCVDRSAAMLVLAEKLLKGGSESGEPYIPGVFFRQFLPVSPK

SEQ ID NO: 8591 - protein, 186 aa, Homo sapiens
MVPRPWSGSPGPGECLHSLLSERLWICRDISAQRRSAPGSPRPSDCQQLSFLPGNQPTFLCLQALAALVPGVTQVDNKSGFLQKRPHRQHPGILKLPHVRLPQALANGAQLLLLGSAGPTMENQVQTLTSYLWSRHLPVEPEELQRRARHLEKKFLENPDLSQTEEKLRGAVLHALRKTTYHWQEL

SEQ ID NO: 8592 - protein, 123 aa, Homo sapiens
  VARIANT 1: note = misc_feature - Xaa can be any naturally occurring amino acid
XPGFVFAPCPHELPCPQLTNLACSFSQAYHPIPFSWNKKPKEEKFSMVILARGSPEEAHRWPRITQPVLKRPRHVHCHLCCPDGHMQHAVLTARRHGSSWGDLLPVLTPSAFPPSTAQDPSES

SEQ ID NO: 8593 - protein, 366 aa, Homo sapiens
MARERPPGRGCGVLRRCLLGAVLLFGLRLCAELRRAGPGSPTRSAPPGPAWRPPGPHLPPAPGQPRGASRRQVTYVRSGRRAPPGGGGSGTPEPGCCAPRGRPRRKGPRWHIDLQPWAGSAQSLDEEAWRFLRYISTTQIACNHMNTDSLATDSSPTHKPWSVCLDDRFNLAHQIRNKQCRLYSLGLGSDDTHFEVSMANNGCEVHRFDPSVKSAHILESQHLWYHRLSIDWRDPHPAVAAQKPHSNTRKLGSILNEFGHHKIDVLKADLESAEWKVLENLILEDVLEQIGQLIFEIHLHWPGFEVSGSDSSVVRFWYSLLKELEQKDFRLFHSYKDLSKPQLFLKKDIFNASSCYTLSWVNTRWK

SEQ ID NO: 8594 - protein, 244 aa, Homo sapiens
MDILVPLLQLLVLLLTLPLHLMALLGCWQPLCKSYFPYLMAVLTPKSNRKMESKKRELFSQIKGLTGASGKVALLELGCGTGANFQFYPPGCRVTCLDPNPHFEKFLTKSMAENRHLQYERFVVAPGEDMRQLADGSMDVVVCTLVLCSVQSPRKVLQEVRRVLRPGGVLFFWEHVAEPYGSWAFMWQQVFEPTWKHIGDGCCLTRETWKDLENAQFSEIQMERQPPPLKWLPVGPHIMGKAVK

SEQ ID NO: 8595 - protein, 276 aa, Homo sapiens
MDILVPLLQLLVLLLTLPLHLMALLGCWQPLCKSYFPYLMAVLTPKSNRKMESKKRELFSQIKGLTGASGKVALLELGCGTGANFQFYPPGCRVTCLDPNPHFEKFLTKSMAENRHLQYERFVVAPGEDMRQLADGSMDVVVCTLVLCSVQSPRKVLQEVRRVLRPGGVLFFWEHVAEPYGSWAFMWQQVFEPTWKHIGDGCCLTRETWKDLENAQFSEIQMERQPPPLKWLPVGPHIMGKAVKSFPSSKALICSFPSLQLEQATHQPIYLPLRGT

SEQ ID NO: 8596 - protein, 243 aa, Homo sapiens
MDRKTTSWDTKFYEKWYVCNREKLCESLQAVFVQSYLDQGTQIFLNNSIEKSGWLFIQLYHSFVSSVFSLFMSRTSINGLLGRGSMFVFSPDQFQRLLKINPDWKTHRLLDLGAGDGEVTKIMSPHFEEIYATELSETMIWQLQKKKYRVLGINEWQNTGFQYDVISCLNLLDRCDQPLTLLKDIRSVLEPTRGRVILALVLPFHPYVENVGGKWEKPSEILEIKGQNWEEQVNSLPEVFRKA

SEQ ID NO: 8597 - protein, 61 aa, Homo sapiens
MRLLAGWLCLSLASVWLARRMWTLRSPLTRSLGMCATERNYANHSRLSLFRVTLIKEHRSS

SEQ ID NO: 8598 - protein, 74 aa, Homo sapiens
MRLLAGWLCLSLASVWLARRMWTLRSPLTRSLYVNMTSGPGGPAAAAGGRKENHQVARKRLNVCVFTRSVSETA

SEQ ID NO: 8599 - protein, 317 aa, Homo sapiens
MRLLAGWLCLSLASVWLARRMWTLRSPLTRSLYVNMTSGPGGPAAAAGGRKENHQWYVCNREKLCESLQAVFVQSYLDQGTQIFLNNSIEKSGWLFIQLYHSFVSSVFSLFMSRTSINGLLGRGSMFVFSPDQFQRLLKINPDWKTHRLLDLGAGDGEVTKIMSPHFEEIYATELSETMIWQLQKKKYRVLGINEWQNTGFQYDVISCLNLLDRCDQPLTLLKDIRSVLEPTRGRVILALVLPFHPYVENGGKWEKPSEILEIKGQNWEEQVNSLPEVFRKAGFVIEAFTRLPYLCEGDMYNDYYVLDDAVFVLKPV

SEQ ID NO: 8600 - protein, 318 aa, Homo sapiens
MRLLAGWLCLSLASVWLARRMWTLRSPLTRSLYVNMTSGPGGPAAAAGGRKENHQWYVCNREKLCESLQAVFVQSYLDQGTQIFLNNSIEKSGWLFIQLYHSFVSSVFSLFMSRTSINGLLGRGSMFVFSPDQFQRLLKINPDWKTHRLLDLGAGDGEVTKIMSPHFEEIYATELSETMIWQLQKKKYRVLGINEWQNTGFQYDVISCLNLLDRCDQPLTLLKDIRSVLEPTRGRVILALVLPFHPYVENVGGKWEKPSEILEIKGQNWEEQVNSLPEVFRKAGFVIEAFTRLPYLCEGDMYNDYYVLDDAVFVLKPV

SEQ ID NO: 8601 - protein, 139 aa, Homo sapiens
MSRTSINGLLGRGSMFVFSPDQFQRLLKINPDWKTHRLLDLGAGDGEVTKIMSPHFEEIYATELSETMIWQLQKKKYRVLGINEWQNTGFQYDVISCLNLLDRCDQPLTLLKDIRSVLEPTRGRVILALVLPFHPYVEN

SEQ ID NO: 8602 - protein, 282 aa, Homo sapiens
MWTLRSPLTRSLYVKENHQWYVCNREKLCESLQAVFVQSYLDQGTQIFLNNSIEKSGWLFIQLYHSFVSSVFSLFMSRTSINGLLGRGSMFVFSPDQFQRLLKINPDWKTHRLLDLGAGDGEVTKIMSPHFEEIYATELSETMIWQLQKKKYRVLGINEWQNTGFQYDVISCLNLLDRCDQPLTLLKDIRSVLEPTRGRVILALVLPFHPYVENVGGKWEKPSEILEIKGQNWEEQVNSLPEVFRKAGFVIEAFTRLPYLCEGDMYNDYYVLDDAVFVLKPV

SEQ ID NO: 8603 - protein, 128 aa, Homo sapiens
  VARIANT 1: note = misc_feature - Xaa can be any naturally occurring amino acid
XPDQFQRLLKINPDWKTHRLLDLGAGDGEVTKIMSPHFEEIYATELSETMIWQLQKKKYRVLGINEWQNTGFQYDVISCLNLLDRCDQPLTLLKDIRSVLEPTRGRVILALVLPFHPYVENGKCGQSG

SEQ ID NO: 8604 - protein, 125 aa, Homo sapiens
  VARIANT 1: note = misc_feature - Xaa can be any naturally occurring amino acid
XSYLDQGTQIFLNNSIEKSGWLFIQLYHSFVSSVFSLFMSRTSINGVLGINEWQNTGFQYDVISCLNLLDRCDQPLTLLKDIRSVLEPTRGRVILALVLPFHPYVENVGGKWEKPSEILEIKGQN

SEQ ID NO: 8605 - protein, 489 aa, Homo sapiens
MPSGSSAALALAAAGVLYGGDDAQGMMAAMLSHAYGPGGCGAAAAALNGEQAALLRRKSVNTTECVPVPSSEHVAEIVGRQGCKIKALRAKTNTYIKTPVRGEEPIFVVTGRKEDVAMAKREILSAAEHFSMIRASRNKNGPALGGLSCSPNLPGQTTVQVRVPYRVVGLVVGPKGATIKRIQQQTHTYIVTPSRDKEPVFEVTGMPENVDRAREEIEMHIAMRTGNYIELNEENDFHYNGTDVSFEGGTLGSAWLSSNPVPPSRARMISNYRNDSSSSLGSGSTDSYFGSNRLADFSPTSPFSTGNFWFGDTLPSVGSEDLAVDSPAFDSLPTSAQTIWTPFEPVNPLSGFGSDPSGNMKTQRRGSQPSTPRLSPTFPESIEHPLARRVRSDPPSTGNHVGLPIYIPAFSNGTNSYSSSNGGSTSSSPPESRRKHDCVICFENEVIAALVPCGHNLFCMECANKICEKRTPSCPVCQTAVTQAIQIHS

SEQ ID NO: 8606 - protein, 659 aa, Homo sapiens
MPSGSSAALALAAAPAPLPQPPPPPPPPPPPLPPPSGGPELEGDGLLLRERLAALGLDDPSPAEPGAPALRAPAAAAQGQARRAAELSPEERAPPGRPGAPEAAELELEEDEEEGEEAELDGDLLEEEELEEAEEEDRSSLLLLSPPAATASQTQQIPGGSLGSVLLPAARFDAREAAAAAAAAGVLYGGDDAQGMMAAMLSHAYGPGGCGAAAAALNGEQAALLRRKSVNTTECVPVPSSEHVAEIVGRQGCKIKALRAKTNTYIKTPVRGEEPIFVVTGRKEDVAMAKREILSAAEHFSMIRASRNKNGPALGGLSCSPNLPGQTTVQVRVPYRVVGLVVGPKGATIKRIQQQTHTYIVTPSRDKEPVFEVTGMPENVDRAREEIEMHIAMRTGNYIELNEENDFHYNGTDVSFEGGTLGSAWLSSNPVPPSRARMISNYRNDSSSSLGSGSTDSYFGSNRLADFSPTSPFSTGNFWFGDTLPSVGSEDLAVDSPAFDSLPTSAQTIWTPFEPVNPLSGFGSDPSGNMKTQRRGSQPSTPRLSPTFPESIEHPLARRVRSDPPSTGNHVGLPIYIPAFSNGTNSYSSSNGGSTSSSPPESRRKHDCVICFENEVIAALVPCGHNLFCMECANKICEKRTPSCPVCQTAVTQAIQIHS

SEQ ID NO: 8607 - protein, 115 aa, Homo sapiens
YGGDDAQGMMAAMLSHAYGPGGCGAAAAALNGEQAALLRRKSVNTTECVPVPSSEHVAEIVGRQGECRGGEVQLGMAPGVGGETRERSVGRKRRTRRGPQVHREGVWEEPRVDQM

SEQ ID NO: 8608 - protein, 183 aa, Homo sapiens
MRAAYLFLLFLPAGLLAQGQYDLDPLPPFPDHVQYTHYSDQIDNPDYYDYQEVTPRPSEEQFQFQSQQQVQQEVIPAPTPEPGNAELEPTEPGPLDCREEQYPCTRLYSIHRPCKQCLNEVCFYSLRRVYVINKEICVRTVCAHEELLRADLCRDKFSKCGVMASSGLCQSVAASCARSCGSC

SEQ ID NO: 8609 - protein, 182 aa, Homo sapiens
MRAAYLFLLFLPGLLAQGQYDLDPLPPFPDHVQYTHYSDQIDNPDYYDYQEVTPRPSEEQFQFQSQQQVQQEVIPAPTPEPGNAELEPTEPGPLDCREEQYPCTRLYSIHRPCKQCLNEVCFYSLRRVYVINKEICVRTVCAHEELLRADLCRDKFSKCGVMASSGLCQSVAASCARSCGSC

SEQ ID NO: 8610 - protein, 17 aa, Homo sapiens
MKLHCCLFTLVASIIVP

SEQ ID NO: 8611 - protein, 109 aa, Homo sapiens
MKLHCCLFTLVASIIVPAAFVLEDVDFDQMVSLEANRSSYNASFPSSFELSASSHSDDDVIIAKEGTSVSIECLLTASHYEDVHWHNSKGQQLDGRSRGGKWLVSDNFL

SEQ ID NO: 8612 - protein, 123 aa, Homo sapiens
MKLHCCLFTLVASIIVPAAFVLEDVDFDQMVSLEANRSSYNASFPSSFELSASSHSDDDVIIAKEGTSVSIECLLTASHYEDVHWHNSKGQQLDGRSRGGKWLVSDNFLNITNVAFDDRGLYT

SEQ ID NO: 8613 - protein, 362 aa, Homo sapiens
MKLHCCLFTLVASIIVPAAFVLEDVDFDQMVSLEANRSSYNASFPSSFELSASSHSDDDVIIAKEGTSVSIECLLTASHYEDVHWHNSKGQQLDGRSRGGKWLVSDNFLNITNVAFDDRGLYTCFVTSPIRASYSVTLRVIFTSGDMSVYYMIVCLIAFTITLILNVTRLCMMSSHLRKTEKAINEFFRTEGAEKLQKAFEIAKRIPIITSAKTLELAKVTQFKTMEFARYIEELARSVPLPPLILNCRAFVEEMFEAVRVDDPDDLGERIKERPALNAQGGIYVINPEMGRSNSPGGDSDDGSLNEQGQEIAVQVSVHLQSETKSIDTESQGSSHFSPPDDIGSAESNCNYKDGAYENCQL

SEQ ID NO: 8614 - protein, 216 aa, Homo sapiens
MSVYYMIVCLIAFTITLILNVTRLCMMSSHLRKTEKAINEFFRTEGAEKLQKAFEIAKRIPIITSAKTLELAKVTQFKTMEFARYIEELARSVPLPPLILNCRAFVEEMFEAVRVDDPDDLGERIKERPALNAQGGIYVINPEMGRSNSPGGDSDDGSLNEQGQEIAVQVSVHLQSETKSIDTESQGSSHFSPPDDIGSAESNCNYKDGAYENCQL

SEQ ID NO: 8615 - protein, 73 aa, Homo sapiens
MDRLKSHLTVCFLPSVPFLILVSTLATAKSVTNSTLNGTNVVLGSVPVIIARTDHIIVKEGNSALINCSVYGI

SEQ ID NO: 8616 - protein, 90 aa, Homo sapiens
MDRLKSHLTVCFLPSVPFLILVSTLATAKSVTNSTLNGTNVVLGSVPVIIARTDHIIVKEGNSALINCSVYGIPDPQFKWYNSIGKLLKE

SEQ ID NO: 8617 - protein, 98 aa, Homo sapiens
MDRLKSHLTVCFLPSVPFLILVSTLATAKSVTNSTLNGTNVVLGSVPVIIARTDHIIVKEGNSALINCSVYGIPDPQFKWYNSIGKLLKEEEDEKERG

SEQ ID NO: 8618 - protein, 409 aa, Homo sapiens
MDRLKSHLTVCFLPSVPFLILVSTLATAKSVTNSTLNGTNVVLGSVPVIIARTDHIIVKEGNSALINCSVYGIPDPQFKWYNSIGKLLKEEEDEKERGGGKWQMHDSGLLNITKVSFSDRGKYTCVASNIYGTVNNTVTLRVIFTSGDMGVYYMVVCLVAFTIVMVLNITRLCMMSSHLKKTEKAINEFFRTEGAEKLQKAFEIAKRIPIITSAKTLELAKVTQFKTMEFARYIEELARSVPLPPLIMNCRTIMEEIMEVVGLEEQGQNFVRHTPEGQEAADRDEVYTIPNSLKRSDSPAADSDASSLHEQPQQIAIKVSVHPQSKKEHADDQEGGQFEVKDVEETELSAEHSPETAEPSTDVTSTELTSEEPTPVEVPDKVLPPAYLEATEPAVTHDKNTCIIYESHV

SEQ ID NO: 8619 - protein, 102 aa, Homo sapiens
MDRLKSHLTVCFLPSVPFLILVSTLATAKSVTNSTLNGTNVVLGSVPVIIARTDHIIVKEGNSALINCSVYGIPDPQFKWYNSIGKLLKEEEDEKERGGGRL

SEQ ID NO: 8620 - protein, 102 aa, Homo sapiens; identical to SEQ ID NO: 8619

SEQ ID NO: 8621 - protein, 44 aa, Homo sapiens
MHDSGLLNITKVSFSDRGKYTCVASNIYGTVNNTVTLRVIFTSG

SEQ ID NO: 8622 - protein, 64 aa, Homo sapiens
MHDSGLLNITKVSFSDRGKYTCVASNIYGTVNNTVTLRVIFTSGDMGVYYMVVCLVAFTIVMVL

SEQ ID NO: 8623 - protein, 157 aa, Homo sapiens
MHDSGLLNITKVSFSDRGKYTCVASNIYGTVNNTVTLRVIFTSGDMGVYYMVVCLVAFTIVMVLNITRLCMMSSHLKKTEKAINEFFRTEGAEKLQKAFEIAKRIPIITSAKTLELAKVTQFKTMEFARYIEELARSVPLPPLIMNCRTIMEEIMEV

SEQ ID NO: 8624 - protein, 306 aa, Homo sapiens
MHDSGLLNITKVSFSDRGKYTCVASNIYGTVNNTVTLRVIFTSGDMGVYYMVVCLVAFTIVMVLNITRLCMMSSHLKKTEKAINEFFRTEGAEKLQKAFEIAKRIPIITSAKTLELAKVTQFKTMEFARYIEELARSVPLPPLIMNCRTIMEEIMEVVGLEEQGQNFVRHTPEGQEAADRDEVYTIPNSLKRSDSPAADSDASSLHEQPQQIAIKVSVHPQSKKEHADDQEGGQFEVKDVEETELSAEHSPETAEPSTDVTSTELTSEEPTPVEVPDKVLPPAYLEATEPAVTHDKNTCIIYESHV

SEQ ID NO: 8625 - protein, 279 aa, Homo sapiens
MGELSPLQRPLATEGTMKAQGVLLKLALLALPLLLLLSTPPCAPQVSGIRGDALERFCLQQPLDCDDIYAQGYQSDGVYLIYPSGPSVPVPVFCDMTTEGGKWTVFQKRFNGSVSFFRGWNDYKLGFGRADGEYWLGLQNMHLLTLKQKYELRVDLEDFENNTAYAKYADFSISPNAVSAEEDGYTLFVAGFEDGGAGDSLSYHSGQKFSTFDRDQDLFVQNCAALSSGAFWFRSCHFANLNGFYLGGSHLSYANGINWAQWKGFYYSLKRTEMKIRRA

SEQ ID NO: 8626 - protein, 255 aa, Homo sapiens
MKALLALPLLLLLSTPPCAPQVSGIRGDALERFCLQQPLDCDDIYAQGYQSDGVYLIYPSGPSVPVPVFCDMTTEGGKWTVFQKRFNGSVSFFRGWNDYKLGFGRADGEYWLGLQNMHLLTLKQKYELRVDLEDFENNTAYAKYADFSISPNAVSAEEDGYTLFVAGFEDGGAGDSLSYHSGQKFSTFDRDQDLFVQNCAALSSGAFWFRSCHFANLNGFYLGGSHLSYANGINWAQWKGFYYSLKRTEMKIRRA

SEQ ID NO: 8627 - protein, 280 aa, Homo sapiens
MVGANAKRTGDLWSWEGAVLTLSAHRQALLALPLLLLLSTPPCAPQVSGIRGDALERFCLQQPLDCDDIYAQGYQSDGVYLIYPSGPSVPVPVFCDMTTEGGKWTVFQKRFNGSVSFFRGWNDYKLGFGRADGEYWLGLQNMHLLTLKQKYELRVDLEDFENNTAYAKYADFSISPNAVSAEEDGYTLFVAGFEDGGAGDSLSYHSGQKFSTFDRDQDLFVQNCAALSSGAFWFRSCHFANLNGFYLGGSHLSYANGINWAQWKGFYYSLKRTEMKIRRA

SEQ ID NO: 8628 - protein, 151 aa, Homo sapiens
MSLLGPKVLLFLAAFIITSDDVTQATPETFTEDPNLVNDPATDETVLAVLADIAPSTDDLECWDEKFTCTRLYSVHRPVKQCIHQLCFTSLRRMYIVNKEICSRLVCKEHEAMKDELCRQMAGLPPRRLRRSNYFRLPPCENVDLQRPNGL

SEQ ID NO: 8629 - protein, 148 aa, Homo sapiens
MSLLGPKVLLFLAAFIITSDWIPLGVNSQRGDDVTQATPETFTEDPNLVNDPATDETECWDEKFTCTRLYSVHRPVKQCIHQLCFTSLRRMYIVNKEICSRLVCKEHEAMKDELCRQMAGLPPRRLRRSNYFRLPPCENVDLQRPNGL

SEQ ID NO: 8630 - protein, 91 aa, Homo sapiens
MSLLGPKVLLFLAAFIITSDWIPLGVNSQRGDDVTQATPETFTEDPNLVNDPATDETVLAVLADIAPSTDDLASLSEKNTTAECWDEKFTC

SEQ ID NO: 8631 - protein, 173 aa, Homo sapiens
MSLLGPKVLLFLAAFIITSDWIPLGVNSQRGDDVTQATPETFTEDPNLVNDPATDETVLAVLADIAPSTDDLASLSEKNTTAECWDEKFTCTRLYSVHRPVKQCIHQLCFTSLRRMYIVNKEICSRLVCKEHEAMKDELCRQMAGLPPRRLRRSNYFRLPPCENVDLQRPNGL

SEQ ID NO: 8632 - protein, 138 aa, Homo sapiens
MSLLGPKVLLFLAAFIITSDWIPLGVNSQRGDDVTQATPETFTEDPNLVNDPATDETVLAVLADIAPSTDDLASLSEKNTTAECWDEKFTCTRLYSVHRPVKQCIHQLCFTSLRRMYIVNKEICSRLVCKEHEAMKDP

SEQ ID NO: 8633 - protein, 109 aa, Homo sapiens
MSLLGPKVLLFLAAFIITSDWIPLGVNSQRGDDVTQATPETFTEDPNLVNDPATDETVLAVLADIAPSTDDLDELCRQMAGLPPRRLRRSNYFRLPPCENVDLQRPNGL

SEQ ID NO: 8634 - protein, 163 aa, Homo sapiens
MSLLGPKVLLFLAAFIITSDWIPLGVNSQRGDDVTQATPETFTEDPNLVNDPATDETVLAVLADIAPSTDDLECWDEKFTCTRLYSVHRPVKQCIHQLCFTSLRRMYIVNKEICSRLVCKEHEAMKDELCRQMAGLPPRRLRRSNYFRLPPCENVDLQRPNGL

SEQ ID NO: 8635 - protein, 163 aa, Homo sapiens; identical to SEQ ID NO: 8634

SEQ ID NO: 8636 - protein, 128 aa, Homo sapiens
MSLLGPKVLLFLAAFIITSDWIPLGVNSQRGDDVTQATPETFTEDPNLVNDPATDETVLAVLADIAPSTDDLECWDEKFTCTRLYSVHRPVKQCIHQLCFTSLRRMYIVNKEICSRLVCKEHEAMKDP

SEQ ID NO: 8637 - protein, 163 aa, Homo sapiens
  VARIANT 1: note = misc_feature - Xaa can be any naturally occurring amino acid
XLAAFIITSDWIPLGVNSQRGDDVTQATPETFTEDPNLVNDPATDETVLAVLADIAPSTDDLASLSEKNTTAECWDEKFTCTRLYSVHRPVKQCIHQLCFTSLRRMYIVNKEICSRLVCKEHEAMKDELCRQMAGLPPRRLRRSNYFRLPPCENVDLQRPNGL

SEQ ID NO: 8638 - protein, 79 aa, Homo sapiens
YSVHRPVKQCIHQLCFTSLRRMYIVNKEICSRLVCKEHEAMKDELCRQMAGLPPRRLRRSNYFRLPPCENVDLQRPNGL

SEQ ID NO: 8639 - protein, 75 aa, Homo sapiens
FDFIHDVNKKHKEFVGNWNKNAVHVNLFETPVEAQYVRLYPTSCHTACTLRFELLGCELNARKADLRRGADDREQ

SEQ ID NO: 8640 - protein, 268 aa, Homo sapiens
MPRPRLLAALCGALLCAPSLLVALDICSKNPCHNGGLCEEISQEVRGDVFPSYTCTCLKGYAGNHCETKCVEPLGLENGNIANSQIAASSVRVTFLGLQHWVPELARLNRAGMVNAWTPSSNDDNPWIQVNLLRRMWVTGVVTQGASRLASHEYLKAFKVAYSLNGHEFDFIHDVNKKHKEFVGNWNKNAVHVNLFETPVEAQYVRLYPTSCHTACTLRFELLGCELNAATRPGACISSAGTPPMHGWTSRATSTPGLRGATVTISGC

SEQ ID NO: 8641 - protein, 335 aa, Homo sapiens
MPRPRLLAALCGALLCAPSLLVALDICSKNPCHNGGLCEEISQEVRGDVFPSYTCTCLKGYAGNHCETKCVEPLGLENGNIANSQIAASSVRVTFLGLQHWVPELARLNRAGMVNAWTPSSNDDNPWIQVNLLRRMWVTGVVTQGASRLASHEYLKAFKVAYSLNGHEFDFIHDVNKKHKEFVGNWNKNAVHVNLFETPVEAQYVRLYPTSCHTACTLRFELLGCELNGCANPLGLKNNSIPDKQITASSSYKTWGLHLFSWNPSYARLDKQGNFNAWVAGSYGNDQWLQIFPGNWDNHSHKKNLFETPILARYVRILPVAWHNRIALRLELLGC

SEQ ID NO: 8642 - protein, 387 aa, Homo sapiens
MPRPRLLAALCGALLCAPSLLVALDICSKNPCHNGGLCEEISQEVRGDVFPSYTCTCLKGYAGNHCETKCVEPLGLENGNIANSQIAASSVRVTFLGLQHWVPELARLNRAGMVNAWTPSSNDDNPWIQVNLLRRMWVTGVVTQGASRLASHEYLKAFKVAYSLNGHEFDFIHDVNKKHKEFVGNWNKNAVHVNLFETPVEAQYVRLYPTSCHTACTLRFELLGCELNGCANPLGLKNNSIPDKQITASSSYKTWGLHLFSWNPSYARLDKQGNFNAWVAGSYGNDQWLQVDLGSSKEVTGIITQGARNFGSVQFVASYKVAYSNDSANWTEYQDPRTGSSKIFPGNWDNHSHKKNLFETPILARYVRILPVAWHNRIALRLELLGC

SEQ ID NO: 8643 - protein, 387 aa, Homo sapiens; identical to SEQ ID NO: 8642

SEQ ID NO: 8644 - protein, 343 aa, Homo sapiens
MPRPRLLAALCGALLCAPSLLVALECVEPLGLENGNIANSQIAASSVRVTFLGLQHWVPELARLNRAGMVNAWTPSSNDDNPWIQVNLLRRMWVTGVVTQGASRLASHEYLKAFKVAYSLNGHEFDFIHDVNKKHKEFVGNWNKNAVHVNLFETPVEAQYVRLYPTSCHTACTLRFELLGCELNGCANPLGLKNNSIPDKQITASSSYKTWGLHLFSWNPSYARLDKQGNFNAWVAGSYGNDQWLQVDLGSSKEVTGIITQGARNFGSVQFVASYKVAYSNDSANWTEYQDPRTGSSKIFPGNWDNHSHKKNLFETPILARYVRILPVAWHNRIALRLELLGC

SEQ ID NO: 8645 - protein, 25 aa, Homo sapiens
MPRPRLLAALCGALLCAPSLLVALG

SEQ ID NO: 8646 - protein, 43 aa, Homo sapiens
MAAEFDTFLASGLRWFCHVDDDNYVNPRALLQLLRAFPLARDV

SEQ ID NO: 8647 - protein, 132 aa, Homo sapiens
MAAEFDTFLASGLRWFCHVDDDNYVNPRALLQLLRAFPLARDVYVGRPSLNRPIHASEPQPHNRTRLVQFWFATGGAGFCINRKLALKMAPWASGSRFMDTSALIRLPDDCTMGYIIECKLGGRLQPSPLFH

SEQ ID NO: 8648 - protein, 130 aa, Homo sapiens
MQCRLPRGLAGALLTLLCMGLLCLRYHLNLSPQRVQGTPELSQPNPGPPKLQLHDVFIAVKTTRAFHRLRLELLLDTWVSRTREQGPTLWSPTAPRNTATQLCPARWLLSSTPSWPVGLGGSAMWTMTTM

SEQ ID NO: 8649 - protein, 321 aa, Homo sapiens
MQCRLPRGLAGALLTLLCMGLLCLRYHLNLSPQRVQGTPELSQPNPGPPKLQLHDVFIAVKTTRAFHRLRLELLLDTWVSRTREQTFVFTDSPDKGLQERLGSHLVVTNCSAEHSHPALSCKMAAEFDTFLASGLRWFCHVDDDNYVNPRALLQLLRAFPLARDVYVGRPSLNRPIHASEPQPHNRTRLVQFWFATGGAGFCINRKLALKMAPWASGSRFMDTSALIRLPDDCTMGYIIECKLGGRLQPSPLFHSHLETLQLLRTAQLPEQVTLSYGVFEGKLNVIKLQGPFSPEEDPSRFRSLHCLLYPDTPWCPQLGAR

SEQ ID NO: 8650 - protein, 118 aa, Homo sapiens
MQCRLPRGLAGALLTLLCMGLLCLRYHLNLSPQRVQGTPELSQPNPGPPKLQLHDVFIAVKTTRAFHRLRLELLLDTWVSRTREQTFVFTDSPDKGLQERLGSPDSSSLLQGPTLWSP

SEQ ID NO: 8651 - protein, 127 aa, Homo sapiens
MQCRLPRGLAGALLTLLCMGLLCLRYHLNLSPQRVQGTPELSQPNPGPPKLQLHDVFIAVKTTRAFHRLRLELLLDTWVSRTREQVTNICLHRQPRQRPPGETGVPPCGHQLLRGTQPPSSVLQDGC

SEQ ID NO: 8652 - protein, 307 aa, Homo sapiens
MQCRLPRGLAGALLTLLCMGLLCLRYHLNLSPQRVQGTPELSQPNPGPPKLQLHDVFIAVKTTRAFHRLRLELLLDTWVSRTREQVTRSHLVVTNCSAEHSHPALSCKMAAEFDTFLASGLRWFCHVDDDNYVNPRALLQLLRAFPLARDVYVGRPSLNRPIHASEPQPHNRTRLVQFWFATGGAGFCINRKLALKMAPWASGSRFMDTSALIRLPDDCTMGYIIECKLGGRLQPSPLFHSHLETLQLLRTAQLPEQVTLSYGVFEGKLNVIKLQGPFSPEEDPSRFRSLHCLLYPDTPWCPQLGAR

SEQ ID NO: 8653 - protein, 87 aa, Homo sapiens
  VARIANT 1: note = misc_feature - Xaa can be any naturally occurring amino acid
XSHLETLQLLRTAQLPEQISLPPLSALSRYTLVSPAGCPMNPELLGKGWAETSGCALAPKVALWVPGKCLVIGSPWQGLRVVGKPRI

SEQ ID NO: 8654 - protein, 3065 aa, Homo sapiens
MEEKQQIILANQDGGTVAGAAPTFFVILKQPGNGKTDQGILVTNQDACALASSVSSPVKSKGKICLPADCTVGGITVTLDNNSMWNEFYHRSTEMILTKQGRRMFPYCRYWITGLDSNLKYILVMDISPVDNHRYKWNGRWWEPSGKAEPHVLGRVFIHPESPSTGHYWMHQPVSFYKLKLTNNTLDQEGHIILHSMHRYLPRLHLVPAEKAVEVIQLNGPGVHTFTFPQTEFFAVTAYQNIQITQLKIDYNPFAKGFRDDGLNNKPQRDGKQKNSSDQEGNNISSSSGHRVRLTEGQGSEIQPGDLDPLSRGHETSGKGLEKTSLNIKRDFLGFMDTDSALSEVPQLKQEISECLIASSFEDDSRVASPLDQNGSFNVVIKEEPLDDYDYELGECPEGVTVKQEETDEETDVYSNSDDDPILEKQLKRHNKVDNPEADHLSSKWLPSSPSGVAKAKMFKLDTGKMPVVYLEPCAVTRSTVKISELPDNMLSTSRKDKSSMLAELEYLPTYIENSNETAFCLGKESENGLRKHSPDLRVVQKYPLLKEPQWKYPDISDSISTERILDDSKDSVGDSLSGKEDLGRKRTTMLKIATAAKVVNANQNASPNVPGKRGRPRKLKLCKAGRPPKNTGKSLISTKNTPVSPGSTFPDVKPDLEDVDGVLFVSFESKEALDIHAVDGTTEESSSLQASTTNDSGYRARISQLEKELIEDLKTLRHKQVIHPGLQEVGLKLNSVDPTMSIDLKYLGVQLPLAPATSFPFWNLTGTNPASPDAGFPFVSRTGKTNDFTKIKGWRGKFHSASASRNEGGNSESSLKNRSAFCSDKLDEYLENEGKLMETSMGFSSNAPTSPVVYQLPTKSTSYVRTLDSVLKKQSTISPSTSYSLKPHSVPPVSRKAKSQNRQATFSGRTKSSYKSILPYPVSPKQKYSHVILGDKVTKNSSGIISENQANNFVVPTLDENIFPKQISLRQAQQQQQQQQGSRPPGLSKSQVKLMDLEDCALWEGKPRTYITEERADVSLTTLLTAQASLKTKPIHTIIRKRAPPCNNDFCRLGCVCSSLALEKRQPAHCRRPDCMFGCTCLKRKVVLVKGGSKTKHFQRKAAHRDPVFYDTLGEEAREEEEGIREEEEQLKEKKKRKKLEYTICETEPEQPVRHYPLWVKVEGEVDPEPVYIPTPSVIEPMKPLLLPQPEVLSPTVKGKLLTGIKSPRSYTPKPNPVIREEDKDPVYLYFESMMTCARVRVYERKKEDQRQPSSSSSPSPSFQQQTSCHSSPENHNNAKEPDSEQQPLKQLTCDLEDDSDKLQEKSWKSSCNEGESSSTSYMHQRSPGGPTKLIEIISDCNWEEDRNKILSILSQHINSNMPQSLKVGSFIIELASQRKSRGEKNPPVYSSRVKISMPSCQDQDDMAEKSGSETPDGPLSPGKMEDISPVQTDALDSVRERLHGGKGLPFYAGLSPAGKLVAYKRKPSSSTSGLIQVASNAKVAASRKPRTLLPSTSNSKMASSSGTATNRPGKNLKAFVPAKRPIAARPSPGGVFTQFVMSKVGALQQKIPGVSTPQTLAGTQKFSIRPSPVMVVTPVVSSEPVQVCSPVTAAVTTTTPQVFLENTTAVTPMTAISDVETKETTYSSGATTTGVVEVSETNTSTSVTSTQSTATVNLTKTTGITTPVASVAFPKSLVASPSTITLPVASTASTSLVVVTAAASSSMVTTPTSSLGSVPIILSGINGSPPVSQRPENAAQIPVATPQVSPNTVKRAGPRLLLIPVQQGSPTLRPVSNTQLQGHRMVLQPVRSPSGMNLFRHPNGQIVQLLPLHQLRGSNTQPNLQPVMFRNPGSVMGIRLPAPSKPSETPPSSTSSSAFSVMNPVIQAVGSSSAVNVITQAPSLLSSGASFVSQAGTLTLRISPPEPQSFASKTGSETKITYSSGGQPVGTASLIPLQSGSFALLQLPGQKPVPSSILQHVASLQMKRESQNPDQKDETNSIKREQETKKVLQSEGEAVDPEANVIKQNSGAATSEETLNDSLEDRGDHLDEECLPEEGCATVKPSEHSCITGSHTDQDYKDVNEEYGARNRKSSKEKVAVLEVRTISEKASNKTVQNLSKVQHQKLGDVKVEQQKGFDNPEENSSEFPVTFKEESKFELSGSKVMEQQSNLQPEAKEKECGDSLEKDRERWRKHLKGPLTRKCVGASQECKKEADEQLIKETKTCQENSDVFQQEQGISDLLGKSGITEDARVLKTECDSWSRISNPSAFSIVPRRAAKSSRGNGHFQGHLLLPGEQIQPKQEKKGGRSSADFTVLDLEEDDEDDNEKTDDSIDEIVDVVSDYQSEEVDDVEKNNCVEYIEDDEEHVDIETVEELSEEINVAHLKTTAAHTQSFKQPSCTHISADEKAAERSRKAPPIPLKLKPDYWSDKLQKEAEAFAYYRRTHTANERRRRGEMRDLFEKLKITLGLLHSSKVSKSLILTRAFSEIQGLTDQADKLIGQKNLLTRKRNILIRKVSSLSGKTEEVVLKKLEYIYAKQQALEAQKRKKKMGSDEFDISPRISKQQEGSSASSVDLGQMFINNRRGKPLILSRKKDQATENTSPLNTPHTSANLVMTPQGQLLTLKGPLFSGPVVAVSPDLLESDLKPQVAGSAVALPENDDLFMMPRIVNVTSLATEGGLVDMGGSKYPHEVPDSKPSDHLKDTVRNEDNSLEDKGRISSRGNRDGRVTLGPTQVFLANKDSGYPQIVDVSNMQKAQEFLPKKISGDMRGIQYKWKESESRGERVKSKDSSFHKLKMKDLKDSSIEMELRKVTSAIEEAALDSSELLTNMEDEDDTDETLTSLLNEIAFLNQQLNDDSVGLAELPSSMDTEFPGDARRAFISKVPPGSRATFQVEHLGTGLKELPDVQGESDSISPLLLHLEDDDFSENEKQLAEPASEPDVLKIVIDSEIKDSLLSNKKAIDGGKNTSGLPAEPESVSSPPTLHMKTGLENSNSTDTLWRPMPKLAPLGLKVANPSSDADGQSLKVMPCLAPIAAKVGSVGHKMNLTGNDQEGRESKVMPTLAPVVAKLGNSGASPSSAGK

SEQ ID NO: 8655 - protein, 1086 aa, Homo sapiens
MEEKQQIILANQDGGTVAGAAPTFFVILKQPGNGKTDQGILVTNQDACALASSVSSPVKSKGKICLPADCTVGGITVTLDNNSMWNEFYHRSTEMILTKQGRRMFPYCRYWITGLDSNLKYILVMDISPVDNHRYKWNGRWWEPSGKAEPHVLGRVFIHPESPSTGHYWMHQPVSFYKLKLTNNTLDQEGHIILHSMHRYLPRLHLVPAEKAVEVIQLNGPGVHTFTFPQTEFFAVTAYQNIQITQLKIDYNPFAKGFRDDGLNNKPQRDGKQKNSSDQEGNNISSSSGHRVRLTEGQGSEIQPGDLDPLSRGHETSGKGLEKTSLNIKRDFLGFMDTDSALSEVPQLKQEISECLIASSFEDDSRVASPLDQNGSFNVVIKEEPLDDYDYELGECPEGVTVKQEETDEETDVYSNSDDDPILEKQLKRHNKVDNPEADHLSSKWLPSSPSGVAKAKMFKLDTGKMPVVYLEPCAVTRSTVKISELPDNMLSTSRKDKSSMLAELEYLPTYIENSNETAFCLGKESENGLRKHSPDLRVVQKYPLLKEPQWKYPDISDSISTERILDDSKDSVGDSLSGKEDLGRKRTTMLKIATAAKVVNANQNASPNVPGKRGRPRKLKLCKAGRPPKNTGKSLISTKNTPVSPGSTFPDVKPDLEDVDGVLFVSFESKEALDIHAVDGTTEESSSLQASTTNDSGYRARISQLEKELIEDLKTLRHKQVIHPGLQEVGLKLNSVDPTMSIDLKYLGVQLPLAPATSFPFWNLTGTNPASPDAGFPFVSRTGKTNDFTKIKGWRGKFHSASASRNEGGNSESSLKNRSAFCSDKLDEYLENEGKLMETSMGFSSNAPTSPVVYQLPTKSTSYVRTLDSVLKKQSTISPSTSYSLKPHSVPPVSRKAKSQNRQATFSGRTKSSYKSILPYPVSPKQKYSHVILGDKVTKNSSGIISENQANNFVVPTLDENIFPKQISLRQAQQQQQQQQGSRPPGLSKSQVKLMDLEDCALWEGKPRTYITEERADVSLTTLLTAQASLKTKPIHTIIRKRAPPCNNDFCRLGCVCSSLALEKRQPAHCRRPDCMFGCTCLKRK

SEQ ID NO: 8656 - protein, 1138 aa, Homo sapiens
MEEKQQIILANQDGGTVAGAAPTFFVILKQPGNGKTDQGILVTNQDACALASSVSSPVKSKGKICLPADCTVGGITVTLDNNSMWNEFYHRSTEMILTKQGRRMFPYCRYWITGLDSNLKYILVMDISPVDNHRYKWNGRWWEPSGKAEPHVLGRVFIHPESPSTGHYWMHQPVSFYKLKLTNNTLDQEGHIILHSMHRYLPRLHLVPAEKAVEVIQLNGPGVHTFTFPQTEFFAVTAYQNIQITQLKIDYNPFAKGFRDDGLNNKPQRDGKQKNSSDQEGNNISSSSGHRVRLTEGQGSEIQPGDLDPLSRGHETSGKGLEKTSLNIKRDFLGFMDTDSALSEVPQLKQEISECLIASSFEDDSRVASPLDQNGSFNVVIKEEPLDDYDYELGECPEGVTVKQEETDEETDVYSNSDDDPILEKQLKRHNKVDNPEADHLSSKWLPSSPSGVAKAKMFKLDTGKMPVVYLEPCAVTRSTVKISELPDNMLSTSRKDKSSMLAELEYLPTYIENSNETAFCLGKESENGLRKHSPDLRVVQKYPLLKEPQWKYPDISDSISTERILDDSKDSVGDSLSGKEDLGRKRTTMLKIATAAKVVNANQNASPNVPGKRGRPRKLKLCKAGRPPKNTGKSLISTKNTPVSPGSTFPDVKPDLEDVDGVLFVSFESKEALDIHAVDGTTEESSSLQASTTNDSGYRARISQLEKELIEDLKTLRHKQVIHPGLQEVGLKLNSVDPTMSIDLKYLGVQLPLAPATSFPFWNLTGTNPASPDAGFPFVSRTGKTNDFTKIKGWRGKFHSASASRNEGGNSESSLKNRSAFCSDKLDEYLENEGKLMETSMGFSSNAPTSPVVYQLPTKSTSYVRTLDSVLKKQSTISPSTSYSLKPHSVPPVSRKAKSQNRQATFSGRTKSSYKSILPYPVSPKQKYSHVILGDKVTKNSSGIISENQANNFVVPTLDENIFPKQISLRQAQQQQQQQQGSRPPGLSKSQVKLMDLEDCALWEGKPRTYITEERADVSLTTLLTAQASLKTKPIHTIIRKRAPPCNNDFCRLGCVCSSLALEKRQPAHCRRPDCMFGCTCLKRKVVLVKGGSKTKHFQRKAAHRDPVFYDTLGEEAREEEEGIREEEEQLKEKKKR

SEQ ID NO: 8657 - protein, 2856 aa, Homo sapiens
MEEKQQIILANQDGGTVAGAAPTFFVILKQPGNGKTDQGILVTNQDACALASSVSSPVKSKGKICLPADCTVGGITVTLDNNSMWNEFYHRSTEMILTKQGRRMFPYCRYWITGLDSNLKYILVMDISPVDNHRYKWNGRWWEPSGKAEPHVLGRVFIHPESPSTGHYWMHQPVSFYKLKLTNNTLDQEGHIILHSMHRYLPRLHLVPAEKAVEVIQLNGPGVHTFTFPQTEFFAVTAYQNIQITQLKIDYNPFAKGFRDDGLNNKPQRDGKQKNSSDQEGNNISSSSGHRVRLTEGQGSEIQPGDLDPLSRGHETSGKGLEKTSLNIKRDFLGFMDTDSALSEVPQLKQEISECLIASSFEDDSRVASPLDQNGSFNVVIKEEPLDDYDYELGECPEGVTVKQEETDEETDVYSNSDDDPILEKQLKRHNKVDNPEADHLSSKWLPSSPSGVAKAKMFKLDTGKMPVVYLEPCAVTRSTVKISELPDNMLSTSRKDKSSMLAELEYLPTYIENSNETAFCLGKESENGLRKHSPDLRVVQKYPLLKEPQWKYPDISDSISTERILDDSKDSVGDSLSGKEDLGRKRTTMLKIATAAKVVNANQNASPNVPGKRGRPRKLKLCKAGRPPKNTGKSLISTKNTPVSPGSTFPDVKPDLEDVDGVLFVSFESKEALDIHAVDGTTEESSSLQASTTNDSGYRARISQLEKELIEDLKTLRHKQVIHPGLQEVGLKLNSVDPTMSIDLKYLGVQLPLAPATSFPFWNLTGTNPASPDAGFPFVSRTGKTNDFTKIKGWRGKFHSASASRNEGGNSESSLKNRSAFCSDKLDEYLENEGKLMETSMGFSSNAPTSPVVYQLPTKSTSYVRTLDSVLKKQSTISPSTSYSLKPHSVPPVSRKAKSQNRQATFSGRTKSSYKSILPYPVSPKQKYSHVILGDKVTKNSSGIISENQANNFVVPTLDENIFPKQISLRQAQQQQQQQQGSRPPGLSKSQVKLMDLEDCALWEGKPRTYITEERADVSLTTLLTAQASLKTKPIHTIIRKRAPPCNNDFCRLGCVCSSLALEKRQPAHCRRPDCMFGCTCLKRKVVLVKGGSKTKHFQRKAAHRDPVFYDTLGEEAREEEEGIREEEEQLKEKKKRKKLEYTICETEPEQPVRHYPLWVKVEGEVDPEPVYIPTPSVIEPMKPLLLPQPEVLSPTVKGKLLTGIKSPRSYTPKPNPVIREEDKDPVYLYFESMMTCARVRVYERKKEDQRQPSSSSSPSPSFQQQTSCHSSPENHNNAKEPDSEQQPLKQLTCDLEDDSDKLQEKSWKSSCNEGESSSTSYMHQRSPGGPTKLIEIISDCNWEEDRNKILSILSQHINSNMPQSLKVGSFIIELASQRKSRGEKNPPVYSSRVKISMPSCQDQDDMAEKSGSETPDGPLSPGKMEDISPVQTDALDSVRERLHGGKGLPFYAGLSPAGKLVAYKRKPSSSTSGLIQVASNAKVAASRKPRTLLPSTSNSKMASSSGTATNRPGKNLKAFVPAKRPIENAAQIPVATPQVSPNTVKRAGPRLLLIPVQQGSPTLRPVSNTQLQGHRMVLQPVRSPSGMNLFRHPNGQIVQLLPLHQLRGSNTQPNLQPVMFRNPGSVMGIRLPAPSKPSETPPSSTSSSAFSVMNPVIQAVGSSSAVNVITQAPSLLSSGASFVSQAGTLTLRISPPEPQSFASKTGSETKITYSSGGQPVGTASLIPLQSGSFALLQLPGQKPVPSSILQHVASLQMKRESQNPDQKDETNSIKREQETKKVLQSEGEAVDPEANVIKQNSGAATSEETLNDSLEDRGDHLDEECLPEEGCATVKPSEHSCITGSHTDQDYKDVNEEYGARNRKSSKEKVAVLEVRTISEKASNKTVQNLSKVQHQKLGDVKVEQQKGFDNPEENSSEFPVTFKEESKFELSGSKVMEQQSNLQPEAKEKECGDSLEKDRERWRKHLKGPLTRKCVGASQECKKEADEQLIKETKTCQENSDVFQQEQGISDLLGKSGITEDARVLKTECDSWSRISNPSAFSIVPRRAAKSSRGNGHFQGHLLLPGEQIQPKQEKKGGRSSADFTVLDLEEDDEDDNEKTDDSIDEIVDVVSDYQSEEVDDVEKNNCVEYIEDDEEHVDIETVEELSEEINVAHLKTTAAHTQSFKQPSCTHISADEKAAERSRKAPPIPLKLKPDYWSDKLQKEAEAFAYYRRTHTANERRRRGEMRDLFEKLKITLGLLHSSKVSKSLILTRAFSEIQGLTDQADKLIGQKNLLTRKRNILIRKVSSLSGKTEEVVLKKLEYIYAKQQALEAQKRKKKMGSDEFDISPRISKQQEGSSASSVDLGQMFINNRRGKPLILSRKKDQATENTSPLNTPHTSANLVMTPQGQLLTLKGPLFSGPVVAVSPDLLESDLKPQVAGSAVALPENDDLFMMPRIVNVTSLATEGGLVDMGGSKYPHEVPDSKPSDHLKDTVRNEDNSLEDKGRISSRGNRDGRVTLGPTQVFLANKDSGYPQIVDVSNMQKAQEFLPKKISGDMRGIQYKWKESESRGERVKSKDSSFHKLKMKDLKDSSIEMELRKVTSAIEEAALDSSELLTNMEDEDDTDETLTSLLNEIAFLNQQLNDDSVGLAELPSSMDTEFPGDARRAFISKVPPGSRATFQVEHLGTGLKELPDVQGESDSISPLLLHLEDDDFSENEKQLAEPASEPDVLKIVIDSEIKDSLLSNKKAIDGGKNTSGLPAEPESVSSPPTLHMKTGLENSNSTDTLWRPMPKLAPLGLKVANPSSDADGQSLKVMPCLAPIAAKVGSVGHKMNLTGNDQEGRESKVMPTLAPVVAKLGNSGASPSSAGK

SEQ ID NO: 8658 - protein, 3065 aa, Homo sapiens; identical to SEQ ID NO: 8654

SEQ ID NO: 8659 - protein, 2856 aa, Homo sapiens; identical to SEQ ID NO: 8657

SEQ ID NO: 8660 - protein, 61 aa, Homo sapiens [sequence omitted]

SEQ ID NO: 8661 - protein, 83 aa, Homo sapiens
  VARIANT 1: note = misc_feature - Xaa can be any naturally occurring amino acid
XDQEGNNISSSSGHRVRLTEGQGSEIQPGDLDPLSRGHETSGKGLEKTSLNIKRDFLGFMDTDSALSEVPQLKQEISEWYSFA

SEQ ID NO: 8662 - protein, 1174 aa, Homo sapiens
  VARIANT 1: note = misc_feature - Xaa can be any naturally occurring amino acid
XLTCDLEDDSDKLQEKSWKSSCNEGESSSTSYMHQRSPGGPTKLIEIISDCNWEEDRNKILSILSQHINSNMPQSLKVNGKSYPQAKLLLGQMGALHPANRLAAYITGRLRPSVLDLSTLSTVISKVASNAKVAASRKPRTLLPSTSNSKMASSSGTATNRPGKNLKAFVPAKRPIAARPSPGGVFTQFVMSKVGALQQKIPGVSTPQTLAGTQKFSIRPSPVMVVTPVVSSEPVQVCSPVTAAVTTTTPQVFLENTTAVTPMTAISDVETKETTYSSGATTTGVVEVSETNTSTSVTSTQSTATVNLTKTTGITTPVASVAFPKSLVASPSTITLPVASTASTSLVVVTAAASSSMVTTPTSSLGSVPIILSGINGSPPVSQRPENAAQIPVATPQVSPNTVKRAGPRLLLIPVQQGSPTLRPVSNTQLQGHRMVLQPVRSPSGMNLFRHPNGQIVQLLPLHQLRGSNTQPNLQPVMFRNPGSVMGIRLPAPSKPSETPPSSTSSSAFSVMNPVIQAVGSSSAVNVITQAPSLLSSGASFVSQAGTLTLRISPPEPQSFASKTGSETKITYSSGGQPVGTASLIPLQSGSFALLQLPGQKPVPSSILQHVASLQMKRESQNPDQKDETNSIKREQETKKVLQSEGEAVDPEANVIKQNSGAATSEETLNDSLEDRGDHLDEECLPEEGCATVKPSEHSCITGSHTDQDYKDVNEEYGARNRKSSKEKVAVLEVRTISEKASNKTVQNLSKVQHQKLGDVKVEQQKGFDNPEENSSEFPVTFKEESKFELSGSKVMEQQSNLQPEAKEKECGDSLEKDRERWRKHLKGPLTRKCVGASQECKKEADEQLIKETKTCQENSDVFQQEQGISDLLGKSGITEDARVLKTECDSWSRISNPSAFSIVPRRAAKSSRGNGHFQGHLLLPGEQIQPKQEKKGGRSSADFTVLDLEEDDEDDNEKTDDSIDEIVDVVSDYQSEEVDDVEKNNCVEYIEDDEEHVDIETVEELSEEINVAHLKTTAAHTQSFKQPSCTHISADEKAAERSRKAPPIPLKLKPDYWSDKLQKEAEAFAYYRRTHTANERRRRGEMRDLFEKLKITLGLLHSSKVSKSLILTRAFSEIQGLTDQADKLIGQKNLLTRKRNILIRKVSSLSGKTEEVVLKKLEYIYAKQQALEA

SEQ ID NO: 8663 - protein, 447 aa, Homo sapiens
MRFRIYKRKVLILTLVVAACGFVLWSSNGRQRKNEALAPPLLDAEPARGAGGRGGDHPSVAVGIRRVSNVSAASLVPAVPQPEADNLTLRYRSLVYQLNFDQTLRNVDKAGTWAPRELVLVVQVHNRPEYLRLLLDSLRKAQGIDNVLVIFSHDFWSTEINQLIAGVNFCPVLQVFFPFSIQLYPNEFPGSDPRDCPRDLPKNAALKLGCINAEYPDSFGHYREAKFSQTKHHWWWKLHFVWERVKILRDYAGLILFLEEDHYLAPDFYHVFKKMWKLKQQECPECDVLSLGTYSASRSFYGMADKVDVKTWKSTEHNMGLALTRNAYQKLIECTDTFCTYDDYNWDWTLQYLTVSCLPKFWKVLVPQIPRIFHAGDCGMHHKKTCRPSTQSAQIESLLNNNKQYMFPETLTISEKFTVVAISPPRKNGGWGDIRDHELCKSYRRLQ

SEQ ID NO: 8664 - protein, 108 aa, Homo sapiens
MESCSCHPGSGVQWRDHGSLQLPPPGFKMKMRRYKLFLMFCMAGLCLISFLHFFKTLSYVTFPRELASLSPNLVSSFFWNNAPVTPQASPEPGGPDLLRTPLYSHSPL

SEQ ID NO: 8665 - protein, 161 aa, Homo sapiens
MKMRRYKLFLMFCMAGLCLISFLHFFKTLSYVTFPRELASLSPNLVSSFFWNNAPVTPQASPEPGGPDLLRTPLYSHSPLLQPLPPSKAAEELHRVDLVLPEDTTEYFVRTKAGGVCFKPGTKMLERPPPGRPEEKPEGANGSSARRPPRYLLSARERTGG

SEQ ID NO: 8666 - protein, 533 aa, Homo sapiens
MKMRRYKLFLMFCMAGLCLISFLHFFKTLSYVTFPRELASLSPNLVSSFFWNNAPVTPQASPEPGGPDLLRTPLYSHSPLLQPLPPSKAAEELHRVDLVLPEDTTEYFVRTKAGGVCFKPGTKMLERPPPGRPEEKPEGANGSSARRPPRYLLSARERTGGRGARRKWVECVCLPGWHGPSCGVPTVVQYSNLPTKERLVPREVPRRVINAINVNHEFDLLDVRFHELGDVVDAFVVCESNFTAYGEPRPLKFREMLTNGTFEYIRHKVLYVFLDHFPPGGRQDGWIADDYLRTFLTQDGVSRLRNLRPDDVFIIDDADEIPARDGVLFLKLYDGWTEPFAFHMRKSLYGFFWKQPGTLEVVSGCTVDMLQAVYGLDGIRLRRRQYYTMPNFRQYENRTGHILVQWSLGSPLHFAGWHCSWCFTPEGIYFKLVSAQNGDFPRWGDYEDKRDLNYIRGLIRTGGWFDGTQQEYPPADPSEHMYAPKYLLKNYDRFHYLLDNPYQEPRSTAAGGWRHRGPEGRPPARGKLDEAEV

SEQ ID NO: 8667 - protein, 423 aa, Homo sapiens
MNYSITVSIVMGIPTVKREVKSYLIETLHSLIDNLYPEEKLDCVIVVFIGETDIDYVHGVVANLEKEFSKEISSGLVEVISPPESYYPDLTNLKETFGDSKERVRWRTKQNLDYCFLMMYAQEKGIYYIQLEDDIIVKQNYFNTIKNFALQLSSEEWMILEFSQLGFIGKMFQAPDLTLIVEFIFMFYKEKPIDWLLDHILWVKVCNPEKDAKHCDRQKANLRIRFRPSLFQHVGLHSSLSGKIQKLTDKDYMKPLLLKIHVNPPAEVSTSLKVYQGHTLEKTYMGEDFFWAITPIAGDYILFKFDKPVNVESYLFHSGNQEHPGDILLNTTVEVLPFKSEGLEISKETKDKRLEDGYFRIGKFENGVAEGMVDPSLNPISAFRLSVIQNSAVWAILNEQRVFSGWWQKSRDKAEGPQAPLLF

SEQ ID NO: 8668 - protein, 535 aa, Homo sapiens
MRLRNGTVATALAFITSFLTLSWYTTWQNGKEKLIAYQREFLALKERLRIAEHRISQRSSELNTIVQQFKRVGAETNGSKDALNKFSDNTLKLLKELTSKKSLQVPSIYYHLPHLLKNEGSLQPAVQIGNGRTGVSIVMGIPTVKREVKSYLIETLHSLIDNLYPEEKLDCVIVVFIGETDIDYVHGVVANLEKEFSKEISSGLVEVISPPESYYPDLTNLKETFGDSKERVRWRTKQNLDYCFLMMYAQEKGIYYIQLEDDIIVKQNYFNTIKNFALQLSSEEWMILEFSQLGFIGKMFQAPDLTLIVEFIFMFYKEKPIDWLLDHILWVKVCNPEKDAKHCDRQKANLRIRFRPSLFQHVGLHSSLSGKIQKLTDKDYMKPLLLKIHVNPPAEVSTSLKVYQGHTLEKTYMGEDFFWAITPIAGDYILFKFDKPVNVESYLFHSGNQEHPGDILLNTTVEVLPFKSEGLEISKETKDKRLEDGYFRIGKFENGVAEGMVDPSLNPISAFRLSVIQNSAVWAILNEIHIKKATN

SEQ ID NO: 8669 - protein, 535 aa, Homo sapiens; identical to SEQ ID NO: 8668

SEQ ID NO: 8670 - protein, 535 aa, Homo sapiens; identical to SEQ ID NO: 8668

SEQ ID NO: 8671 - protein, 44 aa, Homo sapiens
MRLRNGTVATALAFITSFLTLSWYTTWQNGKGKENDSENVHEMY

SEQ ID NO: 8672 - protein, 200 aa, Homo sapiens
MGIPSVRREVHSYLTDTLHSLISELSPQEKEDSVIVVLIAETDSQYTSAVTENIKALFPTEIHSGLLEVISPSPHFYPDFSRLRESFGDPKERVRWRTKQNLDYCFLMMYAQSKGIYYVQLEDDIVAKPNYLSTMKNFALQQPSEDWMILEFSQLGFIGKMFKSLDLSLIVEFILMFYRDKPIDWLLDHILWVKVCNPEK

SEQ ID NO: 8673 - protein, 548 aa, Homo sapiens
MRLRNGTFLTLLLFCLCAFLSLSWYAALSGQKGDVVDVYQREFLALRDRLHAAEQESLKRSKELNLVLDEIKRAVSERQALRDGDGNRTWGRLTEDPRLKPWNGSHRHVLHLPTVFHHLPHLLAKESSLQPAVRVGQGRTGVSVVMGIPSVRREVHSYLTDTLHSLISELSPQEKEDSVIVVLIAETDSQYTSAVTENIKALFPTEIHSGLLEVISPSPHFYPDFSRLRESFGDPKERVRWRTKQNLDYCFLMMYAQSKGIYYVQLEDDIVAKPNYLSTMKNFALQQPSEDWMILEFSQLGFIGKMFKSLDLSLIVEFILMFYRDKPIDWLLDHILWVKVCNPEKDAKHCDRQKANLRIRFKPSLFQHVGTHSSLAGKIQKLKDKDFGKQALRKEHVNPPAEVSTSLKTYQHFTLEKAYLREDFFWAFTPAAGDFIRFRFFQPLRLERFFFRSGNIEHPEDKLFNTSVEVLPFDNPQSDKEALQEGRTATLRYPRSPDGYLQIGSFYKGVAEGEVDPAFGPLEALRLSIQTDSPVWVILSEIFLKKAD

SEQ ID NO: 8674 - protein, 157 aa, Homo sapiens
MSRVAGTRTDVNELLQRWTPRCVRWHTGGARRVALDRPLVTACLPPAGDVVDVYQREFLALRDRLHAAEQESLKRSKELNLVLDEIKRAVSERQALRDGDGNRTWGRLTEDPRLKPWNGSHRHVLHLPTVFHHLPHLLAKESSLQPAVRVGQGRTGD

SEQ ID NO: 8675 - protein, 563 aa, Homo sapiens
MSRVAGTRTDVNELLQRWTPRCVRWHTGGARRVALDRPLVTACLPPAGDVVDVYQREFLALRDRLHAAEQESLKRSKELNLVLDEIKRAVSERQALRDGDGNRTWGRLTEDPRLKPWNGSHRHVLHLPTVFHHLPHLLAKESSLQPAVRVGQGRTGVSVVMGIPSVRREVHSYLTDTLHSLISELSPQEKEDSVIVVLIAETDSQYTSAVTENIKALFPTEIHSGLLEVISPSPHFYPDFSRLRESFGDPKERVRWRTKQNLDYCFLMMYAQSKGIYYVQLEDDIVAKPNYLSTMKNFALQQPSEDWMILEFSQLGFIGKMFKSLDLSLIVEFILMFYRDKPIDWLLDHILWVKVCNPEKDAKHCDRQKANLRIRFKPSLFQHVGTHSSLAGKIQKLKDKDFGKQALRKEHVNPPAEVSTSLKTYQHFTLEKAYLREDFFWAFTPAAGDFIRFRFFQPLRLERFFFRSGNIEHPEDKLFNTSVEVLPFDNPQSDKEALQEGRTATLRYPRSPDGYLQIGSFYKGVAEGEVDPAFGPLEALRLSIQTDSPVWVILSEIFLKKAD

SEQ ID NO: 8676 - protein, 373 aa, Homo sapiens
  VARIANT 1: note = misc_feature - Xaa can be any naturally occurring amino acid
XEDSVIVVLIAETDSQYTSAVTENIKALFPTEIHSGLLEVISPSPHFYPDFSRLRESFGDPKERVRWRTKQNLDYCFLMMYAQSKGIYYVQLEDDIVAKPNYLSTMKNFALQQPSEDWMILEFSQLGFIGKMFKSLDLSLIVEFILMFYRDKPIDWLLDHILWVKVCNPEKDAHCDRQKANLRIRFKPSLFQHVGTHSSLAGKIQKLKDKDFGKQALRKEHVNPPAEVSTSLKTYQHFTLEKAYLREDFFWAFTPAAGDFIRFRFFQPLRLERFFFRSGNIEHPEDKLFNTSVEVLPFDNPQSDKEALQEGRTATLRYPRSPDGYLQIGSFYKGVAEGEVDPAFGPLEALRLSIQTDSPVWVILSEIFLKKAD

SEQ ID NO: 8677 - protein, 429 aa, Homo sapiens
  VARIANT 1: note = misc_feature - Xaa can be any naturally occurring amino acid
XEQESLKRSKELNLVLDEIKRAVSERQALRDGDGNRTWGRLTEDPRLKPWNGSHRHVLHLPTVFHHLPHLLAKESSLQPAVRVGQGRTGVSVVMGIPSVRREVHSYLTDTLHSLISELSPQEKEDSVIVVLIAETDSQYTSAVTENIKALFPTEIHSGLLEVISPSPHFYPDFSRLRESFGDPKERVRWRTKQNLDYCFLMMYAQSKGIYYVQLEDDIVAKPNYLSTMKNFALQQPSEDWMILEFSQLGFIGQRLWKAGAAEGACEPASRGEHEPEDIPALHPGESLPARGLLLGLHPCRGGLHPLPLLPTSKTGAVLLPQWEHRAPGGQALQHVCGGAALRQPSVRQGGPAGGPHRHPPVPSEPRRLPPDRLLLQGSGRGRGGPSLRPSGSTAPLDPDGLPCVGDSERDLPEKGRLSCGLLRVPCGQP

SEQ ID NO: 8678 - protein, 322 aa, Homo sapiens
  VARIANT 1: note = misc_feature - Xaa can be any naturally occurring amino acid
XFPTEIHSGLLEVISPSPHFYPDFSRLRESFGDPKERVRWRTKQNLDYCFLMMYAQSKGIYYVQLEDDIVAKPNYLSTMKNFALQQPSEDWMILEFSQLGFIGKMFKSLDLSLIVEFILMFYRDKPIDWLLDHILWVKVCNPEKDAAGIKVGAHAITAVPPPLQDKDFGKQALRKEHVNPPAEVSTSLKTYQHFTLEKAYLREDFFWAFTPAAGDFIRFRFFQPLRLERFFFRSGNIEHPEDKLFNTSVEVLPFDNPQSDKEALQEGRTATLRYPRSPDGYLQIGSFYKGVAEGEVDPAFGPLEALRLSIQTDSPVWVILSE

SEQ ID NO: 8679 - protein, 240 aa, Homo sapiens
  VARIANT 1: note = misc_feature - Xaa can be any naturally occurring amino acid
XKMFKSLDLSLIVEFILMFYRDKPIDWLLDHILWVKVCNPEKDAKHCDRQKANLRIRFKPSLFQHVGTHSSLAGKIQKLKDKDFGKQALRKEHVNPPAEVSTSLKTYQHFTLEKAYLREDFFWAFTPAAGDFIRFRFFQPLRLERGNIEHPEDKLFNTSVEVLPFDNPQSDKEALQEGRTATLRYPRSPDGYLQIGSFYKGVAEGEVDPAFGPLEALRLSIQTDSPVWVILSEIFLKKAD

SEQ ID NO: 8680 - protein, 150 aa, Homo sapiens
  VARIANT 1: note = misc_feature - Xaa can be any naturally occurring amino acid
XLLLFCLCAFLSLSWYAALSGQKGDVVDVYQREFLALRDRLHAAEQESLKRSKELNLVLDEIKRAVSERQALRDGDGNRTWGRLTGPPIEAVERLTPARAAPAHRLPSPATPAGQGEQSAARGARGPGPHRSVGGDGHPERAARGALVPD

SEQ ID NO: 8681 - protein, 245 aa, Homo sapiens
  VARIANT 1: note = misc_feature - Xaa can be any naturally occurring amino acid
XQYTSAVTENIKALFPTEIHSGLLEVISPSPHFYPDFSRLRESFGDPKERVRWRTKQNLDYCFLMMYAQSKGIYYVQLEDDIVAKPNYLSTMKNFALQQPSEDWMILEFSQLGFIGKMFKSLDLSLIVEFILMFYRDKPIDWLLDHILWVKVCNPEKDAKHCDRQKANLRIRFKPSLFQHVGTHSSLAGKIQKLKDKDFGKQALRKEHVNPPAEWEHRAPGGQALQHVCGGAALRQPSVRQGGPA

SEQ ID NO: 8682 - protein, 307 aa, Homo sapiens
  VARIANT 1: note = misc_feature - Xaa can be any naturally occurring amino acid
XTSAVTENIKALFPTEIHSGLLEVISPSPHFYPDFSRLRESFGDPKERVRWRTKQNLDYCFLMMYAQSKGIYYVQLEDDIVAKPNYLSTMKNFALQQPSEDWMILEFSQLGFIARGHSLLAGWQDPETEGQRLWKAGAAEGACEPASRGEHEPEDIPALHPGESLPARGLLLGLHPCRGGLHPLPLLPTSKTGAVLLPQWEHRAPGGQALQHVCGGAALRQPSVRQGGPAGGPHRHPPVPSEPRRLPPDRLLLQGSGRGRGGPSLRPSGSTAPLDPDGLPCVGDSERDLPEKGRLSCGLLRVPCGQP

SEQ ID NO: 8683 - protein, 113 aa, Homo sapiens
MRTKQVNLLITLVAVALFSFSCFSIYRITQTISFALGISTVNRGNYSYLKQTLTSVVSRMTLSQEKDSVVIVLVADSNEDYLHSVVKMITKKFKRQVRSGSLEVISIPAFLYS

SEQ ID NO: 8684 - protein, 166 aa, Homo sapiens
MRTKQVNLLITLVAVALFSFSCFSIYRITQTNNQLINCRNHILEFKENMLHLRNKTEKNTQEMMKVLNRMKYEITKREILSGNLGKLFRSEDLTHFVRFFLMFYKEKPIDWLLNDIFQVKVCDAGEDLRNCMKRKKQIRIQYKPSLFQHVGIHSSFPRKEQYEKKI

SEQ ID NO: 8685 - protein, 375 aa, Homo sapiens
MRTKQVNLLITLVAVALFSFSCFSIYRITQTNNQLINCRNHILEFKENMLHLRNKTEKNTQEMMKVLNRMKYEITKREILSGNLVAQKADILNKNETVSNTFEDLKFFFPHLRKEGRIYPDVIIGKGKTGVSFALGISTVNRGNYSYLKQTLTSVVSRMTLSQEKDSVVIVLVADSNEDYLHSVVKMITKKFKRQVRSGSLEVISIPAFLYSSMLNAKHLAEASQKLASWRIKQVLDFCILLLYAQPKAKYYLQLEDDIIAKEMYFTKITDFVGNISSNNWFFIEFSMLGFIGKLFRSEDLTHFVRFFLMFYKEKPIDWLLNDIFQVKVCDAGEDLRNCMKRKKQIRIQYKPSLFQHVGIHSSFPRKEQYEKDVY

SEQ ID NO: 8686 - protein, 374 aa, Homo sapiens
MRTKQVNLLITLVAVALFSFSCFSIYRITQTNNQLINCRNHILEFKENMLHLRNKTEKNTQEMMKVLNRMKYEITKREILSGNLVAQKADILNKNETVSNTFEDLKFFFPHLRKEGRIYPDVIIGKGKTGVSFALGISTVNRGNYSYLKQTLTSVVSRMTLSQEKDSVVIVLVADSNEDYLHSVVKMITKKFKRQVRSGSLEVISIPAFLYSSMLNAKHLAEASQKLASWRIKQVLDFCILLLYAQPKAKYYLQLEDDIIAKEMYFTKITDFVGNISSNNWFFIEFSMLGFIGKLFRSEDLTHFVRFFLMFYKEKPIDWLLNDIFQVKVCDAGEDLRNCMKRKKQIRIQYKPSLFQHVGIHSSFPRKEQYEKKI

SEQ ID NO: 8687 - protein, 36 aa, Homo sapiens
MRTKQVNLLITLVAVALFSFSCFSIYRITQTNSKGK

SEQ ID NO: 8688 - protein, 91 aa, Homo sapiens
  VARIANT 1: note = misc_feature - Xaa can be any naturally occurring amino acid
XNISSNNWFFIEFSMLGFIGKLFRSEDLTHFVRFFLMFYKEKPIDWLLNDIFQRNCMKRKKQIRIQYKPSLFQHVGIHSSFPRKEQYEKKI

SEQ ID NO: 8689 - protein, 283 aa, Homo sapiens
METGPEDPSSMPEESSPRRTPQSIPYQDLPHLVNADGQYLFCRYWKPTGTPKALIFVSHGAGEHSGRYEELARMLMGLDLLVFAHDHVGHGQSEGERMVVSDFHVFVRDVLQHVDSMQKDYPGLPVFLLGHSMGGAIAILTAAERPGHFAGMVLISPLVLANPESATTFKVDIYNSDPLICRAGLKVCFGIQLLNAVSRVERALPKLTVPFLLLQGSADRLCDSKGAYLLMELAKSQDKTLKIYEGAYHVLHKELPEVTNSVFHEINMWVSQRTATAGTASPP

SEQ ID NO: 8690 - protein, 313 aa, Homo sapiens
METGPEDPSSMPEESSPRRTPQSIPYQDLPHLVNADGQYLFCRYWKPTGTPKALIFVSHGAGEHSGRYEELARMLMGLDLLVFAHDHVGHGQSEGERMVVSDFHVFVRDVLQHVDSMQKDYPGLPVFLLGHSMGGAIAILTAAERPGHFAGMVLISPLVLANPESATTFKVLAAKVLNLVLPNLSLGPIDSSVLSRNKTEVDIYNSDPLICRAGLKVCFGIQLLNAVSRVERALPKLTVPFLLLQGSADRLCDSKGAYLLMELAKSQDKTLKIYEGAYHVLHKELPEVTNSVFHEINMWVSQRTATAGTASPP

SEQ ID NO: 8691 - protein, 89 aa, Homo sapiens
MLMGLDLLVFAHDHVGHGQSEGERMVVSDFHVFVRDVLQHVDSMQKDYPGLPVFLLGHSMGGAIAILTAAERPGHFAGMVLISPLVLAN

SEQ ID NO: 8692 - protein, 77 aa, Homo sapiens
MPEESSPRRTPQSIPYQDLPHLVNADGQYLFCRYWKPTGTPKALIFVSHGAGEHSGRYEELARMLMGLDLLVFAHDH

SEQ ID NO: 8693 - protein, 303 aa, Homo sapiens
MPEESSPRRTPQSIPYQDLPHLVNADGQYLFCRYWKPTGTPKALIFVSHGAGEHSGRYEELARMLMGLDLLVFAHDHVGHGQSEGERMVVSDFHVFVRDVLQHVDSMQKDYPGLPVFLLGHSMGGAIAILTAAERPGHFAGMVLISPLVLANPESATTFKVLAAKVLNLVLPNLSLGPIDSSVLSRNKTEVDIYNSDPLICRAGLKVCFGIQLLNAVSRVERALPKLTVPFLLLQGSADRLCDSKGAYLLMELAKSQDKTLKIYEGAYHVLHKELPEVTNSVFHEINMWVSQRTATAGTASPP

SEQ ID NO: 8694 - protein, 303 aa, Homo sapiens; identical to SEQ ID NO: 8693

SEQ ID NO: 8695 - protein, 277 aa, Homo sapiens
MQTRFRRIFPWKDASTKRMPEFIHFSPLKPYKGREWEKAGSEHVLETHLLPVGHGQSEGERMVVSDFHVFVRDVLQHVDSMQKDYPGLPVFLLGHSMGGAIAILTAAERPGHFAGMVLISPLVLANPESATTFKVLAAKVLNLVLPNLSLGPIDSSVLSRNKTEVDIYNSDPLICRAGLKVCFGIQLLNAVSRVERALPKLTVPFLLLQGSADRLCDSKGAYLLMELAKSQDKTLKIYEGAYHVLHKELPEVTNSVFHEINMWVSQRTATAGTASPP

SEQ ID NO: 8696 - protein, 197 aa, Homo sapiens
PVGHGQSEGERMVVSDFHVFVRDVLQHVDSMQKDYPGLPVFLLGHSMGGAIAILTAAERPGHFAGMVLISPLVLANPESATTFKVDIYNSDPLICRAGLKVCFGIQLLNAVSRVERALPKLTVPFLLLQGSADRLCDSKGAYLLMELAKSQDKTLKIYEGAYHVLHKELPEVTNSVFHEINMWVSQRTATAGTASPP

SEQ ID NO: 8697 - protein, 155 aa, Homo sapiens [sequence omitted]

SEQ ID NO: 8698 - protein, 209 aa, Homo sapiens
  VARIANT 1: note = misc_feature - Xaa can be any naturally occurring amino acid
XLQGGAIAILTAAERPGHFAGMVLISPLVLANPESATTFKDYSRILKHLMEKASRMLKFWIPRPFWVLAAKVLNLVLPNLSLGPIDSSVLSRNKTEVDIYNSDPLICRAGLKVCFGIQLLNAVSRVERALPKLTVPFLLLQGSADRLCDSKGAYLLMELAKSQDKTLKIYEGAYHVLHKELPEVTNSVFHEINMWVSQRTATAGTASPP

SEQ ID NO: 8699 - protein, 103 aa, Homo sapiens
MKSLILLAILAALAVVTLCYESHESMESYELNPFINRRNANTFISPQQRWRAKVQERIRERSKPVHELNREACDDYRLCERYAMVYGYNAAYNRYFRKRRGTK

SEQ ID NO: 8700 - protein, 128 aa, Homo sapiens
MKSLILLAILAALAVVTLCYGEWQKEENFGFDIVSVLSLNWHRAQESHESMESYELNPFINRRNANTFISPQQRWRAKVQERIRERSKPVHELNREACDDYRLCERYAMVYGYNAAYNRYFRKRRGTK

SEQ ID NO: 8701 - protein, 74 aa, Homo sapiens
  VARIANT 1: note = misc_feature - Xaa can be any naturally occurring amino acid
XSHESMESYELRSENALSLSTSSIGKPVMTTDFANATPWFMDTMLPIIATSGSAEGPNETEGRKKISFFLEAGT

SEQ ID NO: 8702 - protein, 77 aa, Homo sapiens
MAGNSILLAAVSILSACQQSYFALQVGKARLKYKVTPPAVTGSPEFERVFRAHFCYLSGSGVHIWPSPILLGIFRSC

SEQ ID NO: 8703 - protein, 147 aa, Homo sapiens
MAGNSILLAAVSILSACQQSYFALQVGKARLKYKVTPPAVTGSPEFERVFRAQQNCVEFYPIFIITLWMAGWYFNQVFATCLGLVYIYGRHLYFWGYSEAAKKRITGFRLSLGILALLTLLGALGIANSFLDEYLDLNIAKKLRRQF

SEQ ID NO: 8704 - protein, 147 aa, Homo sapiens; identical to SEQ ID NO: 8703

SEQ ID NO: 8705 - protein, 147 aa, Homo sapiens; identical to SEQ ID NO: 8703

SEQ ID NO: 8706 - protein, 46 aa, Homo sapiens
MARSLVCLGVIILLSAFSGPGVRGGPMPKLADRKLCADQECSHPIS

SEQ ID NO: 8707 - protein, 131 aa, Homo sapiens
MARSLVCLGVIILLSAFSGPGVRGGPMPKLADRKLCADQECSHPISMAVALQDYMAPDCRFLTIHRGQVVYVFSKLKGRGRLFWGGSVQGDYYGDLAARLGYFPSSIVREDQTLKPGKVDVKTDKWDFYCQ

SEQ ID NO: 8708 - protein, 131 aa, Homo sapiens; identical to SEQ ID NO: 8707

SEQ ID NO: 8709 - protein, 131 aa, Homo sapiens; identical to SEQ ID NO: 8707

SEQ ID NO: 8710 - protein, 95 aa, Homo sapiens
  VARIANT 1: note = misc_feature - Xaa can be any naturally occurring amino acid
XRSLVCLGVIILLSAFSGPGVRGGPMPKLADRKLCADQECSHPISMAVALQDYMAPDCRFLTIHRGQVVFREITMEIWLLAWAISPVALSERTRP

SEQ ID NO: 8711 - protein, 58 aa, Homo sapiens
  VARIANT 1: note = misc_feature - Xaa can be any naturally occurring amino acid
XSLVCLGVIILLSAFSGPGVRGGPMPKLADRKLCADQECSRSGRLLWRSGCSPGLFPQ

SEQ ID NO: 8712 - protein, 1412 aa, Homo sapiens
MAKFGVHRILLLAISLTKCLESTKLLADLKKCGDLECEALINRVSAMRDYRGPDCRYLNFTKGEEISVYVKLAGEREDLWAGSKGKEFGYFPRDAVQIEEVFISEEIQMSTKESDFLCLLGVSYTFDNEDSELNGDYGENIYPYEEDKDEKSSIYESDFQIEPGFYATYESTLFEDQVPALEAPEDIGSTSESKDWEEVVVESMEQDRIPEVHVPPSSAVSGVKEWFGLGGEQAEEKAFESVIEPVQESSFRSRKIAVEDENDLEELNNGEPQTEHQQESESEIDSVPKTQSELASESEHIPKPQSTGWFGGGFTSYLGFGDEDTGLELIAEESNPPLQDFPNSISSDKEATVPCTEILTEKKDTITNDSLSLKPSWFDFGFAILGFAYAKEDKIMLDDRKNEEDGGADEHEHPLTSELDPEKEQEIETIKIIETEDQIDKKPVSEKTDESDTIPYLKKFLYNFDNPWNFQNIPKETELPFPKQILDQNNVIENEETGEFSIDNYPTDNTKVMIFKSSYSLSDMVSNIELPTRIHEEVYFEPSSSKDSDENSKPSVDTEGPALVEIDRSVENTLLNSQMVSTDNSLSSQNYISQKEDASEFQILKYLFQIDVYDFMNSAFSPIVILTERVVAALPEGMRPDSNLYGFPWELVICAAVVGFFAVLFFLWRSFRSVRSRLYVGREKKLALMLSGLIEEKSKLLEKFSLVQKEYEGYEVESSLKDASFEKEATEAQSLEATCEKLNRSNSELEDEILCLEKELKEEKSKHSEQDELMADISKRIQSLEDESKSLKSQVAEAKMTFKIFQMNEERLKIAIKDALNENSQLQESQKQLLQEAEVWKEQVSELNKQKVTFEDSKVHAEQVLNDKESHIKTLTERLLKMKDWAAMLGEDITDDDNLELEMNSESENGAYLDNPPKGALKKLIHAAKLNASLKTLEGERNQIYIQLSEVDKTKEELTEHIKNLQTEQASLQSENTHFENENQKLQQKLKVMTELYQENEMKLHRKLTVEENYRLEKEEKLSKVDEKISHATEELETYRKRAKDLEEELERTIHSYQGQIISHEKKAHDNWLAARNAERNLNDLRKENAHNRQKLTETELKFELLEKDPYALDVPNTAFGREHSPYGPSPLGWPSSETRAFLSPPTLLEGPLRLSPLLPGGGGRGSRGPGNPLDHQITNERGESSCDRLTDPHRAPSDTGSLSPPWDQDRRMMFPPPGQSYPDSALPPQRQDRFCSNSGRLSGPAELRSFNMPSLDKMDGSMPSEMESSRNDTKDDLGNLNVPDSSLPAENEATGPGFVPPPLAPIRGPLFPVDARGPFLRRGPPFPPPPPGAMFGASRDYFPPGDFPGPPPAPFAMRNVYPPRGFPPYLPPRPGFFPPPPHSEGRSEFPSGLIPPSNEPATEHPEPQQET

SEQ ID NO: 8713 - protein, 1907 aa, Homo sapiens
MAAAPGLLVWLLVLRLPWRVPGQLDPSTGRRFSEHKLCADDECSMLMYRGEALEDFTGPDCRFVNFKKGDPVYVYYKLARGWPEVWAGSVGRTFGYFPKDLIQVVHEYTKEELQVPTDETDFVCFDGGRDDFHNYNVEELLGFLELYNSAATDSEKAVEKTLQDMEKNPELSKEREPEPEPVEANSEESDSVFSENTEDLQEQFTTQKHHSHANSQANHAQGEQASFESFEEMLQDKLKVPESENNKTSNSSQVSNEQDKIDAYKLLKKEMTLDLKTKFGSTADALVSDDETTRLVTSLEDDFDEELDTEYYAVGKEDEENQEDFDELPLLTFTDGEDMKTPAKSGVEKYPTDKEQNSNEEDKVQLTVPPGIKNDDKNILTTWGDTIFSIVTGGEETRDTMDLESSSSEEEKEDDDDALVPDSKQGKPQSATDYSDPDNVDDGLFIVDIPKTNNDKEVNAEHHIKGKGRGVQESKRGLVQDKTELEDENQEGMTVHSSVHSNNLNSMPAAEKGKDTLKSAYDDTENDLKGAAIHISKGMLHEEKPGEQILEGGSESESAQKAAGNQMNDRKIQQESLGSAPLMGDDHPNASRDSVEGDALVNGAKLHTLSVEHQREELKEELVLKTQNQPRFSSPDEIDLPRELEDEVPILGRNLPWQQERDVAATASKQMSEKIRLSEGEAKEDSLDEEFFHHKAMQGTEVGQTDQTDSTGGPAFLSKVEEDDYPSEELLEDENAINAKRSKEKNPGNQGRQFDVNLQVPDRAVLGTIHPDPEIEESKQETSMILDSEKTSETAAKGVNTGGREPNTMVEKERPLADKKAQRPFERSDFSDSIKIQTPELGEVFQNKDSDYLKNDNPEEHLKTSGLAGEPEGELSKEDHENTEKYMGTESQGSAAAEPEDDSFHWTPHTSVEPGHSDKREDLLIISSFFKEQQSLQRFQKYFNVHELEALLQEMSSKLKSAQQESLPYNMEKVLDKVFRASESQILSIAEKMLDTRVAENRDLGMNENNIFEEAAVLDDIQDLIYFVRYKHSTAEETATLVMAPPLEEGLGGAMEEMQPLHEDNFSREKTAELNVQVPEEPTHLDQRVIGDTHASEVSQKPNTEKDLDPGPVTTEDTPMDAIDANKQPETAAEEPASVTPLENAILLIYSFMFYLTKSLVATLPDDVQPGPDFYGLPWKPVFITAFLGIASFAIFLWRTVLVVKDRVYQVTEQQISEKLKTIMKENTELVQKLSNYEQKIKESKKHVQETRKQNMILSDEAIKYKDKIKTLEKNQEILDDTAKNLRVMLESEREQNVKNQDLISENKKSIEKLKDVISMNASEFSEVQIALNEAKLSEEKVKSECHRVQEENARLKKKKEQLQQEIEDWSKLHAELSEQIKSFEKSQKDLEVALTHKDDNINALTNCITQLNLLECESESEGQNKGGNDSDELANGEVGGDRNEKMKNQIKQMMDVSRTQTAISVVEEDLKLLQLKLRASVSTKCNLEDQVKKLEDDRNSLQAAKAGLEDECKTLRQKVEILNELYQQKEMALQKKLSQEEYERQEREHRLSAADEKAVSAAEEVKTYKRRIEEMEDELQKTERSFKNQIATHEKKAHENWLKARAAERAIAEEKREAANLRHKLLELTQKMAMLQEEPVIVKPMPGKPNTQNPPRRGPLSQNGSFGPSPVSGGECSPPLTVEPPVRPLSATLNRRDMPRSEFGSVDGPLPHPRWSAEASGKPSPSDPGSGTATMMNSSSRGSSPTRVLDEGKVNMAPKGPPPFPGVPLMSTPMGGPVPPPIRYGPPPQLCGPFGPRPLPPPFGPGMRPPLGLREFAPGVPPGRRDLPLHPRGFLPGHAPFRPLGSLGPREYFIPGTRLPPPTHGPQEYPPPPAVRDLLPSGSRDEPPPASQSTSQDCSQALKQSP

SEQ ID NO: 8714 - protein, 500 aa, Homo sapiens
MAAAPGLLVWLLVLRLPWRVPGQLDPSTGRRFSEHKLCADDECSMLMYRGEALEDFTGPDCRFVNFKKGDPVYVYYKLARGWPEVWAGSVGRTFGYFPKDLIQVVHEYTKEELQVPTDETDFVCFDGGRDDFHNYNVEELLGFLELYNSAATDSEKAVEKTLQDMEKNPELSKEREPEPEPVEANSEESDSVFSENTEDLQEQFTTQKHHSHANSQANHAQGEQASFESFEEMLQDKLKVPESENNKTSNSSQVSNEQDKIDAYKLLKKEMTLDLKTKFGSTADALVSDDETTRLVTSLEDDFDEELDTEYYAVGKEDEENQEDFDELPLLTFTDGEDMKTPAKSGVEKYPTDKEQNSNEEDKVQLTVPPGIKNDDKNILTTWGDTIFSIVTGGEETRDTMDLESSSSEEEKEDDDDALVPDSKQGKPQSATDYSDPDNVDDGLFIVDIPKTNNDKEVNAEHHIKGKGRGVQESKRGLVQDKTELEDENQEGFKTEPIKL

SEQ ID NO: 8715 - protein, 785 aa, Homo sapiens
MDSVPATVPSIAATPGDPELVGPLSVLYAAFIAKLLELVATLPDDVQPGPDFYGLPWKPVFITAFLGIASFAIFLWRTVLVVKDRVYQVTEQQISEKLKTIMKENTELVQKLSNYEQKIKESKKHVQETRKQNMILSDEAIKYKDKIKTLEKNQEILDDTAKNLRVMLESEREQNVKNQDLISENKKSIEKLKDVISMNASEFSEVQIALNEAKLSEEKVKSECHRVQEENARLKKKKEQLQQEIEDWSKLHAELSEQIKSFEKSQKDLEVALTHKDDNINALTNCITQLNLLECESESEGQNKGGNDSDELANGEVGGDRNEKMKNQIKQMMDVSRTQTAISVVEEDLKLLQLKLRASVSTKCNLEDQVKKLEDDRNSLQAAKAGLEDECKTLRQKVEILNELYQQKEMALQKKLSQEEYERQEREHRLSAADEKAVSAAEEVKTYKRRIEEMEDELQKTERSFKNQIATHEKKAHENWLKARAAERAIAEEKREAANLRHKLLELTQKMAMLQEEPVIVKPMPGKPNTQNPPRRGPLSQNGSFGPSPVSGGECSPPLTVEPPVRPLSATLNRRDMPRSEFGSVDGPLPHPRWSAEASGKPSPSDPGSGTATMMNSSSRGSSPTRVLDEGKVNMAPKGPPPFPGVPLMSTPMGGPVPPPIRYGPPPQLCGPFGPRPLPPPFGPGMRPPLGLREFAPGVPPGRRDLPLHPRGFLPGHAPFRPLGSLGPREYFIPGTRLPPPTHGPQEYPPPPAVRDLLPSGSRDEPPPASQSTSQDCSQALKQSP

SEQ ID NO: 8716 - protein, 1016 aa, Homo sapiens
  VARIANT 1: note = misc_feature - Xaa can be any naturally occurring amino acid
XLVPDSKQGKPQSATDYSDPDNVDDGLFIVDIPKTNNDKEVNAEHHIKGKGRGVQESKRGLVQDKTELEDENQEGMTVHSSVHSNNLNSMPAAEKGKDTLKSAYDDTENDLKGAAIHISKGMLHEEKPGEQILEGGSESESAQKAAGNQMNDRKIQQESLGSAPLMGDDHPNASRDSVEGDALVNGAKLHTLSVEHQREELKEELVLKTQNQPRFSSPDEIDLPRELEDEVPILGRNLPWQQERDVAATASKQMSEKIRLSEGEAKEDSLDEEFFHHKAMQGTEVGQTDQTDSTGGPAFLSKVEEDDYPSEELLEDENAINAKRSKEKNPGNQGRQFDVNLQVPDRAVLGTIHPDPEIEESKQETSMILDSEKTSETAAKGVNTGGREPNTMVEKERPLADKKAQRPFERSDFSDSIKIQTPELGEVFQNKDSDYLKNDNPEEHLKTSGLAGEPEGELSKEDHENTEKYMGTESQGSAAAEPEDDSFHWTPHTSVEPGHSDKREDLLIISSFFKEQQSLQRFQKYFNVHELEALLQEMSSKLKSAQQESLPYNMEKVLDKVFRASESQILSIAEKMLDTRVAENRDLGMNENNIFEEAAVLDDIQDLIYFVRYKHSTAEETATLVMAPPLEEGLGGAMEEMQPLHEDNFSREKTAELNVQVPEEPTHLDQRVIGDTHASEVSQKPNTEKDLDPGPVTTEDTPMDAIDANKQPETAAEEPASVTPLENAILLIYSFMFYLTKSLVATLPDDVQPGPDFYGLPWKPVFITAFLGIASFAIFLWRTVLVVKDRVYQVTEQQISEKLKTIMKENTELVQKLSNYEQKIKESKKHVQETRKQNMILSDEAIKYKDKIKTLEKNQEILDDTAKNLRVMLESEREQNVKNQDLLQQEIEDWSKLHAELSEQIKSFEKSQKDLEVALTHKDDNINALTNCITQLNLLECESESEGQNKGGNDSDELANGEVGGDRNEKMKNQIKQMMDVSRTQTAISVVEEDLKLLQLKLRASVSTKCNLEDQV

SEQ ID NO: 8717 - protein, 107 aa, Homo sapiens
  VARIANT 1: note = misc_feature - Xaa can be any naturally occurring amino acid
XSAEASGKPSPSDPGSGTATMMNSSSRGSSPTRVLDEGKVNMAPKGPPPFPGVPLMSTPMGGPVPPPIRYGPPPQLCGPFGPRPLPPPFDKDGRPGTVAHACNPSTL

SEQ ID NO: 8718 - protein, 388 aa, Homo sapiens
MFRLNSLSALAELAVGSRWYHGGSQPIQIRRRLMMVAFLGASAVTASTGLLWKRAHAESPPCVDNLKSDIGDKGKNKDEGDVCNHEKKTADLAPHPEEKKKKRSGFRDRKVMEYENRIRAYSTPDKIFRYFATLKVISEPGEAEVFMTPEDFVRSITPNEKQPEHLGLDQYIIKRFDGKARFSKKKILHRVRKKSKGSILQRRKKALQKEERTRHGSTKHNEQEVRRTIMEWLEKAGVQWHHLSSLQPPTPWFKRFFCLSLLSSWDYRHTPPCPANFFIFSRDRVSPCWPGWSRYPDLMIRPPWLRKVLGLQKISQEREKFADEGSIFYTLGECGLISFSDYIFLTTVLSTPQRNFEIAFKMFDLNGDGEVDMEEFEQVQSIIRSQTS

SEQ ID NO: 8719 - protein, 480 aa, Homo sapiens
MFRLNSLSALAELAVGSRWYHGGSQPIQIRRRLMMVAFLGASAVTASTGLLWKRAHAESPPCVDNLKSDIGDKGKNKDEGDVCNHEKKTADLAPHPEEKKKKRSGFRDRKVMEYENRIRAYSTPDKIFRYFATLKVISEPGEAEVFMTPEDFVRSITPNEKQPEHLGLDQYIIKRFDGKDFWQKISQEREKFADEGSIFYTLGECGLISFSDYIFLTTVLSTPQRNFEIAFKMFDLNGDGEVDMEEFEQVQSIIRSQTSMGMRHRDRPTTGNTLKSGLCSALTTYFFGADLKGKLTIKNFLEFQRKLQHDVLKLEFERHDPVDGRITERQFGGMLLAYSGVQSKKLTAMQRQLKKHFKEGKGLTFQEVENFFTFLKNINDVDTALSFYHMAGASLDKVTMQQVARTVAKVELSDHVCDVVFALFDCDGNGELSNKEFVSIMKQRLMRGLEKPKDMGFTRLMQAMWKCAQETAWDFALPKQ

SEQ ID NO: 8720 - protein, 482 aa, Homo sapiens
MFRLNSLSALAELAVGSRWYHGGSQPIQIRRRLMMVAFLGASAVTASTGLLWKRAHAESPPCVDNLKSDIGDKGKNKDEGDVCNHEKKTADLAPHPEEKKKKRSGFRDRKVMEYENRIRAYSTPDKIFRYFATLKVISEPGEAEVFMTPEDFVRSITPNEKQPEHLGLDQYIIKRFDGKDFWQTEKISQEREKFADEGSIFYTLGECGLISFSDYIFLTTVLSTPQRNFEIAFKMFDLNGDGEVDMEEFEQVQSIIRSQTSMGMRHRDRPTTGNTLKSGLCSALTTYFFGADLKGKLTIKNFLEFQRKLQHDVLKLEFERHDPVDGRITERQFGGMLLAYSGVQSKKLTAMQRQLKKHFKEGKGLTFQEVENFFTFLKNINDVDTALSFYHMAGASLDKVTMQQVARTVAKVELSDHVCDVVFALFDCDGNGELSNKEFVSIMKQRLMRGLEKPKDMGFTRLMQAMWKCAQETAWDFALPKQ

SEQ ID NO: 8721 - protein, 476 aa, Homo sapiens
MFRLNSLSALAELAVGSRWYHGGSQPIQIRRRLMMVAFLGASAVTASTGLLWKRAHAESPPCVDNLKSDIGDKGKNKDEGDVCNHEKKTADLAPHPEEKKKKRSGFRDRKVMEYENRIRAYSTPDKIFRYFATLKVISEPGEAEVFMTPEDFVRSITPNEKQPEHLGLDQYIIKRFDGKKISQEREKFADEGSIFYTLGECGLISFSDYIFLTTVLSTPQRNFEIAFKMFDLNGDGEVDMEEFEQVQSIIRSQTSMGMRHRDRPTTGNTLKSGLCSALTTYFFGADLKGKLTIKNFLEFQRKLQHDVLKLEFERHDPVDGRITERQFGGMLLAYSGVQSKKLTAMQRQLKKHFKEGKGLTFQEVENFFTFLKNINDVDTALSFYHMAGASLDKVTMQQVARTVAKVELSDHVCDVVFALFDCDGNGELSNKEFVSIMKQRLMRGLEKPKDMGFTRLMQAMWKCAQETAWDFALPKQ

SEQ ID NO: 8722 - protein, 478 aa, Homo sapiens [sequence omitted]

SEQ ID NO: 8723 - protein, 154 aa, Homo sapiens
MKRIYTYRRAKEIFKDTPKAPQRNFEIAFKMFDLNGDGEVDMEEFEQVQSIIRSQTSMGMRHRDRPTTGNTLKSGLCSALTTYFFGADLKGKLTIKNFLEFQRKLQHDVLKLEFERHDPVDGRITERQFGGMLLAYSGVQSKKLTAMQRQLKKH

SEQ ID NO: 8724 - protein, 278 aa, Homo sapiens
MKRIYTYRRAKEIFKDTPKAPQRNFEIAFKMFDLNGDGEVDMEEFEQVQSIIRSQTSMGMRHRDRPTTGNTLKSGLCSALTTYFFGADLKGKLTIKNFLEFQRKLQHDVLKLEFERHDPVDGRITERQFGGMLLAYSGVQSKKLTAMQRQLKKHFKEGKGLTFQEVENFFTFLKNINDVDTALSFYHMAGASLDKVTMQQVARTVAKVELSDHVCDVVFALFDCDGNGELSNKEFVSIMKQRLMRGLEKPKDMGFTRLMQAMWKCAQETAWDFALPKQ

SEQ ID NO: 8725 - protein, 212 aa, Homo sapiens
MVAFLGASAVTASTGLLWKRAHAESPPCVDNLKSDIGDKGKNKDEGDVCNHEKKTADLAPHPEEKKKKRSGFRDRKVMEYENRIRAYSTPDKIFRYFATLKVISEPGEAEVFMTPEDFVRSITPNEKQPEHLGLDQYIIKRFDGKKISQEREKFADEGSIFYTLGECGLISFSDYIFLTTVLSTPQRNFEIAFKMFDLNGDGEVDMEEFEQA

SEQ ID NO: 8726 - protein, 278 aa, Homo sapiens
MVSLKAKLNHLRQSMLKQKAPQRNFEIAFKMFDLNGDGEVDMEEFEQVQSIIRSQTSMGMRHRDRPTTGNTLKSGLCSALTTYFFGADLKGKLTIKNFLEFQRKLQHDVLKLEFERHDPVDGRITERQFGGMLLAYSGVQSKKLTAMQRQLKKHFKEGKGLTFQEVENFFTFLKNINDVDTALSFYHMAGASLDKVTMQQVARTVAKVELSDHVCDVVFALFDCDGNGELSNKEFVSIMKQRLMRGLEKPKDMGFTRLMQAMWKCAQETAWDFALPKQ

SEQ ID NO: 8727 - protein, 246 aa, Homo sapiens
  VARIANT 1: note = misc_feature - Xaa can be any naturally occurring amino acid
XNEKQPEHLGLDQYIIKRFDGKKISQEREKFADEGSIFYTLGECGLISFSDYIFLTTVLSTPQRNFEIAFKMFDLNGDGEVDMEEFEQVQSIIRSQTSMGMRHRDRPTTGNTLKSGLCSALTTYFFGADLKGKLTIKNFLEFQRKLQHDVLKLEFERHDPVDGRITERQFGGMLLAYSGVQSKKLTAMQRQLKKHFKEGKGLTFQEVENFFTFLKNINDVDTALSFYHMAGASLDKGKGTIFMGRR

SEQ ID NO: 8728 - protein, 512 aa, Homo sapiens
MAEPSVESSSPGGSATSDDHEFDPSADMLVHDFDDERTLEEEEMMEGETNFSSEIEDLAREGDMPIHELLSLYGYGSTVRLPEEDEEEEEEEEEGEDDEDADNDDNSGCSGENKEENIKDSSGQEDETQSSNDDPSQSVASQDAQEIIRPRRCKYFDTNSEVEEESEEDEDYIPSEDWKKEIMVGSMFQAEIPVGICRYKENEKVYENDDQLLWDPEYLPEDKVIIFLKDASRRTGDEKGVEAIPEGSHIKDNEQALYELVKCNFDTEEALRRLRFNVKAAREELSVWTEEECRNFEQGLKAYGKDFHLIQANKVRTRSVGECVAFYYMWKKSERYDFFAQQTRFGKKKYNLHPGVTDYMDRLLDESESAASSRAPSPPPTASNSSNSQSEKEDGTVSTANQNGVSSNGPGEILNKEEVKVEGLHINGPTGGNKKPLHADMDTNGYETDNLTTDPKLAHMTARNENDFDEKSERPAKRRRVNSNGKESPGSSEFFQEAVSHGKFEELENTDD

SEQ ID NO: 8729 - protein, 433 aa, Homo sapiens
MAEPSVESSSPGGSATSDDHEFDPSADMLVHDFDDERTLEEEEMMEGETNFSSEIEDLAREGDMPIHELLSLYGYGSTVRLPEEDEEEEEEEEEGEDDEDADNDDNSGCSGENKEENIKDSSGQEDETQSSNDDPSQSVASQDAQEIIRPRRCKYFDTNSEVEEESEEDEDYIPSEDWKKEIMVGSMFQAEIPVGICRYKENEKVYENDDQLLWDPEYLPEDKVIIFLKDASRRTGDEKGVEAIPEGSHIKDNEQALYELVKCNFDTEEALRRLRFNVKAAREELSVWTEEECRNFEQGLKAYGKDFHLIQANKVRTRSVGECVAFYYMWKKSERYDFFAQQTRFGKKKYNLHPGVTDYMDRLLDESESAASSRAPSPPPTASNSSNSQSEKEDGTVSTANQNGVSSNGPGILQMLLPVHFSAISSRANAFLK

SEQ ID NO: 8730 - protein, 486 aa, Homo sapiens
MDGASSGGGGSSEGGGGSSGSGYGVVARFSQCLAEFRTWLRTNWLRFNADKTDVMLPSVESSSPGGSATSDDHEFDPSADMLVHDFDDERTLEEEEMMEGETNFSSEIEDLAREGDMPIHELLSLYGYGSTVRLPEEDEEEEEEEEEGEDDEDADNDDNSGCSGENKEENIKDSSGQEDETQSSNDDPSQSVASQDAQEIIRPRRCKYFDTNSEVEEESEEDEDYIPSEDWKKEIMVGSMFQAEIPVGICRYKENEKVYENDDQLLWDPEYLPEDKVIIFLKDASRRTGDEKGVEAIPEGSHIKDNEQALYELVKCNFDTEEALRRLRFNVKAAREELSVWTEEECRNFEQGLKAYGKDFHLIQANKVRTRSVGECVAFYYMWKKSERYDFFAQQTRFGKKKYNLHPGVTDYMDRLLDESESAASSRAPSPPPTASNSSNSQSEKEDGTVSTANQNGVSSNGPGILQMLLPVHFSAISSRANAFLK

SEQ ID NO: 8731 - protein, 565 aa, Homo sapiens
MDGASSGGGGSSEGGGGSSGSGYGVVARFSQCLAEFRTWLRTNWLRFNADKTDVMLPSVESSSPGGSATSDDHEFDPSADMLVHDFDDERTLEEEEMMEGETNFSSEIEDLAREGDMPIHELLSLYGYGSTVRLPEEDEEEEEEEEEGEDDEDADNDDNSGCSGENKEENIKDSSGQEDETQSSNDDPSQSVASQDAQEIIRPRRCKYFDTNSEVEEESEEDEDYIPSEDWKKEIMVGSMFQAEIPVGICRYKENEKVYENDDQLLWDPEYLPEDKVIIFLKDASRRTGDEKGVEAIPEGSHIKDNEQALYELVKCNFDTEEALRRLRFNVKAAREELSVWTEEECRNFEQGLKAYGKDFHLIQANKVRTRSVGECVAFYYMWKKSERYDFFAQQTRFGKKKYNLHPGVTDYMDRLLDESESAASSRAPSPPPTASNSSNSQSEKEDGTVSTANQNGVSSNGPGEILNKEEVKVEGLHINGPTGGNKKPLHADMDTNGYETDNLTTDPKLAHMTARNENDFDEKSERPAKRRRVNSNGKESPGSSEFFQEAVSHGKFEELENTDD

SEQ ID NO: 8732 - protein, 450 aa, Homo sapiens
MFMFNWFTDCLWTLFLSNYQPSVESSSPGGSATSDDHEFDPSADMLVHDFDDERTLEEEEMMEGETNFSSEIEDLAREGDMPIHELLSLYGYGSTVRLPEEDEEEEEEEEEGEDDEDADNDDNSGCSGENKEENIKDSSGQEDETQSSNDDPSQSVASQDAQEIIRPRRCKYFDTNSEVEEESEEDEDYIPSEDWKKEIMVGSMFQAEIPVGICRYKENEKVYENDDQLLWDPEYLPEDKVIIFLKDASRRTGDEKGVEAIPEGSHIKDNEQALYELVKCNFDTEEALRRLRFNVKAAREELSVWTEEECRNFEQGLKAYGKDFHLIQANKVRTRSVGECVAFYYMWKKSERYDFFAQQTRFGKKKYNLHPGVTDYMDRLLDESESAASSRAPSPPPTASNSSNSQSEKEDGTVSTANQNGVSSNGPGILQMLLPVHFSAISSRANAFLK

SEQ ID NO: 8733 - protein, 470 aa, Homo sapiens
MFMFNWFTDCLWTLFLSNYQPSVESSSPGGSATSDDHEFDPSADMLVHDFDDERTLEEEEMMEGETNFSSEIEDLAREGDMPIHELLSLYGYGSTVRLPEEDEEEEEEEEEGEDDEDADNDDNSGCSGENKEENIKDSSGQEDETQSSNDDPSQSVASQDAQEIIRPRRCKYFDTNSEVEEESEEDEDYIPSEDWKKEIMVGSMFQAEIPVGICRYKENEKVYENDDQLLWDPEYLPEDKVIIFLKDASRRTGDEKGVEAIPEGSHIKDNEQALYELVKCNFDTEEALRRLRFNVKAAREELSVWTEEECRNFEQGLKAYGKDFHLIQANKVRTRSVGECVAFYYMWKKSERYDFFAQQTRFGKKKYNLHPGVTDYMDRLLDESESAASSRAPSPPPTASNSSNSQSEKEDGTVSTANQNGVSSNGPGEILNKEEVKVEGLHINGPTGILQMLLPVHFSAISSRANAFLK

SEQ ID NO: 8734 - protein, 529 aa, Homo sapiens
MFMFNWFTDCLWTLFLSNYQPSVESSSPGGSATSDDHEFDPSADMLVHDFDDERTLEEEEMMEGETNFSSEIEDLAREGDMPIHELLSLYGYGSTVRLPEEDEEEEEEEEEGEDDEDADNDDNSGCSGENKEENIKDSSGQEDETQSSNDDPSQSVASQDAQEIIRPRRCKYFDTNSEVEEESEEDEDYIPSEDWKKEIMVGSMFQAEIPVGICRYKENEKVYENDDQLLWDPEYLPEDKVIIFLKDASRRTGDEKGVEAIPEGSHIKDNEQALYELVKCNFDTEEALRRLRFNVKAAREELSVWTEEECRNFEQGLKAYGKDFHLIQANKVRTRSVGECVAFYYMWKKSERYDFFAQQTRFGKKKYNLHPGVTDYMDRLLDESESAASSRAPSPPPTASNSSNSQSEKEDGTVSTANQNGVSSNGPGEILNKEEVKVEGLHINGPTGGNKKPLHADMDTNGYETDNLTTDPKLAHMTARNENDFDEKSERPAKRRRVNSNGKESPGSSEFFQEAVSHGKFEELENTDD

SEQ ID NO: 8735 - protein, 81 aa, Homo sapiens
MFMFNWFTDCLWTLFLSNYQPSVESSSPGGSATSDDHEFDPSADMLVHDFDDERTLEEEEMMEGETNFSSEIEDLARVNNM

SEQ ID NO: 8736 - protein, 370 aa, Homo sapiens
MPIHELLSLYGYGSTVRLPEEDEEEEEEEEEGEDDEDADNDDNSGCSGENKEENIKDSSGQEDETQSSNDDPSQSVASQDAQEIIRPRRCKYFDTNSEVEEESEEDEDYIPSEDWKKEIMVGSMFQAEIPVGICRYKENEKVYENDDQLLWDPEYLPEDKVIIFLKDASRRTGDEKGVEAIPEGSHIKDNEQALYELVKCNFDTEEALRRLRFNVKAAREELSVWTEEECRNFEQGLKAYGKDFHLIQANKVRTRSVGECVAFYYMWKKSERYDFFAQQTRFGKKKYNLHPGVTDYMDRLLDESESAASSRAPSPPPTASNSSNSQSEKEDGTVSTANQNGVSSNGPGILQMLLPVHFSAISSRANAFLK

SEQ ID NO: 8737 - protein, 70 aa, Homo sapiens
MFQPLSSPDSHRKGTGFGLGIVFSLTFFKRRMWPLAFGSGMGLGMAYSNCQHDFQAPYLLHGKYVKEQEQ

SEQ ID NO: 8738 - protein, 71 aa, Homo sapiens
RKWDRCLADAVVKIGTGFGLGIVFSLTFFKRRMWPLAFGSGMGLGMAYSNCQHDFQAPYLLHGKYVKEQEQ

SEQ ID NO: 8739 - protein, 46 aa, Homo sapiens
  VARIANT 1: note = misc_feature - Xaa can be any naturally occurring amino acid
XKWDRCLADAVVKIEMGFHHVAQAGLELRVQTIHLPWPPNVPGLQA

SEQ ID NO: 8740 - protein, 286 aa, Homo sapiens
MCLFQLCGLVRYMEFGPPTVNDKLMRFFDHCEKFLTEVEKNATALYHVEAFKTGPEMQNILKKVAATLQVPVNDLNADLIQVAFFTCSFDLAIKGVKSPWCDVFDIDDAKVLEYLNDLKQYWKRGYGYTINSRSSCTLFQDIFQHLDKAVEQKQRSQPISSPVILQFGHAETLLPLLSLMGYFKDKEPLTAYNYKKQMHRKFRSGLIVPYASNLIFVLYHCENAKTPKEQFRVQMLLNEKVLPLAYSQETVSFYEDLKNHYKDILQSCQTSEECELARANSTSDEL

SEQ ID NO: 8741 - protein, 312 aa, Homo sapiens
MLRAPGCLLRTSVAPAAALAAALLSSLARCSLLEPRDPVASSLSPYFGTKTRYEDVNPVLLSGPEAPWRDPELLEGTCTPVQLVALIRHGTRYPTVKQIRKLRQLHGLLQARGSRDGGASSTGSRDLGAALADWPLWYADWMDGQLVEKGRQDMRQLALRLASLFPALFSRENYGRLRLITSSKHRCMDSSAAFLQGLWQHYHPGLPPPDVADMEFGPPTVNDKLMRFFDHCEKFLTEVEKNATALYHVEAFKTGPEMQNILKKVAATLQVPVNDLNAGLSQFLLQSSSSLVMQRLFFHCFLSWATSKTRNP

SEQ ID NO: 8742 - protein, 487 aa, Homo sapiens
MLRAPGCLLRTSVAPAAALAAALLSSLARCSLLEPRDPVASSLSPYFGTKTRYEDVNPVLLSGPEAPWRDPELLEGTCTPVQLVALIRHGTRYPTVKQIRKLRQLHGLLQARGSRDGGASSTGSRDLGAALADWPLWYADWMDGQLVEKGRQDMRQLALRLASLFPALFSRENYGRLRLITSSKHRCMDSSAAFLQGLWQHYHPGLPPPDVADMEFGPPTVNDKLMRFFDHCEKFLTEVEKNATALYHVEAFKTGPEMQNILKKVAATLQVPVNDLNADLIQVAFFTCSFDLAIKGVKSPWCDVFDIDDAKVLEYLNDLKQYWKRGYGYTINSRSSCTLFQDIFQHLDKAVEQKQRSQPISSPVILQFGHAETLLPLLSLMGYFKDKEPLTAYNYKKQMHRKFRSGLIVPYASNLIFVLYHCENAKTPKEQFRVQMLLNEKVLPLAYSQETVSFYEDLKNHYKDILQSCQTSEECELARANSTSDEL

SEQ ID NO: 8743 - protein, 146 aa, Homo sapiens
MKLPILRSNPEDQILYQTERYNEETFGYEVPIKEEGDYVLVLKFAEVYFAQSQQKVFDVRLNGHVVVKDLDIFDRVGHSTAHDEIIPMSIRKGKLSVQGEVSTFTGKLYIEFVKGYYDNPKVCALYIMAGTVDDVPKLQPHPGLEK

SEQ ID NO: 8744 - protein, 217 aa, Homo sapiens
MLGAWAVEGTAVALLRLLLLLLPPAIRGPGLGVAGVAGAAGAGLPESVIWAVNAGGEAHVDVHGIHFRKDPLEGRVGRASDYGMKLPILRSNPEDQILYQTERYNEETFGYEVPIKEEGDYVLVLKFAEVYFAQSQQKMYQSFSLIRDWRRKKRKKKKKNMMKGLISKNRPIRTGCSQAPAHPTPMPRTTAASCFPSWWPSESSFQPSSASAGCENK

SEQ ID NO: 8745 - protein, 292 aa, Homo sapiens
MLGAWAVEGTAVALLRLLLLLLPPAIRGPGLGVAGVAGAAGAGLPESVIWAVNAGGEAHVDVHGIHFRKDPLEGRVGRASDYGMKLPILRSNPEDQILYQTERYNEETFGYEVPIKEEGDYVLVLKFAEVYFAQSQQKVFDVRLNGHVVVKDLDIFDRVGHSTAHDEIIPMSIRKGKLSVQGEVSTFTGKLYIEFVKGYYDNPKVCALYIMAGTVDDVPKLQPHPGLEKKEEEEEEEEYDEGSNLKKQTNKNRVQSGPRTPNPYASDNSSLMFPILVAFGVFIPTLFCLCRL

SEQ ID NO: 8746 - protein, 173 aa, Homo sapiens
  VARIANT 1: note = misc_feature - Xaa can be any naturally occurring amino acid
XNEETFGYEVPIKEEGDYVLVLKFAEVYFAQSQQKVFDVRLNGHVVVKDLDIFDRVGHSTAHDEIIPMSIRKGKLSVQGEVSTFTGKLYIEFVKMYQSFSLIRDWRRKKRKKKKKNMMKGLISKNRPIRTGCSQAPAHPTPMPRTTAASCFPSWWPSESSFQPSSASAGCENK

SEQ ID NO: 8747 - protein, 115 aa, Homo sapiens
MVSRKAVAALLVVHVAAMLASQTEAFVPIFTYGELQRMQEKERNKGQKKSLSVWQRSGEEGPVDPAEPIREEENEMIKLTAPLEIGMRMNSRQLEKYPATLEGLLSEMLPQHAAK

SEQ ID NO: 8748 - protein, 114 aa, Homo sapiens
MVSRKAVAALLVVHVAAMLASQTEAFVPIFTYGELQRMQEKERNKGQKKSLSVWQRSGEEGPVDPAEPIREEENEMIKLTAPLEIGMRMNSRQLEKYPATLEGLLSEMLPQHAK

SEQ ID NO: 8749 - protein, 108 aa, Homo sapiens
MVSRKAVAALLVVHVAAMLASQTEAFVPIFTYGELQRMQEKERNKGQKKSLSVWQRSGEEGPVDPAEPIREEENEMIKLTAPLEIGMRMNSRQLEKYPATLEGLLTAK

SEQ ID NO: 8750 - protein, 919 aa, Homo sapiens
MAADVFMCSPRRPRSRGRQVLLKPQVSEDDDDSDTDEPSPPPASGAATPARAHASAAPPPPRAGPGREEPPRRQQIIHSGHFMVSSPHREHPPKKGYDFDTVNKQTCQTYSFGKTSSCHLSIDASLTKLFECMTLAYSGKLVSPKWKNFKGLKLQWRDKIRLNNAIWRAWYMQYLEKRKNPVCHFVTPLDGSVDVDEHRRPEAITTEGKYWKSRIEIVIREYHKWRTYFKKRLQQHKDEDLSSLVQDDDMLYWHKHGDGWKTPVPMEEDPLLDTDMLMSEFSDTLFSTLSSHQPVAWPNPREIAHLGNADMIQPGLIPLQPNLDFMDTFEPFQDLFSSSRSIFGSMLPASASAPVPDPNNPPAQESILPTTALPTVSLPDSLIAPPTAPSLAHMDEQGCEHTSRTEDPFIQPTDFGPSEPPLSVPQPFLPVFTMPLLSPSPAPPPISPVLPLVPPPATALNPPAPPTFHQPQKFAGVNKAPSVITHTASATLTHDAPATTFSQSQGLVITTHHPAPSAAPCGLALSPVTRPPQPRLTFVHPKPVSLTGGRPKQPHKIVPAPKPEPVSLVLKNARIAPAAFSGQPQAVIMTSGPLKREGMLASTVSQSNVVIAPAAIARAPGVPEFHSSILVTDLGHGTSSPPAPVSRLFPSTAQDPLGKGEQVPLHGGSPQVTVTGPSRDCPNSGQASPCASEQSPSPQSPQNNCSGKSDPKNVAALKNRQMKHISAEQKRRFNIKMCFDMLNSLISNNSKLTSHAITLQKTVEYITKLQQERGQMQEEARRLREEIEELNATIISCQQLLPATGVPVTRRQFDHMKDMFDEYVKTRTLQNWKFWIFSIIIKPLFESFKGMVSTSSLEELHRTALSWLDQHCSLPILRPMVLSTLRQLSTSTSILTDPAQLPEQASKAVTRIGKRLGES

SEQ ID NO: 8751 - protein, 217 aa, Homo sapiens
MDEQGCEHTSRTEDPFIQPTDFGPSEPPLSVPPPISPVLPLVPPPATALNPPAPPTFHQPQKFAGVNKAPSVITHTASATLTHDAPATTFSQSQGLVITTHHPAPSAAPCGLALSPVTRPPQPRLTFVHPKPVSLTGGRPKQPHKIVPAPKPEPVSLVLKNARIAPGEPGGETQCGAPPDPEGCFPIPKAFKLVTTTTTLVCTCMRTHIHLNETKVS

SEQ ID NO: 8752 - protein, 526 aa, Homo sapiens
MDEQGCEHTSRTEDPFIQPTDFGPSEPPLSVPQPFLPVFTMPLLSPSPAPPPISPVLPLVPPPATALNPPAPPTFHQPQKFAGVNKAPSVITHTASATLTHDAPATTFSQSQGLVITTHHPAPSAAPCGLALSPVTRPPQPRLTFVHPKPVSLTGGRPKQPHKIVPAPKPEPVSLVLKNARIAPAAFSGQPQAVIMTSGPLKREGMLASTVSQSNVVIAPAAIARAPGVPEFHSSILVTDLGHGTSSPPAPVSRLFPSTAQDPLGKGEQVPLHGGSPQVTVTGPSRDCPNSGQASPCASEQSPSPQSPQNNCSGKSDPKNVAALKNRQMKHISAEQKRRFNIKMCFDMLNSLISNNSKLTSHAITLQKTVEYITKLQQERGQMQEEARRLREEIEELNATIISCQQLLPATGVPVTRRQFDHMKDMFDEYVKTRTLQNWKFWIFSIIIKPLFESFKGMVSTSSLEELHRTALSWLDQHCSLPILRPMVLSTLRQLSTSTSILTDPAQLPEQASKAVTRIGKRLGES

SEQ ID NO: 8753 - protein, 74 aa, Homo sapiens
MLYWHKHGDGWKTPVPMEEDPLLDTDMLMSEFSDTLFSTLSSHQPVAWPNPREIAHLGNADMIQPGLIPLQPNL

SEQ ID NO: 8754 - protein, 308 aa, Homo sapiens
MVLGALVALSSCPLGLRTSCLTGREAASAGWARPCGPGLHLNILLILAAAFSGQPQAVIMTSGPLKREGMLASTVSQSNVVIAPAAIARAPGVPEFHSSILVTDLGHGTSSPPAPVSRLFPSTAQDPLGKGEQVPLHGGSPQVTVTGPSRDCPNSGQASPCASEQSPSPQSPQNNCSGKSDPKNVAALKNRQMKHISAEQKRRFNIKMCFDMLNSLISNNSKLTSHAITLQKTVEYITKLQQERGQMQEEARRLREEIEELNATIISCQQLLPATGVPVTRRQFDHMKDMFDEYVKTRTLQNWKFWIV

SEQ ID NO: 8755 - protein, 171 aa, Homo sapiens
  VARIANT 1: note = misc_feature - Xaa can be any naturally occurring amino acid
XHGGSPQVTVTGPSRDCPNSGQASPCASEQSPSPQSPQNNCSGKSDPKNVAALKNRQMKHISAEQKRRFNIKMCFDMLNSLISNNSKLTSHAITLQKTVEYITKLQQERGQMQEEARRLREEIEELNATIIDPFSVGRYFPAPGERSTPVQPPSGLQSPAPLRACLFFNHT

SEQ ID NO: 8756 - protein, 213 aa, Homo sapiens
MAGALAGLAAGLQVPRVAPSPDSDSDTDSEDPSLRRSAGGLLRSQVIHSGHFMVSSPHSDSLPRRRDQEGSVGPSDFGPRSIDPTLTRLFECLSLAYSGKLVSPKWKNFKGLKLLCRDKIRLNNAIWRAWYIQYFFTNSRLPQPPMPSNFPEPPSFSPVVDSLFSSGTLGPEVPPASSAMTHLSGHSRLQARNSCPGPLDSSAFLSSDFLLPE

SEQ ID NO: 8757 - protein, 721 aa, Homo sapiens
MAGALAGLAAGLQVPRVAPSPDSDSDTDSEDPSLRRSAGGLLRSQVIHSGHFMVSSPHSDSLPRRRDQEGSVGPSDFGPRSIDPTLTRLFECLSLAYSGKLVSPKWKNFKGLKLLCRDKIRLNNAIWRAWYIQYVKRRKSPVCGFVTPLQGPEADAHRKPEAVVLEGNYWKRRIELPPEDAYVGNADMIQPDLTPLQPSLDDFMDISDFFTNSRLPQPPMPSNFPEPPSFSPVVDSLFSSGTLGPEVPPASSAMTHLSGHSRLQARNSCPGPLDSSAFLSSDFLLPEDPKPRLPPPPVPPPLLHYPPPAKVPGLEPCPPPPFPPMAPPTALLQEEPLFSPRFPFPTVPPAPGVSPLPAPAAFPPTPQSVPSPAPTPFPIELLPLGYSEPAFGPCFSMPRGKPPAPSPRGQKASPPTLAPATASPPTTAGSNNPCLTQLLTAAKPEQALEPPLVSSTLLRSPGSPETVPEFPCTFLPPTPAPTPPRPPPGPATLAPSRPLLVPKAERLSPPAPSGSERRLSGDLSSMPGPGTLSVRVSPPQPILSRGRPDSNKTENRRITHISAEQKRRFNIKLGFDTLHGLVSTLSAQPSLKVSKATTLQKTAEYILMLQQERAGLQEEAQQLRDEIEELNAAINLCQQQLPATGVPITHQRFDQMRDMFDDYVRTRTLHNWKFWVFSILIRPLFESFNGMVSTASVHTLRQTSLAWLDQYCSLPALRPST

SEQ ID NO: 8758 - protein, 852 aa, Homo sapiens
MAGALAGLAAGLQVPRVAPSPDSDSDTDSEDPSLRRSAGGLLRSQVIHSGHFMVSSPHSDSLPRRRDQEGSVGPSDFGPRSIDPTLTRLFECLSLAYSGKLVSPKWKNFKGLKLLCRDKIRLNNAIWRAWYIQYVKRRKSPVCGFVTPLQGPEADAHRKPEAVVLEGNYWKRRIEVVMREYHKWRIYYKKRLRKPSREDDLLAPKQAEGRWPPPEQWCKQLFSSVVPVLLGDPEEEPGGRQLLDLNCFLSDISDTLFTMTQSGPSPLQLPPEDAYVGNADMIQPDLTPLQPSLDDFMDISDFFTNSRLPQPPMPSNFPEPPSFSPVVDSLFSSGTLGPEVPPASSAMTHLSGHSRLQARNSCPGPLDSSAFLSSDFLLPEDPKPRLPPPPVPPPLLHYPPPAKVPGLEPCPPPPFPPMAPPTALLQEEPLFSPRFPFPTVPPAPGVSPLPAPAAFPPTPQSVPSPAPTPFPIELLPLGYSEPAFGPCFSMPRGKPPAPSPRGQKASPPTLAPATASPPTTAGSNNPCLTQLLTAAKPEQALEPPLVSSTLLRSPGSPQETVPEFPCTFLPPTPAPTPPRPPPGPATLAPSRPLLVPKAERLSPPAPSGSERRLSGDLSSMPGPGTLSVRVSPPQPILSRGRPDSNKTENRRITHISAEQKRRFNIKLGFDTLHGLVSTLSAQPSLKVSKATTLQKTAEYILMLQQERAGLQEEAQQLRDEIEELNAAINLCQQQLPATGVPITHQRFDQMRDMFDDYVRTRTLHNWKFWVFSILIRPLFESFNGMVSTASVHTLRQTSLAWLDQYCSLPALRPTVLNSLRQLGTSTSILTDPGRIPEQATRAVTEGTLGKPL

SEQ ID NO: 8759 - protein, 575 aa, Homo sapiens
MAGALAGLAAGLQVPRVAPSPDSDSDTDSEDPSLRRSAGGLLRSQVIHSGHFMVSSPHSDSLPRRRDQEGSVGPSDFGPRSIDPTLTRLFECLSLAYSGKLVSPKWKNFKGLKLLCRDKIRLNNAIWRAWYIQYVKRRKSPVCGFVTPLQGPEADAHRKPEAVVLEGNYWKRRIEVVMREYHKWRIYYKKRLRKPSREDDLLAPKQAEGRWPPPEQWCKQLFSSVVPVLLGDPEEEPGGRQLLDLNCFLSDISDTLFTMTQSGPSPLQLPPEDAYVGNADMIQPDLTPLQPSLDDFMDISDFFTNSRLPQPPMPSNFPEPPSFSPVVDSLFSSGTLGPEVPPASSAMTHLSGHSRLQARNSCPGPLDSSAFLSSDFLLPEDPKPRLPPPPVPPPLLHYPPPAKVPGLEPCPPPPFPPMAPPTALLQEEPLFSPRFPFPTVPPAPGVSPLPAPAAFPPTPQSVPSPAPTPFPIELLPLGYSEPAFGPCFSMPRGKPPAPSPRGQKASPPTLAPATASPPTTAGSNNPCLTQLLTAAKPEQALEPPLVSSTLLRSPGSPAVNGGCQGTSAPCQALGL

SEQ ID NO: 8760 - protein, 831 aa, Homo sapiens
MAGALAGLAAGLQVPRVAPSPDSDSDTDSEDPSLRRSAGGLLRSQVIHSGHFMVSSPHSDSLPRRRDQEGSVGPSDFGPRSIDPTLTRLFECLSLAYSGKLVSPKWKNFKGLKLLCRDKIRLNNAIWRAWYIQYVKRRKSPVCGFVTPLQGPEADAHRKPEAVVLEGNYWKRRIEVVMREYHKWRIYYKKRLRKPSREDDLLAPKQAEGRWPPPEQWCKQLFSSVVPVLLGDPEEEPGGRQLLDLNCFLSDISDTLFTMTQSGPSPLQLPPEDAYVGNADMIQPDLTPLQPSLDDFMDISDFFTNSRLPQPPMPSNFPEPPSFSPVVDSLFSSGTLGPEVPPASSAMTHLSGHSRLQARNSCPGPLDSSAFLSSDFLLPEDPKPRLPPPPVPPPLLHYPPPAKVPGLEPCPPPPFPPMAPPTALLQEEPLFSPRFPFPTVPPAPGVSPLPAPAAFPPTPQSVPSPAPTPFPIELLPLGYSEPAFGPCFSMPRGKPPAPSPRGQKASPPTLAPATASPPTTAGSNNPCLTQLLTAAKPEQALEPPLVSSTLLRSPGSPQETVPEFPCTFLPPTPAPTPPRPPPGPATLAPSRPLLVPKAERLSPPAPSGSERRLSGDLSSMPGPGTLSVRVSPPQPILSRGRPDSNKNRRITHISAEQKRRFNIKLGFDTLHGLVSTLSAQPSLKERAGLQEEAQQLRDEIEELNAAINLCQQQLPATGVPITHQRFDQMRDMFDDYVRTRTLHNWKFWVFSILIRPLFESFNGMVSTASVHTLRQTSLAWLDQYCSLPALRPTVLNSLRQLGTSTSILTDPGRIPEQATRAVTEGTLGKPL

SEQ ID NO: 8761 - protein, 833 aa, Homo sapiens
MAGALAGLAAGLQVPRVAPSPDSDSDTDSEDPSLRRSAGGLLRSQVIHSGHFMVSSPHSDSLPRRRDQEGSVGPSDFGPRSIDPTLTRLFECLSLAYSGKLVSPKWKNFKGLKLLCRDKIRLNNAIWRAWYIQYVKRRKSPVCGFVTPLQGPEADAHRKPEAVVLEGNYWKRRIEVVMREYHKWRIYYKKRLRKPSREDDLLAPKQAEGRWPPPEQWCKQLFSSVVPVLLGDPEEEPGGRQLLDLNCFLSDISDTLFTMTQSGPSPLQLPPEDAYVGNADMIQPDLTPLQPSLDDFMDISDFFTNSRLPQPPMPSNFPEPPSFSPVVDSLFSSGTLGPEVPPASSAMTHLSGHSRLQARNSCPGPLDSSAFLSSDFLLPEDPKPRLPPPPVPPPLLHYPPPAKVPGLEPCPPPPFPPMAPPTALLQEEPLFSPRFPFPTVPPAPGVSPLPAPAAFPPTPQSVPSPAPTPFPIELLPLGYSEPAFGPCFSMPRGKPPAPSPRGQKASPPTLAPATASPPTTAGSNNPCLTQLLTAAKPEQALEPPLVSSTLLRSPGSPQETVPEFPCTFLPPTPAPTPPRPPPGPATLAPSRPLLVPKAERLSPPAPSGSERRLSGDLSSMPGPGTLSVRVSPPQPILSRGRPDSNKTENRRITHISAEQKRRFNIKLGFDTLHGLVSTLSAQPSLKERAGLQEEAQQLRDEIEELNAAINLCQQQLPATGVPITHQRFDQMRDMFDDYVRTRTLHNWKFWVFSILIRPLFESFNGMVSTASVHTLRQTSLAWLDQYCSLPALRPTVLNSLRQLGTSTSILTDPGRIPEQATRAVTEGTLGKPL

SEQ ID NO: 8762 - protein, 850 aa, Homo sapiens
MAGALAGLAAGLQVPRVAPSPDSDSDTDSEDPSLRRSAGGLLRSQVIHSGHFMVSSPHSDSLPRRRDQEGSVGPSDFGPRSIDPTLTRLFECLSLAYSGKLVSPKWKNFKGLKLLCRDKIRLNNAIWRAWYIQYVKRRKSPVCGFVTPLQGPEADAHRKPEAVVLEGNYWKRRIEVVMREYHKWRIYYKKRLRKPSREDDLLAPKQAEGRWPPPEQWCKQLFSSVVPVLLGDPEEEPGGRQLLDLNCFLSDISDTLFTMTQSGPSPLQLPPEDAYVGNADMIQPDLTPLQPSLDDFMDISDFFTNSRLPQPPMPSNFPEPPSFSPVVDSLFSSGTLGPEVPPASSAMTHLSGHSRLQARNSCPGPLDSSAFLSSDFLLPEDPKPRLPPPPVPPPLLHYPPPAKVPGLEPCPPPPFPPMAPPTALLQEEPLFSPRFPFPTVPPAPGVSPLPAPAAFPPTPQSVPSPAPTPFPIELLPLGYSEPAFGPCFSMPRGKPPAPSPRGQKASPPTLAPATASPPTTAGSNNPCLTQLLTAAKPEQALEPPLVSSTLLRSPGSPQETVPEFPCTFLPPTPAPTPPRPPPGPATLAPSRPLLVPKAERLSPPAPSGSERRLSGDLSSMPGPGTLSVRVSPPQPILSRGRPDSNKNRRITHISAEQKRRFNIKLGFDTLHGLVSTLSAQPSLKVSKATTLQKTAEYILMLQQERAGLQEEAQQLRDEIEELNAAINLCQQQLPATGVPITHQRFDQMRDMFDDYVRTRTLHNWKFWVFSILIRPLFESFNGMVSTASVHTLRQTSLAWLDQYCSLPALRPTVLNSLRQLGTSTSILTDPGRIPEQATRAVTEGTLGKPL

SEQ ID NO: 8763 - protein, 235 aa, Homo sapiens
PKWKNFKGLKLLCRDKIRLNNAIWRAWYIQYVKRRKSPVCGFVTPLQGPEADAHRKPEAVVLEGNYWKRRIEVVMREYHKWRIYYKKRVSGGGPGRPQSFPPAAAGYRPPRKIPGKGILTPELAPLGPSIQSRADSATVWPQRLLAASLPRGRLRKPSREDDLLAPKQAEGRWPPPEQWCKQLFSSVVPVLLGDPEEEPGGRQLLDLNCFLSDISDTLFTMTQSGPSPLQLPPED

SEQ ID NO: 8764 - protein, 469 aa, Homo sapiens
MHSFPPLLLLLFWGVVSHSFPATLETQEQDVDLVQKYLEKYYNLKNDGRQVEKRRNSGPVVEKLKQMQEFFGLKVTGKPDAETLKVMKQPRCGVPDVAQFVLTEGNPRWEQTHLTYRIENYTPDLPRADVDHAIEKAFQLWSNVTPLTFTKVSEGQADIMISFVRGDHRDNSPFDGPGGNLAHAFQPGPGIGGDAHFDEDERWTNNFREYNLHRVAAHELGHSLGLSHSTDIGALMYPSYTFSGDVQLAQDDIDGIQAIYGRSQNPVQPIGPQTPKACDSKLTFDAITTIRGEVMFFKDRFYMRTNPFYPEVELNFISVFWPQLPNGLEAAYEFADRDEVRFFKGNKYWAVQGQNVLHGYPKDIYSSFGFPRTVKHIDAALSEENTGKTYFFVANKYWRYDEYKRSMDPGYPKMIAHDFPGIGHKVDAVFMKDGFFYFFHGTRQYKFDPKTKRILTLQKANSWFNCRKN

SEQ ID NO: 8765 - protein, 476 aa, Homo sapiens
MMHLAFLVLLCLPVCSAYPLSGAAKEEDSNKDLAQQYLEKYYNLEKDVKQFRRKDSNLIVKKIQGMQKFLGLEVTGKLDTDTLEVMRKPRCGVPDVGHFSSFPGMPKWRKTHLTYRIVNYTPDLPRDAVDSAIEKALKVWEEVTPLTFSRLYEGEADIMISFAVKEHGDFYSFDGPGHSLAHAYPPGPGLYGDIHFDDDEKWTEDASGTNLFLVAAHELGHSLGLFHSANTEALMYPLYNSFTELAQFRLSQDDVNGIQSLYGPPPASTEEPLVPTKSVPSGSEMPAKCDPALSFDAISTLRGEYLFFKDRYFWRRSHWNPEPEFHLISAFWPSLPSYLDAAYEVNSRDTVFIFKGNEFWAIRGNEVQAGYPRGIHTLGFPPTIRKIDAAVSDKEKKKTYFFAADKYWRFDENSQSMEQGFPRLIADDFPGVEPKVDAVLQAFGFFYFFSGSSQFEFDPNARMVTHILKSNSWLHC

SEQ ID NO: 8766 - protein, 181 aa, Homo sapiens
MMHLAFLVLLCLPVCSAYPLSGAAKEEDSNKDLAQQYLEKYYNLEKDVKQFRRKDSNLIVKKIQGMQKFLGLEVTGKLDTDTLEVMRKPRCGVPDVGHFSSFPGMPKWRKTHLTYRIVNYTPDLPRDAVDSAIEKALKVWEEVTPLTFSRLYEGEADIMISFAVKGHSLAHAYPPGPGLYG

SEQ ID NO: 8767 - protein, 113 aa, Homo sapiens
MAPAAWLRSAAARALLPPMLLLLLQPPPLLARALPPDAHHLHAERRGPQPWHAALPSSPAPAPATQEAPRPASSLRPPRCGVPDPSDGLSARNRQKRFVLSGGRWEKTDLTYR

SEQ ID NO: 8768 - protein, 488 aa, Homo sapiens
MAPAAWLRSAAARALLPPMLLLLLQPPPLLARALPPDAHHLHAERRGPQPWHAALPSSPAPAPATQEAPRPASSLRPPRCGVPDPSDGLSARNRQKRFVLSGGRWEKTDLTYRILRFPWQLVQEQVRQTMAEALKVWSDVTPLTFTEVHEGRADIMIDFARYWHGDDLPFDGPGGILAHAFFPKTHREGDVHFDYDETWTIGDDQGTDLLQVAAHEFGHVLGLQHTTAAKALMSAFYTFRYPLSLSPDDCRGVQHLYGQPWPTVTSRTPALGPQAGIDTNEIAPLEPDAPPDACEASFDAVSTIRGELFFFKAGFVWRLRGGQLQPGYPALASRHWQGLPSPVDAAFEDAQGHIWFFQGAQYWVYDGEKPVLGPAPLTELGLVRFPVHAALVWGPEKNKIYFFRGRDYWRFHPSTRRVDSPVPRRATDWRGVPSEIDAAFQDADGYAYFLRGRLYWKFDPVKVKALEGFPRLVGPDFFGCAEPANTFL

SEQ ID NO: 8769 - protein, 354 aa, Homo sapiens
MAPAAWLRSAAARALLPPMLLLLLQPPPLLARALPPDAHHLHAERRGPQPWHAALPSSPAPAPATQEAPRPASSLRPPRCGVPDPSDGLSARNRQKRILRFPWQLVQEQVRQTMAEALKVWSDVTPLTFTEVHEGRADIMIDFARYWHGDDLPFDGPGGILAHAFFPKTHREGDVHFDYDETWTIGDDQGTDLLQVAAHEFGHVLGLQHTTAAKALMSAFYTFRYPLSLSPDDCRGVQHLYGQPWPTVTSRTPALGPQAGIDTNEIAPLEPDAPPDACEASFDAVSTIRGELFFFKAGFVWRLRGGQLQPGYPALASRHWQGLPSPVDAAFEDAQGHIWFFQGTTGVSTPAPGV

SEQ ID NO: 8770 - protein, 170 aa, Homo sapiens
  VARIANT 1: note = misc_feature - Xaa can be any naturally occurring amino acid
XAHEFGHVLGLQHTTAAKALMSAFYTFRYPLSLSPDDCRGVQHLYGQPWPTVTSRTPALGPQAGIDTNEIAPLEPDAPPDACEASFDAVSTIRGELFFFKAGFVWRLRGGQLQPGYPALASRHWQGLPSPVDAAFEDAQGHIWFFQELGFPSSTGRDESLEHCRCQGLHK

SEQ ID NO: 8771 - protein, 470 aa, Homo sapiens
MKFLLILLLQATASGALPLNSSTSLEKNNVLFGERYLEKFYGLEINKLPVTKMKYSGNLMKEKIQEMQHFLGLKVTGQLDTSTLEMMHAPRCGVPDVHHFREMPGGPVWRKHYITYRINNYTPDMNREDVDYAIRKAFQVWSNVTPLKFSKINTGMADILVVFARGAHGDFHAFDGKGGILAHAFGPGSGIGGDAHFDEDEFWTTHSGGTNLFLTAVHEIGHSLGLGHSSDPKAVMFPTYKYVDINTFRLSADDIRGIQSLYGDPKENQRLPNPDNSEPALCDPNLSFDAVTTVGNKIFFFKDRFFWLKVSERPKTSVNLISSLWPTLPSGIEAAYEIEARNQVFLFKDDKYWLISNLRPEPNYPKSIHSFGFPNFVKKIDAAVFNPRFYRTYFFVDNQYWRYDERRQMMDPGYPKLITKNFQGIGPKIDAVFYSKNKYYYFFQGSNQFEYDFLLQRITKTLKSNSWFGC

SEQ ID NO: 8772 - protein, 471 aa, Homo sapiens
MHPGVLAAFLFLSWTHCRALPLPSGGDEDDLSEEDLQFAERYLRSYYHPTNLAGILKENAASSMTERLREMQSFFGLEVTGKLDDNTLDVMKKPRCGVPDVGEYNVFPRTLKWSKMNLTYRIVNYTPDMTHSEVEKAFKKAFKVWSDVTPLNFTRLHDGIADIMISFGIKEHGDFYPFDGPSGLLAHAFPPGPNYGGDAHFDDDETWTSSSKGYNLFLVAAHEFGHSLGLDHSKDPGALMFPIYTYTGKSHFMLPDDDVQGIQSLYGPGDEDPNPKHPKTPDKCDPSLSLDAITSLRGETMIFKDRFFWRLHPQQVDAELFLTKSFWPELPNRIDAAYEHPSHDLIFIFRGRKFWALNGYDILEGYPKKISELGLPKEVKKISAAVHFEDTGKTLLFSGNQVWRYDDTNHIMDKDYPRLIEEDFPGIGDKVDAVYEKNGYIYFFNGPIQFEYSIWSNRIVRVMPANSILWC

SEQ ID NO: 8773 - protein, 489 aa, Homo sapiens
MHPGVLAAFLFLSWTHCRALPLPSGGDEDDLSEEDLQFAERYLRSYYHPTNLAGILKENAASSMTERLREMQSFFGLEVTGKLDDNTLDVMKKPRCGVPDVGEYNVFPRTLKWSKMNLTYRIVNYTPDMTHSEVEKAFKKAFKVWSDVTPLNFTRLHDGIADIMISFGIKEHGDFYPFDGPSGLLAHAFPPGPNYGGDAHFDDDETWTSSSKGYNLFLVAAHEFGHSLGLDHSKDPGALMFPIYTYTGKSHFMLPDDDVQGIQSLYGPGDEDPNPKHPKTPDKCDPSLSLDAITSLRGETMIFKDRFFWRLHPQQVDAELFLTKSFWPELPNRIDAAYEHPSHDLIFIFRGRKFWALNGYDILEGYPKKISELGLPKEVKKISAAVHFEDTGKTLLFSGNQVWRYDDTNHIMDKDYPRLIEEDFPGIGDKVDAVYEKNESHSVTQAGVHCRNLSSLQPPPPGFKRFSCLSLWSSWDYRLYLFFQRTHTV

SEQ ID NO: 8774 - protein, 383 aa, Homo sapiens [sequence omitted]

SEQ ID NO: 8775 - protein, 194 aa, Homo sapiens
MRESLLFLRLPSSPALSRRRALRWALRPPRVAQAFSGRVCGQAWLQQYGYLPPGDLRTHTQRSPQSLSAAIAAMQKFYGLQVTGKADADTMKAMRRPRCGVPDKFGAEIKANVRRKRYAIQGLKWQHNEITFCIQNYTPKVGEYATYEAIRKAFRVWESATPLRFREVPYAYIREGHEKQADIMIFFAEGFHGD

SEQ ID NO: 8776 - protein, 582 aa, Homo sapiens
MSPAPRPPRCLLLPLLTLGTALASLGSAQSSSFSPEAWLQQYGYLPPGDLRTHTQRSPQSLSAAIAAMQKFYGLQVTGKADADTMKAMRRPRCGVPDKFGAEIKANVRRKRYAIQGLKWQHNEITFCIQNYTPKVGEYATYEAIRKAFRVWESATPLRFREVPYAYIREGHEKQADIMIFFAEGFHGDSTPFDGEGGFLAHAYFPGPNIGGDTHFDSAEPWTVRNEDLNGNDIFLVAVHELGHALGLEHSSDPSAIMAPFYQWMDTENFVLPDDDRRGIQQLYGGESGFPTKMPPQPRTTSRPSVPDKPKNPTYGPNICDGNFDTVAMLRGEMFVFKERWFWRVRNNQVMDGYPMPIGQFWRGLPASINTAYERKDGKFVFFKGDKHWVFDEASLEPGYPKHIKELGRGLPTDKIDAALFWMPNGKTYFFRGNKYYRFNEELRAVDSEYPKNIKVWEGIPESPRGSFMGSDEVFTYFYKGNKYWKFNNQKLKVEPGYPKSALRDWMGCPSGGRPDEGTEEETEVIIIEVDEEGGGAVSAAAVVLPVLLLLLVLAVGLAVFFFRRHGTPRRLLYCQRSLLDKV

SEQ ID NO: 8777 - protein, 71 aa, Homo sapiens
MSPAPRPPRCLLLPLLTLGTALASLGSAQSSSFSPESLEELYNWGELPLPRFPWALLSALEPPDKHLDSAQ

SEQ ID NO: 8778 - protein, 143 aa, Homo sapiens
MDPGYPAQSPLWRGVPSTLDDAMRWSDGASYFFRGQEYWKVLDGELEVAPGYPQSTARDWLVCGDSQADGSVAAGVDAAEGPRAPPGQHDQSRSEDGYEVCSCTSGASSPPGAPGPLVAATMLLLLPPLSPGALWTAAQALTL

SEQ ID NO: 8779 - protein, 118 aa, Homo sapiens
MHRFWRGLPLHLDSVDAVYERTSDHKIVFFKGDRYWVFKDNNVEEGYPRPVSDFSLPPGGIDAAFSWAHNDRTYFFKDQLYWRYDDHTRHMDPGYPAQSPLWRGVPSTLDDAMRWSDG

SEQ ID NO: 8780 - protein, 39 aa, Homo sapiens
MHRFWRGLPLHLDSVDAVYERTSDHKIVFFKGPAVLALR

SEQ ID NO: 8781 - protein, 169 aa, Homo sapiens
MKTPRCSLPDLPVLTQARRRRQAPAPTKWNKRNLSWRVRTFPRDSPLGHDTVRALMYYALKVWSDIAPLNFHEVAGSAADIQIDFSKADHNDGYPFDGPGGTVAHAFFPGHHHTAGDTHFDDDEAWTFRSSDAHGMDLFAVAVHEFGHAIGLSHVAAAHSIMRPYYQGP

SEQ ID NO: 8782 - protein, 115 aa, Homo sapiens
MQQFGGLEATGILDEATLALMKTPRCSLPDLPVLTQARRRRQAPAPTKWNKRNLSWRVRTFPRDSPLGHDTVRALMYYALKVWSDIAPLNFHEVAGSAADIQIDFSKADHNDGYP

SEQ ID NO: 8783 - protein, 519 aa, Homo sapiens
MQQFGGLEATGILDEATLALMKTPRCSLPDLPVLTQARRRRQAPAPTKWNKRNLSWRVRTFPRDSPLGHDTVRALMYYALKVWSDIAPLNFHEVAGSAADIQIDFSKADHNDGYPFDGPGGTVAHAFFPGHHHTAGDTHFDDDEAWTFRSSDAHGMDLFAVAVHEFGHAIGLSHVAAAHSIMRPYYQGPVGDPLRYGLPYEDKVRVWQLYGVRESVSPTAQPEEPPLLPEPPDNRSSAPPRKDVPHRCSTHFDAVAQIRGEAFFFKGKYFWRLTRDRHLVSLQPAQMHRFWRGLPLHLDSVDAVYERTSDHKIVFFKGDRYWVFKDNNVEEGYPRPVSDFSLPPGGIDAAFSWAHNDRTYFFKDQLYWRYDDHTRHMDPGYPAQSPLWRGVPSTLDDAMRWSDGASYFFRGQEYWKVLDGELEVAPGYPQSTARDWLVCGDSQADGSVAAGVDAAEGPRAPPGQHDQSRSEDGYEVCSCTSGASSPPGAPGPLVAATMLLLLPPLSPGALWTAAQALTL

SEQ ID NO: 8784 - protein, 603 aa, Homo sapiens
MRRRAARGPGPPPPGPGLSRLPLPLLLLLALGTRGGCAAPAPAPRAEDLSLGVEWLSRFGYLPPADPTTGQLQTQEELSKAITAMQQFGGLEATGILDEATLALMKTPRCSLPDLPVLTQARRRRQAPAPTKWNKRNLSWRVRTFPRDSPLGHDTVRALMYYALKVWSDIAPLNFHEVAGSAADIQIDFSKADHNDGYPFDGPGGTVAHAFFPGHHHTAGDTHFDDDEAWTFRSSDAHGMDLFAVAVHEFGHAIGLSHVAAAHSIMRPYYQGPVGDPLRYGLPYEDKVRVWQLYGVRESVSPTAQPEEPPLLPEPPDNRSSAPPRKDVPHRCSTHFDAVAQIRGEAFFFKGKYFWRLTRDRHLVSLQPAQMHRFWRGLPLHLDSVDAVYERTSDHKIVFFKGDRYWVFKDNNVEEGYPRPVSDFSLPPGGIDAAFSWAHNDRTYFFKDQLYWRYDDHTRHMDPGYPAQSPLWRGVPSTLDDAMRWSDGASYFFRGQEYWKVLDGELEVAPGYPQSTARDWLVCGDSQADGSVAAGVDAAEGPRAPPGQHDQSRSEDGYEVCSCTSGASSPPGAPGPLVAATMLLLLPPLSPGALWTAAQALTL

SEQ ID NO: 8785 - protein, 302 aa, Homo sapiens
MYYALKVWSDIAPLNFHEVAGSAADIQIDFSKADHNDGYPFDGPGGTVAHAFFPGHHHTAGDTHFDDDEAWTFRSSDAHGMDLFAVAVHEFGHAIGLSHVAAAHSIMRPYYQGPVGDPLRYGLPYEDKVRVWQLYGVRESVSPTAQPEEPPLLPEPPDNRSSAPPRKDVPHRCSTHFDAVAQIRGEAFFFKGKYFWRLTRDRHLVSLQPAQMHRFWRGLPLHLDSVDAVYERTSDHKIVFFKGDRYWVFKDNNVEEGYPRPVSDFSLPPGGIDAAFSWAHNDRTYFFKDQLYWRYDDHTRHM

SEQ ID NO: 8786 - protein, 485 aa, Homo sapiens
MNCQQLWLGFLLPMTVSGRVLGLAEVAPVDYLSQYGYLQKPLEGSNNFKPEDITEALRAFQEASELPVSGQLDDATRARMRQPRCGLEDPFNQKTLKYLLLARAALRQAFQDWSNVAPLTFQEVQAGAADIRLSFHGRQSSYCSNTFDGPGRVLAHADIPELGSVHFDEDEFWTEGTYRGVNLRIIAAHEVGHALGLGHSRYSQALMAPVYEGYRPHFKLHPDDVAGIQALYGKKSPVIRDEEEEETELPTVPPVPTEPSPMPDPCSSELDAMMLGPRGKTYAFKGDYVWTVSDSGPGPLFRVSALWEGLPGNLDAAVYSPRTQWIHFFKGDKVWRYINFKMSPGFPKKLNRVEPNLDAALYWPLNQKVFLFKGSGYWQWDELARTDFSSYPKPIKGLFTGVPNQPSAAMSWQDGRVYFFKGKVYWRLNQQLRVEKGYPRNISHNWMHCRPRTIDTTPSGGNTTPSGTGITLDTTLSATETTFEY

SEQ ID NO: 8787 - protein, 305 aa, Homo sapiens
MNCQQLWLGFLLPMTVSGRVLGLAEVAPVDYLSQYGYLQKPLEGSNNFKPEDITEALRAFQEASELPVSGQLDDATRARMRQPRCGLEDPFNQKTLKYLLLGRWRKKHLTFRILNLPSTLPPHTARAALRQAFQDWSNVAPLTFQEVQAGAADIRLSFHGRQSSYCSNTFDGPGKKSPVIRDEEEEETELPTVPPVPTEPSPMPDPCSSELDAMMLGEAPPLQAVGRRWGQPADPEAWTNGSDMGLQHEQWRAPWEDLCFQGGLCVDCIRFRTGPLVPSVCPLGGAPRKPGCCCLLASNTMDSLL

SEQ ID NO: 8788 - protein, 508 aa, Homo sapiens
MNCQQLWLGFLLPMTVSGRVLGLAEVAPVDYLSQYGYLQKPLEGSNNFKPEDITEALRAFQEASELPVSGQLDDATRARMRQPRCGLEDPFNQKTLKYLLLGRWRKKHLTFRILNLPSTLPPHTARAALRQAFQDWSNVAPLTFQEVQAGAADIRLSFHGRQSSYCSNTFDGPGRVLAHADIPELGSVHFDEDEFWTEGTYRGVNLRIIAAHEVGHALGLGHSRYSQALMAPVYEGYRPHFKLHPDDVAGIQALYGKKSPVIRDEEEEETELPTVPPVPTEPSPMPDPCSSELDAMMLGPRGKTYAFKGDYVWTVSDSGPGPLFRVSALWEGLPGNLDAAVYSPRTQWIHFFKGDKVWRYINFKMSPGFPKKLNRVEPNLDAALYWPLNQKVFLFKGSGYWQWDELARTDFSSYPKPIKGLFTGVPNQPSAAMSWQDGRVYFFKGKVYWRLNQQLRVEKGYPRNISHNWMHCRPRTIDTTPSGGNTTPSGTGITLDTTLSATETTFEY

SEQ ID NO: 8789 - protein, 81 aa, Homo sapiens
MNCQQLWLGFLLPMTVSGRVLGLAEVAPVDYLSQYGYLQKPLEGSNNFKPEDITEALRESPGPCRHPRAGQCALRRRRVLD

SEQ ID NO: 8790 - protein, 108 aa, Homo sapiens
MNCQQLWLGFLLPMTVSGRVLGLAEVAPVDYLSQYGYLQKPLEGSNNFKPEDITEALRPLEKEAPDFPHLEPALHPSTPHSPGSPASSLPGLEQCGSLDLPRGAGWCG

SEQ ID NO: 8791 - protein, 63 aa, Homo sapiens
MNCQQLWLGFLLPMTVSGRVLGLAEVAPVDYLSQYGYLQKPLEGSNNFKPEDITEALSLRSAG

SEQ ID NO: 8792 - protein, 252 aa, Homo sapiens
GTTEDYDRDKKYGFCPETGYSLFLVAAHEFGHAMGLEHSQDPGALMAPIYTYTKNFRLSQDDIKGIQELYGASPDIDLGTGPTPTLGPVTPEICKQDIVFDGIAQIRGEIFFFKDRFIWRTVTPRDKPMGPLLVATFWPELPEKIDAVYEAPQEEKAVFFAGNEYWIYSASTLERGYPKPLTSLGLPPDVQRVDAAFNWSKNKKTYIFAGDKFWRYNEVKKKMDPGFPKLIADAWNAIPDNLDAVVDLQGGG

SEQ ID NO: 8793 - protein, 660 aa, Homo sapiens
MEALMARGALTGPLRALCLLGCLLSHAAAAPSPIIKFPGDVAPKTDKELAVQYLNTFYGCPKESCNLFVLKDTLKKMQKFFGLPQTGDLDQNTIETMRKPRCGNPDVANYNFFPRKPKWDKNQITYRIIGYTPDLDPETVDDAFARAFQVWSDVTPLRFSRIHDGEADIMINFGRWEHGDGYPFDGKDGLLAHAFAPGTGVGGDSHFDDDELWTLGEGQVVRVKYGNADGEYCKFPFLFNGKEYNSCTDTGRSDGFLWCSTTYNFEKDGKYGFCPHEALFTMGGNAEGQPCKFPFRFQGTSYDSCTTEGRTDGYRWCGTTEDYDRDKKYGFCPETAMSTVGGNSEGAPCVFPFTFLGNKYESCTSAGRSDGKMWCATTANYDDDRKWGFCPDQGYSLFLVAAHEFGHAMGLEHSQDPGALMAPIYTYTKNFRLSQDDIKGIQELYGASPDIDLGTGPTPTLGPVTPEICKQDIVFDGIAQIRGEIFFFKDRFIWRTVTPRDKPMGPLLVATFWPELPEKIDAVYEAPQEEKAVFFAGNEYWIYSASTLERGYPKPLTSLGLPPDVQRVDAAFNWSKNKKTYIFAGDKFWRYNEVKKKMDPGFPKLIADAWNAIPDNLDAVVDLQGGGHSYFFKGAYYLKLENQSLKSVKFGSIKSDWLGC

SEQ ID NO: 8794 - protein, 118 aa, Homo sapiens
MQKFFGLPQTGDLDQNTIETMRKPRCGNPDVANYNFFPRKPKWDKNQITYRIIGYTPDLDPETVDDAFARAFQVWSDVTPLRFSRIHDGEADIMINFGRWEHGDGYPFDGKDGLLAHA

SEQ ID NO: 8795 - protein, 201 aa, Homo sapiens
MQKFFGLPQTGDLDQNTIETMRKPRCGNPDVANYNFFPRKPKWDKNQITYRIIGYTPDLDPETVDDAFARAFQVWSDVTPLRFSRIHDGEADIMINFGRWEHGDGYPFDGKDGLLAHAFAPGTGVGGDSHFDDDELWTLGEGQVVRVKYGNADGEYCKFPFLFNGKEYNSCTDTGRSDGFLWCSTTYNFEKDGKYGFCPHE

SEQ ID NO: 8796 - protein, 584 aa, Homo sapiens
MQKFFGLPQTGDLDQNTIETMRKPRCGNPDVANYNFFPRKPKWDKNQITYRIIGYTPDLDPETVDDAFARAFQVWSDVTPLRFSRIHDGEADIMINFGRWEHGDGYPFDGKDGLLAHAFAPGTGVGGDSHFDDDELWTLGEGQVVRVKYGNADGEYCKFPFLFNGKEYNSCTDTGRSDGFLWCSTTYNFEKDGKYGFCPHEALFTMGGNAEGQPCKFPFRFQGTSYDSCTTEGRTDGYRWCGTTEDYDRDKKYGFCPETAMSTVGGNSEGAPCVFPFTFLGNKYESCTSAGRSDGKMWCATTANYDDDRKWGFCPDQGYSLFLVAAHEFGHAMGLEHSQDPGALMAPIYTYTKNFRLSQDDIKGIQELYGASPDIDLGTGPTPTLGPVTPEICKQDIVFDGIAQIRGEIFFFKDRFIWRTVTPRDKPMGPLLVATFWPELPEKIDAVYEAPQEEKAVFFAGNEYWIYSASTLERGYPKPLTSLGLPPDVQRVDAAFNWSKNKKTYIFAGDKFWRYNEVKKKMDPGFPKLIADAWNAIPDNLDAVVDLQGGGHSYFFKGAYYLKLENQSLKSVKFGSIKSDWLGC

SEQ ID NO: 8797 - protein, 584 aa, Homo sapiens; identical to SEQ ID NO: 8796

SEQ ID NO: 8798 - protein, 610 aa, Homo sapiens
MQYLNTFYGCPKESCNLFVLKDTLKKMQKFFGLPQTGDLDQNTIETMRKPRCGNPDVANYNFFPRKPKWDKNQITYRIIGYTPDLDPETVDDAFARAFQVWSDVTPLRFSRIHDGEADIMINFGRWEHGDGYPFDGKDGLLAHAFAPGTGVGGDSHFDDDELWTLGEGQVVRVKYGNADGEYCKFPFLFNGKEYNSCTDTGRSDGFLWCSTTYNFEKDGKYGFCPHEALFTMGGNAEGQPCKFPFRFQGTSYDSCTTEGRTDGYRWCGTTEDYDRDKKYGFCPETAMSTVGGNSEGAPCVFPFTFLGNKYESCTSAGRSDGKMWCATTANYDDDRKWGFCPDQGYSLFLVAAHEFGHAMGLEHSQDPGALMAPIYTYTKNFRLSQDDIKGIQELYGASPDIDLGTGPTPTLGPVTPEICKQDIVFDGIAQIRGEIFFFKDRFIWRTVTPRDKPMGPLLVATFWPELPEKIDAVYEAPQEEKAVFFAGNEYWIYSASTLERGYPKPLTSLGLPPDVQRVDAAFNWSKNKKTYIFAGDKFWRYNEVKKKMDPGFPKLIADAWNAIPDNLDAVVDLQGGGHSYFFKGAYYLKLENQSLKSVKFGSIKSDWLGC

SEQ ID NO: 8799 - protein, 22 aa, Homo sapiens
  VARIANT 1: note = misc_feature - Xaa can be any naturally occurring amino acid
XLENQSLKSVKFGSIKSDWLGC

SEQ ID NO: 8800 - protein, 483 aa, Homo sapiens
MKVLPASGLAVFLIMALKFSTAAPSLVAASPRTWRNNYRLAQAYLDKYYTNKEGHQIGEMVARGSNSMIRKIKELQAFFGLQVTGKLDQTTMNVIKKPRCGVPDVANYRLFPGEPKWKKNTLTYRISKYTPSMSSVEVDKAVEMALQAWSSAVPLSFVRINSGEADIMISFENGDHGDSYPFDGPRGTLAHAFAPGEGLGGDTHFDNAEKWTMGTNGFNLFTVAAHEFGHALGLAHSTDPSALMYPTYKYKNPYGFHLPKDDVKGIQALYGPRKVFLGKPTLPHAPHHKPSIPDLCDSSSSFDAVTMLGKELLLFKDRIFWRRQVHLRTGIRPSTITSSFPQLMSNVDAAYEVAERGTAYFFKGPHYWITRGFQMQGPPRTIYDFGFPRHVQQIDAAVYLREPQKTLFFVGDEYYSYDERKRKMEKDYPKNTEEEFSGVNGQIDAAVELNGYIYFFSGPKTYKYDTEKEDVVSVVKSSSWIGC

SEQ ID NO: 8801 - protein, 569 aa, Homo sapiens
MLAASIFRPTLLLCWLAAPWPTQPESLFHSRDRSDLEPSPLRQAKPIADLHAAQRFLSRYGWSGVWAAWGPSPEGPPETPKGAALAEAVRRFQRANALPASGELDAATLAAMNRPRCGVPDMRPPPPSAPPSPPGPPPRARSRRSPRAPLSLSRRGWQPRGYPDGGAAQAFSKRTLSWRLLGEALSSQLSVADQRRIVALAFRMWSEVTPLDFREDLAAPGAAVDIKLGFGRGRHLGCPRAFDGSGQEFAHAWRLGDIHFDDDEHFTPPTSDTGISLLKVAVHEIGHVLGLPHTYRTGSIMQPNYIPQEPAFELDWSDRKAIQKLYGSCEGSFDTAFDWIRKERNQYGEVMVRFSTYFFRNSWYWLYENRNNRTRYGDPIQILTGWPGIPTHNIDAFVHIWTWKRDERYFFQGNQYWRYDSDKDQALTEDEQGKSYPKLISEGFPGIPSPLDTAFYDRRQKLIYFFKESLVFAFDVNRNRVLNSYPKRITEVFPAVIPQNHPFRNIDSAYYSYAYNSIFFFKGNAYWKVVNDKDKQQNSWLPANGLFPKKFISEKWFDVCDVHISTLNM

SEQ ID NO: 8802 - protein, 183 aa, Homo sapiens
MDPGTVATMRKPRCSLPDVLGVAGLVRRRRRYALSGSVWKKRTLTWRVRSFPQSSQLSQETVRVLMSYALMAWGMESGLTFHEVDSPQGQEPDILIDFARAFHQDSYPFDGLGGTLAHAFFPGEHPISGDTHFDDEETWTFGSKASQQLEQELAGGSPVDEELGFSRGWRVNPLGPGSPERLS

SEQ ID NO: 8803 - protein, 562 aa, Homo sapiens
MRLRLRLLALLLLLLAPPARAPKPSAQDVSLGVDWLTRYGYLPPPHPAQAQLQSPEKLRDAIKVMQRFAGLPETGRMDPGTVATMRKPRCSLPDVLGVAGLVRRRRRYALSGSVWKKRTLTWRVRSFPQSSQLSQETVRVLMSYALMAWGMESGLTFHEVDSPQGQEPDILIDFARAFHQDSYPFDGLGGTLAHAFFPGEHPISGDTHFDDEETWTFGSKDGEGTDLFAVAVHEFGHALGLGHSSAPNSIMRPFYQGPVGDPDKYRLSQDDRDGLQQLYGKAPQTPYDKPTRKPLAPPPQPPASPTHSPSFPIPDRCEGNFDAIANIRGETFFFKGPWFWRLQPSGQLVSPRPARLHRFWEGLPAQVRVVQAAYARHRDGRILLFSGPQFWVFQDRQLEGGARPLTELGLPPGEEVDAVFSWPQNGKTYLVRGRQYWRYDEAAARPDPGYPRDLSLWEGAPPSPDDVTVSNAGDTYFFKGAHYWRFPKNSIKTEPDAPQPMGPNWLDCPAPSSGPRAPRPPKATPVSETCDCQCELNQAAGRWPAPIPLLLLPLLVGGVASR

SEQ ID NO: 8804 - protein, 261 aa, Homo sapiens
MQLVILRVTIFLPWCFAVPVPPAADHKGWDFVEGYFHQFFLTKKESPLLTQETQTQLLQQFHRNGTDLLDMQMHALLHQPHCGVPDGSDTSISPGRCKWNKHTLTYRIINYPHDMKPSAVKDSIYNAVSIWSNVTPLIFQQVQNGDADIKVSFWQWAHEDGWPFDGPGGILGHAFLPNSGNPGVVHFDKNEHWSASDTGYNLFLVATHEIGHSLGLQHSGNQSSIMYPTYWYHDPRTFQLSADDIQRIQHLYGEKCSSDIP

SEQ ID NO: 8805 - protein, 261 aa, Homo sapiens; identical to SEQ ID NO: 8804

SEQ ID NO: 8806 - protein, 513 aa, Homo sapiens
MKRLLLLFLFFITFSSAFPLVRMTENEENMQLAQAYLNQFYSLEIEGNHLVQSKNRSLIDDKIREMQAFFGLTVTGKLDSNTLEIMKTPRCGVPDVGQYGYTLPGWRKYNLTYRIINYTPDMARAAVDEAIQEGLEVWSKVTPLKFTKISKGIADIMIAFRTRVHGRCPRYFDGPLGVLGHAFPPGPGLGGDTHFDEDENWTKDGAGFNLFLVAAHEFGHALGLSHSNDQTALMFPNYVSLDPRKYPLSQDDINGIQSIYGGLPKEPAKPKEPTIPHACDPDLTFDAITTFRREVMFFKGRHLWRIYYDITDVEFELIASFWPSLPADLQAAYENPRDKILVFKDENFWMIRGYAVLPDYPKSIHTLGFPGRVKKIDAAVCDKTTRKTYFFVGIWCWRFDEMTQTMDKGFPQRVVKHFPGISIRVDAAFQYKGFFFFSRGSKQFEYDIKTKNITRIMRTNTWFQCKEPKNSSFGFDINKEKAHSGGIKILYHKSLSLFIFGIVHLLKNTSIYQ

SEQ ID NO: 8807 - protein, 89 aa, Homo sapiens
DFETWDSYSPQGRRPETQGPKYCHSSFDAITVDRQQQLYIFKGSHFWEVAADGNVSEPRPLQERWVGLPPNIEAAAVSLNDGDFYFFKA

SEQ ID NO: 8808 - protein, 189 aa, Homo sapiens
KYGYLNEQVPKAPTSTRFSDAIRAFQWVSQLPVSGVLDRATLRQMTRPRCGVTDTNSYAAWAERISDLFARHRTKMRRKKRFAKQGGALAHAFLPRRGEAHFDQDERWSLSRRRGRNLFVVLAHEIGHTLGLTHSPAPRALMAPYYKRLGRDALLSWDDVLAVQSLYGKPLGGSVAVQLPGKLFTDFET

SEQ ID NO: 8809 - protein, 130 aa, Homo sapiens
MVARVGLLLRALQLLLWGHLDAQPAERGGQELRKEAEAFLEKYGYLNEQVPKAPTSTRFSDAIRAFQWVSQLPVSGVLDRATLRQMTRPRCGVTDTNSYAAWAERISDLFARHRTKMRRKKRFAKQGEHC

SEQ ID NO: 8810 - protein, 510 aa, Homo sapiens
MVARVGLLLRALQLLLWGHLDAQPAERGGQELRKEAEAFLEKYGYLNEQVPKAPTSTRFSDAIRAFQWVSQLPVSGVLDRATLRQMTRPRCGVTDTNSYAAWAERISDLFARHRTKMRRKKRFAKQGNKWYKQHLSYRLVNWPEHLPEPAVRGAVRAAFQLWSNVSALEFWEAPATGPADIRLTFFQGDHNDGLGNAFDGPGGALAHAFLPRRGEAHFDQDERWSLSRRRGRNLFVVLAHEIGHTLGLTHSPAPRALMAPYYKRLGRDALLSWDDVLAVQSLYGKPLGGSVAVQLPGKLFTDFETWDSYSPQGRRPETQGPKYCHSSFDAITVGSHFWEVAADGNVSEPRPLQERWVGLPPNIEAAAVSLNDGDFYFFKGGRCWRFRGPKPVWGLPQLCRAGGLPRHPDAALFFPPLRRLILFKGARYYVLARGGLQVEPYYPRSLQDWGGIPEEVSGALPRPDGSIIFFRDDRYWRLDQAKLQATTSGRWATELPWMGCWHANSGSALF

SEQ ID NO: 8811 - protein, 393 aa, Homo sapiens
MVARVGLLLRALQLLLWGHLDAQPAERGGQELRKEAEAFLEKYGYLNEQVPKAPTSTRFSDAIRAFQWVSQLPVSGVLDRATLRQMTRPRCGVTDTNSYAAWAERISDLFARHRTKMRRKKRFAKQGNKWYKQHLSYRLVNWPEHLPEPAVRGAVRAAFQLWSNVSALEFWEAPATGPADIRLTFFQGDHNDGLGNAFDGPGGALAHAFLPRRGEAHFDQDERWSLSRRRGRNLFVVLAHEIGHTLGLTHSPAPRALMAPYYKRLGRDALLSWDDVLAVQSLYGKPLGGSVAVQLPGKLFTDFETWDSYSPQGRRPETQGPKYCHSSFDAITVDRQQQLYIFKGSHFWEVAADGNVSEPRPLQERWVGLPPNIEAAAVSLNDGDFYFFKVQSV

SEQ ID NO: 8812 - protein, 520 aa, Homo sapiens
MVARVGLLLRALQLLLWGHLDAQPAERGGQELRKEAEAFLEKYGYLNEQVPKAPTSTRFSDAIRAFQWVSQLPVSGVLDRATLRQMTRPRCGVTDTNSYAAWAERISDLFARHRTKMRRKKRFAKQGNKWYKQHLSYRLVNWPEHLPEPAVRGAVRAAFQLWSNVSALEFWEAPATGPADIRLTFFQGDHNDGLGNAFDGPGGALAHAFLPRRGEAHFDQDERWSLSRRRGRNLFVVLAHEIGHTLGLTHSPAPRALMAPYYKRLGRDALLSWDDVLAVQSLYGKPLGGSVAVQLPGKLFTDFETWDSYSPQGRRPETQGPKYCHSSFDAITVDRQQQLYIFKGSHFWEVAADGNVSEPRPLQERWVGLPPNIEAAAVSLNDGDFYFFKGGRCWRFRGPKPVWGLPQLCRAGGLPRHPDAALFFPPLRRLILFKGARYYVLARGGLQVEPYYPRSLQDWGGIPEEVSGALPRPDGSIIFFRDDRYWRLDQAKLQATTSGRWATELPWMGCWHANSGSALF

SEQ ID NO: 8813 - protein, 42 aa, Homo sapiens
MKSLPILLLLCVAVCSAYPLDGAAREISRKLLRPQKRCETVC

SEQ ID NO: 8814 - protein, 477 aa, Homo sapiens
MKSLPILLLLCVAVCSAYPLDGAARGEDTSMNLVQKYLENYYDLKKDVKQFVRRKDSGPVVKKIREMQKFLGLEVTGKLDSDTLEVMRKPRCGVPDVGHFRTFPGIPKWRKTHLTYRIVNYTPDLPKDAVDSAVEKALKVWEEVTPLTFSRLYEGEADIMISFAVREHGDFYPFDGPGNVLAHAYAPGPGINGDAHFDDDEQWTKDTTGTNLFLVAAHEIGHSLGLFHSANTEALMYPLYHSLTDLTRFRLSQDDINGIQSLYGPPPDSPETPLVPTEPVPPEPGTPANCDPALSFDAVSTLRGEILIFKDRHFWRKSLRKLEPELHLISSFWPSLPSGVDAAYEVTSKDLVFIFKGNQFWAIRGNEVRAGYPRGIHTLGFPPTVRKIDAAISDKEKNKTYFFVEDKYWRFDEKRNSMEPGFPKQIAEDFPGIDSKIDAVFEEFGFFYFFTGSSQLEFDPNAKKVTHTLKSNSWLNC

SEQ ID NO: 8815 - protein, 99 aa, Homo sapiens
  VARIANT 1: note = misc_feature - Xaa can be any naturally occurring amino acid
XNQFWAIRGNEVRAGYPRGIHTLGFPPTVRKIDAAISDKEKNKTYFFVEDKYWRFDEKRNSMEPGFPKQIAEDFPGIDSKIDAVFEEFDRAGTECCLHS

SEQ ID NO: 8816 - protein, 267 aa, Homo sapiens
MRLTVLCAVCLLPGSLALPLPQEAGGMSELQWEQAQDYLKRFYLYDSETKNANSLEAKLKEMQKFFGLPITGMLNSRVIEIMQKPRCGVPDVAEYSLFPNSPKWTSKVVTYRIVSYTRDLPHITVDRLVSKALNMWGKEIPLHFRKVVWGTADIMIGFARGAHGDSYPFDGPGNTLAHAFAPGTGLGGDAHFDEDERWTDGSSLGINFLYAATHELGHSLGMGHSSDPNAVMYPTYGNGDPQNFKLSQDDIKGIQKLYGKRSNSRKK

SEQ ID NO: 8817 - protein, 467 aa, Homo sapiens [sequence omitted]

SEQ ID NO: 8818 - protein, 56 aa, Homo sapiens
MFSLKTLPFLLLLHVQISKAFPVSSKEKNTKTVQHKAISEANQMQPPDLGLPSLQN

SEQ ID NO: 8819 - protein, 56 aa, Homo sapiens; identical to SEQ ID NO: 8818

SEQ ID NO: 8820 - protein, 36 aa, Homo sapiens
MFSLKTLPFLLLLHVQISKAFPVSSKEKNTKTVQNK

SEQ ID NO: 8821 - protein, 43 aa, Homo sapiens
MFSLKTLPFLLLLHVQISKAFPVSSKEKNTKTVQRQKYLKSDK

SEQ ID NO: 8822 - protein, 344 aa, Homo sapiens
  VARIANT 1: note = misc_feature - Xaa can be any naturally occurring amino acid
XKEKNTKTVQDYLEKFYQLPSNQYQSTRKNGTNVIVEKLKEMQRFFGLNVTGKPNEETLDMMKKPRCGVPDSGGFMLTPGNPKWERTNLTYRIRNYTPQLSEAEVERAIKDAFELWSVASPLIFTRISQGEADINIAFYQRDHGDNSPFDGPNGILAHAFQPGQGIGGDAHFDAEETWTNTSANYNLFLVAAHEFGHSLGLAHSSDPGALMYPNYAFRETSNYSLPQDDIDGIQAIYGLSSNPIQPTGPSTPKPCDPSLTFDAITTLRGEILFFKDRYFWRRHPQLQRVEMNFISLFWPSLPTGIQAAYEDFDRDLIFLFKDMITKDNSWSQVIPKAYQVPFQE

SEQ ID NO: 8823 - protein, 707 aa, Homo sapiens
MSLWQPLVLVLLVLGCCFAAPRQRQSTLVLFPGDLRTNLTDRQLAEEYLYRYGYTRVAEMRGESKSLGPALLLLQKQLSLPETGELDSATLKAMRTPRCGVPDLGRFQTFEGDLKWHHHNITYWIQNYSEDLPRAVIDDAFARAFALWSAVTPLTFTRVYSRDADIVIQFGVAEHGDGYPFDGKDGLLAHAFPPGPGIQGDAHFDDDELWSLGKGVVVPTRFGNADGAACHFPFIFEGRSYSACTTDGRSDGLPWCSTTANYDTDDRFGFCPSERLYTQDGNADGKPCQFPFIFQGQSYSACTTDGRSDGYRWCATTANYDRDKLFGFCPTRADSTVMGGNSAGELCVFPFTFLGKEYSTCTSEGRGDGRLWCATTSNFDSDKKWGFCPDQGYSLFLVAAHEFGHALGLDHSSVPEALMYPMYRFTEGPPLHKDDVNGIRHLYGPRPEPEPRPPTTTTPQPTAPPTVCPTGPPTVHPSERPTAGPTGPPSAGPTGPPTAGPSTATTVPLSPVDDACNVNIFDAIAEIGNQLYLFKDGKYWRFSEGRGSRPQGPFLIADKWPALPRKLDSVFEERLSKKLFFFSGRQVWVYTGASVLGPRRLDKLGLGADVAQVTGALRSGRGKMLLFSGRRLWRFDVKAQMVDPRSASEVDRMFPGVPLDTHDVFQYREKAYFCQDRFYWRVSSRSELNQVDQVGYVTYDILQCPED

SEQ ID NO: 8824 - protein, 1228 aa, Homo sapiens
MKGARLFVLLSSLWSGGIGLNNSKHSWTIPEDGNSQKTMPSASVPPNKIQSLQILPTTRVMSAEIATTPEARTSEDSLLKSTLPPSETSAPAEGVRNQTLTSTEKAEGVVKLQNLTLPTNASIKFNPGAESVVLSNSTLKFLQSFARKSNEQATSLNTVGGTGGIGGVGGTGGVGNRAPRETYLSRGDSSSSQRTDYQKSNFETTRGKNWCAYVHTRLSPTVILDNQVTYVPGGKGPCGWTGGSCPQRSQKISNPVYRMQHKIVTSLDWRCCPGYSGPKCQLRAQEQQSLIHTNQAESHTAVGRGVAEQQQQQGCGDPEVMQKMTDQVNYQAMKLTLLQKKIDNISLTVNDVRNTYSSLEGKVSEDKSREFQSLLKGLKSKSINVLIRDIVREQFKIFQNDMQETVAQLFKTVSSLSEDLESTRQIIQKVNESVVSIAAQQKFVLVQENRPTLTDIVELRNHIVNVRQEMTLTCEKPIKELEVKQTHLEGALEQEHSRSILYYESLNKTLSKLKEVHEQLLSTEQVSDQKNAPAAESVSNNVTEYMSTLHENIKKQSLMMLQMFEDLHIQESKINNLTVSLEMEKESLRGECEDMLSKCRNDFKFQLKDTEENLHVLNQTLAEVLFPMDNKMDKMSEQLNDLTYDMEILQPLLEQGASLRQTMTYEQPKEAIVIRKKIENLTSAVNSLNFIIKELTKRHNLLRNEVQGRDDALERRINEYALEMEDGLNKTMTIINNAIDFIQDNYALKETLSTIKDNSEIHHKCTSDMETILTFIPQFHRLNDSIQTLVNDNQRYNFVLQVAKTLAGIPRDEKLNQSNFQKMYQMFNETTSQVRKYQQNMSHLEEKLLLTTKISKNFETRLQDIESKVTQTLIPYYISVKKGSVVTNERDQALQLQVLNSRFKALEAKSIHLSINFFSLNKTLHEVLTMCHNASTSVSELNATIPKWIKHSLPDIQLLQKGLTEFVEPIIQIKTQAALSNLTCCIDRSLPGSLANVVKSQKQVKSLPKKINALKKPTVNLTTVLIGRTQRNTDNIIYPEEYSSCSRHPCQNGGTCINGRTSFTCACRHPFTGDNCTIKLVEENALAPDFSKGSYRYAPMVAFFASHTYGMTIPGPILFNNLDVNYGASYTPRTGKFRIPYLGVYVFKYTIESFSAHISGFLVVDGIDKLAFESENINSEIHCDRVLTGDALLELNYGQEVWLRLAKGTIPAKFPPVTTFSGYLLYRT

SEQ ID NO: 8825 - protein, 1228 aa, Homo sapiens; identical to SEQ ID NO: 8824

SEQ ID NO: 8826 - protein, 970 aa, Homo sapiens
MQHKIVTSLDWRCCPGYSGPKCQLRAQEQQSLIHTNQAESHTAVGRGVAEQQQQQGCGDPEVMQKMTDQVNYQAMKLTLLQKKIDNISLTVNDVRNTYSSLEGKVSEDKSREFQSLLKGLKSKSINVLIRDIVREQFKIFQNDMQETVAQLFKTVSSLSEDLESTRQIIQKVNESVVSIAAQQKFVLVQENRPTLTDIVELRNHIVNVRQEMTLTCEKPIKELEVKQTHLEGALEQEHSRSILYYESLNKTLSKLKEVHEQLLSTEQVSDQKNAPAAESVSNNVTEYMSTLHENIKKQSLMMLQMFEDLHIQESKINNLTVSLEMEKESLRGECEDMLSKCRNDFKFQLKDTEENLHVLNQTLAEVLFPMDNKMDKMSEQLNDLTYDMEILQPLLEQGASLRQTMTYEQPKEAIVIRKKIENLTSAVNSLNFIIKELTKRHNLLRNEVQGRDDALERRINEYALEMEDGLNKTMTIINNAIDFIQDNYALKETLSTIKDNSEIHHKCTSDMETILTFIPQFHRLNDSIQTLVNDNQRYNFVLQVAKTLAGIPRDEKLNQSNFQKMYQMFNETTSQVRKYQQNMSHLEEKLLLTTKISKNFETRLQDIESKVTQTLIPYYISVKKGSVVTNERDQALQLQVLNSRFKALEAKSIHLSINFFSLNKTLHEVLTMCHNASTSVSELNATIPKWIKHSLPDIQLLQKGLTEFVEPIIQIKTQAALSNLTCCIDRSLPGSLANVVKSQKQVKSLPKKINALKKPTVNLTTVLIGRTQRNTDNIIYPEEYSSCSRHPCQNGGTCINGRTSFTCACRHPFTGDNCTIKLVEENALAPDFSKGSYRYAPMVAFFASHTYGMTIPGPILFNNLDVNYGASYTPRTGKFRIPYLGVYVFKYTIESFSAHISGFLVVDGIDKLAFESENINSEIHCDRVLTGDALLELNYGQEVWLRLAKGTIPAKFPPVTTFSGYLLYRT

SEQ ID NO: 8827 - protein, 204 aa, Homo sapiens
MAHKPVYQVKQKVLTSLAWRCCPGYTGPNCEHHDSMAIPEPADPGDSHQEPQDGPVSFKPGHLAAVINEVEVQQEQQEHLLGDLQNDVHRVADSLPGLWKALPGNLTAAVMEANQTGHEFPDRSLEQVLLPHVDTFLQVHFSPIWRSFNQSLHSLTQAIRNLSLDVEANRQAISRVQDSAVARADFQELGAKFEAKVQENTQRV

SEQ ID NO: 8828 - protein, 295 aa, Homo sapiens
MGTSASWAGGMGIKGQPEAAKSWRKPKQSNWCPYPMSKLVTLLALCKTEKFLIHSQQPCPQGAPDCQKVKVMYRMAHKPVYQVKQKVLTSLAWRCCPGYTGPNCEHHDSMAIPEPADPGDSHQEPQDGPVSFKPGHLAAVINEVEVQQEQQEHLLGDLQNDVHRVADSLPGLWKALPGNLTAAVMEANQTGHEFPDRSLEQVLLPHVDTFLQVHFSPIWRSFNQSLHSLTQAIRNLSLDVEANRQAISRVQDSAVARADFQELGAKFEAKVQENTQRVGQLRQDVEDRLHAQHFT

SEQ ID NO: 8829 - protein, 109 aa, Homo sapiens
MILSLLFSLGGPLGWGLLGAWAQASSTSLSDLQSSRTPGVWKAEAEDTGKDPVGRIMDSRIPALLRQEARTGGSALAPPVDLGVAQQPSPLACFPVTGAPTQCPSWSPY

SEQ ID NO: 8830 - protein, 949 aa, Homo sapiens
MILSLLFSLGGPLGWGLLGAWAQASSTSLSDLQSSRTPGVWKAEAEDTGKDPVGRNWCPYPMSKLVTLLALCKTEKFLIHSQQPCPQGAPDCQKVKVMYRMAHKPVYQVKQKVLTSLAWRCCPGYTGPNCEHHDSMAIPEPADPGDSHQEPQDGPVSFKPGHLAAVINEVEVQQEQQEHLLGDLQNDVHRVADSLPGLWKALPGNLTAAVMEANQTGHEFPDRSLEQVLLPHVDTFLQVHFSPIWRSFNQSLHSLTQAIRNLSLDVEANRQAISRVQDSAVARADFQELGAKFEAKVQENTQRVGQLRQDVEDRLHAQHFTLHRSISELQADVDTKLKRLHKAQEAPGTNGSLVLATPGAGARPEPDSLQARLGQLQRNLSELHMTTARREEELQYTLEDMRATLTRHVDEIKELYSESDETFDQISKVERQVEELQVNHTALRELRVILMEKSLIMEENKEEVERQLLELNLTLQHLQGGHADLIKYVKDCNCQKLYLDLDVIREGQRDATRALEETQVSLDERRQLDGSSLQALQNAVDAVSLAVDAHKAEGERARAATSRLRSQVQALDDEVGALKAAAAEARHEVRQLHSAFAALLEDALRHEAVLAALFGEEVLEEMSEQTPGPLPLSYEQIRVALQDAASGLQEQALGWDELAARVTALEQASEPPRPAEHLEPSHDAGREEAATTALAGLARELQSLSNDVKNVGRCCEAEAGAGAASLNASLHGLHNALFATQRSLEQHQRLFHSLFGNFQGLMEANVSLDLGKLQTMLSRKGKKQQKDLEAPRKRDKKEAEPLVDIRVTGPVPGALGAALWEAGSPVAFYASFSEGTAALQTVKFNTTYINIGSSYFPEHGYFRAPERGVYLFAVSVEFGPGPGTGQLVFGGHHRTPVCTTGQGSGSTATVFAMAELQKGERVWFELTQGSITKRSLSGTAFGGFLMFKT

SEQ ID NO: 8831 - protein, 123 aa, Homo sapiens
MSKLVTLLALCKTEKFLIHSQQPCPQGAPDCQKVKVMYRMAHKPVYQVKQKVLTSLAWRCCPGYTGPNCEHHDSMAIPEPADPGDSHQEPQDGPVSFKPGHLAAVINEVEVQQEQQEHLLGDL

SEQ ID NO: 8832 - protein, 613 aa, Homo sapiens
MCCWPLLLLWGLLPGTAAGGSGRTYPHRTLLDSEGKYWLGWSQRGSQIAFRLQVRTAGYVGFGFSPTGAMASADIVVGGVAHGRPYLQDYFTNANRELKKDAQQDYHLEYAMENSTHTIIEFTRELHTCDINDKSITDSTVRVIWAYHHEDAGEAGPKYHDSNRGTKSLRLLNPEKTSVLSTALPYFDLVNQDVPIPNKDTTYWCQMFKIPVFQEKHHVIKVEPVIQRGHESLVHHILLYQCSNNFNDSVLESGHECYHPNMPDAFLTCETVIFAWAIGGEGFSYPPHVGLSLGTPLDPHYVLLEVHYDNPTYEEGLIDNSGLRLFYTMDIRKYDAGVIEAGLWVSLFHTIPPGMPEFQSEGHCTLECLEEALEAEKPSGIHVFAVLLHAHLAGRGIRLRHFRKGKEMKLLAYDDDFDFNFQEFQYLKEEQTILPGDNLITECRYNTKDRAEMTWGGLSTRSEMCLSYLLYYPRINLTRCASIPDIMEQLQFIGVKEIYRPVTTWPFIIKSPKQYKNLSFMDAMNKFKWTKKEGLSFNKLVLSLPVNVRCSKTDNAEWSIQGMTALPPDIERPYKAEPLVCGTSSSSSLHRDFSINLLVCLLLLSCTLSTKSL

SEQ ID NO: 8833 - protein, 115 aa, Homo sapiens
MCCWPLLLLWGLLPGTAAGGSGRTYPHRTLLDSEGKYWLGWSQRGSQIAFRLQVRTAGYVGFGFSPTGAMASADIVVGGVAHGRPYLQPCLLVSKTEACDAKCLQQQGNCCRATC

SEQ ID NO: 8834 - protein, 545 aa, Homo sapiens
MNSFLSVFRYPDFSFPYFPQDYFTNANRELKKDAQQDYHLEYAMENSTHTIIEFTRELHTCDINDKSITDSTVRVIWAYHHEDAGEAGPKYHDSNRGTKSLRLLNPEKTSVLSTALPYFDLVNQDVPIPNKDTTYWCQMFKIPVFQEKHHVIKVEPVIQRGHESLVHHILLYQCSNNFNDSVLESGHECYHPNMPDAFLTCETVIFAWAIGGEGFSYPPHVGLSLGTPLDPHYVLLEVHYDNPTYEEGLIDNSGLRLFYTMDIRKYDAGVIEAGLWVSLFHTIPPGMPEFQSEGHCTLECLEEALEAEKPSGIHVFAVLLHAHLAGRGIRLRHFRKGKEMKLLAYDDDFDFNFQEFQYLKEEQTILPGDNLITECRYNTKDRAEMTWGGLSTRSEMCLSYLLYYPRINLTRCASIPDIMEQLQFIGVKEIYRPVTTWPFIIKSPKQYKNLSFMDAMNKFKWTKKEGLSFNKLVLSLPVNVRCSKTDNAEWSIQGMTALPPDIERPYKAEPLVCGTSSSSSLHRDFSINLLVCLLLLSCTLSTKSL

SEQ ID NO: 8835 - protein, 125 aa, Homo sapiens
MAVFLQLLPLLLSRAQGNPGASLDGRPGDRVNLSCGGVSHPIRWVWAPSFPACKGLSKGRRPILWASSSGTPTVPPLQPFVGRLRSLDSAPDPAAGRWVGARTGSFGPGLVAAQAPAPATDSTTP

SEQ ID NO: 8836 - protein, 193 aa, Homo sapiens
MAVFLQLLPLLLSRAQGNPGASLDGRPGDRVNLSCGGVSHPIRWVWAPSFPACKGLSKGRRPILWASSSGTPTVPPLQPFVGRLRSLDSGIRRLELLLSAGDSGTFFCKGRHEDESRTVLHVLGDRTYCKAPGPTHALSPPHSSTCENRAPEASKGGRAQDSRGPGPGTEPALCGSGPSSPQQAPPAVHSGPC

SEQ ID NO: 8837 - protein, 197 aa, Homo sapiens
MAVFLQLLPLLLSRAQGNPGASLDGRPGDRVNLSCGGVSHPIRWVWAPSFPACKGLSKGRRPILWASSSGTPTVPPLQPFVGRLRSLDSGIRRLELLLSAGDSGTFFCKGRHEDESRTVLHVLGDRTYCKAPGPTHAPLVKTEPQRPVKEEEPKIPGDLDQEPSLLYADLDHLALSRPRRLSTADPADASTIYAVVV

SEQ ID NO: 8838 - protein, 217 aa, Homo sapiens
MAVFLQLLPLLLSRAQGNPGASLDGRPGDRVNLSCGGVSHPIRWVWAPSFPACKGLSKGRRPILWASSSGTPTVPPLQPFVGRLRSLDSGIRRLELLLSAGDSGTFFCKGRHEDESRTVLHVLGDRTYCKAPGPTHGACPRNRFDHSLDLLCPPHIAPLVKTEPQRPVKEEEPKIPGDLDQEPSLLYADLDHLALSRPRRLSTADPADASTIYAVVV

SEQ ID NO: 8839 - protein, 237 aa, Homo sapiens
MAVFLQLLPLLLSRAQGNPGASLDGRPGDRVNLSCGGVSHPIRWVWAPSFPACKGLSKGRRPILWASSSGTPTVPPLQPFVGRLRSLDSGIRRLELLLSAGDSGTFFCKGRHEDESRTVLHVLGDRTYCKAPGPTHGSVYPQLLIPLLGAGLVLGLGALGLVWWLHRRLPPQPIRPLPRFALSPPHSSTCENRAPEASKGGRAQDSRGPGPGTEPALCGSGPSSPQQAPPAVHSGPC

SEQ ID NO: 8840 - protein, 222 aa, Homo sapiens
MAVFLQLLPLLLSRAQGNPGASLDGRPGDRVNLSCGGVSHPIRWVWAPSFPACKGLSKGRRPILWASSSGTPTVPPLQPFVGRLRSLDSGIRRLELLLSAGDSGTFFCKGRHEDESRTVLHVLGDRTYCKAPGPTHGSVYPQLLIPLLGAGLVLGLGALGLVWWLHRRLPPQPIRPLPRFALSPPHSSTCENRAPEASKGGRAQDSRGPGPGTGKGMGMGRG

SEQ ID NO: 8841 - protein, 241 aa, Homo sapiens
MAVFLQLLPLLLSRAQGNPGASLDGRPGDRVNLSCGGVSHPIRWVWAPSFPACKGLSKGRRPILWASSSGTPTVPPLQPFVGRLRSLDSGIRRLELLLSAGDSGTFFCKGRHEDESRTVLHVLGDRTYCKAPGPTHGSVYPQLLIPLLGAGLVLGLGALGLVWWLHRRLPPQPIRPLPRFAPLVKTEPQRPVKEEEPKIPGDLDQEPSLLYADLDHLALSRPRRLSTADPADASTIYAVVV

SEQ ID NO: 8842 - protein, 220 aa, Homo sapiens
MAVFLQLLPLLLSRAQGNPGASLDGRPGDRVNLSCGGVSHPIRWVWAPSFPACKGLSKGRRPILWASSSGTPTVPPLQPFVGRLRSLDSGIRRLELLLSAGDSGTFFCKGRHEDESRTVLHVLGDRTYCKAPGPTHGSVYPQLLIPLLGAGLVLGLGALGLVWWLHRRLPPQPIRPLPRFAPLVKTEPQRPVKEEEPKIPGDLDQEPVRAWGWEGDSQNL

SEQ ID NO: 8843 - protein, 745 aa, Homo sapiens
MGVPFFSSLRCMVDLGPCWAGGLTAEMKLLLALAGLLAILATPQPSEGAAPAVLGEVDTSLVLSSMEEAKQLVDKAYKERRESIKQRLRSGSASPMELLSYFKQPVAATRTAVRAADYLHVALDLLERKLRSLWRRPFNVTDVLTPAQLNVLSKSSGCAYQDVGVTCPEQDKYRTITGMCNNRRSPTLGASNRAFVRWLPAEYEDGFSLPYGWTPGVKRNGFPVALARAVSNEIVRFPTDQLTPDQERSLMFMQWGQLLDHDLDFTPEPAARASFVTGVNCETSCVQQPPCFPLKIPPNDPRIKNQADCIPFFRSCPACPGSNITIRNQINALTSFVDASMVYGSEEPLARNLRNMSNQLGLLAVNQRFQDNGRALLPFDNLHDDPCLLTNRSARIPCFLAGDTRSSEMPELTSMHTLLLREHNRLATELKSLNPRWDGERLYQEARKIVGAMVQIITYRDYLPLVLGPTAMRKYLPTYRSYNDSVDPRIANVFTNAFRYGHTLIQPFMFRLDNRYQPMEPNPRVPLSRVFFASWRVVLEGGIDPILRGLMATPAKLNRQNQIAVDEIRERLFEQVMRIGLDLPALNMQRSRDHGLPGYNAWRRFCGLPQPETVGQLGTVLRNLKLARKLMEQYGTPNNIDIWMGGVSEPLKRKGRVGPLLACIIGTQFRKLRDGDRFWWENEGVFSMQQRQALAQISLPRIICDNTGITTVSKNNIFMSNSYPRDFVNCSTLPALNLASWREAS

SEQ ID NO: 8844 - protein, 87 aa, Homo sapiens [sequence omitted]

SEQ ID NO: 8845 - protein, 74 aa, Homo sapiens
MWRSRWDASVLKAEALALLPCGLGMAFSQSHVMAARRHQHSRLIIEVDEYSSNPTQAFTFYNINQGRFQPPHVQ

SEQ ID NO: 8846 - protein, 119 aa, Homo sapiens
MWRSRWDASVLKAEALALLPCGLGMAFSQSHVMAARRHQHSRLIIEVDEYSSNPTQAFTFYNINQGRFQPPHVQMVDPVPHDAPKPPGYTRFVCVSDTHSRTDPIQMPYGDVLIHAGDF

SEQ ID NO: 8847 - protein, 326 aa, Homo sapiens
MWRSRWDASVLKAEALALLPCGLGMAFSQSHVMAARRHQHSRLIIEVDEYSSNPTQAFTFYNINQGRFQPPHVQMVDPVPHDAPKPPGYTRFVCVSDTHSRTDPIQMPYGDVLIHAGDFTELGLPSEVKKFNEWLGSLPYEYKIVIAGNHELTFDQEFMADLIKQDFYYFPSVSKLKPENYENVQSLLTNCIYLQDSEVTVRGFRIYGSPWQPWFYGWGFNLPRGQALLEKWNLIPEGVDILITHGPPLGFLDWVPKKMQRVGCVELLNTVQRRVQPRLHVFGHIHEGYGVMADGTTTYVNASVCTVNYQPVNPPIVIDLPTPRNS

SEQ ID NO: 8848 - protein, 326 aa, Homo sapiens; identical to SEQ ID NO: 8847

SEQ ID NO: 8849 - protein, 209 aa, Homo sapiens
MAASAGAGAVIAAPDSRRWLWSVLAAALGLLTAGVSALEVYTPKEIFVANGTQGKLTCKFKSTSTTGGLTSVSWSFQPEGADTTVSFFHYSQGQVYLGNYPPFKDRISWAGDLDKKDASINIENMQFIHNGTYICDVKNPPDIVVQPGHIRLYVVEKENLPVFPVWVVVGIVTAVVLGLTLLISMILAVLYRRKNSKRDYTGAQSYMHS

SEQ ID NO: 8850 - protein, 269 aa, Homo sapiens
MAASAGAGAVIAAPDSRRWLWSVLAAALGLLTAGVSALEVYTPKEIFVANGTQGKLTCKFKSTSTTGGLTSVSWSFQPEGADTTVSFFHYSQGQVYLGNYPPFKDRISWAGDLDKKDASINIENMQFIHNGTYICDVKNPPDIVVQPGHIRLYVVEKENLPVFPVWVVVGIVTAVVLGLTLLISMILAVLYRRKNSKRDYTGCSTSESLSPVKQAPRKSPSDTEGLVKSLPSGSHQGPVIYAQLDHSGGHHSDKINKSESVVYADIRKN

SEQ ID NO: 8851 - protein, 119 aa, Homo sapiens
MAASAGAGAVIAAPDSRRWLWSVLAAALGLLTAGVSALEVYTPKEIFVANGTQGKLTCKFKSTSTTGGLTSVSWSFQPEGADTTVSGPVIYAQLDHSGGHHSDKINKSESVVYADIRKN

SEQ ID NO: 8852 - protein, 95 aa, Homo sapiens
MAASAGAGAVIAAPDSRRWLWSVLAAALGLLTAGVSALEVYTPKEIFVANGTQGKLTCKFKSTSTTGGLTSVSWSFQPEGADTTVSRICLCFQFG

SEQ ID NO: 8853 - protein, 183 aa, Homo sapiens
PFSSVTAGVSALEVYTPKEIFVANGTQGKLTCKFKSTSTTGGLTSVSWSFQPEGADTTVSFFHYSQGQVYLGNYPPFKDRISWAGDLDKKDASINIENMQFIHNGTYICDVKNPPDIVVQPGHIRLYVVEKENLPVFPVWVVVGIVTAVVLGLTLLISMILAVLYRRKNSKRDYTGAQSYMHS

SEQ ID NO: 8854 - protein, 296 aa, Homo sapiens
MGELMAFLLPLIIVLMVKHSDSRTHSLRYFRLGVSDPIHGVPEFISVGYVDSHPITTYDSVTRQKEPRAPWMAENLAPDHWERYTQLLRGWQQMFKVELKRLQRHYNHSDNVAHTIKQAWEANQHELLYQKNWLEEECIAWLKRFLEYGKDTLQRTEPPLVRVNRKETFPGVTALFCKAHGFYPPEIYMTWMKNGEEIVQEIDYGDILPSGDGTYQAWASIELDPQSSNLYSCHVEHCGVHMVLQVPQESETIPLVMKAVSGSIVLVIVLAGVGVLVWRRRPREQNGAIYLPTPDR

SEQ ID NO: 8855 - protein, 341 aa, Homo sapiens
MGELMAFLLPLIIVLMVKHSDSRTHSLRYFRLGVSDPIHGVPEFISVGYVDSHPITTYDSVTRQKEPRAPWMAENLAPDHWERYTQLLRGWQQMFKVELKRLQRHYNHSGSHTYQRMIGCELLEDGSTTGFLQYAYDGQDFLIFNKDTLSWLAVDNVAHTIKQAWEANQHELLYQKNWLEEECIAWLKRFLEYGKDTLQRTEPPLVRVNRKETFPGVTALFCKAHGFYPPEIYMTWMKNGEEIVQEIDYGDILPSGDGTYQAWASIELDPQSSNLYSCHVEHCGVHMVLQVPQESETIPLVMKAVSGSIVLVIVLAGVGVLVWRRRPREQNGAIYLPTPDR

SEQ ID NO: 8856 - protein, 341 aa, Homo sapiens; identical to SEQ ID NO: 8855

SEQ ID NO: 8857 - protein, 214 aa, Homo sapiens
MGELMAFLLPLIIVLMVKHSDSRTHSLRYFRLGVSDPIHGVPEFISVGYVDSHPITTYDSVTRQKEPRAPWMAENLAPDHWERYTQLLRGWQQMFKVELKRLQRHYNHSGSHTYQRMIGCELLEDGSTTGFLQYAYDGQDFLIFNKDTLSWLAVDNVAHTIKQAWEANQHELLYQKNWLEEECIAWLKRFLEYGKDTLQRTEQNGAIYLPTPDR

SEQ ID NO: 8858 - protein, 249 aa, Homo sapiens
MGELMAFLLPLIIVLMVKHSDSRTHSLRYFRLGVSDPIHGVPEFISVGYVDSHPITTYDSVTRQKEPRAPWMAENLAPDHWERYTQLLRGWQQMFKVELKRLQRHYNHSGSHTYQRMIGCELLEDGSTTGFLQYAYDGQDFLIFNKDTLSWLAVDNVAHTIKQAWEANQHELLYQKNWLEEECIAWLKRFLEYGKDTLQRTESETIPLVMKAVSGSIVLVIVLAGVGVLVWRRRPREQNGAIYLPTPDR

SEQ ID NO: 8859 - protein, 249 aa, Homo sapiens; identical to SEQ ID NO: 8858

SEQ ID NO: 8860 - protein, 103 aa, Homo sapiens
MALCALTRALRSLNLAPPTVAAPAPSLFPAAQMMNNGLLQQPSALMLLPCRPVLTSVALNANFVSWKSRTKYTITPVKMRKSGGRDHTGAGNVRSNSRPSIQR

SEQ ID NO: 8861 - protein, 96 aa, Homo sapiens
MALCALTRALRSLNLAPPTVAAPAPSLFPAAQMMNNGLLQQPSALMLLPCRPVLTSVALNANFVSWKSRTKYTITPVKMRKSGGRDHTGGNKDRGI

SEQ ID NO: 8862 - protein, 225 aa, Homo sapiens
MALCALTRALRSLNLAPPTVAAPAPSLFPAAQMMNNGLLQQPSALMLLPCRPVLTSVALNANFVSWKSRTKYTITPVKMRKSGGRDHTGRIRVHGIGGGHKQRYRMIDFLRFRPEETKSGPFEEKVIQVRYDPCRSADIALVAGGSRKRWIIATENMQAGDTILNSNHIGRMAVAAREGDAHPLGALPVGTLINNVESEPGRGAQYIRAAGAGNVRSNSRPSIQR

SEQ ID NO: 8863 - protein, 305 aa, Homo sapiens [sequence omitted]

SEQ ID NO: 8864 - protein, 94 aa, Homo sapiens
MALCALTRALRSLNLAPPTVAAPAPSLFPAAQVIHLTREEGCFHSGCRRWGLRACEAGVASLVRSHADDEQWPPPTALCLDVAPLPPSSYFCGP

SEQ ID NO: 8865 - protein, 49 aa, Homo sapiens
MAASSLTVTLGRLASACSHSILRPSGPGAASLWSASRRFNSQSTSYLPG

SEQ ID NO: 8866 - protein, 49 aa, Homo sapiens; identical to SEQ ID NO: 8865

SEQ ID NO: 8867 - protein, 150 aa, Homo sapiens
MAASSLTVTLGRLASACSHSILRPSGPGAASLWSASRRFNSQSTSYLPGYVPKTSLSSPPWPEVVLPDPVEETRHHAEVVKKVNEMIVTGQYGRLFAVVHFASRQWKVTSEDLILIGNELDLACGERIRLEKVLLVGADNFTLLGKPLLG

SEQ ID NO: 8868 - protein, 205 aa, Homo sapiens
MAASSLTVTLGRLASACSHSILRPSGPGAASLWSASRRFNSQSTSYLPGYVPKTSLSSPPWPEVVLPDPVEETRHHAEVVKKVNEMIVTGQYGRLFAVVHFASRQWKVTSEDLILIGNELDLACGERIRLEKVLLVGADNFTLLGKPLLGKDLVRVEATVIEKTESWPRIIMRFRKRKNFKKKRIVTTPQTVLRINSIEIAPCLL

SEQ ID NO: 8869 - protein, 36 aa, Homo sapiens
MAASSLTVTLGRLASACSHSILRPSGPGADMFLKHP

SEQ ID NO: 8870 - protein, 120 aa, Homo sapiens
MIVTGQYGRLFAVVHFASRQWKVTSEDLILIGNELDLACGERIRLEKVLLVGADNFTLLGKPLLGKDLVRVEATVIEKTESWPRIIMRFRKRKNFKKKRIVTTPQTVLRINSIEIAPCLL

SEQ ID NO: 8871 - protein, 195 aa, Homo sapiens
MIVTGQYGRLFAVVHFASRQWKVTSEDLILIGNELDLACGERIRLEKVLLVGADNFTLLGKPLLGKDLVRVEATVIEKTESWPRIIMRFRKRKNFKKKRSKLEKVPLGPVARCWLPRRMRTEGVGHVGLGTGSPGRSQPGCHCPLATLILEGAPRGSSLAPLLLHAPRVTPPRSPSPPRSARDPTSLPFSSTLRA

SEQ ID NO: 8872 - protein, 38 aa, Homo sapiens
EMESELTACVDVAGALWIHNLRSRGKLALGKSTTVEDK

SEQ ID NO: 8873 - protein, 212 aa, Homo sapiens
MAAAVLGQLGALWIHNLRSRGKLALGLLSFHSVLPQSYIHTSASLDISRKWEKKNKIVYPPQLPGEPRRPAEIYHCRRQIKYSKDKMWYLAKLIRGMSIDQALAQLEFNDKKGAKIIKEVLLEAQDMAVRDHNVEFRSNLYIAESTSGRGQCLKRIRYHGRGRFGIMEKVYCHYFVKLVEGPPPPPEPPKTAVAHAKEYIQQLRSRTIVHTL

SEQ ID NO: 8874 - protein, 206 aa, Homo sapiens
MAAAVLGQLGALWIHNLRSRGKLALGVLPQSYIHTSASLDISRKWEKKNKIVYPPQLPGEPRRPAEIYHCRRQIKYSKDKMWYLAKLIRGMSIDQALAQLEFNDKKGAKIIKEVLLEAQDMAVRDHNVEFRSNLYIAESTSGRGQCLKRIRYHGRGRFGIMEKVYCHYFVKLVEGPPPPPEPPKTAVAHAKEYIQQLRSRTIVHTL

SEQ ID NO: 8875 - protein, 232 aa, Homo sapiens
MAAAVLGQLGKDFLVVKRQKGVEMESELTACVDVAGALWIHNLRSRGKLALGVLPQSYIHTSASLDISRKWEKKNKIVYPPQLPGEPRRPAEIYHCRRQIKYSKDKMWYLAKLIRGMSIDQALAQLEFNDKKGAKIIKEVLLEAQDMAVRDHNVEFRSNLYIAESTSGRGQCLKRIRYHGRGRFGIMEKVYCHYFVKLVEGPPPPPEPPKTAVAHAKEYIQQLRSRTIVHTL

SEQ ID NO: 8876 - protein, 126 aa, Homo sapiens
MWYLAKLIRGMSIDQALAQLEFNDKKGAKIIKEVLLEAQDMAVRDHNVEFRSNLYIAESTSGRGQCLKRIRYHGRGRFGIMEKVYCHYFVKLVEGPPPPPEPPKTAVAHAKEYIQQLRSRTIVHTL

SEQ ID NO: 8877 - protein, 68 aa, Homo sapiens
MRLSALLALASKVTLPPHYRYGMSPPGSVADKRKNPPWIRRRPVVVEPISDEDWYLFCGDTVEILEGK

SEQ ID NO: 8878 - protein, 99 aa, Homo sapiens
MRLSALLALASKVTLPPHYRYGMSPPGSVADKRKNPPWIRRRPVVVEPISDEDWYLFCGDTVEILEGKDAGKQGKVVQVIRQRNWVVVGGLNTHYRYIG

SEQ ID NO: 8879 - protein, 173 aa, Homo sapiens
MRLSALLALASKVTLPPHYRYGMSPPGSVADKRKNPPWIRRRPVVVEPISDEDWYLFCGDTVEILEGKDAGKQGKVVQVIRQRNWVVVGGLNTHYRYIGKTMDYRGTMIPSEAPLLHRQVKLVDPMDRKPTEIEWRFTEAGERVRVSTRSGRIIPKPEFPRADGIVPETWIDG

SEQ ID NO: 8880 - protein, 216 aa, Homo sapiens
MRLSALLALASKVTLPPHYRYGMSPPGSVADKRKNPPWIRRRPVVVEPISDEDWYLFCGDTVEILEGKDAGKQGKVVQVIRQRNWVVVGGLNTHYRYIGKTMDYRGTMIPSEAPLLHRQVKLVDPMDRKPTEIEWRFTEAGERVRVSTRSGRIIPKPEFPRADGIVPETWIDGPKDTSVEDALERTYVPCLKTLQEEVMEAMGIKETRKYKKVYWY

SEQ ID NO: 8881 - protein, 216 aa, Homo sapiens; identical to SEQ ID NO: 8880

SEQ ID NO: 8882 - protein, 148 aa, Homo sapiens
MASVVLALRTRTAVTSLLSPTPATALAVRYASKKSGGSSKNLGGKSSGRRQGIKKMEGHYVHAGNIIATQRHFRWHPGAHVGVGKNKCLYALEEGIVRYTKEVYVPHPRNTEAVDLITRLPKGAVLYKTFVHVVPAKPEGTFKLVAML

SEQ ID NO: 8883 - protein, 94 aa, Homo sapiens
MASVVLALRTRTAVTSLLSPTPATALAVRYASKKSGGSSKNLGGKSSGRRQGIKKMEGHYVHAGNIIATQRHFRWHPGAHVSCSVAAPLFPFLG

SEQ ID NO: 8884 - protein, 84 aa, Homo sapiens
MASVVLALRTRTAVTSLLSPTPATALAVRYASKKSGGSSKNLGGKSSGRRQGIKKMEGHYVHAGNIIATQRHFRWHPGAHWRWK

SEQ ID NO: 8885 - protein, 93 aa, Homo sapiens
MEGHYVHAGNIIATQRHFRWHPGAHVGVGKNKCLYALEEGIVRYTKEVYVPHPRNTEAVDLITRLPKGAVLYKTFVHVVPAKPEGTFKLVAML

SEQ ID NO: 8886 - protein, 93 aa, Homo sapiens; identical to SEQ ID NO: 8885

SEQ ID NO: 8887 - protein, 136 aa, Homo sapiens
  VARIANT 1: note = misc_feature - Xaa can be any naturally occurring amino acid
XSPTPATALAVRYASKKSGGSSKNLGGKSSGRRQGIKKMEGHYVHAGNIIATQRHFRWHPGAHVCVLQVGVGKNKCLYALEEGIVRYTKEVYVPHPRNTEAVDLITRLPKGAVLYKTFVHVVPAKPEGTFKLVAML

SEQ ID NO: 8888 - protein, 188 aa, Homo sapiens [sequence omitted]

SEQ ID NO: 8889 - protein, 107 aa, Homo sapiens
MALAMLVLVVSPWSAARGVLRNYWERLLRKLPQSRPGFPSPPWGPALAVQGPAMFTEPANDTSGSKENSSLLDSIFWMAAPKNRRTIEVNRCRRRNPQKLIKVKVMH

SEQ ID NO: 8890 - protein, 42 aa, Homo sapiens
  VARIANT 1: note = misc_feature - Xaa can be any naturally occurring amino acid
XENSSLLDSIFWMAAPKNRRTIEVNRCRRRNPQKLIKVKSSC

SEQ ID NO: 8891 - protein, 36 aa, Homo sapiens
MAVLAGSLLGPTSRLAGMSISRATSNARTSTAGSGA

SEQ ID NO: 8892 - protein, 92 aa, Homo sapiens [sequence omitted]

SEQ ID NO: 8893 - protein, 92 aa, Homo sapiens [sequence omitted]

SEQ ID NO: 8894 - protein, 92 aa, Homo sapiens [sequence omitted]

SEQ ID NO: 8895 - protein, 184 aa, Homo sapiens
MPRRPSGYFLSSGGAGSGSGRALGEGSGSQSRNSWSSVLTVSGHSSITMWLPSSMSFRNARSRICRRRRAQGLERLWAPESPAAGTAGPTADMAVLAGSLLGPTSRSAALLGGRWLQPRAWLGFPDAWGLPTPQQARGKARGNEYQPSNIKRKNKHGWVRRLSTPAGVQVILRRMLKGRKSLSH

SEQ ID NO: 8896 - protein, 95 aa, Homo sapiens
MAASAFAGAVRAASGILRPLNILASSTYRNCVKNASLISALSTGRFSHIQTPVVSSTPRLTTSERNLTCGHTSVILNRLAIRKNYGKRHLQGRSD

SEQ ID NO: 8897 - protein, 170 aa, Homo sapiens
MAASAFAGAVRAASGILRPLNILASSTYRNCVKNASLISALSTGRFSHIQTPVVSSTPRLTTSERNLTCGHTSVILNRMAPVLPSVLKLPVRSLTYFSARKGKRKTVKAVIDRFLRLHCGLWVRRKAGYKKKLWKKTPARKKRLREFVFCNKTQSKLLDKMTTSFWKRRN

SEQ ID NO: 8898 - protein, 177 aa, Homo sapiens
MAASAFAGAVRAASGILRPLNILASSTYRNCVKNASLISALSTGRFSHIQTPVVSSTPRLTTSERNLTCGHTSVILNRMAPVLPSVLKLPVRSLTYFSARKGKRKTVKAVIDRFLRLHCGLWVRRKAGYKKKLWKKTPARKKRLREFVFCNKTQSKLLDKMTTSFWKRRNWHSPICR

SEQ ID NO: 8899 - protein, 188 aa, Homo sapiens [sequence omitted]

SEQ ID NO: 8900 - protein, 122 aa, Homo sapiens
MAALGTVLFSVRRLHCSVAAWAGGQWRLQQGLAANPSGYGPLTELPDWSYADGRPAPPMKGQLRRKAERETFARRVVLLSQEMDAGLQAWQLRQQKLQEEQRKQENALKPKGASLKSPLPSQ

SEQ ID NO: 8901 - protein, 110 aa, Homo sapiens
MAALGTVLFSVRRLHCSVAAWAGGQWRLQQGLAANPSGYGPLTELPDWSYADGRPAPPMKGQLRRKAERETFAVSETSCTAVTGNGRWITSMAAQAAEVAGRTKEAGKCS

SEQ ID NO: 8902 - protein, 72 aa, Homo sapiens
MAALGTVLFSVRRLHCSVAAWAGGQWRLQQGLAANPSGYGPLTELPDWSYAETSCTAVTGNGRWITSMAAQA

SEQ ID NO: 8903 - protein, 123 aa, Homo sapiens
MAALGTVLFTGVRRLHCSVAAWAGGQWRLQQGLAANPSGYGPLTELPDWSYADGRPAPPMKGQLRRKAERETFARRVVLLSQEMDAGLQAWQLRQQKLQEEQRKQENALKPKGASLKSPLPSQ

SEQ ID NO: 8904 - protein, 87 aa, Homo sapiens
MAALGTVLFTGVRRLHCSVAAWAGGQWRLQQGLAANPSGYGPLTELPDWSYAETSCTAVTGNGRWITSMAAQAAEVAGRTKEAGKCS

SEQ ID NO: 8905 - protein, 64 aa, Homo sapiens
MKGQLRRKAERETFARRVVLLSQEMDAGLQAWQLRQQKLQEEQRKQENALKPKGASLKSPLPSQ

SEQ ID NO: 8906 - protein, 64 aa, Homo sapiens; identical to SEQ ID NO: 8905

SEQ ID NO: 8907 - protein, 64 aa, Homo sapiens; identical to SEQ ID NO: 8905

SEQ ID NO: 8908 - protein, 52 aa, Homo sapiens
MKGQLRRKAERETFAVSETSCTAVTGNGRWITSMAAQAAEVAGRTKEAGKCS

SEQ ID NO: 8909 - protein, 51 aa, Homo sapiens
MRRRVVLLSQEMDAGLQAWQLRQQKLQEEQRKQENALKPKGASLKSPLPSQ

SEQ ID NO: 8910 - protein, 52 aa, Homo sapiens
MVKIFSTCYLLDELYCCHRKWTLDYKHGSSGSRSCRKNKGSRKMLLNPKGLH

SEQ ID NO: 8911 - protein, 5 aa, Homo sapiens
MAAVG

SEQ ID NO: 8912 - protein, 9 aa, Homo sapiens
MAAVGSLLG

SEQ ID NO: 8913 - protein, 164 aa, Homo sapiens
MAAVGSLLGLAASSWLGGQNASDHSLWLLRKPRGSSCPGTGHQLCRLRQSTVKATGPALRRLHTSSWRADSSRASLTRVHRQAYARLYPVLLVKQDGSTIHIRYREPRRMLAMPIDLDTLSPEERRARLRKREAQLQSRKEYEQELSDDLHVERYRQFWTRTKK

SEQ ID NO: 8914 - protein, 164 aa, Homo sapiens; identical to SEQ ID NO: 8913

SEQ ID NO: 8915 - protein, 24 aa, Homo sapiens
MAAVGSLLGRLRQSTVKATGPALR

SEQ ID NO: 8916 - protein, 43 aa, Homo sapiens
MAAVGSLLGRLRQSTVKATGPALRRLHTSSWRADSSRASLTRV

SEQ ID NO: 8917 - protein, 76 aa, Homo sapiens
MAAVGSLLGRLRQSTVKATGPALRRLHTSSWRADSSRASLTRVHRQAYARLYPVLLVKQDGSTIHIRYREPRRMLA

SEQ ID NO: 8918 - protein, 128 aa, Homo sapiens
MAAVGSLLGRLRQSTVKATGPALRRLHTSSWRADSSRASLTRVHRQAYARLYPVLLVKQDGSTIHIRYREPRRMLAMPIDLDTLSPEERRARLRKREAQLQSRKEYEQELSDDLHVERYRQFWTRTKK

SEQ ID NO: 8919 - protein, 128 aa, Homo sapiens; identical to SEQ ID NO: 8918

SEQ ID NO: 8920 - protein, 128 aa, Homo sapiens; identical to SEQ ID NO: 8918

SEQ ID NO: 8921 - protein, 128 aa, Homo sapiens; identical to SEQ ID NO: 8918

SEQ ID NO: 8922 - protein, 128 aa, Homo sapiens; identical to SEQ ID NO: 8918

SEQ ID NO: 8923 - protein, 128 aa, Homo sapiens; identical to SEQ ID NO: 8918

SEQ ID NO: 8924 - protein, 128 aa, Homo sapiens; identical to SEQ ID NO: 8918

SEQ ID NO: 8925 - protein, 128 aa, Homo sapiens; identical to SEQ ID NO: 8918

SEQ ID NO: 8926 - protein, 128 aa, Homo sapiens; identical to SEQ ID NO: 8918

SEQ ID NO: 8927 - protein, 128 aa, Homo sapiens; identical to SEQ ID NO: 8918

SEQ ID NO: 8928 - protein, 128 aa, Homo sapiens; identical to SEQ ID NO: 8918

SEQ ID NO: 8929 - protein, 128 aa, Homo sapiens; identical to SEQ ID NO: 8918

SEQ ID NO: 8930 - protein, 128 aa, Homo sapiens; identical to SEQ ID NO: 8918

SEQ ID NO: 8931 - protein, 128 aa, Homo sapiens; identical to SEQ ID NO: 8918

SEQ ID NO: 8932 - protein, 128 aa, Homo sapiens; identical to SEQ ID NO: 8918

SEQ ID NO: 8933 - protein, 128 aa, Homo sapiens; identical to SEQ ID NO: 8918

SEQ ID NO: 8934 - protein, 55 aa, Homo sapiens
MLAMPIDLDTLSPEERRARLRKREAQLQSRKEYEQELSDDLHVERYRQFWTRTKK

SEQ ID NO: 8935 - protein, 55 aa, Homo sapiens; identical to SEQ ID NO: 8934

SEQ ID NO: 8936 - protein, 55 aa, Homo sapiens; identical to SEQ ID NO: 8934

SEQ ID NO: 8937 - protein, 128 aa, Homo sapiens
MAAFMLGSLLRTFKQMVPSSASGQVRSHYVDWRMWRDVKRRKMAYEYADERLRINSLRKNTILPKILQDVADEEIAALPRDSCPVRIRNRCVMTSRPRGVKRRWRLSRIVFRHLADHGQLSGIQRATW

SEQ ID NO: 8938 - protein, 60 aa, Homo sapiens
MAAFMLGSLLRTFKQVRPLLLSTPLPLTAESHNPRVPHGSATCSARWFLHQLQAKFEVTM

SEQ ID NO: 8939 - protein, 200 aa, Homo sapiens
GTTVLLWSLLRSSPGVERVCFRARIQPWHGGLLQPLPCSFEMGLPRRRFSSEAASYLLKSILAESGSPETKKPTFMDEEVQSILTKMTGLNLQKTFKPAIQELKPPTYKLMTQAQLEEATRQAVEAAKVRLKMPPVLEERVPINDVLAEDKILEGTETTKYVFTDISYSIPHRERFIVVREPSGTLRKASWEERDRMIQV

SEQ ID NO: 8940 - protein, 360 aa, Homo sapiens
MAPLGTTVLLWSLLRSSPGVERVCFRARIQPWHGGLLQPLPCSFEMGLPRRRFSSEAAESGSPETKKPTFMDEEVQSILTKMTGLNLQKTFKPAIQELKPPTYKLMTQAQLEEATRQAVEAAKVRLKMPPVLEERVPINDVLAEDKILEGTETTKYVFTDISYSIPHRERFIVVREPSGTLRKASWEERDRMIQVYFPKEGRKILTPIIFKEENLRTMYSQDRHVDVLNLCFAQFEPDSTEYIKVHHKTYEDIDKRGKYDLLRSTRYFGGMVWYFVNNKKIDGLLIDQIQRDLIDDATNLVQLYHVLHPDGQSAQGAKDQAAEGINLIKVFAKTEAQKGAYIELTLQTYQEALSRHSAAS

SEQ ID NO: 8941 - protein, 360 aa, Homo sapiens; identical to SEQ ID NO: 8940

SEQ ID NO: 8942 - protein, 168 aa, Homo sapiens
MAPLGTTVLLWSLLRSSPGVERVCFRARIQPWHGGLLQPLPCSFEMGLPRRRFSSEAESGSPETKKPTFMDEEVQSILTKMTGLNLQKTFKPAIQELKPPTYKLMTQAQLEEATRQAVEAAKVRLKMPPVLEERVPINDVLAEDKILEGTETTKYVFTDISYSIPHRC

SEQ ID NO: 8943 - protein, 359 aa, Homo sapiens
MAPLGTTVLLWSLLRSSPGVERVCFRARIQPWHGGLLQPLPCSFEMGLPRRRFSSEAESGSPETKKPTFMDEEVQSILTKMTGLNLQKTFKPAIQELKPPTYKLMTQAQLEEATRQAVEAAKVRLKMPPVLEERVPINDVLAEDKILEGTETTKYVFTDISYSIPHRERFIVVREPSGTLRKASWEERDRMIQVYFPKEGRKILTPIIFKEENLRTMYSQDRHVDVLNLCFAQFEPDSTEYIKVHHKTYEDIDKRGKYDLLRSTRYFGGMVWYFVNNKKIDGLLIDQIQRDLIDDATNLVQLYHVLHPDGQSAQGAKDQAAEGINLIKVFAKTEAQKGAYIELTLQTYQEALSRHSAAS

SEQ ID NO: 8944 - protein, 319 aa, Homo sapiens
MSRNETEHRYLGTHFGAESGSPETKKPTFMDEEVQSILTKMTGLNLQKTFKPAIQELKPPTYKLMTQAQLEEATRQAVEAAKVRLKMPPVLEERVPINDVLAEDKILEGTETTKYVFTDISYSIPHRERFIVVREPSGTLRKASWEERDRMIQVYFPKEGRKILTPIIFKEENLRTMYSQDRHVDVLNLCFAQFEPDSTEYIKVHHKTYEDIDKRGKYDLLRSTRYFGGMVWYFVNNKKIDGLLIDQIQRDLIDDATNLVQLYHVLHPDGQSAQGAKDQAAEGINLIKVFAKTEAQKGAYIELTLQTYQEALSRHSAAS

SEQ ID NO: 8945 - protein, 51 aa, Homo sapiens
MVQTGRSEGIPGWEQSMSKGREIPGSDSESGSPETKKPTFMDEEVQSILTK

SEQ ID NO: 8946 - protein, 121 aa, Homo sapiens
  VARIANT 1: note = misc_feature - Xaa can be any naturally occurring amino acid
XKYVFTDISYSIPHRERFIVVREPSGTLRKASWEERDRMIQVYFPKEGRKILTPIIFKEENLRFEPDSTEYIKVHHKTYEDIDKRGKYDLLRSTRYFGGMVWYFVNNKKIDGLLIDQIQRD

SEQ ID NO: 8947 - protein, 165 aa, Homo sapiens
  VARIANT 1: note = misc_feature - Xaa can be any naturally occurring amino acid
XTTVLLWSLLRSSPGVERVCFRARIQPWHGGLLQPLPCSFEMGLPRRRFSSEAAESGSPETKKPTFMDEEVQSILTKMTGLNLQKTFKPAIQELKPPTYKLMTQAQLEEATRQAVEAAKVRLKMPPVLEERVPINDVLAEDKILEGTETTKYVFTDISYSIPHRC

SEQ ID NO: 8948 - protein, 86 aa, Homo sapiens
MAALCRTRAVAAESHFLRVFLFFRPFRGVGTESGSESGSSNAKEPKTRAGGFASALERHSELLQKVEPLQKEIPERNQGPVAAIRS

SEQ ID NO: 8949 - protein, 187 aa, Homo sapiens
MAALCRTRAVAAESHFLRVFLFFRPFRGVGTESGSESGSSNAKEPKTRAGGFASALERHSELLQKVEPLQKGSPKNVESFASMLRHSPLTQMGPAKDKLVIGRIFHIVENDLYIDFGGKFHCVCRRPEVDGEKYQKGTRVRLRLLDLELTSRFLGATTDTTVLEANAVLLGIQESKDSRSKEEHHEK

SEQ ID NO: 8950 - protein, 109 aa, Homo sapiens
MLPRLVLNSWVQVILLRWPPKVLGLQMTDMGPAKDKLVIGRIFHIVENDLYIDFGGKFHCVCRRPEVDGEKYQKGTRVRLRLLDLELTSRFLGATTDTTVLEANAVLLG

SEQ ID NO: 8951 - protein, 125 aa, Homo sapiens
MLPRLVLNSWVQVILLRWPPKVLGLQMTDMGPAKDKLVIGRIFHIVENDLYIDFGGKFHCVCRRPEVDGEKYQKGTRVRLRLLDLELTSRFLGATTDTTVLEANAVLLGIQESKDSRSKEEHHEK

SEQ ID NO: 8952 - protein, 103 aa, Homo sapiens
MLRHSPLTQMGPAKDKLVIGRIFHIVENDLYIDFGGKFHCVCRRPEVDGEKYQKGTRVRLRLLDLELTSRFLGATTDTTVLEANAVLLGIQESKDSRSKEEHH

SEQ ID NO: 8953 - protein, 143 aa, Homo sapiens
  VARIANT 1: note = misc_feature - Xaa can be any naturally occurring amino acid
XFCVAFAYWAGSVHTALVFLGLNAGGKGSPKNVESFASMLRHSPLTQMGPAKDKLVIGRIFHIVENDLYIDFGGKFHCVCRRPEVDGEKYQKGTRVRLRLLDLELTSRFLGATTDTTVLEANAVLLGIQESKDSRSKEEHHEK

SEQ ID NO: 8954 - protein, 83 aa, Homo sapiens
  VARIANT 1: note = misc_feature - Xaa can be any naturally occurring amino acid
XMLRHSPLTQMGPAKDKLVIGRIFHIVENDLYIDFGGKFHCVCRRPEVDGESPISWYAVWRRFSQVMITCFSSNSDFGKHRKR

SEQ ID NO: 8955 - protein, 163 aa, Homo sapiens
  VARIANT 1: note = misc_feature - Xaa can be any naturally occurring amino acid
XTRAVAAESHFLRVFLFFRPFRGVGTESGSESGSSNAKEPKTRAGGFASALERHSELLQKRWGFAMLPRLVLNSWVQVILLRWPPKVLGLQMTDGSPKNVESFASMLRHSPLTQMGPAKDKLVIGRIFHIVENDLYIDFGGKFHCVCRRPEVDGEKYQKGTRV

SEQ ID NO: 8956 - protein, 170 aa, Homo sapiens
MESTSQDRRATHVITIKPNETVLTAFPYRPHSSLLDFLKGEPRVLGATQILLALIIVGFGTIFALNYIGFSQRLPLVVLTGYPFWGALIFILTGYLTVTDKKSKLLGQGVTGMNVISSLVAITGITFTILSYRHQDKYCQMPSFEEICVFSRTLFIDFILLTPPHSSHFL

SEQ ID NO: 8957 - protein, 712 aa, Homo sapiens
MESTSQDRRATHVITIKPNETVLTAFPYRPHSSLLDFLKGEPRVLGATQILLALIIVGFGTIFALNYIGFSQRLPLVVLTGYPFWGALIFILTGYLTVTDKKSKLLGQGVTGMNVISSLVAITGITFTILSYRHQDKYCQMPSFEEICVFSRTLFIGILLILLIISIAELSISVTIASFRSKCWTQSDEVLFFLPSDVTQNSEQPAPEENDQLQFVLQEEFSSDDSTTNAQSVIFGGYAFFKLTLSRSPLVSQPGNKGREFVPDEQKQSILPSPKFSEEEIEPLPPTLEKKPSENMSIQLDSTFKQMKDEDLQSAIVQPSQMQTKLLQDQAASLQVFPSHSALKLEDISPEDLPSQALPVEGLSEQTMPSKSTSSHVKQSSNLTANDLPPQGILSQDTSSQDMLFHDMTSQDMQSLDMLSQDTPSHAMPPQDIPSQDMLSQALSAHAILPEASTSHIVQFPEIQHLLQQPPDLQPENTEPQNQQILQMSYQDIRSEVMEETKEWKSEEELHRRKSSRRHSLNQQTKALQYLRRHSLDVQAKGQKSSKRHSLDQQSKGWQSPKQKSLDQQIKDWLSPKRHSVDKQAQLNQTKEQLPDQQAEDQQAKGEQYPEGQSKDGQVKDQQTDKEQNSKKQTQDQQTEDQPAQEKKSPKGQFQNVQAEGQQAQVEKVPKLLCQDSESQIQQYQFWQFHKGNLQAGQPRTVNLLAKNPLTG

SEQ ID NO: 8958 - protein, 679 aa, Homo sapiens
MESTSQDRRATHVITIKPNETVLTAFPYRPHSSLLDFLKGEPRVLGATQILLALIIVGFGTIFALNYIGFSQRLPLVVLTGYPFWGALIFILTGYLTVTDKKSKLLGQGVTGMNVISSLVAITGITFTILSYRHQDKYCQMPSFEEICVFSRTLFIVLFFLPSDVTQNSEQPAPEENDQLQFVLQEEFSSDDSTTNAQSVIFGGYAFFKLTLSRSPLVSQPGNKGREFVPDEQKQSILPSPKFSEEEIEPLPPTLEKKPSENMSIQLDSTFKQMKDEDLQSAIVQPSQMQTKLLQDQAASLQVFPSHSALKLEDISPEDLPSQALPVEGLSEQTMPSKSTSSHVKQSSNLTANDLPPQGILSQDTSSQDMLFHDMTSQDMQSLDMLSQDTPSHAMPPQDIPSQDMLSQALSAHAILPEASTSHIVQFPEIQHLLQQPPDLQPENTEPQNQQILQMSYQDIRSEVMEETKEWKSEEELHRRKSSRRHSLNQQTKALQYLRRHSLDVQAKGQKSSKRHSLDQQSKGWQSPKQKSLDQQIKDWLSPKRHSVDKQAQLNQTKEQLPDQQAEDQQAKGEQYPEGQSKDGQVKDQQTDKEQNSKKQTQDQQTEDQPAQEKKSPKGQFQNVQAEGQQAQVEKVPKLLCQDSESQIQQYQFWQFHKGNLQAGQPRTVNLLAKNPLTG

SEQ ID NO: 8959 - protein, 153 aa, Homo sapiens
MESTSQDRRATHVITIKPNETVLTAFPYRPHSSLLDFLKGEPRVLGATQILLALIIVGFGTIFALNYIGFSQRLPLVVLTGYPFWGALIGQGVTGMNVISSLVAITGITFTILSYRHQDKYCQMPSFEEICVFSRTLFIDFILLTPPHSSHFL

SEQ ID NO: 8960 - protein, 153 aa, Homo sapiens; identical to SEQ ID NO: 8959

SEQ ID NO: 8961 - protein, 148 aa, Homo sapiens
MESTSQDRRATHVITIKPNETVLTAFPYRPHSSLLDFLKGEPRVLGATQILLALIIVGFGTIFALNYIGFSQRLPLVVLTGYPFWGALIGQGVTGMNVISSLVAITGITFTILSYRHQDKYCQMPSFEEICVFSRTLFIGILLILLII

SEQ ID NO: 8962 - protein, 695 aa, Homo sapiens
MESTSQDRRATHVITIKPNETVLTAFPYRPHSSLLDFLKGEPRVLGATQILLALIIVGFGTIFALNYIGFSQRLPLVVLTGYPFWGALIGQGVTGMNVISSLVAITGITFTILSYRHQDKYCQMPSFEEICVFSRTLFIGILLILLIISIAELSISVTIASFRSKCWTQSDEVLFFLPSDVTQNSEQPAPEENDQLQFVLQEEFSSDDSTTNAQSVIFGGYAFFKLTLSRSPLVSQPGNKGREFVPDEQKQSILPSPKFSEEEIEPLPPTLEKKPSENMSIQLDSTFKQMKDEDLQSAIVQPSQMQTKLLQDQAASLQVFPSHSALKLEDISPEDLPSQALPVEGLSEQTMPSKSTSSHVKQSSNLTANDLPPQGILSQDTSSQDMLFHDMTSQDMQSLDMLSQDTPSHAMPPQDIPSQDMLSQALSAHAILPEASTSHIVQFPEIQHLLQQPPDLQPENTEPQNQQILQMSYQDIRSEVMEETKEWKSEEELHRRKSSRRHSLNQQTKALQYLRRHSLDVQAKGQKSSKRHSLDQQSKGWQSPKQKSLDQQIKDWLSPKRHSVDKQAQLNQTKEQLPDQQAEDQQAKGEQYPEGQSKDGQVKDQQTDKEQNSKKQTQDQQTEDQPAQEKKSPKGQFQNVQAEGQQAQVEKVPKLLCQDSESQIQQYQFWQFHKGNLQAGQPRTVNLLAKNPLTG

SEQ ID NO: 8963 - protein, 662 aa, Homo sapiens
MESTSQDRRATHVITIKPNETVLTAFPYRPHSSLLDFLKGEPRVLGATQILLALIIVGFGTIFALNYIGFSQRLPLVVLTGYPFWGALIGQGVTGMNVISSLVAITGITFTILSYRHQDKYCQMPSFEEICVFSRTLFIVLFFLPSDVTQNSEQPAPEENDQLQFVLQEEFSSDDSTTNAQSVIFGGYAFFKLTLSRSPLVSQPGNKGREFVPDEQKQSILPSPKFSEEEIEPLPPTLEKKPSENMSIQLDSTFKQMKDEDLQSAIVQPSQMQTKLLQDQAASLQVFPSHSALKLEDISPEDLPSQALPVEGLSEQTMPSKSTSSHVKQSSNLTANDLPPQGILSQDTSSQDMLFHDMTSQDMQSLDMLSQDTPSHAMPPQDIPSQDMLSQALSAHAILPEASTSHIVQFPEIQHLLQQPPDLQPENTEPQNQQILQMSYQDIRSEVMEETKEWKSEEELHRRKSSRRHSLNQQTKALQYLRRHSLDVQAKGQKSSKRHSLDQQSKGWQSPKQKSLDQQIKDWLSPKRHSVDKQAQLNQTKEQLPDQQAEDQQAKGEQYPEGQSKDGQVKDQQTDKEQNSKKQTQDQQTEDQPAQEKKSPKGQFQNVQAEGQQAQVEKVPKLLCQDSESQIQQYQFWQFHKGNLQAGQPRTVNLLAKNPLTG

SEQ ID NO: 8964 - protein, 94 aa, Homo sapiens
MESTSQDRRATHVITIKPNETVLTAFPYRPHSSLLDFLKGEPRVLGATQILLALIIVGFGTIFALNYIGFSQRLPLVVLTGYPFWGALIVSTVD

SEQ ID NO: 8965 - protein, 567 aa, Homo sapiens
MNVISSLVAITGITFTILSYRHQDKYCQMPSFEEICVFSRTLFIVLFFLPSDVTQNSEQPAPEENDQLQFVLQEEFSSDDSTTNAQSVIFGGYAFFKLTLSRSPLVSQPGNKGREFVPDEQKQSILPSPKFSEEEIEPLPPTLEKKPSENMSIQLDSTFKQMKDEDLQSAIVQPSQMQTKLLQDQAASLQVFPSHSALKLEDISPEDLPSQALPVEGLSEQTMPSKSTSSHVKQSSNLTANDLPPQGILSQDTSSQDMLFHDMTSQDMQSLDMLSQDTPSHAMPPQDIPSQDMLSQALSAHAILPEASTSHIVQFPEIQHLLQQPPDLQPENTEPQNQQILQMSYQDIRSEVMEETKEWKSEEELHRRKSSRRHSLNQQTKALQYLRRHSLDVQAKGQKSSKRHSLDQQSKGWQSPKQKSLDQQIKDWLSPKRHSVDKQAQLNQTKEQLPDQQAEDQQAKGEQYPEGQSKDGQVKDQQTDKEQNSKKQTQDQQTEDQPAQEKKSPKGQFQNVQAEGQQAQVEKVPKLLCQDSESQIQQYQFWQFHKGNLQAGQPRTVNLLAKNPLTG

SEQ ID NO: 8966 - protein, 139 aa, Homo sapiens
  VARIANT 1: note = misc_feature - Xaa can be any naturally occurring amino acid
XRVLGATQILLALIIVGFGTIFALNYIGFSQRLPLVVLTGYPFWGALIFILTGYLTVTDKKSKLLGQGVTGMNVISSLVAITGITFTILSYRHQDKYCQMPSFEEICVFSRTLFIVSGLILHEESLKSSLNCVHDVMIH

SEQ ID NO: 8967 - protein, 214 aa, Homo sapiens
MASHEVDNAELGSASAHGTPGSEAGPEELNTSVYQPIDGSPDYQKAKLQVLGAIQILNAAMILALGVFLGSLQYPYHFQKHFFFFTFYTGYPIWGAVFFCSSGTLSVVAGIKPTRTWIQNSFGMNIASATIALVGTAFLSLNIAVNIQSLRSCHSSSESPDLCNYMGSISNGMVSLLLILTLLELCVTISTIAMWCNANCCNSREEISSPPNSV

SEQ ID NO: 8968 - protein, 168 aa, Homo sapiens
MASHEVDNAELGSASAHGTPGSEAGPEELNTSVYQPIDGSPDYQKAKLQVLGFCSSGTLSVVAGIKPTRTWIQNSFGMNIASATIALVGTAFLSLNIAVNIQSLRSCHSSSESPDLCNYMGSISNGMVSLLLILTLLELCVTISTIAMWCNANCCNSREEISSPPNSV

SEQ ID NO: 8969 - protein, 168 aa, Homo sapiens; identical to SEQ ID NO: 8968

SEQ ID NO: 8970 - protein, 83 aa, Homo sapiens
MASHEVDNAELGSASAHGTPGSEAGPEELNTSVYQPIDGSPDYQKAKLQVLGSIQREEDEDEDLYDNLLPLNEYSVVQEPCLL

SEQ ID NO: 8971 - protein, 91 aa, Homo sapiens
MNIASATIALVGTAFLSLNIAVNIQSLRSCHSSSESPDLCNYMGSISNGMVSLLLILTLLELCVTISTIAMWCNANCCNSREEISSPPNSV

SEQ ID NO: 8972 - protein, 1137 aa, Homo sapiens
MSRRKPASGGLAASSSAPARQAVLSRFFQSTGSLKSTSSSTGAADQVDPGAAAAAAAAAAAAPPAPPAPAFPPQLPPHIATEIDRRKKRPLENDGPVKKKVKKVQQKEGGSDLGMSGNSEPKKCLRTRNVSKSLEKLKEFCCDSALPQSRVQTESLQERFAVLPKCTDFDDISLLHAKNAVSSEDSKRQINQKDTTLFDLSQFGSSNTSHENLQKTASKSANKRSKSIYTPLELQYIEMKQQHKDAVLCVECGYKYRFFGEDAEIAARELNIYCHLDHNFMTASIPTHRLFVHVRRLVAKGYKVGVVKQTETAALKAIGDNRSSLFSRKLTALYTKSTLIGEDVNPLIKLDDAVNVDEIMTDTSTSYLLCISENKENVRDKKKGNIFIGIVGVQPATGEVVFDSFQDSASRSELETRMSSLQPVELLLPSALSEQTEALIHRATSVSVQDDRIRVERMDNIYFEYSHAFQAVTEFYAKDTVDIKGSQIISGIVNLEKPVICSLAAIIKYLKEFNLEKMLSKPENFKQLSSKMEFMTINGTTLRNLEILQNQTDMKTKGSLLWVLDHTKTSFGRRKLKKWVTQPLLKLREINARLDAVSEVLHSESSVFGQIENHLRKLPDIERGLCSIYHKKCSTQEFFLIVKTLYHLKSEFQAIIPAVNSHIQSDLLRTVILEIPELLSPVEHYLKILNEQAAKVGDKTELFKDLSDFPLIKKRKDEIQGVIDEIRMHLQEIRKILKNPSAQYVTVSGQEFMIEIKNSAVSCIPTDWVKVGSTKAVSRFHSPFIVENYRHLNQLREQLVLDCSAEWLDFLEKFSEHYHSLCKAVHHLATVDCIFSLAKVAKQGDYCRPTVQEERKIVIKNGRHPVIDVLLGEQDQYVPNNTDLSEDSERVMIITGPNMGGKSSYIKQVALITIMAQIGSYVPAEEATIGIVDGIFTRMGAADNIYKGQSTFMEELTDTAEIIRKATSQSLVILDELGRGTSTHDGIAIAYATLEYFIRDVKSLTLFVTHYPPVCELEKNYSHQVGNYHMGFLVSEDESKLDPGAAEQVPDFVTFLYQITRGIAARSYGLNVAKLADVPGEILKKAAHKSKELEGLINTKRKRLKYFAKLWTMHNAQDLQKWTEEFNMEETQTSLLH

SEQ ID NO: 8973 - protein, 166 aa, Homo sapiens
GYSRPRYSPQVLGVRIQNGRHPLMELCARTFVPNSTECGGDKGRVKVITGPNSSGKSIYLKQVAKAVNNATAQSLVLIDEFGKGTNTVDGLALLAAVLRHWLARGPTCPHIFVATNFLSLVQLQLLPQGPLVQYLDWPRVSGQEGGLRRCCEGQPCLPHSCPGWAS

SEQ ID NO: 8974 - protein, 333 aa, Homo sapiens
KILFLSSIIPFDCLLTVRALGGLLKFLGRRRIGVELEDYNVSVPILGFKKFMLTHLVNIDQDTYSVLQIFKSESHPSVYKVASGLKEGLSLFGILNRCHCKWGEKLLRLWFTRPTHDLGELSSRLDVIQFFLLPQNLDMAQMLHRLLGHIKNVPLILKRMKLSHTKVSDWQVLYKTVYSALGLRDACRSLPQSIQLFRDIAQEFSDDLHHIASLIGKVYLSPQVDFEGSLAENRFTVLPNIDPEIDEKKRRLMGLPSFLTEVARKELENLDSRIPSCSVIYIPLIGFLLSIPRLPSMVEASDFEINGLDFMFLSEEKLHYRSARTKELDALLG

SEQ ID NO: 8975 - protein, 822 aa, Homo sapiens
MASLGANPRRTPQGPRPGAASSGFPSPAPVPGPREAEEEEVEEEEELAEIHLCVLWNSGYLGIAYYDTSDSTIHFMPDAPDHESLKLLQRVLDEINPQSVVTSAKQDENMTRFLGKLASQEHREPKRPEIIFLPSVDFGLEISKQRLLSGNYSFIPDAMTATEKILFLSSIIPFDCLLTPPGDLRFTPIPLLIPSQVRALGGLLKFLGRRRIGVELEDYNVSVPILGFKKFMLTHLVNIDQDTYSVLQIFKSESHPSVYKVASGLKEGLSLFGILNRCHCKWGEKLLRLWFTRPTHDLGELSSRLDVIQFFLLPQNLDMAQMLHRLLGHIKNVPLILKRMKLSHTKVSDWQVLYKTVYSALGLRDACRSLPQSIQLFRDIAQEFSDDLHHIASLIGKVVDFEGSLAENRFTVLPNIDPEIDEKKRRLMGLPSFLTEVARKELENLDSRIPSCSVIYIPLIGFLLSIPRLPSMVEASDFEINGLDFMFLSEEKLHYRSARTKELDALLGDLHCEIRDQETLLMYQLQCQVLARAAVLTRVLDLASRLDVLLALASAARDYGYSRPRYSPQVLGVRIQNGRHPLMELCARTFVPNSTECGGDKGRVKVITGPNSSGKSIYLKQVGLITFMALVGSFVPAEEAEIGAVDAIFTRIHSCESISLGLSTFMIDLNQQVAKAVNNATAQSLVLIDEFGKGTNTVDGLALLAAVLRHWLARGPTCPHIFVATNFLSLVQLQLLPQGPLVQYLTMETCEDGNDLVFFYQVSDLIRSGKPIKPVKDLLKKNQMENCQTLVDKFMKLDLEDPNLDLNVFMSQEVLPAATSIL

SEQ ID NO: 8976 - protein, 194 aa, Homo sapiens
MASLGANPRRTPQGPRPGAASSGFPSPAPVPGPREAEEEEVEEEEELAEIHLCVLWNSGYLGIAYYDTSDSTIHFMPDAPDHESLKLLQRVLDEINPQSVVTSAKQDENMTRFLGKLASQEHREPKRPEIIFLPSVDFGLEISKQRLLSGNYSFIPDAMTATEKILFLSSIIPFDCLLTVRALGGLLKFLGRRR

SEQ ID NO: 8977 - protein, 834 aa, Homo sapiens
MASLGANPRRTPQGPRPGAASSGFPSPAPVPGPREAEEEEVEEEEELAEIHLCVLWNSGYLGIAYYDTSDSTIHFMPDAPDHESLKLLQRVLDEINPQSVVTSAKQDENMTRFLGKLASQEHREPKRPEIIFLPSVDFGLEISKQRLLSGNYSFIPDAMTATEKILFLSSIIPFDCLLTVRALGGLLKFLGRRRIGVELEDYNVSVPILGFKKFMLTHLVNIDQDTYSVLQIFKSESHPSVYKVASGLKEGLSLFGILNRCHCKWGEKLLRLWFTRPTHDLGELSSRLDVIQFFLLPQNLDMAQMLHRLLGHIKNVPLILKRMKLSHTKVSDWQVLYKTVYSALGLRDACRSLPQSIQLFRDIAQEFSDDLHHIASLIGKVVDFEGSLAENRFTVLPNIDPEIDEKKRRLMGLPSFLTEVARKELENLDSRIPSCSVIYIPLIGFLLSIPRLPSMVEASDFEINGLDFMFLSEEKLHYRSARTKELDALLGDLHCEIRDQETLLMYQLQCQVLARAAVLTRVLDLASRLDVLLALASAARDYGYSRPRYSPQVLGVRIQNGRHPLMELCARTFVPNSTECGGDKGRVKVITGPNSSGKSIYLKQVGLITFMALVGSFVPAEEAEIGAVDAIFTRIHSCESISLGLSTFMIDLNQVAKAVNNATAQSLVLIDEFGKGTNTVDGLALLAAVLRHWLARGPTCPHIFVATNFLSLVQLQLLPQGPLVQYLTMETCEDGNDLVFFYQVCEGVAKASHASHTAAQAGLPDKLVARGKEVSDLIRSGKPIKPVKDLLKKNQMENCQTLVDKFMKLDLEDPNLDLNVFMSQEVLPAATSIL

SEQ ID NO: 8978 - protein, 835 aa, Homo sapiens
MASLGANPRRTPQGPRPGAASSGFPSPAPVPGPREAEEEEVEEEEELAEIHLCVLWNSGYLGIAYYDTSDSTIHFMPDAPDHESLKLLQRVLDEINPQSVVTSAKQDENMTRFLGKLASQEHREPKRPEIIFLPSVDFGLEISKQRLLSGNYSFIPDAMTATEKILFLSSIIPFDCLLTVRALGGLLKFLGRRRIGVELEDYNVSVPILGFKKFMLTHLVNIDQDTYSVLQIFKSESHPSVYKVASGLKEGLSLFGILNRCHCKWGEKLLRLWFTRPTHDLGELSSRLDVIQFFLLPQNLDMAQMLHRLLGHIKNVPLILKRMKLSHTKVSDWQVLYKTVYSALGLRDACRSLPQSIQLFRDIAQEFSDDLHHIASLIGKVVDFEGSLAENRFTVLPNIDPEIDEKKRRLMGLPSFLTEVARKELENLDSRIPSCSVIYIPLIGFLLSIPRLPSMVEASDFEINGLDFMFLSEEKLHYRSARTKELDALLGDLHCEIRDQETLLMYQLQCQVLARAAVLTRVLDLASRLDVLLALASAARDYGYSRPRYSPQVLGVRIQNGRHPLMELCARTFVPNSTECGGDKGRVKVITGPNSSGKSIYLKQVGLITFMALVGSFVPAEEAEIGAVDAIFTRIHSCESISLGLSTFMIDLNQQVAKAVNNATAQSLVLIDEFGKGTNTVDGLALLAAVLRHWLARGPTCPHIFVATNFLSLVQLQLLPQGPLVQYLTMETCEDGNDLVFFYQVCEGVAKASHASHTAAQAGLPDKLVARGKEVSDLIRSGKPIKPVKDLLKKNQMENCQTLVDKFMKLDLEDPNLDLNVFMSQEVLPAATSIL

SEQ ID NO: 8979 - protein, 834 aa, Homo sapiens; identical to SEQ ID NO: 8977

SEQ ID NO: 8980 - protein, 637 aa, Homo sapiens
MASLGANPRRTPQGPRPGAASSGFPSPAPVPGPREAEEEEVEEEEELAEIHLCVLWNSGYLGIAYYDTSDSTIHFMPDAPDHESLKLLQRVLDEINPQSVVTSAKQDENMTRFLGKLASQEHREPKRPEIIFLPSVDFGLEISKQRLLSGNYSFIPDAMTATEKILFLSSIIPFDCLLTVRALGGLLKFLGRRRIGVELEDYNVSVPILGFKKFMLTHLVNIDQDTYSVLQIFKSESHPSVYKVASGLKEGLSLFGILNRCHCKWGEKLLRLWFTRPTHDLGELSSRLDVIQFFLLPQNLDMAQMLHRLLGHIKNVPLILKRMKLSHTKVSDWQVLYKTVYSALGLRDACRSLPQSIQLFRDIAQEFSDDLHHIASLIGKVVDFEGSLAENRFTVLPNIDPEIDEKKRRLMGLPSFLTEVARKELENLDSRIPSCSVIYIPLIGFLLSIPRLPSMVEASDFEINGLDFMFLSEEKLHYRSARTKELDALLGDLHCEIRDQETLLMYQLQCQVLARAAVLTRVLDLASRLDVLLALASAARDYGYSRPRYSPQVLGVRIQNGRHPLMELCARTFVPNSTECGGDKGRVKVITGPNSSGKSIYLKQLRIHLPWPLHLHDRPQPGGESSEQCHCTVAGPY

SEQ ID NO: 8981 - protein, 508 aa, Homo sapiens
MWPVLLFVFLSQTVYSALGLRDACRSLPQSIQLFRDIAQEFSDDLHHIASLIGKVVDFEGSLAENRFTVLPNIDPEIDEKKRRLMGLPSFLTEVARKELENLDSRIPSCSVIYIPLIGFLLSIPRLPSMVEASDFEINGLDFMFLSEEKLHYRSARTKELDALLGDLHCEIRDQETLLMYQLQCQVLARAAVLTRVLDLASRLDVLLALASAARDYGYSRPRYSPQVLGVRIQNGRHPLMELCARTFVPNSTECGGDKGRVKVITGPNSSGKSIYLKQVGLITFMALVGSFVPAEEAEIGAVDAIFTRIHSCESISLGLSTFMIDLNQVAKAVNNATAQSLVLIDEFGKGTNTVDGLALLAAVLRHWLARGPTCPHIFVATNFLSLVQLQLLPQGPLVQYLTMETCEDGNDLVFFYQVCEGVAKASHASHTAAQAGLPDKLVARGKEVSDLIRSGKPIKPVKDLLKKNQMENCQTLVDKFMKLDLEDPNLDLNVFMSQEVLPAATSIL

SEQ ID NO: 8982 - protein, 156 aa, Homo sapiens
TAQSLVLIDEFGKGTNTVDGLALLAAVLRHWLARGPTCPHIFVATNFLSLVQLQLLPQGPLVQYLVCEGVAKASHASHTAAQAGLPDKLVARGKEVSDLIRSGKPIKPVKDLLKKNQMENCQTLVDKFMKLDLEDPNLDLNVFMSQEVLPAATSIL

SEQ ID NO: 8983 - protein, 159 aa, Homo sapiens
  VARIANT 1: note = misc_feature - Xaa can be any naturally occurring amino acid
XDAPDHESLKLLQRVLDEINPQSVVTSAKQDENMTRFLGKLASQEHREPKRPEIIFLPSVDFGLEISKQRLLSGNYSFIPDAMTATEKILFLSSIIPFDCLLTVRALGGLLKFLGRRRIGVELEDYNVSVPILGFKKFMLTHLVNIDQDTYRNPQQMPL

SEQ ID NO: 8984 - protein, 43 aa, Homo sapiens
  VARIANT 1: note = misc_feature - Xaa can be any naturally occurring amino acid
XRIGVELEDYNVSVPILGFKKFMLTHLVNIDQDTYRNPQQMPL

SEQ ID NO: 8985 - protein, 170 aa, Homo sapiens
MALPTARPLLGSCGTPALGSLLFLLFSLGWVQPSRTLAGETGQEAAPLDGVLANPPNISSLSPRQLLGFPCAEVSGLSTERVRELAVALAQKNVKLSTEQLRCLAHRLSEPPEDLDALPLDLLLFLNPDAFSGPQACTRFFSRITKANVDLLPRGAPERQRLLPAALACW

SEQ ID NO: 8986 - protein, 333 aa, Homo sapiens [sequence omitted]

SEQ ID NO: 8987 - protein, 630 aa, Homo sapiens
MALPTARPLLGSCGTPALGSLLFLLFSLGWVQPSRTLAGETGQEAAPLDGVLANPPNISSLSPRQLLGFPCAEVSGLSTERVRELAVALAQKNVKLSTEQLRCLAHRLSEPPEDLDALPLDLLLFLNPDAFSGPQACTRFFSRITKANVDLLPRGAPERQRLLPAALACWGVRGSLLSEADVRALGGLACDLPGRFVAESAEVLLPRLVSCPGPLDQDQQEAARAALQGGGPPYGPPSTWSVSTMDALRGLLPVLGQPIIRSIPQGIVAAWRQRSSRDPSWRQPERTILRPRFRREVEKTACPSGKKAREIDESLIFYKKWELEACVDAALLATQMDRVNAIPFTYEQLDVLKHKLDELYPQGYPESVIQHLGYLFLKMSPEDIRKWNVTSLETLKALLEVNKGHEMSPQAPRRPLPQVATLIDRFVKGRGQLDKDTLDTLTAFYPGYLCSLSPEELSSVPPSSIWAVRPQDLDTCDPRQLDVLYPKARLAFQNMNGSEYFVKIQSFLGGAPTEDLKALSQQNVSMDLATFMKLRTDAVLPLTVAEVQKLLGPHVEGLKAEERHRPVRDWILRQRQDDLDTLGLGLQGGIPNGYLVLDLSMQEALSGTPCLLGPGPVLTVLALLLASTLA

SEQ ID NO: 8988 - protein, 622 aa, Homo sapiens
MALPTARPLLGSCGTPALGSLLFLLFSLGWVQPSRTLAGETGQEAAPLDGVLANPPNISSLSPRQLLGFPCAEVSGLSTERVRELAVALAQKNVKLSTEQLRCLAHRLSEPPEDLDALPLDLLLFLNPDAFSGPQACTRFFSRITKANVDLLPRGAPERQRLLPAALACWGVRGSLLSEADVRALGGLACDLPGRFVAESAEVLLPRLVSCPGPLDQDQQEAARAALQGGGPPYGPPSTWSVSTMDALRGLLPVLGQPIIRSIPQGIVAAWRQRSSRDPSWRQPERTILRPRFRREVEKTACPSGKKAREIDESLIFYKKWELEACVDAALLATQMDRVNAIPFTYEQLDVLKHKLDELYPQGYPESVIQHLGYLFLKMSPEDIRKWNVTSLETLKALLEVNKGHEMSPQVATLIDRFVKGRGQLDKDTLDTLTAFYPGYLCSLSPEELSSVPPSSIWAVRPQDLDTCDPRQLDVLYPKARLAFQNMNGSEYFVKIQSFLGGAPTEDLKALSQQNVSMDLATFMKLRTDAVLPLTVAEVQKLLGPHVEGLKAEERHRPVRDWILRQRQDDLDTLGLGLQGGIPNGYLVLDLSMQEALSGTPCLLGPGPVLTVLALLLASTLA

SEQ ID NO: 8989 - protein, 622 aa, Homo sapiens; identical to SEQ ID NO: 8988

SEQ ID NO: 8990 - protein, 622 aa, Homo sapiens; identical to SEQ ID NO: 8988

SEQ ID NO: 8991 - protein, 398 aa, Homo sapiens
VEKTACPSGKKAREIDESLIFYKKWELEACVDAALLATQMDRVNAIPFTYEQLDVLKHKLDELYPQGYPESVIQHLGYLFLKMSPEDIRKWNVTSLETLKALLEVNKGHEMSPQVATLIDRFVKGRGQLDKDTLDTLTAFYPGYLCSLSPEELSSVPPSSIWAVRPQDLDTCDPRQLDVLYPKARLAFQNMNGSEYFVKIQSFLGGAPTEDLKALSQQNVSMDLATFMKLRTDAVLPLTVAEVQKLLGPHVEGLKAEERHRPVRDWILRQRQDDLDTLGLGLQGGIPNGYLVLDLSMQGGRGGQARAGGRAGGVEVGALSHPSLCRGPLGDALPPRTWTCSHRPGTAPSLHPGLRAPLPCWPQPCWGSPPGQEQARVVPVPPQENSRSVNGNMPPADT

SEQ ID NO: 8992 - protein, 334 aa, Homo sapiens
  VARIANT 1: note = misc_feature - Xaa can be any naturally occurring amino acid
XSWRQPERTILRPRFRREVEKTACPSGKKAREIDESLIFYKKWELEACVDAALLATQMDRVNAIPFTYEQLDVLKHKLDELYPQGYPESVIQHLGYLFLKMSPEDIRKWNVTSLETLKALLEVNKGHEMSPQVATLIDRFVKGRGQLDKDTLDTLTAFYPGYLCSLSPEELSSVPPSSIWAVRPQDLDTCDPRQLDVLYPKARLAFQNMNGSEYFVKIQSFLGGAPTEDLKALSQQNVSMDLATFMKLRTDAVLPLTVAEVQKLLGPHVEGLKAEERHRPVRDWILRQRQDDLDTLGLGLQGGIPNGYLVLDLSMQGPGPVLTVLALLLASTLA

SEQ ID NO: 8993 - protein, 114 aa, Homo sapiens
MNVLLGSVVIFATFVTLCNASCYFIPNEGVPGDSTRKCMDLKGNKHPINSEWQTDNCETCTCYETEISCCTLVSTPVGYDKDNCQRIFKKEDCKYIVVEKKDPKKTCSVSEWII

SEQ ID NO: 8994 - protein, 77 aa, Homo sapiens
MNVLLGSVVIFATFVTLCNASCYFIPNEGVPGDSTRMFLHLWVMTKTTAKESSRRRTASISWWRRRTQKRPVLSVNG

SEQ ID NO: 8995 - protein, 59 aa, Homo sapiens
MAVFGMGCFWGAERKFWVLKGVYSTQVGFAGGYTSNPTYKEVCSDVQNNSMFISLFKSF

SEQ ID NO: 8996 - protein, 82 aa, Homo sapiens
MAVFGMGCFWGAERKFWVLKGVYSTQVGFAGGYTSNPTYKEVCSEKTGHAEVVRVVYQPEHMSFEELLKVFWENHDPTQGMR

SEQ ID NO: 8997 - protein, 169 aa, Homo sapiens
MAVFGMGCFWGAERKFWVLKGVYSTQVGFAGGYTSNPTYKEVCSEKTGHAEVVRVVYQPEHMSFEELLKVFWENHDPTQGMRQGNDHGTQYRSAIYPTSAKQMEAALSSKENYQKVLSEHGFGPITTDIREGQTFYYAEDYHQQYLSKNPNGYCGLGGTGVSCPVGIKK

SEQ ID NO: 8998 - protein, 192 aa, Homo sapiens
MCSEPKHHVNGNRTVEPFPEGTQMAVFGMGCFWGAERKFWVLKGVYSTQVGFAGGYTSNPTYKEVCSEKTGHAEVVRVVYQPEHMSFEELLKVFWENHDPTQGMRQGNDHGTQYRSAIYPTSAKQMEAALSSKENYQKVLSEHGFGPITTDIREGQTFYYAEDYHQQYLSKNPNGYCGLGGTGVSCPVGIKK

SEQ ID NO: 8999 - protein, 195 aa, Homo sapiens
MLSATRRACQLLLLHSLFPVPRMGNSASNIVSPQEALPGRKEQTPVAAKHHVNGNRTVEPFPEGTQMAVFEKTGHAEVVRVVYQPEHMSFEELLKVFWENHDPTQGMRQGNDHGTQYRSAIYPTSAKQMEAALSSKENYQKVLSEHGFGPITTDIREGQTFYYAEDYHQQYLSKNPNGYCGLGGTGVSCPVGIKK

SEQ ID NO: 9000 - protein, 213 aa, Homo sapiens
MLSATRRACQLLLLHSLFPVPRMGNSASNIVSPQEALPGRKEQTPVAAKHHVNGNRTVEPFPEGTQMAVFGMGCFWGAERKFWVLKGVYSTQVGFAGGYTSNPTYKEVCSEKTGHAEVVRVVYQPEHMSFEELLKVFWENHDPTQGMRQGNDHGTQYRSAIYPTSAKQMEAALSSKENYQKLVLPCSSSAMLGLTAASSAQLAWVQPSSRKHY

SEQ ID NO: 9001 - protein, 235 aa, Homo sapiens
MLSATRRACQLLLLHSLFPVPRMGNSASNIVSPQEALPGRKEQTPVAAKHHVNGNRTVEPFPEGTQMAVFGMGCFWGAERKFWVLKGVYSTQVGFAGGYTSNPTYKEVCSEKTGHAEVVRVVYQPEHMSFEELLKVFWENHDPTQGMRQGNDHGTQYRSAIYPTSAKQMEAALSSKENYQKVLSEHGFGPITTDIREGQTFYYAEDYHQQYLSKNPNGYCGLGGTGVSCPVGIKK

SEQ ID NO: 9002 - protein, 91 aa, Homo sapiens
  VARIANT 1: note = misc_feature - Xaa can be any naturally occurring amino acid
XKTGHAEVVRVVYQPEHMSFEELLKVFWENHDPTQGMRQGNDHGTQYRSAIYPTSAKQMEAALSSKENYQKVPKHVHWKKRTQTGLQTEGR

SEQ ID NO: 9003 - protein, 182 aa, Homo sapiens
MARLLWLLRGLTLGTAPRRAVRGQAGGGGPGTGPGLGEAGSLATCELPLAKSEWQKKLTPEQFYVTREKGTEPPFSGIYLNNKEAGMYHCVCCDSPLFSSEKKYCSGTGWPSFSEAHGTSGSDESHTGILRRLDTSLGSARTEVVCKQCEAHLGHVFPDGPGPNGQRFCINSVALKFKPRKH

SEQ ID NO: 9004 - protein, 120 aa, Homo sapiens
  VARIANT 1: note = misc_feature - Xaa can be any naturally occurring amino acid
XSLATCELPLAKSEWQKKLTPEQFYVTREKGTEPPFSGIYLNNKEAGMYHCVCCDSPLFRSLLDIQKEVFSIKGSRSPSTSRGNGFDSEVLRKSTALALGGLRFPRLMVRLALMKATQGS

SEQ ID NO: 9005 - protein, 84 aa, Homo sapiens
GEYTHHKDPGIYKCVVCGTPLFKSETKFDSGSGWPSFHDVINSEAITFTDDFSYGMHRVETSCSQQEGPHQMLPLNLGFPGLQN

SEQ ID NO: 9006 - protein, 117 aa, Homo sapiens
MSAFNLLHLVTKSQPVALRACGLPSGSCRDKKNCKVVFSQQELRKRLTPLQYHVTQEKGTESAFEGEYTHHKDPGIYKCVVCGTPLFKSETKFDSGSGWPSFHDVINSEAITFTDDF

SEQ ID NO: 9007 - protein, 164 aa, Homo sapiens
MSAFNLLHLVTKSQPVALRACGLPSGSCRDKKNCKVVFSQQELRKRLTPLQYHVTQEKGTESAFEGEYTHHKDPGIYKCVVCGTPLFKSETKFDSGSGWPSFHDVINSEAITFTDDFSYGMHRVETSCSQCGAHLGHIFDDGPRPTGKRYCINSAALSFTPADS

SEQ ID NO: 9008 - protein, 185 aa, Homo sapiens
MSAFNLLHLVTKSQPVALRACGLPSGSCRDKKNCKVVFSQQELRKRLTPLQYHVTQEKGTESAFEGEYTHHKDPGIYKCVVCGTPLFKSETKFDSGSGWPSFHDVINSEAITFTDDFSYGMHRVETSCSQCGAHLGHIFDDGPRPTGKRYCINSAALSFTPADSSGTAEGGSGVASPAQADKAEL

SEQ ID NO: 9009 - protein, 185 aa, Homo sapiens; identical to SEQ ID NO: 9008

SEQ ID NO: 9010 - protein, 185 aa, Homo sapiens; identical to SEQ ID NO: 9008

SEQ ID NO: 9011 - protein, 185 aa, Homo sapiens; identical to SEQ ID NO: 9008

SEQ ID NO: 9012 - protein, 185 aa, Homo sapiens; identical to SEQ ID NO: 9008

SEQ ID NO: 9013 - protein, 185 aa, Homo sapiens; identical to SEQ ID NO: 9008

SEQ ID NO: 9014 - protein, 44 aa, Homo sapiens
MSPRRTLPRPLSLCLSLCLCLCLAAALGSAQSALAPVLCFSFCW

SEQ ID NO: 9015 - protein, 192 aa, Homo sapiens
MSPRRTLPRPLSLCLSLCLCLCLAAALGSAQSGSCRDKKNCKVVFSQQELRKRLTPLQYHVTQEKGTESAFEGEYTHHKDPGIYKCVVCGTPLFKSETKFDSGSGWPSFHDVINSEAITFTDDFSYGMHRVETSCSQCGAHLGHIFDDGPRPTGKRYCINSAALSFTPADSSGTAEGGSGVASPAQADKAEL

SEQ ID NO: 9016 - protein, 160 aa, Homo sapiens
MSPRRTLPRPLSLCLSLCLCLCLAAALGSAQSGSCRDKKNCKVVFSQQELRKRLTPLQYHVTQEKGTESAFEGEYTHHKDPGIYKCVVCGTPLFKSETKFDSGSGWPSFHDVINSEAITFTDDFSYGMHRVETSCSQVSSSFLKTQYIAFRTPGCAKYSN

SEQ ID NO: 9017 - protein, 117 aa, Homo sapiens
  VARIANT 1: note = misc_feature - Xaa can be any naturally occurring amino acid
XLRKRLTPLQYHVTQEKGTESAFEGEYTHHKDPGIYKCVVCGTPLFKSETKFDSGSGWPSFHDVINSEAITFTDDFSYGMHRVETSCSQQEGPHQMLPLNLGFPGLQNCEPINFYSF

SEQ ID NO: 9018 - protein, 174 aa, Homo sapiens
  VARIANT 1: note = misc_feature - Xaa can be any naturally occurring amino acid
XRRRLPGLSMSPRRTLPRPLSLCLSLCLCLCLAAALGSAQSGSCRDKKNCKVVFSQQELRKRLTPLQYHVTQEKGTESAFEGEYTHHKDPGIYKCVVCGTPLFKSETKFDSGSGWPSFHDVINSEAITFTDDFSYGMHRVETSCSQQEGPHQMLPLNLGFPGLQNCEPINFYSF

SEQ ID NO: 9019 - protein, 725 aa, Homo sapiens
MGLWWVTVQPPARRMGWLPLLLLLTQCLGVPGQRSPLNDFQVLRGTELQHLLHAVVPGPWQEDVADAEECAGRCGPLMDCRAFHYNVSSHGCQLLPWTQHSPHTRLRRSGRCDLFQKKDYVRTCIMNNGVGYRGTMATTVGGLPCQAWSHKFPNDHKYTPTLRNGLEENFCRNPDGDPGGPWCYTTDPAVRFQSCGIKSCREAACVWCNGEEYRGAVDRTESGRECQRWDLQHPHQHPFEPGKFLDQGLDDNYCRNPDGSERPWCYTTDPQIEREFCDLPRCGSEAQPRQEATTVSCFRGKGEGYRGTANTTTAGVPCQRWDAQIPHQHRFTPEKYACKDLRENFCRNPDGSEAPWCFTLRPGMRAAFCYQIRRCTDDVRPQDCYHGAGEQYRGTVSKTRKGVQCQRWSAETPHKPQFTFTSEPHAQLEENFCRNPDGDSHGPWCYTMDPRTPFDYCALRRCADDQPPSILDPPDQVQFEKCGKRVDRLDQRRSKLRVVGGHPGNSPWTVSLRNRQGQHFCGGSLVKEQWILTARQCFSSCHMPLTGYEVWLGTLFQNPQHGEPSLQRVPVAKMVCGPSGSQLVLLKLERSVTLNQRVALICLPPEWYVVPPGTKCEIAGWGETKGTGNDTVLNVALLNVISNQECNIKHRGRVRESEMCTEGLLAPVGACEGDYGGPLACFTHNCWVLEGIIIPNRVCARSRWPAVFTRVSVFVDWIHKVMRLG

SEQ ID NO: 9020 - protein, 195 aa, Homo sapiens
  VARIANT 1: note = misc_feature - Xaa can be any naturally occurring amino acid
XAGPAFLRGVSSEGAVDTDCPAVLLLLNPQHGEPSLQRVPVAKMVCGPSGSQLVLLKLERSVTLNQRVALICLPPEWYVVPPGTKCEIAGWGETKGTGNDTVLNVALLNVISNQECNIKHRGRVRESEMCTEGLLAPVGACEGDYGGPLACFTHNCWVLEGIIIPNRVCARSRWPAVFTRVSVFVDWIHKVMRLG

SEQ ID NO: 9021 - protein, 375 aa, Homo sapiens
MQKLQLCVYIYLFMLIVAGPVDLNENSEQKENVEKEGLCNACTWRQNTKSSRIEAIKIQILSKLRLETAPNISKDVIRQLLPKAPPLRELIDQYDVQRDDSSDGSLEDDDYHATTETIITMPTESDFLMQVDGKPKCCFFKFSSKIQYNKVVKAQLWIYLRPVETPTTVFVQILRLIKPMKDGTRYTGIRSLKLDMNPGTGIWQSIDVKTVLQNWLKQPESNLGIEIKALDENGHDLAVTFPGPGEDGLNPFLEVKVTDTPKRSRRDFGLDCDEHSTESRCCRYPLTVDFEAFGWDWIIAPKRYKANYCSGECEFVFLQKYPHTHLVHQANPRGSAGPCCTPTKMSPINMLYFNGKEQIIYGKIPAMVVDRCGCS

SEQ ID NO: 9022 - protein, 62 aa, Homo sapiens
MDPNCSCAAAGVSCTCASSCKCKECKCTSCKKSCCSCCPVGCAKCAQGCICKGASEKCSCCA

SEQ ID NO: 9023 - protein, 39 aa, Homo sapiens
MDPNCSCAAGCCSCCPVGCAKCAQGCICKGASEKCSCCA

SEQ ID NO: 9024 - protein, 61 aa, Homo sapiens
MDPNCSCAAGVSCTCASSCKCKECKCTSCKKSCCSCCPVGCAKCAQGCICKGASEKCSCCA

SEQ ID NO: 9025 - protein, 68 aa, Homo sapiens
MDPNCSCAAGVSCTCASSCKCKECKCTSCKKSECGAISRNLGLWLRLGGNPRLSLSACFWGTGLPLSL

SEQ ID NO: 9026 - protein, 36 aa, Homo sapiens
MAATSLMSALAARLLQPAHSCSLRLRPFHLAAVRAY

SEQ ID NO: 9027 - protein, 267 aa, Homo sapiens
MAATSLMSALAARLLQPAHSCSLRLRPFHLAAVRNEAVVISGRKLAQQIKQEVRQEVEEWVASGNKRPHLSVILVGENPASHSYVLNKTRAAAVVEHIDERRICNAVSPDKDVDGFHVINVGRMCLDQYSMLPATPWGVWEIIKRTGIPTLGKNVVVAGRSKNVGMPIAMLLHTDGAHERPGGDATVTISHRYTPKEQLKKHTILADIVISAAGVRQKAGYITPVPGGVGPMTVAMLMKNTIIAAKKVLRLEEREVLKSKELGVATN

SEQ ID NO: 9028 - protein, 222 aa, Homo sapiens
MAATSLMSALAARLLQPAHSCSLRLRPFHLAAVRNEAVVISGRKLAQQIKQEVRQEVEEWVASGNKRPHLSVILVGENPASHSYVLNKTRAAAVVGDATVTISHRYTPKEQLKKHTILADIVISAAGIPNLITADMIKEGAAVIDVGINRVHDPVTAKPKLVGDVDFEGVRQKAGYITPVPGGVGPMTVAMLMKNTIIAAKKVLRLEEREVLKSKELGVATN

SEQ ID NO: 9029 - protein, 350 aa, Homo sapiens
MAATSLMSALAARLLQPAHSCSLRLRPFHLAAVRNEAVVISGRKLAQQIKQEVRQEVEEWVASGNKRPHLSVILVGENPASHSYVLNKTRAAAVVGINSETIMKPASISEEELLNLINKLNNDDNVDGLLVQLPLPEHIDERRICNAVSPDKDVDGFHVINVGRMCLDQYSMLPATPWGVWEIIKRTGIPTLGKNVVVAGRSKNVGMPIAMLLHTDGAHERPGGDATVTISHRYTPKEQLKKHTILADIVISAAGIPNLITADMIKEGAAVIDVGINRVHDPVTAKPKLVGDVDFEGVRQKAGYITPVPGGVGPMTVAMLMKNTIIAAKKVLRLEEREVLKSKELGVATN

SEQ ID NO: 9030 - protein, 37 aa, Homo sapiens
MAATSLMSALAARLLQPAHSCSLRLRPFHLAAVRNQQ

SEQ ID NO: 9031 - protein, 292 aa, Homo sapiens
MAGARAAAAAASAGSSASSGNQPPQELGLGELLEEFSRTQYRAKDGSGTGGSKCWDLVQQTQNYLKLLLSLVNSDDDSGLLVHCISGWDRTPLFISLLRLSLWADGLIHTSLKPTEILYLTVAYDWFLFGHMLVDRLSKGEEIFFFCFNFLKHITSEEFSALKTQRRKSLPARDGGFTLEDICMLRRKDRGSTTSLGSDFSLVMESSPGATGSFTYEAVELVPAGAPTQAAWLAALSDRETRLQEVRSAFLAAYSSTVGLRAVAPSPSGAIGGLLEQFARGVGLRSISSNAL

SEQ ID NO: 9032 - protein, 71 aa, Homo sapiens
MAGARAAAAAASAGSSASSGNQPPQELGLGELLEEFSRTQYRAKDGSGTGGSKSSYRQTWRASCQLRPSPP

SEQ ID NO: 9033 - protein, 158 aa, Homo sapiens
MAGARAAAAAASAGSSASSGNQPPQELGLGELLEEFSRTQYRAKDGSGTGGSKVERIEKRCLELFGRDYCFSVIPNTNGDICGHYPRHIVFLEYESSEKEKDTFESTVQGVQMMPGQMWRTSRRRTVLFEVVTRIFLIRSEAMTSSCFDTCQSNTSVT

SEQ ID NO: 9034 - protein, 188 aa, Homo sapiens
MAGARAAAAAASAGSSASSGNQPPQELGLGELLEEFSRTQYRAKDGSGTGGSKVERIEKRCLELFGRDYCFSVIPNTNGDICGHYPRHIVFLEYESSEKEKDTFESTVQVSKLQDLIHRSKMARCRGRFVCPVILFKGKGVQMMPGQMWRTSRRRTVLFEVVTRIFLIRSEAMTSSCFDTCQSNTSVT

SEQ ID NO: 9035 - protein, 650 aa, Homo sapiens
MAGARAAAAAASAGSSASSGNQPPQELGLGELLEEFSRTQYRAKDGSGTGGSKVERIEKRCLELFGRDYCFSVIPNTNGDICGHYPRHIVFLEYESSEKEKDTFESTVQVSKLQDLIHRSKMARCRGRFVCPVILFKGKHICRSATLAGWGELYGRSGYNYFFSGGADDAWADVEDVTEEDCALRSGDTHLFDKVRGYDIKLLRYLSVKYICDLMVENKKVKFGMNVTSSEKVDKAQRYADFTLLSIPYPGCEFFKEYKDRDYMAEGLIFNWKQDYVDAPLSIPDFLTHSLNIDWSQYQCWDLVQQTQNYLKLLLSLVNSDDDSGLLVHCISGWDRTPLFISLLRLSLWADGLIHTSLKPTEILYLTVAYDWFLFGHMLVDRLSKGEEIFFFCFNFLKHITSEEFSALKTQRRKSLPARDGGFTLEDICMLRRKDRGSTTSLGSDFSLVMESSPGATGSFTYEAVELVPAGAPTQAAWRKSHSSSPQSVLWNRPQPSEDRLPSQQGLAEARSSSSSSSNHSDNFFRMGSSPLEVPKPRSVDHPLPGSSLSTDYGSWQMVTGCGSIQERAVLHTDSSLPFSFPDELPNSCLLAALSDRETRLQEVRSAFLAAYSSTVGLRAVAPSPSGAIGGLLEQFARGVGLRSISSNAL

SEQ ID NO: 9036 - protein, 598 aa, Homo sapiens
MAGARAAAAAASAGSSASSGNQPPQELGLGELLEEFSRTQYRAKDGSGTGGSKVERIEKRCLELFGRDYCFSVIPNTNGDICGHYPRHIVFLEYESSEKEKDTFESTVQVSKLQDLIHRSKMARCRGRFVCPVILFKGKHICRSATLAGWGELYGRSGYNYFFSGGADDAWADVEDVTEEDCALRSGDTHLFDKVRGYDIKLLRYLSVKYICDLMVENKKVKFGMNVTSSEKVDKAQRYADFTLLSIPYPGCEFFKEYKDRDYMAEGLIFNWKQDYVDAPLSIPDFLTHSLNIDWSQYQCWDLVQQTQNYLKLLLSLVNSDDDSGLLVHCISGWDRTPLFISLLRLSLWADGLIHTSLKPTEILYLTVAYDWFLFGHMLVDRLSKGEEIFFFCFNFLKHITSEEFSALKTQRRKSLPARDGGFTLEDICMLRRKDRGSTTSLGSDFSLVMESSPGATGSFTYEAVELVPAGAPTQAAWRKSHSSSPQSVLWNRPQPSEDRLPSQQGLAEARSSSSSSSNHSDNFFRMGSSPLEVPKPRLAALSDRETRLQEVRSAFLAAYSSTVGLRAVAPSPSGAIGGLLEQFARGVGLRSISSNAL

SEQ ID NO: 9037 - protein, 538 aa, Homo sapiens
MAGARAAAAAASAGSSASSGNQPPQELGLGELLEEFSRTQYRAKDGSGTGGSKVERIEKRCLELFGRDYCFSVIPNTNGDICGHYPRHIVFLEYESSEKEKDTFESTVQVSKLQDLIHRSKMARCRGRFVCPVILFKGKHICRSATLAGWGELYGRSGYNYFFSGGADDAWADVEDVTEEDCALRSGDTHLFDKVRGYDIKLLRYLSVKYICDLMVENKKVKFGMNVTSSEKVDKAQRYADFTLLSIPYPGCEFFKEYKDRDYMAEGLIFNWKQDYVDAPLSIPDFLTHSLNIDWSQYQCWDLVQQTQNYLKLLLSLVNSDDDSGLLVHCISGWDRTPLFISLLRLSLWADGLIHTSLKPTEILYLTVAYDWFLFGHMLVDRLSKGEEIFFFCFNFLKHITSEEFSALKTQRRKSLPARDGGFTLEDICMLRRKDRGSTTSLGSDFSLVMESSPGATGSFTYEAVELVPAGAPTQAAWLAALSDRETRLQEVRSAFLAAYSSTVGLRAVAPSPSGAIGGLLEQFARGVGLRSISSNAL

SEQ ID NO: 9038 - protein, 187 aa, Homo sapiens
MAGARAAAAAASAGSSASSGNQPPQELGLGELLEEFSRTQYRAKDGSGTGGSKVERIEKRCLELFGRDYCFSVIPNTNGDICGHYPRHIVFLEYESSEKEKDTSGDTHLFDKVRGYDIKLLRYLSVKYICDLMVENKKVKFGMNVTSSEKVDKAQRYADFTLLSIPYPVLGSGATNTKLPEAAAFLS

SEQ ID NO: 9039 - protein, 154 aa, Homo sapiens
MALLILLLVPLLLPDSGSEAYSGCEFFKEYKDRDYMAEGLIFNWKQDYVDAPLSIPDFLTHSLNIDWSQYQCWDLVQQTQNYLKLLLSLVNSDDDSGLLVHCISGWDRTPLFISLLRLSLWADGLIHTSLKPTEILYLTVAYDWFLFGHMLVDR

SEQ ID NO: 9040 - protein, 60 aa, Homo sapiens
MDAQATTIFSQGVQMMPGQMWRTSRRRTVLFEVVTRIFLIRSEAMTSSCFDTCQSNTSVT

SEQ ID NO: 9041 - protein, 36 aa, Homo sapiens
MSHCAWPETELELDVGEPVKEPLADLTRKGLRVPYR

SEQ ID NO: 9042 - protein, 24 aa, Homo sapiens
MATRGFSCLLLVISEIDLSVKRWV

SEQ ID NO: 9043 - protein, 725 aa, Homo sapiens
MGAASVRAGARLVEVALCSFTVTCLEVMRRFLLLYATQQGQAKAIAEEICEQAVVHGFSADLHCISESDKYDLKTETAPLVVVVSTTGTGDPPDTARKFVKEIQNQTLPVDFFAHLRYGLLGLGDSEYTYFCNGGKIIDKRLQELGARHFYDTGHADDCVGLELVVEPWIAGLWPALRKHFRSSRGQEEISGALPVASPASSRTDLVKSELLHIESQVELLRFDDSGRKDSEVLKQNAVNSNQSNVVIEDFESSLTRSVPPLSQASLNIPGLPPEYLQVHLQESLGQEESQVSVTSADPVFQVPISKAVQLTTNDAIKTTLLVELDISNTDFSYQPGDAFSVICPNSDSEVQSLLQRLQLEDKREHCVLLKIKADTKKKGATLPQHIPAGCSLQFIFTWCLEIRAIPKKAFLRALVDYTSDSAEKRRLQELCSKQGAADYSRFVRDACACLLDLLLAFPSCQPPLSLLLEHLPKLQPRPYSCASSSLFHPGKLHFVFNIVEFLSTATTEVLRKGVCTGWLALLVASVLQPNIHASHEDSGKALAPKISISPRTTNSFHLPDDPSIPIIMVGPGTGIAPFIGFLQHREKLQEQHPDGNFGAMWLFFGCRHKDRDYLFRKELRHFLKHGILTHLKVSFSRDAPVGEEEAPAKYVQDNIQLHGQQVARILLQENGHIYVCGDAKNMAKDVHDALVQIISKEVGVEKLEAMKTLATLKEEKRYLQDIWS

SEQ ID NO: 9044 - protein, 41 aa, Homo sapiens
MRRFLLLYATQQGQAKAIAEEICEQAVVHGFSADLHCISES

SEQ ID NO: 9045 - protein, 46 aa, Homo sapiens
MRRFLLLYATQQGQAKAIAEEICEQAVVHGFSADLHCISESDKCEK

SEQ ID NO: 9046 - protein, 58 aa, Homo sapiens
MRRFLLLYATQQGQAKAIAEEICEQAVVHGFSADLHCISESDKVSVIQNTPTFAMGGR

SEQ ID NO: 9047 - protein, 58 aa, Homo sapiens; identical to SEQ ID NO: 9046

SEQ ID NO: 9048 - protein, 92 aa, Homo sapiens
MRRFLLLYATQQGQAKAIAEEICEQAVVHGFSADLHCISESDKYDLKTETAPLVVVVSTTGTGDPPDTARKFVKEIQNQTLPVDFFAHLRSR

SEQ ID NO: 9049 - protein, 112 aa, Homo sapiens
MRRFLLLYATQQGQAKAIAEEICEQAVVHGFSADLHCISESDKYDLKTETAPLVVVVSTTGTGDPPDTARKFVKEIQNQTLPVDFFAHLRYGLLGLGDSEYTYFCNGGKIID

SEQ ID NO: 9050 - protein, 156 aa, Homo sapiens
MRRFLLLYATQQGQAKAIAEEICEQAVVHGFSADLHCISESDKYDLKTETAPLVVVVSTTGTGDPPDTARKFVKEIQNQTLPVDFFAHLRYGLLGLGDSEYTYFCNGGKIIDKRLQELGARHFYDTGHADDCVGLELVVEPWIAGLWPALRKHFRS

SEQ ID NO: 9051 - protein, 698 aa, Homo sapiens
MRRFLLLYATQQGQAKAIAEEICEQAVVHGFSADLHCISESDKYDLKTETAPLVVVVSTTGTGDPPDTARKFVKEIQNQTLPVDFFAHLRYGLLGLGDSEYTYFCNGGKIIDKRLQELGARHFYDTGHADDCVGLELVVEPWIAGLWPALRKHFRSSRGQEEISGALPVASPASSRTDLVKSELLHIESQVELLRFDDSGRKDSEVLKQNAVNSNQSNVVIEDFESSLTRSVPPLSQASLNIPGLPPEYLQVHLQESLGQEESQVSVTSADPVFQVPISKAVQLTTNDAIKTTLLVELDISNTDFSYQPGDAFSVICPNSDSEVQSLLQRLQLEDKREHCVLLKIKADTKKKGATLPQHIPAGCSLQFIFTWCLEIRAIPKKAFLRALVDYTSDSAEKRRLQELCSKQGAADYSRFVRDACACLLDLLLAFPSCQPPLSLLLEHLPKLQPRPYSCASSSLFHPGKLHFVFNIVEFLSTATTEVLRKGVCTGWLALLVASVLQPNIHASHEDSGKALAPKISISPRTTNSFHLPDDPSIPIIMVGPGTGIAPFIGFLQHREKLQEQHPDGNFGAMWLFFGCRHKDRDYLFRKELRHFLKHGILTHLKVSFSRDAPVGEEEAPAKYVQDNIQLHGQQVARILLQENGHIYVCGDAKNMAKDVHDALVQIISKEVGVEKLEAMKTLATLKEEKRYLQDIWS

SEQ ID NO: 9052 - protein, 372 aa, Homo sapiens
  VARIANT 1: note = misc_feature - Xaa can be any naturally occurring amino acid
XFTVTCLEVMRRFLLLYATQQGQAKAIAEEICEQAVVHGFSADLHCISESDKYDLKTETAPLVVVVSTTGTGDPPDTARKFVKEIQNQTLPVDFFAHLRYGLLGLGDSEYTYFCNGGKIIDKRLQELGARHFYDTGHADDCVGLELVVEPWIAGLWPALRKHFRSSRGQEEISGALPVASPASSRTDLVKSELLHIESQVELLRFDDSGRKDSEVLKQNAVNSNQSNVVIEDFESSLTRSVPPLSQASLNIPGLPPEYLQVHLQESLGQEESQVSVTSADPVFQVPISKAVQLTTNDAIKTTLLVELDISNTDFSYQPGDAFSVICPNSDSEVQSLLQRLQLEDKREHCVLLKIKADTKKKGIFASPCGLYQ

SEQ ID NO: 9053 - protein, 160 aa, Homo sapiens
  VARIANT 1: note = misc_feature - Xaa can be any naturally occurring amino acid
XVRAGARLVEVALCRFVPGWRGVGLGDSEYTYFCNGGKIIDKRLQELGARHFYDTGHADDCVGLELVVEPWIAGLWPALRKHFRSSRGQEEISGALPVASPASSRTDLVKSELLHIESQVELLRFDDSGRKDSEVLKQNAVNSNQSNVVIEDFESSLTRS

SEQ ID NO: 9054 - protein, 81 aa, Homo sapiens
  VARIANT 1: note = misc_feature - Xaa can be any naturally occurring amino acid
XVRAGARLVEVALCSFTVTCLEVMRRFLLLYATQQGQAKAIAEEICEQAVVHGFSADLHCISESDKVSVIQNTPTFAMGGR

SEQ ID NO: 9055 - protein, 115 aa, Homo sapiens
  VARIANT 1: note = misc_feature - Xaa can be any naturally occurring amino acid
XVRAGARLVEVALCSFTVTCLEVMRRFLLLYATQQGQAKAIAEEICEQAVVHGFSADLHCISESDKYDLKTETAPLVVVVSTTGTGDPPDTARKFVKEIQNQTLPVDFFAHLRSR

SEQ ID NO: 9056 - protein, 178 aa, Homo sapiens
MARAPLRPENTIVRGSANQCQDTYRAEELTGHTTGLSLNNDRLYKLTYSTEVLLDRGKGKLQDSVGYRISSNVDVALLWRNPDGDDDQLIQITMKDVNVENVNQQRGEKSIFKGKSPSKIMGKENLEALQRPTLLHLIHGKVKEFYSYQNEAVAIENIKRGLASLFQTQLSSGTTNEV

SEQ ID NO: 9057 - protein, 55 aa, Homo sapiens
MARAPLRPENTIVRGSANQCQDTYRAEELTGRPSIITRIHKTEEGDRRDGQSDMK

SEQ ID NO: 9058 - protein, 42 aa, Homo sapiens
MARAPLRPENTIVRGSANQCQDTYRAEELTGSEEGHSLTGCH

SEQ ID NO: 9059 - protein, 56 aa, Homo sapiens
MEERGGVYAGRGLELVFWEWEVVTVMSVFSRSRIKCVPADVYSFIYSCEYWMKELR

SEQ ID NO: 9060 - protein, 921 aa, Homo sapiens
MEERGGVYAGRGLELVFWEWEVVTVMSVFSRSRIKCVPADVYSFIYSCHTTGLSLNNDRLYKLTYSTEVLLDRGKGKLQDSVGYRISSNVDVALLWRNPDGDDDQLIQITMKDVNVENVNQQRGEKSIFKGKSPSKIMGKENLEALQRPTLLHLIHGKVKEFYSYQNEAVAIENIKRGLASLFQTQLSSGTTNEVDISGNCKVTYQAHQDKVIKIKALDSCKIARSGFTTPNQVLGVSSKATSVTTYKIEDSFVIAVLAEETHNFGLNFLQTIKGKIVSKQKLELKTTEAGPRLMSGKQAAAIIKAVDSKYTAIPIVGQVFQSHCKGCPSLSELWRSTRKYLQPDNLSKAEAVRNFLAFIQHLRTAKKEEILQILKMENKEVLPQLVDAVTSAQTSDSLEAILDFLDFKSDSSIILQERFLYACGFASHPNEELLRALISKFKGSIGSSDIRETVMIITGTLVRKLCQNEGCKLKAVVEAKKLILGGLEKAEKKEDTRMYLLALKNALLPEGIPSLLKYAEAGEGPISHLATTALQRYDLPFITDEVKKTLNRIYHQNRKVHEKTVRTAAAAIILNNNPSYMDVKNILLSIGELPQEMNKYMLAIVQDILRFEMPASKIVRRVLKEMVAHNYDRFSRSGSSSAYTGYIERSPRSASTYSLDILYSGSGILRRSNLNIFQYIGKAGLHGSQVVIEAQGLEALIAATPDEGEENLDSYAGMSAILFDVQLRPVTFFNGYSDLMSKMLSASGDPISVVKGLILLIDHSQELQLQSGLKANIEVQGGLAIDISGAMEFSLWYRESKTRVKNRVTVVITTDITVDSSFVKAGLETSTETEAGLEFISTVQFSQYPFLVCMQMDKDEAPFRQFEKKYERLSTGRGYVSQKRKESVLAGCEFPLHQENSEMCKVVFAPQPDSTSSGWF

SEQ ID NO: 9061 - protein, 50 aa, Homo sapiens
MEERGGVYAGRGLELVFWEWEVVTVMSVFSRSRIKCVPADVYSFIYSCPV

SEQ ID NO: 9062 - protein, 72 aa, Homo sapiens
MEERGGVYAGRGLELVFWEWEVVTVMSVFSRSRIKCVPADVYSFIYSCRPSIITRIHKTEEGDRRDGQSDMK

SEQ ID NO: 9063 - protein, 59 aa, Homo sapiens
MEERGGVYAGRGLELVFWEWEVVTVMSVFSRSRIKCVPADVYSFIYSCSEEGHSLTGCH

SEQ ID NO: 9064 - protein, 894 aa, Homo sapiens
MILLAVLFLCFISSYSASVKGHTTGLSLNNDRLYKLTYSTEVLLDRGKGKLQDSVGYRISSNVDVALLWRNPDGDDDQLIQITMKDVNVENVNQQRGEKSIFKGKSPSKIMGKENLEALQRPTLLHLIHGKVKEFYSYQNEAVAIENIKRGLASLFQTQLSSGTTNEVDISGNCKVTYQAHQDKVIKIKALDSCKIARSGFTTPNQVLGVSSKATSVTTYKIEDSFVIAVLAEETHNFGLNFLQTIKGKIVSKQKLELKTTEAGPRLMSGKQAAAIIKAVDSKYTAIPIVGQVFQSHCKGCPSLSELWRSTRKYLQPDNLSKAEAVRNFLAFIQHLRTAKKEEILQILKMENKEVLPQLVDAVTSAQTSDSLEAILDFLDFKSDSSIILQERFLYACGFASHPNEELLRALISKFKGSIGSSDIRETVMIITGTLVRKLCQNEGCKLKAVVEAKKLILGGLEKAEKKEDTRMYLLALKNALLPEGIPSLLKYAEAGEGPISHLATTALQRYDLPFITDEVKKTLNRIYHQNRKVHEKTVRTAAAAIILNNNPSYMDVKNILLSIGELPQEMNKYMLAIVQDILRFEMPASKIVRRVLKEMVAHNYDRFSRSGSSSAYTGYIERSPRSASTYSLDILYSGSGILRRSNLNIFQYIGKAGLHGSQVVIEAQGLEALIAATPDEGEENLDSYAGMSAILFDVQLRPVTFFNGYSDLMSKMLSASGDPISVVKGLILLIDHSQELQLQSGLKANIEVQGGLAIDISGAMEFSLWYRESKTRVKNRVTVVITTDITVDSSFVKAGLETSTETEAGLEFISTVQFSQYPFLVCMQMDKDEAPFRQFEKKYERLSTGRGYVSQKRKESVLAGCEFPLHQENSEMCKVVFAPQPDSTSSGWF

SEQ ID NO: 9065 - protein, 894 aa, Homo sapiens; identical to SEQ ID NO: 9064

SEQ ID NO: 9066 - protein, 151 aa, Homo sapiens
MILLAVLFLCFISSYSASVKGHTTGLSLNNDRLYKLTYSTEVLLDRGKGKLQDSVGYRISSNVDVALLWRNPDGDDDQLIQITMKDVNVENVNQQRGEKSIFKGKSPSKIMGKENLEALQRPTLLHLIHGKVKGRLDSTTFSPTSYFSSLQ

SEQ ID NO: 9067 - protein, 45 aa, Homo sapiens
MSLVAEAFVSQIAAAEPWPENATLYQQLKGEQILLSDNAASLAVQ

SEQ ID NO: 9068 - protein, 263 aa, Homo sapiens
MSLVAEAFVSQIAAAEPWPENATLYQQLKGEQILLSDNAASLAVQAFLQMCNLPIKVVCRANAEYMSPSGKVPFIHVGNQVVSELGPIVQFVKAKGHSLSDGLEEVQKAEMKAYMELVNNMLLTAELYLQWCDEATVGEITHARYGSPYPWPLNHILAYQKQWEVKRKMKAIGWGKKTLDQVLEDVDQCCQALSQRLGTQPYFFNKQPTELDALVFGHLYTILTTQLTNDELSEKVKNYSNLLAFCRRIEQHYFEDRGKGRLS

SEQ ID NO: 9069 - protein, 229 aa, Homo sapiens
MSLVAEAFVSQIAAAEPWPENATLYQQLKGEQILLSDNAASLAVQAFLQMCNLPIKVVCRANAEYMSPSGKVPFIHVGNQVVSELGPIVQFVKAKGHSLSDGLEEVQKAEMKAYMELVNNMLLTAELYLQWCDEATVGEWEVKRKMKAIGWGKKTLDQVLEDVDQCCQALSQRLGTQPYFFNKQPTELDALVFGHLYTILTTQLTNDELSEKVKNYSNLLAFCRRIEQH

SEQ ID NO: 9070 - protein, 207 aa, Homo sapiens
MSLVAEAFVSQIAGKVPFIHVGNQVVSELGPIVQFVKAKGHSLSDGLEEVQKAEMKAYMELVNNMLLTAELYLQWCDEATVGEITHARYGSPYPWPLNHILAYQKQWEVKRKMKAIGWGKKTLDQVLEDVDQCCQALSQRLGTQPYFFNKQPTELDALVFGHLYTILTTQLTNDELSEKVKNYSNLLAFCRRIEQHYFEDRGKGRLS

SEQ ID NO: 9071 - protein, 37 aa, Homo sapiens
MSLVAEAFVSQIAGWSAVAQPGLTATSASRVQAILLP

SEQ ID NO: 9072 - protein, 228 aa, Homo sapiens
ASSTHHSTVPPLTSSNHSTSPQLSTGVSFFFLSFHISNLQFNSSLEDPSTDYYQELQRDISEMFLQIYKQGGFLGLSNIKFRPGSVVVQLTLAFREGTINVHDVETQFNQYKTEAASRYNLTISDVSVSDVPFPFSAQSGAGVPGWGIALLVLVCVLVALAIVYLIALAVCQCRRKNYGQLDIFPARDTYHPMSEYPTYHTHGRYVPPSSTDRSPYEKEWRVDRERLA

SEQ ID NO: 9073 - protein, 135 aa, Homo sapiens
MTPGTQSPFFLLLLLTVLTATTAPKPATVVTGSGHASSTPGGEKETSATQRSSVPSSTEKNAALHQAQLLLWCTTAPLPGLPQPQPARALHSQFPATTLILLPPLPAIAPRLMPVALTIARSQHRLLPRAAERHF

SEQ ID NO: 9074 - protein, 241 aa, Homo sapiens
MTPGTQSPFFLLLLLTVLTATTAPKPATVVTGSGHASSTPGGEKETSATQRSSVPSSTEKNAFLQIYKQGGFLGLSNIKFRPGSVVVQLTLAFREGTINVHDVETQFNQYKTEAASRYNLTISDVSVSDVPFPFSAQSGAGVPGWGIALLVLVCVLVALAIVYLIALAVCQCRRKNYGQLDIFPARDTYHPMSEYPTYHTHGRYVPPSSTDRSPYEKVSAGNGGSSLSYTNPAVAATSANL

SEQ ID NO: 9075 - protein, 159 aa, Homo sapiens
MTPGTQSPFFLLLLLTVLTATTAPKPATVVTGSGHASSTPGGEKETSATQRSSVPSSTEKNAFNSSLEDPSTDYYQELQRDISEMAVCQCRRKNYGQLDIFPARDTYHPMSEYPTYHTHGRYVPPSSTDRSPYEKVSAGNGGSSLSYTNPAVAATSANL

SEQ ID NO: 9076 - protein, 264 aa, Homo sapiens
MTPGTQSPFFLLLLLTVLTATTAPKPATVVTGSGHASSTPGGEKETSATQRSSVPSSTEKNAFNSSLEDPSTDYYQELQRDISEMFLQIYKQGGFLGLSNIKFRPGSVVVQLTLAFREGTINVHDVETQFNQYKTEAASRYNLTISDVSVSDVPFPFSAQSGAGVPGWGIALLVLVCVLVALAIVYLIALAVCQCRRKNYGQLDIFPARDTYHPMSEYPTYHTHGRYVPPSSTDRSPYEKVSAGNGGSSLSYTNPAVAATSANL

SEQ ID NO: 9077 - protein, 189 aa, Homo sapiens
MTPGTQSPFFLLLLLTVLTATTAPKPATVVTGSGHASSTPGGEKETSATQRSSVPSSTEKNAFNSSLEDPSTDYYQELQRDISEMSGAGVPGWGIALLVLVCVLVALAIVYLIALAVCQCRRKNYGQLDIFPARDTYHPMSEYPTYHTHGRYVPPSSTDRSPYEKVSAGNGGSSLSYTNPAVAATSANL

SEQ ID NO: 9078 - protein, 80 aa, Homo sapiens
MTPGTQSPFFLLLLLTVLTATTAPKPATVVTGSGHASSTPGGEKETSATQRSSVPSSTEKNAIPAPTTTKSCRETFLKCE

SEQ ID NO: 9079 - protein, 239 aa, Homo sapiens
MTPGTQSPFFLLLLLTVLTATTAPKPATVVTGSGHASSTPGGEKETSATQRSSVPSSTEKNAIPAPTTTKSCRETFLKWPGSVVVQLTLAFREGTINVHDVETQFNQYKTEAASRYNLTISDVSVSDVPFPFSAQSGAGVPGWGIALLVLVCVLVALAIVYLIALAVCQCRRKNYGQLDIFPARDTYHPMSEYPTYHTHGRYVPPSSTDRSPYEKVSAGNGGSSLSYTNPAVAATSANL

SEQ ID NO: 9080 - protein, 268 aa, Homo sapiens
MTPGTQSPFFLLLLLTVLTATTAPKPATVVTGSGHASSTPGGEKETSATQRSSVPSSTEKNALSTGVSFFFLSFHISNLQFNSSLEDPSTDYYQELQRDISEMFLQIYKQGGFLGLSNIKFRPGSVVVQLTLAFREGTINVHDVETQFNQYKTEAASRYNLTISDVSVSDVPFPFSAQSGAGVPGWGIALLVLVCVLVALAIVYLIALAVCQCRRKNYGQLDIFPARDTYHPMSEYPTYHTHGRYVPPSSTDRSPYEKEWRVDRERLA

SEQ ID NO: 9081 - protein, 123 aa, Homo sapiens
MTPGTQSPFFLLLLLTVLTATTAPKPATVVTGSGHASSTPGGEKETSATQRSSVPSSTEKNALSTGVSFFFLSFHISNLQFNSSLEDPSTDYYQELQRDISEMFLQIYKQGGFLGLSNIKFSE

SEQ ID NO: 9082 - protein, 166 aa, Homo sapiens
MTPGTQSPFFLLLLLTVLTATTAPKPATVVTGSGHASSTPGGEKETSATQRSSVPSSTEKNASGAGVPGWGIALLVLVCVLVALAIVYLIALAVCQCRRKNYGQLDIFPARDTYHPMSEYPTYHTHGRYVPPSSTDRSPYEKVSAGNGGSSLSYTNPAVAATSANL

SEQ ID NO: 9083 - protein, 484 aa, Homo sapiens
MTPGTQSPFFLLLLLTVLTATTAPKPATVVTGSGHASSTPGGEKETSATQRSSVPSSTEKNAVSMTSSVLSSHSPGSGSSTTQGQDVTLAPATEPASGSAATWGQDVTSVPVTRPALGSTTPPAHDVTSAPDNKPAPGSTAPPAHGVTSAPDTRPAPGSTAPPAHGVTSAPDNRPALGSTAPPVHNVTSASGSASGSASTLVHNGTSARATTTPASKSTPFSIPSHHSDTPTTLASHSTKTDASSTHHSTVPPLTSSNHSTSPQLSTGVSFFFLSFHISNLQFNSSLEDPSTDYYQELQRDISEMFLQIYKQGGFLGLSNIKFRPGSVVVQLTLAFREGTINVHDVETQFNQYKTEAASRYNLTISDVSVSDVPFPFSAQSGAGVPGWGIALLVLVCVLVALAIVYLIALAVCQCRRKNYGQLDIFPARDTYHPMSEYPTYHTHGRYVPPSSTDRSPYEKVSAGNGGSSLSYTNPAVAATSANL

SEQ ID NO: 9084 - protein, 213 aa, Homo sapiens
MTPGTQSPFFLLLLLTVLTGSGHASSTPGGEKETSATQRSSVPSSTEKNAVSMTSSVLSSHSPGSGSSTTQGQDVTLAPATEPASGSAATWGQDVTSVPVTRPALGSTTPPAGVPGWGIALLVLVCVLVALAIVYLIALAVCQCRRKNYGQLDIFPARDTYHPMSEYPTYHTHGRYVPPSSTDRSPYEKVSAGNGGSSLSYTNPAVAATSANL

SEQ ID NO: 9085 - protein, 126 aa, Homo sapiens
MTPGTQSPFFLLLLLTVLTVVTGSGHASSTPGGEKETSATQRSSVPSSTEKNAALHQAQLLLWCTTAPLPGLPQPQPARALHSQFPATTLILLPPLPAIAPRLMPVALTIARSQHRLLPRAAERHF

SEQ ID NO: 9086 - protein, 255 aa, Homo sapiens
MTPGTQSPFFLLLLLTVLTVVTGSGHASSTPGGEKETSATQRSSVPSSTEKNAFNSSLEDPSTDYYQELQRDISEMFLQIYKQGGFLGLSNIKFRPGSVVVQLTLAFREGTINVHDVETQFNQYKTEAASRYNLTISDVSVSDVPFPFSAQSGAGVPGWGIALLVLVCVLVALAIVYLIALAVCQCRRKNYGQLDIFPARDTYHPMSEYPTYHTHGRYVPPSSTDRSPYEKVSAGNGGSSLSYTNPAVAATSANL

SEQ ID NO: 9087 - protein, 96 aa, Homo sapiens
MTPGTQSPFFLLLLLTVLTVVTGSGHASSTPGGEKETSATQRSSVPSSTEKNAFNSSLEDPSTDYYQELQRDISEMFLQIYKQGGFLGLSNIKFSE

SEQ ID NO: 9088 - protein, 149 aa, Homo sapiens
MTPGTQSPFFLLLLLTVLTVVTGSGHASSTPGGEKETSATQRSSVPSSTEKNAFNSSLEDPSTDYYQELQRDISEMFLQIYKQGGFLGLSNIKFSLGLGCQAGASRCWCWSVFWLRWPLSISLPWLSVSAAERTTGSWTSFQPGIPTIL

SEQ ID NO: 9089 - protein, 203 aa, Homo sapiens
MTPGTQSPFFLLLLLTVLTVVTGSGHASSTPGGEKETSATQRSSVPSSTEKNAIPAPTTTKSCRETFLKCFCRFINKGVFWASPILSSVSDVPFPFSAQSGAGVPGWGIALLVLVCVLVALAIVYLIALAVCQCRRKNYGQLDIFPARDTYHPMSEYPTYHTHGRYVPPSSTDRSPYEKVSAGNGGSSLSYTNPAVAATSANL

SEQ ID NO: 9090 - protein, 230 aa, Homo sapiens
MTPGTQSPFFLLLLLTVLTVVTGSGHASSTPGGEKETSATQRSSVPSSTEKNAIPAPTTTKSCRETFLKWPGSVVVQLTLAFREGTINVHDVETQFNQYKTEAASRYNLTISDVSVSDVPFPFSAQSGAGVPGWGIALLVLVCVLVALAIVYLIALAVCQCRRKNYGQLDIFPARDTYHPMSEYPTYHTHGRYVPPSSTDRSPYEKVSAGNGGSSLSYTNPAVAATSANL

SEQ ID NO: 9091 - protein, 229 aa, Homo sapiens
MTPGTQSPFFLLLLLTVLTVVTGSGHASSTPGGEKETSATQRSSVPSSTEKNAIYKQGGFLGLSNIKFRPGSVVVQLTLAFREGTINVHDVETQFNQYKTEAASRYNLTISDVSVSDVPFPFSAQSGAGVPGWGIALLVLVCVLVALAIVYLIALAVCQCRRKNYGQLDIFPARDTYHPMSEYPTYHTHGRYVPPSSTDRSPYEKVSAGNGGSSLSYTNPAVAATSANL

SEQ ID NO: 9092 - protein, 168 aa, Homo sapiens
MTPGTQSPFFLLLLLTVLTVVTGSGHASSTPGGEKETSATQRSSVPSSTEKNALSTGVSFFFLSFHISNLQFNSSLEDPSTDYYQELQRDISEMAVCQCRRKNYGQLDIFPARDTYHPMSEYPTYHTHGRYVPPSSTDRSPYEKVSAGNGGSSLSYTNPAVAATSANL

SEQ ID NO: 9093 - protein, 198 aa, Homo sapiens
MTPGTQSPFFLLLLLTVLTVVTGSGHASSTPGGEKETSATQRSSVPSSTEKNALSTGVSFFFLSFHISNLQFNSSLEDPSTDYYQELQRDISEMFLQIYKQGGFLGLSNIKFRPGSVVVQLTLAFREGTINVHDVETQFNQYKTEAASRYNLTISDVSGCLSVPPKELRAAGHLSSPGYLPSYERVPHLPHPWALCAP

SEQ ID NO: 9094 - protein, 273 aa, Homo sapiens
MTPGTQSPFFLLLLLTVLTVVTGSGHASSTPGGEKETSATQRSSVPSSTEKNALSTGVSFFFLSFHISNLQFNSSLEDPSTDYYQELQRDISEMFLQIYKQGGFLGLSNIKFRPGSVVVQLTLAFREGTINVHDVETQFNQYKTEAASRYNLTISDVSVSDVPFPFSAQSGAGVPGWGIALLVLVCVLVALAIVYLIALAVCQCRRKNYGQLDIFPARDTYHPMSEYPTYHTHGRYVPPSSTDRSPYEKVSAGNGGSSLSYTNPAVAATSANL

SEQ ID NO: 9095 - protein, 475 aa, Homo sapiens
MTPGTQSPFFLLLLLTVLTVVTGSGHASSTPGGEKETSATQRSSVPSSTEKNAVSMTSSVLSSHSPGSGSSTTQGQDVTLAPATEPASGSAATWGQDVTSVPVTRPALGSTTPPAHDVTSAPDNKPAPGSTAPPAHGVTSAPDTRPAPGSTAPPAHGVTSAPDNRPALGSTAPPVHNVTSASGSASGSASTLVHNGTSARATTTPASKSTPFSIPSHHSDTPTTLASHSTKTDASSTHHSTVPPLTSSNHSTSPQLSTGVSFFFLSFHISNLQFNSSLEDPSTDYYQELQRDISEMFLQIYKQGGFLGLSNIKFRPGSVVVQLTLAFREGTINVHDVETQFNQYKTEAASRYNLTISDVSVSDVPFPFSAQSGAGVPGWGIALLVLVCVLVALAIVYLIALAVCQCRRKNYGQLDIFPARDTYHPMSEYPTYHTHGRYVPPSSTDRSPYEKVSAGNGGSSLSYTNPAVAATSANL

SEQ ID NO: 9096 - protein, 1262 aa, Homo sapiens
MTPGTQSPFFLLLLLTVLTVVTGSGHASSTPGGEKETSATQRSSVPSSTEKNAVSMTSSVLSSHSPGSGSSTTQGQDVTLAPATEPASGSAATWGQDVTSVPVTRPALGSTTPPAHDVTSAPDNKPAPGSTAPPAHGVTSAPDTRPAPGSTAPQAHGVTSAPDTRPAPGSTAPPAHGVTSAPDTRPAPGSTAPPAHGVTSAPDTRSAPGSTAPAAHGVTSAPDTRSVPGSTAPQAHGVTSAPDTRPAPGSTAPPAHGVTSAPDTRPVPGSTAPPAHGVTSAPDTRPAPGSTAPPAHGVTSAPDTRPAPGSTAPQAHGVTSAPDTRPAPGSTAPPAHGVTSAPDTRPAPGSTAPPAHGVTSAPDTRPAPGSTAPAAHGVTSAPDTRPAPGSTAPQAHGVTSAPDTRPAPGSTAPPAHGVTSAPDTRPAPGSTAPPAHGVTSAPDTRPAPGSTAPPAHGVTSAPDTRPAPGSTAPAAHGVTSAPDTRPAPGSTAPQAHGVTSAPDTRPAPGSTAPPAHGVTSAPDTRPAPGSTAPPAHGVTSAPDTRPAPGSTAPPTHGVTSAPDTSPAPGSTAPPAHGVTSAPDTRPAPGYTAPAAHGVTSAPDTRPAPGSTAPQAHGVTSAPDTRPAPGSTAPPAHGVTSAPDTRPAPGSTAPPAHGVTSAPDTRPAPGSTAPPAHGVTSAPESRPAPGSTARAAHGVTSAPESRPAPGSTAPPAHGVTSAPDTRPAPGSTAPPAHGVTSAPDTRPAPGSTAPPAHGVTSAPDTRPAPGSTAPPAHGVTSAPDTRPAPGSTAPPAHGVTSAPDTRPSPPGSTAPPAHGVTSAPDTRPAPGSTAPPVHGVTSAPDTRPAPGSTAPPAHGVTSAPDTRPAPGSTAPPAHGVTSAPDTRPAPGSTAPPAHGVTSAPDTRRAPGSTPAPGSTAPPAHGVTSAPDTRPAPGSTAPPAHGVTSAPDNRPALGSTAPPVHNVTSASGSASGSASTLVHNGTSARATTTPASKSTPFSIPSHHSDTPTTLASHSTKTDASSTHHSTVPPLTSSNHSTSPQLSTGVSFFFLSFHISNLQFNSSLEDPSTDYYQELQRDISEMFLQIYKQGGFLGLSNIKFRPGSVVVQLTLAFREGTINVHDVETQFNQYKTEAASRYNLTISDVSVSDVPFPFSAQSGAGVPGWGIALLVLVCVLVALAIVYLIALAVCQCRRKNYGQLDIFPARDTYHPMSEYPTYHTHGRYVPPSSTDRSPYEKVSAGNGGSSLSYTNPAVAATSANL

SEQ ID NO: 9097 - protein, 85 aa, Homo sapiens
TEAASRYNLTISDVSVWGWGARLGHRAAGAGLCSGCAGHCLSHCLGCLSVPPKELRAAGHLSSPGYLPSYERVPHLPHPWALCAP

SEQ ID NO: 9098 - protein, 512 aa, Homo sapiens
MKAIIHLTLLALLSVNTATNQGNSADAVTTTETATSGPTVAAADTTETNFPETASTTANTPSFPTATSPAPPIISTHSSSTIPTPAPPIISTHSSSTIPIPTAADSESTTNVNSLATSDIITASSPNDGLITMVPSETQSNNEMSPTTEDNQSSGPPTGTALLETSTLNSTGPSNPCQDDPCADNSLCVKLHNTSFCLCLEGYYYNSSTCKKGKVFPGKISVTVSETFDPEEKHSMAYQDLHSEITSLFKDVFGTSVYGQTVILTVSTSLSPRSEMRADDKFVNVTIVTILAETTSDNEKTVTEKINKAIRSSSSNFLNYDLTLRCDYYGCNQTADDCLNGLACDCKSDLQRPNPQSPFCVASSLKCPDACNAQHKQCLIKKSGGAPECACVPGYQEDANGNCQKCAFGYSGLDCKDKFQLILTIVGTIAGIVILSMIIALIVTARSNNKTKHIEEENLIDEDFQNLKLRSTGFTNLGAEGSVFPKVRITASRDSQMQNPYSRHSSMPRPDY

SEQ ID NO: 9099 - protein, 184 aa, Homo sapiens
MKAIIHLTLLALLSVNTEDNQSSGPPTGTALLETSTLNSTGPSNPCQDDPCADNSLCVKLHNTSFCLCLEGYYYNSSTCKKGKVFPGKISVTVSETFDPEEKHSMAYQDLHSEITSLFKDVFGTSVYGQTVILTVSTSLSPRSEMRADDKFVNVTIVTILAETTSDNEKTVTEKINKAIRSSSS

SEQ ID NO: 9100 - protein, 709 aa, Homo sapiens
MGCLWGLALPLFFFCWEVGVSGSSAGPSTRRADTAMTTDDTEVPAMTLAPGHAALETQTLSAETSSRASTPAGPIPEAETRGAKRISPARETRSFTKTSPNFMVLIATSVETSAASGSPEGAGMTTVQTITGSDPREAIFDTLCTDDSSEEAKTLTMDILTLAHTSTEAKGLSSESSASSDSPHPVITPSRASESSASSDGPHPVITPSRASESSASSDGPHPVITPSRASESSASSDGPHPVITPSRASESSASSDGPHPVITPSRASESSASSDGPHPVITPSRASESSASSDGPHPVITPSRASESSASSDGPHPVITPSRASESSASSDGPHPVITPSRASESSASSDGLHPVITPSRASESSASSDGPHPVITPSRASESSASSDGPHPVITPSWSPGSDVTLLAEALVTVTNIEVINCSITEIETTTSSIPGASDTDLIPTEGVKASSTSDPPALPDSTEAKPHITEVTASAETLSTAGTTESAAPDATVGTPLPTNSATEREVTAPGATTLSGALVTVSRNPLEETSALSVETPSYVKVSGAAPVSIEAGSAVGKTTSFAGSSASSYSPSEAALKNFTPSETPTMDIATKGPFPTSRDPLPSVPPTTTNSSRGTNSTLAKITTSAKTTMKPPTATPTTARTRPTTDVSAGENGGFLLLRLSVASPEDLTDPRVAERLMQQLHRELHAHAPHFQVSLLRVRRG

SEQ ID NO: 9101 - protein, 723 aa, Homo sapiens
MGCLWGLALPLFFFCWEVGVSGSSAGPSTRRADTAMTTDDTEVPAMTLAPGHAALETQTLSAETSSRASTPAGPIPEAETRGAKRISPARETRSFTKTSPNFMVLIATSVETSAASGSPEGAGMTTVQTITGSDPREAIFDTLCTDDSSEEAKTLTMDILTLAHTSTEAKGLSSESSASSDSPHPVITPSRASESSASSDGPHPVITPSRASESSASSDGPHPVITPSRASESSASSDGPHPVITPSRASESSASSDGPHPVITPSRASESSASSDGPHPVITPSRASESSASSDGPHPVITPSRASESSASSDGPHPVITPSRASESSASSDGPHPVITPSRASESSASSDGLHPVITPSRASESSASSDGPHPVITPSRASESSASSDGPHPVITPSWSPGSDVTLLAEALVTVTNIEVINCSITEIETTTSSIPGASDTDLIPTEGVKASSTSDPPALPDSTEAKPHITEVTASAETLSTAGTTESAAPDATVGTPLPTNSATEREVTAPGATTLSGALVTVSRNPLEETSALSVETPSYVKVSGAAPVSIEAGSAVGKTTSFAGSSASSYSPSEAALKNFTPSETPTMDIATKGPFPTSRDPLPSVPPTTTNSSRGTNSTLAKITTSAKTTMKPPTATPTTARTRPTTDVSAGENGGFLLLRLSVASPEDLTDPRVAERLMQQMERSLALSPRLECSGVISAHCKLHLLGSRDSPASAS

SEQ ID NO: 9102 - protein, 538 aa, Homo sapiens
MGCLWGLALPLFFFCWEVGVSGSSAGPSTRRADTAMTTDDTEVPAMTLAPGHAALETQTLSAETSSRASTPAGPIPEAETRGAKRISPARETRSFTKTSPNFMVLIATSVETSAASGSPEGAGMTTVQTITGSDPREAIFDTLCTDDSSEEAKTLTMDILTLAHTSTEAKGLSSESSASSDSPHPVITPSRASESSASSDGPHPVITPSRASESSASSDGPHPVITPSWSPGSDVTLLAEALVTVTNIEVINCSITEIETTTSSIPGASDTDLIPTEGVKASSTSDPPALPDSTEAKPHITEVTASAETLSTAGTTESAAPDATVGTPLPTNSATEREVTAPGATTLSGALVTVSRNPLEETSALSVETPSYVKVSGAAPVSIEAGSAVGKTTSFAGSSASSYSPSEAALKNFTPSETPTMDIATKGPFPTSRDPLPSVPPTTTNSSRGTNSTLAKITTSAKTTMKPPTATPTTARTRPTTDVSAGENGGFLLLRLSVASPEDLTDPRVAERLMQQLHRELHAHAPHFQVSLLRVRRG

SEQ ID NO: 9103 - protein, 674 aa, Homo sapiens
MTTDDTEVPAMTLAPGHAALETQTLSAETSSRASTPAGPIPEAETRGAKRISPARETRSFTKTSPNFMVLIATSVETSAASGSPEGAGMTTVQTITGSDPREAIFDTLCTDDSSEEAKTLTMDILTLAHTSTEAKGLSSESSASSDSPHPVITPSRASESSASSDGPHPVITPSRASESSASSDGPHPVITPSRASESSASSDGPHPVITPSRASESSASSDGPHPVITPSRASESSASSDGPHPVITPSRASESSASSDGPHPVITPSRASESSASSDGPHPVITPSRASESSASSDGPHPVITPSRASESSASSDGLHPVITPSRASESSASSDGPHPVITPSRASESSASSDGPHPVITPSWSPGSDVTLLAEALVTVTNIEVINCSITEIETTTSSIPGASDTDLIPTEGVKASSTSDPPALPDSTEAKPHITEVTASAETLSTAGTTESAAPDATVGTPLPTNSATEREVTAPGATTLSGALVTVSRNPLEETSALSVETPSYVKVSGAAPVSIEAGSAVGKTTSFAGSSASSYSPSEAALKNFTPSETPTMDIATKGPFPTSRDPLPSVPPTTTNSSRGTNSTLAKITTSAKTTMKPPTATPTTARTRPTTDVSAGENGGFLLLRLSVASPEDLTDPRVAERLMQQLHRELHAHAPHFQVSLLRVRRG

SEQ ID NO: 9104 - protein, 128 aa, Homo sapiens
  VARIANT 1: note = misc_feature - Xaa can be any naturally occurring amino acid
XPTMDIATKGPFPTSRDPLPSVPPTTTNSSRGTNSTLAKITTSAKTTMKPPTATPTTARTRPTTDVSAGENGGFLLLRLSVASPEDLTDPRVAERLMQQLMTQGTHSAHVPSMVGVNPLPIVPGGFQH

SEQ ID NO: 9105 - protein, 3323 aa, Homo sapiens
MQLLGLLGLLWMLKASPWATGTLSTATSISQVPFPRAEAASAVLSNSPHSRDLAGWPLGVPQLASPAPGHRENAPMTLTTSPHDTLISETLLNSPVSSNTSTTPTSKFAFKVETTPPTVLVYSATTECVYPTSFIITISHPTSICVTTTQVAFTSSYTSTPVTQKPVTTVTSTYSMTTTEKGTSAMTSSPSTTTARETPIVTVTPSSVSATDTTFHTTISSTTRTTERTPLPTGSIHTTTSPTPVFTTLKTAVTSTSPITSSITSTNTVTSMTTTASQPTATNTLSSPTRTILSSTPVLSTETITSGITNTTPLSTLVTTLPTTISRSTPTSETTYTTSPTSTVTDSTTKIAYSTSMTGTLSTETSLPPTSSSLPTTETATTPMTNLVTTTTEISSHSTPSFSSSTIYSTVSTSTTAISSLPPTSGTMVTSTTMTPSSLSTDIPFTTPTTITHHSVGSTGFLTTATDLTSTFTVSSSSAMSTSVIPSSPSIQNTETSSLVSMTSATTPNVRPTFVSTLSTPTSSLLTTFPATYSFSSSMSASSAGTTHTESISSPPASTSTLHTTAESTLAPTTTTSFTTSTTMEPPSTTAATTGTGQTTFTSSTATFPETTTPTPTTDMSTESLTTAMTSPPITSSVTSTNTVTSMTTTTSPPTTTNSFTSLTSMPLSSTPVPSTEVVTSGTINTIPPSILVTTLPTPNASSMTTSETTYPNSPTGPGTNSTTEITYPTTMTETSSTATSLPPTSPLVSTAKTAKTPTTNLVTTTTKTTSHSTTSFTSSTVYSTASTYTTAITSVPTTLGTMVTSTSMISSTVSTGIPTSQPTTITPSSVGISGSLPMMTDLTSVYTVSNMSARPTTVIPSSPTVQNTEISISVSMTSATTPSGGPTFTSTENTPTRSLLTSFPMTHSFSSSMSESSAGTTHTESISSPRGTTSTLHTTVESTPSPTTTTSFTTSTMMEPPSSTVSTTGRGQTTFPSSTATFPETTTLTPTTDISTVSLTTAMTSPPPVSSSITPTNTMTSMRTTTYWPTATNTLSPLTSSILSSTPVPSTEMITSHTTNTTPLSTLVTTLLTTITRSTPTSETTYPTSPTSIVSDSTTEITYSTSITGTLSTATTLPPTSSSLPTTETATMTPTTTLITTTPNTTSLSTPSFTSSTIYSTVSTSTTAISSASPTSGTMVTSTTMTPSSLSTDTPSTTPTTITYPSVGSTGFLTTATDLTSTFTVSSSSAMSTSVIPSSPSIQNTETSSLVSMTSATTPSLRPTITSTDSTLTSSLLTTFPSTYSFSSSMSASSAGTTHTETISSLPASTNTIHTTAESALAPTTTTSFTTSPTMEPPSTTVATTGTGQTTFPSSTATFLETTTLTPTTDFSTESLTTAMTSTPPITSSITPTDTMTSMRTTTSWPTATNTLSPLTSSILSSTPVPSTEVTTSHTTNTNPVSTLVTTLPITITRSTLTSETAYPSSPTSTVTESTTEITYPTTMTETSSTATSLPPTSSLVSTAETAKTPTTNLVTTTTKTTSHSTTSFTSSTIYSTASTPTTAITSVPTTLGTMVTSTSMIPSTVSTGIPTSQPTTITPSSVGISGSLPMMTDLTSVYTVSSMSARPTSVIPSSPTVQNTETSIFVSMMSATTPSGGPTFTSTENTPTRSLLTSFPVTHSFSSSMSASSVGTTHTQSISSPPAITSTLHTTAESTPSPTTTMSFTTFTKMETPSSTVATTGTGQTTFTSSTATSPKTTTLTPTSDISTGSFKTAVSSTPPITSSITSTYTVTSMTTTTPLGPTATNTLPSFTSSVSSSTPVPSTEAITSGTTNTTPLSTLVTTFSNSDTSSTPTSETTYPTSLTSALTDSTTRTTYSTNMTGTLSTVTSLRPTSSSLLTTVTATVPTTNLVTTTTKITSHSTPSFTSSIATTETPSHSTPRFTSSITTTETPSHSTPRFTSSITNTKTTSHSSPSFTSSITTTETTSHNTPSLTSSITTTKTTSHSTPSYTSLITTTTTTSHSTPSFTSSITTTETTSHNTPSLTSSITTTETTSHSTPSFTSSITTETTSHSTPSFTSLITITEITSHSTLSYTTSITTTETPSHSTLSFTSSITTTETTSHSTPSFTSSITTSEMPSHSTPSFTSSITTTENATHSTPNFTSSITTTETTSHSTPSFTSLITTTETTSHRWGTTETTSYSTPSFTSSNTITETTSHSTPSYITSITTTETPSSSTPSFSSSITTTETTSHSTPGFTSSITTTETTSHSTPSFTSSITTTETTSHDTPSFTSSITTSETPSHSTPSSTSLITTTKTTSHSTPSFTSSITTTETTSHSAHSFTSSITTTETTSHNTRSFTSSITTTETNSHSTTSFTSSITTTETTSHSTPSFSSSITTTETPLHSTPGLTSWVTTTKTTSHITPGLTSSITTTETTSHSTPGFTSSITTTETTSESTPSLSSSTIYSTVSTSTTAITSHFTTSETAVTPTPVTPSSLSTDIPTTSLRTLTPSSVGTSTSLTTTTDFPSIPTDISTLPTRTHIISSSPSIQSTETSSLVGTTSPTMSTVRMTLRITENTPISSFSTSIVVIPETPTQTPPVLTSATGTQTSPAPTTVTFGSTDSSTSTLHTLTPSTALSTIVSTSQVPIPSTHSSTLQTTPSTPSLQTSLTSTSEFTTESFTRGSTSTNAILTSFSTIIWSSTPTIIMSSSPSSASITPVFSTTIHSVPSSPYIFSTENVGSASITGFPSLSSSATTSTSSTSSSLTTALTEITPFSYISLPSTTPCPGTITITIVPASPTDPCVEMDPSTEATSPPTTPLTVFPFTTEMVTCPTSISIQTTLTTYMDTSSMMPESESSISPNASSSTGTGTVPTNTVFTSTRLPTSETWLSNSSVIPLPLPGVSTIPLTMKPSSSLPTILRTSSKSTHPSPPTTRTSETPVATTQTPTTLTSRRTTRITSQMTTQSTLTTTAGTCDNGGTWEQGQCACLPGFSGDRCQLQTRCQNGGQWDGLKCQCPSTFYGSSCEFAVEQVDLDVVETEVGMEVSVDQQFSPDLNDNTSQAYRDFNKTFWNQMQKIFADMQGFTFKGVEILSLRNGSIVVDYLVLLEMPFSPQLESEYEQVKTTLKEGLQNASQDVNSCQDSQTLCFKPDSIKVNNNSKTELTPAAICRRAAPTGYEEFYFPLVEATRLRCVTKCTSGVDNAIDCHQGQCVLETSGPTCRCYSTDTHWFSGPRCEVAVHWRALVGGLTAGAALLVLLLLALGVRAVRSGWWGGQRRGRSWDQDRKWFETWDEEVVGTFSNWGFEDDGTDKDTNFYVALENVDTTMKVHIKRPEMTSSSV

SEQ ID NO: 9106 - protein, 3265 aa, Homo sapiens
MQLLGLLGLLWMLKASPWATGTLSTATSISQVPFPRAEAASAVLSNSPHSRDLAGWPLGVPQLASPAPGHRENAPMTLTTSPHDTLISETLLNSPVSSNTSTTPTSKFAFKVETTPPTVLVYSATTECVYPTSFIITISHPTSICVTTTQVAFTSSYTSTPVTQKPVTTVTSTYSMTTTEKGTSAMTSSPSTTTARETPIVTVTPSSVSATDTTFHTTISSTTRTTERTPLPTGSIHTTTSPTPVFTTLKTAVTSTSPITSSITSTNTVTSMTTTASQPTATNTLSSPTRTILSSTPVLSTETITSGITNTTPLSTLVTTLPTTISRSTPTSETTYTTSPTSTVTDSTTKIAYSTSMTGTLSTETSLPPTSSSLPTTETATTPMTNLVTTTTEISSHSTPSFSSSTIYSTVSTSTTAISSLPPTSGTMVTSTTMTPSSLSTDIPFTTPTTITHHSVGSTGFLTTATDLTSTFTVSSSSAMSTSVIPSSPSIQNTETSSLVSMTSATTPNVRPTFVSTLSTPTSSLLTTFPATYSFSSSMSASSAGTTHTESISSPPASTSTLHTTAESTLAPTTTTSFTTSTTMEPPSTTAATTGTGQTTFTSSTATFPETTTPTPTTDMSTESLTTAMTSPPITSSVTSTNTVTSMTTTTSPPTTTNSFTSLTSMPLSSTPVPSTEVVTSGTINTIPPSILVTTLPTPNASSMTTSETTYPNSPTGPGTNSTTEITYPTTMTETSSTATSLPPTSPLVSTAKTAKTPTTNLVTTTTKTTSHSTTSFTSSTVYSTASTYTTAITSVPTTLGTMVTSTSMISSTVSTGIPTSQPTTITPSSVGISGSLPMMTDLTSVYTVSNMSARPTTVIPSSPTVQNTEISISVSMTSATTPSGGPTFTSTENTPTRSLLTSFPMTHSFSSSMSESSAGTTHTESISSPRGTTSTLHTTVESTPSPTTTTSFTTSTMMEPPSSTVSTTGRGQTTFPSSTATFPETTTLTPTTDISTVSLTTAMTSPPPVSSSITPTNTMTSMRTTTYWPTATNTLSPLTSSILSSTPVPSTEMITSHTTNTTPLSTLVTTLLTTITRSTPTSETTYPTSPTSIVSDSTTEITYSTSITGTLSTATTLPPTSSSLPTTETATMTPTTTLITTTPNTTSLSTPSFTSSTIYSTVSTSTTAISSASPTSGTMVTSTTMTPSSLSTDTPSTTPTTITYPSVGSTGFLTTATDLTSTFTVSSSSAMSTSVIPSSPSIQNTETSSLVSMTSATTPSLRPTITSTDSTLTSSLLTTFPSTYSFSSSMSASSAGTTHTETISSLPASTNTIHTTAESALAPTTTTSFTTSPTMEPPSTTVATTGTGQTTFPSSTATFLETTTLTPTTDFSTESLTTAMTSTPPITSSITPTDTMTSMRTTTSWPTATNTLSPLTSSILSSTPVPSTEVTTSHTTNTNPVSTLVTTLPITITRSTLTSETAYPSSPTSTVTESTTEITYPTTMTETSSTATSLPPTSSLVSTAETAKTPTTNLVTTTTKTTSHSTTSFTSSTIYSTASTPTTAITSVPTTLGTMVTSTSMIPSTVSTGIPTSQPTTITPSSVGISGSLPMMTDLTSVYTVSSMSARPTSVIPSSPTVQNTETSIFVSMMSATTPSGGPTFTSTENTPTRSLLTSFPVTHSFSSSMSASSVGTTHTQSISSPPAITSTLHTTAESTPSPTTTMSFTTFTKMETPSSTVATTGTGQTTFTSSTATSPKTTTLTPTSDISTGSFKTAVSSTPPITSSITSTYTVTSMTTTTPLGPTATNTLPSFTSSVSSSTPVPSTEAITSGTTNTTPLSTLVTTFSNSDTSSTPTSETTYPTSLTSALTDSTTRTTYSTNMTGTLSTVTSLRPTSSSLLTTVTATVPTTNLVTTTTKITSHSTPSFTSSIATTETPSHSTPRFTSSITTTETPSHSTPRFTSSITNTKTTSHSSPSFTSSITTTETTSHNTPSLTSSITTTKTTSHSTPSYTSLITTTTTTSHSTPSFTSSITTTETTSHNTPSLTSSITTTETTSHSTPSFTSSITTETTSHSTPSFTSLITITEITSHSTLSYTTSITTTETPSHSTLSFTSSITTTETTSHSTPSFTSSITTSEMPSHSTPSFTSSITTTENATHSTPNFTSSITTTETTSHSTPSFTSLITTTETTSHRWGTTETTSYSTPSFTSSNTITETTSHSTPSYITSITTTETPSSSTPSFSSSITTTETTSHSTPGFTSSITTTETTSHSTPSFTSSITTTETTSHDTPSFTSSITTSETPSHSTPSSTSLITTTKTTSHSTPSFTSSITTTETTSHSAHSFTSSITTTETTSHNTRSFTSSITTTETNSHSTTSFTSSITTTETTSHSTPSFSSSITTTETPLHSTPGLTSWVTTTKTTSHITPGLTSSITTTETTSHSTPGFTSSITTTETTSESTPSLSSSTIYSTVSTSTTAITSHFTTSETAVTPTPVTPSSLSTDIPTTSLRTLTPSSVGTSTSLTTTTDFPSIPTDISTLPTRTHIISSSPSIQSTETSSLVGTTSPTMSTVRMTLRITENTPISSFSTSIVVIPETPTQTPPVLTSATGTQTSPAPTTVTFGSTDSSTSTLHTLTPSTALSTIVSTSQVPIPSTHSSTLQTTPSTPSLQTSLTSTSEFTTESFTRGSTSTNAILTSFSTIIWSSTPTIIMSSSPSSASITPVFSTTIHSVPSSPYIFSTENVGSASITGFPSLSSSATTSTSSTSSSLTTALTEITPFSYISLPSTTPCPGTITITIVPASPTDPCVEMDPSTEATSPPTTPLTVFPFTTEMVTCPTSISIQTTLTTYMDTSSMMPESESSISPNASSSTGTGTVPTNTVFTSTRLPTSETWLSNSSVIPLPLPGVSTIPLTMKPSSSLPTILRTSSKSTHPSPPTTRTSETPVATTQTPTTLTSRRTTRITSQMTTQSTLTTTAGTCDNGGTWEQGQCACLPGFSGDRCQLQTRCQNGGQWDGLKCQCPSTFYGSSCEFAVEQVDLDVVETEVGMEVSVDQQFSPDLNDNTSQAYRDFNKTFWNQMQKIFADMQGFTFKGVEILSLRNGSIVVDYLVLLEMPFSPQLESEYEQVKTTLKEGLQNASQDVNSCQDSQTLCFKPDSIKVNNNSKTELTPAAICRRAAPTGYEEFYFPLVEATRLRCVTKCTSGVDNAIDCHQGQCVLETSGPTCRSWDQDRKWFETWDEEVVGTFSNWGFEDDGTDKDTNFYVALENVDTTMKVHIKRPEMTSSSV

SEQ ID NO: 9107 - protein, 1002 aa, Homo sapiens
  VARIANT 1: note = misc_feature - Xaa can be any naturally occurring amino acid
XITITEITSHSTLSYTTSITTTETPSHSTLSFTSSITTTETTSHSTPSFTSSITTSEMPSHSTPSFTSSITTTENATHSTPNFTSSITTTETTSHSTPSFTSLITTTETTSHRWGTTETTSYSTPSFTSSNTITETTSHSTPSYITSITTTETPSSSTPSFSSSITTTETTSHSTPGFTSSITTTETTSHSTPSFTSSITTTETTSHDTPSFTSSITTSETPSHSTPSSTSLITTTKTTSHSTPSFTSSITTTETTSHSAHSFTSSITTTETTSHNTRSFTSSITTTETNSHSTTSFTSSITTTETTSHSTPSFSSSITTTETPLHSTPGLTSWVTTTKTTSHITPGLTSSITTTETTSHSTPGFTSSITTTETTSESTPSLSSSTIYSTVSTSTTAITSHFTTSETAVTPTPVTPSSLSTDIPTTSLRTLTPSSVGTSTSLTTTTDFPSIPTDISTLPTRTHIISSSPSIQSTETSSLVGTTSPTMSTVRMTLRITENTPISSFSTSIVVIPETPTQTPPVLTSATGTQTSPAPTTVTFGSTDSSTSTLHTLTPSTALSTIVSTSQVPIPSTHSSTLQTTPSTPSLQTSLTSTSEFTTESFTRGSTSTNAILTSFSTIIWSSTPTIIMSSSPSSASITPVFSTTIHSVPSSPYIFSTENVGSASITGFPSLSSSATTSTSSTSSSLTTALTEITPFSYISLPSTTPCPGTITITIVPASPTDPCVEMDPSTEATSPPTTPLTVFPFTTEMVTCPTSISIQTTLTTYMDTSSMMPESESSISPNASSSTGTGTVPTNTVFTSTRLPTSETWLSNSSVIPLPLPGVSTIPLTMKPSSSLPTILRTSSKSTHPSPPTTRTSETPVATTQTPTTLTSRRTTRITSQMTTQSTLTTTAGTCDNGGTWEQGQCACLPGFSGDRCQLQTRCQNGGQWDGLKCQCPSTFYGSSCEFAVEQVDLDAEDFCRHAGLHLQGCGDPVPEEWQHRGGLPGPAGDALQPPAGERV

SEQ ID NO: 9108 - protein, 5654 aa, Homo sapiens
MSVGRRKLALLWALALALACTRHTGHAQDGSSESSYKHHPALSPIARGPSGVPLRGATVFPSLRTIPVVRASNPAHNGRVCSTWGSFHYKTFDGDVFRFPGLCNYVFSEHCGAAYEDFNIQLRRSQESAAPTLSRVLMKVDGVVIQLTKGSVLVNGHPVLLPFSQSGVLIQQSSSYTKVEARLGLVLMWNHDDSLLLELDTKYANKTCGLCGDFNGMPVVSELLSHNTKLTPMEFGNLQKMDDPTDQCQDPVPEPPRNCSTGFGICEELLHGQLFSGCVALVDVGSYLEACRQDLCFCEDTDLLSCVCHTLAEYSRQCTHAGGLPQDWRGPDFCPQKCPNNMQYHECRSPCADTCSNQEHSRACEDHCVAGCFCPEGTVLDDIGQTGCVPVSKCACVYNGAAYAPGATYSTDCTNCTCSGGRWSCQEVPCPGTCSVLGGAHFSTFDGKQYTVHGDCSYVLTKPCDSSAFTVLAELRRCGLTDSETCLKSVTLSLDGAQTVVVIKASGEVFLNQIYTQLPISAANVTIFRPSTFFIIAQTSLGLQLNLQLVPTMQLFMQLAPKLRGQTCGLCGNFNSIQADDFRTLSGVVEATAAAFFNTFKTQAACPNIRNSFEDPCSLSVENEKYAQHWCSQLTDADGPFGRCHAAVKPGTYYSNCMFDTCNCERSEDCLCAALSSYVHACAAKGVQLGGWRDGVCTKPMTTCPKSMTYHYHVSTCQPTCRSLSEGDITCSVGFIPVDGCICPKGTFLDDTGKCVQASNCPCYHRGSMIPNGESVHDSGAICTCTHGKLSCIGGQAPAPVCAAPMVFFDCRNATPGDTGAGCQKSCHTLDMTCYSPQCVPGCVCPDGLVADGEGGCITAEDCPCVHNEASYRAGQTIRVGCNTCTCDSRMWRCTDDPCLATCAVYGDGHYLTFDGQSYSFNGDCEYTLVQNHCGGKDSTQDSFRVVTENVPCGTTGTTCSKAIKIFLGGFELKLSHGKVEVIGTDESQEVPYTIRQMGIYLVVDTDIGLVLLWDKKTSIFINLSPEFKGRVCGLCGNFDDIAVNDFATRSRSVVGDVLEFGNSWKLSPSCPDALAPKDPCTANPFRKSWAQKQCSILHGPTFAACHAHVEPARYYEACVNDACACDSGGDCECFCTAVAAYAQACHEVGLCVSWRTPSICPLFCDYYNPEGQCEWHYQPCGVPCLRTCRNPRGDCLRDVRGLEGCYPKCPPEAPIFDEDKMQCVATCPTPPLPPRCHVHGKSYRPGAVVPSDKNCQSCLCTERGVECTYKAEACVCTYNGQRFHPGDVIYHTTDGTGGCISARCGANGTIERRVYPCSPTTPVPPTTFSFSTPPLVVSSTHTPSNGPSSAHTGPPSSAWPTTAGTSPRTRLPTASASLPPVCGEKCLWSPWMDVSRPGRGTDSGDFDTLENLRAHGYRVCESPRSVECRAEDAPGVPLRALGQRVQCSPDVGLTCRNREQASGLCYNYQIRVQCCTPLPCSTSSSPAQTTPPTTSKTTETRASGSSAPSSTPGTVSLSTARTTPAPGTATSVKKTFSTPSPPPVPATSTSSMSTTAPGTSVVSSKPTPTEPSTSSCLQELCTWTEWIDGSYPAPGINGGDFDTFQNLRDEGYTFCESPRSVQCRAESFPNTPLADLGQDVICSHTEGLICLNKNQLPPICYNYEIRIQCCETVNVCRDITRLPKTVATTRPTPHPTGAQTQTTFTTHMPSASTEQPTATSRGGPTATSVTQGTHTTLVTRNCHPRCTWTKWFDVDFPSPGPHGGDKETYNNIIRSGEKICRRPEEITRLQCRAKSHPEVSIEHLGQVVQCSREEGLVCRNQDQQGPFKMCLNYEVRVLCCETPRGCHMTSTPGSTSSSPAQTTPSTTSKTTETQASGSSAPSSTPGTVSLSTARTTPAPGTATSVKKTFSTPSPPPVPATSTSSMSTTAPGTSVVSSKPTPTEPSTSSCLQELCTWTEWIDGSYPAPGINGGDFDTFQNLRDEGYTFCESPRSVQCRAESFPNTPLADLGQDVICSHTEGLICLNKNQLPPICYNYEIRIQCCETVNVCRDITRPPKTVATTRPTPHPTGAQTQTTFTTHMPSASTEQPTATSRGGPTATSVTQGTHTTPVTRNCHPRCTWTTWFDVDFPSPGPHGGDKETYNNIIRSGEKICRRPEEITRLQCRAKSHPEVSIEHLGQVVQCSREEGLVCRNQDQQGPFKMCLNYEVRVLCCETPKGCPVTSTPVTAPSTPSGRATSPTQSTSSWQKSRTTTLVTTSTTSTPQTSTTYAHTTSTTSAPTARTTSAPTTRTTSASPASTTSGPGNTPSPVPTTSTISAPTTSITSAPTTSTTSAPTSSTTSGPGTTPSPVPTTSITSAPTTSTTSAPTTSTTSARTSSTTSATTTSRISGPETTPSPVPTTSTTSATTTSTTSAPTTSTTSAPTSSTTSSPQTSTTSAPTTSTTSGPGTTPSPVPTTSTTSAPTTRTTSAPKSSTTSAATTSTTSGPETTPRPVPTTSTTSSPTTSTTSAPTTSTTSASTTSTTSGAGTTPSPVPTTSTTSAPTTSTTSAPISSTTSATTTSTTSGPGTTPSPVPTTSTTSAPTTSTTSGPGTTPSAVPTTSITSAPTTSTNSAPISSTTSATTTSRISGPETTPSPVPTASTTSASTTSTTSGPGTTPSPVPTTSTISVPTTSTTSASTTSTTSASTTSTTSGPGTTPSPVPTTSTTSAPTTSTTSAPTTSTISAPTTSTTSATTTSTTSAPTPRRTSAPTTSTISASTTSTTSATTTSTTSATTTSTISAPTTSTTLSPTTSTTSTTITSTTSAPISSTTSTPQTSTTSAPTTSTTSGPGTTSSPVPTTSTTSAPTTSTTSAPTTRTTSVPTSSTTSTATTSTTSGPGTTPSPVPTTSTTSAPTTRTTSAPTTSTTSAPTTSTTSAPTSSTTSATTTSTISVPTTSTTSVPGTTPSPVPTTSTISVPTTSTTSASTTSTTSGPGTTPSPVPTTSTTSAPTTSTTSAPTTSTISAPTTSTPSAPTTSTTLAPTTSTTSAPTTSTTSTPTSSTTSSPQTSTTSASTTSITSGPGTTPSPVPTTSTTSAPTTSTTSAATTSTISAPTTSTTSAPTTSTTSASTASKTSGLGTTPSPIPTTSTTSPPTTSTTSASTASKTSGPGTTPSPVPTTSTIFAPRTSTTSASTTSTTPGPGTTPSPVPTTSTASVSKTSTSHVSISKTTHSQPVTRDCHLRCTWTKWFDIDFPSPGPHGGDKETYNNIIRSGEKICRRPEEITRLQCRAESHPEVSIEHLGQVVQCSREEGLVCRNQDQQGPFKMCLNYEVRVLCCETPKGCPVTSTPVTAPSTPSGRATSPTQSTSSWQKSRTTTLVTTSTTSTPQTSTTSAPTTSTTSAPTTSTTSAPTTSTTSTPQTSISSAPTSSTTSAPTSSTISARTTSIISAPTTSTTSSPTTSTTSATTTSTTSAPTSSTTSTPQTSKTSAATSSTTSGSGTTPSPVTTTSTASVSKTSTSHVSVSKTTHSQPVTRDCHPRCTWTKWFDVDFPSPGPHGGDKETYNNIIRSGEKICRRPEEITRLQCRAKSHPEVSIEHLGQVVQCSREEGLVCRNQDQQGPFKMCLNYEVRVLCCETPKGCPVTSTSVTAPSTPSGRATSPTQSTSSWQKSRTTTLVTSSITSTTQTSTTSAPTTSTTPASIPSTTSAPTTSTTSAPTTSTTSAPTTSTTSTPQTTTSSAPTSSTTSAPTTSTISAPTTSTISAPTTSTTSAPTASTTSAPTSTSSAPTTNTTSAPTTSTTSAPITSTISAPTTSTTSTPQTSTISSPTTSTTSTPQTSTTSSPTTSTTSAPTTSTTSAPTTSTTSTPQTSISSAPTSSTTSAPTASTISAPTTSTTSFHTTSTTSPPTSSTSSTPQTSKTSAATSSTTSGSGTTPSPVPTTSTASVSKTSTSHVSVSKTTHSQPVTRDCHPRCTWTKWFDVDFPSPGPHGGDKETYNNIIRSGEKICRRPEEITRLQCRAESHPEVSIEHLGQVVQCSREEGLVCRNQDQQGPFKMCLNYEVRVLCCETPKGCPVTSTPVTAPSTPSGRATSPTQSTSSWQKSRTTTLVTTSTTSTPQTSTTSAPTTSTIPASTPSTTSAPTTSTTSAPTTSTTSAPTHRTTSGPTTSTTLAPTTSTTSAPTTSTNSAPTTSTISASTTSTISAPTTSTISSPTSSTTSTPQTSKTSAATSSTTSGSGTTPSPVPTTSTTSASTTSTTSAPTTSTTSGPGTTPSPVPSTSTTSAATTSTTSAPTTRTTSAPTSSMTSGPGTTPSPVPTTSTTSAPTTSTTSGPGTTPSPVPTTSTTSAPITSTTSGPGSTPSPVPTTSTTSAPTTSTTSASTASTTSGPGTTPSPVPTTSTTSAPTTRTTSASTASTTSGPGSTPSPVPTTSTTSAPTTRTTPASTASTTSGPGTTPSPVPTTSTTSASTTSTISLPTTSTTSAPITSMTSGPGTTPSPVPTTSTTSAPTTSTTSASTASTTSGPGTTPSPVPTTSTTSAPTTSTTSASTASTTSGPGTSLSPVPTTSTTSAPTTSTTSGPGTTPSPVPTTSTTSAPTTSTTSGPGTTPSPVPTTSTTPVSKTSTSHLSVSKTTHSQPVTSDCHPLCAWTKWFDVDFPSPGPHGGDKETYNNIIRSGEKICRRPEEITRLQCRAESHPEVNIEHLGQVVQCSREEGLVCRNQDQQGPFKMCLNYEVRVLCCETPRGCPVTSVTPYGTSPTNALYPSLSTSMVSASVASTSVASSSVASSSVAYSTQTCFCNVADRLYPAGSTIYRHRDLAGHCYYALCSQDCQVVRGVDSDCPSTTLPPAPATSPSISTSEPVTELGCPNAVPPRKKGETWATPNCSEATCEGNNVISLRPRTCPRVEKPTCANGYPAVKVADQDGCCHHYQCQCVCSGWGDPHYITFDGTYYTFLDNCTYVLVQQIVPVYGHFRVLVDNYFCGAEDGLSCPRSIILEYHQDRVVLTRKPVHGVMTNEIIFNNKVVSPGFRKNGIVVSRIGVKMYATIPELGVQVMFSGLIFSVEVPFSKFANNTEGQCGTCTNDRKDECRTPRGTVVASCSEMSGLWNVSIPDQPACHRPHPTPTTVGPTTVGSTTVGPTTVGSTTVGPTTPPAPCLPSPICQLILSKVFEPCHTVIPPLLFYEGCVFDRCHMTDLDVVCSSLELYAALCASHDICIDWRGRTGHMCPFTCPADKVYQPCGPSNPSYCYGNDSASLGALPEAGPITEGCFCPEGMTLFSTSAQVCVPTGCPRCLGPHGEPVKVGHTVGMDCQECTCEAATWTLTCRPKLCPLPPACPLPGFVPVPAAPQAGQCCPQYSCACNTSRCPAPVGCPEGARAIPTYQEGACCPVQNCSWTVCSINGTLYQPGAVVSSSLCETCRCELPGGPPSDAFVVSCETQICNTHCPVGFEYQEQSGQCCGTCVQVACVTNTSKSPAHLFYPGETWSDAGNHCVTHQCEKHQDGLVVVTTKKACPPLSCSLDEARMSKDGCCRFCPPPPPPYQNQSTCAVYHRSLIIQQQGCSSSEPVRLAYCRGNCGDSSSMYSLEGNTVEHRCQCCQELRTSLRNVTLHCTDGSSRAFSYTEVEECGCMGRRCPAPGDTQHSEEAEPEPSQEAESGSWERGVPVSPMH

SEQ ID NO: 9109 - protein, 5762 aa, Homo sapiens
MGAPSACRTLVLALAAMLVVPQAETQGPVEPSWENAGHTMDGGAPTSSPTRRVSFVPPVTVFPSLSPLNPAHNGRVCSTWGDFHYKTFDGDVFRFPGLCNYVFSEHCRAAYEDFNVQLRRGLVGSRPVVTRVVIKAQGLVLEASNGSVLINGQREELPYSRTGLLVEQSGDYIKVSIRLVLTFLWNGEDSALLELDPKYANQTCGLCGDFNGLPAFNEFYAHNARLTPLQFGNLQKLDGPTEQCPDPLPLPAGNCTDEEGICHRTLLGPAFAECHALVDSTAYLAACAQDLCRCPTCPCATFVEYSRQCAHAGGQPRNWRCPELCPRTCPLNMQHQECGSPCTDTCSNPQRAQLCEDHCVDGCFCPPGTVLDDITHSGCLPLGQCPCTHGGRTYSPGTSFNTTCSSCTCSGGLWQCQDLPCPGTCSVQGGAHISTYDEKLYDLHGDCSYVLSKKCADSSFTVLAELRKCGLTDNENCLKAVTLSLDGGDTAIRVQADGGVFLNSIYTQLPLSAANITLFTPSSFFIVVQTGLGLQLLVQLVPLMQVFVRLDPAHQGQMCGLCGNFNQNQADDFTALSGVVEATGAAFANTWKAQAACANARNSFEDPCSLSVENENYARHWCSRLTDPNSAFSRCHSIINPKPFHSNCMFDTCNCERSEDCLCAALSSYVHACAAKGVQLSDWRDGVCTKYMQNCPKSQRYAYVVDACQPTCRGLSEADVTCSVSFVPVDGCTCPAGTFLNDAGACVPAQECPCYAHGTVLAPGEVVHDEGAVCSCTGGKLSCLGASLQKSTGCAAPMVYLDCSNSSAGTPGAECLRSCHTLDVGCFSTHCVSGCVCPPGLVSDGSGGCIAEEDCPCVHNEATYKPGETIRVDCNTCTCRNRRWECSHRLCLGTCVAYGDGHFITFDGDRYSFEGSCEYILAQDYCGDNTTHGTFRIVTENIPCGTTGTTCSKAIKLFVESYELILQEGTFKAVARGPGGDPPYKIRYMGIFLVIETHGMAVSWDRKTSVFIRLHQDYKGRVCGLCGNFDDNAINDFATRSRSVVGDALEFGNSWKLSPSCPDALAPKDPCTANPFRKSWAQKQCSILHGPTFAACRSQVDSTKYYEACVNDACACDSGGDCECFCTAVAAYAQACHDAGLCVSWRTPDTCPLFCDFYNPHGGCEWHYQPCGAPCLKTCRNPSGHCLVDLPGLEGCYPKCPPSQPFFNEDQMKCVAQCGCYDKDGNYYDVGARVPTAENCQSCNCTPSGIQCAHSLEACTCTYEDRTYSYQDVIYNTTDGLGACLIAICGSNGTIIRKAVACPGTPATTPFTFTTAWVPHSTTSPALPVSTVCVREVCRWSSWYNGHRPEPGLGGGDFETFENLRQRGYQVCPVLADIECRAAQLPDMPLEELGQQVDCDRMRGLMCANSQQSPPLCHDYELRVLCCEYVPCGPSPAPGTSPQPSLSASTEPAVPTPTQTTATEKTTLWVTPSIRSTAALTSQTGSSSGPVTVTPSAPGTTTCQPRCQWTEWFDEDYPKSEQLGGDVESYDKIRAAGGHLCQQPKDIECQAESFPNWTLAQVGQKVHCDVHFGLVCRNWEQEGVFKMCYNYRIRVLCCSDDHCRGRATTPPPTTELETATTTTTQALFSTPQPTSSPGLTRAPPASTTAVPTLSEGLTSPRYTSTLGTATTGGPTTPAGSTEPTVPGVATSTLPTRSALPGTTGSLGTWRPSQPPTLAPTTMATSRARPTGTASTASKEPLTTSLAPTLTSELSTSQAETSTPRTETTMSPLTNTTTSQGTTRCQPKCEWTEWFDVDFPTSGVAGGDMETFENIRAAGGKMCWAPKSIECRAENYPEVSIDQVGQVLTCSLETGLTCKNEDQTGRFNMCFNYNVRVLCCDDYSHCPSTPATSSTATPSSTPGTTWILTKPTTTATTTASTGSTATPTSTLRTAPPPKVLTTTATTPTVTSSKATPSSSPGTATALPALRSTATTPTATSVTPIPSSSLGTTWTRLSQTTTPTATMSTATPSSTPETAHTSTVLTATATTTGATGSVATPSSTPGTAHTTKVPTTTTTGFTATPSSSPGTALTPPVWISTTTTPTTRGSTVTPSSIPGTTHTATVLTTTTTTVATGSMATPSSSTQTSGTPPSLTTTATTITATGSTTNPSSTPGTTPIPPVLTTTATTPAATSNTVTPSSALGTTHTPPVPNTMATTHGRSLPPSSPHTVRTAWTSATSGILGTTHITEPSTVTSHTLAATTGTTQHSTPALSSPHPSSRTTESPPSPGTTTPGHTTATSRTTATATPSKTRTSTLLPSSPTSAPITTVVTMGCEPQCAWSEWLDYSYPMPGPSGGDFDTYSNIRAAGGAVCEQPLGLECRAQAQPGVPLRELGQVVECSLDFGLVCRNREQVGKFKMCFNYEIRVFCCNYGHCPSTPATSSTAMPSSTPGTTWILTELTTTATTTESTGSTATPSSTPGTTWILTEPSTTATVTVPTGSTATASSTQATAGTPHVSTTATTPTVTSSKATPFSSPGTATALPALRSTATTPTATSFTAIPSSSLGTTWTRLSQTTTPTATMSTATPSSTPETVHTSTVLTTTATTTGATGSVATPSSTPGTAHTTKVLTTTTTGFTATPSSSPGTARTLPVWISTTTTPTTRGSTVTPSSIPGTTHTPTVLTTTTTTVATGSMATPSSSTQTSGTPPSLTTTATTITATGSTTNPSSTPGTTPIPPVLTTTATTPAATSSTVTPSSALGTTHTPPVPNTTATTHGRSLSPSSPHTVRTAWTSATSGTLGTTHITEPSTGTSHTPAATTGTTQHSTPALSSPHPSSRTTESPPSPGTTTPGHTRATSRTTATATPSKTRTSTLLPSSPTSAPITTVVTMGCEPQCAWSEWLDYSYPMPGPSGGDFDTYSNIRAAGGAVCEQPLGLECRAQAQPGVPLRELGQVVECSLDFGLVCRNREQVGKFKMCFNYEIRVFCCNYGHCPSTPATSSTATPSSTPGTTWILTEQTTAATTTATTGSTAIPSSTPGTAPPPKVLTSTATTPTATSSKATSSSSPRTATTLPVLTSTATKSTATSFTPIPSFTLGTTGTLPEQTTTPMATMSTIHPSSTPETTHTSTVLTTKATTTRATSSMSTPSSTPGTTWILTELTTAATTTAATGPTATPSSTPGTTWILTEPSTTATVTVPTGSTATASSTRATAGTLKVLTSTATTPTVISSRATPSSSPGTATALPALRSTATTPTATSVTAIPSSSLGTAWTRLSQTTTPTATMSTATPSSTPETVHTSTVLTTTTTTTRATGSVATPSSTPGTAHTTKVPTTTTTGFTATPSSSPGTALTPPVWISTTTTPTTRGSTVTPSSIPGTTHTATVLTTTTTTVATGSMATPSSSTQTSGTPPSLTTTATTITATGSTTNPSSTPGTTPIPPVLTTTATTPAATSSTVTPSSALGTTHTPPVPNTTATTHGRSLPPSSPHTVRTAWTSATSGILGTTHITEPSTVTSHTPAATTSTTQHSTPALSSPHPSSRTTESPPSPGTTTPGHTRGTSRTTATATPSKTRTSTLLPSSPTSAPITTVVTTGCEPQCAWSEWLDYSYPMPGPSGGDFDTYSNIRAAGGAVCEQPLGLECRAQAQPGVPLRELGQVVECSLDFGLVCRNREQVGKFKMCFNYEIRVFCCNYGHCPSTPATSSTATPSSTPGTTWILTKLTTTATTTESTGSTATPSSTPGTTWILTEPSTTATVTVPTGSTATASSTQATAGTPHVSTTATTPTVTSSKATPFSSPGTATALPALRSTATTPTATSFTAIPSSSLGTTWTRLSQTTTPTATMSTATPSSTPETAHTSTVLTTTATTTRATGSVATPSSTPGTAHTTKVPTTTTTGFTVTPSSSPGTARTPPVWISTTTTPTTSGSTVTPSSVPGTTHTPTVLTTTTTTVATGSMATPSSSTQTSGTPPSLITTATTITATGSTTNPSSTPGTTPIPPVLTTTATTPAATSSTVTPSSALGTTHTPPVPNTTATTHGRSLSPSSPHTVRTAWTSATSGTLGTTHITEPSTGTSHTPAATTGTTQHSTPALSSPHPSSRTTESPPSPGTTTPGHTTATSRTTATATPSKTRTSTLLPSSPTSAPITTVVTTGCEPQCAWSEWLDYSYPMPGPSGGDFDTYSNIRAAGGAVCEQPLGLECRAQAQPGVPLGELGQVVECSLDFGLVCRNREQVGKFKMCFNYEIRVFCCNYGHCPSTPATSSTAMPSSTPGTTWILTELTTTATTTASTGSTATPSSTPGTAPPPKVLTSPATTPTATSSKATSSSSPRTATTLPVLTSTATKSTATSVTPIPSSTLGTTGTLPEQTTTPVATMSTIHPSSTPETTHTSTVLTTKATTTRATSSTSTPSSTPGTTWILTELTTAATTTAATGPTATPSSTPGTTWILTELTTTATTTASTGSTATPSSTPGTTWILTEPSTTATVTVPTGSTATASSTQATAGTPHVSTTATTPTVTSSKATPSSSPGTATALPALRSTATTPTATSFTAIPSSSLGTTWTRLSQTTTPTATMSTATPSSTPETVHTSTVLTATATTTGATGSVATPSSTPGTAHTTKVPTTTTTGFTATPSSSPGTALTPPVWISTTTTPTTTTPTTSGSTVTPSSIPGTTHTARVLTTTTTTVATGSMATPSSSTQTSGTPPSLTTTATTITATGSTTNPSSTPGTTPITPVLTSTATTPAATSSKATSSSSPRTATTLPVLTSTATKSTATSFTPIPSSTLWTTWTVPAQTTTPMSTMSTIHTSSTPETTHTSTVLTTTATMTRATNSTATPSSTLGTTRILTELTTTATTTAATGSTATLSSTPGTTWILTEPSTIATVMVPTGSTATASSTLGTAHTPKVVTTMATMPTATASTVPSSSTVGTTRTPAVLPSSLPTFSVSTVSSSVLTTLRPTGFPSSHFSTPCFCRAFGQFFSPGEVIYNKTDRAGCHFYAVCNQHCDIDRFQGACPTSPPPVSSAPLSSPSPAPGCDNAIPLRQVNETWTLENCTVARCVGDNRVVLLDPKPVANVTCVNKHLPIKVSDPSQPCDFHYECECICSMWGGSHYSTFDGTSYTFRGNCTYVLMREIHARFGNLSLYLDNHYCTASATAAAARCPRALSIHYKSMDIVLTVTMVHGKEEGLILFDQIPVSSGFSKNGVLVSVLGTTTMRVDIPALGVSVTFNGQVFQARLPYSLFHNNTEGQCGTCTNNQRDDCLQRDGTTAASCKDMAKTWLVPDSRKDGCWAPTGTPPTASPAAPVSSTPTPTPCPPQPLCDLMLSQVFAECHNLVPPGPFFNACISDHCRGRLEVPCQSLEAYAELCRARGVCSDWRGATGGLCDLTCPPTKVYKPCGPIQPATCNSRNQSPQLEGMAEGCFCPEDQILFNAHMGICVQACPCVGPDGFPKFPGERWVSNCQSCVCDEGSVSVQCKPLPCDAQGQPPPCNRPGFVTVTRPRAENPCCPETVCVCNTTTCPQSLPVCPPGQESICTQEEGDCCPTFRCRPQLCSYNGTFYGVGATFPGALPCHMCTCLSGDTQDPTVQCQEDACNNTTCPQGFEYKRVAGQCCGECVQTACLTPDGQPVQLNETWVNSHVDNCTVYLCEAEGGVHLLTPQPASCPDVSSCRGSLRKTGCCYSCEEDSCQVRINTTILWHQGCETEVNITFCEGSCPGASKYSAEAQAMQHQCTCCQERRVHEETVPLHCPNGSAILHTYTHVDECGCTPFCVPAPMAPPHTRGFPAQEATAV

SEQ ID NO: 9110 - protein, 154 aa, Homo sapiens [sequence omitted]

SEQ ID NO: 9111 - protein, 181 aa, Homo sapiens
MDTSRTPSVCRETGGAALSRGERRPQGRRGSPTPTAGPVHTGLANTSYTSPGLQRLKDSPQTAPDKGQCSTWGAGHFSTFDHHVYDFSGTCNYIFAATCKDAFPTFSVQLRRGPDGSISRIIVELGASVVTVSEAIISVKDIGVISLPYTSNGLQITPFGQSVRLVAKQLELELEVVWGPD

SEQ ID NO: 9112 - protein, 2439 aa, Homo sapiens
MVQRWLLLSCCGALLSAGLANTSYTSPGLQRLKDSPQTAPDKGQCSTWGAGHFSTFDHHVYDFSGTCNYIFAATCKDAFPTFSVQLRRGPDGSISRIIVELGASVVTVSEAIISVKDIGVISLPYTSNGLQITPFGQSVRLVAKQLELELEVVWGPDSHLMVLVERKYMGQMCGLCGNFDGKVTNEFVSEEGKFLEPHKFAALQKLDDPGEICTFQDIPSTHVRQAQHARICTQLLTLVAPECSVSKEPFVLSCQADVAAAPQPGPQNSSCATLSEYSRQCSMVGQPVRRWRSPGLCSVGQCPANQVYQECGSACVKTCSNPQHSCSSSCTFGCFCPEGTVLNDLSNNHTCVPVTQCPCVLHGAMYAPGEVTIAACQTCRCTLGRWVCTERPCPGHCSLEGGSFVTTFDARPYRFHGTCTYILLQSPQLPEDGALMAVYDKSGVSHSETSLVAVVYLSRQDKIVISQDEVVTNNGEAKWLPYKTRNITVFRQTSTHLQMATSFGLELVVQLRPIFQAYVTVGPQFRGQTRGLCGNFNGDTTDDFTTSMGIAEGTASLFVDSWRAGNCPAALERETDPCSMSQLNKVCAETHCSMLLRTGTVFERCHATVNPAPFYKRCVYQACNYEETFPHICAALGDYVHACSLRGVLLWGWRSSVDNCTIPCTGNTTFSYNSQACERTCLSLSDRATECHHSAVPVDGCNCPDGTYLNQKGECVRKAQCPCILEGYKFILAEQSTVINGITCHCINGRLSCPQRPQMFLASCQAPKTFKSCSQSSENKFGAACAPTCQMLATGVACVPTKCEPGCVCAEGLYENADGQCVPPEECPCEFSGVSYPGGAELHTDCRTCSCSRGRWACQQGTHCPSTCTLYGEGHVITFDGQRFVFDGNCEYILATDVCGVNDSQPTFKILTENVICGNSGVTCSRAIKIFLGGLSVVLADRNYTVTGEEPHVQLGVTPGALSLVVDISIPGRYNLTLIWNRHMTILIRIARASQDPLCGLCGNFNGNMKDDFETRSRYVASSELELVNSWKESPLCGDVSFVTDPCSLNAFRRSWAERKCSVINSQTFATCHSKVYHLPYYEACVRDACGCDSGGDCECLCDAVAAYAQACLDKGVCVDWRTPAFCPIYCGFYNTHTQDGHGEYQYTQEANCTWHYQPCLCPSQPQSVPGSNIEGCYNCSQDEYFDHEEGVCVPCMPPTTPQPPTTPQLPTTGSRPTQVWPMTGTSTTIGLLSSTGPSPSSNHTPASPTQTPLLPATLTSSKPTASSGEPPRPTTAVTPQATSGLPPTATLRSTATKPTVTQATTRATASTASPATTSTAQSTTRTTMTLPTPATSGTSPTLPKSTNQELPGTTATQTTGPRPTPASTTGPTTPQPGQPTRPTATETTQTRTTTEYTTPQTPHTTHSPPTAGSPVPSTGPVTATSFHATTTYPTPSHPETTLPTHVPPFSTSLVTPSTHTVITPTHAQMATSASNHSAPTGTIPPPTTLKATGSTHTAPPITPTTSGTSQAHSSFSTNKTPTSLHSHTSSTHHPEVTPTSTTTITPNPTSTRTRTPVAHTNSATSSRPPPPFTTHSPPTGSSPFSSTGPMTATSFKTTTTYPTPSHPQTTLPTHVPPFSTSLVTPSTHTVITPTHAQMATSASIHSMPTGTIPPPTTLKATGSTHTAPTMTLTTSGTSQALSSLNTAKTSTSLHSHTSSTHHAEATSTSTTNITPNPTSTGTPPMTVTTSGTSQSRSSFSTAKTSTSLHSHTSSTHHPEVTSTSTTSITPNHTSTGTRTPVAHTTSATSSRLPTPFTTHSPPTGTTPISSTGPVTATSFQTTTTYPTPSHPHTTLPTHVPSFSTSLVTPSTHTVIIPTHTQMATSASIHSMPTGTIPPPTTIKATGSTHTAPPMTPTTSGTSQSPSSFSTAKTSTSLPYHTSSTHHPEVTPTSTTNITPKHTSTGTRTPVAHTTSASSSRLPTPFTTHSPPTGSSPFSSTGPMTATSFQTTTTYPTPSHPQTTLPTHVPPFSTSLVTPSTHTVIITTHTQMATSASIHSTPTGTVPPPTTLKATGSTHTAPPMTVTTSGTSQTHSSFSTATASSSFISSSSWLPQNSSSRPPSSPITTQLPHLSSATTPVSTTNQLSSSFSPSPSAPSTVSSYVPSSHSSPQTSSPSVGTSSSFVSAPVHSTTLSSGSHSSLSTHPTTASVSASPLFPSSPAASTTIRATLPHTISSPFTLSALLPISTVTVSPTPSSHLASSTIAFPSTPRTTASTHTAPAFSSQSTTSRSTSLTTRVPTSGFVSLTSGVTGIPTSPVTNLTTRHPGPTLSPTTRFLTSSLTAHGSTPASAPVSSLGTPTPTSPGVCSVREQQEEITFKGCMANVTVTRCEGACISAASFNIITQQVDARCSCCRPLHSYEQQLELPCPDPSTPGRRLVLTLQVFSHCVCSSVACGD

SEQ ID NO: 9113 - protein, 115 aa, Homo sapiens
  VARIANT 1: note = misc_feature - Xaa can be any naturally occurring amino acid
XPPTTPQPPTTPQLPTTGSRPTQVWPMTGTSTTIGLLSSTGPSPSSNHTPASPTQTPLLPATLTSSKPTASSGGKEPPAEPMERAAAGGPRYTSGVGLGMALLPGSHLPLSRFPA

SEQ ID NO: 9114 - protein, 219 aa, Homo sapiens
  VARIANT 1: note = misc_feature - Xaa can be any naturally occurring amino acid
XSSPFTLSALLPISTVTVSPTPSSHLASSTIAFPSTPRTTASTHTAPAFSSQSTTSRSTSLTTRVPTSGFVSLTSGVTGIPTSPVTNLTTRHPGPTLSPTTRFLTSSLTAHGSTPASAPVSSLGTPTPTSPGESTGGRPAPRPPRCSQPHPREVRAPHPGACCPISFNIITQQVDARCSCCRPLHSYEQQLELPCPDPSTPGRRLVLTLQVFSHCVCSS

SEQ ID NO: 9115 - protein, 136 aa, Homo sapiens
MKTLPLFVCICALSACFSFSEGRERDHELRHRRHHHQSPKSHFELPHYPGLLAHQKPFIRKSYKCLHKRCRPKLPPSPNNPPKFPNPHQPPKHPDKNSSVVNPTLVATTQIPSVTFPSASTKITTLPNVTFLPQNA

SEQ ID NO: 9116 - protein, 377 aa, Homo sapiens
MKTLPLFVCICALSACFSFSEGRERDHELRHRRHHHQSPKSHFELPHYPGLLAHQKPFIRKSYKCLHKRCRPKLPPSPNNPPKFPNPHQPPKHPDKNSSVVNPTLVATTQIPSVTFPSASTKITTLPNVTFLPQNATTISSRENVNTSSSVATLAPVNSPAPQDTTAAPPTPSATTPAPPSSSAPPETTAAPPTPSATTQAPPSSSAPPETTAAPPTPPATTPAPPSSSAPPETTAAPPTPSATTPAPLSSSAPPETTAVPPTPSATTLDPSSASAPPETTAAPPTPSATTPAPPSSPAPQETTAAPITTPNSSPTTLAPDTSETSAAPTHQTTTSVTTQTTTTKQPTSAPGQNKISRFLLYMKNLLNRIIDDMVEQ

SEQ ID NO: 9117 - protein, 377 aa, Homo sapiens; identical to SEQ ID NO: 9116

SEQ ID NO: 9118 - protein, 377 aa, Homo sapiens; identical to SEQ ID NO: 9116

SEQ ID NO: 9119 - protein, 85 aa, Homo sapiens
MGGDHGYQLAVTKAENPTTAAPADTYPATGPADDEAPDAETTAAATTATTAAPTTATTAASTTARKDIPVLPKWVGDLPNGRVCP

SEQ ID NO: 9120 - protein, 90 aa, Homo sapiens
MKFLAVLVLLGVSIFLVSAQNPTTAAPADTYPATGPADDEAPDAETTAAATTATTAAPTTATTAASTTARKDIPVLPKWVGDLPNGRVCP

SEQ ID NO: 9121 - protein, 80 aa, Homo sapiens
MKFLAVLVLLGVSIFLVSAQNPTTAAPADTYPATGPADDEAPDAETTPTTATTAASTTARKDIPVLPKWVGDLPNGRVCP

SEQ ID NO: 9122 - protein, 2828 aa, Homo sapiens
MPKRAHWGALSVVLILLWGHPRVALACPHPCACYVPSEVHCTFRSLASVPAGIAKHVERINLGFNSIQALSETSFAGLTKLELLMIHGNEIPSIPDGALRDLSSLQVFKFSYNKLRVITGQTLQGLSNLMRLHIDHNKIEFIHPQAFNGLTSLRLLHLEGNLLHQLHPSTFSTFTFLDYFRLSTIRHLYLAENMVRTLPASMLRNMPLLENLYLQGNPWTCDCEMRWFLEWDAKSRGILKCKKDKAYEGGQLCAMCFSPKKLYKHEIHKLKDMTCLKPSIESPLRQNRSRSIEEEQEQEEDGGSQLILEKFQLPQWSISLNMTDEHGNMVNLVCDIKKPMDVYKIHLNQTDPPDIDINATVALDFECPMTRENYEKLWKLIAYYSEVPVKLHRELMLSKDPRVSYQYRQDADEEALYYTGVRAQILAEPEWVMQPSIDIQLNRRQSTAKKVLLSYYTQYSQTISTKDTRQARGRSWVMIEPSGAVQRDQTVLEGGPCQLSCNVKASESPSIFWVLPDGSILKAPMDDPDSKFSILSSGWLRIKSMEPSDSGLYQCIAQVRDEMDRMVYRVLVQSPSTQPAEKDTVTIGKNPGESVTLPCNALAIPEAHLSWILPNRRIINDLANTSHVYMLPNGTLSIPKVQVSDSGYYRCVAVNQQGADHFTVGITVTKKGSGLPSKRGRRPGAKALSRVREDIVEDEGGSGMGDEENTSRRLLHPKDQEVFLKTKDDAINGDKKAKKGRRKLKLWKHSEKEPETNVAEGRRVFESRRRINMANKQINPERWADILAKVRGKNLPKGTEVPPLIKTTSPPSLSLEVTPPFPAISPPSASPVQTVTSAEESSADVPLLGEEEHVLGTISSASMGLEHNHNGVILVEPEVTSTPLEEVVDDLSEKTEEITSTEGDLKGTAAPTLISEPYEPSPTLHTLDTVYEKPTHEETATEGWSAADVGSSPEPTSSEYEPPLDAVSLAESEPMQYFDPDLETKSQPDEDKMKEDTFAHLTPTPTIWVNDSSTSQLFEDSTIGEPGVPGQSHLQGLTDNIHLVKSSLSTQDTLLIKKGMKEMSQTLQGGNMLEGDPTHSRSSESEGQESKSITLPDSTLGIMSSMSPVKKPAETTVGTLLDKDTTTATTTPRQKVAPSSTMSTHPSRRRPNGRRRLRPNKFRHRHKQTPPTTFAPSETFSTQPTQAPDIKISSQVESSLVPTAWVDNTVNTPKQLEMEKNAEPTSKGTPRRKHGKRPNKHRYTPSTVSSRASGSKPSPSPENKHRNIVTPSSETILLPRTVSLKTEGPYDSLDYMTTTRKIYSSYPKVQETLPVTYKPTSDGKEIKDDVATNVDKHKSDILVTGESITNAIPTSRSLVSTMGEFKEESSPVGFPGTPTWNPSRTAQPGRLQTGIPVTTSGENLTDPPLLKELEDVDFTSEFLSSLTVSTPFHQEEAGSSTTLSSIKVEVASSQAETTTLDQDHLETTVAILLSETRPQNHTPTAARMKEPASSSPSTILMSLGQTTTTKPALPSPRISQASRDSKENVFLNYVGNPETEATPVNNEGTQHMSGPNELSTPSSDQDAFNLSTKLELEKQVFGSRSLPRGPDSQRQDGRVHASHQLTRVPAKPILPTATVRLPEMSTQSASRYFVTSQSPRHWTNKPEITTYPSGALPENKQFTTPRLSSTTIPLPLHMSKPSIPSKFTDRRTDQFNGYSKVFGNNNIPEARNPVGKPPSPRIPHYSNGRLPFFTNKTLSFPQLGVTRRPQIPTSPAPVMRERKVIPGSYNRIHSHSTFHLDFGPPAPPLLHTPQTTGSPSTNLQNIPMVSSTQSSISFITSSVQSSGSFHQSSSKFFAGGPPASKFWSLGEKPQILTKSPQTVSVTAETDTVFPCEATGKPKPFVTWTKVSTGALMTPNTRIQRFEVLKNGTLVIRKVQVQDRGQYMCTASNLHGLDRMVVLLSVTVQQPQILASHYQDVTVYLGDTIAMECLAKGTPAPQISWIFPDRRVWQTVSPVEGRITLHENRTLSIKEASFSDRGVYKCVASNAAGADSLAIRLHVAALPPVIHQEKLENISLPPGLSIHIHCTAKAAPLPSVRWVLGDGTQIRPSQFLHGNLFVFPNGTLYIRNLAPKDSGRYECVAANLVGSARRTVQLNVQRAAANARITGTSPRRTDVRYGGTLKLDCSASGDPWPRILWRLPSKRMIDALFSFDSRIKVFANGTLVVKSVTDKDAGDYLCVARNKVGDDYVVLKVDVVMKPAKIEHKEENDHKVFYGGDLKVDCVATGLPNPEISWSLPDGSLVNSFMQSDDSGGRTKRYVVFNNGTLYFNEVGMREEGDYTCFAENQVGKDEMRVRVKVVTAPATIRNKTYLAVQVPYGDVVTVACEAKGEPMPKVTWLSPTNKVIPTSSEKYQIYQDGTLLIQKAQRSDSGNYTCLVRNSAGEDRKTVWIHVNVQPPKINGNPNPITTVREIAAGGSRKLIDCKAEGIPTPRVLWAFPEGVVLPAPYYGNRITVHGNGSLDIRSLRKSDSVQLVCMARNEGGEARLILQLTVLEPMEKPIFHDPISEKITAMAGHTISLNCSAAGTPTPSLVWVLPNGTDLQSGQQLQRFYHKADGMLHISGLSSVDAGAYRCVARNAAGHTERLVSLKVGLKPEANKQYHNLVSIINGETLKLPCTPPGAGQGRFSWTLPNGMHLEGPQTLGRVSLLDNGTLTVREASVFDRGTYVCRMETEYGPSVTSIPVIVIAYPPRITSEPTPVIYTRPGNTVKLNCMAMGIPKADITWELPDKSHLKAGVQARLYGNRFLHPQGSLTIQHATQRDAGFYKCMAKNILGSDSKTTYIHVF

SEQ ID NO: 9123 - protein, 213 aa, Homo sapiens
MDTERVGDGKQHRRKQSQRLRWPCCLALVPDRHPSQLSSCTLCLLAAASQWESWAHFSKWHTEASTGTHLGKAKAEGLGCTVKNTPQLSICEPSHFGPSFVHSPHLLVDHDHRAGAATGRGQAGPSRASSVSPTFCPPTTSHHPVCAKGTDPVLVLQEEEQDLDGEKGPSSEGPEEEDGEGFSFKYSPGKLRGNQYKKMMTKEELEEEQRTEE

SEQ ID NO: 9124 - protein, 177 aa, Homo sapiens
MEAPAELLAALPALATALALLLAWLLVRRGAAASPEPARAPPEPAPPAEATGAPAPSRPCAPEPAASPAGPEEPGEPAGLGELGEPAGPGEPEGPGDPAAAPAEAEEQAVEARQEEEQDLDGEKGPSSEGPEEEDGEGFSFKYSPGKLRGNQYKKMMTKEELEEEQRIELTSDLTSL

SEQ ID NO: 9125 - protein, 170 aa, Homo sapiens
MEAPAELLAALPALATALALLLAWLLVRRGAAASPEPARAPPEPAPPAEATGAPAPSRPCAPEPAASPAGPEEPGEPAGLGELGEPAGPGEPEGPGDPAAAPAEAEEQAVEARQEEEQDLDGEKGPSSEGPEEEDGEGFSFKYSPGKLRGNQYKKMMTKEELEEEQRTEE

SEQ ID NO: 9126 - protein, 204 aa, Homo sapiens
MEAPAELLAALPALATALALLLAWLLVRRGAAASPEPARAPPEPAPPAEATGAPAPSRPCAPEPAASPAGPEEPGEPAGLGELGEPAGPGEPEGPGDPAAAPAEAEEQAVEARQEEEQDLDGEKGPSSEGPEEEDGEGFSFKYSPGKLRGNQYKKMMTKEELEEEQRVQKEQLAAIFKLMKDNKETFGEMSDGDVQEQLRLYDM

SEQ ID NO: 9127 - protein, 22 aa, Homo sapiens
MMTKEELEEEQRIELTSDLTSL

SEQ ID NO: 9128 - protein, 15 aa, Homo sapiens
MMTKEELEEEQRTEE

SEQ ID NO: 9129 - protein, 15 aa, Homo sapiens
MMTKEELEEEQRTEE

SEQ ID NO: 9130 - protein, 189 aa, Homo sapiens
MAAPSGGWNGVGASLWAALLLGAVALRPAEAVSEPTTVAFDVRPGGVVHSFSHNVGPGDKYTCMFTYASQGGTNEQWQMSLGTSEDHQHFTCTIWRPQGKSYLYFTQFKAEVRGAEIEYAMAYSKAAFERESDVPLKTEEFEVTKTAGTERWGWGRGDATPIQGWAIGAVWRGGSAIGVLETVDQASTN

SEQ ID NO: 9131 - protein, 173 aa, Homo sapiens
MAAPSGGWNGVGASLWAALLLGAVALRPAEAVSEPTTVAFDVRPGGVVHSFSHNVGPGDKYTCMFTYASQGGTNEQWQMSLGTSEDHQHFTCTIWRPQGKSYLYFTQFKAEVRGAEIEYAMAYSKAAFERESDVPLKTEEFEVTKTAVAHRPGAFKAELSKLVIVAKASRTEL

SEQ ID NO: 9132 - protein, 84 aa, Homo sapiens
  VARIANT 1: note = misc_feature - Xaa can be any naturally occurring amino acid
XHQHFTCTIWRPQGKSYLYFTQFKAEVRGAEIEYAMAYSKAAFERESDVPLKTEEFEVTKTAVISAPQEKGDDQPHWTDGETEA

SEQ ID NO: 9133 - protein, 194 aa, Homo sapiens
MAPKKDVKKPVAAAAAAPAPAPAPAPAPAPAKPKEEKIDLSAIKIEFSKEQQDEFKEAFLLFDRTGDSKITLSQVGDVLRALGTNPTNAEVRKVLGNPSNEELNAKKIEFEQFLPMMQAISNNKDQATYEDFVEGLRVFDKEGNGTVMGAELRHVLATLGEKMKEEEVEALMAGQEDSNGCINYEAFVKHIMSI

SEQ ID NO: 9134 - protein, 150 aa, Homo sapiens
MSFSADQIAEFKEAFLLFDRTGDSKITLSQVGDVLRALGTNPTNAEVRKVLGNPSNEELNAKKIEFEQFLPMMQAISNNKDQATYEDFVEGLRVFDKEGNGTVMGAELRHVLATLGEKMKEEEVEALMAGQEDSNGCINYEAFVKHIMSI

SEQ ID NO: 9135 - protein, 63 aa, Homo sapiens
MRFFCARCCSFGPEMPAVQLLLLACLVWDVGARTAQLRKANDQRSFYVEFGHFGLPGTEVRAN

SEQ ID NO: 9136 - protein, 504 aa, Homo sapiens
MRFFCARCCSFGPEMPAVQLLLLACLVWDVGARTAQLRKANDQSGRCQYTFSVASPNESSCPEQSQAMSVIHNLQRDSSTQRLDLEATKARLSSLESLLHQLTLDQAARPQETQEGLQRELGTLRRERDQLETQTRELETAYSNLLRDKSVLEEEKKRLRQENENLARRLESSSQEVARLRRGQCPQTRDTARAVPPGSREVSTWNLDTLAFQELKSELTEVPASRILKESPSGYLRSGEGDTGCGELVWVGEPLTLRTAETITGKYGVWMRDPKPTYPYTQETTWRIDTVGTDVRQVFEYDLISQFMQGYPSKVHILPRPLESTGAVVYSGSLYFQGAESRTVIRYELNTETVKAEKEIPGAGYHGQFPYSWGGYTDIDLAVDEAGLWVIYSTDEAKGAIVLSKLNPENLELEQTWETNIRKQSVANAFIICGTLYTVSSYTSADATVNFAYDTGTGISKTLTIPFKNRYKYSSMIDYNPLEKKLFAWDNLNMVTYDIKLSKM

SEQ ID NO: 9137 - protein, 250 aa, Homo sapiens
MAFCALTIVALYILSLKDQDRRVPNLPPSNITSSQEPALLPTASSSAPNTSLVTTPASLQVPEITFCEILPCQETYCCPIRGMKEVSSSPVQRQSEEKEFHQRRWSEDKSKSVLARNALSGPDWESDWIDTTISSIQIMEIQQIIDHQYCIQSLQCGTTEPLIVFQCKFTLGNICFHSKRGTKGLESHREISQEMTQGYQHIWSLPVAPFSDSMFHFRVAAPDLADCSTDPYFAGIFFTDYFFYFYRRCA

SEQ ID NO: 9138 - protein, 898 aa, Homo sapiens
MDVVGENEALQQFFEAQGANGTLENPALDTSLLEEFLGNDFDLGALQRQLPDTPPYSASDSCSPPQVKGACYPTLRPTAGRTPAPFLHPTAAPAMPPMHPLQSTSGMGDSCQIHGGFHSCHSNASHLATPLDQSVSSHLGIGCSYPQQPLCHSPGASLPPTKKRKCTQALEDSGECRVWACHCRPMTSRSRSSEVQDPDSEGQNRMPTDQCSPALKWQPCHSVPWHSLLNSHYEKLPDVGYRVVTDKGFNFSPADEAFVCQKKNHFQITIHIQVWGSPKFVETEMGLKPIEMFYLKVFGTKVEATNQIIAIEQSQADRSKKIFNPVKIDLLADQVTKVTLGRLHFSETTANNMRKKGKPNPDQRYFMLVVGLYAANQDQFYLLSAHISERIIVRASNPGQFENDSDALWQRGQVPESIVCHGRVGINTDAPDEALVVCGNMKVMGTIMHPSDSRAKQNIQEVDTNEQLKRIAQMRIVEYDYKPEFASAMGINTAHQTGMIAQEVQEILPRAVREVGDVTCGNGETLENFLMVDKDQIFMENVGAVKQLCKLTNNLEERIEELEIWNRKLARLKRLSSWKSSASEASTISKSSRAVSASSPRRAVHKKNNKVYFSGKRQACPNWVFQTLVITLIAVMAFCLKDQDRRVPNLPPSNITSSQEPALLPTASSSAPNTSLVTTPASLQVPEITFCEILPCQETYCCPIRGMKEVSSSPVQRQSEEKEFHQRRWSDKSKSVLARNALSGPDWESDWIDTTISSIQIMEIQQIIDHQYCIQSLQCGSGNYNYNIPVNKHTPTNVKFSLEINTTEPLIVFQCKFTLGNICFHSKRGTKGLESHREISQEMTQGYQHIWSLPVAPFSDSMFHFRVAAPDLADCSTDPYFAGIFFTDYFFYFYRRCA

SEQ ID NO: 9139 - protein, 910 aa, Homo sapiens
MDVVGENEALQQFFEAQGANGTLENPALDTSLLEEFLGNDFDLGALQRQLPDTPPYSASDSCSPPQVKGACYPTLRPTAGRTPAPFLHPTAAPAMPPMHPLQSTSGMGDSCQIHGGFHSCHSNASHLATPLDQSVSSHLGIGCSYPQQPLCHSPGASLPPTKKRKCTQALEDSGECRVWACHCRPMTSRSRSSEVQDPDSEGQNRMPTDQCSPALKWQPCHSVPWHSLLNSHYEKLPDVGYRVVTDKGFNFSPADEAFVCQKKNHFQITIHIQVWGSPKFVETEMGLKPIEMFYLKVFGTKVEATNQIIAIEQSQADRSKKIFNPVKIDLLADQVTKVTLGRLHFSETTANNMRKKGKPNPDQRYFMLVVGLYAANQDQFYLLSAHISERIIVRASNPGQFENDSDALWQRGQVPESIVCHGRVGINTDAPDEALVVCGNMKVMGTIMHPSDSRAKQNIQEVDTNEQLKRIAQMRIVEYDYKPEFASAMGINTAHQTGMIAQEVQEILPRAVREVGDVTCGNGETLENFLMVDKDQIFMENVGAVKQLCKLTNNLEERIEELEIWNRKLARLKRLSSWKSSASEASTISKSSRAVSASSPRRAVHKKNNKVYFSGKRQACPNWVFQTLVITLIAVMAFCALTIVALYILSLKDQDRRVPNLPPSNITSSQEPALLPTASSSAPNTSLVTTPASLQVPEITFCEILPCQETYCCPIRGMKEVSSSPVQRQSEEKEFHQRRWSEDKSKSVLARNALSGPDWESDWIDTTISSIQIMEIQQIIDHQYCIQSLQCGSGNYNYNIPVNKHTPTNVKFSLEINTTEPLIVFQCKFTLGNICFHSKRGTKGLESHREISQEMTQGYQHIWSLPVAPFSDSMFHFRVAAPDLADCSTDPYFAGIFFTDYFFYFYRRCA

SEQ ID NO: 9140 - protein, 250 aa, Homo sapiens
MVFLALTIVALYILSLKDQDRRVPNLPPSNITSSQEPALLPTASSSAPNTSLVTTPASLQVPEITFCEILPCQETYCCPIRGMKEVSSSPVQRQSEEKEFHQRRWSEDKSKSVLARNALSGPDWESDWIDTTISSIQIMEIQQIIDHQYCIQSLQCGTTEPLIVFQCKFTLGNICFHSKRGTKGLESHREISQEMTQGYQHIWSLPVAPFSDSMFHFRVAAPDLADCSTDPYFAGIFFTDYFFYFYRRCA

SEQ ID NO: 9141 - protein, 375 aa, Homo sapiens
  VARIANT 1: note = misc_feature - Xaa can be any naturally occurring amino acid
XIFMENVGAVKQLCKLTNNLEERIEELEIWNRKLARLKRLSSWKSSASEASTISKSSRAVSASSPRRAVHKKNNKVYFSGKRQACPNWVFQTLVITLIAVMAFCALTIVALYILSLKDQDRRVPNLPPSNITSSQEPALLPTASSSAPNTSLVTTPASLQVPEITFCEILPCQETYCCPIRGMKEVSSSPVQRQSEEKEFHQRRWSEDKSKSVLARNALSGPDWESDWIDTTISSIQIMEIQQIIDHQYCIQSLQCGSGNYNYNIPVNKHTPTNVKFSLEINTTEPLIVFQCKFTLGNICFHSKRGTKGLESHREISQEMTQGYQHIWSLPVAPFSDSMFHFRVAAPDLADCSTDPYFAGIFFTDYFFYFYRRCA

SEQ ID NO: 9142 - protein, 76 aa, Homo sapiens
MRLSLPLLLLLLGAWAIPGGLGDRAPLTATAPQLDDEEMYSAHMPAHLRCDACRAVAYQLRSSRSGPSETSHRPRT

SEQ ID NO: 9143 - protein, 189 aa, Homo sapiens
MRLSLPLLLLLLGAWAIPGGLGDRAPLTATAPQLDDEEMYSAHMPAHLRCDACRAVAYQMWQNLAKAETKLHTSNSGGRRELSELVYTDVLDRSCSRNWQDYGVREVDQVKRLTGPGLSEGPEPSISVMVTGGPWPTRLSRTCLHYLGEFGEDQIYEAHQQGRGALEALLCGGPQGACSEKVSATREEL

SEQ ID NO: 9144 - protein, 75 aa, Homo sapiens
MRLSLPLLLLLLGAWAIPGGLGDRAPLTATAPQLDDEEMYSAHMPAHLRCDACRAVAYQRLCSYPPHLPLTEQQS

SEQ ID NO: 9145 - protein, 123 aa, Homo sapiens
MRLSLPLLLLLLGAWAIPGGLGDRAPLTATAPQLDDEEMYSAHMPAHLRCDACRAVAYQSLLVPDVAKSGKGRDQTSYLKLWGAAGAERVGLHGCPGPELLPELAGLRSSRSGPSETSHRPRT

SEQ ID NO: 9146 - protein, 60 aa, Homo sapiens
  VARIANT 1: note = misc_feature - Xaa can be any naturally occurring amino acid
XSLPLLLLLLGAWAIPGGLGDRAPLTATAPQLDDEEMYSAHMPAHLRCDACRAVAYQAHP

SEQ ID NO: 9147 - protein, 737 aa, Homo sapiens
MALCSALMTIFTIKMGTAKQAIDQGRSPVIIDNTNIQAWEMKPYVEVAIGKGYRVEFHEPETWWKFDPEELEKRNKHGVSRKKIAQMLDRYEYQMSISIVMNSVEPSHKSTQRPPPPQGRQRERVLKKTGHRLSKTKQKRNRKRNKKQNSQNRIMEENSLEFLSDLTPGDQDPSQSEEEDIEKTRRESEYPFIDGLQNEVGDFVTGYKEKRWKNKDPKDSFQNVMSIVELDNTPKNYLSKEGDNLFVSLLLRPNEISVTCPILTQNLSCVTTDDCSGMKVEKHIRNRHTIALDTQDLSAETSCLFMKKREIVDKNLSHEPILCHQHGIRMSDKVLREEQVYTTKINHWAFFTTNLSDEDLQLGSDRQPYFGSWPAGPHKFICEQRPKKDRACKLAGPDSRGQWIQMIFTSVAASEPGNNPEILTDKLLIGNEDFSPPPETMDSFIETNLFRSCLPQPDIPKNALESTKNKKRRKKRIFNLVPNFDLLGQSRIGVKEREKCDLLTKNHGLKITLGEEKDRISERNSEEENKQKLMTFDHHPLWFYLDIIKATPLNIDGQRYSHCLSFNRLRCSASLYKNYIPSFVLHNLSSIWKPSFTNKKLFLTFESQTRVGNKLNDAGFISPEILHSHPDTSCSLGVTSDFHFLNERFDRKLKRWEEPKELPAEDSQDLTSTDYRSLELPLSQGFAFQLVKLFGSPGVPMESLLPDDYVVPLDWKTLKMIYLQWKMSVEKRQKKIG

SEQ ID NO: 9148 - protein, 737 aa, Homo sapiens; identical to SEQ ID NO: 9147

SEQ ID NO: 9149 - protein, 752 aa, Homo sapiens
MSYGEIEEFCLVRIVMALCSALMTIFTIKMGTAKQAIDQGRSPVIIDNTNIQAWEMKPYVEVAIGKGYRVEFHEPETWWKFDPEELEKRNKHGVSRKKIAQMLDRYEYQMSISIVMNSVEPSHKSTQRPPPPQGRQRERVLKKTGHRLSKTKQKRNRKRNKKQNSQNRIMEENSLEFLSDLTPGDQDPSQSEEEDIEKTRRESEYPFIDGLQNEVGDFVTGYKEKRWKNKDPKDSFQNVMSIVELDNTPKNYLSKEGDNLFVSLLLRPNEISVTCPILTQNLSCVTTDDCSGMKVEKHIRNRHTIALDTQDLSAETSCLFMKKREIVDKNLSHEPILCHQHGIRMSDKVLREEQVYTTKINHWAFFTTNLSDEDLQLGSDRQPYFGSWPAGPHKFICEQRPKKDRACKLAGPDSRGQWIQMIFTSVAASEPGNNPEILTDKLLIGNEDFSPPPETMDSFIETNLFRSCLPQPDIPKNALESTKNKKRRKKRIFNLVPNFDLLGQSRIGVKEREKCDLLTKNHGLKITLGEEKDRISERNSEEENKQKLMTFDHHPLWFYLDIIKATPLNIDGQRYSHCLSFNRLRCSASLYKNYIPSFVLHNLSSIWKPSFTNKKLFLTFESQTRVGNKLNDAGFISPEILHSHPDTSCSLGVTSDFHFLNERFDRKLKRWEEPKELPAEDSQDLTSTDYRSLELPLSQGFAFQLVKLFGSPGVPMESLLPDDYVVPLDWKTLKMIYLQWKMSVEKRQKKIG

SEQ ID NO: 9150 - protein, 583 aa, Homo sapiens
MSYGEIEGKFLGPREEVTSEPRCKKLKSTTESYVFHNHSNADFHRIQEKTGNDWVPVTIIDVRGHSYLQENKIKTTDLHRPLHDEMPGNRPDVIESIDSQVLQEARPPLVSADDEIYSTSKAFIGPIYKPPEKKKRNEGRNEAHVLNGINDRGGQKEKQKFNSEKSEIDNELFQFYKEIEELEKEKDGFENSCKESEPSQEQFVPFYEGHNNGLLKPDEEKKDLSNKAMPSHCDYQQNLGNEPDKYPCNGQVIPTFCDTSFTSFRPEWQSVYPFIVPYGPPLPSLNYHLNIQRFSGPPNPPSNIFQAQDDSQIQNGYYVNNCHVNWNCMTFDQNNEYTDCSENRSSVHPSGNGCSMQDRYVSNGFCEVRERCWKDHCMDKHNGTDRFVNQQFQEEKLNKLQKLLILLRGLPGSGKTTLSRILLGQNRDGIVFSTDDYFHHQDGYRYNVNQLGDAHDWNQNRAKQAIDQGRSPVIIDNTNIQAWEMKPYVEVAIGKGYRVEFHEPETWWKFDPEELEKRNKHGVSRKKIAQMLDRYEYQMSISIVMNSVEPSHKSTQRPPPPQGRQRWGGSLGSHNRVCVTNNH

SEQ ID NO: 9151 - protein, 655 aa, Homo sapiens
MSYGEIEGKFLGPREEVTSEPRCKKLKSTTESYVFHNHSNADFHRIQEKTGNDWVPVTIIDVRGHSYLQENKIKTTDLHRPLHDEMPGNRPDVIESIDSQVLQEARPPLVSADDEIYSTSKAFIGPIYKPPEKKKRNEGRNEAHVLNGINDRGGQKEKQKFNSEKSEIDNELFQFYKEIEELEKEKDGFENSCKESEPSQEQFVPFYEGHNNGLLKPDEEKKDLSNKAMPSHCDYQQNLGNEPDKYPCNGQVIPTFCDTSFTSFRPEWQSVYPFIVPYGPPLPSLNYHLNIQRFSGPPNPPSNIFQAQDDSQIQNGYYVNNCHVNWNCMTFDQNNEYTDCSENRSSVHPSGNGCSMQDRYVSNGFCEVRERCWKDHCMDKHNGTDRFVNQQFQEEKLNKLQKLLILLRGLPGSGKTTLSRILLGQNRDGIVFSTDDYFHHQDGYRYNVNQLGDAHDWNQNRAKQAIDQGRSPVIIDNTNIQAWEMKPYVEVAIGKGYRVEFHEPETWWKFDPEELEKRNKHGVSRKKIAQMLDRYEYQMSISIVMNSVEPSHKSTQRPPPPQGRQRFDRKLKRWEEPKELPAEDSQDLTSTDYRSLELPLSQGFAFQLVKLFGSPGVPMESLLPDDYVVPLDWKTLKMIYLQWKMSVEKRQKKIG

SEQ ID NO: 9152 - protein, 709 aa, Homo sapiens
MSYGEIEGKFLGPREEVTSEPRCKKLKSTTESYVFHNHSNADFHRIQEKTGNDWVPVTIIDVRGHSYLQENKIKTTDLHRPLHDEMPGNRPDVIESIDSQVLQEARPPLVSADDEIYSTSKAFIGPIYKPPEKKKRNEGRNEAHVLNGINDRGGQKEKQKFNSEKSEIDNELFQFYKEIEELEKEKDGFENSCKESEPSQEQFVPFYEGHNNGLLKPDEEKKDLSNKAMPSHCDYQQNLGNEPDKYPCNGQVIPTFCDTSFTSFRPEWQSVYPFIVPYGPPLPSLNYHLNIQRFSGPPNPPSNIFQAQDDSQIQNGYYVNNCHVNWNCMTFDQNNEYTDCSENRSSVHPSGNGCSMQDRYVSNGFCEVRERCWKDHCMDKHNGTDRFVNQQFQEEKLNKLQKLLILLRGLPGSGKTTLSRILLGQNRDGIVFSTDDYFHHQDGYRYNVNQLGDAHDWNQNRAKQAIDQGRSPVIIDNTNIQAWEMKPYVEVAIGKGYRVEFHEPETWWKFDPEELEKRNKHGVSRKKIAQMLDRYEYQMSISIVMNSVEPSHKSTQRPPPPQGRQRERVLKKTGHRLSKTKQKRNRKRNKKQNSQNRIMEENSLEFLSDLTPGDQDPSQSEEEDIEKTRRESEYPFIDGLQNEVGDFVTGYKEKRWKNKDPKDSFQNVMSIVELDNTPKNYLSKEGDNLFVSLLLRPNEISVTCPILTQ

SEQ ID NO: 9153 - protein, 125 aa, Homo sapiens
MAGAGPTMLLREENGCCSRRQSSSSAGDSDGEREDSAAERARQQLEALLNKTMRIRMTDGRTLVGCFLCTDRDCNVILGSAQEFLKPSDSFSAGEPRVLGLAMVPGHHIVSIEVQRESLTGPPYL

SEQ ID NO: 9154 - protein, 135 aa, Homo sapiens
MAGAGPTMLLREENGCCSRRQSSSSAGDSDGEREDSAAERARQQLEALLNKTMRIRMTDGRTLVGCFLCTDRDCNVILGSAQEFLKPSGQCPGNAHPPDSFSAGEPRVLGLAMVPGHHIVSIEVQRESLTGPPYL

SEQ ID NO: 9155 - protein, 173 aa, Homo sapiens
MAVAVGVRAAPVLGLARALVLGLRGSQAARWRGWGTAAPGSLWALCECPAGCRELWFRGRAAWAARSERLLHPAQDSDGEREDSAAERARQQLEALLNKTMRIRMTDGRTLVGCFLCTDRDCNVILGSAQEFLKPSDSFSAGEPRVLGLAMVPGHHIVSIEVQRESLTGPPYL

SEQ ID NO: 9156 - protein, 99 aa, Homo sapiens
MDSDGEREDSAAERARQQLEALLNKTMRIRMTDGRTLVGCFLCTDRDCNVILGSAQEFLKPSDSFSAGEPRVLGLAMVPGHHIVSIEVQRESLTGPPYL

SEQ ID NO: 9157 - protein, 73 aa, Homo sapiens
MRIRMTDGRTLVGCFLCTDRDCNVILGSAQEFLKPSDSFSAGEPRVLGLAMVPGHHIVSIEVQRESLTGPPYL

SEQ ID NO: 9158 - protein, 83 aa, Homo sapiens
MRIRMTDGRTLVGCFLCTDRDCNVILGSAQEFLKPSGQCPGNAHPPDSFSAGEPRVLGLAMVPGHHIVSIEVQRESLTGPPYL

SEQ ID NO: 9159 - protein, 252 aa, Homo sapiens
MCDFMNLSLADCLLVNLAYESSVFCTSIVAQDSRGHIYHGRNLDYPFGNVLRKLTVDVQFLKNGQIAFTGTTFIGYVGLWTGQSPHKFTVSGDERDKGWWWENAIAALFRRHIPVSWLIRATLSESENFEAAVGKLAKTPLIADVYYIVGGTSPREGVVITRNRDGPADIWPLDPLNGAWFRVETNYDHWKPAPKEDDRRTSAIKALNATGQANLSLEALFQVTCVTVSCIPRMFGVLLIVNMKNSVKSSGR

SEQ ID NO: 9160 - protein, 359 aa, Homo sapiens
MRTADREARPGLPSLLLLLLAGAGLSAASPPAAPRFNVSLDSVPELRWLPVLRHYDLDLVRAAMAQVIGDRVPKWVHVLIGKVVLELERFLPQPFTGEIRGMCDFMNLSLADCLLVNLAYESSVFCTSIVAQDSRGHIYHGRNLDYPFGNVLRKLTVDVQFLKNGQIAFTGTTFIGYVGLWTGQSPHKFTVSGDERDKGWWWENAIAALFRRHIPVSWLIRATLSESENFEAAVGKLAKTPLIADVYYIVGGTSPREGVVITRNRDGPADIWPLDPLNGAWFRVETNYDHWKPAPKEDDRRTSAIKALNATGQANLSLEALFQILSVVPVYNNFTIYTTVMSAGSPDKYMTRIRNPSRK

SEQ ID NO: 9161 - protein, 323 aa, Homo sapiens
MRTADREARPGLPSLLLLLLAGAGLSAASPPAAPRFNVSLDSVPELRWLPVLRHYDLDLVRAAMAQVIGDRVPKWVHVLIGKVVLELERFLPQPFTGEIRGMCDFMNLSLADCLLVNLAYESSVFCTSIVAQDSRGHIYHGRNLDYPFGNVLRKLTVDVQFLKNGQIAFTGTTFIGYVGLWTGQSPHKFTVSGDERDKGWWWENAIAALFRRHIPVSWLIRATLSESENFEAAVGKLAKTPLIADVYYIVGGTSPREGVVITRNRDGPADIWPLDPLNGAWFRVETNYDHWKPAPKEDDRRTSAIKALNATGQANLSLEALFQ

SEQ ID NO: 9162 - protein, 167 aa, Homo sapiens
MRTADREARPGLPSLLLLLLAGAGLSAASPPAAPRFNVSLDSVPELRWLPVLRHYDLDLVRAAMAQVIGDRVPKWVHVLIGKVVLELERFLPQPFTGEIRGMCDFMNLSLADCLLVNLAYESSVFCTSIVAQDSRGHIYHGRNLDYPFGNVLRKLTVDVQFLKNGQV

SEQ ID NO: 9163 - protein, 139 aa, Homo sapiens
  VARIANT 1: note = misc_feature - Xaa can be any naturally occurring amino acid
XDKGWWWENAIAALFRRHIPVSWLIRATLSESENFEAAVGKLAKTPLIADVYYIVGGTSPREGVVITRNRDGPADIWPLDPLNGAWFRVETNYDHWKPAPKEDDRRTSAIKALNATGQANLSLEALFQLHNLYYGNERR

SEQ ID NO: 9164 - protein, 222 aa, Homo sapiens
  VARIANT 1: note = misc_feature - Xaa can be any naturally occurring amino acid
XTSIVAQDSRGHIYHGRNLDYPFGNVLRKLTVDVQFLKNGQIAFTGTTFIGYVGLWTGQSPHKFTVSGDERDKGWWWENAIAALFRRHIPVSWLIRATLSESENFEAAVGKLAKTPLIADVYYIVGGTSPREGVVITRNRDGPADIWPLDPLNGAWFRVETNYDHWKPAPKEDDRRTSAIKALNATGQANLSLEALFQILSVVPVYNKLFPLAEFPEVGLLS

SEQ ID NO: 9165 - protein, 411 aa, Homo sapiens
MLLKTVLLLGHVAQVLMLDNGLLQTPPMGWLAWERFRCNINCDEDPKNCISEQLFMEMADRMAQDGWRDMGYTYLNIDDCWIGGRDASGRLMPDPKRFPHGIPFLADYVHSLGLKLGIYADMGNFTCMGYPGTTLDKVVQDAQTFAEWKVDMLKLDGCFSTPEERAQGYPKMAAALNATGRPIAFSCSWPAYEGGLPPRVNYSLLADICNLWRNYDDIQDSWWSVLSILNWFVEHQDILQPVAGPGHWNDPDMLLIGNFGLSLEQSRAQMALWTVLAAPLLMSTDLRTISAQNMDILQNPLMIKINQDPLGIQGRRIHKEKSLIEVYMRPLSNKASALVFFSCRTDMPYRYHSSLGQLNFTGSVIYEAQDVYSGDIISGLRDETNFTVIINPSGVVMWYLYPIKNLEMSQQ

SEQ ID NO: 9166 - protein, 411 aa, Homo sapiens; identical to SEQ ID NO: 9165

SEQ ID NO: 9167 - protein, 411 aa, Homo sapiens; identical to SEQ ID NO: 9165

SEQ ID NO: 9168 - protein, 743 aa, Homo sapiens
MEAVAVAAAVGVLLLAGAGGAAGDEAREAAAVRALVARLLGPGPAADFSVSVERALAAKPGLDTYSLGGGGAARVRVRGSTGVAAAAGLHRYLRDFCGCHVAWSGSQLRLPRPLPAVPGELTEATPNRYRYYQNVCTQSYSFVWWDWARWEREIDWMALNGINLALAWSGQEAIWQRVYLALGLTQAEINEFFTGPAFLAWGRMGNLHTWDGPLPPSWHIKQLYLQHRVLDQMRSFGMTPVLPAFAGHVPEAVTRVFPQVNVTKMGSWGHFNCSYSCSFLLAPEDPIFPIIGSLFLRELIKEFGTDHIYGADTFNEMQPPSSEPSYLAAATTAVYEAMTAVDTEAVWLLQGWLFQHQPQFWGPAQIRAVLGAVPRGRLLVLDLFAESQPVYTRTASFQGQPFIWCMLHNFGGNHGLFGALEAVNGGPEAARLFPNSTMVGTGMAPEGISQNEVVYSLMAELGWRKDPVPDLAAWVTSFAARRYGVSHPDAGAAWRLLLRSVYNCSGEACRGHNRSPLVRRPSLQMNTSIWYNRSDVFEAWRLLLTSAPSLATSPAFRYDLLDLTRQAVQELVSLYYEEARSAYLSKELASLLRAGGVLAYELLPALDEVLASDSRFLLGSWLEQARAAAVSEAEADFYEQNSRYQLTLWGPEGNILDYANKQLAGLVANYYTPRWRLFLEALVDSVAQGIPFQQHQFDKNVFQLEQAFVLSKQRYPSQPRGDTVDLAKKIFLKYYPRWVAGSW

SEQ ID NO: 9169 - protein, 81 aa, Homo sapiens
MGDLFQGRGPSRVGCAPAHDTARRYRYYQNVCTQSYSFVWWDWARWEREIDWMALNGINLALAWSGQEAIWQRVYLALGLT

SEQ ID NO: 9170 - protein, 122 aa, Homo sapiens
RGAAPLPARLLWLPRGLVRLSAAPAAATASRAGGADRGHAQQVYLALGLTQAEINEFFTGPAFLAWGRMGNLHTWDGPLPPSWHIKQLYLQHRVLDQMRSFGMTPVLPAFAGHVPEAVTSGY

SEQ ID NO: 9171 - protein, 65 aa, Homo sapiens
  VARIANT 1: note = misc_feature - Xaa can be any naturally occurring amino acid
XFGTDHIYGADTFNEMQPPSSEPSYLAAATTAVYEAMTAVLGARPDQGCAGSCAPWPPPGSGPVC

SEQ ID NO: 9172 - protein, 170 aa, Homo sapiens
  VARIANT 1: note = misc_feature - Xaa can be any naturally occurring amino acid
XGRRGAAPLPARLLWLPRGLVRLSAAPAAATASRAGGADRGHAQQVYLALGLTQAEINEFFTGPAFLAWGRMGNLHTWDGPLPPSWHIKQLYLQHRVLDQMRSFGMTPVLPAFAGHVPEAVTRVFPQVNVTKMGSWGHFNCSYSCSFLLAPEDPIFPIIGSLFLRELIKE

SEQ ID NO: 9173 - protein, 534 aa, Homo sapiens
MATALMAVVLRAAAVAPRLRGRGGTGGARRLSCGARRRAARGTSPGRRLSTAWSQPQPPPEEYAGADDVSQSPVAEEPSWVPSPRPPVPHESPEPPSGRSLVQRDIQAFLNQCGASPGEARHWLTQFQTCHHSADKPFAVIEVDEEVLKCQQGVSSLAFALAFLQRMDMKPLVVLGLPAPTAPSGCLSFWEAKAQLAKSCKVLVDALRHNAAAAVPFFGGGSVLRAAEPAPHASYGGIVSVETDLLQWCLESGSIPILCPIGETAARRSVLLDSLEVTASLAKALRPTKIIFLNNTGGLRDSSHKVLSNVNLPADLDLVCNAEWVSTKERQQMRLIVDVLSRLPHHSSAVITAASTLLTELFSNKGSGTLFKNAERMLRVRSLDKLDQGRLVDLVNASFGKKLRDDYLASLRPRLHSIYVSEGYNAAAILTMEPVLGGTPYLDKFVVSSSRQGQGSGQMLWECLRRDLQTLFWRSRVTNPINPWYFKHSDGSFSNKQWIFFWFGLADIRDSYELVNHAKGLPDSFHKPASDPGS

SEQ ID NO: 9174 - protein, 511 aa, Homo sapiens
SCGARRRAARGTSPGRRLSTAWSQPQPPPEEYAGADDVSQSPVAEEPSWVPSPRPPVPHESPEPPSGRSLVQRDIQAFLNQCGASPGEARHWLTQFQTCHHSADKPFAVIEVDEEVLKCQQGVSSLAFALAFLQRMDMKPLVVLGLPAPTAPSGCLSFWEAKAQLAKSCKVLVDALRHNAAAAVPFFGGGSVLRAAEPAPHASYGGIVSVETDLLQWCLESGSIPILCPIGETAARRSVLLDSLEVTASLAKALRPTKIIFLNNTGGLRDSSHKVLSNVNLPADLDLVCNAEWVSTKERQQMRLIVDVLSRLPHHSSAVITAASTLLTELFSNKGSGTLFKNAERMLRVRSLDKLDQGRLVDLVNASFGKKLRDDYLASLRPRLHSIYVSEGLPLSRCARYNAAAILTMEPVLGGTPYLDKFVVSSSRQGQGSGQMLWECLRRDLQTLFWRSRVTNPINPWYFKHSDGSFSNKQWIFFWFGLADIRDSYELVNHAKGLPDSFHKPASDPGS

SEQ ID NO: 9175 - protein, 104 aa, Homo sapiens
MSPPPLLQPLLLLLPLLNVEPSGATLIRIPLHRVQPGRRILNLLRGWREPAELPKLGAPSPGDKPIFVPLSNYRDGYTTDLIPKPLAPSRPMGPSLPFNMELGG

SEQ ID NO: 9176 - protein, 268 aa, Homo sapiens
MSPPPLLQPLLLLLPLLNVEPSGATLIRIPLHRVQPGRRILNLLRGWREPAELPKLGAPSPGDKPIFVPLSNYRDVQYFGEIGLGTPPQNFTVAFDTGSSNLWVPSRRCHFFSVPCSSSSFQANGTKFAIQYGTGRVDGILSEDKLTIGGIKGASVIFGEALWEPSLVFAFAHFDGILGLGFPILSVEGVRPPMDVLVEQGLLDKPVFSFYLNRDPEEPDGGELVLGGSDPAHYIPPLTFVPVTVPAYWQIHMERVKVGPGLTLCAKG

SEQ ID NO: 9177 - protein, 420 aa, Homo sapiens
MSPPPLLQPLLLLLPLLNVEPSGATLIRIPLHRVQPGRRILNLLRGWREPAELPKLGAPSPGDKPIFVPLSNYRDVQYFGEIGLGTPPQNFTVAFDTGSSNLWVPSRRCHFFSVPCWLHHRFDPKASSSFQANGTKFAIQYGTGRVDGILSEDKLTIGGIKGASVIFGEALWEPSLVFAFAHFDGILGLGFPILSVEGVRPPMDVLVEQGLLDKPVFSFYLNRDPEEPDGGELVLGGSDPAHYIPPLTFVPVTVPAYWQIHMERVKVGPGLTLCAKGCAAILDTGTSLITGPTEEIRALHAAIGGIPLLAGEYIILCSEIPKLPAVSFLLGGVWFNLTAHDYVIQTTRNGVRLCLSGFQALDVPPPAGPFWILGDVFLGTYVAVFDRGDMKSSARVGLARARTRGADLGWGETAQAQFPG

SEQ ID NO: 9178 - protein, 237 aa, Homo sapiens
MLPDGPGSSLWGNPGLQTSDSPNAVHEVEKWLPRLHALVVGPGLGRDDALLRNVQGILEVSKARDIPVVIDADGLWLVAQQPALIHGYRKAVLTPNHVEFSRLYDAVLRGPMDSDDSHGSVLRLSQALGNVTVVQKGERDILSNGQQVLVCSQEGSSRRCGGQGDLLSGSLGVLVHWALLAGPQKTNGSSPLLVAAFGACSLTRQCNHQAFQKHGRSTTTSDMIAEVGAAFSKLFET

SEQ ID NO: 9179 - protein, 390 aa, Homo sapiens
MVTRAGAGTAVAGAVVVALLSAALALYGPPLDAVLERAFSLRKAHSIKDMENTLQLVRNIIPPLSSTKHKGQDGRIGVVGGCQEYTGAPYFAAISALKVGADLSHVFCASAAAPVIKAYSPELIVHPVLDSPNAVHEVEKWLPRLHALVVGPGLGRDDALLRNVQGILEVSKARDIPVVIDADGLWLVAQQPALIHGYRKAVLTPNHVEFSRLYDAVLRGPMDSDDSHGSVLRLSQALGNVTVVQKGERDILSNGQQVLVCSQEGSSRRCGGQGDLLSGSLGVLVHWALLAGPQKTNGGISDLKLTIWGPEIETGVKTRAQGSCGPRTTTPTSPHLLLSPSPQVQPSPGGRVWRLLSHQAVQPPSLPEARSLHHHLRHDRRGGGRLQQAL

SEQ ID NO: 9180 - protein, 260 aa, Homo sapiens
MSRLRALLGLGLLVAGSRVPRIKSQTIACRSGPTWWGPQRLNSGGRWDSEVMASTVVKYLSQEEAQAVDQELFNEYQFSVDQLMELAGLSCATAIAKAYPPTSMSRSPPTVLVICGPGNNGGDGLVCARHLKLFGYEPTIYYPKRPNKPLFTALVTQCQKMDIPFLGEMPAELQGRCSGTVPQHPECPEGTHCAHCQHRHSLRMGRGEGKCWRDPARLAHIPHSPQKICNPVYRSLPLPGGSFCATCSGEEVPAEPATLP

SEQ ID NO: 9181 - protein, 245 aa, Homo sapiens
MSRLRALLGLGLLVAGSRVPRIKSQTIACRSGPTWWGPQRLNSGGRWDSEVMASTVVKYLSQEEAQAVDQELFNEYQFSVDQLMELAGLSCATAIAKAYPPTSMSRSPPTVLVICGPGNNGGDGLVCARHLKLFGYEPTIYYPKRPNKPLFTALVTQCQKMDIPFLGEMPAEPMTIDELYELVVDAIFGFSFKGDVREPFHSILSVLKGLTVPIASIDIPSGAGIQKVGWGRLGPYPPDSCPHQV

SEQ ID NO: 9182 - protein, 288 aa, Homo sapiens
MSRLRALLGLGLLVAGSRVPRIKSQTIACRSGPTWWGPQRLNSGGRWDSEVMASTVVKYLSQEEAQAVDQELFNEYQFSVDQLMELAGLSCATAIAKAYPPTSMSRSPPTVLVICGPGNNGGDGLVCARHLKLFGYEPTIYYPKRPNKPLFTALVTQCQKMDIPFLGEMPAEPMTIDELYELVVDAIFGFSFKGDVREPFHSILSVLKGLTVPIASIDIPSGWDVEKGNAGGIQPDLLISLTAPKKSATQFTGRYHYLGGRFVPPALEKKYQLNLPPYPDTECVYRLQ

SEQ ID NO: 9183 - protein, 128 aa, Homo sapiens
MCSLALQQLISMDLFWRLFFVCGQEGLRALEATGMMLRVLVGAVLPAMLLAAPPPINKLALFPDKSAWCEAKNITQIVGHSGCEAKSIQNRACLGQCFSYSVPNTFPQSTESLVHCDSCMPAQSMWEI

SEQ ID NO: 9184 - protein, 215 aa, Homo sapiens
MCSLALQQLISMDLFWRLFFVCGQEGLRALEATGMMLRVLVGAVLPAMLLAAPPPINKLALFPDKSAWCEAKNITQIVGHSGCEAKSIQNRACLGQCFSYSVPNTFPQSTESLVHCDSCMPAQSMWEIVTLECPGHEEVPRVDKLVEKILHCSCQACGKEPSHEGLSVYVQGEDGPGSQPGTHPHPHPHPHPGGQTPEPEDPPGAPHTEEEGAED

SEQ ID NO: 9185 - protein, 163 aa, Homo sapiens
MLRVLVGAVLPAMLLAAPPPINKLALFPDKSAWCEAKNITQIVGHSGCEAKSIQNRACLGQCFSYSVPNTFPQSTESLVHCDSCMPAQSMWEIVTLECPGHEEVPRVDKLVEKILHCSCQACGKEPSHEGLSVYVQGEDGPGSQPGTHPHPHPHPHPGGQTPE

SEQ ID NO: 9186 - protein, 109 aa, Homo sapiens
MMLRVLVGAVLPAMLLAAPPPINKLALFPDKSAWCEAKNITQIVGHSGCEAKSIQNRACLGQCFSYSVPNTFPQSTESLVHCDSCMPAQSMWEIVTLECPGHEEVPRVD

SEQ ID NO: 9187 - protein, 116 aa, Homo sapiens
MMLRVLVGAVLPAMLLAAPPPINKLALFPDKSAWCEAKNITQIVGHSGCEAKSIQNRACLGQCFSYSVPNTFPQSTESLVHCDSCMPAQSMWEIVTLECPGHEEVPRVDKLVEKIL

SEQ ID NO: 9188 - protein, 117 aa, Homo sapiens
MMLRVLVGAVLPAMLLAAPPPINKLALFPDKSAWCEAKNITQIVGHSGCEAKSIQNRACLGQCFSYSVPNTFPQSTESLVHCDSCMPAQSMWEIVTLECPGHEEVPRVDKLVEKILH

SEQ ID NO: 9189 - protein, 128 aa, Homo sapiens
MMLRVLVGAVLPAMLLAAPPPINKLALFPDKSAWCEAKNITQIVGHSGCEAKSIQNRACLGQCFSYSVPNTFPQSTESLVHCDSCMPAQSMWEIVTLECPGHEEVPRVDKLVEKILHCSCQACGKEPS

SEQ ID NO: 9190 - protein, 181 aa, Homo sapiens
MMLRVLVGAVLPAMLLAAPPPINKLALFPDKSAWCEAKNITQIVGHSGCEAKSIQNRACLGQCFSYSVPNTFPQSTESLVHCDSCMPAQSMWEIVTLECPGHEEVPRVDKLVEKILHCSCQACGKEPSHEGLSVYVQGEDGPGSQPGTHPHPHPHPHPGGQTPEPEDPPGAPHTEEEGAED

SEQ ID NO: 9191 - protein, 181 aa, Homo sapiens; identical to SEQ ID NO: 9190

SEQ ID NO: 9192 - protein, 181 aa, Homo sapiens; identical to SEQ ID NO: 9190

SEQ ID NO: 9193 - protein, 181 aa, Homo sapiens; identical to SEQ ID NO: 9190

SEQ ID NO: 9194 - protein, 181 aa, Homo sapiens; identical to SEQ ID NO: 9190

SEQ ID NO: 9195 - protein, 181 aa, Homo sapiens; identical to SEQ ID NO: 9190

SEQ ID NO: 9196 - protein, 216 aa, Homo sapiens
MPGNLMSQTSRAVSIWKFPAKLGKTHGHRALEATGMMLRVLVGAVLPAMLLAAPPPINKLALFPDKSAWCEAKNITQIVGHSGCEAKSIQNRACLGQCFSYSVPNTFPQSTESLVHCDSCMPAQSMWEIVTLECPGHEEVPRVDKLVEKILHCSCQACGKEPSHEGLSVYVQGEDGPGSQPGTHPHPHPHPHPGGQTPEPEDPPGAPHTEEEGAED

SEQ ID NO: 9197 - protein, 165 aa, Homo sapiens
EFILVQADTPSSPSIDQVEPYSSTAQVQFDEPEATGGVPILKYKAEWRAVGEEVWHSKWYDAKEASMEGIVTIVGLKPETTYAVRLAALNGKGLGEISAASEFKTQPVHSPPPPASASSSTPVPLSPPDTTWPLPALATTEPAKNIAQNHCCNMFQAGLHNALMK

SEQ ID NO: 9198 - protein, 133 aa, Homo sapiens
MLQTKDLIWTLFFLGTAAKPKITYVENQTAMELEEQVTLTCEASGDPIPSITWRTSTRNISSEEKTLDGHMVVRSHARVSSLTLKSIQYTDAGEYICTASNTIGQDSQSMYLEVQYAPKLQGPVAVYTWEGNQ

SEQ ID NO: 9199 - protein, 136 aa, Homo sapiens [sequence omitted]

SEQ ID NO: 9200 - protein, 858 aa, Homo sapiens
MLQTKDLIWTLFFLGTAVSLQVDIVPSQGEISVGESKFFLCQVAGDAKDKDISWFSPNGEKLTPNQQRISVVWNDDSSSTLTIYNANIDDAGIYKCVVTGEDGSESEATVNVKIFQKLMFKNAPTPQEFREGEDAVIVCDVVSSLPPTIIWKHKGRDVILKKDVRFIVLSNNYLQIRGIKKTDEGTYRCEGRILARGEINFKDIQVIVNVPPTIQARQNIVNATANLGQSVTLVCDAEGFPEPTMSWTKDGEQIEQEEDDEKYIFSDDSSQLTIKKVDKNDEAEYICIAENKAGEQDATIHLKVFAKPKITYVENQTAMELEEQVTLTCEASGDPIPSITWRTSTRNISSEEKASWTRPEKQETLDGHMVVRSHARVSSLTLKSIQYTDAGEYICTASNTIGQDSQSMYLEVQYAPKLQGPVAVYTWEGNQVNITCEVFAYPSATISWFRDGQLLPSSNYSNIKIYNTPSASYLEVTPDSENDFGNYNCTAVNRIGQESLEFILVQADTPSSPSIDQVEPYSSTAQVQFDEPEATGGVPILKYKAEWRAVGEEVWHSKWYDAKEASMEGIVTIVGLKPETTYAVRLAALNGKGLGEISAASEFKTQPVQGEPSAPKLEGQMGEDGNSIKVNLIKQDDGGSPIRHYLVRYRALSSEWKPEIRLPSGSDHVMLKSLDWNAEYEVYVVAENQQGKSKAAHFVFRTSAQPTAIPANGSPTSGLSTGAIVGILIVIFVLLLVVVDITCYFLNKCGLFMCIAVNLCGKAGPGAKGKDMEEGKAAFSKDESKEPIVEVRTEEERTPNHDGGKHTEPNETTPLTEPEKGPVEAKPECQETETKPAPAEVKTVPNDATQTKENESKA

SEQ ID NO: 9201 - protein, 725 aa, Homo sapiens
MLQTKDLIWTLFFLGTAVSLQVDIVPSQGEISVGESKFFLCQVAGDAKDKDISWFSPNGEKLTPNQQRISVVWNDDSSSTLTIYNANIDDAGIYKCVVTGEDGSESEATVNVKIFQKLMFKNAPTPQEFREGEDAVIVCDVVSSLPPTIIWKHKGRDVILKKDVRFIVLSNNYLQIRGIKKTDEGTYRCEGRILARGEINFKDIQVIVNVPPTIQARQNIVNATANLGQSVTLVCDAEGFPEPTMSWTKDGEQIEQEEDDEKYIFSDDSSQLTIKKVDKNDEAEYICIAENKAGEQDATIHLKVFAKPKITYVENQTAMELEEQVTLTCEASGDPIPSITWRTSTRNISSEEKTLDGHMVVRSHARVSSLTLKSIQYTDAGEYICTASNTIGQDSQSMYLEVQYAPKLQGPVAVYTWEGNQVNITCEVFAYPSATISWFRDGQLLPSSNYSNIKIYNTPSASYLEVTPDSENDFGNYNCTAVNRIGQESLEFILVQADTPSSPSIDQVEPYSSTAQVQFDEPEATGGVPILKYKAEWRAVGEEVWHSKWYDAKEASMEGIVTIVGLKPETTYAVRLAALNGKGLGEISAASEFKTQPVREPSAPKLEGQMGEDGNSIKVNLIKQDDGGSPIRHYLVRYRALSSEWKPEIRLPSGSDHVMLKSLDWNAEYEVYVVAENQQGKSKAAHFVFRTSAQPTAIPATLGGNSASYTFVSLLFSAVTLLLLC

SEQ ID NO: 9202 - protein, 364 aa, Homo sapiens
MLQTKDLIWTLFFLGTAVSLQVDIVPSQGEISVGESKFFLCQVAGDAKDKDISWFSPNGEKLTPNQQRISVVWNDDSSSTLTIYNANIDDAGIYKCVVTGEDGSESEATVNVKIFQKLMFKNAPTPQEFREGEDAVIVCDVVSSLPPTIIWKHKGRDVILKKDVRFIVLSNNYLQIRGIKKTDEGTYRCEGRILARGEINFKDIQVIVNVPPTIQARQNIVNATANLGQSVTLVCDAEGFPEPTMSWTKDGEQIEQEEDDEKYIFSDDSSQLTIKKVDKNDEAEYICIAENKAGEQDATIHLKVFAKPKITYVENQTAMELEEQVTLTCEASGDPIPSITWRTSTRNISSEEKASWTRPEKQEV

SEQ ID NO: 9203 - protein, 761 aa, Homo sapiens
MLQTKDLIWTLFFLGTAVSLQVDIVPSQGEISVGESKFFLCQVAGDAKDKDISWFSPNGEKLTPNQQRISVVWNDDSSSTLTIYNANIDDAGIYKCVVTGEDGSESEATVNVKIFQKLMFKNAPTPQEFREGEDAVIVCDVVSSLPPTIIWKHKGRDVILKKDVRFIVLSNNYLQIRGIKKTDEGTYRCEGRILARGEINFKDIQVIVNVPPTIQARQNIVNATANLGQSVTLVCDAEGFPEPTMSWTKDGEQIEQEEDDEKYIFSDDSSQLTIKKVDKNDEAEYICIAENKAGEQDATIHLKVFAKPKITYVENQTAMELEEQVTLTCEASGDPIPSITWRTSTRNISSEEKTLDGHMVVRSHARVSSLTLKSIQYTDAGEYICTASNTIGQDSQSMYLEVQYAPKLQGPVAVYTWEGNQVNITCEVFAYPSATISWFRDGQLLPSSNYSNIKIYNTPSASYLEVTPDSENDFGNYNCTAVNRIGQESLEFILVQADTPSSPSIDQVEPYSSTAQVQFDEPEATGGVPILKYKAEWRAVGEEVWHSKWYDAKEASMEGIVTIVGLKPETTYAVRLAALNGKGLGEISAASEFKTQPVHSPPPPASASSSTPVPLSPPDTTWPLPALATTEPAKGEPSAPKLEGQMGEDGNSIKVNLIKQDDGGSPIRHYLVRYRALSSEWKPEIRLPSGSDHVMLKSLDWNAEYEVYVVAENQQGKSKAAHFVFRTSAQPTAIPATLGGNSASYTFVSLLFSAVTLLLLC

SEQ ID NO: 9204 - protein, 848 aa, Homo sapiens [sequence omitted]

SEQ ID NO: 9205 - protein, 761 aa, Homo sapiens [sequence omitted]

SEQ ID NO: 9206 - protein, 726 aa, Homo sapiens
MLQTKDLIWTLFFLGTAVSLQVDIVPSQGEISVGESKFFLCQVAGDAKDKDISWFSPNGEKLTPNQQRISVVWNDDSSSTLTIYNANIDDAGIYKCVVTGEDGSESEATVNVKIFQKLMFKNAPTPQEFREGEDAVIVCDVVSSLPPTIIWKHKGRDVILKKDVRFIVLSNNYLQIRGIKKTDEGTYRCEGRILARGEINFKDIQVIVNVPPTIQARQNIVNATANLGQSVTLVCDAEGFPEPTMSWTKDGEQIEQEEDDEKYIFSDDSSQLTIKKVDKNDEAEYICIAENKAGEQDATIHLKVFAKPKITYVENQTAMELEEQVTLTCEASGDPIPSITWRTSTRNISSEEKTLDGHMVVRSHARVSSLTLKSIQYTDAGEYICTASNTIGQDSQSMYLEVQYAPKLQGPVAVYTWEGNQVNITCEVFAYPSATISWFRDGQLLPSSNYSNIKIYNTPSASYLEVTPDSENDFGNYNCTAVNRIGQESLEFILVQADTPSSPSIDQVEPYSSTAQVQFDEPEATGGVPILKYKAEWRAVGEEVWHSKWYDAKEASMEGIVTIVGLKPETTYAVRLAALNGKGLGEISAASEFKTQPVQGEPSAPKLEGQMGEDGNSIKVNLIKQDDGGSPIRHYLVRYRALSSEWKPEIRLPSGSDHVMLKSLDWNAEYEVYVVAENQQGKSKAAHFVFRTSAQPTAIPATLGGNSASYTFVSLLFSAVTLLLLC

SEQ ID NO: 9207 - protein, 884 aa, Homo sapiens [sequence omitted]

SEQ ID NO: 9208 - protein, 884 aa, Homo sapiens
MLQTKDLIWTLFFLGTAVSLQVDIVPSQGEISVGESKFFLCQVAGDAKDKDISWFSPNGEKLTPNQQRISVVWNDDSSSTLTIYNANIDDAGIYKCVVTGEDGSESEATVNVKIFQKLMFKNAPTPQEFREGEDAVIVCDVVSSLPPTIIWKHKGRDVILKKDVRFIVLSNNYLQIRGIKKTDEGTYRCEGRILARGEINFKDIQVIVNVPPTIQARQNIVNATANLGQSVTLVCDAEGFPEPTMSWTKDGEQIEQEEDDEKYIFSDDSSQLTIKKVDKNDEAEYICIAENKAGEQDATIHLKVFAKPKITYVENQTAMELEEQVTLTCEASGDPIPSITWRTSTRNISSEEKASWTRPEKQEVHAPWNWQVGRQKGQAGSAGFPGSHETLDGHMVVRSHARVSSLTLKSIQYTDAGEYICTASNTIGQDSQSMYLEVQYAPKLQGPVAVYTWEGNQVNITCEVFAYPSATISWFRDGQLLPSSNYSNIKIYNTPSASYLEVTPDSENDFGNYNCTAVNRIGQESLEFILVQADTPSSPSIDQVEPYSSTAQVQFDEPEATGGVPILKYKAEWRAVGEEVWHSKWYDAKEASMEGIVTIVGLKPETTYAVRLAALNGKGLGEISAASEFKTQPVQGEPSAPKLEGQMGEDGNSIKVNLIKQDDGGSPIRHYLVRYRALSSEWKPEIRLPSGSDHVMLKSLDWNAEYEVYVVAENQQGKSKAAHFVFRTSAQPTAIPANGSPTSGLSTGAIVGILIVIFVLLLVVVDITCYFLNKCGLFMCIAVNLCGKAGPGAKGKDMEEGKAAFSKDESKEPIVEVRTEEERTPNHDGGKHTEPNETTPLTEPEKGPVEAKPECQETETKPAPAEVKTVPNDATQTKENESKA

SEQ ID NO: 9209 - protein, 858 aa, Homo sapiens [sequence omitted]

SEQ ID NO: 9210 - protein, 848 aa, Homo sapiens
MLQTKDLIWTLFFLGTAVSLQVDIVPSQGEISVGESKFFLCQVAGDAKDKDISWFSPNGEKLTPNQQRISVVWNDDSSSTLTIYNANIDDAGIYKCVVTGEDGSESEATVNVKIFQKLMFKNAPTPQEFREGEDAVIVCDVVSSLPPTIIWKHKGRDVILKKDVRFIVLSNNYLQIRGIKKTDEGTYRCEGRILARGEINFKDIQVIVNVPPTIQARQNIVNATANLGQSVTLVCDAEGFPEPTMSWTKDGEQIEQEEDDEKYIFSDDSSQLTIKKVDKNDEAEYICIAENKAGEQDATIHLKVFAKPKITYVENQTAMELEEQVTLTCEASGDPIPSITWRTSTRNISSEEKTLDGHMVVRSHARVSSLTLKSIQYTDAGEYICTASNTIGQDSQSMYLEVQYAPKLQGPVAVYTWEGNQVNITCEVFAYPSATISWFRDGQLLPSSNYSNIKIYNTPSASYLEVTPDSENDFGNYNCTAVNRIGQESLEFILVQADTPSSPSIDQVEPYSSTAQVQFDEPEATGGVPILKYKAEWRAVGEEVWHSKWYDAKEASMEGIVTIVGLKPETTYAVRLAALNGKGLGEISAASEFKTQPVQGEPSAPKLEGQMGEDGNSIKVNLIKQDDGGSPIRHYLVRYRALSSEWKPEIRLPSGSDHVMLKSLDWNAEYEVYVVAENQQGKSKAAHFVFRTSAQPTAIPANGSPTSGLSTGAIVGILIVIFVLLLVVVDITCYFLNKCGLFMCIAVNLCGKAGPGAKGKDMEEGKAAFSKDESKEPIVEVRTEEERTPNHDGGKHTEPNETTPLTEPEKGPVEAKPECQETETKPAPAEVKTVPNDATQTKENESKA

SEQ ID NO: 9211 - protein, 229 aa, Homo sapiens
TISWFRDGQLLPSSNYSNIKIYNTPSASYLEVTPDSENDFGNYNCTAVNRIGQESLEFILVQADTPSSPSIDQVEPYSSTAQVQFDEPEATGGVPILKYKAEWRAVGEEVWHSKWYDAKEASMEGIVTIVGLKPETTYAVRLAALNGKGLGEISAASEFKTQPVHSPPPREPSAPKLEGQMGEDGNSIKVNLIKQDDGGSPIRHYLVRYRALSSEWKPEIRLPSGSDHV

SEQ ID NO: 9212 - protein, 357 aa, Homo sapiens
  VARIANT 1: note = misc_feature - Xaa can be any naturally occurring amino acid
XFILVQADTPSSPSIDQVEPYSSTAQVQFDEPEATGGVPILKYKAEWRAVGEEVWHSKWYDAKEASMEGIVTIVGLKPETTYAVRLAALNGKGLGEISAASEFKTQPVREPSAPKLEGQMGEDGNSIKVNLIKQDDGGSPIRHYLVRYRALSSEWKPEIRLPSGSDHVMLKSLDWNAEYEVYVVAENQQGKSKAAHFVFRTSAQPTAIPANGSPTSGLSTGAIVGILIVIFVLLLVVVDITCYFLNKCGLFMCIAVNLCGKAGPGAKGKDMEEGKAAFSKDESKEPIVEVRTEEERTPNHDGGKHTEPNETTPLTEPEKGPVEAKPECQETETKPAPAEVKTVPNDATQTKENESKA

SEQ ID NO: 9213 - protein, 84 aa, Homo sapiens
  VARIANT 1: note = misc_feature - Xaa can be any naturally occurring amino acid
XQDDGGSPIRHYLVRYRALSSEWKPEIRLPSGSDHVMLKSLDWNAEYEVYVVAENQQGKSKAAHFVFRTSAQPTAIPVTLLLLC

SEQ ID NO: 9214 - protein, 468 aa, Homo sapiens
  VARIANT 1: note = misc_feature - Xaa can be any naturally occurring amino acid
XSGSDHVMLKSLDWNAEYEVYVVAENQQGKSKAAHFVFRTSAQPTAIPANGSPTSGLSTGAIVGILIVIFVLLLVVVDITCYFLNKCGLFMCIAVNLCGKAGPGAKGKDMEEGKAAFSKDESKEPIVEVRTEEERTPNHDGGKHTEPNETTPLTEPELPADTTATVEDMLPSVTTVTTNSDTITETFATAQNSPTSETTTLTSSIAPPATATPDSNSVPAGQATPSKGPSASAPSPAPASAPKVAPLVDLSDTPTSTPAASNLSSSVLANQGAVLSPSAPAGVGEASKAPPASKPTPAPVPTPTGAASPLAAAAAPATEAPQAKQEAPSTKGPDPEPTQPGAAKSPAEAATALASPKSEAASVSTTNPSQGEDFKMDEGNFKTPDIDLAKDVFAALGSPAPAAGASGQAPELAPSTADSSVSPAPAKTEKGPVEAKPECQETETKPAPAEVKTVPNDATQTKENESKA

SEQ ID NO: 9215 - protein, 372 aa, Homo sapiens
  VARIANT 1: note = misc_feature - Xaa can be any naturally occurring amino acid
XTPSSPSIDQVEPYSSTAQVQFDEPEATGGVPILKYKAEWRAVGEEVWHSKWYDAKEASMEGIVTIVGLKPETTYAVRLAALNGKGLGEISAASEFKTQPVHSPPPPASASSSTPVPLSPPDKGEPSAPKLEGQMGEDGNSIKVNLIKQDDGGSPIRHYLVRYRALSSEWKPEIRLPSGSDHVMLKSLDWNAEYEVYVVAENQQGKSKAAHFVFRTSAQPTAIPANGSPTSGLSTGAIVGILIVIFVLLLVVVDITCYFLNKCGLFMCIAVNLCGKAGPGAKGKDMEEGKAAFSKDESKEPIVEVRTEEERTPNHDGGKHTEPNETTPLTEPEKGPVEAKPECQETETKPAPAEVKTVPNDATQTKENESKA

SEQ ID NO: 9216 - protein, 305 aa, Homo sapiens
YNTPSASYLEVTPDSENDFGNYNCTAVNRIGQESLEFILVQADTPSSPSIDQVEPYSSTAQVQFDEPEATGGVPILKYKAEWRAVGEEVWHSKWYDAKEASMEGIVTIVGLKPETTYAVRLAALNGKGLGEISAASEFKTQPVHSPPPPASASSSTPVPLSPPDTTWPLPALATTEPAREPSAPKLEGQMGEDGNSIKVNLIKQDDGGSPIRHYLVRYRALSSEWKPEIRLPSGSDHVMLKSLDWNAEYEVYVVAENQQGKSKAAHFVFRTSAQPTAIPATLGGNSASYTFVSLLFSAVTLLLLC

SEQ ID NO: 9217 - protein, 1321 aa, Homo sapiens
MGAPFVWALGLLMLQMLLFVAGEQGTQDITDASERGLHMQKLGSGSVQAALAELVALPCLFTLQPRPSAARDAPRIKWTKVRTASGQRQDLPILVAKDNVVRVAKSWQGRVSLPSYPRRRANATLLLGPLRASDSGLYRCQVVRGIEDEQDLVPLEVTGVVFHYRSARDRYALTFAEAQEACRLSSAIIAAPRHLQAAFEDGFDNCDAGWLSDRTVRYPITQSRPGCYGDRSSLPGVRSYGRRNPQELYDVYCFARELGGEVFYVGPARRLTLAGARAQCRRQGAALASVGQLHLAWHEGLDQCDPGWLADGSVRYPIQTPRRRCGGPAPGVRTVYRFANRTGFPSPAERFDAYCFRAHHPTSQHGDLETPSSGDEGEILSAEGPPVRELEPTLEEEEVVTPDFQEPLVSSGEEETLILEEKQESQQTLSPTPGDPMLASWPTGEVWLSTVAPSPSDMGAGTAASSHTEVAPTDPMPRRRGRFKGLNGRYFQQQEPEPGLQGGMEASAQPPTSEAAVNQMEPPLAMAVTEMLGSGQSRSPWADLTNEVDMPGAGSAGGKSSPEPWLWPPTMVPPSISGHSRAPVLELEKAEGPSARPATPDLFWSPLEATVSAPSPAPWEAFPVATSPDLPMMAMLRGPKEWMLPHPTPISTEANRVEAHGEATATAPPSPAAETKVYSLPLSLTPTGQGGEAMPTTPESPRADFRETGETSPAQVNKAEHSSSSPWPSVNRNVAVGFVPTETATEPTGLRGIPGSESGVFDTAESPTSGLQATVDEVQDPWPSVYSKGLDASSPSAPLGSPGVFLVPKVTPNLEPWVATDEGPTVNPMDSTVTPAPSDASGIWEPGSQVFEEAESTTLSPQVALDTSIVTPLTTLEQGDKVGVPAMSTLGSSSSQPHPEPEDQVETQGTSGASVPPHQSSPLGKPAVPPGTPTAASVGESASVSSGEPTVPWDPSSTLLPVTLGIEDFELEVLAGSPGVESFWEEVASGEEPALPGTPMNAGAEEVHSDPCENNPCLHGGTCNANGTMYGCSCDQGFAGENCEIDIDDCLCSPCENGGTCIDEVNGFVCLCLPSYGGSFCEKDTEGCDRGWHKFQGHCYRYFAHRRAWEDAEKDCRRRSGHLTSVHSPEEHSFINSFGHENTWIGLNDRIVERDFQWTDNTGLQFENWRENQPDNFFAGGEDCVVMVAHESGRWNDVPCNYNLPYVCKKGTVLCGPPPAVENASLIGARKAKYNVHATVRYQCNEGFAQHHVATIRCRSNGKWDRPQIVCTKPRRSHRMRRHHHHHQHHHQHHHHKSRKERRKHKKHPTEDWEKDEGNFC

SEQ ID NO: 9218 - protein, 175 aa, Homo sapiens
  VARIANT 1: note = misc_feature - Xaa can be any naturally occurring amino acid
XGCDRGWHKFQGHCYRYFAHRRAWEDAEKDCRRRSGHLTSVHSPEEHSFINSFGHENTWIGLNDRIVERDFQWTDNTGLQFENWRENQPDNFFAGGEDCVVMVAHESGRWNDVPCNYNLPYVCKKGTARRSHRMRRHHHHHQHHHQHHHHKSRKERRKHKKHPTEDWEKDEGNFC

SEQ ID NO: 9219 - protein, 99 aa, Homo sapiens
MVLRRLLAALLHSPQLVERLSESRPIRRAAQLTAFALLQAQLRGQDAARRLQDLAAGPVGSLCRRAERFRDAFTQELRRGLRGRSGPPPGSQRGPGANI

SEQ ID NO: 9220 - protein, 709 aa, Homo sapiens
MATAGGGSGADPGSRGLLRLLSFCVLLAGLCRGNSVERKIYIPLNKTAPCVRLLNATHQIGCQSSISGDTGVIHVVEKEEDLQWVLTDGPNPPYMVLLESKHFTRDLMEKLKGRTSRIAGLAVSLTKPSPASGFSPSVQCPNDGFGVYSNSYGPEFAHCREIQWNSLGNGLAYEDFSFPIFLLEDENETKVIKQCYQDHNLSQNGSAPTFPLCAMQLFSHMHAVISTATCMRRSSIQSTFSINPEIVCDPLSDYNVWSMLKPINTTGTLKPDDRVVVAATRLDSRSFFWNVAPGAESAVASFVTQLAAAEALQKAPDVTTLPRNVMFVFFQGETFDYIGSSRMVYDMEKGKFPVQLENVDSFVELGQVALRTSLELWMHTDPVSQKNESVRNQVEDLLATLEKSGAGVPAVILRRPNQSQPLPPSSLQRFLRARNISGVVLADHSGAFHNKYYQSIYDTAENINVSYPEWLSPEEDLNFVTDTAKALADVATVLGRALYELAGGTNFSDTVQADPQTVTRLLYGFLIKANNSWFQSILRQDLRSYLGDGPLQHYIAVSSPTNTTYVVQYALANLTGTVVNLTREQCQDPSKVPSENKDLYEYSWVQGPLHSNETDRLPRCVRSTARLARALSPAFELSQWSSTEYSTWTESRWKDIRARIFLIASKELELITLTVGFGILIFSLIVTYCINAKADVLFIAPREPGAVSY

SEQ ID NO: 9221 - protein, 255 aa, Homo sapiens
MATAGGGSGADPGSRGLLRLLSFCVLLAGLCRGNSVERKIYIPLNKTAPCVRLLNATHQIGCQSSISGDTGVIHVVEKEEDLQWVLTDGPNPPYMVLLESKHFTRDLMEKLKGRTSRIAGLAVSLTKPSPASGFSPSVQCPNDGFGVYSNSYGPEFAHCREIQWNSLGNGLAYEDFSFPIFLLEDENETKVIKQETFDYIGSSRMVYDMEKGKFPVQLENVDSFVELGQVALRTSLELWMHTDPVSQKNESVRNQ

SEQ ID NO: 9222 - protein, 134 aa, Homo sapiens
MATAGGGSGADPGSRGLLRLLSFCVLLAGLCRGNSVERKIYIPLNKTAPCVRLLNATHQIGCQSSISGDTGVIHVVEKEEDLQWVLTDGPNPPYMVLLESKHFTRQNVRLSDTFLCSFMEFLSYSRDLMEKLKG

SEQ ID NO: 9223 - protein, 232 aa, Homo sapiens
MATAGGGSGADPGSRGLLRLLSFCVLLAGLFLDFEPDPLPLCPDVSFFPQPQPPTPQSKGTGLCRGNSVERKIYIPLNKTAPCVRLLNATHQIGCQSSISGDTGVIHVVEKEEDLQWVLTDGPNPPYMVLLESKHFTRDLMEKLKGRTSRIAGLAVSLTKPSPASGFSPSVQCPNDGFGVYSNSYGPEFAHCREIQWNSLGNGLAYEDFSFPIFLLEDENETKVIKQCYQDH

SEQ ID NO: 9224 - protein, 71 aa, Homo sapiens
MATAGGGSGADPGSRGLLRLLSFCVLLAGLFLDFEPDPLPLCPDVSFFPQPQPPTPQSKGTGVKVSFLPRV

SEQ ID NO: 9225 - protein, 69 aa, Homo sapiens
MATAGGGSGADPGSRGLLRLLSFCVLLAVSLSMALHGLCNNPLRHIAGCHVEHVSVTISVCPRNQKNGL

SEQ ID NO: 9226 - protein, 219 aa, Homo sapiens
RSSIQSTFSINPEIVCDPLSDYNVWSMLKPINTTGTLKPDDRVVVAATRLAAAEALQKAPDVTTLPRNVMFVFFQGETFDYIGSSRMVYDMEKGKFPVQLENVDSFVELGQVALRTSLELWMHTDPVSQKNESVRNQVEDLLATLEKSGAGVPAVILRRPNQSQPLPPSSLQRFLRARNISGVVLADHSGAFHNKYYQSIYDTAENINVSYPEWLSPEE

SEQ ID NO: 9227 - protein, 69 aa, Homo sapiens
  VARIANT 1: note = misc_feature - Xaa can be any naturally occurring amino acid
XNDGFGVYSNSYGPEFAHCREIQWNSLGNGLAYEDFSFPIFLLEDENETKVIKQKSSVTPCLITMCGAC

SEQ ID NO: 9228 - protein, 275 aa, Homo sapiens
  VARIANT 1: note = misc_feature - Xaa can be any naturally occurring amino acid
XNVAPGAESAVASFVTQLAAAEALQKAPDVTTLPRNVMFVFFQGVALRTSLELWMHTDPVSQKNESVRNQVEDLLATLEKSGAGVPAVILRRPNQSQPLPPSSLQRFLRARNISGVVLADHSGAFHNKYYQSIYDTAENINVSYPEWLSPEEDLNFVTDTAKALADVATVLGRALYELAGGTNFSDTVQADPQTVTRLLYGFLIKANNSWFQSILRQDLRSYLGDGPLQHYIAVSSPTNTTYVVQYALANLTGTVVNLTREQCQDPSKVPSENKD

SEQ ID NO: 9229 - protein, 317 aa, Homo sapiens
  VARIANT 1: note = misc_feature - Xaa can be any naturally occurring amino acid
XVYSNSYGPEFAHCREIQWNSLGNGLAYEDFSFPIFLLEDENETKVIKQLFSHMHAVISTATCMRRSSIQSTFSINPEIVCDPLSDYNVWSMLKPINTTGTLKPDDRVVVAATRLDSRSFFWNVAPGAESAVASFVTQLAAAEALQKAPDVTTLPRNVMFVFFQGETFDYIGSSRMVYDMEKGKFPVQLENVDSFVELGQVALRTSLELWMHTDPVSQKNESVRNQVEDLLATLEKSGAGVPAVILRRPNQSQPLPPSSLQRFLRARNISGVVLADHSGAFHNKYYQSIYDTAENINVSYPEWLSPEEDLNFVTDTA

SEQ ID NO: 9230 - protein, 116 aa, Homo sapiens
MVLLHWCLLWLLFPLSSRTQKLPTRDEELFQMQIRDKAFFHDSSVIPDGAEISSYLFRDTPKRYFFVVEEDNTPLSVTVTPCDAPLEWKLSLQELPEDRSGEGSGDLEPLEQQKQQ

SEQ ID NO: 9231 - protein, 145 aa, Homo sapiens
MVLLHWCLLWLLFPLSSRTQKLPTRDEELFQMQIRDKAFFHDSSVIPDGAEISSYLFRDTPKRYFFVVEEDNTPLSVTVTPCDAPLEWKLSLQELPEDRSGEGSGDLEPLEQQKQQIINEEGTELFSYKGNDVEYFISSSSPSGL

SEQ ID NO: 9232 - protein, 568 aa, Homo sapiens
MVLLHWCLLWLLFPLSSRTQKLPTRDEELFQMQIRDKAFFHDSSVIPDGAEISSYLFRDTPKRYFFVVEEDNTPLSVTVTPCDAPLEWKLSLQELPEDRSGEGSGDLEPLEQQKQQIINEEGTELFSYKGNDVEYFISSSSPSGLYQLDLLSTEKDTHFKVYATTTPESDQPYPELPYDPRVDVTSLGRTTVTLAWKPSPTASLLKQPIQYCVVINKEHNFKSLCAVEAKLSADDAFMMAPKPGLDFSPFDFAHFGFPSDNSGKERSFQAKPSPKLGRHVYSRPKVDIQKICIGNKNIFTVSDLKPDTQYYFDVFVVNINSNMSTAYVGTFARTKEEAKQKTVELKDGKITDVFVKRKGAKFLRFAPVSSHQKVTFFIHSCLDAVQIQVRRDGKLLLSQNVEGIQQFQLRGKPKAKYLVRLKGNKKGASMLKILATTRPTKQSFPSLPEDTRIKAFDKLRTCSSATVAWLGTQERNKFCIYKKEVDDNYNEDQKKREQNQCLGPDIRKKSEKVLCKYFHSQNLQKAVTTETIKGLQPGKSYLLDVYVIGHGGHSVKYQSKVVKTRKFC

SEQ ID NO: 9233 - protein, 133 aa, Homo sapiens
MRKHVLAASFSMLSLLVIMGDTDSKTDSSFIMDSDPRRCMRHHYVDSISHPLYKCSSKMVLLARCEGHCSQASRSEPLVSFSTVLKQPFRSSCHCCRPQTSKLKALRLRCSGGMRLTATYRYILSCHCEECNS

SEQ ID NO: 9234 - protein, 133 aa, Homo sapiens; identical to SEQ ID NO: 9233

SEQ ID NO: 9235 - protein, 133 aa, Homo sapiens; identical to SEQ ID NO: 9233

SEQ ID NO: 9236 - protein, 129 aa, Homo sapiens
DIENAYKKTFLPEMSEKCEVLQYSAREAQDSKKVVEDIEYLKFDKGPWLKQDNRTLYHLRLLVQDKFEVLNYTSIPIFLPEVTIGAHQTDRVLHQFREVPADQEHRWVSLLSSPLGSLFSEWSVCGEDS

SEQ ID NO: 9237 - protein, 138 aa, Homo sapiens
ENAYKKTFLPEMSEKCEVLQYSAREAQDSKKVVEDIEYLKFDKGPWLKQDNRTLYHLRLLVQDKFEVLNYTSIPIFLPEVTIGAHQTDRVLHQFREFSLFNGRKPDAVKILCSLLEADRSLLEADRSLLEADRVQDSC

SEQ ID NO: 9238 - protein, 94 aa, Homo sapiens
MALRLLKLAATSASARVVAAGAQRVASSTFLKRGFIIQTVPQEMGSPSPPTIMATVVWRNFTMIREAMMATVTACSPGCTAVACCSTQMPWSTC

SEQ ID NO: 9239 - protein, 429 aa, Homo sapiens
MALRLLKLAATSASARVVAAGAQRVRGIHSSVQCKLRYGMWHFLLGDKASKRLTERSRVITVDGNICTGKGKLAKEIAEKLGFKHFPEAGIHYPDSTTGDGKPLATDYNGNCSLEKFYDDPRSNDGNSYRLQSWLYSSRLLQYSDALEHLLTTGQGVVLERSIFSDFVFLEAMYNQGFIRKQCESALQTHFWTGVAGASGKLESGSSEEVLLINERGGRSKPGVDHYNEVKSVTICDYLPPHLVIYIDVPVPEPHEMKITSAYLQDIENAYKKTFLPEMSEKCEVLQYSAREAQDSKKVVEDIEYLKFDKGPWLKQDNRTLYHLRLLVQDKFEVLNYTSIPIFLPEVTIGAHQTDRVLHQFRERLDWTVCFGEESTEVKHQGHLLSVQPGTVALTVGSWLRSCLLGLHWKLLFLFPESPMHTTAFMFLC

SEQ ID NO: 9240 - protein, 201 aa, Homo sapiens
MALRLLKLAATSASARVVAAGAQRVRGIHSSVQCKLRYGMWHFLLGDKASKRLTERSRVITVDGNICTGKGKLAKEIAEKLGFKHFPEAGIHYPDSTTGDGKPLATDYNGNCSLEKFYDDPRSNDGNSYRLQSWLYSSRLLQYSDALEHLLTTGQGVVLERSIFSDFVFLEAMYNQGFIRKQCESALQTHFWVCGATLQGL

SEQ ID NO: 9241 - protein, 355 aa, Homo sapiens
MALRLLKLAATSASARVVAAGAQRVRGIHSSVQCKLRYGMWHFLLGDKASKRLTERSRVITVDGNICTGKGKLAKEIAEKLGFKHFPEAGIHYPDSTTGDGKPLATDYNGNCSLEKFYDDPRSNDGNSYRLQSWLYSSRLLQYSDALEHLLTTGQGVVLERSIFSDFVFLEAMYNQGFIRKQCVDHYNEVKSVTICDYLPPHLVIYIDVPVPEVQRRIQKKGDPHEMKITSAYLQDIENAYKKTFLPEMSEKCEVLQYSAREAQDSKKVVEDIEYLKFDKGPWLKQDNRTLYHLRLLVQDKFEVLNYTSIPIFLPEVTIGAHQTDRVLHQFRELPGRKYSPGYNTEVGDKWIWLK

SEQ ID NO: 9242 - protein, 390 aa, Homo sapiens
MALRLLKLAATSASARVVAAGAQRVRGIHSSVQCKLRYGMWHFLLGDKASKRLTERSRVITVDGNICTGKGKLAKEIAEKLGFKHFPEAGIHYPDSTTGDGKPLATDYNGNCSLEKFYDDPRSNDGNSYRLQSWLYSSRLLQYSDALEHLLTTGQGVVLERSIFSDFVFLEAMYNQGFIRKQCVDHYNEVKSVTICDYLPPHLVIYIDVPVPEVQRRIQKKGDPHEMKITSAYLQDIENAYKKTFLPEMSEKCEVLQYSAREAQDSKKVVEDIEYLKFDKGPWLKQDNRTLYHLRLLVQDKFEVLNYTSIPIFLPEVTIGAHQTDRVLHQFRELGIPYPQRAVQSTREGPEVLLTGLWRWEDLLIGLQLPGRKYSPGYNTEVGDKWIWLK

SEQ ID NO: 9243 - protein, 245 aa, Homo sapiens [sequence omitted]

SEQ ID NO: 9244 - protein, 355 aa, Homo sapiens
MALRLLKLAATSASARVVARAPSAWRGIHSSVQCKLRYGMWHFLLGDKASKRLTERSRVITVDGNICTGKGKLAKEIAEKLGFKHFPEAGIHYPDSTTGDGKPLATDYNGNCSLEKFYDDPRSNDGNSYRLQSWLYSSRLLQYSDALEHLLTTGQGVVLERSIFSDFVFLEAMYNQGFIRKQCVDHYNEVKSVTICDYLPPHLVIYIDVPVPEVQRRIQKKGDPHEMKITSAYLQDIENAYKKTFLPEMSEKCEVLQYSAREAQDSKKVVEDIEYLKFDKGPWLKQDNRTLYHLRLLVQDKFEVLNYTSIPIFLPEVTIGAHQTDRVLHQFRELPGRKYSPGYNTEVGDKWIWLK

SEQ ID NO: 9245 - protein, 133 aa, Homo sapiens
  VARIANT 1: note = misc_feature - Xaa can be any naturally occurring amino acid
XSAYLQDIENAYKKTFLPEMSEKCEVLQYSAREAQDSKKVVEDIEYLKFDKGPWLKQDNRTLYHLRLLVQDKFEVLNYTSIPIFLPEVTIGAHQTDRVLHQFREVFQESEAKRLDVEEVCWKKTPLKDRGEEV

SEQ ID NO: 9246 - protein, 100 aa, Homo sapiens
GFRLLRWQLCLAGPLALASDLGASSLVAFRRLLGNSIFPAPVRHSGDHGKRLFVIRPSRFYDRRFLKLLRFYIALTGIPVAIFITLVNVFIASHIKMDCP

SEQ ID NO: 9247 - protein, 56 aa, Homo sapiens
IPVAIFITLVNVFIGQAELAEIPEGYVPEHWEYYKGKGAGSAKIDACERRWTLVLL

SEQ ID NO: 9248 - protein, 177 aa, Homo sapiens
MAAMSLLRRVSVTAVAALSGRPLGTRLGFGGFLTRGFPKAAAPGNHHSAVFMILTTLFLIFYIALTGIPVAIFITLVNVFIGQAELAEIPEGYVPEHWEYYKHPISRWIARNFYDSPEKIYERTMAVLQIEAEKAELRVKELEVRKLMHVRGDGPWYYYETIDKELIDHSPKATPDN

SEQ ID NO: 9249 - protein, 135 aa, Homo sapiens
MAAMSLLRRVSVTAVAALSGRPLGTRLGFGGFLTRGFPKAAAPVRHSGDHGKRLFVIRPSRFYDRRFLKLLRFYIALTGIPVAIFITLVNVFIGQAELAEIPEGYVPEHWEYYKGKGAGSAKIDACERRWTLVLL

SEQ ID NO: 9250 - protein, 189 aa, Homo sapiens
MAAMSLLRRVSVTAVAALSGRPLGTRLGFGGFLTRGFPKAAAPVRHSGDHGKRLFVIRPSRFYDRRFLKLLRFYIALTGIPVAIFITLVNVFIGQAELAEIPEGYVPEHWEYYKHPISRWIARNFYDSPEKIYERTMAVLQIEAEKAELRVKELEVRKLMHVRGDGPWYYYETIDKELIDHSPKATPDN

SEQ ID NO: 9251 - protein, 66 aa, Homo sapiens
MAAMSLLRRVSVTAVAALSGRPLGTRLGFGGFLTRGFPKAAEILHCIDWDSSSNFHNSGECIHWSS

SEQ ID NO: 9252 - protein, 42 aa, Homo sapiens
MAAMSLLRRVSVTAVAALSGRPLGTRLGFGGFLTRGFPKAAG

SEQ ID NO: 9253 - protein, 137 aa, Homo sapiens
MAAMSLLRRVSVTAVAALSGRPLGTRLGFGGFLTRGFPKAAGQAELAEIPEGYVPEHWEYYKHPISRWIARNFYDSPEKIYERTMAVLQIEAEKAELRVKELEVRKLMHVRGDGPWYYYETIDKELIDHSPKATPDN

SEQ ID NO: 9254 - protein, 206 aa, Homo sapiens
  VARIANT 1: note = misc_feature - Xaa can be any naturally occurring amino acid
XSLLRRVSVTAVAALSGRPLGTRLGFGGFLTRGFPKAAAPVRHSGDHGKRLFVIRPSRFYDRRFLKLLALYEQSRGLENGRLSGPSATRFYIALTGIPVAIFITLVNVFIGQAELAEIPEGYVPEHWEYYKHPISRWIARNFYDSPEKIYERTMAVLQIEAEKAELRVKELEVRKLMHVRGDGPWYYYETIDKELIDHSPKATPDN

SEQ ID NO: 9255 - protein, 40 aa, Homo sapiens
LTTPMLLRALAQAARAGPPGGRSLHSSAVAATYSEYLGGL

SEQ ID NO: 9256 - protein, 110 aa, Homo sapiens
MRCLTTPMLLRALAQAARAGPPGGRSLHSSAVAATYKYVNMQDPEMDMKSVTDRAARTLLWTELFRGLGMTLSYLFREPATINYPFEKGPLSPRFRGEHALRRYPSGEER

SEQ ID NO: 9257 - protein, 124 aa, Homo sapiens
MRCLTTPMLLRALAQAARAGPPGGRSLHSSAVAATYKYVNMQDPEMDMKSVTDRAARTLLWTELFRGLGMTLSYLFREPATINYPFEKGPLSPRFRGEHALRRYPSGEERCIACKLCEAICPAQ

SEQ ID NO: 9258 - protein, 184 aa, Homo sapiens
MRCLTTPMLLRALAQAARAGPPGGRSLHSSAVAATYKYVNMQDPEMDMKSVTDRAARTLLWTELFRGLGMTLSYLFREPATINYPFEKGPLSPRFRGEHALRRYPSGEERCIACKLCEAICPAQAITIEAEPRADGSRRTTRYDIDMTKCIYCGFCQEACPVDAIVEGPNFEFSTETHEELLYN

SEQ ID NO: 9259 - protein, 210 aa, Homo sapiens
MRCLTTPMLLRALAQAARAGPPGGRSLHSSAVAATYKYVNMQDPEMDMKSVTDRAARTLLWTELFRGLGMTLSYLFREPATINYPFEKGPLSPRFRGEHALRRYPSGEERCIACKLCEAICPAQAITIEAEPRADGSRRTTRYDIDMTKCIYCGFCQEACPVDAIVEGPNFEFSTETHEELLYNKEKLLNNGDKWEAEIAANIQADYLYR

SEQ ID NO: 9260 - protein, 43 aa, Homo sapiens
MRCLTTPMLLRALAQAARAGPPGGRSLHSSAVAATYSEYLGGL

SEQ ID NO: 9261 - protein, 70 aa, Homo sapiens
MRRPLCATGLVRVGDHWEDALPDHAYAAAGPGPGCTCRTSWWPEPPQQCSGSHLQVCEHAGSRDGHEVSD

SEQ ID NO: 9262 - protein, 138 aa, Homo sapiens
MRRPLCATGLVRVGDHWEEYVNMQDPEMDMKSVTDRAARTLLWTELFRGLGMTLSYLFREPATINYPFEKGPLSPRFRGEHALRRYPSGEERCIACKLCEAICPAQAITIEAEPRADGSRRTTRYDIDMTKCIYCGFC

SEQ ID NO: 9263 - protein, 64 aa, Homo sapiens
MTKCIYCGFCQEACPVDAIVEGPNFEFSTETHEELLYNKEKLLNNGDKWEAEIAANIQADYLYR

SEQ ID NO: 9264 - protein, 93 aa, Homo sapiens
  VARIANT 1: note = misc_feature - Xaa can be any naturally occurring amino acid
XEPATINYPFEKGPLSPRFRGEHALRRYPSGEERCIACKLCEAICPAQGETLRAAGATLNKAVNSPLVRGGSWQMTPAADKQARQAGHGGSRL

SEQ ID NO: 9265 - protein, 127 aa, Homo sapiens
CPTTVANVETVAVSPTICRRGGTWFAGFGRERNSGTKLFNISGHVNHPCTVEEEMSVPLKELIEKHAGGVTGGWDNLLAVIPGGSSTPLIPKSVCETVLMDFDALVQAQTGLGTAAVIVMDRSVWTG

SEQ ID NO: 9266 - protein, 133 aa, Homo sapiens
EAYEAGLIGKNACGSGYDFDVFVVRGAGAYICGEETALIESIEGKQGKPRLKPPFPADVGVFGCPTTVANVETVAVSPTICRRGGTWFAGFGRERNSGTKLFNISGHVNHPCTVEEEMSVPLKELIEKHAVCV

SEQ ID NO: 9267 - protein, 75 aa, Homo sapiens
MGIPSPSAAPKKTSFGSLKDEDRIFTNLYGRHDWRLKGSLSRGDWYKTKEILLKGPDWILGEIKTSGLRGRGGAG

SEQ ID NO: 9268 - protein, 144 aa, Homo sapiens
MKTGFSPTCTAAMTGGSLSRGDWYKTKEILLKGPDWILGEIKTSGLRGRGGAGFPTGLKWSFMNKPSDGRPKYLVVNADEGEPGTCKDREILRHDPHKLLEGCLVGGRAMGARAAYIYIRGEFYNEASNLQVAIREAYEAGLIG

SEQ ID NO: 9269 - protein, 455 aa, Homo sapiens
MLATRRLLGWSLPARTAPKKTSFGSLKDEDRIFTNLYGRHDWRLKGSLSRGDWYKTKEILLKGPDWILGEIKTSGLRGRGGAGFPTGLKWSFMNKPSDGRPKYLVVNADEGEPGTCKDREILRHDPHKLLEGCLVGGRAMGARAAYIYIRGEFYNEASNLQVAIREAYEAGLIGKNACGSGYDFDVFVVRGAGAYICGEETALIESIEGKQGKPRLKPPFPADVGVFGCPTTVANVETVAVSPTICRRGGTWFAGFGRERNSGTKLFNISGHVNHPCTVEEEMSVPLKELIEKHAGGVTGGWDNLLAVIPGGSSTPLIPKSVCETVLMDFDALVQAQTGLGTAAVIVMDRSTDIVKAIARLIEFYKHESCGQCTPCREGVDWMNKVMARFVRGDARPAEIDSLWEISKQIEGHTICALGDGAAWPVQGLIRHFRPELEERMQRFAQQHQARQAAS

SEQ ID NO: 9270 - protein, 457 aa, Homo sapiens
MLATRRLLGWSLPARVSTAPKKTSFGSLKDEDRIFTNLYGRHDWRLKGSLSRGDWYKTKEILLKGPDWILGEIKTSGLRGRGGAGFPTGLKWSFMNKPSDGRPKYLVVNADEGEPGTCKDREILRHDPHKLLEGCLVGGRAMGARAAYIYIRGEFYNEASNLQVAIREAYEAGLIGKNACGSGYDFDVFVVRGAGAYICGEETALIESIEGKQGKPRLKPPFPADVGVFGCPTTVANVETVAVSPTICRRGGTWFAGFGRERNSGTKLFNISGHVNHPCTVEEEMSVPLKELIEKHAGGVTGGWDNLLAVIPGGSSTPLIPKSVCETVLMDFDALVQAQTGLGTAAVIVMDRSTDIVKAIARLIEFYKHESCGQCTPCREGVDWMNKVMARFVRGDARPAEIDSLWEISKQIEGHTICALGDGAAWPVQGLIRHFRPELEERMQRFAQQHQARQAAS

SEQ ID NO: 9271 - protein, 178 aa, Homo sapiens
MLATRRLLGWSLPARVSVRFSGDTDEDRIFTNLYGRHDWRLKGSLSRGDWYKTKEILLKGPDWILGEIKTSGLRGRGGAGFPTGLKWSFMNKPSDGRPKYLVVNADEGEPGTCKDREILRHDPHKLLEGCLVGGRAMGARAAYIYIRGEFYNEASNLQVAIREAYEAGLIGKNACGSG

SEQ ID NO: 9272 - protein, 43 aa, Homo sapiens
MLATRRLLGWSLPARVSVRFSGDTSSAWRKFCRQHPRKPHLAR

SEQ ID NO: 9273 - protein, 178 aa, Homo sapiens
MLATRRLLGWSLPARVSVRFSGDTTAPKKTSFGSLKDEDRIFTNLLKGSLSRGDWYKTKEILLKGPDWILGEIKTSGLRGRGGAGFPTGLKWSFMNKPSDGRPKYLVVNADEGEPGTCKDREILRHDPHKLLEGCLVGGRAMGARAAYIYIRGEFYNEASNLQVAIREAYEAGLIGKN

SEQ ID NO: 9274 - protein, 464 aa, Homo sapiens
MLATRRLLGWSLPARVSVRFSGDTTAPKKTSFGSLKDEDRIFTNLYGRHDWRLKGSLSRGDWYKTKEILLKGPDWILGEIKTSGLRGRGGAGFPTGLKWSFMNKPSDGRPKYLVVNADEGEPGTCKDREILRHDPHKLLEGCLVGGRAMGARAAYIYIRGEFYNEASNLQVAIREAYEAGLIGKNACGSGYDFDVFVVRGAGAYICGEETALIESIEGKQGKPRLKPPFPADVGVFGCPTTVANVETVAVSPTICRRGGTWFAGFGRERNSGTKLFNISGHVNHPCTVEEEMSVPLKELIEKHAGGVTGGWDNLLAVIPGGSSTPLIPKSVCETVLMDFDALVQAQTGLGTAAVIVMDRSTDIVKAIARLIEFYKHESCGQCTPCREGVDWMNKVMARFVRGDARPAEIDSLWEISKQIEGHTICALGDGAAWPVQGLIRHFRPELEERMQRFAQQHQARQAAS

SEQ ID NO: 9275 - protein, 53 aa, Homo sapiens
MNKPSDGRPKYLVVNADEGEPGTCKDREILRHDPHKLLEGCLVGGRAMGARAA

SEQ ID NO: 9276 - protein, 96 aa, Homo sapiens
MNKPSDGRPKYLVVNADEGEPGTCKDREILRHDPHKLLEGCLVGGRAMGARAAYIYIRGEFYNEASNLQVAIREAYEAGLIGKNACGSGYDFDVFV

SEQ ID NO: 9277 - protein, 136 aa, Homo sapiens
MNKPSDGRPKYLVVNADEGEPGTCKDREILRHDPHKLLEGCLVGGRAMGARAAYIYIRGEFYNEASNLQVAIREAYEAGLIGKNACGSGYDFDVFVVRGAGAYICGEETALIESIEGKQGKPRLKPPFPADVGKAW

SEQ ID NO: 9278 - protein, 363 aa, Homo sapiens
MNKPSDGRPKYLVVNADEGEPGTCKDREILRHDPHKLLEGCLVGGRAMGARAAYIYIRGEFYNEASNLQVAIREAYEAGLIGKNACGSGYDFDVFVVRGAGAYICGEETALIESIEGKQGKPRLKPPFPADVGVFGCPTTVANVETVAVSPTICRRGGTWFAGFGRERNSGTKLFNISGHVNHPCTVEEEMSVPLKELIEKHAGGVTGGWDNLLAVIPGGSSTPLIPKSVCETVLMDFDALVQAQTGLGTAAVIVMDRSTDIVKAIARLIEFYKHESCGQCTPCREGVDWMNKVMARFVRGDARPAEIDSLWEISKQIEGHTICALGDGAAWPVQGLIRHFRPELEERMQRFAQQHQARQAAS

SEQ ID NO: 9279 - protein, 54 aa, Homo sapiens
MACAGLLTVCLLRPPAPQPQPQTPRHPQLAPDPGPAGHTLFQDVFRRADKNALI

SEQ ID NO: 9280 - protein, 210 aa, Homo sapiens
MACAGLLTVCLLRPPAPQPQPQTPRHPQLAPDPGPAGHTLFQDVFRRADKNDDGKLSFEEFQNYFADGVLSLGELQELFSGIDGHLTDNLETEKLCDYFSEHLGVYRPVLAALESLNRAVLAAMDATKLEYERASKVDQFVTRFLLRETVSQLQALQSSLEGASDTLEAQAHGWRCRERGGAEQALRQPAGRTPSPEECQPVIHLVPRLF

SEQ ID NO: 9281 - protein, 192 aa, Homo sapiens
MACAGLLTVCLLRPPAPQPQPQTPRHPQLAPDPGPAGHTLFQDVFRRADKNDDGKLSFEEFQNYFADGVLSLGELQELFSGIDGHLTDNLETEKLCDYFSEHLGVYRPVLAALESLNRAVLAAMDATKLEYERASKVDQFVTRFLLRETVSQLQALQSSLEGASDTLEAQAHGWRLIPSWGPSPRPCEPHFL

SEQ ID NO: 9282 - protein, 362 aa, Homo sapiens
MACAGLLTVCLLRPPAPQPQPQTPRHPQLAPDPGPAGHTLFQDVFRRADKNDDGKLSFEEFQNYFADGVLSLGELQELFSGIDGHLTDNLETEKLCDYFSEHLGVYRPVLAALESLNRAVLAAMDATKLEYERASKVDQFVTRFLLRETVSQLQALQSSLEGASDTLEAQAHGWRSDAESVEAQSRLCGSRRAGRRALRSVSRSSTWSPGSSDTGRSSEAEMQWRLQVNRLQELIDQLECKAPRLEPLREEDLAKGPDLHILMAQRQVQVAEEGLQDFHRALRCYVDFTGAQSHCLHVSAQKMLDGASFTLYEFWQDEASWRRHQQSPGSKAFQRILIDHLRAPDTLTTVFFPASWWIMNNN

SEQ ID NO: 9283 - protein, 289 aa, Homo sapiens
MACAGLLTVCLLRPPAPQPQPQTPRHPQLAPDPGPAGHTLFQDVFRRADKNDDGKLSFEEFQNYFADGVLSLGELQELFSGIDGHLTDNLETEKLCDYFSEHLGVYRPVLAALESLNRAVLAAMDATKLEYERASKVDQFVTRFLLRETVSQLQALQSSLEGASDTLEAQAHGWRSDAESVEAQSRLCGSRRAGRRALRSVSRSSTWSPGSSDTGRSSEAEMQWRLQVNRLQELIDQLECKHILMAQRQVQVAEEGLQDFHRALRCYVDFTGAQSHCLHVSAQKMLDGA

SEQ ID NO: 9284 - protein, 297 aa, Homo sapiens
MACAGLLTVCLLRPPAPQPQPQTPRHPQLAPDPGPAGHTLFQDVFRRADKNDDGKLSFEEFQNYFADGVLSLGELQELFSGIDGHLTDNLETEKLCDYFSEHLGVYRPVLAALESLNRAVLAAMDATKLEYERASKVDQFVTRFLLRETVSQLQALQSSLEGASDTLEAQAHGWRSDAESVEAQSRLCGSRRAGRRALRSVSRSSTWSPGSSDTGRSSEAEMQWRLQVNRLQELIDQLECKRQVQVAEEGLQDFHRALRCYVDFTGAQSHCLHVSAQKMLDGASFTLYEFWQDEASW

SEQ ID NO: 9285 - protein, 396 aa, Homo sapiens
MACAGLLTVCLLRPPAPQPQPQTPRHPQLAPDPGPAGHTLFQDVFRRADKNDDGKLSFEEFQNYFADGVLSLGELQELFSGIDGHLTDNLETEKLCDYFSEHLGVYRPVLAALESLNRAVLAAMDATKLEYERASKVDQFVTRFLLRETVSQLQALQSSLEGASDTLEAQAHGWRSDAESVEAQSRLCGSRRAGRRALRSVSRSSTWSPGSSDTGRSSEAEMQWRLQVNRLQELIDQLECKVRAVGPGPHKGGPSWYPPEPGPCWRPGPHSVPSQAPRLEPLREEDLAKGPDLHILMAQRQVQVAEEGLQDFHRALRCYVDFTGAQSHCLHVSAQKMLDGASFTLYEFWQDEASWRRHQQSPGSKAFQRILIDHLRAPDTLTTVFFPASWWIMNNN

SEQ ID NO: 9286 - protein, 71 aa, Homo sapiens
MACAGLLTVCLLRPPAPQPQPQTPRHPQLAPDPGPAGHTLFQDVFRRADKNELLCRWGSQPGGAAGTVQRH

SEQ ID NO: 9287 - protein, 126 aa, Homo sapiens
MQWRLQVNRLQELIDQLECKAPRLEPLREEDLAKGPDLHILMAQRQVQVAEEGLQDFHRALRCYVDFTGAQSHCLHVSAQKMLDGASFTLYEFWQDEASWRRHQQSPGSKAFQRILIDHLRAPDTL

SEQ ID NO: 9288 - protein, 95 aa, Homo sapiens
  VARIANT 1: note = misc_feature - Xaa can be any naturally occurring amino acid
XQNYFADGVLSLGELQELFSGIDGHLTDNLETEKLCDYFSEHLGVYRPVLAALESLNRAVLAAMDATKLVSGVADGGGSTVRQWASAVLWDPPQS

SEQ ID NO: 9289 - protein, 517 aa, Homo sapiens
MARMGLAGAAGRWWGLALGLTAFFLPGVHSQVVQVNDSMYGFIGTDVVLHCSFANPLPSVKITQVTWQKSTNGSKQNVAIYNPSMGVSVLAPYRERVEFLRPSFTDGTIRLSRLELEDEGVYICEFATFPTGNRESQLNLTVMAKPTNWIEGTQAVLRAKKGQDDKVLVATCTSANGKPPSVVSWETRLKGEAEYQEIRNPNGTVTVISRYRLVPSREAHQQSLACIVNYHMDRFKESLTLNVQYEPEVTIEGFDGNWYLQRMDVKLTCKADANPPATEYHWTTLNGSLPKGVEAQNRTLFFKGPINYSLAGTYICEATNPIGTRSGQVEVNITEFPYTPSPPEHGRRAGPVPTAIIGGVAGSILLVLIVVGGIVVALRRRRHTFKGDYSTKKHVYGNGYSKAGIPQHHPPMAQNLQYPDDSDDEKKAGPLGGSSYEEEEEEEEGGGGGERKVGGPHPKYDEDAKRPYFTVDEAEARQDGYGDRTLGYQYDPEQLDLAENMVSQNDGSFISKKEWYV

SEQ ID NO: 9290 - protein, 458 aa, Homo sapiens
MARMGLAGAAGRWWGLALGLTAFFLPGVHSQVVQVNDSMYGFIGTDVVLHCSFANPLPSVKITQVTWQKSTNGSKQNVAIYNPSMGVSVLAPYRERVEFLRPSFTDGTIRLSRLELEDEGVYICEFATFPTGNRESQLNLTVMAKPTNWIEGTQAVLRAKKGQDDKVLVATCTSANGKPPSVVSWETRLKGEAEYQEIRNPNGTVTVISRYRLVPSREAHQQSLACIVNYHMDRFKESLTLNVQYEPEVTIEGFDGNWYLQRMDVKLTCKADANPPATEYHWTTLNGSLPKGVEAQNRTLFFKGPINYSLAGTYICEATNPIGTRSGQVEVNITEKPRPQRGLGSAARLLAGTVAVFLILVAVLTVFFLYNRQQKSPPETDGAGTDQPLSQKPEPSPSRQSSLVPEDIQVVHLDPGRQQQQEEEDLQKLSLQPPYYDLGVSPSYHPSVRTTEPRGECP

SEQ ID NO: 9291 - protein, 352 aa, Homo sapiens
MARMGLAGAAGRWWGLALGLTAFFLPGVHSQVVQVNDSMYGFIGTDVVLHCSFANPLPSVKITQVTWQKSTNGSKQNVAIYNPSMGVSVLAPYRERVEFLRPSFTDGTIRLSRLELEDEGVYICEFATFPTGNRESQLNLTVMAKPTNWIEGTQAVLRAKKGQDDKVLVATCTSANGKPPSVVSWETRLKGEAEYQEIRNPNGTVTVISRYRLVPSREAHQQSLACIVNYHMDRFKESLTLNVQYEPEVTIEGFDGNWYLQRMDVKLTCKADANPPATEYHWTTLNGSLPKGVEAQNRTLFFKGPINYSLAGTYICEATNPIGTRSGQVEVNITAFCQLIYPGKGRTRARMF

SEQ ID NO: 9292 - protein, 838 aa, Homo sapiens
MPMDLILVVWFCVCTARTAEDMKPPVLSLIWRTRVLKSLLQQSLQGVVGFGMDPDLQMDIVTELDLVNTTLGVAQVSGMHNASKAFLFQDIEREIHAAPHVSEKLIQLFRNKSEFTILATVQQKPSTSGVILSIRELEHSYFELESSGLRDEIRYHYIHNGKPRTEALPYRMADGQWHKVALSVSASHLLLHVDCNRIYERVIDPPDTNLPPGINLWLGQRNQKHGLFKGIIQDGKIIFMPNGYITQCPNLNHTCPTCSDFLSLVQGIMDLQELLAKMTAKLNYAETRLSQLENCHCEKTCQVSGLLYRDQDSWVDGDHCRNCTCKSGAVECRRMSCPPLNCSPDSLPVHIAGQCCKVCRPKCIYGGKVLAEGQRILTKSCRECRGGVLVKITEMCPPLNCSEKDHILPENQCCRVCRGHNFCAEGPKCGENSECKNWNTKATCECKSGYISVQGDSAYCEDIDECAAKMHYCHANTVCVNLPGLYRCDCVPGYIRVDDFSCTEHDECGSGQHNCDENAICTNTVQGHSCTCKPGYVGNGTICRAFCEEGCRYGGTCVAPNKCVCPSGFTGSHCEKDIDECSEGIIECHNHSRCVNLPGWYHCECRSGFHDDGTYSLSGESCIDIDECALRTHTCWNDSACINLAGGFDCLCPSGPSCSGDCPHEGGLKHNGQVWTLKEDRCSVCSCKDGKIFCRRTACDCQNPSADLFCCPECDTRVTSQCLDQNGHKLYRSGDNWTHSCQQCRCLEGEVDCWPLTCPNLSCEYTAILEGECCPRCVSDPCLADNITYDIRKTCLDSYGVSRLSGSVWTMAGSPCTTCKCKNGRVCCSVDFECLQNN

SEQ ID NO: 9293 - protein, 753 aa, Homo sapiens
MPMDLILVVWFCVCTARTVVGFGMDPDLQMDIVTELDLVNTTLGVAQVSGMHNASKAFLFQDIEREIHAAPHVSEKLIQLFRNKSEFTILATVQQKPSTSGVILSIRELEHRIYERVIDPPDTNLPPGINLWLGQRNQKHGLFKGIIQDGKIIFMPNGYITQCPNLNHTCPTCSDFLSLVQGIMDLQELLAKMTAKLNYAETRLSQLENCHCEKTCQVSGLLYRDQDSWVDGDHCRNCTCKSGAVECRRMSCPPLNCSPDSLPVHIAGQCCKVCRPKCIYGGKVLAEGQRILTKSCRECRGGVLVKITEMCPPLNCSEKDHILPENQCCRVCRGHNFCAEGPKCGENSECKNWNTKATCECKSGYISVQGDSAYCEDIDECAAKMHYCHANTVCVNLPGLYRCDCVPGYIRVDDFSCTEHDECGSGQHNCDENAICTNTVQGHSCTCKPGYVGNGTICRAFCEEGCRYGGTCVAPNKCVCPSGFTGSHCEKDIDECSEGIIECHNHSRCVNLPGWYHCECRSGFHDDGTYSLSGESCIDIDECALRTHTCWNDSACINLAGGFDCLCPSGPSCSGDCPHEGGLKHNGQVWTLKEDRCSVCSCKDGKIFCRRTACDCQNPSADLFCCPECDTRVTSQCLDQNGHKLYRSGDNWTHSCQQCRCLEGEVDCWPLTCPNLSCEYTAILEGECCPRCVSDPCLADNITYDIRKTCLDSYGVSRLSGSVWTMAGSPCTTCKCKNGRVCCSVDFECLQNN

SEQ ID NO: 9294 - protein, 810 aa, Homo sapiens
MPMDLILVVWFCVCTARTVVGFGMDPDLQMDIVTELDLVNTTLGVAQVSGMHNASKAFLFQDIEREIHAAPHVSEKLIQLFRNKSEFTILATVQQKPSTSGVILSIRELEHSYFELESSGLRDEIRYHYIHNGKPRTEALPYRMADGQWHKVALSVSASHLLLHVDCNRIYERVIDPPDTNLPPGINLWLGQRNQKHGLFKGIIQDGKIIFMPNGYITQCPNLNHTCPTCSDFLSLVQGIMDLQELLAKMTAKLNYAETRLSQLENCHCEKTCQVSGLLYRDQDSWVDGDHCRNCTCKSGAVECRRMSCPPLNCSPDSLPVHIAGQCCKVCRPKCIYGGKVLAEGQRILTKSCRECRGGVLVKITEMCPPLNCSEKDHILPENQCCRVCRGHNFCAEGPKCGENSECKNWNTKATCECKSGYISVQGDSAYCEDIDECAAKMHYCHANTVCVNLPGLYRCDCVPGYIRVDDFSCTEHDECGSGQHNCDENAICTNTVQGHSCTCKPGYVGNGTICRAFCEEGCRYGGTCVAPNKCVCPSGFTGSHCEKDIDECSEGIIECHNHSRCVNLPGWYHCECRSGFHDDGTYSLSGESCIDIDECALRTHTCWNDSACINLAGGFDCLCPSGPSCSGDCPHEGGLKHNGQVWTLKEDRCSVCSCKDGKIFCRRTACDCQNPSADLFCCPECDTRVTSQCLDQNGHKLYRSGDNWTHSCQQCRCLEGEVDCWPLTCPNLSCEYTAILEGECCPRCVSDPCLADNITYDIRKTCLDSYGVSRLSGSVWTMAGSPCTTCKCKNGRVCCSVDFECLQNN

SEQ ID NO: 9295 - protein, 763 aa, Homo sapiens
MPMDLILVVWFCVCTARTVVGFGMDPDLQMDIVTELDLVNTTLGVAQVSGMHNASKAFLFQDIEREIHAAPHVSEKLIQLFRNKSEFTILATVQQKPSTSGVILSIRELEHSYFELESSGLRDEIRYHYIHNGKPRTEALPYRMADGQWHKVALSVSASHLLLHVDCNRIYERVIDPPDTNLPPGINLWLGQRNQKHGLFKGIIQDGKIIFMPNGYITQCPNLNHTCPTCSDFLSLVQGIMDLQELLAKMTAKLNYAETRLSQLENCHCEKTCQVSGLLYRDQDSWVDGDHCRNCTCKSGAVECRRMSCPPLNCSPDSLPVHIAGQCCKVCRPKCIYGGKVLAEGQRILTKSCRECRGGVLVKITEMCPPLNCSEKDHILPENQCCRVCRGHNFCAEGPKCGENSECKNWNTKATCECKSGYISVQGDSAYCEDIDECAAKMHYCHANTVCVNLPGLYRCDCVPGYIRVDDFSCTEHDECGSGQHNCDENAICTNTVQGHSCTCKPGYVGNGTICRAFCEEGCRYGGTCVAPNKCVCPSGFTGSHCEKDIDECALRTHTCWNDSACINLAGGFDCLCPSGPSCSGDCPHEGGLKHNGQVWTLKEDRCSVCSCKDGKIFCRRTACDCQNPSADLFCCPECDTRVTSQCLDQNGHKLYRSGDNWTHSCQQCRCLEGEVDCWPLTCPNLSCEYTAILEGECCPRCVSDPCLADNITYDIRKTCLDSYGVSRLSGSVWTMAGSPCTTCKCKNGRVCCSVDFECLQNN

SEQ ID NO: 9296 - protein, 122 aa, Homo sapiens
CPTCNDFHGLVQKIMELQDILAKTSAKLSRAEQRMNRLDQCYCERTCTMKGTTYREFESWIDGCKNCTCLNGTIQCETLICPNPDCPLKSALAYVDGKCCKECKCEHNFYDEYFLWKNKALY

SEQ ID NO: 9297 - protein, 166 aa, Homo sapiens
MELFLFLSPTSYPSPVWGLGVDPSLQIDVLTELELGESTTGVRQVPGLHNGTKAFLFQDTPRSIKASTATAEQFFQKLRNKHEFTILVTLKQTHLNSGVILSIHHLDHRYLELESSGHRNEVRLHYRSGSHRPHTEVFPYILADDKWHKLSLAISASHLILHIDCN

SEQ ID NO: 9298 - protein, 22 aa, Homo sapiens
MESRVLLRTFCLIFGLGAVWGL

SEQ ID NO: 9299 - protein, 112 aa, Homo sapiens
MESRVLLRTFCLIFGLGAVWGLGVDPSLQIDVLTELELGESTTGVRQVPGLHNGTKAFLFQDTPRSIKASTATAEQFFQKLRNKHEFTILVTLKQTHLNSGVILSIHHLDHR

SEQ ID NO: 9300 - protein, 816 aa, Homo sapiens
MESRVLLRTFCLIFGLGAVWGLGVDPSLQIDVLTELELGESTTGVRQVPGLHNGTKAFLFQDTPRSIKASTATAEQFFQKLRNKHEFTILVTLKQTHLNSGVILSIHHLDHRYLELESSGHRNEVRLHYRSGSHRPHTEVFPYILADDKWHKLSLAISASHLILHIDCNKIYERVVEKPSTDLPLGTTFWLGQRNNAHGYFKGIMQDVQLLVMPQGFIAQCPDLNRTCPTCNDFHGLVQKIMELQDILAKTSAKLSRAEQRMNRLDQCYCERTCTMKGTTYREFESWIDGCKNCTCLNGTIQCETLICPNPDCPLKSALAYVDGKCCKECKSICQFQGRTYFEGERNTVYSSSGVCVLYECKDQTMKLVESSGCPALDCPESHQITLSHSCCKVCKGYDFCSERHNCMENSICRNLNDRAVCSCRDGFRALREDNAYCEDIDECAEGRHYCRENTMCVNTPGSFMCICKTGYIRIDDYSCTEHDECITNQHNCDENALCFNTVGGHNCVCKPGYTGNGTTCKAFCKDGCRNGGACIAANVCACPQGFTGPSCETDIDECSDGFVQCDSRANCINLPGWYHCECRDGYHDNGMFSPSGESCEDIDECGTGRHSCANDTICFNLDGGYDCRCPHGKNCTGDCIHDGKVKHNGQIWVLENDRCSVCSCQNGFVMCRRMVCDCENPTVDLFCCPECDPRLSSQCLHQNGETLYNSGDTWVQNCQQCRCLQGEVDCWPLPCPDVECEFSILPENECCPRCVTDPCQADTIRNDITKTCLDEMNVVRFTGSSWIKHGTECTLCQCKNGHICCSVDPQCLQEL

SEQ ID NO: 9301 - protein, 816 aa, Homo sapiens; identical to SEQ ID NO: 9300

SEQ ID NO: 9302 - protein, 321 aa, Homo sapiens
MESRVLLRTFCLIFGLGAVWGLGVDPSLQIDVLTELELGESTTGVRQVPGLHNGTKAFLFQDTPRSIKASTATAEQFFQKLRNKHEFTILVTLKQTHLNSGVILSIHHLDHRYLELESSGHRNEVRLHYRSGSHRPHTEVFPYILADDKWHKLSLAISASHLILHIDCNKIYERVVEKPSTDLPLGTTFWLGQRNNAHGYFKGIMQDVQLLVMPQGFIAQCPDLNRTCPTCNDFHGLVQKIMELQDILAKTSAKLSRAEQRMNRLDQCYCERTCTMKGTTYREFESWIDGCKNCTCLNGTIQCETLICPNPDCPLKSALAY

SEQ ID NO: 9303 - protein, 110 aa, Homo sapiens
METGLGAPLFKAWLLISVWGLGVDPSLQIDVLTELELGESTTGVRQVPGLHNGTKAFLFQDTPRSIKASTATAEQFFQKLRNKHEFTILVTLKQTHLNSGVILSIHHLDH

SEQ ID NO: 9304 - protein, 815 aa, Homo sapiens
METGLGAPLFKAWLLISVWGLGVDPSLQIDVLTELELGESTTGVRQVPGLHNGTKAFLFQDTPRSIKASTATAEQFFQKLRNKHEFTILVTLKQTHLNSGVILSIHHLDHRYLELESSGHRNEVRLHYRSGSHRPHTEVFPYILADDKWHKLSLAISASHLILHIDCNKIYERVVEKPSTDLPLGTTFWLGQRNNAHGYFKGIMQDVQLLVMPQGFIAQCPDLNRTCPTCNDFHGLVQKIMELQDILAKTSAKLSRAEQRMNRLDQCYCERTCTMKGTTYREFESWIDGCKNCTCLNGTIQCETLICPNPDCPLKSALAYVDGKCCKECKSICQFQGRTYFEGERNTVYSSSGVCVLYECKDQTMKLVESSGCPALDCPESHQITLSHSCCKVCKGYDFCSERHNCMENSICRNLNDRAVCSCRDGFRALREDNAYCEDIDECAEGRHYCRENTMCVNTPGSFMCICKTGYIRIDDYSCTEHDECITNQHNCDENALCFNTVGGHNCVCKPGYTGNGTTCKAFCKDGCRNGGACIAANVCACPQGFTGPSCETDIDECSDGFVQCDSRANCINLPGWYHCECRDGYHDNGMFSPSGESCEDIDECGTGRHSCANDTICFNLDGGYDCRCPHGKNCTGDCIHDGKVKHNGQIWVLENDRCSVCSCQNGFVMCRRMVCDCENPTVDLFCCPECDPRLSSQCLHQNGETLYNSGDTWVQNCQQCRCLQGEVDCWPLPCPDVECEFSILPENECCPRCVTDPCQADTIRNDITKTCLDEMNVVRFTGSSWIKHGTECTLCQCKNGHICCSVDPQCLQEL

SEQ ID NO: 9305 - protein, 768 aa, Homo sapiens
METGLGAPLFKAWLLISVWGLGVDPSLQIDVLTELELGESTTGVRQVPGLHNGTKAFLFQDTPRSIKASTATAEQFFQKLRNKHEFTILVTLKQTHLNSGVILSIHHLDHRYLELESSGHRNEVRLHYRSGSHRPHTEVFPYILADDKWHKLSLAISASHLILHIDCNKIYERVVEKPSTDLPLGTTFWLGQRNNAHGYFKGIMQDVQLLVMPQGFIAQCPDLNRTCPTCNDFHGLVQKIMELQDILAKTSAKLSRAEQRMNRLDQCYCERTCTMKGTTYREFESWIDGCKNCTCLNGTIQCETLICPNPDCPLKSALAYVDGKCCKECKSICQFQGRTYFEGERNTVYSSSGVCVLYECKDQTMKLVESSGCPALDCPESHQITLSHSCCKVCKGYDFCSERHNCMENSICRNLNDRAVCSCRDGFRALREDNAYCEDIDECAEGRHYCRENTMCVNTPGSFMCICKTGYIRIDDYSCTEHDECITNQHNCDENALCFNTVGGHNCVCKPGYTGNGTTCKAFCKDGCRNGGACIAANVCACPQGFTGPSCETDIDECGTGRHSCANDTICFNLDGGYDCRCPHGKNCTGDCIHDGKVKHNGQIWVLENDRCSVCSCQNGFVMCRRMVCDCENPTVDLFCCPECDPRLSSQCLHQNGETLYNSGDTWVQNCQQCRCLQGEVDCWPLPCPDVECEFSILPENECCPRCVTDPCQADTIRNDITKTCLDEMNVVRFTGSSWIKHGTECTLCQCKNGHICCSVDPQCLQEL

SEQ ID NO: 9306 - protein, 815 aa, Homo sapiens; identical to SEQ ID NO: 9304

SEQ ID NO: 9307 - protein, 866 aa, Homo sapiens
MGFPPLLKGQASATRSSLASCSWVVFFLSCLSRHAPEIEGGRRWTELIRTMESRVLLRTFCLIFGLGAVWGLGVDPSLQIDVLTELELGESTTGVRQVPGLHNGTKAFLFQDTPRSIKASTATAEQFFQKLRNKHEFTILVTLKQTHLNSGVILSIHHLDHRYLELESSGHRNEVRLHYRSGSHRPHTEVFPYILADDKWHKLSLAISASHLILHIDCNKIYERVVEKPSTDLPLGTTFWLGQRNNAHGYFKGIMQDVQLLVMPQGFIAQCPDLNRTCPTCNDFHGLVQKIMELQDILAKTSAKLSRAEQRMNRLDQCYCERTCTMKGTTYREFESWIDGCKNCTCLNGTIQCETLICPNPDCPLKSALAYVDGKCCKECKSICQFQGRTYFEGERNTVYSSSGVCVLYECKDQTMKLVESSGCPALDCPESHQITLSHSCCKVCKGYDFCSERHNCMENSICRNLNDRAVCSCRDGFRALREDNAYCEDIDECAEGRHYCRENTMCVNTPGSFMCICKTGYIRIDDYSCTEHDECITNQHNCDENALCFNTVGGHNCVCKPGYTGNGTTCKAFCKDGCRNGGACIAANVCACPQGFTGPSCETDIDECSDGFVQCDSRANCINLPGWYHCECRDGYHDNGMFSPSGESCEDIDECGTGRHSCANDTICFNLDGGYDCRCPHGKNCTGDCIHDGKVKHNGQIWVLENDRCSVCSCQNGFVMCRRMVCDCENPTVDLFCCPECDPRLSSQCLHQNGETLYNSGDTWVQNCQQCRCLQGEVDCWPLPCPDVECEFSILPENECCPRCVTDPCQADTIRNDITKTCLDEMNVVRFTGSSWIKHGTECTLCQCKNGHICCSVDPQCLQEL

SEQ ID NO: 9308 - protein, 839 aa, Homo sapiens
MSIRRLLILILKIGRRWTELIRTMESRVLLRTFCLIFGLGAVWGLGVDPSLQIDVLTELELGESTTGVRQVPGLHNGTKAFLFQDTPRSIKASTATAEQFFQKLRNKHEFTILVTLKQTHLNSGVILSIHHLDHRYLELESSGHRNEVRLHYRSGSHRPHTEVFPYILADDKWHKLSLAISASHLILHIDCNKIYERVVEKPSTDLPLGTTFWLGQRNNAHGYFKGIMQDVQLLVMPQGFIAQCPDLNRTCPTCNDFHGLVQKIMELQDILAKTSAKLSRAEQRMNRLDQCYCERTCTMKGTTYREFESWIDGCKNCTCLNGTIQCETLICPNPDCPLKSALAYVDGKCCKECKSICQFQGRTYFEGERNTVYSSSGVCVLYECKDQTMKLVESSGCPALDCPESHQITLSHSCCKVCKGYDFCSERHNCMENSICRNLNDRAVCSCRDGFRALREDNAYCEDIDECAEGRHYCRENTMCVNTPGSFMCICKTGYIRIDDYSCTEHDECITNQHNCDENALCFNTVGGHNCVCKPGYTGNGTTCKAFCKDGCRNGGACIAANVCACPQGFTGPSCETDIDECSDGFVQCDSRANCINLPGWYHCECRDGYHDNGMFSPSGESCEDIDECGTGRHSCANDTICFNLDGGYDCRCPHGKNCTGDCIHDGKVKHNGQIWVLENDRCSVCSCQNGFVMCRRMVCDCENPTVDLFCCPECDPRLSSQCLHQNGETLYNSGDTWVQNCQQCRCLQGEVDCWPLPCPDVECEFSILPENECCPRCVTDPCQADTIRNDITKTCLDEMNVVRFTGSSWIKHGTECTLCQCKNGHICCSVDPQCLQEL

SEQ ID NO: 9309 - protein, 246 aa, Homo sapiens
  VARIANT 1: note = misc_feature - Xaa can be any naturally occurring amino acid
XAKLSRAEQRMNRLDQCYCERTCTMKGTTYREFESWIDGCKNCTCLNGTIQCETLICPNPDCPLKSALAYVDGKCSICQFQGRTYFEGERNTVYSSSGVCVLYECKDQTMKLVESSGCPALDCPESHQITLSHSCCKVCKGYDFCSERHNCMENSICRNLNDRAVCSCRDGFRALREDNAYCEDIDECAEGRHYCRENTMCVNTPGSFMCICKTGYIRIDDYSCTEHDECITNQHNCDENALCFNT

SEQ ID NO: 9310 - protein, 86 aa, Homo sapiens
  VARIANT 1: note = misc_feature - Xaa can be any naturally occurring amino acid
XDNGMFSPSGESCEDIDECGTGRHSCANDTICFNLDGGYDCRCPHGKNCTGDCIHDGKVKHNGQIWVLENDRCSVCSCQVGINEKL

SEQ ID NO: 9311 - protein, 172 aa, Homo sapiens
MVGPAPRRRLRPLAALALVLALAPGLPTARAGQTPRPAERGPPVRLFTEEELARYGGEEEDQPIYLAVKGVVFDVTSGKEFYGRGAPYNALTGKDSTRGVAKMSLDPADLTHDTTGLTAKELEALDEVFTKVYKAKYPIVGYTARRILNEDGSPNLDFKPEDQPHFDIKDEF

SEQ ID NO: 9312 - protein, 533 aa, Homo sapiens
MIHGRSVLHIVASLIILHLSGATKKGTEKQTTSETQKSVQCGTWTKHAEGGIFTSPNYPSKYPPDRECIYIIEAAPRQCIELYFDEKYSIEPSWECKFDHIEVRDGPFGFSPIIGRFCGQQNPPVIKSSGRFLWIKFFADGELESMGFSARYNFTPDPDFKDLGALKPLPACEFEMGGSEGIVESIQIMKEGKATASEAVDCKWYIRAPPRSKIYLRFLDYEMQNSNECKRNFVAVYDGSSSVEDLKAKFCSTVANDVMLRTGLGVIRMWADEGSRNSRFQMLFTSFQEPPCEGNTFFCHSNMCINNTLVCNGLQNCVYPWDENHCKEKRKTSLLDQLTNTSGTVIGVTSCIVIILIIISVIVQIKQPRKKYVQRKSDFDQTVFQEVFEPPHYELCTLRGTGATADFADVADDFENYHKLRRSSSKCIHDHHCGSQLSSTKGSRSNLSTRDASILTEMPTQPGKPLIPPMNRRNILVMKHSYSQDAADACDIDEIEEVPTTSHRLSRHDKAVQRFCLIGSLSKHESEYNTTRV

SEQ ID NO: 9313 - protein, 533 aa, Homo sapiens; identical to SEQ ID NO: 9312

SEQ ID NO: 9314 - protein, 156 aa, Homo sapiens
MLAEPFPKVVASLIILHLSGATKKGTEKQTTSETQKSVQCGTWTKHAEGGIFTSPNYPSKYPPDRECIYIIEAAPRQCIELYFDEKYSIEPSWECKFDHIEVRDGPFGFSPIIGRFCGQQNPPVIKSSGRFLWIKFFADGELESMGFSARYNFTPE

SEQ ID NO: 9315 - protein, 101 aa, Homo sapiens
MSLYGFVASLIILHLSGATKKGTEKQTTSETQKSVQCGTWTKHAEGGIFTSPNYPSKYPPDRECIYIIEAAPRQCIELYFDEKYSIEPSWECKFDHIEVRD

SEQ ID NO: 9316 - skipped

SEQ ID NO: 9317 - protein, 1165 aa, Homo sapiens
IEIPMDLTQPPTITKQSAKDHIVDPRDNILIECEAKGNPAPSFHWTRNSRFFNIAKDPRVSMRRRSGTLVIDFRSGGRPEEYEGEYQCFARNKFGTALSNRIRLQVSKSPLWPKENLDPVVVQEGAPLTLQCNPPPGLPSPVIFWMSSSMEPITQDKRVSQGHNGDLYFSNVMLQDMQTDYSCNARFHFTHTIQQKNPFTLKVLTNHPYNDSSLRNHPDMYSARGVAERTPSFMYPQGTASSQMVLRGMDLLLECIASGVPTPDIAWYKKGGDLPSDKAKFENFNKALRITNVSEEDSGEYFCLASNKMGSIRHTISVRVKAAPYWLDEPKNLILAPGEDGRLVCRANGNPKPTVQWMVNGEPLQSAPPNPNREVAGDTIIFRDTQISSRAVYQCNTSNEHGYLLANAFVSVLDVPPRMLSPRNQLIRVILYNRTRLDCPFFGSPIPTLRWFKNGQGSNLDGGNYHVYENGSLEIKMIRKEDQGIYTCVATNILGKAENQVRLEVKDPTRIYRMPEDQVARRGTTVQLECRVKHDPSLKLTVSWLKDDEPLYIGNRMKKEDDSLTIFGVAERDQGSYTCVASTELDQDLAKAYLTVLADQATPTNRLAALPKGRPDRPRDLELTDLAERSVRLTWIPGDANNSPITDYVVQFEEDQFQPGVWHDHSKYPGSVNSAVLRLSPYVNYQFRVIAINEVGSSHPSLPSERYRTSGAPPESNPGDVKGEGTRKNNMEITWTPMNATSAFGPNLRYIVKWRRRETREAWNNVTVWGSRYVVGQTPVYVPYEIRVQAENDFGKGPEPESVIGYSGEDYPRAAPTEVKVRVMNSTAISLQWNRVYSDTVQGQLREYRAYYWRESSLLKNLWVSQKRQQASFPGDRLRGVVSRLFPYSNYKLEMVVVNGRGDGPRSETKEFTTPEGVPSAPRRFRVRQPNLETINLEWDHPEHPNGIMIGYTLKYVAFNGTKVGKQIVENFSPNQTKFTVQRTDPVSRYRFTLSARTQVGSGEAVTEESPAPPNEATPTAAYTNNQADIATQGWFIGLMCAIALLVLILLIVCFIKRSRGGKYPVREKKDVPLGPEDPKEEDGSFDYSDEDNKPLQGSQTSLDGTIKQQESDDSLVDYGEGGEGQFNEDGSFIGQYTVKKDKEETEGNESSEATSPVNAIYSLA

SEQ ID NO: 9318 - protein, 1169 aa, Homo sapiens
MARQPPPPWVHAAFLLCLLSLGGAIEIPMDLTQPPTITKQSAKDHIVDPRDNILIECEAKGNPAPSFHWTRNSRFFNIAKDPRVSMRRRSGTLVIDFRSGGRPEEYEGEYQCFARNKFGTALSNRIRLQVSKSPLWPKENLDPVVVQEGAPLTLQCNPPPGLPSPVIFWMSSSMEPITQDKRVSQGHNGDLYFSNVMLQDMQTDYSCNARFHFTHTIQQKNPFTLKVLTNHPYNDSSLRNHPDMYSARGVAERTPSFMYPQGTASSQMVLRGMDLLLECIASGVPTPDIAWYKKGGDLPSDKAKFENFNKALRITNVSEEDSGEYFCLASNKMGSIRHTISVRVKAAPYWLDEPKNLILAPGEDGRLVCRANGNPKPTVQWMVNGEPLQSAPPNPNREVAGDTIIFRDTQISSRAVYQCNTSNEHGYLLANAFVSVLDVPPRMLSPRNQLIRVILYNRTRLDCPFFGSPIPTLRWFKNGQGSNLDGGNYHVYENGSLEIKMIRKEDQGIYTCVATNILGKAENQVRLEVKDPTRIYRMPEDQVARRGTTVQLECRVKHDPSLKLTVSWLKDDEPLYIGNRMKKEDDSLTIFGVAERDQGSYTCVASTELDQDLAKAYLTVLGRPDRPRDLELTDLAERSVRLTWIPGDANNSPITDYVVQFEEDQFQPGVWHDHSKYPGSVNSAVLRLSPYVNYQFRVIAINEVGSSHPSLPSERYRTSGAPPESNPGDVKGEGTRKNNMEITWTPMNATSAFGPNLRYIVKWRRRETREAWNNVTVWGSRYVVGQTPVYVPYEIRVQAENDFGKGPEPESVIGYSGEDYPRAAPTEVKVRVMNSTAISLQWNRVYSDTVQGQLREYRAYYWRESSLLKNLWVSQKRQQASFPGDRLRGVVSRLFPYSNYKLEMVVVNGRGDGPRSETKEFTTPEGVPSAPRRFRVRQPNLETINLEWDHPEHPNGIMIGYTLKYVAFNGTKVGKQIVENFSPNQTKFTVQRTDPVSRYRFTLSARTQVGSGEAVTEESPAPPNEAYTNNQADIATQGWFIGLMCAIALLVLILLIVCFIKRSRGGKYPVREKKDVPLGPEDPKEEDGSFDYSDEDNKPLQGSQTSLDGTIKQQESDDSLVDYGEGGEGQFNEDGSFIGQYTVKKDKEETEGNESSEATSPVNAIYSLA

SEQ ID NO: 9319 - protein, 1174 aa, Homo sapiens
MARQPPPPWVHAAFLLCLLSLGGAIEIPMDLTQPPTITKQSAKDHIVDPRDNILIECEAKGNPAPSFHWTRNSRFFNIAKDPRVSMRRRSGTLVIDFRSGGRPEEYEGEYQCFARNKFGTALSNRIRLQVSKSPLWPKENLDPVVVQEGAPLTLQCNPPPGLPSPVIFWMSSSMEPITQDKRVSQGHNGDLYFSNVMLQDMQTDYSCNARFHFTHTIQQKNPFTLKVLTNHPYNDSSLRNHPDMYSARGVAERTPSFMYPQGTASSQMVLRGMDLLLECIASGVPTPDIAWYKKGGDLPSDKAKFENFNKALRITNVSEEDSGEYFCLASNKMGSIRHTISVRVKAAPYWLDEPKNLILAPGEDGRLVCRANGNPKPTVQWMVNGEPLQSAPPNPNREVAGDTIIFRDTQISSRAVYQCNTSNEHGYLLANAFVSVLDVPPRMLSPRNQLIRVILYNRTRLDCPFFGSPIPTLRWFKNGQGSNLDGGNYHVYENGSLEIKMIRKEDQGIYTCVATNILGKAENQVRLEVKDPTRIYRMPEDQVARRGTTVQLECRVKHDPSLKLTVSWLKDDEPLYIGNRMKKEDDSLTIFGVAERDQGSYTCVASTELDQDLAKAYLTVLGRPDRPRDLELTDLAERSVRLTWIPGDANNSPITDYVVQFEEDQFQPGVWHDHSKYPGSVNSAVLRLSPYVNYQFRVIAINEVGSSHPSLPSERYRTSGAPPESNPGDVKGEGTRKNNMEITWTPMNATSAFGPNLRYIVKWRRRETREAWNNVTVWGSRYVVGQTPVYVPYEIRVQAENDFGKGPEPESVIGYSGEDYPRAAPTEVKVRVMNSTAISLQWNRVYSDTVQGQLREYRAYYWRESSLLKNLWVSQKRQQASFPGDRLRGVVSRLFPYSNYKLEMVVVNGRGDGPRSETKEFTTPEGVPSAPRRFRVRQPNLETINLEWDHPEHPNGIMIGYTLKYVAFNGTKVGKQIVENFSPNQTKFTVQRTDPVSRYRFTLSARTQVGSGEAVTEESPAPPNEATPTAAYTNNQADIATQGWFIGLMCAIALLVLILLIVCFIKRSRGGKYPVREKKDVPLGPEDPKEEDGSFDYSDEDNKPLQGSQTSLDGTIKQQESDDSLVDYGEGGEGQFNEDGSFIGQYTVKKDKEETEGNESSEATSPVNAIYSLA

SEQ ID NO: 9320 - protein, 1174 aa, Homo sapiens; identical to SEQ ID NO: 9319

SEQ ID NO: 9321 - protein, 1169 aa, Homo sapiens; identical to SEQ ID NO: 9318

SEQ ID NO: 9322 - protein, 1157 aa, Homo sapiens
MARQPPPPWVHAAFLLCLLSLGGAIEIPMDLTQPPTITKQSAKDHIVDPRDNILIECEAKGNPAPSFHWTRNSRFFNIAKDPRVSMRRRSGTLVIDFRSGGRPEEYEGEYQCFARNKFGTALSNRIRLQVSKSPLWPKENLDPVVVQEGAPLTLQCNPPPGLPSPVIFWMSSSMEPITQDKRVSQGHNGDLYFSNVMLQDMQTDYSCNARFHFTHTIQQKNPFTLKVLTTRGVAERTPSFMYPQGTASSQMVLRGMDLLLECIASGVPTPDIAWYKKGGDLPSDKAKFENFNKALRITNVSEEDSGEYFCLASNKMGSIRHTISVRVKAAPYWLDEPKNLILAPGEDGRLVCRANGNPKPTVQWMVNGEPLQSAPPNPNREVAGDTIIFRDTQISSRAVYQCNTSNEHGYLLANAFVSVLDVPPRMLSPRNQLIRVILYNRTRLDCPFFGSPIPTLRWFKNGQGSNLDGGNYHVYENGSLEIKMIRKEDQGIYTCVATNILGKAENQVRLEVKDPTRIYRMPEDQVARRGTTVQLECRVKHDPSLKLTVSWLKDDEPLYIGNRMKKEDDSLTIFGVAERDQGSYTCVASTELDQDLAKAYLTVLGRPDRPRDLELTDLAERSVRLTWIPGDANNSPITDYVVQFEEDQFQPGVWHDHSKYPGSVNSAVLRLSPYVNYQFRVIAINEVGSSHPSLPSERYRTSGAPPESNPGDVKGEGTRKNNMEITWTPMNATSAFGPNLRYIVKWRRRETREAWNNVTVWGSRYVVGQTPVYVPYEIRVQAENDFGKGPEPESVIGYSGEDYPRAAPTEVKVRVMNSTAISLQWNRVYSDTVQGQLREYRAYYWRESSLLKNLWVSQKRQQASFPGDRLRGVVSRLFPYSNYKLEMVVVNGRGDGPRSETKEFTTPEGVPSAPRRFRVRQPNLETINLEWDHPEHPNGIMIGYTLKYVAFNGTKVGKQIVENFSPNQTKFTVQRTDPVSRYRFTLSARTQVGSGEAVTEESPAPPNEATPTAAYTNNQADIATQGWFIGLMCAIALLVLILLIVCFIKRSRGGKYPVREKKDVPLGPEDPKEEDGSFDYSDEDNKPLQGSQTSLDGTIKQQESDDSLVDYGEGGEGQFNEDGSFIGQYTVKKDKEETEGNESSEATSPVNAIYSLA

SEQ ID NO: 9323 - protein, 129 aa, Homo sapiens
MARQPPPPWVHAAFLLCLLSLGGAIEIPMDPSIQNELTQPPTITKQSAKDHIVDPRDNILIECEAKGNPAPSFHWTRNSRFFNIAKDPRVSMRRRSGTLVIDFRSGGRPEEYEGEYQCFARNKFGTALS

SEQ ID NO: 9324 - protein, 486 aa, Homo sapiens
MARQPPPPWVHAAFLLCLLSLGGAIEIPMDPSIQNELTQPPTITKQSAKDHIVDPRDNILIECEAKGNPAPSFHWTRNSRFFNIAKDPRVSMRRRSGTLVIDFRSGGRPEEYEGEYQCFARNKFGTALSNRIRLQVSKSPLWPKENLDPVVVQEGAPLTLQCNPPPGLPSPVIFWMSSSMEPITQDKRVSQGHNGDLYFSNVMLQDMQTDYSCNARFHFTHTIQQKNPFTLKVLTNHPYNDSSLRNHPDMYSARGVAERTPSFMYPQGTASSQMVLRGMDLLLECIASGVPTPDIAWYKKGGDLPSDKAKFENFNKALRITNVSEEDSGEYFCLASNKMGSIRHTISVRVKAAPYWLDEPKNLILAPGEDGRLVCRANGNPKPTVQWMVNGEPLQSAPPNPNREVAGDTIIFRDTQISSRAVYQCNTSNEHGYLLANAFVSVLDVPPRMLSPRNQLIRVILYNRTRLDCPFFGSPIPTLRCPHGLS

SEQ ID NO: 9325 - protein, 1240 aa, Homo sapiens
MARQPPPPWVHAAFLLCLLSLGGAIEIPMDPSIQNELTQPPTITKQSAKDHIVDPRDNILIECEAKGNPAPSFHWTRNSRFFNIAKDPRVSMRRRSGTLVIDFRSGGRPEEYEGEYQCFARNKFGTALSNRIRLQVSKSPLWPKENLDPVVVQEGAPLTLQCNPPPGLPSPVIFWMSSSMEPITQDKRVSQGHNGDLYFSNVMLQDMQTDYSCNARFHFTHTIQQKNPFTLKVLTTRGVAERTPSFMYPQGTASSQMVLRGMDLLLECIASGVPTPDIAWYKKGGDLPSDKAKFENFNKALRITNVSEEDSGEYFCLASNKMGSIRHTISVRVKAAPYWLDEPKNLILAPGEDGRLVCRANGNPKPTVQWMVNGEPLQSAPPNPNREVAGDTIIFRDTQISSRAVYQCNTSNEHGYLLANAFVSVLDVPPRMLSPRNQLIRVILYNRTRLDCPFFGSPIPTLRWFKNGQGSNLDGGNYHVYENGSLEIKMIRKEDQGIYTCVATNILGKAENQVRLEVKDPTRIYRMPEDQVARRGTTVQLECRVKHDPSLKLTVSWLKDDEPLYIGNRMKKEDDSLTIFGVAERDQGSYTCVASTELDQDLAKAYLTVLADQATPTNRLAALPKGRPDRPRDLELTDLAERSVRLTWIPGDANNSPITDYVVQFEEDQFQPGVWHDHSKYPGSVNSAVLRLSPYVNYQFRVIAINEVGSSHPSLPSERYRTSGAPPESNPGDVKGEGTRKNNMEITWTPMNATSAFGPNLRYIVKWRRRETREAWNNVTVWGSRYVVGQTPVYVPYEIRVQAENDFGKGPEPESVIGYSGEDLPSAPRRFRVRQPNLETINLEWDHPEHPNGIMIGYTLKYVAFNGTKVGKQIVENFSPNQTKFTVQRTDPVSRYRFTLSARTQVGSGEAVTEESPAPPNEATPTAAPPTLPPTTVGATGAVSSTDATAIAATTEATTVPIIPTVAPTTIATTTTVATTTTTTAAATTTTESPPTTTSGTKIHESAPDEQSIWNVTVLPNSKWANITWKHNFGPGTDFVVEYIDSNHTKKTVPVKAQAQPIQLTDLYPGMTYTLRVYSRDNEGISSTVITFMTSTAYTNNQADIATQGWFIGLMCAIALLVLILLIVCFIKRSRGGKYPVREKKDVPLGPEDPKEEDGSFDYSDEDNKPLQGSQTSLDGTIKQQESDDSLVDYGEGGEGQFNEDGSFIGQYTVKKDKEETEGNESSEATSPVNAIYSLA

SEQ ID NO: 9326 - protein, 1240 aa, Homo sapiens; identical to SEQ ID NO: 9325

SEQ ID NO: 9327 - protein, 619 aa, Homo sapiens
MARQPPPPWVHAAFLLCLLSLGGAIEIPMDPSIQNELTQPPTITKQSAKDHIVDPRDNILIECEAKGNPAPSFHWTRNSRFFNIAKDPRVSMRRRSGTLVIDFRSGGRPEEYEGEYQCFARNKFGTALSNRIRLQVSKSPLWPKENLDPVVVQEGAPLTLQCNPPPGLPSPVIFWMSSSMEPITQDKRVSQGHNGDLYFSNVMLQDMQTDYSCNARFHFTHTIQQKNPFTLKVLTTRGVAERTPSFMYPQGTASSQMVLRGMDLLLECIASGVPTPDIAWYKKGGDLPSDKAKFENFNKALRITNVSEEDSGEYFCLASNKMGSIRHTISVRVKAAPYWLDEPKNLILAPGEDGRLVCRANGNPKPTVQWMVNGEPLQSAPPNPNREVAGDTIIFRDTQISSRAVYQCNTSNEHGYLLANAFVSVLDVPPRMLSPRNQLIRVILYNRTRLDCPFFGSPIPTLRWFKNGQGSNLDGGNYHVYENGSLEIKMIRKEDQGIYTCVATNILGKAENQVRLEVKDPTRIYRMPEDQVARRGTTVQLECRVKHDPSLKLTVSWLKDDEPLYIGNRMKKEDDSLTIFGVAERDQGSYTCVASTELDQDLAKAYLTVLGNCPCSPWH

SEQ ID NO: 9328 - protein, 218 aa, Homo sapiens
PPTTVGATGAVSSTDATAIAATTEATTVPIIPTVAPTTIATTTTVATTTTTTAAATTTTESPPTTTSGTKIHESAYTNNQADIATQGWFIGLMCAIALLVLILLIVCFIKRSRGGKYPVREKKDVPLGPEDPKEEDGSFDYSDEDNKPLQGSQTSLDGTIKQQESDDSLVDYGEGGEGQFNEDGSFIGQYTVKKDKEETEGNESSEATSPVNAIYSLA

SEQ ID NO: 9329 - protein, 237 aa, Homo sapiens
  VARIANT 1: note = misc_feature - Xaa can be any naturally occurring amino acid
XENFSPNQTKFTVQRTDPVSRYRFTLSARTQVGSGEAVTEESPAPPNEATPTAAPDEQSIWNVTVLPNSKWANITWKHNFGPGTDFVVEYIDSNHTKKTVPVKAQAQPIQLTDLYPGMTYTLRVYSRDNEGISSTVITFMTSTAYTNNQADIATQGWFIGLMCAIALLVLILLIVCFIKRSRGGKYPVREKKDVPLGPEDPKEEDGSFDYSDEDNKPLQGSQTSLDGTIKQQESDDS

SEQ ID NO: 9330 - protein, 298 aa, Homo sapiens
  VARIANT 1: note = misc_feature - Xaa can be any naturally occurring amino acid
XRETREAWNNVTVWGSRYVVGQTPVYVPYEIRVQAENDFGKGPEPESVIGYSGEDLPSAPRRFRVRQPNLETINLEWDHPEHPNGIMIGYTLKYVAFNGTKVGKQIVENFSPNQTKFTVQRTDPVSRYRFTLSARTQVGSGEAVTEESPAPPNEAYTNNQADIATQGWFIGLMCAIALLVLILLIVCFIKRSRGGKYPVREKKDVPLGPEDPKEEDGSFDYSDEDNKPLQGSQTSLDGTIKQQESDDSLVDYGEGGEGQFNEDGSFIGQYTVKKDKEETEGNESSEATSPVNAIYSLA

SEQ ID NO: 9331 - protein, 1041 aa, Homo sapiens
  VARIANT 1: note = misc_feature - Xaa can be any naturally occurring amino acid
XSIQNELTQPPTITKQSAKDHIVDPRDNILIECEAKGNPAPSFHWTRNSRFFNIAKDPRVSMRRRSGTLVIDFRSGGRPEEYEGEYQCFARNKFGTALSNRIRLQVSKSPLWPKENLDPVVVQEGAPLTLQCNPPPGLPSPVIFWMSSSMEPITQDKRVSQGHNGDLYFSNVMLQDMQTDYSCNARFHFTHTIQQKNPFTLKVLTTRGVAERTPSFMYPQGTASSQMVLRGMDLLLECIASGVPTPDIAWYKKGGDLPSDKAKFENFNKALRITNVSEEDSGEYFCLASNKMGSIRHTISVRVKAAPYWLDEPKNLILAPGEDGRLVCRANGNPKPTVQWMVNGEPLQSAPPNPNREVAGDTIIFRDTQISSRAVYQCNTSNEHGYLLANAFVSVLDVPPRMLSPRNQLIRVILYNRTRLDCPFFGSPIPTLRWFKNGQGSNLDGGNYHVYENGSLEIKMIRKEDQGIYTCVATNILGKAENQVRLEVKDPTRIYRMPEDQVARRGTTVQLECRVKHDPSLKLTVSWLKDDEPLYIGNRMKKEDDSLTIFGVAERDQGSYTCVASTELDQDLAKAYLTVLADQATPTNRLAALPKGRPDRPRDLELTDLAERSVRLTWIPGDANNSPITDYVVQFEEDQFQPGVWHDHSKYPGSVNSAVLRLSPYVNYQFRVIAINEVGSSHPSLPSERYRTSGAPPESNPGDVKGEGTRKNNMEITWTPMNATSAFGPNLRYIVKWRRRETREAWNNVTVWGSRYVVGQTPVYVPYEIRVQAENDFGKGPEPESVIGYSGEDLPSAPRRFRVRQPNLETINLEWDHPEHPNGIMIGYTLKYVAFNGTKVGKQIVENFSPNQTKFTVQRTDPVSRYRFTLSARTQVGSGEAVTEESPAPPNEATPTAAYTNNQADIATQGWFIGLMCAIALLVLILLIVCFIKRSRGGKYPVREKKDVPLGPEDPKEEDGSFDYSDEDNKPLQGSQTSLDGTIKQQESDDSLVDYGEGGEGQFNEDGSFIGQYTVKKDKEETEGNESSEATSPVNAIYSLA

SEQ ID NO: 9332 - protein, 573 aa, Homo sapiens
MGWESHLTAASADIDLGAGREVFDYSHRQKEQDVEKELRDGGEQDTWAGEGAEALARNLLVDGETGESFPAQFPADISSITEAVPSESEPPALQNNLLSPLLTGTESPFDLEQQWQDLMSIMEMQAMEVNTSASEILYSAPPGDPLSTNYSLAPNTPINQNVSLHQASLGGCSQDFLLFSPEVESLPVASSSTLLPLAPSNSTSLNSTFGSTNLTGLFFPPQLNGTANDTAGPELPDPLGGLLDEAMLDEISLMDLAIEEGFNPVQASQLEEEFDSDSGLSLDSSHSPSSLSSSEGSSSSSSSSSSSSSSASSSASSSFSEEGAVGYSSDSETLDLEEAEGAVGYQPEYSKFCRMSYQDPAQLSCLPYLEHVGHNHTYNMAPSALDSADLPPPSALKKGSKEKQADFLDKQMSRDEHRARAMKIPFTNDKIINLPVEEFNELLSKYQLSEAQLSLIRDIRRRGKNKMAAQNCRKRKLDTILNLERDVEDLQRDKARLLREKVEFLRSLRQMKQKVQSLYQEVFGRLRDENGRPYSPSQYALQYAGDGSVLLIPRTMADQQARRQERKPKDRRK

SEQ ID NO: 9333 - protein, 584 aa, Homo sapiens
MGWESHLTAASADIDLIDILWRQDIDLGAGREVFDYSHRQKEQDVEKELRDGGEQDTWAGEGAEALARNLLVDGETGESFPAQFPADISSITEAVPSESEPPALQNNLLSPLLTGTESPFDLEQQWQDLMSIMEMQAMEVNTSASEILYSAPPGDPLSTNYSLAPNTPINQNVSLHQASLGGCSQDFLLFSPEVESLPVASSSTLLPLAPSNSTSLNSTFGSTNLTGLFFPPQLNGTANDTAGPELPDPLGGLLDEAMLDEISLMDLAIEEGFNPVQASQLEEEFDSDSGLSLDSSHSPSSLSSSEGSSSSSSSSSSSSSSASSSASSSFSEEGAVGYSSDSETLDLEEAEGAVGYQPEYSKFCRMSYQDPAQLSCLPYLEHVGHNHTYNMAPSALDSADLPPPSALKKGSKEKQADFLDKQMSRDEHRARAMKIPFTNDKIINLPVEEFNELLSKYQLSEAQLSLIRDIRRRGKNKMAAQNCRKRKLDTILNLERDVEDLQRDKARLLREKVEFLRSLRQMKQKVQSLYQEVFGRLRDENGRPYSPSQYALQYAGDGSVLLIPRTMADQQARRQERKPKDRRK

SEQ ID NO: 9334 - protein, 4 aa, Homo sapiens
MLSL

SEQ ID NO: 9335 - protein, 9 aa, Homo sapiens
MLSLKKYLT

SEQ ID NO: 9336 - protein, 83 aa, Homo sapiens
MLSLKKYLTEGLLQFTILLSLIGVRVDVDTYLTSQLPPLREIILGPSSAYTQTQFHNLRNTLDGYGIHPKSIDLDNYFTARRL

SEQ ID NO: 9337 - protein, 99 aa, Homo sapiens
MLSLKKYLTEGLLQFTILLSLIGVRVDVDTYLTSQLPPLREIILGPSSAYTQTQFHNLRNTLDGYGIHPKSIDLDNYFTARRLLSQVRALDRFQVPTTE

SEQ ID NO: 9338 - protein, 761 aa, Homo sapiens
MLSLKKYLTEGLLQFTILLSLIGVRVDVDTYLTSQLPPLREIILGPSSAYTQTQFHNLRNTLDGYGIHPKSIDLDNYFTARRLLSQVRALDRFQVPTTEVNAWLVHRDPEGSVSGSQPNSGLALESSSGLQDVTGPDNGVRESETEQGFGEDLEDLGAVAPPVSGDLTKEDIDLGAGREVFDYSHRQKEQDVEKELRDGGEQDTWAGEGAEALARNLLVDGETGESFPAQVPSGEDQTALSLEECLRLLEATCPFGENAEFPADISSITEAVPSESEPPALQNNLLSPLLTGTESPFDLEQQWQDLMSIMEMQAMEVNTSASEILYSAPPGDPLSTNYSLAPNTPINQNVSLHQASLGGCSQDFLLFSPEVESLPVASSSTLLPLAPSNSTSLNSTFGSTNLTGLFFPPQLNGTANDTAGPELPDPLGGLLDEAMLDEISLMDLAIEEGFNPVQASQLEEEFDSDSGLSLDSSHSPSSLSSSEGSSSSSSSSSSSSSSASSSASSSFSEEGAVGYSSDSETLDLEEAEGAVGYQPEYSKFCRMSYQDPAQLSCLPYLEHVGHNHTYNMAPSALDSADLPPPSALKKGSKEKQADFLDKQMSRDEHRARAMKIPFTNDKIINLPVEEFNELLSKYQLSEAQLSLIRDIRRRGKNKMAAQNCRKRKLDTILNLERDVEDLQRDKARLLREKVEFLRSLRQMKQKVQSLYQEVFGRLRDENGRPYSPSQYALQYAGDGSVLLIPRTMADQQARRQERKPKDRRK

SEQ ID NO: 9339 - protein, 742 aa, Homo sapiens
MLSLKKYLTEGLLQFTILLSLIGVRVDVDTYLTSQLPPLREIILGPSSAYTQTQFHNLRNTLDGYGIHPKSIDLDNYFTARRLLSQVRALDRFQVPTTEVNAWLVHRDPEGSVSGSQPNSGLALESSSGLQDVTGPDNGVRESETEQGFGEDLEDLGAVAPPVSGDLTKEDIDLIDILWRQDIDLGAGREVFDYSHRQKEQDVEKELRDGGEQDTWAGEGAEALARNLLVDGETGESFPAQFPADISSITEAVPSESEPPALQNNLLSPLLTGTESPFDLEQQWQDLMSIMEMQAMEVNTSASEILYSAPPGDPLSTNYSLAPNTPINQNVSLHQASLGGCSQDFLLFSPEVESLPVASSSTLLPLAPSNSTSLNSTFGSTNLTGLFFPPQLNGTANDTAGPELPDPLGGLLDEAMLDEISLMDLAIEEGFNPVQASQLEEEFDSDSGLSLDSSHSPSSLSSSEGSSSSSSSSSSSSSSASSSASSSFSEEGAVGYSSDSETLDLEEAEGAVGYQPEYSKFCRMSYQDPAQLSCLPYLEHVGHNHTYNMAPSALDSADLPPPSALKKGSKEKQADFLDKQMSRDEHRARAMKIPFTNDKIINLPVEEFNELLSKYQLSEAQLSLIRDIRRRGKNKMAAQNCRKRKLDTILNLERDVEDLQRDKARLLREKVEFLRSLRQMKQKVQSLYQEVFGRLRDENGRPYSPSQYALQYAGDGSVLLIPRTMADQQARRQERKPKDRRK

SEQ ID NO: 9340 - protein, 742 aa, Homo sapiens; identical to SEQ ID NO: 9339

SEQ ID NO: 9341 - protein, 772 aa, Homo sapiens
MLSLKKYLTEGLLQFTILLSLIGVRVDVDTYLTSQLPPLREIILGPSSAYTQTQFHNLRNTLDGYGIHPKSIDLDNYFTARRLLSQVRALDRFQVPTTEVNAWLVHRDPEGSVSGSQPNSGLALESSSGLQDVTGPDNGVRESETEQGFGEDLEDLGAVAPPVSGDLTKEDIDLIDILWRQDIDLGAGREVFDYSHRQKEQDVEKELRDGGEQDTWAGEGAEALARNLLVDGETGESFPAQVPSGEDQTALSLEECLRLLEATCPFGENAEFPADISSITEAVPSESEPPALQNNLLSPLLTGTESPFDLEQQWQDLMSIMEMQAMEVNTSASEILYSAPPGDPLSTNYSLAPNTPINQNVSLHQASLGGCSQDFLLFSPEVESLPVASSSTLLPLAPSNSTSLNSTFGSTNLTGLFFPPQLNGTANDTAGPELPDPLGGLLDEAMLDEISLMDLAIEEGFNPVQASQLEEEFDSDSGLSLDSSHSPSSLSSSEGSSSSSSSSSSSSSSASSSASSSFSEEGAVGYSSDSETLDLEEAEGAVGYQPEYSKFCRMSYQDPAQLSCLPYLEHVGHNHTYNMAPSALDSADLPPPSALKKGSKEKQADFLDKQMSRDEHRARAMKIPFTNDKIINLPVEEFNELLSKYQLSEAQLSLIRDIRRRGKNKMAAQNCRKRKLDTILNLERDVEDLQRDKARLLREKVEFLRSLRQMKQKVQSLYQEVFGRLRDENGRPYSPSQYALQYAGDGSVLLIPRTMADQQARRQERKPKDRRK

SEQ ID NO: 9342 - protein, 19 aa, Homo sapiens
MSIMEMQAMEVNTSASEIL

SEQ ID NO: 9343 - protein, 23 aa, Homo sapiens
MSIMEMQAMEVNTSASEILYSAP

SEQ ID NO: 9344 - protein, 47 aa, Homo sapiens
MSIMEMQAMEVNTSASEILYSAPPGDPLSTNYSLAPNTPINQNVSLH

SEQ ID NO: 9345 - protein, 63 aa, Homo sapiens
MSIMEMQAMEVNTSASEILYSAPPGDPLSTNYSLAPNTPINQNVSLHQASLGGCSQDFLLFSP

SEQ ID NO: 9346 - protein, 161 aa, Homo sapiens
MTRLDRSSHSGGGHAKGSRPLNSLLAGHRVAQPASAPGSRASVQDIDLGAGREVFDYSHRQKEQDVEKELRDGGEQDTWAGEGAEALARNLLVDGETGESFPAQFPADISSITEAVPSESEPPALQNNLLSPLLTGTESPFDLEQQWQDLMSIMEMQAMEV

SEQ ID NO: 9347 - protein, 63 aa, Homo sapiens
MTRLDRSSHSGGGHAKGSRPLNSLLAGHRVAQPASAPGSRASVQDIDLIDILWRQDIDLGAGR

SEQ ID NO: 9348 - protein, 111 aa, Homo sapiens
MTRLDRSSHSGGGHAKGSRPLNSLLAGHRVAQPASAPGSRASVQDIDLIDILWRQDIDLGAGREVFDYSHRQKEQDVEKELRDGGEQDTWAGEGAEALARNLLVDGETGES

SEQ ID NO: 9349 - protein, 616 aa, Homo sapiens
MTRLDRSSHSGGGHAKGSRPLNSLLAGHRVAQPASAPGSRASVQDIDLIDILWRQDIDLGAGREVFDYSHRQKEQDVEKELRDGGEQDTWAGEGAEALARNLLVDGETGESFPAQFPADISSITEAVPSESEPPALQNNLLSPLLTGTESPFDLEQQWQDLMSIMEMQAMEVNTSASEILYSAPPGDPLSTNYSLAPNTPINQNVSLHQASLGGCSQDFLLFSPEVESLPVASSSTLLPLAPSNSTSLNSTFGSTNLTGLFFPPQLNGTANDTAGPELPDPLGGLLDEAMLDEISLMDLAIEEGFNPVQASQLEEEFDSDSGLSLDSSHSPSSLSSSEGSSSSSSSSSSSSSSASSSASSSFSEEGAVGYSSDSETLDLEEAEGAVGYQPEYSKFCRMSYQDPAQLSCLPYLEHVGHNHTYNMAPSALDSADLPPPSALKKGSKEKQADFLDKQMSRDEHRARAMKIPFTNDKIINLPVEEFNELLSKYQLSEAQLSLIRDIRRRGKNKMAAQNCRKRKLDTILNLERDVEDLQRDKARLLREKVEFLRSLRQMKQKVQSLYQEVFGRLRDENGRPYSPSQYALQYAGDGSVLLIPRTMADQQARRQERKPKDRRK

SEQ ID NO: 9350 - protein, 133 aa, Homo sapiens
SEEGAVGYSSDSETLDLEEAEGAVGYQPEYSKFCRMSYQDPAQLSCLPYLEHVGHNHTYNMAPSALDSADLPPPSALKKGSKEKQADFLDKQMSRDEHRARAMKIPFTNDKIINLPVEELCGAKADRGEGMDL

SEQ ID NO: 9351 - protein, 694 aa, Homo sapiens
MKHLKRWWSAGGGLLHLTLLLSLAGLRVDLDLYLLLPPPTLLQDELLFLGGPASSAYALSPFSASGGWGRAGHLHPKGRELDPAAPPEGQLLREVRALGVPFVPRTSVDAWLVHSVAAGSADEAHGLLGAAAASSTGGAGASVDGGSQAVQGGGGDPRAARSGPLDAGEEEKAPAEPTAQVPDAGGCASEENGVLREKHEAVDHSSQHEENEERVSAQKENSLQQNDDDENKIAEKPDWEAEKTTESRNERHLNGTDTSFSLEDLFQLLSSQPENSLEGISLGDIPLPGSISDGMNSSAHYHVNFSQAISQDVNLHEAILLCPNNTFRRDPTARTSQSQEPFLQLNSHTTNPEQTLPGTNLTGFLSPVDNHMRNLTSQDLLYDLDINIFDEINLMSLATEDNFDPIDVSQLFDEPDSDSGLSLDSSHNNTSVIKSNSSHSVCDEGAIGYCTDHESSSHHDLEGAVGGYYPEPSKLCHLDQSDSDFHGDLTFQHVFHNHTYHLQPTAPESTSEPFPWPGKSQKIRSRYLEDTDRNLSRDEQRAKALHIPFSVDEIVGMPVDSFNSMLSRYYLTDLQVSLIRDIRRRGKNKVAAQNCRKRKLDIILNLEDDVCNLQAKKETLKREQAQCNKAINIMKQKLHDLYHDIFSRLRDDQGRPVNPNHYALQCTHDGSILIVPKELVASGHKKETQKGKRK

SEQ ID NO: 9352 - protein, 83 aa, Homo sapiens
NEERVSAQKENSLQQNDDDENKIAEKPDWEAEKTTESRNERHLNGTDTSFSLEDLFQLLSSQPENSLEVIGTLAFILAGTYLH

SEQ ID NO: 9353 - protein, 238 aa, Homo sapiens
MELLAAAFSAACAVDHDSSTSESDARDSAAGHLPGSESSSTPGNGATPEEWPALADSPTTLTEALRMIHPIPADSWRNLIEQIGLLYQEYRDKSTLQEIETRRQQDAEIEDNTNGSPASEDTPEEEEEEEEEEEPASPPERKTLPQICLLSNPHSRFNLWQDLPEIRSSGVLEILQPEEIKLQEAMFELVTSEASYYKSLNLLVSHFMENERIRKILHPSEAHILFSNVLDVLAVSER

SEQ ID NO: 9354 - protein, 618 aa, Homo sapiens
MELLAAAFSAACAVDHDSSTSESDARDSAAGHLPGSESSSTPGNGATPEEWPALADSPTTLTEALRMIHPIPADSWRNLIEQIGLLYQEYRDKSTLQEIETRRQQDAEIEDNTNGSPASEDTPEEEEEEEEEEEPASPPERKTLPQICLLSNPHSRFNLWQDLPEIRSSGVLEILQPEEIKLQEAMFELVTSEASYYKSLNLLVSHFMENERIRKILHPSEAHILFSNVLDVLAVSERFLLELEHRMEENIVISDVCDIVYRYAADHFSVYITYVSNQTYQERTYKQLLQEKAAFRELIAQLELDPKCRGLPFSSFLILPFQRITRLKLLVQNILKRVEERSERECTALDAHKELEMVVKACNEGVRKMSRTEQMISIQKKMEFKIKSVPIISHSRWLLKQGELQQMSGPKTSRTLRTKKLFHEIYLFLFNDLLVICRQIPGDKYQVFDSAPRGLLRVEELEDQGQTLANVFILRLLENADDREATYMLKASSQSEMKRWMTSLAPNRRTKFVSFTSRLLDCPQVQCVHPYVAQQPDELTLELADILNILDKTDDGWIFGERLHDQERGWFPSSMTEEILNPKIRSQNLKECFRVHKMDDPQRSQNKDRRKLGSRNRQ

SEQ ID NO: 9355 - protein, 710 aa, Homo sapiens
METRESEDLEKTRRKSASDQWNTDNEPAKVKPELLPEKEETSQADQDIQDKEPHCHIPIKRNSIFNRSIRRKSKAKARDNPERNASCLADSQDNGKSVNEPLTLNIPWSRMPPCRTAMQTDPGAQEMSESSSTPGNGATPEEWPALADSPTTLTEALRMIHPIPADSWRNLIEQIGLLYQEYRDKSTLQEIETRRQQDAEIEDNTNGSPASEDTPEEEEEEEEEEEPASPPERKTLPQICLLSNPHSRFNLWQDLPEIRSSGVLEILQPEEIKLQEAMFELVTSEASYYKSLNLLVSHFMENERIRKILHPSEAHILFSNVLDVLAVSERFLLELEHRMEENIVISDVCDIVYRYAADHFSVYITYVSNQTYQERTYKQLLQEKAAFRELIAQLELDPKCRGLPFSSFLILPFQRITRLKLLVQNILKRVEERSERECTALDAHKELEMVVKACNEGVRKMSRTEQMISIQKKMEFKIKSVPIISHSRWLLKQGELQQMSGPKTSRTLRTKKLFHEIYLFLFNDLLVICRQIPGDKYQVFDSAPRGLLRVEELEDQGQTLANVFILRLLENADDREATYMLKASSQSEMKRWMTSLAPNRRTKFVSFTSRLLDCPQVQCVHPYVAQQPDELTLELADILNILDKTDDGWIFGERLHDQERGWFPSSMTEEILNPKIRSQNLKECFRVHKMDDPQRSQNKDRRKLGSRNRQ

SEQ ID NO: 9356 - protein, 187 aa, Homo sapiens
MFELVTSEASYYKSLNLLVSHFMENERIRKILHPSEAHILFSNVLDVLAVSERFLLELEHRMEENIVISDVCDIVYRYAADHFSVYITYVSNQTYQERTYKQLLQEKAAFRELIAQLELDPKCRGLPFSSFLILPFQRITRLKLLVQNILKRVEERSERECTALDAHKELEMVVKACNEGVRKMSRT

SEQ ID NO: 9357 - protein, 150 aa, Homo sapiens
MVVKACNEGVRKMSRTEQMISIQKKMEFKIKSVPIISHSRWLLKQGELQQMSGPKTSRTLRTKKLFHEIYLFLFNDLLVICRQIPGDKYQVFDSAPRGLLRVEELEDQGQTLANVFILRLLENADDREATYMLKASSQSEMKRWMTSLAP

SEQ ID NO: 9358 - protein, 97 aa, Homo sapiens
  VARIANT 1: note = misc_feature - Xaa can be any naturally occurring amino acid
XELLPEKEETSQADQDIQDKEPHCHIPIKRNSIFNRSIRRKSKAKARDNPERNASCLADSQDNGKSVNEPLTLNIPWSRMPPCRTAMQTDPGAQEMR

SEQ ID NO: 9359 - protein, 241 aa, Homo sapiens
MSMLFYTLITAFLIGIQAEPHSESNVPAGHTIPQAHWTKLQHSLDTALRRARSAPAAAIAARVAGQTRNITVDPRLFKKRRLRSPRVLFSTQPPREAADTQDLDFEVGGAAPFNRTHRSKRSSSHPIFHRGEFSVCDSVSVWVGDKTTATDIKGKEVMVLGEVNINNSVFKQYFFETKCRDPNPVDSGCRGIDSKHWNSYCTTTHTFVKALTMDGKQAAWRFIRIDTACVCVLSRKAVRRA

SEQ ID NO: 9360 - protein, 633 aa, Homo sapiens
AALGSSSGSASPAVAELCQNTPETFLEASKLLLTYADNILRNPNDEKYRSIRIGNTAFSTRLLPVRGAVECLFEMGFEEGETHLIFPKKASVEQLQKIRDLIAIERSSRLDGSNKSHKVKSSQQPAASTQLPTTPSSNPSGLNQHTRNRQGQSSDPPSASTVAADSAILEVLQSNIQHVLVYENPALQEKALACIPVQELKRKSQEKLSRARKLDKGINISDEDFLLLELLHWFKEEFFHWVNNVLCSKCGGQTRSRDRSLLPSDDELKWGAKEVEDHYCDACQFSNRFPRYNNPEKLLETRCGRCGEWANCFTLCCRAVGFEARYVWDYTELQRTLSLKLTTLKEIGKTFLRISKRQKLIQVVDVTWRYSCKHEEVIARRTKVKEALLRDTINGLNKQRQLFLSENRRKELLQRIIVELVEFISPKTPKPGELGGRISGSVAWRVARGEMGLQRKETLFIPCENEKISKQLHLCYNIVKDRYVRVSNNNQTISGWENGVWKMESIFRKVETDWHMVYLARKEGSSFAYISWKFECGSVGLKVDSISIRTSSQTFQTGTVEWKLRSDTAQVELTGDNSLHSYADFSGATEVILEAELSRGDGDVAWQHTQLFRQSLNDHEENCLEIIIKFSDL

SEQ ID NO: 9361 - protein, 654 aa, Homo sapiens [sequence omitted]

SEQ ID NO: 9362 - protein, 558 aa, Homo sapiens
MAAAALGSSSGSASPAVAELCQNTPETFLEASKLLLTYADNILRNPNDEKYRSIRIGNTAFSTRLLPVRGAVECLFEMGFEEGETHLIFPKKASVEQLQKIRDLIAIERSSRLDGSNKSHKVKSSQQPAASTQLPTTPSSNPSGLNQHTRNRQGQSSDPPSASTVAADSAILEVLQSNIQHVLVYENPALQEKALACIPVQELKRKSQEKLSRARKLDKGINISDEDFLLLELLHWFKEEFFHWVNNVLCSKCGGQTRSRDRSLLPSDDELKWGAKEVEDHYCDACQFSNRFPRYNNPEKLLETRCGRCGEWANCFTLCCRAVGFEARYVWDYTDHVWTEVYSPSQQRWLHCDACEDVCDKPLLYEIGWGKKLSYVIAFSKDEVVDVTWRYSCKHEEVIARRTKVKEALLRDTINGLNKQRQLFLSENRRKELLQRIIVELVEFISPKTPKPGELGGRISGSVAWRVARGEMGLQRKETLFIPCENEKISKQLHLCYNIVKDRYVRVSNNNQTISGWENGVWKMESIFRKVETDWHMITVFTPMLIFLVPLKLFWKQN

SEQ ID NO: 9363 - protein, 636 aa, Homo sapiens
MAAAALGSSSGSASPAVAELCQNTPETFLEASKLLLTYADNILRNPNDEKYRSIRIGNTAFSTRLLPVRGAVECLFEMGFEEGETHLIFPKKASVEQLQKIRDLIAIERSSRLDGSNKSHKVKSSQQPAASTQLPTTPSSNPSGLNQHTRNRQGQSSDPPSASTVAADSAILEVLQSNIQHVLVYENPALQEKALACIPVQELKRKSQEKLSRARKLDKGINISDEDFLLLELLHWFKEEFFHWVNNVLCSKCGGQTRSRDRSLLPSDDELKWGAKEVEDHYCDACQFSNRFPRYNNPEKLLETRCGRCGEWANCFTLCCRAVGFEARYVWDYTELQRTLSLKLTTLKEIGKTFLRISKRQKLIQVVDVTWRYSCKHEEVIARRTKVKEALLRDTINGLNKQRQLFLSENRRKELLQRIIVELVEFISPKTPKPGELGGRISGSVAWRVARGEMGLQRKETLFIPCENEKISKQLHLCYNIVKDRYVRVSNNNQTISGWENGVWKMESIFRKVETDWHMVYLARKEGSSFAYISWKFECGSVGLKVDSISIRTSSQTFQTGTVEWKLRSDTAQVELTGDNSLHSYADFSGATEVILEAELSRGDGDVAWQHTQLFRQSLNDHEENCLEIIIKFSDL

SEQ ID NO: 9364 - protein, 114 aa, Homo sapiens
MGFEEGETHLIFPKKASVEQLQKIRDLIAIERSSRLDGSNKSHKVKSSQQPAASTQLPTTPSSNPSGLNQHTRNRQGQSSDPPSASTVAADSAILEVLQSNIQHVLVYENPALQ

SEQ ID NO: 9365 - protein, 612 aa, Homo sapiens
MRNPNDEKYRSIRIGNTAFSTRLLPVRGAVECLFEMGFEEGETHLIFPKKASVEQLQKIRDLIAIERSSRLDGSNKSHKVKSSQQPAASTQLPTTPSSNPSGLNQHTRNRQGQSSDPPSASTVAADSAILEVLQSNIQHVLVYENPALQEKALACIPVQELKRKSQEKLSRARKLDKGINISDEDFLLLELLHWFKEEFFHWVNNVLCSKCGGQTRSRDRSLLPSDDELKWGAKEVEDHYCDACQFSNRFPRYNNPEKLLETRCGRCGEWANCFTLCCRAVGFEARYVWDYTDHVWTEVYSPSQQRWLHCDACEDVCDKPLLYEIGWGKKLSYVIAFSKDEVVDVTWRYSCKHEEVIARRTKVKEALLRDTINGLNKQRQLFLSENRRKELLQRIIVELVEFISPKTPKPGELGGRISGSVAWRVARGEMGLQRKETLFIPCENEKISKQLHLCYNIVKDRYVRVSNNNQTISGWENGVWKMESIFRKVETDWHMVYLARKEGSSFAYISWKFECGSVGLKVDSISIRTSSQTFQTGTVEWKLRSDTAQVELTGDNSLHSYADFSGATEVILEAELSRGDGDVAWQHTQLFRQSLNDHEENCLEIIIKFSDL

SEQ ID NO: 9366 - protein, 240 aa, Homo sapiens
  VARIANT 1: note = misc_feature - Xaa can be any naturally occurring amino acid
XSGSASPAVAELCQNTPETFLEASKLLLTYADNILRNPNDEKYRSIRIGNTAFSTRLLPVRGAVECLFEMGFEEGETHLIFPKKASVEQLQKIRDLIAIERSSRLDGSNKSHKVKSSQQPAASTQLPTTPSSNPSGLNQHTRNRQGQSSDPPSASTVAADSAILEVLQSNIQHVLVYENPALQEKALACIPVQELKRKSQEKLSRARKLDKDIITLRNFWKQDVDGVASGPIVLHCAAEL

SEQ ID NO: 9367 - protein, 23 aa, Homo sapiens
EAPGAPPRTLTWEAMEQIRYLSS

SEQ ID NO: 9368 - protein, 291 aa, Homo sapiens
MAVTLSLLLGGRVCAAVTRCGFATRGVAGPGPIGREPDPDSDWEPEERELQEVESTLKRQKQAIRFQKIRRQMEAPGAPPRTLTWEAMEQIRYLHEEFPESWSVPRLAEGFDVSTDVIRRVLKSKFLPTLEQKLKQDQKVLKKAGLAHSLQHLRGSGNTSKLLPAGHSVSGSLLMPGHEASSKDPNHSTALKVIESDTHRTNTPRRRKGRNKEIQDLEESFVPVAAPLGHPRELQKYSSDSESPRGTGSGALPSGQKLEELKAEEPDNFSSKVVQRGREFFDSNGNFLYRI

SEQ ID NO: 9369 - protein, 280 aa, Homo sapiens
MARFWVCVAGAGFFLAFLVLHSRFCGSPVLRNFTFAVSWRTEKILYRLDVGWPKHPEYFTGTTFCVAVDSLNGLVYIGQRGDNIPKILVFTEDGYFLRAWNYTVDTPHGIFAASTLYEQSVWITDVGSDFMILWLHGENGTGPAKFNIPHSVTLDSAGRVWVADRGNKRIQVFDKDTGEWLGAWNNCFTEEGPSSVRFTPDGKYLIVAQLNLSRLSVVAAPPVGSIGECSVISTIQLADQVLPHLLEVDRKTGAVYVAEIGAKQVQKYVPLNSYVPSFGS

SEQ ID NO: 9370 - protein, 347 aa, Homo sapiens
MARFWVCVAGAGFFLAFLVLHSRFCGSPVLRNFTFAVSWRTEKILYRLDVGWPKHPEYFTGTTFCVAVDSLNGLVYIGQRGDNIPKILVFTEDGYFLRAWNYTVDTPHGIFAASTLYEQSVWITDVGSGFFGHTVKKYSSFGDLVQVLGTPGKKGTSLNPLQFDNPAELYVEDTGDIYIVDGDGGLNNRLIKLSQDFMILWLHGENGTGPAKFNIPHSVTLDSAGRVWVADRGNKRIQVFDKDTGEWLGAWNNCFTEEGPSSVRFTPDGKYLIVAQLNLSRLSVVAAPPVGSIGECSVISTIQLADQVLPHLLEVDRKTGAVYVAEIGAKQVQKYVPLNSYVPSFGS

SEQ ID NO: 9371 - protein, 150 aa, Homo sapiens
MILWLHGENGTGPAKFNIPHSVTLDSAGRVWVADRGNKRIQVFDKDTGEWLGAWNNCFTEEGPSSVRFTPDGKYLIVAQLNLSRLSVVAAPPVGSIGECSVISTIQLADQVLPHLLEVDRKTGAVYVAEIGAKQVQKYVPLNSYVPSFGS

SEQ ID NO: 9372 - protein, 1247 aa, Homo sapiens
MLASSSRIRAAWTRALLLPLLLAGPVGCLSRQELFPFGPGQGDLELEDGDDFVSPALELSGALRFYDRSDIDAVYVTTNGIIATSEPPAKESHPGLFPPTFGAVAPFLADLDTTDGLGKVYYREDLSPSITQRAAECVHRGFPEISFQPSSAVVVTWESVAPYQGPSRDPDQKGKRNTFQAVLASSDSSSYAIFLYPEDGLQFHTTFSKKENNQVPAVVAFSQGSVGFLWKSNGAYNIFANDRESVENLAKSSNSGQQGVWVFEIGSPATTNGVVPADVILGTEDGAEYDDEDEDYDLATTRLGLEDVGTTPFSYKALRRGGADTYSVPSVLSPRRAATERPLGPPTERTRSFQLAVETFHQQHPQVIDVDEVEETGVVFSYNTDSRQTCANNRHQCSVHAECRDYATGFCCSCVAGYTGNGRQCVAEGSPQRVNGKVKGRIFVGSSQVPIVFENTDLHSYVVMNHGRSYTAISTIPETVGYSLLPLAPVGGIIGWMFAVEQDGFKNGFSITGGEFTRQAEVTFVGHPGNLVIKQRFSGIDEHGHLTIDTELEGRVPQIPFGSSVHIEPYTELYHYSTSVITSSSTREYTVTEPERDGASPSRIYTYQWRQTITFQECVHDDSRPALPSTQQLSVDSVFVLYNQEEKILRYALSNSIGPVREGSPDALQNPCYIGTHGCDTNAACRPGPRTQFTCECSIGFRGDGRTCYDIDECSEQPSVCGSHTICNNHPGTFRCECVEGYQFSDEGTCVAVVDQRPINYCETGLHNCDIPQRAQCIYTGGSSYTCSCLPGFSGDGQACQDVDECQPSRCHPDAFCYNTPGSFTCQCKPGYQGDGFRCVPGEVEKTRCQHEREHILGAAGATDPQRPIPPGLFVPECDAHGHYAPTQCHGSTGYCWCVDRDGREVEGTRTRPGMTPPCLSTVAPPIHQGPAVPTAVIPLPPGTHLLFAQTGKIERLPLEGNTMRKTEAKAFLHVPAKVIIGLAFDCVDKMVYWTDITEPSIGRASLHGGEPTTIIRQDLGSPEGIAVDHLGRNIFWTDSNLDRIEVAKLDGTQRRVLFETDLVNPRGIVTDSVRGNLYWTDWNRDNPKIETSYMDGTNRRILVQDDLGLPNGLTFDAFSSQLCWVDAGTNRAECLNPSQPSRRKALEGLQYPFAVTSYGKNLYFTDWKMNSVVALDLAISKETDAFQPHKQTRLYGITTALSQCPQGHNYCSVNNGGCTHLCLATPGSRTCRCPDNTLGVDCIEQK

SEQ ID NO: 9373 - protein, 1114 aa, Homo sapiens
MLASSSRIRAAWTRALLLPLLLAGPVGCLSRQELFPFGPGQGDLELEDGDDFVSPALELSGALRFYDRSDIDAVYVTTNGIIATSEPPAKESHPGLFPPTFGAVAPFLADLDTTDGLGKVYYREDLSPSITQRAAECVHRGFPEISFQPSSAVVVTWESVAPYQGPSRDPDQKGKRNTFQAVLASSDSSSYAIFLYPEDGLQFHTTFSKKENNQVPAVVAFSQGSVGFLWKSNGAYNIFANDRESVENLAKSSNSGQQGVWVFEIGSPATTNGVVPADVILGTEDGAEYDDEDEDYDLATTRLGLEDVGTTPFSYKALRRGGADTYSVPSVLSPRRAATERPLGPPTERTRSFQLAVETFHQQHPQVIDVDEVEETGVVFSYNTDSRQTCANNRHQCSVHAECRDYATGFCCSCVAGYTGNGRQCVAEGSPQRVNGKVKGRIFVGSSQVPIVFENTDLHSYVVMNHGRSYTAISTIPETVGYSLLPLAPVGGIIGWMFAVEQDGFKNGFSITGGEFTRQAEVTFVGHPGNLVIKQRFSGIDEHGHLTIDTELEGRVPQIPFGSSVHIEPYTELYHYSTSVITSSSTREYTVTEPERDGASPSRIYTYQWRQTITFQECVHDDSRPALPSTQQLSVDSVFVLYNQEEKILRYALSNSIGPVREGSPDALQNPCYIGTHGCDTNAACRPGPRTQFTCECSIGFRGDGRTCYEVEKTRCQHEREHILGAAGATDPQRPIPPGLFVPECDAHGHYAPTQCHGSTGYCWCVDRDGREVEGTRTRPGMTPPCLSTVAPPIHQGPAVPTAVIPLPPGTHLLFAQTGKIERLPLEGNTMRKTEAKAFLHVPAKVIIGLAFDCVDKMVYWTDITEPSIGRASLHGGEPTTIIRQDLGSPEGIAVDHLGRNIFWTDSNLDRIEVAKLDGTQRRVLFETDLVNPRGIVTDSVRGNLYWTDWNRDNPKIETSYMDGTNRRILVQDDLGLPNGLTFDAFSSQLCWVDAGTNRAECLNPSQPSRRKALEGLQYPFAVTSYGKNLYFTDWKMNSVVALDLAISKETDAFQPHKQTRLYGITTALSQCPQGHNYCSVNNGGCTHLCLATPGSRTCRCPDNTLGVDCIEQK

SEQ ID NO: 9374 - protein, 1375 aa, Homo sapiens
MEGDRVAGRPVLSSLPVLLLLPLLMLRAAALHPDELFPHGESWGDQLLQEGDDESSAVVKLANPLHFYEARFSNLYVGTNGIISTQDFPRETQYVDYDFPTDFPAIAPFLADIDTSHGRGRVLYREDTSPAVLGLAARYVRAGFPRSARFTPTHAFLATWEQVGAYEEVKRGALPSGELNTFQAVLASDGSDSYALFLYPANGLQFLGTRPKESYNVQLQLPARVGFCRGEADDLKSEGPYFSLTSTEQSVKNLYQLSNLGIPGVWAFHIGSTSPLDNVRPAAVGDLSAAHSSVPLGRSFSHATALESDYNEDNLDYYDVNEEEAEYLPGEPEEALNGHSSIDVSFQSKVDTKPLEESSTLDPHTKEGTSLGEVGGPDLKGQVEPWDERETRSPAPPEVDRDSLAPSWETPPPYPENGSIQPYPDGGPVPSEMDVPPAHPEEEIVLRSYPASGHTTPLSRGTYEVGLEDNIGSNTEVFTYNAANKETCEHNHRQCSRHAFCTDYATGFCCHCQSKFYGNGKHCLPEGAPHRVNGKVSGHLHVGHTPVHFTDVDLHAYIVGNDGRAYTAISHIPQPAAQALLPLTPIGGLFGWLFALEKPGSENGFSLAGAAFTHDMEVTFYPGEETVRITQTAEGLDPENYLSIKTNIQGQVPYVSANFTAHISPYKELYHYSDSTVTSTSSRDYSLTFGAINQTWSYRIHQNITYQVCRHAPRHPSFPTTQQLNVDRVFALYNDEERVLRFAVTNQIGPVKEDSDPTPGNPCYDGSHMCDTTARCHPGTGVDYTCECASGYQGDGRNCVDENECATGFHRCGPNSVCINLPGSYRCECRSGYEFADDRHTCILITPPANPCEDGSHTCAPAGQARCVHHGGSTFSCACLPGYAGDGHQCTDVDECSENRCHPAATCYNTPGSFSCRCQPGYYGDGFQCIPDSTSSLTPCEQQQRHAQAQYAYPGARFHIPQCDEQGNFLPLQCHGSTGFCWCVDPDGHEVPGTQTPPGSTPPHCGPSPEPTQRPPTICERWRENLLEHYGGTPRDDQYVPQCDDLGHFIPLQCHGKSDFCWCVDKDGREVQGTRSQPGTTPACIPTVAPPMVRPTPRPDVTPPSVGTFLLYTQGQQIGYLPLNGTRLQKDAAKTLLSLHGSIIVGIDYDCRERMVYWTDVAGRTISRAGLELGAEPETIVNSGLISPEGLAIDHIRRTMYWTDSVLDKIESALLDGSERKVLFYTDLVNPRAIAVDPIRGNLYWTDWNREAPKIETSSLDGENRRILINTDIGLPNGLTFDPFSKLLCWADAGTKKLECTLPDGTGRRVIQNNLKYPFSIVSYADHFYHTDWRRDGVVSVNKHSGQFTDEYLPEQRSHLYGITAVYPYCPTGRK

SEQ ID NO: 9375 - protein, 969 aa, Homo sapiens
MEGDRVAGRPVLSSLPVLLLLPLLMLRAAALHPDELFPHGESWGDQLLQEGDDESSAVVKLANPLHFYEARFSNLYVGTNGIISTQDFPRETQYVDYDFPTDFPAIAPFLADIDTSHGRGRVLYRVNGKVSGHLHVGHTPVHFTDVDLHAYIVGNDGRAYTAISHIPQPAAQALLPLTPIGGLFGWLFALEKPGSENGFSLAGAAFTHDMEVTFYPGEETVRITQTAEGLDPENYLSIKTNIQGQVPYVSANFTAHISPYKELYHYSDSTVTSTSSRDYSLTFGAINQTWSYRIHQNITYQVCRHAPRHPSFPTTQQLNVDRVFALYNDEERVLRFAVTNQIGPVKEDSDPTPGNPCYDGSHMCDTTARCHPGTGVDYTCECASGYQGDGRNCVDENECATGFHRCGPNSVCINLPGSYRCECRSGYEFADDRHTCILITPPANPCEDGSHTCAPAGQARCVHHGGSTFSCACLPGYAGDGHQCTDVDECSENRCHPAATCYNTPGSFSCRCQPGYYGDGFQCIPDSTSSLTPCEQQQRHAQAQYAYPGARFHIPQCDEQGNFLPLQCHGSTGFCWCVDPDGHEVPGTQTPPGSTPPHCGPSPEPTQRPPTICERWRENLLEHYGGTPRDDQYVPQCDDLGHFIPLQCHGKSDFCWCVDKDGREVQGTRSQPGTTPACIPTVAPPMVRPTPRPDVTPPSVGTFLLYTQGQQIGYLPLNGTRLQKDAAKTLLSLHGSIIVGIDYDCRERMVYWTDVAGRTISRAGLELGAEPETIVNSGLISPEGLAIDHIRRTMYWTDSVLDKIESALLDGSERKVLFYTDLVNPRAIAVDPIRGNLYWTDWNREAPKIETSSLDGENRRILINTDIGLPNGLTFDPFSKLLCWADAGTKKLECTLPDGTGRRVIQNNLKYPFSIVSYADHFYHTDWRRDGVVSVNKHSGQFTDEYLPEQRSHLYGITAVYPYCPTGRK

SEQ ID NO: 9376 - protein, 644 aa, Homo sapiens
  VARIANT 1: note = misc_feature - Xaa can be any naturally occurring amino acid
XYSLTFGAINQTWSYRIHQNITYQVCRHAPRHPSFPTTQQLNVDRVFALYNDEERVLRFAVTNQIGPVKEDSDPTPGNPCYDGSHMCDTTARCHPGTGVDYTCECASGYQGDGRNCVDENECATGFHRCGPNSVCINLPGSYRCECRSGYEFADDRHTCIYVDECSENRCHPAATCYNTPGSFSCRCQPGYYGDGFQCIPDSTSSLTPCEQQQRHAQAQYAYPGARFHIPQCDEQGNFLPLQCHGSTGFCWCVDPDGHEVPGTQTPPGSTPPHCGPSPEPTQRPPTICERWRENLLEHYGGTPRDDQYVPQCDDLGHFIPLQCHGKSDFCWCVDKDGREVQGTRSQPGTTPACIPTVAPPMVRPTPRPDVTPPSVGTFLLYTQGQQIGYLPLNGTRLQKDAAKTLLSLHGSIIVGIDYDCRERMVYWTDVAGRTISRAGLELGAEPETIVNSGLISPEGLAIDHIRRTMYWTDSVLDKIESALLDGSERKVLFYTDLVNPRAIAVDPIRGNLYWTDWNREAPKIETSSLDGENRRILINTDIGLPNGLTFDPFSKLLCWADAGTKKLECTLPDGTGRRVIQNNLKYPFSIVSYADHFYHTDWRRDGVVSVNKHSGQFTDEYLPEQRSHLYGITAVYPYCPTGRK

SEQ ID NO: 9377 - protein, 85 aa, Homo sapiens
MELCRSLALLGGSLGLMFCLIALSTDFWFEAVGPTHSAHSGLWPTGHGDIISGHGPLVSTTAAFAAGALSLGAHCGGPRPGYETL

SEQ ID NO: 9378 - protein, 142 aa, Homo sapiens
MELCRSLALLGGSLGLMFCLIALSTDFWFEAVGPTHSAHSGLWPTGHGDIISGHGPLVSTTAAFAAGKDSGLDWGIASQRIPAEELSHLSCPCPQPSPWWWPWRCTPASGGTSLHTPRSRPSSPGPSTWAGSQLSSCSVQVP

SEQ ID NO: 9379 - protein, 165 aa, Homo sapiens
MELCRSLALLGGSLGLMFCLIALSTDFWFEAVGPTHSAHSGLWPTGHGDIISGYIHVTQTFSIMAVLWALVSVSFLVLSCFPSLFPPGHGPLVSTTAAFAAAISMVVAMAVYTSERWDQPPHPQIQTFFSWSFYLGWVSAILLLCTGALSLGAHCGGPRPGYETL

SEQ ID NO: 9380 - protein, 72 aa, Homo sapiens
TGHGDIISAISMVVAMAVYTSERWDQPPHPQIQTFFSWSFYLGWVSAILLLCTGALSLGAHCGGPRPGYETL

SEQ ID NO: 9381 - protein, 89 aa, Homo sapiens
  VARIANT 1: note = misc_feature - Xaa can be any naturally occurring amino acid
XWPTGHGDIISGHGPLVSTTAAFAAAISMVVAMAVYTSERWDQPPHPQIQTFFSWSFYLGWVSAILLLCTGALSLGAHCGGPRPGYETL

SEQ ID NO: 9382 - protein, 351 aa, Homo sapiens
MLPVWFTANLDIVATYIQEPNEDCLYLNVYVPTEDGSGAKKQGEDLADNDGDEDEDIRDSGAKPVMVYIHGGSYMEGTGNMIDGSILASYGNVIVITLNYRVGVLGFLSTGDQAAKGNYGLLDQIQALRWVSENIAFFGGDPRRITVFGSGIGASCVSLLTLSHHSEGLFQRAIIQSGSALSSWAVNYQPVKYTSLLADKVGCNVLDTVDMVDCLRQKSAKELVEQDIQPARYHVAFGPVIDGDVIPDDPEILMEQGEFLNYDIMLGVNQGEGLKFVEGVVDPEDGVSGTDFDYSVSILWTICMAILRVRTPCERPSSSCIQTGQTVTTLRPAVKHWWHSSLTTSGWSPQW

SEQ ID NO: 9383 - protein, 513 aa, Homo sapiens
MWLRLGPPSLSLSPKPTVGRSLCLTLWFLSLALRASTQAPAPTVNTHFGKLRGARVPLPSEILGPVDQYLGVPYAAPPIGEKRFLPPEPPPSWSGIRNATHFPPVCPQNIHTAVPEVMLPVWFTANLDIVATYIQEPNEDCLYLNVYVPTEDDIRDSGAKPVMVYIHGGSYMEGTGNMIDGSILASYGNVIVITLNYRVGVLGFLSTGDQAAKGNYGLLDQIQALRWVSENIAFFGGDPRRITVFGSGIGASCVSLLTLSHHSEGLFQRAIIQSGSALSSWAVNYQPVKYTSLLADKVGCNVLDTVDMVDCLRQKSAKELVEQDIQPARYHVAFGPVIDGDVIPDDPEILMEQGEFLNYDIMLGVNQGEGLKFVEGVVDPEDGVSGTDFDYSVSNFVDNLYGYPEGKDTLRETIKFMYTDWADRDNPETRRKTLVALFTDHQWVEPSVVTADLHARYGSPTYFYAFYHHCQSLMKPAWSDAAHGDEVPYVFGVPMVGPTDLFPCNFSKNDVML

SEQ ID NO: 9384 - protein, 808 aa, Homo sapiens
MWLRLGPPSLSLSPKPTVGRSLCLTLWFLSLALRASTQAPAPTVNTHFGKLRGARVPLPSEILGPVDQYLGVPYAAPPIGEKRFLPPEPPPSWSGIRNATHFPPVCPQNIHTAVPEVMLPVWFTANLDIVATYIQEPNEDCLYLNVYVPTEDDIRDSGAKPVMVYIHGGSYMEGTGNMIDGSILASYGNVIVITLNYRVGVLGFLSTGDQAAKGNYGLLDQIQALRWVSENIAFFGGDPRRITVFGSGIGASCVSLLTLSHHSEGLFQRAIIQSGSALSSWAVNYQPVKYTSLLADKVGCNVLDTVDMVDCLRQKSAKELVEQDIQPARYHVAFGPVIDGDVIPDDPEILMEQGEFLNYDIMLGVNQGEGLKFVEGVVDPEDGVSGTDFDYSVSNFVDNLYGYPEGKDTLRETIKFMYTDWADRDNPETRRKTLVALFTDHQWVEPSVVTADLHARYGSPTYFYAFYHHCQSLMKPAWSDAAHGDEVPYVFGVPMVGPTDLFPCNFSKNDVMLSAVVMTYWTNFAKTGDPNKPVPQDTKFIHTKANRFEEVAWSKYNPRDQLYLHIGLKPRVRDHYRATKVAFWKHLVPHLYNLHDMFHYTSTTTKVPPPDTTHSSHITRRPNGKTWSTKRPAISPAYSNENAQGSWNGDQDAGPLLVENPRDYSTELSVTIAVGASLLFLNVLAFAALYYRKDKRRQEPLRQPSPQRGAGAPELGAAPEEELAALQLGPTHHECEAGPPHDTLRLTALPDYTLTLRRSPDDIPLMTPNTITMIPNSLVGLQTLHPYNTFAAGFNSTGLPHSHSTTRV

SEQ ID NO: 9385 - protein, 828 aa, Homo sapiens
MWLRLGPPSLSLSPKPTVGRSLCLTLWFLSLALRASTQAPAPTVNTHFGKLRGARVPLPSEILGPVDQYLGVPYAAPPIGEKRFLPPEPPPSWSGIRNATHFPPVCPQNIHTAVPEVMLPVWFTANLDIVATYIQEPNEDCLYLNVYVPTEDGSGAKKQGEDLADNDGDEDEDIRDSGAKPVMVYIHGGSYMEGTGNMIDGSILASYGNVIVITLNYRVGVLGFLSTGDQAAKGNYGLLDQIQALRWVSENIAFFGGDPRRITVFGSGIGASCVSLLTLSHHSEGLFQRAIIQSGSALSSWAVNYQPVKYTSLLADKVGCNVLDTVDMVDCLRQKSAKELVEQDIQPARYHVAFGPVIDGDVIPDDPEILMEQGEFLNYDIMLGVNQGEGLKFVEGVVDPEDGVSGTDFDYSVSNFVDNLYGYPEGKDTLRETIKFMYTDWADRDNPETRRKTLVALFTDHQWVEPSVVTADLHARYGSPTYFYAFYHHCQSLMKPAWSDAAHGDEVPYVFGVPMVGPTDLFPCNFSKNDVMLSAVVMTYWTNFAKTGDPNKPVPQDTKFIHTKANRFEEVAWSKYNPRDQLYLHIGLKPRVRDHYRATKVAFWKHLVPHLYNLHDMFHYTSTTTKVPPPDTTHSSHITRRPNGKTWSTKRPAISPAYSNENAQGSWNGDQDAGPLLVENPRDYSTELSVTIAVGASLLFLNVLAFAALYYRKDKRRQEPLRQPSPQRGAGAPELGAAPEEELAALQLGPTHHECEAGPPHDTLRLTALPDYTLTLRRSPDDIPLMTPNTITMIPNSLVGLQTLHPYNTFAAGFNSTGLPHSHSTTRV

SEQ ID NO: 9386 - protein, 848 aa, Homo sapiens
MWLRLGPPSLSLSPKPTVGRSLCLTLWFLSLALRASTQAPAPTVNTHFGKLRGARVPLPSEILGPVDQYLGVPYAAPPIGEKRFLPPEPPPSWSGIRNATHFPPVCPQNIHTAVPEVMLPVWFTANLDIVATYIQEPNEDCLYLNVYVPTEDVKRISKECARKPNKKICRKGGSGAKKQGEDLADNDGDEDEDIRDSGAKPVMVYIHGGSYMEGTGNMIDGSILASYGNVIVITLNYRVGVLGFLSTGDQAAKGNYGLLDQIQALRWVSENIAFFGGDPRRITVFGSGIGASCVSLLTLSHHSEGLFQRAIIQSGSALSSWAVNYQPVKYTSLLADKVGCNVLDTVDMVDCLRQKSAKELVEQDIQPARYHVAFGPVIDGDVIPDDPEILMEQGEFLNYDIMLGVNQGEGLKFVEGVVDPEDGVSGTDFDYSVSNFVDNLYGYPEGKDTLRETIKFMYTDWADRDNPETRRKTLVALFTDHQWVEPSVVTADLHARYGSPTYFYAFYHHCQSLMKPAWSDAAHGDEVPYVFGVPMVGPTDLFPCNFSKNDVMLSAVVMTYWTNFAKTGDPNKPVPQDTKFIHTKANRFEEVAWSKYNPRDQLYLHIGLKPRVRDHYRATKVAFWKHLVPHLYNLHDMFHYTSTTTKVPPPDTTHSSHITRRPNGKTWSTKRPAISPAYSNENAQGSWNGDQDAGPLLVENPRDYSTELSVTIAVGASLLFLNVLAFAALYYRKDKRRQEPLRQPSPQRGAGAPELGAAPEEELAALQLGPTHHECEAGPPHDTLRLTALPDYTLTLRRSPDDIPLMTPNTITMIPNSLVGLQTLHPYNTFAAGFNSTGLPHSHSTTRV

SEQ ID NO: 9387 - protein, 33 aa, Homo sapiens
MLRPQGLLWLPLLFTSVCVMLNSNVLLWITALA

SEQ ID NO: 9388 - protein, 816 aa, Homo sapiens
MLRPQGLLWLPLLFTSVCVMLNSNVLLWITALAIKFTLIDSQAQYPVVNTNYGKIQGLRTPLPSEILGPVEQYLGVPYASPPTGERRFQPPESPSSWTGIRNATQFSAVCPQHLDERFLLHDMLPIWFTTSLDTLMTYVQDQNEDCLYLNIYVPMEDDIHEQNSKKPVMVYIHGGSYMEGTGNMIDGSILASYGNVIVITINYRLGILGFLSTGDQAAKGNYGLLDQIQALRWIEENVGAFGGDPKRVTIFGSGAGASCVSLLTLSHYSEGLFQKAIIQSGTALSSWAVNYQPAKYTRILADKVGCNMLDTTDMVECLKNKNYKELIQQTITPATYHIAFGPVIDGDVIPDDPQILMEQGEFLNYDIMLGVNQGEGLKFVDGIVDNEDGVTPNDFDFSVSNFVDNLYGYPEGKDTLRETIKFMYTDWADKENPETRRKTLVALFTDHQWVAPAVATADLHAQYGSPTYFYAFYHHCQSEMKPSWADSAHGDEVPYVFGIPMIGPTELFSCNFSKNDVMLSAVVMTYWTNFAKTGDPNQPVPQDTKFIHTKPNRFEEVAWSKYNPKDQLYLHIGLKPRVRDHYRATKVAFWLELVPHLHNLNEIFQYVSTTTKVPPPDMTSFPYGTRRSPAKIWPTTKRPAITPANNPKHSKDPHKTGPEDTTVLIETKRDYSTELSVTIAVGASLLFLNILAFAALYYKKDKRRHETHRHPSPQRNTTNDITHIQNEEIMSLQMKQLEHDHECESLQAHDTLRLTCPPDYTLTLRRSPDDIPFMTPNTITMIPNTLMGMQPLHTFKTFSGGQNSTNLPHGHSTTRV

SEQ ID NO: 9389 - protein, 816 aa, Homo sapiens; identical to SEQ ID NO: 9388

SEQ ID NO: 9390 - protein, 873 aa, Homo sapiens
MLRPQGLLWLPLLFTSVCVMLNSNVLLWITALAIKFTLIDSQAQYPVVNTNYGKIQGLRTPLPSEILGPVEQYLGVPYASPPTGERRFQPPESPSSWTGIRNATQFSAVCPQHLDERFLLHDMLPIWFTTSLDTLMTYVQDQNEDCLYLNIYVPMEDGTNIKRNADDITSNDHGEDKDIHEQNSKKPVMVYIHGGSYMEGTGNMIDGSILASYGNVIVITINYRLGILAQNTLAHGNCKHRCQLHLQAPRDCKSAYPFRNEDEIRGFLSTGDQAAKGNYGLLDQIQALRWIEENVGAFGGDPKRVTIFGSGAGASCVSLLTLSHYSEGLFQKAIIQSGTALSSWAVNYQPAKYTRILADKVGCNMLDTTDMVECLKNKNYKELIQQTITPATYHIAFGPVIDGDVIPDDPQILMEQGEFLNYDIMLGVNQGEGLKFVDGIVDNEDGVTPNDFDFSVSNFVDNLYGYPEGKDTLRETIKFMYTDWADKENPETRRKTLVALFTDHQWVAPAVATADLHAQYGSPTYFYAFYHHCQSEMKPSWADSAHGDEVPYVFGIPMIGPTELFSCNFSKNDVMLSAVVMTYWTNFAKTGDPNQPVPQDTKFIHTKPNRFEEVAWSKYNPKDQLYLHIGLKPRVRDHYRATKVAFWLELVPHLHNLNEIFQYVSTTTKVPPPDMTSFPYGTRRSPAKIWPTTKRPAITPANNPKHSKDPHKTGPEDTTVLIETKRDYSTELSVTIAVGASLLFLNILAFAALYYKKDKRRHETHRHPSPQRNTTNDITHIQNEEIMSLQMKQLEHDHECESLQAHDTLRLTCPPDYTLTLRRSPDDIPFMTPNTITMIPNTLMGMQPLHTFKTFSGGQNSTNLPHGHSTTRV

SEQ ID NO: 9391 - protein, 836 aa, Homo sapiens
MLRPQGLLWLPLLFTSVCVMLNSNVLLWITALAIKFTLIDSQAQYPVVNTNYGKIQGLRTPLPSEILGPVEQYLGVPYASPPTGERRFQPPESPSSWTGIRNATQFSAVCPQHLDERFLLHDMLPIWFTTSLDTLMTYVQDQNEDCLYLNIYVPMEDGTNIKRNADDITSNDHGEDKDIHEQNSKKPVMVYIHGGSYMEGTGNMIDGSILASYGNVIVITINYRLGILGFLSTGDQAAKGNYGLLDQIQALRWIEENVGAFGGDPKRVTIFGSGAGASCVSLLTLSHYSEGLFQKAIIQSGTALSSWAVNYQPAKYTRILADKVGCNMLDTTDMVECLKNKNYKELIQQTITPATYHIAFGPVIDGDVIPDDPQILMEQGEFLNYDIMLGVNQGEGLKFVDGIVDNEDGVTPNDFDFSVSNFVDNLYGYPEGKDTLRETIKFMYTDWADKENPETRRKTLVALFTDHQWVAPAVATADLHAQYGSPTYFYAFYHHCQSEMKPSWADSAHGDEVPYVFGIPMIGPTELFSCNFSKNDVMLSAVVMTYWTNFAKTGDPNQPVPQDTKFIHTKPNRFEEVAWSKYNPKDQLYLHIGLKPRVRDHYRATKVAFWLELVPHLHNLNEIFQYVSTTTKVPPPDMTSFPYGTRRSPAKIWPTTKRPAITPANNPKHSKDPHKTGPEDTTVLIETKRDYSTELSVTIAVGASLLFLNILAFAALYYKKDKRRHETHRHPSPQRNTTNDITHIQNEEIMSLQMKQLEHDHECESLQAHDTLRLTCPPDYTLTLRRSPDDIPFMTPNTITMIPNTLMGMQPLHTFKTFSGGQNSTNLPHGHSTTRV

SEQ ID NO: 9392 - protein, 648 aa, Homo sapiens
MVYIHGGSYMEGTGNMIDGSILASYGNVIVITINYRLGILGFLSTGDQAAKGNYGLLDQIQALRWIEENVGAFGGDPKRVTIFGSGAGASCVSLLTLSHYSEGLFQKAIIQSGTALSSWAVNYQPAKYTRILADKVGCNMLDTTDMVECLKNKNYKELIQQTITPATYHIAFGPVIDGDVIPDDPQILMEQGEFLNYDIMLGVNQGEGLKFVDGIVDNEDGVTPNDFDFSVSNFVDNLYGYPEGKDTLRETIKFMYTDWADKENPETRRKTLVALFTDHQWVAPAVATADLHAQYGSPTYFYAFYHHCQSEMKPSWADSAHGDEVPYVFGIPMIGPTELFSCNFSKNDVMLSAVVMTYWTNFAKTGDPNQPVPQDTKFIHTKPNRFEEVAWSKYNPKDQLYLHIGLKPRVRDHYRATKVAFWLELVPHLHNLNEIFQYVSTTTKVPPPDMTSFPYGTRRSPAKIWPTTKRPAITPANNPKHSKDPHKTGPEDTTVLIETKRDYSTELSVTIAVGASLLFLNILAFAALYYKKDKRRHETHRHPSPQRNTTNDITHIQNEEIMSLQMKQLEHDHECESLQAHDTLRLTCPPDYTLTLRRSPDDIPFMTPNTITMIPNTLMGMQPLHTFKTFSGGQNSTNLPHGHSTTRV

SEQ ID NO: 9393 - protein, 236 aa, Homo sapiens
  VARIANT 1: note = misc_feature - Xaa can be any naturally occurring amino acid
XNSNVLLWITALAIKFTLIDSQAQYPVVNTNYGKIQGLRTPLPSEILGPVEQYLGVPYASPPTGERRFQPPESPSSWTGIRNATQFSAVCPQHLDERFLLHDMLPIWFTTSLDTLMTYVQDQNEDCLYLNIYVPMEDGTNIKRNADDITSNDHGEDKDIHEQNSKKPVMVYIHGGSYMEGTGNMIDGSILASYGNVIVITINYRLGILGMQEARLCGSSKMFNYFKSPFTNLINFF

SEQ ID NO: 9394 - protein, 178 aa, Homo sapiens
GPTCSILPKNPLFPQNLSSQPCIKMEGDKSLTFSSYGLQWCLYELDKEEFQTFKELLKKKSSESTTCSIPQFEIENANVECLALLLHEYYGASLAWATSISIFENMNLRTLSEKARDDMKRHSPEDPEATMTDQGPSKEKVPGISQAVQQDSATAAETKEQESFAVLLRLQCSGYPQA

SEQ ID NO: 9395 - protein, 1200 aa, Homo sapiens
MKVAGGLELGAAALLSASPRALVTLSTGPTCSILPKNPLFPQNLSSQPCIKMEGDKSLTFSSYGLQWCLYELDKEEFQTFKELLKKKSSESTTCSIPQFEIENANVECLALLLHEYYGASLAWATSISIFENMNLRTLSEKARDDMKRHSPEDPEATMTDQGPSKEKVPDISDSNNKHKYVGIHSSFAEISQAMEQEGATAAETEEQEISQAMEQEGATAAETEEQGHGGDTWDYKSHVMTKFAEEEDVRRSFENTAADWPEMQTLAGAFDSDRWGFRPRTVVLHGKSGIGKSALARRIVLCWAQGGLYQGMFSYVFFLPVREMQRKKESSVTEFISREWPDSQAPVTEIMSRPERLLFIIDGFDDLGSVLNNDTKLCKDWAEKQPPFTLIRSLLRKVLLPESFLIVTVRDVGTEKLKSEVVSPRYLLVRGISGEQRIHLLLERGIGEHQKTQGLRAIMNNRELLDQCQVPAVGSLICVALQLQDVVGESVAPFNQTLTGLHAAFVFHQLTPRGVVRRCLNLEERVVLKRFCRMAVEGVWNRKSVFDGDDLMVQGLGESELRALFHMNILLPDSHCEEYYTFFHLSLQDFCAALYYVLEGLEIEPALCPLYVEKTKRSMELKQAGFHIHSLWMKRFLFGLVSEDVRRPLEVLLGCPVPLGVKQKLLHWVSLLGQQPNATTPGDTLDAFHCLFETQDKEFVRLALNSFQEVWLPINQNLDLIASSFCLQHCPYLRKIRVDVKGIFPRDESAEACPVVPLWMRDKTLIEEQWEDFCSMLGTHPHLRQLDLGSSILTERAMKTLCAKLRHPTCKIQTLMFRNAQITPGVQHLWRIVMANRNLRSLNLGGTHLKEEDVRMACEALKHPKCLLESLRLDCCGLTHACYLKISQILTTSPSLKSLSLAGNKVTDQGVMPLSDALRVSQCALQKLILEDCGITATGCQSLASALVSNRSLTHLCLSNNSLGNEGVNLLCRSMRLPHCSLQRLMLNQCHLDTAGCGFLALALMGNSWLTHLSLSMNPVEDNGVKLLCEVMREPSCHLQDLELVKCHLTAACCESLSCVISRSRHLKSLDLTDNALGDGGVAALCEGLKQKNSVLARLGLKACGLTSDCCEALSLALSCNRHLTSLNLVQNNFSPKGMMKLCSAFACPTSNLQIIGLWKWQYPVQIRKLLEEVQLLKPRVVIDGSWHSFDEDDRYWWKN

SEQ ID NO: 9396 - protein, 1200 aa, Homo sapiens
MKVAGGLELGAAALLSASPRALVTLSTGPTCSILPKNPLFPQNLSSQPCIKMEGDKSLTFSSYGLQWCLYELDKEEFQTFKELLKKKSSESTTCSIPQFEIENANVECLALLLHEYYGASLAWATSISIFENMNLRTLSEKARDDMKRHSPEDPEATMTDQGPSKEKVPGISQAVQQDSATAAETKEQEISQAMEQEGATAAETEEQEISQAMEQEGATAAETEEQGHGGDTWDYKSHVMTKFAEEEDVRRSFENTAADWPEMQTLAGAFDSDRWGFRPRTVVLHGKSGIGKSALARRIVLCWAQGGLYQGMFSYVFFLPVREMQRKKESSVTEFISREWPDSQAPVTEIMSRPERLLFIIDGFDDLGSVLNNDTKLCKDWAEKQPPFTLIRSLLRKVLLPESFLIVTVRDVGTEKLKSEVVSPRYLLVRGISGEQRIHLLLERGIGEHQKTQGLRAIMNNRELLDQCQVPAVGSLICVALQLQDVVGESVAPFNQTLTGLHAAFVFHQLTPRGVVRRCLNLEERVVLKRFCRMAVEGVWNRKSVFDGDDLMVQGLGESELRALFHMNILLPDSHCEEYYTFFHLSLQDFCAALYYVLEGLEIEPALCPLYVEKTKRSMELKQAGFHIHSLWMKRFLFGLVSEDVRRPLEVLLGCPVPLGVKQKLLHWVSLLGQQPNATTPGDTLDAFHCLFETQDKEFVRLALNSFQEVWLPINQNLDLIASSFCLQHCPYLRKIRVDVKGIFPRDESAEACPVVPLWMRDKTLIEEQWEDFCSMLGTHPHLRQLDLGSSILTERAMKTLCAKLRHPTCKIQTLMFRNAQITPGVQHLWRIVMANRNLRSLNLGGTHLKEEDVRMACEALKHPKCLLESLRLDCCGLTHACYLKISQILTTSPSLKSLSLAGNKVTDQGVMPLSDALRVSQCALQKLILEDCGITATGCQSLASALVSNRSLTHLCLSNNSLGNEGVNLLCRSMRLPHCSLQRLMLNQCHLDTAGCGFLALALMGNSWLTHLSLSMNPVEDNGVKLLCEVMREPSCHLQDLELVKCHLTAACCESLSCVISRSRHLKSLDLTDNALGDGGVAALCEGLKQKNSVLARLGLKACGLTSDCCEALSLALSCNRHLTSLNLVQNNFSPKGMMKLCSAFACPTSNLQIIGLWKWQYPVQIRKLLEEVQLLKPRVVIDGSWHSFDEDDRYWWKN

SEQ ID NO: 9397 - protein, 154 aa, Homo sapiens
MARRAGGARMFGSLLLFALLAAGVAPLSWDLPEPRSRASKIRVHSRGNLWATGHFMGKKSLEPSSPSPLGTAPHTSLRDQRLQLSHDLLGILLLKKALGVSLSRPAPQIQEAAGTNTAEMTPIMGQTQQRGLDCAHPGKVLNGTLLMAPSGCKS

SEQ ID NO: 9398 - protein, 121 aa, Homo sapiens
MARRAGGARMFGSLLLFALLAAGVAPLSWDLPEPRSRASKIRVHSRGNLWATGHFMGKKSLEPSSPSPLGTAPHTSLRDQRLQLSHDLLGILLLKKALGVSLSRPAPQIQYRRLLVQILQK

SEQ ID NO: 9399 - protein, 82 aa, Homo sapiens
MANCERTFIAIKPDGVQRGLVGEIIKRFEQKGFRLVGLKFMQASEDLLKEHYVDLKDRPFFAGLVKYMHSGPVVAMLPDFLL

SEQ ID NO: 9400 - protein, 82 aa, Homo sapiens; identical to SEQ ID NO: 9399

SEQ ID NO: 9401 - protein, 152 aa, Homo sapiens
MANCERTFIAIKPDGVQRGLVGEIIKRFEQKGFRLVGLKFMQASEDLLKEHYVDLKDRPFFAGLVKYMHSGPVVAMVWEGLNVVKTGRVMLGETNPADSKPGTIRGDFCIQVGRNIIHGSDSVESAEKEIGLWFHPEELVDYTSCAQNWIYE

SEQ ID NO: 9402 - protein, 60 aa, Homo sapiens
MVLLSTLGIVFQGEGPPISSCDTGTMANCERTFIAIKPDGVQRGLVGEIIKRFEQKGFRL

SEQ ID NO: 9403 - protein, 139 aa, Homo sapiens
MVLLSTLGIVFQGEGPPISSCDTGTMANCERTFIAIKPDGVQRGLVGEIIKRFEQKGFRLVGLKFMQASEDLLKEHYVDLKDRPFFAGLVKYMHSGPVVAMVWEGLNVVKTGRVMLGETNPADSKPGTIRGDFCIQVGR

SEQ ID NO: 9404 - protein, 177 aa, Homo sapiens
MVLLSTLGIVFQGEGPPISSCDTGTMANCERTFIAIKPDGVQRGLVGEIIKRFEQKGFRLVGLKFMQASEDLLKEHYVDLKDRPFFAGLVKYMHSGPVVAMVWEGLNVVKTGRVMLGETNPADSKPGTIRGDFCIQVGRNIIHGSDSVESAEKEIGLWFHPEELVDYTSCAQNWIYE

SEQ ID NO: 9405 - protein, 177 aa, Homo sapiens; identical to SEQ ID NO: 9404

SEQ ID NO: 9406 - protein, 197 aa, Homo sapiens
MANCERTFIAIKPDGVQRGLVGEIIKRFEQKGFRLVGLKFMQASEDLLKEHYVDLKDRPFFAGLVKYMHSGPVVAMVWEGLNVVKTGRVMLGETNPADSKPGTIRGDFCIQVGRTMANLERTFIAIKPDGVQRGLVGEIIKRFEQKGFRLVAMKFLRASEEHLKQHYIDLKDRPFFPGLVKYMNSGPVVAMEHHSWQ

SEQ ID NO: 9407 - protein, 267 aa, Homo sapiens
MANCERTFIAIKPDGVQRGLVGEIIKRFEQKGFRLVGLKFMQASEDLLKEHYVDLKDRPFFAGLVKYMHSGPVVAMVWEGLNVVKTGRVMLGETNPADSKPGTIRGDFCIQVGRTMANLERTFIAIKPDGVQRGLVGEIIKRFEQKGFRLVAMKFLRASEEHLKQHYIDLKDRPFFPGLVKYMNSGPVVAMVWEGLNVVKTGRVMLGETNPADSKPGTIRGDFCIQVGRNIIHGSDSVKSAEKEISLWFKPEELVDYKSCAHDWVYE

SEQ ID NO: 9408 - protein, 292 aa, Homo sapiens
MVLLSTLGIVFQGEGPPISSCDTGTMANCERTFIAIKPDGVQRGLVGEIIKRFEQKGFRLVGLKFMQASEDLLKEHYVDLKDRPFFAGLVKYMHSGPVVAMVWEGLNVVKTGRVMLGETNPADSKPGTIRGDFCIQVGRTMANLERTFIAIKPDGVQRGLVGEIIKRFEQKGFRLVAMKFLRASEEHLKQHYIDLKDRPFFPGLVKYMNSGPVVAMVWEGLNVVKTGRVMLGETNPADSKPGTIRGDFCIQVGRNIIHGSDSVKSAEKEISLWFKPEELVDYKSCAHDWVYE

SEQ ID NO: 9409 - protein, 53 aa, Homo sapiens
FANLFPAACTGAHERTFLAVKPDGVQRRLVGEIVRRFERKGFKLVALKLVQAA

SEQ ID NO: 9410 - protein, 57 aa, Homo sapiens
IFANLFPAACTGAHERTFLAVKPDGVQRRLVGEIVRRFERKGFKRPDPSAGLRGAAA

SEQ ID NO: 9411 - protein, 85 aa, Homo sapiens
MASGPVVAMVWQGLDVVRTSRALIGATNPADAPPGTIRGDFCIEVGKNLIHGSDSVESARREIALWFRADELLCWEDSAGHWLYE

SEQ ID NO: 9412 - protein, 169 aa, Homo sapiens
MICLVLTIFANLFPAACTGAHERTFLAVKPDGVQRRLVGEIVRRFERKGFKLVALKLVQASEELLREHYAELRERPFYGRLVKYMASGPVVAMVWQGLDVVRTSRALIGATNPADAPPGTIRGDFCIEVGKNLIHGSDSVESARREIALWFRADELLCWEDSAGHWLYE

SEQ ID NO: 9413 - protein, 123 aa, Homo sapiens
PAACTGAHERTFLAVKPDGVQRRLVGEIVRRFERKGFKLVALKLVQVGARPPRSCCVSTTPSCVNARSTAALSSIWPPGRWWPWYGRGWTWCAPRGRSSEPRTRPTPRPAPSAGISASRLART

SEQ ID NO: 9414 - protein, 153 aa, Homo sapiens
MKHLRPQFPLILAIYCFCMLQIPSSGFPQPLADPSDGLDIVQLEQLAYCLSQWAPLSRQPKDNQDIYKRFLFHYSRTQEATHPVKTGFPPVHPLMHLAAKLANRRMKRILQRGSGTAAVDFTKKDHTATWGRPFFLFRPRNGRNIEDEAQIQW

SEQ ID NO: 9415 - protein, 158 aa, Homo sapiens
MLRTESCRPRSPAGQVAAASPLLLLLLLLAWCAGACRGAPILPQGLQPEQQLQLWNEASNALEELCFMIMGMLPKPQEQDEKDNTKRFLFHYSKTQKLGKSNVVSSVVHPLLQLVPHLHERRMKRFRVDEEFQSPFASQSRGYFLFRPRNGRRSAGFI

SEQ ID NO: 9416 - protein, 149 aa, Homo sapiens
MLRTESCRPRSPAGQVAAASPLLLLLLLLAWCAGACRGAPILPQGLQPEQQLQLWNEIDDTCSSFLSIDSQPQASNALEELCFMIMGMLPKPQEQDEKDNTKRFLFHYSKTQKLGKSNVVEEFQSPFASQSRGYFLFRPRNGRRSAGFI

SEQ ID NO: 9417 - protein, 174 aa, Homo sapiens
MLRTESCRPRSPAGQVAAASPLLLLLLLLAWCAGACRGAPILPQGLQPEQQLQLWNEIDDTCSSFLSIDSQPQASNALEELCFMIMGMLPKPQEQDEKDNTKRFLFHYSKTQKLGKSNVVSSVVHPLLQLVPHLHERRMKRFRVDEEFQSPFASQSRGYFLFRPRNGRRSAGFI

SEQ ID NO: 9418 - protein, 147 aa, Homo sapiens
MLRTESCRPRSPAGQVAAASPLLLLLLLLAWCAGACRGAPILPQGLQPEQQLQLWNEIDDTCSSFLSIDSQPQASNALEELCFMIMGMLPKPQSSVVHPLLQLVPHLHERRMKRFRVDEEFQSPFASQSRGYFLFRPRNGRRSAGFI

SEQ ID NO: 9419 - protein, 698 aa, Homo sapiens
MLPARLPFRLLSLFLRGSAPTAARHGLREPLLERRCAAASSFQHSSSLGRELPYDPVDTEGFGEGGDMQERFLFPEYILDPEPQPTREKQLQELQQQQEEEERQRQQRREERRQQNLRARSREHPVVGHPDPALPPSGVNCSGCGAELHCQDAGVPGYLPREKFLRTAEADGGLARTVCQRCWLLSHHRRALRLQVSREQYLELVSAALRRPGPSLVLYMVDLLDLPDALLPDLPALVGPKQLIVLGNKVDLLPQDAPGYRQRLRERLWEDCARAGLLLAPGHQGPQRPVKDEPQDGENPNPPNWSRTVVRDVRLISAKTGYGVEELISALQRSWRYRGDVYLVGATNAGKSTLFNTLLESDYCTAKGSEAIDRATISPWPGTTLNLLKFPICNPTPYRMFKRHQRLKKDSTQAEEDLSEQEQNQLNVLKKHGYVVGRVGRTFLYSEEQKDNIPFEFDADSLAFDMENDPVMGTHKSTKQVELTAQDVKDAHWFYDTPGITKENCILNLLTEKEVNIVLPTQSIVPRTFVLKPGMVLFLGAIGRIDFLQGNQSAWFTVVASNILPVHITSLDRADALYQKHAGHTLLQIPMGGKERMAGFPPLVAEDIMLKEGLGASEAVADIKFSSAGWVSVTPNFKDRLHLRGYTPEGTVLTVRPPLLPYIVNIKGQRIKKSVAYKTKKPPSLMYNVRKKKGKINV

SEQ ID NO: 9420 - protein, 292 aa, Homo sapiens
DQQLGIQTKDVAVDGQNWTFAFDFSFLSQQEDLAWAELRLQLSSPVDLPTEGSLAIEIFHQPKPDTEQASDSCLERFQMDLFTVTLSQVTFSLGSMVLEVTRPLSKWLKHPGALEKQMSRVAGECWPRPPTPPATNVLLMLYSNLSQEQRQLGGSTLLWEAESSWRAQEGQLSWEWGKRHRRHHLPDRSQLCRKVKFQVDFNLIGWGSWIIYPKQYNAYRCEGECPNPVGEEFHPTNHAYIQSLLKRYQPHRVPSTCCAPVKTKPLSMLYVDNGRVLLDHHKDMIVEECGCL

SEQ ID NO: 9421 - protein, 347 aa, Homo sapiens
MHAHCLPFLLHAWWALLQAGAATVATALLRTRGQPSSPSPLAYMLSLYRDPLPRADIIRSLQAEDVAVDGQNWTFAFDFSFLSQQEDLAWAELRLQLSSPVDLPTEGSLAIEIFHQPKPDTEQASDSCLERFQMDLFTVTLSQVTFSLGSMVLEVTRPLSKWLKHPGALEKQMSRVAGECWPRPPTPPATNVLLMLYSNLSQEQRQLGGSTLLWEAESSWRAQEGQLSWEWGKRHRRHHLPDRSQLCRKVKFQVDFNLIGWGSWIIYPKQYNAYRCEGECPNPVGEEFHPTNHAYIQSLLKRYQPHRVPSTCCAPVKTKPLSMLYVDNGRVLLDHHKDMIVEECGCL

SEQ ID NO: 9422 - protein, 232 aa, Homo sapiens
MERCPSLGVTLYALVVVLGLRATPAGGQHYLHIRPAPSDNLPLVDLIEHPDPIFDPKEKDLNETLLRSLLGGHYDPGFMATSPPEDRPGGGGGAAGGAEDLAELDQLLRQRPSGAMPSEIKGLEFSEGLAQGKKQRLSKKLRRKLQMWLWSQTFCPVLYAWNDLGSRFWPRYVKVGSCFSKRSCSVPEGMVCKPSKSVHLTVLRWRCQRRGGQRCGWIPIQYPIISECKCSC

SEQ ID NO: 9423 - protein, 138 aa, Homo sapiens
MLVGQGAGPLGPAVVTAAVVLLLSGVGPAHGSEDIVVGCGGFVKSDVEINYSLIEIKLYTKHGTLKYQTDCAPNNGYFMIPLYDKGDFILKIEPPLGWSFEPTTVELHVDGVSDICTKGGDINFVFTGFSVNGKVCIF

SEQ ID NO: 9424 - protein, 1267 aa, Homo sapiens
MLVGQGAGPLGPAVVTAAVVLLLSGVGPAHGSEDIVVGCGGFVKSDVEINYSLIEIKLYTKHGTLKYQTDCAPNNGYFMIPLYDKGDFILKIEPPLGWSFEPTTVELHVDGVSDICTKGGDINFVFTGFSVNGKVLSKGQPLGPAGVQVSLRNTGTEAKIQSTVTQPGGKFAFFKVLPGDYEILATHPTWALKEASTTVRVTNSNANAASPLIVAGYNVSGSVRSDGEPMKGVKFLLFSSLVTKEDVLGCNVSPVPGFQPQDESLVYLCYTVSREDGSFSFYSLPSGGYTVIPFYRGERITFDVAPSRLDFTVEHDSLKIEPVFHVMGFSVTGRVLNGPEGDGVPEAVVTLNNQIKVKTKADGSFRLENITTGTYTIHAQKEHLYFETVTIKIAPNTPQLADIVATGFSVCGQISIIRFPDTVKQMNKYKVVLSSQDKDKSLVTVETDAHGSFCFKANPGTYKVQVMVPEAETRAGLTLKPQTFPLTVTDRPVMDVAFVQFLASVSGKVSCLDTCGDLLVTLQSLSRQGEKRSLQLSGKVNAMTFTFDNVLPGKYKISIMHEDWCWKNKSLEVEVLEDDVSAVEFRQTGYMLRCSLSHAITLEFYQDGNGRENVGIYNLSKGVNRFCLSKPGVYKVTPRSCHRFEQAFYTYDTSSPSILTLTAIRHHVLGTITTDKMMDVTVTIKSSIDSEPALVLGPLKSVQELRREQQLAEIEARRQEREKNGNEEGEERMTKPPVQEMVDELQGPFSYDFSYWARSGEKITVTPSSKELLFYPPSMEAVVSGESCPGKLIEIHGKAGLFLEGQIHPELEGVEIVISEKGASSPLITVFTDDKGAYSVGPLHSDLEYTVTSQKEGYVLTAVEGTIGDFKAYALAGVSFEIKAEDDQPLPGVLLSLSGGLFRSNLLTQDNGILTFSNLSPGQYYFKPMMKEFRFEPSSQMIEVQEGQNLKITITGYRTAYSCYGTVSSLNGEPEQGVAMEAVGQNDCSIYGEDTVTDEEGKFRLRGLLPGCVYHVQLKAEGNDHIERALPHHRVIEVGNNDIDDVNIIVFRQINQFDLSGNVITSSEYLPTLWVKLYKSENLDNPIQTVSLGQSLFFHFPPLLRDGENYVVLLDSTLPRSQYDYILPQVSFTAVGYHKHITLIFNPTRKLPEQDIAQGSYIALPLTLLVLLAGYNHDKLIPLLLQLTSRLQGVGALGQAASDNSGPEDAKRQAKKQKTRRTLRLQEEFQLMWCLVPWRGTLGIHLFSSLPFASEILLETTATCIHY

SEQ ID NO: 9425 - protein, 1222 aa, Homo sapiens
MLVGQGAGPLGPAVVTAAVVLLLSGVGPAHGSEDIVVGCGGFVKSDVEINYSLIEIKLYTKHGTLKYQTDCAPNNGYFMIPLYDKGDFILKIEPPLGWSFEPTTVELHVDGVSDICTKGGDINFVFTGFSVNGKVLSKGQPLGPAGVQVSLRNTGTEAKIQSTVTQPGGKFAFFKVLPGDYEILATHPTWALKEASTTVRVTNSNANAASPLIVAGYNVSGSVRSDGEPMKGVKFLLFSSLVTKEDVLGCNVSPVPGFQPQDESLVYLCYTVSREDGSFSFYSLPSGGYTVIPFYRGERITFDVAPSRLDFTVEHDSLKIEPVFHVMGFSVTGRVLNGPEGDGVPEAVVTLNNQIKVKTKADGSFRLENITTGTYTIHAQKEHLYFETVTIKIAPNTPQLADIVATGFSVCGQISIIRFPDTVKQMNKYKVVLSSQDKDKSLVTVETDAHGSFCFKANPGTYKVQVMVPEAETRAGLTLKPQTFPLTVTDRPVMDVAFVQFLASVSGKVSCLDTCGDLLVTLQSLSRQGEKRSLQLSGKVNAMTFTFDNVLPGKYKISIMHEDWCWKNKSLEVEVLEDDVSAVEFRQTGYMLRCSLSHAITLEFYQDGNGRENVGIYNLSKGVNRFCLSKPGVYKVTPRSCHRFEQAFYTYDTSSPSILTLTAIRHHVLGTITTDKMMDVTVTIKSSIDSEPALVLGPLKSVQELRREQQLAEIEARRQEREKNGNEEGEERMTKPPVQEMVDELQGPFSYDFSYWARSGEKITVTPSSKELLFYPPSMEAVVSGESCPGKLIEIHGKAGLFLEGQIHPELEGVEIVISEKGASSPLITVFTDDKGAYSVGPLHSDLEYTVTSQKEGYVLTAVEGTIGDFKAYALAGVSFEIKAEDDQPLPGVLLSLSGGLFRSNLLTQDNGILTFSNLSPGQYYFKPMMKEFRFEPSSQMIEVQEGQNLKITITGYRTAYSCYGTVSSLNGEPEQGVAMEAVGQNDCSIYGEDTVTDEEGKFRLRGLLPGCVYHVQLKAEGNDHIERALPHHRVIEVGNNDIDDVNIIVFRQINQFDLSGNVITSSEYLPTLWVKLYKSENLDNPIQTVSLGQSLFFHFPPLLRDGENYVVLLDSTLPRSQYDYILPQVSFTAVGYHKHITLIFNPTRKLPEQDIAQGSYIALPLTLLVLLAGYNHDKLIPLLLQLTSRLQGVGALGQAASDNSGPEDAKRQAKKQKTRRT

SEQ ID NO: 9426 - protein, 61 aa, Homo sapiens
MLVGQGAGPLGPAVVTAAVVLLLSGVGPAHGSEDIVVGCGGFVKSDVEINYSLIEQVLNMH

SEQ ID NO: 9427 - protein, 95 aa, Homo sapiens
  VARIANT 1: note = misc_feature - Xaa can be any naturally occurring amino acid
XEDWCWKNKSLEVEVLEDDVSAVEFRQTGYMLRCSLSHAITLVQPYCSGEMCPGTSELKTPRNFIRMEMGVRMWGFITSPKESTDSACPSLVCTK

SEQ ID NO: 9428 - protein, 50 aa, Homo sapiens
  VARIANT 1: note = misc_feature - Xaa can be any naturally occurring amino acid
XSYIALPLTLLVLLAGYNHDKGHIRPGERPAHPWGLISKRPASFELKPTH

SEQ ID NO: 9429 - protein, 80 aa, Homo sapiens
  VARIANT 1: note = misc_feature - Xaa can be any naturally occurring amino acid
XTGYMLRCSLSHAITLVCTAYGVSYLEKRLPCGCQERLTSQEYCKRRNFIRMEMGVRMWGFITSPKESTDSACPSLVCTK

SEQ ID NO: 9430 - protein, 81 aa, Homo sapiens
MLQHISLLVKQVQELELKLSGQNAMGSQDSLLEITFRSGALPVLCDPTTPKPEDLHSPPLGAGLADFAHPAGSPLGRRDCL

SEQ ID NO: 9431 - protein, 349 aa, Homo sapiens
MPSKTKYNLVDDGHDLRIPLHNEDAFQHGICFEAKYVGSLDVPRPNSRVEIVAAMRRIRYEFKAKNIKKKKVSIMVSVDGVKVILKKKKKKKEWTWDESKMLVMQDPIYRIFYVSHDSQDLKIFSYIARDGASNIFRCNVFKSKKKSQAMRIVRTVGQAFEVCHKLSLQHTQQNADGQEDGESERNSNSSGDPGRQLTGAERASTATAEETDIDAVEVPLPGNDVLEFSRGVTDLDAVGKEGGSHTGSKVSHPQEPMLTASPRMLLPSSSSKPPGLGTETPLSTHHQMQLLQQLLQQQQQQTQVAVAQCVVGQIALVLSTAISMCLLLPNFSLALPSLLMEELESRYTC

SEQ ID NO: 9432 - protein, 501 aa, Homo sapiens
MPSKTKYNLVDDGHDLRIPLHNEDAFQHGICFEAKYVGSLDVPRPNSRVEIVAAMRRIRYEFKAKNIKKKKVSIMVSVDGVKVILKKKKKKKEWTWDESKMLVMQDPIYRIFYVSHDSQDLKIFSYIARDGASNIFRCNVFKSKKKSQAMRIVRTVGQAFEVCHKLSLQHTQQNADGQEDGESERNSNSSGDPGRQLTGAERASTATAEETDIDAVEVPLPGNDVLEFSRGVTDLDAVGKEGGSHTGSKVSHPQEPMLTASPRMLLPSSSSKPPGLGTETPLSTHHQMQLLQQLLQQQQQQTQVAVAQVHLLKDQLAAEAAARLEAQARVHQLLLQNKDMLQHISLLVKQVQELELKLSGQNAMGSQDSLLEITFRSGALPVLCDPTTPKPEDLHSPPLGAGLADFAHPAGSPLGRRDCLVKLECFRFLPPEDTPPPAQGEALLGGLELIKFRESGIASEYESNTDESEERDSWSQEELPRLLNVLQRQELGDGLDDEIAV

SEQ ID NO: 9433 - protein, 506 aa, Homo sapiens
MPSKTKYNLVDDGHDLRIPLHNEDAFQHGICFEAKYVGSLDVPRPNSRVEIVAAMRRIRYEFKAKNIKKKKVSIMVSVDGVKVILKKKKKLLLLQKKEWTWDESKMLVMQDPIYRIFYVSHDSQDLKIFSYIARDGASNIFRCNVFKSKKKSQAMRIVRTVGQAFEVCHKLSLQHTQQNADGQEDGESERNSNSSGDPGRQLTGAERASTATAEETDIDAVEVPLPGNDVLEFSRGVTDLDAVGKEGGSHTGSKVSHPQEPMLTASPRMLLPSSSSKPPGLGTETPLSTHHQMQLLQQLLQQQQQQTQVAVAQVHLLKDQLAAEAAARLEAQARVHQLLLQNKDMLQHISLLVKQVQELELKLSGQNAMGSQDSLLEITFRSGALPVLCDPTTPKPEDLHSPPLGAGLADFAHPAGSPLGRRDCLVKLECFRFLPPEDTPPPAQGEALLGGLELIKFRESGIASEYESNTDESEERDSWSQEELPRLLNVLQRQELGDGLDDEIAV

SEQ ID NO: 9434 - protein, 211 aa, Homo sapiens
MSLSSLCPVFSAAASSLQVHLLKDQLAAEAAARLEAQARVHQLLLQNKDMLQHISLLVKQVQELELKLSGQNAMGSQDSLLEITFRSGALPVLCDPTTPKPEDLHSPPLGAGLADFAHPAGSPLGRRDCLVKLECFRFLPPEDTPPPAQGEALLGGLELIKFRESGIASEYESNTDESEERDSWSQEELPRLLNVLQRQELGDGLDDEIAV

SEQ ID NO: 9435 - protein, 1286 aa, Homo sapiens
GPGARGRRRRRRPMSPPPPPPPVRALPLLLLLAGPGAAAPPCLDGSPCANGGRCTQLPSREAACLCPPGWVGERCQLEDPCHSGPCAGRGVCQSSVVAGTARFSCRCPRGFRGPDCSLPDPCLSSPCAHGARCSVGPDGRFLCSCPPGYQGRSCRSDVDECRVGEPCRHGGTCLNTPGSFRCQCPAGYTGPLCENPAVPCAPSPCRNGGTCRQSGDLTYDCACLPGFEGQNCEVNVDDCPGHRCLNGGTCVDGVNTYNCQCPPEWTGQFCTEDVDECQLQPNACHNGGTCFNTLGGHSCVCVNGWTGESCSQNIDDCATAVCFHGATCHDRVASFYCACPMGKTGLLCHLDDACVSNPCHEDAICDTNPVNGRAICTCPPGFTGGACDQDVDECSIGANPCEHLGRCVNTQGSFLCQCGRGYTGPRCETDVNECLSGPCRNQATCLDRIGQFTCICMAGFTGTYCEVDIDECQSSPCVNGGVCKDRVNGFSCTCPSGFSGSTCQLDVDECASTPCRNGAKCVDQPDGYECRCAEGFEGTLCDRNVDDCSPDPCHHGRCVDGIASFSCACAPGYTGTRCESQVDECRSQPCRHGGKCLDLVDKYLCRCPSGTTGVNCEVNIDDCASNPCTFGVCRDGINRYDCVCQPGFTGPLCNVEINECASSPCGEGGSCVDGENGFRCLCPPGSLPPLCLPPSHPCAHEPCSHGICYDAPGGFRCVCEPGWSGPRCSQSLARDACESQPCRAGGTCSSDGMGFHCTCPPGVQGRQCELLSPCTPNPCEHGGRCESAPGQLPVCSCPQGWQDPCLNGGSCQDGVGSFSCSCLPGFAGPRCARDVDECLSNPCGPGTCTDHVASFTCTCPPGYGGFHCEQDLPDCSPSSCFNGGTCVDGVNSFSCLCRPGYTGAHCQHEADPCLSRPCLHGGVCSAAHPGFRCTCLESFTGPQCQTLVDWCSRQPCQNGGRCVQTGAYCLCPPGWSGRLCDIRSLPCREAAAQIGVRLEQLCQAGGQCVDEDSSHYCVCPEGRTGSHCEQEVDPCLAQPCQHGGTCRGYMGGYMCECLPGYNGDNCEDDVDECASQPCQHGGSCIDLVARYLCSCPPGTLGVLCEINEDDCGPGPPLDSGPRCLHNGTCVDLVGGFRCTCPPGYTGLRCEADINECRSGACHAAHTRDCLQDPGGGFRCLCHAGFSGPRCQTVLSPCESQPCQHGGQCRPSPGPGGGLTFTCHCAQPFWGPRCERVARSCRELQCPVGVPCQQTPRGPRCACPPGLSGPSCRSFPGSPPGASNASC

SEQ ID NO: 9436 - protein, 2321 aa, Homo sapiens
MGPGARGRRRRRRPMSPPPPPPPVRALPLLLLLAGPGAAAPPCLDGSPCANGGRCTQLPSREAACLCPPGWVGERCQLEDPCHSGPCAGRGVCQSSVVAGTARFSCRCPRGFRGPDCSLPDPCLSSPCAHGARCSVGPDGRFLCSCPPGYQGRSCRSDVDECRVGEPCRHGGTCLNTPGSFRCQCPAGYTGPLCENPAVPCAPSPCRNGGTCRQSGDLTYDCACLPGFEGQNCEVNVDDCPGHRCLNGGTCVDGVNTYNCQCPPEWTGQFCTEDVDECQLQPNACHNGGTCFNTLGGHSCVCVNGWTGESCSQNIDDCATAVCFHGATCHDRVASFYCACPMGKTGLLCHLDDACVSNPCHEDAICDTNPVNGRAICTCPPGFTGGACDQDVDECSIGANPCEHLGRCVNTQGSFLCQCGRGYTGPRCETDVNECLSGPCRNQATCLDRIGQFTCICMAGFTGTYCEVDIDECQSSPCVNGGVCKDRVNGFSCTCPSGFSGSTCQLDVDECASTPCRNGAKCVDQPDGYECRCAEGFEGTLCDRNVDDCSPDPCHHGRCVDGIASFSCACAPGYTGTRCESQVDECRSQPCRHGGKCLDLVDKYLCRCPSGTTGVNCEVNIDDCASNPCTFGVCRDGINRYDCVCQPGFTGPLCNVEINECASSPCGEGGSCVDGENGFRCLCPPGSLPPLCLPPSHPCAHEPCSHGICYDAPGGFRCVCEPGWSGPRCSQSLARDACESQPCRAGGTCSSDGMGFHCTCPPGVQGRQCELLSPCTPNPCEHGGRCESAPGQLPVCSCPQGWQGPRCQQDVDECAGPAPCGPHGICTNLAGSFSCTCHGGYTGPSCDQDINDCDPNPCLNGGSCQDGVGSFSCSCLPGFAGPRCARDVDECLSNPCGPGTCTDHVASFTCTCPPGYGGFHCEQDLPDCSPSSCFNGGTCVDGVNSFSCLCRPGYTGAHCQHEADPCLSRPCLHGGVCSAAHPGFRCTCLESFTGPQCQTLVDWCSRQPCQNGGRCVQTGAYCLCPPGWSGRLCDIRSLPCREAAAQIGVRLEQLCQAGGQCVDEDSSHYCVCPEGRTGSHCEQEVDPCLAQPCQHGGTCRGYMGGYMCECLPGYNGDNCEDDVDECASQPCQHGGSCIDLVARYLCSCPPGTLGVLCEINEDDCGPGPPLDSGPRCLHNGTCVDLVGGFRCTCPPGYTGLRCEADINECRSGACHAAHTRDCLQDPGGGFRCLCHAGFSGPRCQTVLSPCESQPCQHGGQCRPSPGPGGGLTFTCHCAQPFWGPRCERVARSCRELQCPVGVPCQQTPRGPRCACPPGLSGPSCRSFPGSPPGASNASCAAAPCLHGGSCRPAPLAPFFRCACAQGWTGPRCEAPAAAPEVSEEPRCPRAACQAKRGDQRCDRECNSPGCGWDGGDCSLSVGDPWRQCEALQCWRLFNNSRCDPACSSPACLYDNFDCHAGGRERTCNPVYEKYCADHFADGRCDQGCNTEECGWDGLDCASEVPALLARGVLVLTVLLPPEELLRSSADFLQRLSAILRTSLRFRLDAHGQAMVFPYHRPSPGSEPRARRELAPEVIGSVVMLEIDNRLCLQSPENDHCFPDAQSAADYLGALSAVERLDFPYPLRDVRGEPLEPPEPSVPLLPLLVAGAVLLLVILVLGVMVARRKREHSTLWFPEGFSLHKDVASGHKGRREPVGQDALGMKNMAKGESLMGEVATDWMDTECPEAKRLKVEEPGMGAEEAVDCRQWTQHHLVAADIRVAPAMALTPPQGDADADGMDVNVRGPDGFTPLMLASFCGGALEPMPTEEDEADDTSASIISDLICQGAQLGARTDRTGETALHLAARYARADAAKRLLDAGADTNAQDHSGRTPLHTAVTADAQGVFQILIRNRSTDLDARMADGSTALILAARLAVEGMVEELIASHADVNAVDELGKSALHWAAAVNNVEATLALLKNGANKDMQDSKEETPLFLAAREGSYEAAKLLLDHFANREITDHLDRLPRDVAQERLHQDIVRLLDQPSGPRSPPGPHGLGPLLCPPGAFLPGLKAAQSGSKKSRRPPGKAGLGPQGPRGRGKKLTLACPGPLADSSVTLSPVDSLDSPRPFGGPPASPGGFPLEGPYAAATATAVSLAQLGGPGRAGLGRQPPGGCVLSLGLLNPVAVPLDWARLPPPAPPGPSFLLPLAPGPQLLNPGTPVSPQERPPPYLAVPGHGEEYPAAGAHSSPPKARFLRVPSEHPYLTPSPESPEHWASPSPPSLSDWSESTPSPATATGAMATTTGALPAQPLPLSVPSSLAQAQTQLGPQPEVTPKRQVLA

SEQ ID NO: 9437 - protein, 117 aa, Homo sapiens
  VARIANT 1: note = misc_feature - Xaa can be any naturally occurring amino acid
XLMGEVATDWMDTECPEAKRLKVEEPGMGAEEAVDCRQWTQHHLVAADIRVAPAMALTPPQGDADADGMDVNVRGPDSHPKPLYRLGCPHGRWLNGTDPGGPPGSRGHGGRAHRQPC

SEQ ID NO: 9438 - protein, 177 aa, Homo sapiens
  VARIANT 1: note = misc_feature - Xaa can be any naturally occurring amino acid
XQLGARTDRTGETALHLAARYARADAAKRLLDAGADTNAQDHSGRTPLHTAVTADAQGVFQILIRNRSTDLDARMADGSTALILAARLAVEGMVEELIASHADVNAVDELGKSALHWAAAVNNVEATLALLKNGANKDMQDSKVSPSPWSTGCQQWHSAIAIQPGQQSETLSKNKTK

SEQ ID NO: 9439 - protein, 295 aa, Homo sapiens
MGRGVRVLLLLSLLHCAGGSEGRKTWRRRGQQPPPPPRTEAAPAAGQPVESFPLDFTAVEGNMDSFMAQVKSLAQSLYPCSAQQLNEDLRLHLLLNTSVTCNDGSPAGYYLKESRGSRRWLLFLEGGWYCFNRENCDSRYDTMRRLMSSRDWPRTRTGTGILSSQPEENPYWWNANMVFIPYCSSDVWSGASSKSEKNEYAFMGALIIQEVVRELLGRGLSGAKVLLLAGSSAGGTGVLLNVDRVAEQLEKLGYPAIQVRGLADSGWFLDNKQYRHTDCVDTITCAPTEAIRRGI

SEQ ID NO: 9440 - protein, 496 aa, Homo sapiens
MGRGVRVLLLLSLLHCAGGSEGRKTWRRRGQQPPPPPRTEAAPAAGQPVESFPLDFTAVEGNMDSFMAQVKSLAQSLYPCSAQQLNEDLRLHLLLNTSVTCNDGSPAGYYLKESRGSRRWLLFLEGGWYCFNRENCDSRYDTMRRLMSSRDWPRTRTGTGILSSQPEENPYWWNANMVFIPYCSSDVWSGASSKSEKNEYAFMGALIIQEVVRELLGRGLSGAKVLLLAGSSAGGTGVLLNVDRVAEQLEKLGYPAIQVRGLADSGWFLDNKQYRHTDCVDTITCAPTEAIRRGIRYWNGVVPERCRRQFQEGEEWNCFFGYKVYPTLRCPVFVVQWLFDEAQLTVDNVHLTGQPVQEGLRLYIQNLGRELRHTLKDVPASFAPACLSHEIIIRSHWTDVQVKGTSLPRALHCWDRSLHDSHKASKTPLKGCPVHLVDSCPWPHCNPSCPTVRDQFTGQEMNVAQFLMHMGFDMQTVAQPQGLEPSELLGMLSNGS

SEQ ID NO: 9441 - protein, 197 aa, Homo sapiens
MRRLMSSRDWPRTRTGTGILSSQPEENPYWWNANMVFIPYCSSDVWSGASSKSEKNEYAFMGALIIQEVVRELLGRGLSGAKVLLLAGSSAGGTGVLLNVDRVAEQLEKLGYPAIQVRGLADSGWFLDNKQYRHTDCVDTITCAPTEAIRRGIRYWNGVVPERCRRQFQEGEEWNCFFGYKVYPTLRCPVFVVQWLF

SEQ ID NO: 9442 - protein, 357 aa, Homo sapiens
MQSVQSTSFCLRKQCLCLTFLLLHLLGQVAATQRCPPQCPGRCPATPPTCAPGVRAVLDGCSCCLVCARQRGESCSDLEPCDESSGLYCDRSADPSNQTGICTAVEGDNCVFDGVIYRSGEKFQPSCKFQCTCRDGQIGCVPRCQLDVLLPEPNCPAPRKVEVPGECCEKWICGPDEEDSLGGLTLAAYRPEATLGVEVSDSSVNCIEQTTEWTACSKSCGMGFSTRVTNRNRQCEMLKQTRLCMVRPCEQEPEQPTDKKGKKCLRTKKSLKAIHLQFKNCTSLHTYKPRFCGVCSDGRCCTPHNTKTIQAEFQCSPGQIVKKPVMVIGTCTCHTNCPKNNEAFLQELELKTTRGKM

SEQ ID NO: 9443 - protein, 125 aa, Homo sapiens
MARSATLAAAALALCLLLAPPGLAWYKPAAGHSSYSVGRAAGLLSGLRRSPYARRSQPYRGAEPPGGAGASPELQLHPRLRSLAVCVQDVAPNLQRCERLPDGRGTYQCKANVFLSLRAADCLAA

SEQ ID NO: 9444 - protein, 156 aa, Homo sapiens
MARSATLAAAALALCLLLAPPGLAWYKPAAGHSSYSVGRAAGLLSGLRRSPYARRSQPYRGAEPPGGAGASPELQLHPRLRSLVSPACRGLMGGGGRTWVGVRRPLSLCLPAPQAVCVQDVAPNLQRCERLPDGRGTYQCKANVFLSLRAADCLAA

SEQ ID NO: 9445 - protein, 53 aa, Homo sapiens
GAQHRCPGRTGAVQGLRFCGWSYKGSECEPMPHPTLPAEQRTVLQRQCHLHQQ

SEQ ID NO: 9446 - protein, 201 aa, Homo sapiens
MRFLAATFLLLALSTAAQAEPVQFKDCGSVDGVIKEVNVSPCPTQPCQLSKGQSYSVNVTFTSNIQSKSSKAVVHGILMGVPVPFPIPEPDGCKSGINCPIQKDKTYSYLNKLPVKSEYPSIKLVVEWQLQDDKNQSLFCWEIPVQIMFPCLFSAHCPMLATEHRCLQLQMETKSLRFWSRRGMSVWLPSPAGAWRRTAPF

SEQ ID NO: 9447 - protein, 151 aa, Homo sapiens
MRFLAATFLLLALSTAAQAEPVQFKDCGSVDGVIKEVNVSPCPTQPCQLSKGQSYSVNVTFTSNIQSKSSKAVVHGILMGVPVPFPIPEPDGCKSGINCPIQKDKTYSYLNKLPVKSEYPSIKLVVEWQLQDDKNQSLFCWEIPVQIVSHL

SEQ ID NO: 9448 - protein, 174 aa, Homo sapiens
MRFLAATFLLLALSTAAQAEPVQFKDCGSVDGVIKEVNVSPCPTQPCQLSKGQSYSVNVTFTSNIQSKSSKAVVHGILMGVPVPFPIPEPDGCKSGINCPIQKDKTYSYLNKLPVKSEYPSIKLVVEWQLQDDKNQSLFCWEIPVQIVSLSGGERAWVEGRKWRRNQTETKSVP

SEQ ID NO: 9449 - protein, 221 aa, Homo sapiens
MRFLAATFLLLALSTAAQAEPVQFKDCGSVDGVIKEVNVSPCPTQPCQLSKGQSYSVNVTFTSNIQSKSSKAVVHGILMGVPVPFPIPEPDGCKSGINCPIQKDKTYSYLNKLPVKSEYPSIKLVVEWQLQDDKNQSLFCWEIPVQIVSLSGGFSSLSASLSSVHLANESAETLDSTSSSAASTTVTCSPMVSSDSLKRRCSVAETELRVAGSQWLSHVSF

SEQ ID NO: 9450 - protein, 148 aa, Homo sapiens
MRFLAATFLLLALSTAAQAEPVQFKDCGSVDGVIKEVNVSPCPTQPCQLSKGQSYSVNVTFTSNIQSKSSKAVVHGILMGVPVPFPIPEPDGCKSGINCPIQKDKTYSYLNKLPVKSEYPSIKLVVEWQLQDDKNQSLFCWEIPVSHL

SEQ ID NO: 9451 - protein, 122 aa, Homo sapiens
MRFLAATFLLLALSTAAQAEPVQFKDCGSVDGVIKEVNVSPCPTQPCQLSKGQSYSVNVTFTSNIQSKSSKAVVHGILMGVPVPFPIPEPDGCKSGINCPIQKDKTYSYLNKLPVKSEYPSV

SEQ ID NO: 9452 - protein, 125 aa, Homo sapiens
MRFLAATFLLLALSTAAQAEPVQFKDCGSVDGVIKEVNVSPCPTQPCQLSKGQSYSVNVTFTSNIQSKSSKAVVHGILMGVPVPFPIPEPDGCKSGINCPIQKDKTYSYLNKLPVKSEYPSVSHL

SEQ ID NO: 9453 - protein, 173 aa, Homo sapiens
  VARIANT 1: note = misc_feature - Xaa can be any naturally occurring amino acid
XPLRVRPPTWTQLSVRRICPSPASGLEDDASRRAWGPREAVRSLRAREEGSVDGVIKEVNVSPCPTQPCQLSKGQSYSVNVTFTSNIQSKSSKAVVHGILMGVPVPFPIPEPDGCKSGINCPIQKDKTYSYLNKLPVKSEYPSIKLVVEWQLQDDKNQSLFCWEIPVQIVSHL

SEQ ID NO: 9454 - protein, 113 aa, Homo sapiens
MDSRQAAALLVLLLLIDGGCAEGPGGQQEDQLSAEEDSEPLPPQDAQTSGSLLHYLLQAMERPGRSQAFLFQPQRFGRNTQGSWRNEWLSPRAGEGLNSQFWSLAAPQRFGKK

SEQ ID NO: 9455 - protein, 423 aa, Homo sapiens
MFIMNEKWDTNSSENWHPIWNVNDTKHHLYSDINITYVNYYLHQPQVAAIFIISYFLIFFLCMMGNTVVCFIVMRNKHMHTVTNLFILNLAISDLLVGIFCMPITLLDNIIAGWPFGNTMCKISGLVQGISVAASVFTLVAIAVDRFQCVVYPFKPKLTIKTAFVIIMIIWVLAITIMSPSAVMLHVQEEKYYRVRLNSQNKTSPVYWCREDWPNQEMRKIYTTVLFANIYLAPLSLIVIMYGRIGISLFRAAVPHTGRKNQEQWHVVSRKKQKIIKMLLIVALLFILSWLPLWTLMMLSDYADLSPNELQIINIYIYPFAHWLAFGNSSVNPIIYGFFNENFRRGFQEAFQLQLCQKRAKPMEAYALKAKSHVLINTSNQLVQESTFQNPHGETLLYRKSAEKPQQELVMEELKETTNSSEI

SEQ ID NO: 9456 - protein, 420 aa, Homo sapiens
MNEKWDTNSSENWHPIWNVNDTKHHLYSDINITYVNYYLHQPQVAAIFIISYFLIFFLCMMGNTVVCFIVMRNKHMHTVTNLFILNLAISDLLVGIFCMPITLLDNIIAGWPFGNTMCKISGLVQGISVAASVFTLVAIAVDRFQCVVYPFKPKLTIKTAFVIIMIIWVLAITIMSPSAVMLHVQEEKYYRVRLNSQNKTSPVYWCREDWPNQEMRKIYTTVLFANIYLAPLSLIVIMYGRIGISLFRAAVPHTGRKNQEQWHVVSRKKQKIIKMLLIVALLFILSWLPLWTLMMLSDYADLSPNELQIINIYIYPFAHWLAFGNSSVNPIIYGFFNENFRRGFQEAFQLQLCQKRAKPMEAYALKAKSHVLINTSNQLVQESTFQNPHGETLLYRKSAEKPQQELVMEELKETTNSSEI

SEQ ID NO: 9457 - protein, 522 aa, Homo sapiens
MNSFFGTPAASWCLLESDVSSAPDKEAGRERRALSVQQRGGPAWSGSLEWSRQSAGDRRRLGLSRQTAKSSWSRSRDRTCCCRRAWWILVPAADRARRERFIMNEKWDTNSSENWHPIWNVNDTKHHLYSDINITYVNYYLHQPQVAAIFIISYFLIFFLCMMGNTVVCFIVMRNKHMHTVTNLFILNLAISDLLVGIFCMPITLLDNIIAGWPFGNTMCKISGLVQGISVAASVFTLVAIAVDRFQCVVYPFKPKLTIKTAFVIIMIIWVLAITIMSPSAVMLHVQEEKYYRVRLNSQNKTSPVYWCREDWPNQEMRKIYTTVLFANIYLAPLSLIVIMYGRIGISLFRAAVPHTGRKNQEQWHVVSRKKQKIIKMLLIVALLFILSWLPLWTLMMLSDYADLSPNELQIINIYIYPFAHWLAFGNSSVNPIIYGFFNENFRRGFQEAFQLQLCQKRAKPMEAYALKAKSHVLINTSNQLVQESTFQNPHGETLLYRKSAEKPQQELVMEELKETTNSSEI

SEQ ID NO: 9458 - protein, 132 aa, Homo sapiens
MNSFFGTPAASWCLLESDVSSAPDKEAGRERRALSVQQRGGPAWSGSLEWSRQSAGDRRRLGLSRQTAKSSWSRSRDRTCCCRRAWWILVPAADRARRERMAIWKHDVQDQWIGPGNICRSFSLYVSCNCCR

SEQ ID NO: 9459 - protein, 1201 aa, Homo sapiens
MALGTTLRASLLLLGLLTEGLAQLAIPASVPRGFWALPENLTVVEGASVELRCGVSTPGSAVQWAKDGLLLGPDPRIPGFPRYRLEGDPARGEFHLHIEACDLSDDAEYECQVGRSEMGPELVSPRVILSILVPPKLLLLTPEAGTMVTWVAGQEYVVNCVSGDAKPAPDITILLSGQTISDISANVNEGSQQKLFTVEATARVTPRSSDNRQLLVCEASSPALEAPIKASFTVNVLFPPGPPVIEWPGLDEGHVRAGQSLELPCVARGGNPLATLQWLKNGQPVSTAWGTEHTQAVARSVLVMTVRPEDHGAQLSCEAHNSVSAGTQEHGITLQVTFPPSAIIILGSASQTENKNVTLSCVSKSSRPRVLLRWWLGWRQLLPMEETVMDGLHGGHISMSNLTFLARREDNGLTLTCEAFSEAFTKETFKKSLILNVKYPAQKLWIEGPPEGQKLRAGTRVRLVCLAIGGNPEPSLMWYKDSRTVTESRLPQESRRVHLGSVEKSGSTFSRELVLVTGPSDNQAKFTCKAGQLSASTQLAVQFPPTNVTILANASALRPGDALNLTCVSVSSNPPVNLSWDKEGERLEGVAAPPRRAPFKGSAAARSVLLQVSSRDHGQRVTCRAHSAELRETVSSFYRLNVLYRPEFLGEQVLVVTAVEQGEALLPVSVSANPAPEAFNWTFRGYRLSPAGGPRHRILSSGALHLWNVTRADDGLYQLHCQNSEGTAEARLRLDVHYAPTIRALQDPTEVNVGGSVDIVCTVDANPILPGMFNWERLGEDEEDQSLDDMEKISRGPTGRLRIHHAKLAQAGAYQCIVDNGVAPPARRLLRLVVRFAPQVEHPTPLTKVAAAGDSTSSATLHCRARGVPNIVFTWTKNGVPLDLQDPRYTEHTYHQGGVHSSLLTIANVSAAQDYALFTCTATNALGSDQTNIQLVSISRPDPPSGLKVVSLTPHSVGLEWKPGFDGGLPQRFCIRYEALGTPGFHYVDVVPPQATTFTLTGLQPSTRYRVWLLASNALGDSGLADKGTQLPITTPGLHQPSGEPEDQLPTEPPSGISEKTEAGSEEDRVRNEYEESQWTGERDTQSSTVSTTEAEPYYRSLRDFSPQLPPTQEEVSYSRGFTGEDEDMAFPGHLYDEVERTYPPSGAWGPLYDEVQMGPWDLHWPEDTYQDPRGIYDQVAGDLDTLEPDSLPFELRGHLV

SEQ ID NO: 9460 - protein, 1241 aa, Homo sapiens
MALGTTLRASLLLLGLLTEGLAQLAIPASVPRGFWALPENLTVVEGASVELRCGVSTPGSAVQWAKDGLLLGPDPRIPGFPRYRLEGDPARGEFHLHIEACDLSDDAEYECQVGRSEMGPELVSPRVILSILVPPKLLLLTPEAGTMVTWVAGQEYVVNCVSGDAKPAPDITILLSGQTISDISANVNEGSQQKLFTVEATARVTPRSSDNRQLLVCEASSPALEAPIKASFTVNVLFPPGPPVIEWPGLDEGHVRAGQSLELPCVARGGNPLATLQWLKNGQPVSTAWGTEHTQAVARSVLVMTVRPEDHGAQLSCEAHNSVSAGTQEHGITLQVTFPPSAIIILGSASQTENKNVTLSCVSKSSRPRVLLRWWLGWRQLLPMEETVMDGLHGGHISMSNLTFLARREDNGLTLTCEAFSEAFTKETFKKSLILNVKYPAQKLWIEGPPEGQKLRAGTRVRLVCLAIGGNPEPSLMWYKDSRTVTESRLPQESRRVHLGSVEKSGSTFSRELVLVTGPSDNQAKFTCKAGQLSASTQLAVQFPPTNVTILANASALRPGDALNLTCVSVSSNPPVNLSWDKEGERLEGVAAPPRRAPFKGSAAARSVLLQVSSRDHGQRVTCRAHSAELRETVSSFYRLNVLYRPEFLGEQVLVVTAVEQGEALLPVSVSANPAPEAFNWTFRGYRLSPAGGPRHRILSSGALHLWNVTRADDGLYQLHCQNSEGTAEARLRLDVHYAPTIRALQDPTEVNVGGSVDIVCTVDANPILPGMFNWERLGEDEEDQSLDDMEKISRGPTGRLRIHHAKLAQAGAYQCIVDNGVAPPARRLLRLVVRFAPQVEHPTPLTKVAAAGDSTSSATLHCRARGVPNIVFTWTKNGVPLDLQDPRYTEHTYHQGGVHSSLLTIANVSAAQDYALFTCTATNALGSDQTNIQLVSISRPDPPSGLKVVSLTPHSVGLEWKPGFDGGLPQRFCIRYEALGTPGFHYVDVVPPQATTFTLTGLQPSTRYRVWLLASNALGDSGLADKGTQLPITTPGLHQPSGEPEDQLPTEPPSGPSGLPLLPVLFALGGLLLLSNASCVGGVLWQRRLRRLAEGISEKTEAGSEEDRVRNEYEESQWTGERDTQSSTVSTTEAEPYYRSLRDFSPQLPPTQEEVSYSRGFTGEDEDMAFPGHLYDEVERTYPPSGAWGPLYDEVQMGPWDLHWPEDTYQDPRGIYDQVAGDLDTLEPDSLPFELRGHLV

SEQ ID NO: 9461 - protein, 609 aa, Homo sapiens
MDFLLALVLVSSLYLQAAAEFDGRWPRQIVSSIGLCRYGGRIDCCWGWARQSWGQCQPFYVLRQRIARIRCQLKAVCQPRCKHGECIGPNKCKCHPGYAGKTCNQDEHIPAPLDQGSEQPLFQPLDHQATSLPSRDLNECGLKPRPCKHRCMNTYGSYKCYCLNGYMLMPDGSCSSALTCSMANCQYGCDVVKGQIRCQCPSPGLQLAPDGRTCVDVDECATGRASCPRFRQCVNTFGSYICKCHKGFDLMYIGGKYQCHDIDECSLGQYQCSSFARCYNIRGSYKCKCKEGYQGDGLTCVYIPKVMIEPSGPIHVPKGNGTILKGDTGNNNWIPDVGSTWWPPKTPYIPPIITNRPTSKPTTRPTPKPTPIPTPPPPPPLPTELRTPLPPTTPERPTTGLTTIAPAASTPPGGITVDNRVQTDPQKPRGDVFIPRQPSNDLFEIFEIERGVSADDEAKDDPGVLVHSCNFDHGLCGWIREKDNDLHWEPIRDPAGGQYLTVSAAKAPGGKAARLVLPLGRLMHSGDLCLSFRHKVTGLHSGTLQVFVRKHGAHGAALWGRNGGHGWRQTQITLRGADIKSVVFKGEKRRGHTGEIGLDDVSLKKGHCS

SEQ ID NO: 9462 - protein, 582 aa, Homo sapiens
MDFLLALVLVSSLYLQAAAEFDGRWPRQIVSSIGLCRYGGRIDCCWGWARQSWGQCQPFYVLRQRIARIRCQLKAVCQPRCKHGECIGPNKCKCHPGYAGKTCNQDLNECGLKPRPCKHRCMNTYGSYKCYCLNGYMLMPDGSCSSALTCSMANCQYGCDVVKGQIRCQCPSPGLQLAPDGRTCVDVDECATGRASCPRFRQCVNTFGSYICKCHKGFDLMYIGGKYQCHDIDECSLGQYQCSSFARCYNIRGSYKCKCKEGYQGDGLTCVYIPKVMIEPSGPIHVPKGNGTILKGDTGNNNWIPDVGSTWWPPKTPYIPPIITNRPTSKPTTRPTPKPTPIPTPPPPPPLPTELRTPLPPTTPERPTTGLTTIAPAASTPPGGITVDNRVQTDPQKPRGDVFIPRQPSNDLFEIFEIERGVSADDEAKDDPGVLVHSCNFDHGLCGWIREKDNDLHWEPIRDPAGGQYLTVSAAKAPGGKAARLVLPLGRLMHSGDLCLSFRHKVTGLHSGTLQVFVRKHGAHGAALWGRNGGHGWRQTQITLRGADIKSVVFKGEKRRGHTGEIGLDDVSLKKGHCSEER

SEQ ID NO: 9463 - protein, 595 aa, Homo sapiens
MDFLLALVLVSSLYLQAAAEFDGRWPRQIVSSIGLCRYGGRIDCCWGWARQSWGQCQPVCQPRCKHGECIGPNKCKCHPGYAGKTCNQDEHIPAPLDQGSEQPLFQPLDHQATSLPSRDLNECGLKPRPCKHRCMNTYGSYKCYCLNGYMLMPDGSCSSALTCSMANCQYGCDVVKGQIRCQCPSPGLQLAPDGRTCVDVDECATGRASCPRFRQCVNTFGSYICKCHKGFDLMYIGGKYQCHDIDECSLGQYQCSSFARCYNIRGSYKCKCKEGYQGDGLTCVYIPKVMIEPSGPIHVPKGNGTILKGDTGNNNWIPDVGSTWWPPKTPYIPPIITNRPTSKPTTRPTPKPTPIPTPPPPPPLPTELRTPLPPTTPERPTTGLTTIAPAASTPPGGITVDNRVQTDPQKPRGDVFIPRQPSNDLFEIFEIERGVSADDEAKDDPGVLVHSCNFDHGLCGWIREKDNDLHWEPIRDPAGGQYLTVSAAKAPGGKAARLVLPLGRLMHSGDLCLSFRHKVTGLHSGTLQVFVRKHGAHGAALWGRNGGHGWRQTQITLRGADIKSVVFKGEKRRGHTGEIGLDDVSLKKGHCSEER

SEQ ID NO: 9464 - protein, 566 aa, Homo sapiens
MDFLLALVLVSSLYLQAAAEFDGRWPRQIVSSIGLCRYGGRIDCCWGWARQSWGQCQPVCQPRCKHGECIGPNKCKCHPGYAGKTCNQDEHIPAPLDQGSEQPLFQPLDHQATSLPSRDLNECGLKPRPCKHRCMNTYGSYKCYCLNGYMLMPDGSCSSALTCSMANCQYGCDVVKGQIRCQCPSPGLQLAPDGRTCVDVDECATGRASCPRFRQCVNTFGSYICKCHKGFDLMYIGGKYQCHDIDECSLGQYQCSSFARCYNIRGSYKCKCKEGYQGDGLTCVYIPKVMIEPSGPIHVPKGNGTILKGDTGNNNWIPDVGSTWWPPKTPYIPPIITNRPTSKPTTRPTPKPTPIPTPPPPPPLPTELRTPLPPTTPERPTTGLTTIAPAASTPPGGITVDNRVQTDPQKPRGDVFSVLVHSCNFDHGLCGWIREKDNDLHWEPIRDPAGGQYLTVSAAKAPGGKAARLVLPLGRLMHSGDLCLSFRHKVTGLHSGTLQVFVRKHGAHGAALWGRNGGHGWRQTQITLRGADIKSVVFKGEKRRGHTGEIGLDDVSLKKGHCSEER

SEQ ID NO: 9465 - protein, 509 aa, Homo sapiens
MDFLLALVLVSSLYLQAAAEFDGRWPRQIVSSIGLCRYGGRIDCCWGWARQSWGQCQPVCQPRCKHGECIGPNKCKCHPGYAGKTCNQDLNECGLKPRPCKHRCMNTYGSYKCYCLNGYMLMPDGSCSSALTCSMANCQYGCDVVKGQIRCQCPSPGLQLAPDGRTCVDVDECATGRASCPRFRQCVNTFGSYICKCHKGFDLMYIGGKYQCHDIDECSLGQYQCSSFARCYNIRGSYKCKCKEGYQGDGLTCVYIPKVMIEPSGPIHVPKGNGTILKGDTGNNNWIPDVGSTWWPPKTPYIPPIITNRPTSKPTTRPTPKPTPIPTPPPPPPLPTELRTPLPPTTPERPTTGLTTIAPAASTPPGGITVDNRVQTDPQKPRGDVFSVLVHSCNFDHGLCGWIREKDNDLHWEPIRDPAGGQYLTVSAAKAPGGKAARLVLPLGRLMHSGDLCLSFRHKVTGLHSGTLQVFVRKHGAHGAALWGRNGGHGWRQTQITLRGADIKSESQR

SEQ ID NO: 9466 - protein, 565 aa, Homo sapiens
MDFLLALVLVSSLYLQAAAEFDGRWPRQIVSSIGLCRYGGRIDCCWGWARQSWGQCQPVCQPRCKHGECIGPNKCKCHPGYAGKTCNQDLNECGLKPRPCKHRCMNTYGSYKCYCLNGYMLMPDGSCSSALTCSMANCQYGCDVVKGQIRCQCPSPGLQLAPDGRTCVDVDECATGRASCPRFRQCVNTFGSYICKCHKGFDLMYIGGKYQCHDIDECSLGQYQCSSFARCYNIRGSYKCKCKEGYQGDGLTCVYIPKVMIEPSGPIHVPKGNGTILKGDTGNNNWIPDVGSTWWPPKTPYIPPIITNRPTSKPTTRPTPKPTPIPTPPPPPPLPTELRTPLPPTTPERPTTGLTTIAPAASTPPGGITVDNRVQTDPQKPRGDVFIPRQPSNDLFEIFEIERGVSADDEAKDDPGVLVHSCNFDHGLCGWIREKDNDLHWEPIRDPAGGQYLTVSAAKAPGGKAARLVLPLGRLMHSGDLCLSFRHKVTGLHSGTLQVFVRKHGAHGAALWGRNGGHGWRQTQITLRGADIKSVVFKGEKRRGHTGEIGLDDVSLKKGHCSEER

SEQ ID NO: 9467 - protein, 536 aa, Homo sapiens
MDFLLALVLVSSLYLQAAAEFDGRWPRQIVSSIGLCRYGGRIDCCWGWARQSWGQCQPVCQPRCKHGECIGPNKCKCHPGYAGKTCNQDLNECGLKPRPCKHRCMNTYGSYKCYCLNGYMLMPDGSCSSALTCSMANCQYGCDVVKGQIRCQCPSPGLQLAPDGRTCVDVDECATGRASCPRFRQCVNTFGSYICKCHKGFDLMYIGGKYQCHDIDECSLGQYQCSSFARCYNIRGSYKCKCKEGYQGDGLTCVYIPKVMIEPSGPIHVPKGNGTILKGDTGNNNWIPDVGSTWWPPKTPYIPPIITNRPTSKPTTRPTPKPTPIPTPPPPPPLPTELRTPLPPTTPERPTTGLTTIAPAASTPPGGITVDNRVQTDPQKPRGDVFSVLVHSCNFDHGLCGWIREKDNDLHWEPIRDPAGGQYLTVSAAKAPGGKAARLVLPLGRLMHSGDLCLSFRHKVTGLHSGTLQVFVRKHGAHGAALWGRNGGHGWRQTQITLRGADIKSVVFKGEKRRGHTGEIGLDDVSLKKGHCSEER

SEQ ID NO: 9468 - protein, 61 aa, Homo sapiens
MNTYGSYKCYCLNGYMLMPDGSCSSALTCSMANCQYGCDVVKGQIRCQCPSPGLQLAPDGR

SEQ ID NO: 9469 - protein, 104 aa, Homo sapiens
  VARIANT 1: note = misc_feature - Xaa can be any naturally occurring amino acid
XGLCGWIREKDNDLHWEPIRDPAGITKMIKGLEKKIYDGKLKELGLLSLEKRRLRGKPLMVFKYMKGWHREGGDQLFSICTKNRTRGNWLRLEYKGAFLGRGHC

SEQ ID NO: 9470 - protein, 26 aa, Homo sapiens
  VARIANT 1: note = misc_feature - Xaa can be any naturally occurring amino acid
XNDLHWEPIRDPADNCSCLHAGGLDL

SEQ ID NO: 9471 - protein, 453 aa, Homo sapiens
  VARIANT 1: note = misc_feature - Xaa can be any naturally occurring amino acid
XWPRQIVSSIGLCRYGGRIDCCWGWARQSWGQCQPVCQPRCKHGECIGPNKCKCHPGYAGKTCNQDLNECGLKPRPCKHRCMNTYGSYKCYCLNGYMLMPDGSCSSALTCSMANCQYGCDVVKGQIRCQCPSPGLQLAPDGRTCVDVDECATGRASCPRFRQCVNTFGSYICKCHKGFDLMYIGGKYQCHDIDECSLGQYQCSSFARCYNIRGSYKCKCKEGYQGDGLTCVYIPKVMIEPSGPIHVPKGNGTILKGDTGNNNWIPDVGSTWWPPKTPYIPPIITNRPTSKPTTRPTPKPTPIPTPPPPPPLPTELRTPLPPTTPERPTTGLTTIAPAASTPPGGITVDNRVQTDPQKPRGDVFIPRQPSNDLFEIFEIERGVSADDEAKDDPGVLVHSCNFDHGLCGWIREKDNDLHWEPIRDPAEILQGTQFREIFIGCILSASCVTSYLGC

SEQ ID NO: 9472 - protein, 101 aa, Homo sapiens
MPLEDEVVPPQVLSEPNEEAGAALSPLPEVPPWTGEVSPAQRDGGALGRGPWDSSDRSALLKSKLRALLTAPRSLRRSSCFGGRMDRIGAQSGLGCNSFRY

SEQ ID NO: 9473 - protein, 151 aa, Homo sapiens
MSSFSTTTVSFLLLLAFQLLGQTRANPMYNAVSNADLMDFKNLLDHLEEKMPLEDEVVPPQVLSEPNEEAGAALSPLPEVPPWTGEVSPAQRDGGALGRGPWDSSDRSALLKSKLRALLTAPRSLRRSSCFGGRMDRIGAQSGLGCNSFRY

SEQ ID NO: 9474 - protein, 152 aa, Homo sapiens [sequence omitted]

SEQ ID NO: 9475 - protein, 134 aa, Homo sapiens
MDPQTAPSRALLLLLFLHLAFLGGRSHPLGSPGSASDLETSGLQEQRNHLQGKLSELQVEQTSLEPLQESPRPTGVWKSREVATEGIRGHRKMVLYTLRAPRSPKMVQGSGCFGRKMDRISSSSGLGCKVLRRH

SEQ ID NO: 9476 - protein, 126 aa, Homo sapiens
MHLSQLLACALLLTLLSLRPSEAKPGAPPKVPRTPPAEELAEPQAAGGGQKKGDKAPGGGGANLKGDRSRLLRDLRVDTKSRAAWARLLQEHPNARKYKGANKKGLSKGCFGLKLDRIGSMSGLGC

SEQ ID NO: 9477 - protein, 126 aa, Homo sapiens; identical to SEQ ID NO: 9476

SEQ ID NO: 9478 - protein, 89 aa, Homo sapiens
MISSVKLNLILVLSLSTMHVFWCYPVPSSKVSGKSDYFLILLNSCPTRLDRSKELAFLKPILEKMFVKRSFRNGVGTGMKKTSFQRAKS

SEQ ID NO: 9479 - protein, 432 aa, Homo sapiens
MPAGRAARTCALLALCLLGAGAQDFGPTRFICTSVPVDADMCAASVAAGGAEELRSSVLQLRETVLQQKETILSQKETIRELTAKLGRCESQSTLDPGAGEARAGGGRKQPGSGKNTMGDLSRTPAAETLSQLGQTLQSLKTRLENLEQYSRLNSSSQTNSLKDLLQSKIDELERQVLSRVNTLEEGKGGPRNDTEERVKIETALTSLHQRISELEKGQKDNRPGDKFQLTFPLRTNYMYAKVKKSLPEMYAFTVCMWLKSSATPGVGTPFSYAVPGQANELVLIEWGNNPMEILINDKVAKLPFVINDGKWHHICVTWTTRDGVWEAYQDGTQGGSGENLAPYHPIKPQGVLVLGQEQDTLGGGFDATQAFVGELAHFNIWDRKLTPGEVYNLATCSTKALSGNVIAWAESHIEIYGGATKWTFEACRQIN

SEQ ID NO: 9480 - protein, 431 aa, Homo sapiens
MLALLAASVALAVAAGAQDSPAPGSRFVCTALPPEAVHAGCPLPAMPMQGGAQSPEEELRAAVLQLRETVVQQKETLGAQREAIRELTGKLARCEGLAGGKARGAGATGKDTMGDLPRDPGHVVEQLSRSLQTLKDRLESLEHQLRANVSNAGLPGDFREVLQQRLGELERQLLRKVAELEDEKSLLHNETSAHRQKTESTLNALLQRVTELERGNSAFKSPDAFKVSLPLRTNYLYGKIKKTLPELYAFTICLWLRSSASPGIGTPFSYAVPGQANEIVLIEWGNNPIELLINDKVAQLPLFVSDGKWHHICVTWTTRDGMWEAFQDGEKLGTGENLAPWHPIKPGGVLILGQEQDTVGGRFDATQAFVGELSQFNIWDRVLRAQEIVNIANCSTNMPGNIIPWVDNNVDVFGGASKWPVETCEERLLDL

SEQ ID NO: 9481 - protein, 500 aa, Homo sapiens
LKFLAVLLAAGMLAFLGAVICIIASVPLAASPARALPGGADNASVASGAAASPGPQRSLSALHGAGGSAGPPALPGAPAASAHPLPPGPLFSRFLCTPLAAACPSGAQQGDAAGAAPGEREELLLLQSTAEQLRQTALQQEARIRADQDTIRELTGKLGRCESGLPRGLQGAGPRRDTMADGPWDSPALILELEDAVRALRDRIDRLEQELPARVNLSAAPAPVSAVPTGLHSKMDQLEGQLLAQVLALEKERVALSHSSRRQRQEVEKELDVLQGRVAELEHGSSAYSPPDAFKISIPIRNNYMYARVRKALPELYAFTACMWLRSRSSGTGQGTPFSYSVPGQANEIVLLEAGHEPMELLINDKVAQLPLSLKDNGWHHICIAWTTRDGLWSAYQDGELQGSGENLAAWHPIKPHGILILGQEQDTLGGRFDATQAFVGDIAQFNLWDHALTPAQVLGIANCTAPLLGNVLPWEDKLVEAFGGATKAAFDVCKGRAKA

SEQ ID NO: 9482 - protein, 500 aa, Homo sapiens; identical to SEQ ID NO: 9481

SEQ ID NO: 9483 - protein, 196 aa, Homo sapiens
MEIISSKLFILLTLATSSLLTSNIFCADELVMSNLHSKENYDKYSEPRGYPKGERSLNFEELKDWGPKNVIKMSTPAVNKMPHSFANLPLRFGRNVQEERSAGATANLPLRSGRNMEVSLVRRVPNLPQRFGRTTTAKSVCRMLSDLCQGSMHSPCANDLFYSMTCQHQEIQNPDQKQSRRLLFKKIDDAELKQEK

SEQ ID NO: 9484 - protein, 165 aa, Homo sapiens
LAWRPGERGAPASRPRLALLLLLLLLPLPSGAWYKHVASPRYHTVGRAAGLLMGLRRSPYLWRRALRAAAGPLARDTLSPEPAAREAPLLLPSWVQELWETRRRSSQAGIPVRAPRSPRAPEPALEPESLDFSGAGQRLRRDVSRPAVDPAANRLGLPCLAPGPF

SEQ ID NO: 9485 - protein, 113 aa, Homo sapiens
MGLRRSPYLWRRALRAAAGPLARDTLSPEPAAREAPLLLPSWVQELWETRRRSSQAGIPVRAPRSPRAPEPALEPESLDFSGAGQRLRRDVSRPAVDPAANRLGLPCLAPGPF

SEQ ID NO: 9486 - protein, 128 aa, Homo sapiens
MSRPLEGPRGHAASPGLLWATRVTSTLAGLHELALSDETRHNWFASQMNKGSCLSPARLLSCCPRGFRSCGRRDAGAPRQGSPSVRPGARAPQSLRWNRSPWTSAELARDFGETSPAQRWTPQQTALA

SEQ ID NO: 9487 - protein, 97 aa, Homo sapiens
MLGNKRLGLSGLTLALSLLVCLGALAEAYPSKPDNPGEDAPAEDMARYYSALRHYINLITRQRYGKRSSPETLISDLLMRESTENVPRTRLEDPAMW

SEQ ID NO: 9488 - protein, 97 aa, Homo sapiens; identical to SEQ ID NO: 9487

SEQ ID NO: 9489 - protein, 97 aa, Homo sapiens; identical to SEQ ID NO: 9487

SEQ ID NO: 9490 - protein, 35 aa, Homo sapiens
MAEFRFLKSGALPILSLLCLQALKFSLGCSRGSSE

SEQ ID NO: 9491 - protein, 63 aa, Homo sapiens
MAGKKVLIVYAHQEPKSFNGSLKNVAVDELSRQGCTVTVSDLYAMNLEPRATDKDITGTLSNP

SEQ ID NO: 9492 - protein, 139 aa, Homo sapiens
MAGKKVLIVYAHQEPKSFNGSLKNVAVDELSRQGCTVTVSDLYAMNLEPRATDKDITGTLSNPEVFNYGVETHEAYKQRSLASDITDEQKKVREADLVIFQFPLYWFSVPAILKGWMDRVLCQGFAFDIPGFYDSGLLQ

SEQ ID NO: 9493 - protein, 139 aa, Homo sapiens; identical to SEQ ID NO: 9492

SEQ ID NO: 9494 - protein, 231 aa, Homo sapiens
MAGKKVLIVYAHQEPKSFNGSLKNVAVDELSRQGCTVTVSDLYAMNLEPRATDKDITGTLSNPEVFNYGVETHEAYKQRSLASDITDEQKKVREADLVIFQFPLYWFSVPAILKGWMDRVLCQGFAFDIPGFYDSGLLQGKLALLSVTTGGTAEMYTKTGVNGDSRYFLWPLQHGTLHFCGFKVLAPQISFAPEIASEEERKGMVAAWSQRLQTIWKEEPIPCTAHWHFGQ

SEQ ID NO: 9495 - protein, 231 aa, Homo sapiens; identical to SEQ ID NO: 9494

SEQ ID NO: 9496 - protein, 231 aa, Homo sapiens; identical to SEQ ID NO: 9494

SEQ ID NO: 9497 - protein, 193 aa, Homo sapiens
MAGKKVLIVYAHQEPKSFNGSLKNVAVDELSRQGCTVTVSDLYAMNLEPRATDKDITGTLSNPEVFNYGVETHEAYKQRSLASDITDEQKKVREADLVIFQGKLALLSVTTGGTAEMYTKTGVNGDSRYFLWPLQHGTLHFCGFKVLAPQISFAPEIASEEERKGMVAAWSQRLQTIWKEEPIPCTAHWHFGQ

SEQ ID NO: 9498 - protein, 193 aa, Homo sapiens; identical to SEQ ID NO: 9497

SEQ ID NO: 9499 - protein, 1299 aa, Homo sapiens
MPKKKRLSAGRVPLILFLCQMISALEVPLDPKLLEDLVQPPTITQQSPKDYIIDPRENIVIQCEAKGKPPPSFSWTRNGTHFDIDKDPLVTMKPGTGTLIINIMSEGKAETYEGVYQCTARNERGAAVSNNIVVRPSRSPLWTKEKLEPITLQSGQSLVLPCRPPIGLPPPIIFWMDNSFQRLPQSERVSQGLNGDLYFSNVLPEDTREDYICYARFNHTQTIQQKQPISVKVISVDELNDTIAANLSDTEFYGAKSSRERPPTFLTPEGNASNKEELRGNVLSLECIAEGLPTPIIYWAKEDGMLPKNRTVYKNFEKTLQIIHVSEADSGNYQCIAKNALGAIHHTISVRVKAAPYWITAPQNLVLSPGEDGTLICRANGNPKPRISWLTNGVPIEIAPDDPSRKIDGDTIIFSNVQERSSAVYQCNASNEYGYLLANAFVNVLAEPPRILTPANTLYQVIANRPALLDCAFFGSPLPTIEWFKGAKGSALHEDIYVLHENGTLEIPVAQKDSTGTYTCVARNKLGMAKNEVHLEIKDPTWIVKQPEYAVVQRGSMVSFECKVKHDHTLSLTVLWLKDNRELPSDERFTVDKDHLVVADVSDDDSGTYTCVANTTLDSVSASAVLSVVAPTPTPAPVYDVPNPPFDLELTDQLDKSVQLSWTPGDDNNSPITRIHHEYEDAMHKPGLWHHQTEVSGTQTTAQLKLSPYVNYSFRVMAVNSIGKSLPSEASEQYLTKASEPDKNPTAVEGLGSEPDNLVITWKPLNGFESNGPGLQYKVSWRQKDGDDEWTSVVVANVSKYIVSGTPTFVPYLIKVQALNDMGFAPEPAVVMGHSGEDLPMVAPGNVRVNVVNSTLAEVHWDPVPLKSIRGHLQGYRIYYWKTQSSSKRNRRHIEKKILTFQGSKTHGMLPGLEPFSHYTLNVRVVNGKGEGPASPDRVFNTPEGVPSAPSSLKIVNPTLDSLTLEWDPPSHPNGILTEYTLKYQPINSTHELGPLVDLKIPANKTRWTLKNLNFSTRYKFYFYAQTSAGSGSQITEEAVTTVDEAGILPPDVGAGKVQAVNPRISNLTAAAAETYANISWEYEGPEHVNFYVEYGVAGSKEEWRKEIVNGSRSFFGLKGLMPGTAYKVRVGAVGDSGFVSSEDVFETGPAMASRQVDIATQGWFIGLMCAVALLILILLIVCFIRRNKGGKYPVKEKEDAHADPEIQPMKEDDGTFGEYSDAEDHKPLKKGSRTPSDRTVKKEDSDDSLVDYGEGVNGQFNEDGSFIGQYSGKKEKEPAEGNESSEAPSPVNAMNSFV

SEQ ID NO: 9500 - protein, 106 aa, Homo sapiens
MQLKIMPKKKRLSAGRVPLILFLCQMISALEVPLDLVQPPTITQQSPKDYIIDPRENIVIQCEAKGKPPPSFSWTRNGTHFDIDKDPLVTMKPGTGTLIINIMSEG

SEQ ID NO: 9501 - protein, 106 aa, Homo sapiens; identical to SEQ ID NO: 9500

SEQ ID NO: 9502 - protein, 1183 aa, Homo sapiens
MQLKIMPKKKRLSAGRVPLILFLCQMISALEVPLDLVQPPTITQQSPKDYIIDPRENIVIQCEAKGKPPPSFSWTRNGTHFDIDKDPLVTMKPGTGTLIINIMSEGKAETYEGVYQCTARNERGAAVSNNIVVRPSRSPLWTKEKLEPITLQSGQSLVLPCRPPIGLPPPIIFWMDNSFQRLPQSERVSQGLNGDLYFSNVLPEDTREDYICYARFNHTQTIQQKQPISVKVISVDELNDTIAANLSDTEFYGAKSSRERPPTFLTPEGNASNKEELRGNVLSLECIAEGLPTPIIYWAKEDGMLPKNRTVYKNFEKTLQIIHVSEADSGNYQCIAKNALGAIHHTISVRVKAAPYWITAPQNLVLSPGEDGTLICRANGNPKPRISWLTNGVPIEIAPDDPSRKIDGDTIIFSNVQERSSAVYQCNASNEYGYLLANAFVNVLAEPPRILTPANTLYQVIANRPALLDCAFFGSPLPTIEWFKGAKGSALHEDIYVLHENGTLEIPVAQKDSTGTYTCVARNKLGMAKNEVHLEIKDPTWIVKQPEYAVVQRGSMVSFECKVKHDHTLSLTVLWLKDNRELPSDERFTVDKDHLVVADVSDDDSGTYTCVANTTLDSVSASAVLSVVDVPNPPFDLELTDQLDKSVQLSWTPGDDNNSPITKFIIEYEDAMHKPGLWHHQTEVSGTQTTAQLKLSPYVNYSFRVMAVNSIGKSLPSEASEQYLTKASEPDKNPTAVEGLGSEPDNLVITWKPLNGFESNGPGLQYKVSWRQKDGDDEWTSVVVANVSKYIVSGTPTFVPYLIKVQALNDMGFAPEPAVVMGHSGEDLPMVAPGNVRVNVVNSTLAEVHWDPVPLKSIRGHLQGYRIYYWKTQSSSKRNRRHIEKKILTFQGSKTHGMLPGLEPFSHYTLNVRVVNGKGEGPASPDRVFNTPEGVPSAPSSLKIVNPTLDSLTLEWDPPSHPNGILTEYTLKYQPINSTHELGPLVDLKIPANKTRWTLKNLNFSTRYKFYFYAQTSAGSGSQITEEAVTTVDEAMASRQVDIATQGWFIGLMCAVALLILILLIVCFIRRNKGGKYPVKEKEDAHADPEIQPMKEDDGTFGEYSDAEDHKPLKKGSRTPSDRTVKKEDSDDSLVDYGEGVNGQFNEDGSFIGQYSGKKEKEPAEGNESSEAPSPVNAMNSFV

SEQ ID NO: 9503 - protein, 431 aa, Homo sapiens
MQLKIMPKKKRLSAGRVPLILFLCQMISALEVPLDLVQPPTITQQSPKDYIIDPRENIVIQCEAKGKPPPSFSWTRNGTHFDIDKDPLVTMKPGTGTLIINIMSEGKAETYEGVYQCTARNERGAAVSNNIVVRPSRSPLWTKEKLEPITLQSGQSLVLPCRPPIGLPPPIIFWMDNSFQRLPQSERVSQGLNGDLYFSNVLPEDTREDYICYARFNHTQTIQQKQPISVKVISVDELNDTIAANLSDTEFYGAKSSRERPPTFLTPEGNASNKEELRGNVLSLECIAEGLPTPIIYWAKEDGMLPKNRTVYKNFEKTLQIIHVSEADSGNYQCIAKNALGAIHHTISVRVKAAPYWITAPQNLVLSPGEDGTLICRANGNPKPRISWLTNGVPIEIAPDDPSRKIDGDTIIFSNVQERSSAVYQCNASNE

SEQ ID NO: 9504 - protein, 771 aa, Homo sapiens [sequence omitted]

SEQ ID NO: 9505 - protein, 61 aa, Homo sapiens
MQLKIMPKKKRLSAGRVPLILFLCQMISALEVPLDPKLLEDLVQPPTITQQSPKDYIIDPR

SEQ ID NO: 9506 - protein, 118 aa, Homo sapiens
MQLKIMPKKKRLSAGRVPLILFLCQMISALEVPLDPKLLEDLVQPPTITQQSPKDYIIDPRENIVIQCEAKGKPPPSFSWTRNGTHFDIDKDPLVTMKPGTGTLIINIMSEGKAETYE

SEQ ID NO: 9507 - protein, 1192 aa, Homo sapiens
MQLKIMPKKKRLSAGRVPLILFLCQMISALEVPLDPKLLEDLVQPPTITQQSPKDYIIDPRENIVIQCEAKGKPPPSFSWTRNGTHFDIDKDPLVTMKPGTGTLIINIMSEGKAETYEGVYQCTARNERGAAVSNNIVVRPSRSPLWTKEKLEPITLQSGQSLVLPCRPPIGLPPPIIFWMDNSFQRLPQSERVSQGLNGDLYFSNVLPEDTREDYICYARFNHTQTIQQKQPISVKVISAKSSRERPPTFLTPEGNASNKEELRGNVLSLECIAEGLPTPIIYWAKEDGMLPKNRTVYKNFEKTLQIIHVSEADSGNYQCIAKNALGAIHHTISVRVKAAPYWITAPQNLVLSPGEDGTLICRANGNPKPRISWLTNGVPIEIAPDDPSRKIDGDTIIFSNVQERSSAVYQCNASNEYGYLLANAFVNVLAEPPRILTPANTLYQVIANRPALLDCAFFGSPLPTIEWFKGAKGSALHEDIYVLHENGTLEIPVAQKDSTGTYTCVARNKLGMAKNEVHLEIKDPTWIVKQPEYAVVQRGSMVSFECKVKHDHTLSLTVLWLKDNRELPSDERFTVDKDHLVVADVSDDDSGTYTCVANTTLDSVSASAVLSVVAPTPTPAPVYDVPNPPFDLELTDQLDKSVQLSWTPGDDNNSPITKFIIEYEDAMHKPGLWHHQTEVSGTQTTAQLKLSPYVNYSFRVMAVNSIGKSLPSEASEQYLTKASEPDKNPTAVEGLGSEPDNLVITWKPLNGFESNGPGLQYKVSWRQKDGDDEWTSVVVANVSKYIVSGTPTFVPYLIKVQALNDMGFAPEPAVVMGHSGEDLPMVAPGNVRVNVVNSTLAEVHWDPVPLKSIRGHLQGYRIYYWKTQSSSKRNRRHIEKKILTFQGSKTHGMLPGLEPFSHYTLNVRVVNGKGEGPASPDRVFNTPEGVPSAPSSLKIVNPTLDSLTLEWDPPSHPNGILTEYTLKYQPINSTHELGPLVDLKIPANKTRWTLKNLNFSTRYKFYFYAQTSAGSGSQITEEAVTTVDEAGILPPDVGAGKAMASRQVDIATQGWFIGLMCAVALLILILLIVCFIRRNKGGKYPVKEKEDAHADPEIQPMKEDDGTFGEYSDAEDHKPLKKGSRTPSDRTVKKEDSDDSLVDYGEGVNGQFNEDGSFIGQYSGKKEKEPAEGNESSEAPSPVNAMNSFV

SEQ ID NO: 9508 - protein, 1304 aa, Homo sapiens
MQLKIMPKKKRLSAGRVPLILFLCQMISALEVPLDPKLLEDLVQPPTITQQSPKDYIIDPRENIVIQCEAKGKPPPSFSWTRNGTHFDIDKDPLVTMKPGTGTLIINIMSEGKAETYEGVYQCTARNERGAAVSNNIVVRPSRSPLWTKEKLEPITLQSGQSLVLPCRPPIGLPPPIIFWMDNSFQRLPQSERVSQGLNGDLYFSNVLPEDTREDYICYARFNHTQTIQQKQPISVKVISVDELNDTIAANLSDTEFYGAKSSRERPPTFLTPEGNASNKEELRGNVLSLECIAEGLPTPIIYWAKEDGMLPKNRTVYKNFEKTLQIIHVSEADSGNYQCIAKNALGAIHHTISVRVKAAPYWITAPQNLVLSPGEDGTLICRANGNPKPRISWLTNGVPIEIAPDDPSRKIDGDTIIFSNVQERSSAVYQCNASNEYGYLLANAFVNVLAEPPRILTPANTLYQVIANRPALLDCAFFGSPLPTIEWFKGAKGSALHEDIYVLHENGTLEIPVAQKDSTGTYTCVARNKLGMAKNEVHLEIKDPTWIVKQPEYAVVQRGSMVSFECKVKHDHTLSLTVLWLKDNRELPSDERFTVDKDHLVVADVSDDDSGTYTCVANTTLDSVSASAVLSVVAPTPTPAPVYDVPNPPFDLELTDQLDKSVQLSWTPGDDNNSPITKFIIEYEDAMHKPGLWHHQTEVSGTQTTAQLKLSPYVNYSFRVMAVNSIGKSLPSEASEQYLTKASEPDKNPTAVEGLGSEPDNLVITWKPLNGFESNGPGLQYKVSWRQKDGDDEWTSVVVANVSKYIVSGTPTFVPYLIKVQALNDMGFAPEPAVVMGHSGEDLPMVAPGNVRVNVVNSTLAEVHWDPVPLKSIRGHLQGYRIYYWKTQSSSKRNRRHIEKKILTFQGSKTHGMLPGLEPFSHYTLNVRVVNGKGEGPASPDRVFNTPEGVPSAPSSLKIVNPTLDSLTLEWDPPSHPNGILTEYTLKYQPINSTHELGPLVDLKIPANKTRWTLKNLNFSTRYKFYFYAQTSAGSGSQITEEAVTTVDEAGILPPDVGAGKVQAVNPRISNLTAAAAETYANISWEYEGPEHVNFYVEYGVAGSKEEWRKEIVNGSRSFFGLKGLMPGTAYKVRVGAVGDSGFVSSEDVFETGPAMASRQVDIATQGWFIGLMCAVALLILILLIVCFIRRNKGGKYPVKEKEDAHADPEIQPMKEDDGTFGEYSDAEDHKPLKKGSRTPSDRTVKKEDSDDSLVDYGEGVNGQFNEDGSFIGQYSGKKEKEPAEGNESSEAPSPVNAMNSFV

SEQ ID NO: 9509 - protein, 1211 aa, Homo sapiens
MQLKIMPKKKRLSAGRVPLILFLCQMISALEVPLDPKLLEDLVQPPTITQQSPKDYIIDPRENIVIQCEAKGKPPPSFSWTRNGTHFDIDKDPLVTMKPGTGTLIINIMSEGKAETYEGVYQCTARNERGAAVSNNIVVRPSRSPLWTKEKLEPITLQSGQSLVLPCRPPIGLPPPIIFWMDNSFQRLPQSERVSQGLNGDLYFSNVLPEDTREDYICYARFNHTQTIQQKQPISVKVISVDELNDTIAANLSDTEFYGAKSSRERPPTFLTPEGNASNKEELRGNVLSLECIAEGLPTPIIYWAKEDGMLPKNRTVYKNFEKTLQIIHVSEADSGNYQCIAKNALGAIHHTISVRVKAAPYWITAPQNLVLSPGEDGTLICRANGNPKPRISWLTNGVPIEIAPDDPSRKIDGDTIIFSNVQERSSAVYQCNASNEYGYLLANAFVNVLAEPPRILTPANTLYQVIANRPALLDCAFFGSPLPTIEWFKGAKGSALHEDIYVLHENGTLEIPVAQKDSTGTYTCVARNKLGMAKNEVHLEIKDPTWIVKQPEYAVVQRGSMVSFECKVKHDHTLSLTVLWLKDNRELPSDERFTVDKDHLVVADVSDDDSGTYTCVANTTLDSVSASAVLSVVAPTPTPAPVYDVPNPPFDLELTDQLDKSVQLSWTPGDDNNSPITKFIIEYEDAMHKPGLWHHQTEVSGTQTTAQLKLSPYVNYSFRVMAVNSIGKSLPSEASEQYLTKASEPDKNPTAVEGLGSEPDNLVITWKPLNGFESNGPGLQYKVSWRQKDGDDEWTSVVVANVSKYIVSGTPTFVPYLIKVQALNDMGFAPEPAVVMGHSGEDLPMVAPGNVRVNVVNSTLAEVHWDPVPLKSIRGHLQGYRIYYWKTQSSSKRNRRHIEKKILTFQGSKTHGMLPGLEPFSHYTLNVRVVNGKGEGPASPDRVFNTPEGVPSAPSSLKIVNPTLDSLTLEWDPPSHPNGILTEYTLKYQPINSTHELGPLVDLKIPANKTRWTLKNLNFSTRYKFYFYAQTSAGSGSQITEEAVTTVDEAGILPPDVGAGKAMASRQVDIATQGWFIGLMCAVALLILILLIVCFIRRNKGGKYPVKEKEDAHADPEIQPMKEDDGTFGEYSDAEDHKPLKKGSRTPSDRTVKKEDSDDSLVDYGEGVNGQFNEDGSFIGQYSGKKEKEPAEGNESSEAPSPVNAMNSFV

SEQ ID NO: 9510 - protein, 1304 aa, Homo sapiens; identical to SEQ ID NO: 9508

SEQ ID NO: 9511 - protein, 190 aa, Homo sapiens
  VARIANT 1: note = misc_feature - Xaa can be any naturally occurring amino acid
XGILPPDVGAGKVQAVNPRISNLTAAAAETYANISWEYEGPEHVNFYVEYGVAGTMASRQVDIATQGWFIGLMCAVALLILILLIVCFIRRNKGGKYPVKEKEDAHADPEIQPMKEDDGTFGEYSDAEDHKPLKKGSRTPSDRTVKKEDSDDSLVDYGEGVNGQFNEDGSFIGQYSGKKEKEPAEGNESS

SEQ ID NO: 9512 - protein, 296 aa, Homo sapiens
MEIYSPDMSEVAAERSSSPSTQLSADPSLDGLPAAEDMPEPQTEDGRTPGLVGLAVPCCACLEAERLRGCLNSEKICIVPILACLVSLCLCIAGLKWVFVDKIFEYDSPTHLDPGGLGQDPIISLDATAASAVWVSSEAYTSPVSRAQSESEVQVTVQGDKAVVSFEPSAAPTPKNRIFAFSFLPSTAPSFPSPTRNPEVRTPKSATQPQTTETNLQTAPKLSTSTSTTGTSHLVKCAEKEKTFCVNGGECFMVKDLSNPSRYLCKCPNEFTGDRCQNYVMASFYSTSTPFLSLPE

SEQ ID NO: 9513 - protein, 590 aa, Homo sapiens
MGKGRAGRVGTTALPPRLKEMKSQESAAGSKLVLRCETSSEYSSLRFKWFKNGNELNRKNKPQNIKIQKKPGKSELRINKASLADSGEYMCKVISKLGNDSASANITIVESNATSTSTTGTSHLVKCAEKEKTFCVNGGECFMVKDLSNPSRYLCKCPNEFTGDRCQNYVMASFYKHLGIEFMEAEELYQKRVLTITGICIALLVVGIMCVVAYCKTKKQRKKLHDRLRQSLRSERNNMMNIANGPHHPNPPPENVQLVNQYVSKNVISSEHIVEREAETSFSTSHYTSTAHHSTTVTQTPSHSWSNGHTESILSESHSVIVMSSVENSRHSSPTGGPRGRLNGTGGPRECNSFLRHARETPDSYRDSPHSERYVSAMTTPARMSPVDFHTPSSPKSPPSEMSPPVSSMTVSMPSMAVSPFMEEERPLLLVTPPRLREKKFDHHPQQFSSFHHNPAHDSNSLPASPLRIVEDEEYETTQEYEPAQEPVKKLANSRRAKRTKPNGHIANRLEVDSNTSSQSSNSESETEDERVGEDTPFLGIQNPLAASLEATPAFRLADSRTNPAGRFSTQEEIQARLSSVIANQDPIAV

SEQ ID NO: 9514 - protein, 481 aa, Homo sapiens
MGKGRAGRVGTTALPPRLKEMKSQESAAGSKLVLRCETSSEYSSLRFKWFKNGNELNRKNKPQNIKIQKKPGKSELRINKASLADSGEYMCKVISKLGNDSASANITIVESNEIITGMPASTEGAYVSSATSTSTTGTSHLVKCAEKEKTFCVNGGECFMVKDLSNPSRYLCKCPNEFTGDRCQNYVMASFYKHLGIEFMEAEELYQKRVLTITGICIALLVVGIMCVVAYCKTKKQRKKLHDRLRQSLRSERNNMMNIANGPHHPNPPPENVQLVNQYVSKNVISSEHIVEREAETSFSTSHYTSTAHHSTTVTQTPSHSWSNGHTESILSESHSVIVMSSVENSRHSSPTGGPRGRLNGTGGPRECNSFLRHARETPDSYRDSPHSERYVSAMTTPARMSPVDFHTPSSPKSPPSEMSPPVSSMTVSMPSMAVSPFMEEERPLLLVTPPRLREKKFDHHPQQFSSFHHNPAHDSNSLPA

SEQ ID NO: 9515 - protein, 193 aa, Homo sapiens
MKKRNEMIFLATLKNKALPPRLKEMKSQESAAGSKLVLRCETSSEYSSLRFKWFKNGNELNRKNKPQNIKIQKKPGKSELRINKASLADSGEYMCKVISKLGNDSASANITIVESNEIITGMPASTEGAYVSSESPIRISVSTEGANTSSSTSTSTTGTSHLVKCAEKEKTFCVNGGECFMVKDLSNPSRYLC

SEQ ID NO: 9516 - protein, 135 aa, Homo sapiens
MQIPKHISIEDITATSTSTTGTSHLVKCAEKEKTFCVNGGECFMVKDLSNPSRYLCKCPNEFTGDRCQNYVMASFYKAEELYQKRVLTITGICIALLVVGIMCVVAYCKTKKQRKKLHDRLRQSLRSERNNMMNI

SEQ ID NO: 9517 - protein, 101 aa, Homo sapiens
MQIPKHISIEDITATSTSTTGTSHLVKCAEKEKTFCVNGGECFMVKDLSNPSRYLCKCPNEFTGDRCQNYVMASFYKHLGIEFMEAEELYQKRVLTITGIC

SEQ ID NO: 9518 - protein, 129 aa, Homo sapiens
MQIPKHISIEDITATSTSTTGTSHLVKCAEKEKTFCVNGGECFMVKDLSNPSRYLCKCQPGFTGARCTENVPMKVQNQEKAEELYQKRVLTITGICIALLVVGIMCVVAYCKTKKQRKKLHDRLRQSLR

SEQ ID NO: 9519 - protein, 308 aa, Homo sapiens
MQIPKHISIEDITATSTSTTGTSHLVKCAEKEKTFCVNGGECFMVKDLSNPSRYLCKCQPGFTGARCTENVPMKVQNQEKAEELYQKRVLTITGICIALLVVGIMCVVAYCKTKKQRKKLHDRLRQSLRSERNNMMNIANGPHHPNPPPENVQLVNQYVSKNVISSEHIVEREAETSFSTSHYTSTAHHSTTVTQTPSHSWSNGHTESILSESHSVIVMSSVENSRHSSPTGGPRGRLNGTGGPRECNSFLRHARETPDSYRDSPHSERHNLIAELRRNKAHRSKCMQIQLSATHLRSSSIPHLGFIL

SEQ ID NO: 9520 - protein, 254 aa, Homo sapiens [sequence omitted]

SEQ ID NO: 9521 - protein, 422 aa, Homo sapiens
MRWRRAPRRSGRPGPRAQRPGSAARSSPPLPLLPLLLLLGTAALAPGAAAGNEAAPAGASVCYSSPPSVGSVQELAQRAAVVIEGKVHPQRRQQGALDRKAAAAAGEAGAWGGDREPPAAGPRALGPPAEEPLLAANGTVPSWPTAPVPSAGEPGEEAPYLVKVHQVWAVKAGGLKKDSLLTVRLGTWGHPAFPSCGRLKEDSRYIFFMEPDANSTSRAPAAFRASFPPLETGRNLKKEVSRVLCKRCALPPRLKEMKSQESAAGSKLVLRCETSSEYSSLRFKWFKNGNELNRKNKPQNIKIQKKPGKSELRINKASLADSGEYMCKVISKLGNDSASANITIVESNATSTSTTGTSHLVKCAEKEKTFCVNGGECFMVKDLSNPSRYLCKCPNEFTGDRCQNYVMASFYSTSTPFLSLPE

SEQ ID NO: 9522 - protein, 637 aa, Homo sapiens
MSERKEGRGKGKGKKKERGSGKKPESAAGSQSPALPPRLKEMKSQESAAGSKLVLRCETSSEYSSLRFKWFKNGNELNRKNKPQNIKIQKKPGKSELRINKASLADSGEYMCKVISKLGNDSASANITIVESNEIITGMPASTEGAYVSSESPIRISVSTEGANTSSSTSTSTTGTSHLVKCAEKEKTFCVNGGECFMVKDLSNPSRYLCKCPNEFTGDRCQNYVMASFYKAEELYQKRVLTITGICIALLVVGIMCVVAYCKTKKQRKKLHDRLRQSLRSERNNMMNIANGPHHPNPPPENVQLVNQYVSKNVISSEHIVEREAETSFSTSHYTSTAHHSTTVTQTPSHSWSNGHTESILSESHSVIVMSSVENSRHSSPTGGPRGRLNGTGGPRECNSFLRHARETPDSYRDSPHSERYVSAMTTPARMSPVDFHTPSSPKSPPSEMSPPVSSMTVSMPSMAVSPFMEEERPLLLVTPPRLREKKFDHHPQQFSSFHHNPAHDSNSLPASPLRIVEDEEYETTQEYEPAQEPVKKLANSRRAKRTKPNGHIANRLEVDSNTSSQSSNSESETEDERVGEDTPFLGIQNPLAASLEATPAFRLADSRTNPAGRFSTQEEIQARLSSVIANQDPIAV

SEQ ID NO: 9523 - protein, 420 aa, Homo sapiens
MSERKEGRGKGKGKKKERGSGKKPESAAGSQSPALPPRLKEMKSQESAAGSKLVLRCETSSEYSSLRFKWFKNGNELNRKNKPQNIKIQKKPGKSELRINKASLADSGEYMCKVISKLGNDSASANITIVESNEIITGMPASTEGAYVSSESPIRISVSTEGANTSSSTSTSTTGTSHLVKCAEKEKTFCVNGGECFMVKDLSNPSRYLCKCPNEFTGDRCQNYVMASFYKAEELYQKRVLTITGICIALLVVGIMCVVAYCKTKKQRKKLHDRLRQSLRSERNNMMNIANGPHHPNPPPENVQLVNQYVSKNVISSEHIVEREAETSFSTSHYTSTAHHSTTVTQTPSHSWSNGHTESILSESHSVIVMSSVENSRHSSPTGGPRGRLNGTGGPRECNSFLRHARETPDSYRDSPHSER

SEQ ID NO: 9524 - protein, 645 aa, Homo sapiens
MSERKEGRGKGKGKKKERGSGKKPESAAGSQSPALPPRLKEMKSQESAAGSKLVLRCETSSEYSSLRFKWFKNGNELNRKNKPQNIKIQKKPGKSELRINKASLADSGEYMCKVISKLGNDSASANITIVESNEIITGMPASTEGAYVSSESPIRISVSTEGANTSSSTSTSTTGTSHLVKCAEKEKTFCVNGGECFMVKDLSNPSRYLCKCPNEFTGDRCQNYVMASFYKHLGIEFMEAEELYQKRVLTITGICIALLVVGIMCVVAYCKTKKQRKKLHDRLRQSLRSERNNMMNIANGPHHPNPPPENVQLVNQYVSKNVISSEHIVEREAETSFSTSHYTSTAHHSTTVTQTPSHSWSNGHTESILSESHSVIVMSSVENSRHSSPTGGPRGRLNGTGGPRECNSFLRHARETPDSYRDSPHSERYVSAMTTPARMSPVDFHTPSSPKSPPSEMSPPVSSMTVSMPSMAVSPFMEEERPLLLVTPPRLREKKFDHHPQQFSSFHHNPAHDSNSLPASPLRIVEDEEYETTQEYEPAQEPVKKLANSRRAKRTKPNGHIANRLEVDSNTSSQSSNSESETEDERVGEDTPFLGIQNPLAASLEATPAFRLADSRTNPAGRFSTQEEIQARLSSVIANQDPIAV

SEQ ID NO: 9525 - protein, 640 aa, Homo sapiens
MSERKEGRGKGKGKKKERGSGKKPESAAGSQSPALPPRLKEMKSQESAAGSKLVLRCETSSEYSSLRFKWFKNGNELNRKNKPQNIKIQKKPGKSELRINKASLADSGEYMCKVISKLGNDSASANITIVESNEIITGMPASTEGAYVSSESPIRISVSTEGANTSSSTSTSTTGTSHLVKCAEKEKTFCVNGGECFMVKDLSNPSRYLCKCQPGFTGARCTENVPMKVQNQEKAEELYQKRVLTITGICIALLVVGIMCVVAYCKTKKQRKKLHDRLRQSLRSERNNMMNIANGPHHPNPPPENVQLVNQYVSKNVISSEHIVEREAETSFSTSHYTSTAHHSTTVTQTPSHSWSNGHTESILSESHSVIVMSSVENSRHSSPTGGPRGRLNGTGGPRECNSFLRHARETPDSYRDSPHSERYVSAMTTPARMSPVDFHTPSSPKSPPSEMSPPVSSMTVSMPSMAVSPFMEEERPLLLVTPPRLREKKFDHHPQQFSSFHHNPAHDSNSLPASPLRIVEDEEYETTQEYEPAQEPVKKLANSRRAKRTKPNGHIANRLEVDSNTSSQSSNSESETEDERVGEDTPFLGIQNPLAASLEATPAFRLADSRTNPAGRFSTQEEIQARLSSVIANQDPIAV

SEQ ID NO: 9526 - protein, 462 aa, Homo sapiens
MSERKEGRGKGKGKKKERGSGKKPESAAGSQSPALPPRLKEMKSQESAAGSKLVLRCETSSEYSSLRFKWFKNGNELNRKNKPQNIKIQKKPGKSELRINKASLADSGEYMCKVISKLGNDSASANITIVESNEIITGMPASTEGAYVSSESPIRISVSTEGANTSSSTSTSTTGTSHLVKCAEKEKTFCVNGGECFMVKDLSNPSRYLCKCQPGFTGARCTENVPMKVQNQEKAEELYQKRVLTITGICIALLVVGIMCVVAYCKTKKQRKKLHDRLRQSLRSERNNMMNIANGPHHPNPPPENVQLVNQYVSKNVISSEHIVEREAETSFSTSHYTSTAHHSTTVTQTPSHSWSNGHTESILSESHSVIVMSSVENSRHSSPTGGPRGRLNGTGGPRECNSFLRHARETPDSYRDSPHSERHNLIAELRRNKAHRSKCMQIQLSATHLRSSSIPHLGFIL

SEQ ID NO: 9527 - protein, 196 aa, Homo sapiens
PQTEDGRTPGLVGLAVPCCACLEAERLRGCLNSEKICIVPILACLVSLCLCIAGLKWVFVDKIFEYDSPTHLDPGGLGQDPIISLDATAASAVWVSSEAYTSPVSRAQSESEVQVTVQGDKAVVSFEPSAAPTPKNRIFAFSFLPSTAPSFPSPTRNPEVRTPKSATQPQTTETNLQTAPKLCAQMSLLVIAAKTT

SEQ ID NO: 9528 - protein, 713 aa, Homo sapiens
VPSAGEPGEEAPYLVKVHQVWAVKAGGLKKDSLLTVRLGTWGHPAFPSCGRLKEDSRYIFFMEPDANSTSRAPAAFRASFPPLETGRNLKKEVSRVLCKRCALPPRLKEMKSQESAAGSKLVLRCETSSEYSSLRFKWFKNGNELNRKNKPQNIKIQKKPGKSELRINKASLADSGEYMCKVISKLGNDSASANITIVESNEIITGMPASTEGAYVSSESPIRISVSTEGANTSSSTSTSTTGTSHLVKCAEKEKTFCVNGGECFMVKDLSNPSRYLCKCPNEFTGDRCQNYVMASFYKHLGIEFMEAEELYQKRVLTITGICIALLVVGIMCVVAYCKTKKQRKKLHDRLRQSLRSERNNMMNIANGPHHPNPPPENVQLVNQYVSKNVISSEHIVEREAETSFSTSHYTSTAHHSTTVTQTPSHSWSNGHTESILSESHSVIVMSSVENSRHSSPTGGPRGRLNGTGGPRECNSFLRHARETPDSYRDSPHSERYVSAMTTPARMSPVDFHTPSSPKSPPSEMSPPVSSMTVSMPSMAVSPFMEEERPLLLVTPPRLREKKFDHHPQQFSSFHHNPAHDSNSLPASPLRIVEDEEYETTQEYEPAQEPVKKLANSRRAKRTKPNGHIANRLEVDSNTSSQSSNSESETEDERVGEDTPFLGIQNPLAASLEATPAFRLADSRTNPAGRFSTQEEIQARLSSVIANQDPIAV

SEQ ID NO: 9529 - protein, 126 aa, Homo sapiens
  VARIANT 1: note = misc_feature - Xaa can be any naturally occurring amino acid
XASANITIVESNEIITGMPASTEGAYVSSESPIRISVSTEGANTSSSTSTSTTGTSHLVKCAEKEKTFCVNGGECFMVKDLSNPSRYLCKCQPGFTGARCTENVPMKVQNQESAQMSLLVIAAKTT

SEQ ID NO: 9530 - protein, 165 aa, Homo sapiens
MMRCCRRRCCCRQPPHALRPLLLLPLVLLPPLAAAAAGPNRCDTIYQGFAECLIRLGDSMGRGGELETICRSWNDFHACASQVLSGCPEEAAAVWESLQQEARQAPRPNNLHTLCGAPVHVRERGTGSETNQETLRATAPALPMAPAPPLLAAALALAYLLRPLA

SEQ ID NO: 9531 - protein, 87 aa, Homo sapiens
MTSMPVPLRSCQAVRRRQLQCGNHYSKKLARPPVRITCTLCAVPRCMFGSAAQAPKPTRRRCGLQRLHSPWPLRPHCWRLLWLWPTS

SEQ ID NO: 9532 - protein, 88 aa, Homo sapiens
  VARIANT 1: note = misc_feature - Xaa can be any naturally occurring amino acid
XRCCRRRCCCRQPPHALRPLLLLPLVLLPPLAAAAAGPNRCDTIYQGFAECLIRLGDSMGRGGELETICSTVDKEYLIVLREPGGWMS

SEQ ID NO: 9533 - protein, 923 aa, Homo sapiens
MERGLPLLCAVLALVLAPAGAFRNDKCGDTIKIESPGYLTSPGYPHSYHPSEKCEWLIQAPDPYQRIMINFNPHFDLEDRDCKYDYVEVFDGENENGHFRGKFCGKIAPPPVVSSGPFLFIKFVSDYETHGAGFSIRYEIFKRGPECSQNYTTPSGVIKSPGFPEKYPNSLECTYIVFVPKMSEIILEFESFDLEPDSNPPGGMFCRYDRLEIWDGFPDVGPHIGRYCGQKTPGRIRSSSGILSMVFYTDSAIAKEGFSANYSVLQSSVSEDFKCMEALGMESGEIHSDQITASSQYSTNWSAERSRLNYPENGWTPGEDSYREWIQVDLGLLRFVTAVGTQGAISKETKKKYYVKTYKIDVSSNGEDWITIKEGNKPVLFQGNTNPTDVVVAVFPKPLITRFVRIKPATWETGISMRFEVYGCKITDYPCSGMLGMVSGLISDSQITSSNQGDRNWMPENIRLVTSRSGWALPPAPHSYINEWLQIDLGEEKIVRGIIIQGGKHRENKVFMRKFKIGYSNNGSDWKMIMDDSKRKAKSFEGNNNYDTPELRTFPALSTRFIRIYPERATHGGLGLRMELLGCEVEAPTAGPTTPNGNLVDECDDDQANCHSGTGDDFQLTGGTTVLATEKPTVIDSTIQSEFPTYGFNCEFGWGSHKTFCHWEHDNHVQLKWSVLTSKTGPIQDHTGDGNFIYSQADENQKGKVARLVSPVVYSQNSAHCMTFWYHMSGSHVGTLRVKLRYQKPEEYDQLVWMAIGHQGDHWKEGRVLLHKSLKLYQVIFEGEIGKGNLGGIAVDDISINNHISQEDCAKPADLDKKNPEIKIDETGSTPGYEGEGEGDKNISRKPGNVLKTLDPILITIIAMSALGVLLGAVCGVVLYCACWHNGMSERNLSALENYNFELVDGVKLKKDKLNTQSTYSEA

SEQ ID NO: 9534 - protein, 641 aa, Homo sapiens
MERGLPLLCAVLALVLAPAGAFRNDKCGDTIKIESPGYLTSPGYPHSYHPSEKCEWLIQAPDPYQRIMINFNPHFDLEDRDCKYDYVEVFDGENENGHFRGKFCGKIAPPPVVSSGPFLFIKFVSDYETHGAGFSIRYEIFKRGPECSQNYTTPSGVIKSPGFPEKYPNSLECTYIVFVPKMSEIILEFESFDLEPDSNPPGGMFCRYDRLEIWDGFPDVGPHIGRYCGQKTPGRIRSSSGILSMVFYTDSAIAKEGFSANYSVLQSSVSEDFKCMEALGMESGEIHSDQITASSQYSTNWSAERSRLNYPENGWTPGEDSYREWIQVDLGLLRFVTAVGTQGAISKETKKKYYVKTYKIDVSSNGEDWITIKEGNKPVLFQGNTNPTDVVVAVFPKPLITRFVRIKPATWETGISMRFEVYGCKITDYPCSGMLGMVSGLISDSQITSSNQGDRNWMPENIRLVTSRSGWALPPAPHSYINEWLQIDLGEEKIVRGIIIQGGKHRENKVFMRKFKIGYSNNGSDWKMIMDDSKRKAKSFEGNNNYDTPELRTFPALSTRFIRIYPERATHGGLGLRMELLGCEVEGTINTDQECPCARALAKDAKKKKRWADSTHCRCVRSIHGEMWSSGKGVCSLDANL

SEQ ID NO: 9535 - protein, 704 aa, Homo sapiens
MERGLPLLCAVLALVLAPAGAFRNDKCGDTIKIESPGYLTSPGYPHSYHPSEKCEWLIQAPDPYQRIMINFNPHFDLEDRDCKYDYVEVFDGENENGHFRGKFCGKIAPPPVVSSGPFLFIKFVSDYETHGAGFSIRYEIFKRGPECSQNYTTPSGVIKSPGFPEKYPNSLECTYIVFVPKMSEIILEFESFDLEPDSNPPGGMFCRYDRLEIWDGFPDVGPHIGRYCGQKTPGRIRSSSGILSMVFYTDSAIAKEGFSANYSVLQSSVSEDFKCMEALGMESGEIHSDQITASSQYSTNWSAERSRLNYPENGWTPGEDSYREWIQVDLGLLRFVTAVGTQGAISKETKKKYYVKTYKIDVSSNGEDWITIKEGNKPVLFQGNTNPTDVVVAVFPKPLITRFVRIKPATWETGISMRFEVYGCKITDYPCSGMLGMVSGLISDSQITSSNQGDRNWMPENIRLVTSRSGWALPPAPHSYINEWLQIDLGEEKIVRGIIIQGGKHRENKVFMRKFKIGYSNNGSDWKMIMDDSKRKAKSFEGNNNYDTPELRTFPALSTRFIRIYPERATHGGLGLRMELLGCEVEAPTAGPTTPNGNLVDECDDDQANCHSGTGDDFQLTGAETIFIPLLYHFSSCLSWDQLTPVCVLVTPHGRELPRNRSCLARTRASSFPHVIWIDELFLIATTICNNNLSHFESQRLGLS

SEQ ID NO: 9536 - protein, 644 aa, Homo sapiens
MERGLPLLCAVLALVLAPAGAFRNDKCGDTIKIESPGYLTSPGYPHSYHPSEKCEWLIQAPDPYQRIMINFNPHFDLEDRDCKYDYVEVFDGENENGHFRGKFCGKIAPPPVVSSGPFLFIKFVSDYETHGAGFSIRYEIFKRGPECSQNYTTPSGVIKSPGFPEKYPNSLECTYIVFVPKMSEIILEFESFDLEPDSNPPGGMFCRYDRLEIWDGFPDVGPHIGRYCGQKTPGRIRSSSGILSMVFYTDSAIAKEGFSANYSVLQSSVSEDFKCMEALGMESGEIHSDQITASSQYSTNWSAERSRLNYPENGWTPGEDSYREWIQVDLGLLRFVTAVGTQGAISKETKKKYYVKTYKIDVSSNGEDWITIKEGNKPVLFQGNTNPTDVVVAVFPKPLITRFVRIKPATWETGISMRFEVYGCKITDYPCSGMLGMVSGLISDSQITSSNQGDRNWMPENIRLVTSRSGWALPPAPHSYINEWLQIDLGEEKIVRGIIIQGGKHRENKVFMRKFKIGYSNNGSDWKMIMDDSKRKAKSFEGNNNYDTPELRTFPALSTRFIRIYPERATHGGLGLRMELLGCEVEAPTAGPTTPNGNLVDECDDDQANCHSGTGDDFQLTGGTTVLATEKPTVIDSTIQSGIK

SEQ ID NO: 9537 - protein, 923 aa, Homo sapiens; identical to SEQ ID NO: 9533

SEQ ID NO: 9538 - protein, 609 aa, Homo sapiens
MERGLPLLCAVLALVLAPAGAFRNDKCGDTIKIESPGYLTSPGYPHSYHPSEKCEWLIQAPDPYQRIMINFNPHFDLEDRDCKYDYVEVFDGENENGHFRGKFCGKIAPPPVVSSGPFLFIKFVSDYETHGAGFSIRYEIFKRGPECSQNYTTPSGVIKSPGFPEKYPNSLECTYIVFVPKMSEIILEFESFDLEPDSNPPGGMFCRYDRLEIWDGFPDVGPHIGRYCGQKTPGRIRSSSGILSMVFYTDSAIAKEGFSANYSVLQSSVSEDFKCMEALGMESGEIHSDQITASSQYSTNWSAERSRLNYPENGWTPGEDSYREWIQVDLGLLRFVTAVGTQGAISKETKKKYYVKTYKIDVSSNGEDWITIKEGNKPVLFQGNTNPTDVVVAVFPKPLITRFVRIKPATWETGISMRFEVYGCKITDYPCSGMLGMVSGLISDSQITSSNQGDRNWMPENIRLVTSRSGWALPPAPHSYINEWLQIDLGEEKIVRGIIIQGGKHRENKVFMRKFKIGYSNNGSDWKMIMDDSKRKAKSFEGNNNYDTPELRTFPALSTRFIRIYPERATHGGLGLRMELLGCEVEGGTTVLATEKPTVIDSTIQSGIK

SEQ ID NO: 9539 - protein, 597 aa, Homo sapiens
MERGLPLLCAVLALVLAPAGAFRNDKCGDTIKIESPGYLTSPGYPHSYHPSEKCEWLIQAPDPYQRIMINFNPHFDLEDRDCKYDYVEVFDGENENGHFRGKFCGKIAPPPVVSSGPFLFIKFVSDYETHGAGFSIRYEIFKRGPECSQNYTTPSGVIKSPGFPEKYPNSLECTYIVFVPKMSEIILEFESFDLEPDSNPPGGMFCRYDRLEIWDGFPDVGPHIGRYCGQKTPGRIRSSSGILSMVFYTDSAIAKEGFSANYSVLQSSVSEDFKCMEALGMESGEIHSDQITASSQYSTNWSAERSRLNYPENGWTPGEDSYREWIQVDLGLLRFVTAVGTQGAISKETKKKYYVKTYKIDVSSNGEDWITIKEGNKPVLFQGNTNPTDVVVAVFPKPLITRFVRIKPATWETGISMRFEVYGCKITDYPCSGMLGMVSGLISDSQITSSNQGDRNWMPENIRLVTSRSGWALPPAPHSYINEWLQIDLGEEKIVRGIIIQGGKHRENKVFMRKFKIGYSNNGSDWKMIMDDSKRKAKVRAGDWEEVIPYVLDFNQGPLAFSRGRASYFLPAMTLEEVCDGVSKTLDSRKTGIWHEK

SEQ ID NO: 9540 - protein, 906 aa, Homo sapiens
MERGLPLLCAVLALVLAPAGAFRNDKCGDTIKIESPGYLTSPGYPHSYHPSEKCEWLIQAPDPYQRIMINFNPHFDLEDRDCKYDYVEVFDGENENGHFRGKFCGKIAPPPVVSSGPFLFIKFVSDYETHGAGFSIRYEIFKRGPECSQNYTTPSGVIKSPGFPEKYPNSLECTYIVFVPKMSEIILEFESFDLEPDSNPPGGMFCRYDRLEIWDGFPDVGPHIGRYCGQKTPGRIRSSSGILSMVFYTDSAIAKEGFSANYSVLQSSVSEDFKCMEALGMESGEIHSDQITASSQYSTNWSAERSRLNYPENGWTPGEDSYREWIQVDLGLLRFVTAVGTQGAISKETKKKYYVKTYKIDVSSNGEDWITIKEGNKPVLFQGNTNPTDVVVAVFPKPLITRFVRIKPATWETGISMRFEVYGCKITDYPCSGMLGMVSGLISDSQITSSNQGDRNWMPENIRLVTSRSGWALPPAPHSYINEWLQIDLGEEKIVRGIIIQGGKHRENKVFMRKFKIGYSNNGSDWKMIMDDSKRKAKSFEGNNNYDTPELRTFPALSTRFIRIYPERATHGGLGLRMELLGCEVEAPTAGPTTPNGNLVDECDDDQANCHSGTGDDFQLTGGTTVLATEKPTVIDSTIQSEFPTYGFNCEFGWGSHKTFCHWEHDNHVQLKWSVLTSKTGPIQDHTGDGNFIYSQADENQKGKVARLVSPVVYSQNSAHCMTFWYHMSGSHVGTLRVKLRYQKPEEYDQLVWMAIGHQGDHWKEGRVLLHKSLKLYQVIFEGEIGKGNLGGIAVDDISINNHISQEDCARSTPGYEGEGEGDKNISRKPGNVLKTLDPILITIIAMSALGVLLGAVCGVVLYCACWHNGMSERNLSALENYNFELVDGVKLKKDKLNTQSTYSEA

SEQ ID NO: 9541 - protein, 735 aa, Homo sapiens
MSEIILEFESFDLEPDSNPPGGMFCRYDRLEIWDGFPDVGPHIGRYCGQKTPGRIRSSSGILSMVFYTDSAIAKEGFSANYSVLQSSVSEDFKCMEALGMESGEIHSDQITASSQYSTNWSAERSRLNYPENGWTPGEDSYREWIQVDLGLLRFVTAVGTQGAISKETKKKYYVKTYKIDVSSNGEDWITIKEGNKPVLFQGNTNPTDVVVAVFPKPLITRFVRIKPATWETGISMRFEVYGCKITDYPCSGMLGMVSGLISDSQITSSNQGDRNWMPENIRLVTSRSGWALPPAPHSYINEWLQIDLGEEKIVRGIIIQGGKHRENKVFMRKFKIGYSNNGSDWKMIMDDSKRKAKSFEGNNNYDTPELRTFPALSTRFIRIYPERATHGGLGLRMELLGCEVEAPTAGPTTPNGNLVDECDDDQANCHSGTGGTTVLATEKPTVIDSTIQSEFPTYGFNCEFGWGSHKTFCHWEHDNHVQLKWSVLTSKTGPIQDHTGDGNFIYSQADENQKGKVARLVSPVVYSQNSAHCMTFWYHMSGSHVGTLRVKLRYQKPEEYDQLVWMAIGHQGDHWKEGRVLLHKSLKLYQVIFEGEIGKGNLGGIAVDDISINNHISQEDCAKPADLDKKNPEIKIDETGSTPGYEGEGEGDKNISRKPGNVLKTLDPILITIIAMSALGVLLGAVCGVVLYCACWHNGMSERNLSALENYNFELVDGVKLKKDKLNTQSTYSEA

SEQ ID NO: 9542 - protein, 105 aa, Homo sapiens
NHISQEDCARSTPGYEGEGEGDKNISRKPGNVLKTLDPILITIIAMSALGVLLGAVCGVVLYCACWHNGMSERNLSALENYNFELVDGVKLKKDKLNTQSTYSEA

SEQ ID NO: 9543 - protein, 60 aa, Homo sapiens
  VARIANT 1: note = misc_feature - Xaa can be any naturally occurring amino acid
XINEWLQIDLGEEKIVRGIIIQGGKHRENKVFMRKFKIGYSNNGSDWKMIMDDSKRKALI

SEQ ID NO: 9544 - protein, 170 aa, Homo sapiens
  VARIANT 1: note = misc_feature - Xaa can be any naturally occurring amino acid
XPGGMFCRYDRLEIWDGFPDVGPHIGRYCGQKTPGRIRSSSGILSMVFYTDSAIAKEGFSANYSVLQSSVSEDFKCMEALGMESGEIHSDQITASSQYSTNWSAERSRLNYPENGWTPGEDSYREWIQDAKYRLRVSVVRSKSSSSSTSLEPRPLSSLKLSFFSYKIKIT

SEQ ID NO: 9545 - protein, 77 aa, Homo sapiens
  VARIANT 1: note = misc_feature - Xaa can be any naturally occurring amino acid
XPTAGPTTPNGNLVDECDDDQANCHSGTGDDFQLTGGTTVLATEKPTVIDSTIQSARLEVSTLNLSLHNPPQQKALI

SEQ ID NO: 9546 - protein, 100 aa, Homo sapiens
  VARIANT 1: note = misc_feature - Xaa can be any naturally occurring amino acid
XTHGGLGLRMELLGCEVEAPTAGPTTPNGNLVDECDDDQANCHSGTGDDFQLTGGTTVLATEKPTVIDSTIQSGSRFFKHHHKQQSMRPQNLHHNSILLL

SEQ ID NO: 9547 - protein, 102 aa, Homo sapiens
MDMFPLTWVFLALYFSRHQVRGQPDPPCGGRLNSKDAGYITSPGYPQDYPSHQNCEWIVYAPEPNQKIVLNFNPHFEIEKHDCKYDFIEIRDGDSESADLLG

SEQ ID NO: 9548 - protein, 906 aa, Homo sapiens
MDMFPLTWVFLALYFSRHQVRGQPDPPCGGRLNSKDAGYITSPGYPQDYPSHQNCEWIVYAPEPNQKIVLNFNPHFEIEKHDCKYDFIEIRDGDSESADLLGKHCGNIAPPTIISSGSMLYIKFTSDYARQGAGFSLRYEIFKTGSEDCSKNFTSPNGTIESPGFPEKYPHNLDCTFTILAKPKMEIILQFLIFDLEHDPLQVGEGDCKYDWLDIWDGIPHVGPLIGKYCGTKTPSELRSSTGILSLTFHTDMAVAKDGFSARYYLVHQEPLENFQCNVPLGMESGRIANEQISASSTYSDGRWTPQQSRLHGDDNGWTPNLDSNKEYLQVDLRFLTMLTAIATQGAISRETQNGYYVKSYKLEVSTNGEDWMVYRHGKNHKVFQANNDATEVVLNKLHAPLLTRFVRIRPQTWHSGIALRLELFGCRVTDAPCSNMLGMLSGLIADSQISASSTQEYLWSPSAARLVSSRSGWFPRIPQAQPGEEWLQVDLGTPKTVKGVIIQGARGGDSITAVEARAFVRKFKVSYSLNGKDWEYIQDPRTQQPKLFEGNMHYDTPDIRRFDPIPAQYVRVYPERWSPAGIGMRLEVLGCDWTDSKPTVETLGPTVKSEETTTPYPTEEEATECGENCSFEDDKDLQLPSGFNCNFDFLEEPCGWMYDHAKWLRTTWASSSSPNDRTFPDDRNFLRLQSDSQREGQYARLISPPVHLPRSPVCMEFQYQATGGRGVALQVVREASQESKLLWVIREDQGGEWKHGRIILPSYDMEYQIVFEGVIGKGRSGEIAIDDIRISTDVPLENCMEPISAFAGENFKGGTLLPGTEPTVDTVPMQPIPAYWYYVMAAGGAVLVLVSVALALVLHYHRFRYAAKKTDHSITYKTSHYTNGAPLAVEPTLTIKLEQDRGSHC

SEQ ID NO: 9549 - protein, 926 aa, Homo sapiens
MDMFPLTWVFLALYFSRHQVRGQPDPPCGGRLNSKDAGYITSPGYPQDYPSHQNCEWIVYAPEPNQKIVLNFNPHFEIEKHDCKYDFIEIRDGDSESADLLGKHCGNIAPPTIISSGSMLYIKFTSDYARQGAGFSLRYEIFKTGSEDCSKNFTSPNGTIESPGFPEKYPHNLDCTFTILAKPKMEIILQFLIFDLEHDPLQVGEGDCKYDWLDIWDGIPHVGPLIGKYCGTKTPSELRSSTGILSLTFHTDMAVAKDGFSARYYLVHQEPLENFQCNVPLGMESGRIANEQISASSTYSDGRWTPQQSRLHGDDNGWTPNLDSNKEYLQVDLRFLTMLTAIATQGAISRETQNGYYVKSYKLEVSTNGEDWMVYRHGKNHKVFQANNDATEVVLNKLHAPLLTRFVRIRPQTWHSGIALRLELFGCRVTDAPCSNMLGMLSGLIADSQISASSTQEYLWSPSAARLVSSRSGWFPRIPQAQPGEEWLQVDLGTPKTVKGVIIQGARGGDSITAVEARAFVRKFKVSYSLNGKDWEYIQDPRTQQPKLFEGNMHYDTPDIRRFDPIPAQYVRVYPERWSPAGIGMRLEVLGCDWTDSKPTVETLGPTVKSEETTTPYPTEEEATECGENCSFEDDKDLQLPSGFNCNFDFLEEPCGWMYDHAKWLRTTWASSSSPNDRTFPDDRNFLRLQSDSQREGQYARLISPPVHLPRSPVCMEFQYQATGGRGVALQVVREASQESKLLWVIREDQGGEWKHGRIILPSYDMEYQIVFEGVIGKGRSGEIAIDDIRISTDVPLENCMEPISAFAVDIPEIHEREGYEDEIDDEYEVDWSNSSSATSGSGAPSTDKEKSWLYTLDPILITIIAMSSLGVLLGATCAGLLLYCTCSYSGLSSRSCTTLENYNFELYDGLKHKVKMNHQKCCSEA

SEQ ID NO: 9550 - protein, 931 aa, Homo sapiens
MDMFPLTWVFLALYFSRHQVRGQPDPPCGGRLNSKDAGYITSPGYPQDYPSHQNCEWIVYAPEPNQKIVLNFNPHFEIEKHDCKYDFIEIRDGDSESADLLGKHCGNIAPPTIISSGSMLYIKFTSDYARQGAGFSLRYEIFKTGSEDCSKNFTSPNGTIESPGFPEKYPHNLDCTFTILAKPKMEIILQFLIFDLEHDPLQVGEGDCKYDWLDIWDGIPHVGPLIGKYCGTKTPSELRSSTGILSLTFHTDMAVAKDGFSARYYLVHQEPLENFQCNVPLGMESGRIANEQISASSTYSDGRWTPQQSRLHGDDNGWTPNLDSNKEYLQVDLRFLTMLTAIATQGAISRETQNGYYVKSYKLEVSTNGEDWMVYRHGKNHKVFQANNDATEVVLNKLHAPLLTRFVRIRPQTWHSGIALRLELFGCRVTDAPCSNMLGMLSGLIADSQISASSTQEYLWSPSAARLVSSRSGWFPRIPQAQPGEEWLQVDLGTPKTVKGVIIQGARGGDSITAVEARAFVRKFKVSYSLNGKDWEYIQDPRTQQPKLFEGNMHYDTPDIRRFDPIPAQYVRVYPERWSPAGIGMRLEVLGCDWTDSKPTVETLGPTVKSEETTTPYPTEEEATECGENCSFEDDKDLQLPSGFNCNFDFLEEPCGWMYDHAKWLRTTWASSSSPNDRTFPDDRNFLRLQSDSQREGQYARLISPPVHLPRSPVCMEFQYQATGGRGVALQVVREASQESKLLWVIREDQGGEWKHGRIILPSYDMEYQIVFEGVIGKGRSGEIAIDDIRISTDVPLENCMEPISAFAGENFKVDIPEIHEREGYEDEIDDEYEVDWSNSSSATSGSGAPSTDKEKSWLYTLDPILITIIAMSSLGVLLGATCAGLLLYCTCSYSGLSSRSCTTLENYNFELYDGLKHKVKMNHQKCCSEA

SEQ ID NO: 9551 - protein, 901 aa, Homo sapiens
MDMFPLTWVFLALYFSRHQVRGQPDPPCGGRLNSKDAGYITSPGYPQDYPSHQNCEWIVYAPEPNQKIVLNFNPHFEIEKHDCKYDFIEIRDGDSESADLLGKHCGNIAPPTIISSGSMLYIKFTSDYARQGAGFSLRYEIFKTGSEDCSKNFTSPNGTIESPGFPEKYPHNLDCTFTILAKPKMEIILQFLIFDLEHDPLQVGEGDCKYDWLDIWDGIPHVGPLIGKYCGTKTPSELRSSTGILSLTFHTDMAVAKDGFSARYYLVHQEPLENFQCNVPLGMESGRIANEQISASSTYSDGRWTPQQSRLHGDDNGWTPNLDSNKEYLQVDLRFLTMLTAIATQGAISRETQNGYYVKSYKLEVSTNGEDWMVYRHGKNHKVFQANNDATEVVLNKLHAPLLTRFVRIRPQTWHSGIALRLELFGCRVTDAPCSNMLGMLSGLIADSQISASSTQEYLWSPSAARLVSSRSGWFPRIPQAQPGEEWLQVDLGTPKTVKGVIIQGARGGDSITAVEARAFVRKFKVSYSLNGKDWEYIQDPRTQQPKLFEGNMHYDTPDIRRFDPIPAQYVRVYPERWSPAGIGMRLEVLGCDWTDSKPTVETLGPTVKSEETTTPYPTEEEATECGENCSFEDDKDLQLPSGFNCNFDFLEEPCGWMYDHAKWLRTTWASSSSPNDRTFPDDRNFLRLQSDSQREGQYARLISPPVHLPRSPVCMEFQYQATGGRGVALQVVREASQESKLLWVIREDQGGEWKHGRIILPSYDMEYQIVFEGVIGKGRSGEIAIDDIRISTDVPLENCMEPISAFAGGTLLPGTEPTVDTVPMQPIPAYWYYVMAAGGAVLVLVSVALALVLHYHRFRYAAKKTDHSITYKTSHYTNGAPLAVEPTLTIKLEQDRGSHC

SEQ ID NO: 9552 - protein, 555 aa, Homo sapiens
MDMFPLTWVFLALYFSRHQVRGQPDPPCGGRLNSKDAGYITSPGYPQDYPSHQNCEWIVYAPEPNQKIVLNFNPHFEIEKHDCKYDFIEIRDGDSESADLLGKHCGNIAPPTIISSGSMLYIKFTSDYARQGAGFSLRYEIFKTGSEDCSKNFTSPNGTIESPGFPEKYPHNLDCTFTILAKPKMEIILQFLIFDLEHDPLQVGEGDCKYDWLDIWDGIPHVGPLIGKYCGTKTPSELRSSTGILSLTFHTDMAVAKDGFSARYYLVHQEPLENFQCNVPLGMESGRIANEQISASSTYSDGRWTPQQSRLHGDDNGWTPNLDSNKEYLQVDLRFLTMLTAIATQGAISRETQNGYYVKSYKLEVSTNGEDWMVYRHGKNHKVFQANNDATEVVLNKLHAPLLTRFVRIRPQTWHSGIALRLELFGCRVTDAPCSNMLGMLSGLIADSQISASSTQEYLWSPSAARLVSSRSGWFPRIPQAQPGEEWLQVDLGTPKTVKGVIIQGARGGDSITAVEARAFVRKFKVSYSLNGKDWEYIQDPRTQQPKVGCSWRPL

SEQ ID NO: 9553 - protein, 909 aa, Homo sapiens
MDMFPLTWVFLALYFSRHQVRGQPDPPCGGRLNSKDAGYITSPGYPQDYPSHQNCEWIVYAPEPNQKIVLNFNPHFEIEKHDCKYDFIEIRDGDSESADLLGKHCGNIAPPTIISSGSMLYIKFTSDYARQGAGFSLRYEIFKTGSEDCSKNFTSPNGTIESPGFPEKYPHNLDCTFTILAKPKMEIILQFLIFDLEHDPLQVGEGDCKYDWLDIWDGIPHVGPLIGKYCGTKTPSELRSSTGILSLTFHTDMAVAKDGFSARYYLVHQEPLENFQCNVPLGMESGRIANEQISASSTYSDGRWTPQQSRLHGDDNGWTPNLDSNKEYLQVDLRFLTMLTAIATQGAISRETQNGYYVKSYKLEVSTNGEDWMVYRHGKNHKVFQANNDATEVVLNKLHAPLLTRFVRIRPQTWHSGIALRLELFGCRVTDAPCSNMLGMLSGLIADSQISASSTQEYLWSPSAARLVSSRSGWFPRIPQAQPGEEWLQVDLGTPKTVKGVIIQGARGGDSITAVEARAFVRKFKVSYSLNGKDWEYIQDPRTQQPKLFEGNMHYDTPDIRRFDPIPAQYVRVYPERWSPAGIGMRLEVLGCDWTDSKPTVETLGPTVKSEETTTPYPTEEEATECGENCSFEDDKDLQLPSGFNCNFDFLEEPCGWMYDHAKWLRTTWASSSSPNDRTFPDDRNFLRLQSDSQREGQYARLISPPVHLPRSPVCMEFQYQATGGRGVALQVVREASQESKLLWVIREDQGGEWKHGRIILPSYDMEYQIVFEGVIGKGRSGEIAIDDIRISTDVPLENCMEPISAFADEYEVDWSNSSSATSGSGAPSTDKEKSWLYTLDPILITIIAMSSLGVLLGATCAGLLLYCTCSYSGLSSRSCTTLENYNFELYDGLKHKVKMNHQKCCSEA

SEQ ID NO: 9554 - protein, 197 aa, Homo sapiens
MQRWKAAALASVLCSSVLSIWMCREGLLLSHRLGPALVPLHRLPRTLDARIARLAQYRALLQGAPDAMELRELTPWAGRPPGPRRRAGPRRRRARARLGARPCGLRELEVRVSELGLGYASDETVLFRYCAGACEAAARVYDLGLRRLRQRRRLRRERVRAQPCCRPTAYEDEVSFLDAHSRYHTVHELSARECACV

SEQ ID NO: 9555 - protein, 214 aa, Homo sapiens [sequence omitted]

SEQ ID NO: 9556 - protein, 851 aa, Homo sapiens
GKEEYIATFKGSEYFCYDLSQNPIQSSSDEITLSFKTLQRNGLMLHTGKSADYVNLALKNGAVSLVINLGSGAFEALVEPVNGKFNDNAWHDVKVTRNLRQHSGIGHAMVNKLHCSVTISVDGILTTTGYTQEDYTMLGSDDFFYVGGSPSTADLPGSPVSNNFMGCLKEVVYKNNDVRLELSRLAKQGDPKMKIHGVVAFKCENVATLDPITFETPESFISLPKWNAKKTGSISFDFRTTEPNGLILFSHGKPRHQKDAKHPQMIKVDFFAIEMLDGHLYLLLDMGSGTIKIKALLKKVNDGEWYHVDFQRDGRSGTISVNTLRTPYTAPGESEILDLDDELYLGGLPENKAGLVFPTEVWTALLNYGYVGCIRDLFIDGQSKDIRQMAEVQSTAGVKPSCSKETAKPCLSNPCKNNGMCRDGWNRYVCDCSGTGYLGRSCEREATVLSYDGSMFMKIQLPVVMHTEAEDVSLRFRSQRAYGILMATTSRDSADTLRLELDAGRVKLTVNLDCIRINCNSSKGPETLFAGYNLNDNEWHTVRVVRRGKSLKLTVDDQQAMTGQMAGDHTRLEFHNIETGIITERRYLSSVPSNFIGHLQSLTFNGMAYIDLCKNGDIDYCELNARFGFRNIIADPVTFKTKSSYVALATLQAYTSMHLFFQFKTTSLDGLILYNSGDGNDFIVVELVKGYLHYVFDLGNGANLIKGSSNKPLNDNQWHNVMISRDTSNLHTVKIDTKITTQITAGARNLDLKSDLYIGGVAKETYKSLPKLVHAKEGFQGCLASVDLNGRLPDLISDALFCNGQIERGCEGPSTTCQEDSCSNQGVCLQQWDGFSCDCSMTSFSGPLCND

SEQ ID NO: 9557 - protein, 836 aa, Homo sapiens
GKEEYIATFKGSEYFCYDLSQNPIQSSSDEITLSFKTLQRNGLMLHTGKSADYVNLALKNGAVSLVINLGSGAFEALVEPVNGKFNDNAWHDVKVTRNLRQVTISVDGILTTTGYTQEDYTMLGSDDFFYVGGSPSTADLPGSPVSNNFMGCLKEVVYKNNDVRLELSRLAKQGDPKMKIHGVVAFKCENVATLDPITFETPESFISLPKWNAKKTGSISFDFRTTEPNGLILFSHGKPRHQKDAKHPQMIKVDFFAIEMLDGHLYLLLDMGSGTIKIKALLKKVNDGEWYHVDFQRDGRSGTISVNTLRTPYTAPGESEILDLDDELYLGGLPENKAGLVFPTEVWTALLNYGYVGCIRDLFIDGQSKDIRQMAEVQSTAGVKPSCSKETAKPCLSNPCKNNGMCRDGWNRYVCDCSGTGYLGRSCEREATVLSYDGSMFMKIQLPVVMHTEAEDVSLRFRSQRAYGILMATTSRDSADTLRLELDAGRVKLTVNLDCIRINCNSSKGPETLFAGYNLNDNEWHTVRVVRRGKSLKLTVDDQQAMTGQMAGDHTRLEFHNIETGIITERRYLSSVPSNFIGHLQSLTFNGMAYIDLCKNGDIDYCELNARFGFRNIIADPVTFKTKSSYVALATLQAYTSMHLFFQFKTTSLDGLILYNSGDGNDFIVVELVKGYLHYVFDLGNGANLIKGSSNKPLNDNQWHNVMISRDTSNLHTVKIDTKITTQITAGARNLDLKSDLYIGGVAKETYKSLPKLVHAKEGFQGCLASVDLNGRLPDLISDALFCNGQIERGCEGPSTTCQEDSCSNQGVCLQQWDGFSCDCSMTSFSGPLCND

SEQ ID NO: 9558 - protein, 198 aa, Homo sapiens
MAAENDANIAIVGNVRLVGEVPSSMTTESTATAMQSEMSTSIMETTTTLATSTARRGKPPTKEPISQTTDDILVASAECPSDDEDIDPCEPSSGGLANPTRAGGREPYPGSAEVIRESSSTTGMVVGIVAAAALCILILLYAMYKYRNRDEGSYHVDESRNYISNSAQSNGAVVKEKQPSSAKSSNKNKKNKDKEYYV

SEQ ID NO: 9559 - protein, 139 aa, Homo sapiens
MDMRWHCENLQTTDDILVASAECPSDDEDIDPCEPSSANPTRAGGREPYPGSAEVIRESSSTTGMVVGIVAAAALCILILLYAMYKYRNRDEGSYHVDESRNYISNSAQSNGAVVKEKQPSSAKSSNKNKKNKDKEYYV

SEQ ID NO: 9560 - protein, 142 aa, Homo sapiens
MDMRWHCENLQTTDDILVASAECPSDDEDIDPCEPSSGGLANPTRAGGREPYPGSAEVIRESSSTTGMVVGIVAAAALCILILLYAMYKYRNRDEGSYHVDESRNYISNSAQSNGAVVKEKQPSSAKSSNKNKKNKDKEYYV

SEQ ID NO: 9561 - protein, 62 aa, Homo sapiens
MDMRWHCENLQTTDDILVASAECPSDDEDIDPCEPSSGTKQTMWKTSRDHRILPNARRERKD

SEQ ID NO: 9562 - protein, 143 aa, Homo sapiens
MDMRWHCENLQVTTDDILVASAECPSDDEDIDPCEPSSGGLANPTRAGGREPYPGSAEVIRESSSTTGMVVGIVAAAALCILILLYAMYKYRNRDEGSYHVDESRNYISNSAQSNGAVVKEKQPSSAKSSNKNKKNKDKEYYV

SEQ ID NO: 9563 - protein, 1477 aa, Homo sapiens
MGTALLQRGGCFLLCLSLLLLGCWAELGSGLEFPGAEGQWTRFPKWNACCESEMSFQLKTRSARGLVLYFDDEGFCDFLELILTRGGRLQLSFSIFCAEPATLLADTPVNDGAWHSVRIRRQFRNTTLFIDQVEAKWVEVKSKRRDMTVFSGLFVGGLPPELRAAALKLTLASVREREPFKGWIRDVRVNSSQVLPVDSGEVKLDDEPPNSGGGSPCEAGEEGEGGVCLNGGVCSVVDDQAVCDCSRTGFRGKDCSQEDNNVEGLAHLMMGDQGKSKGKEEYIATFKGSEYFCYDLSQNPIQSSSDEITLSFKTLQRNGLMLHTGKSADYVNLALKNGAVSLVINLGSGAFEALVEPVNGKFNDNAWHDVKVTRNLRQHSGIGHAMVTISVDGILTTTGYTQEDYTMLGSDDFFYVGGSPSTADLPGSPVSNNFMGCLKEVVYKNNDVRLELSRLAKQGDPKMKIHGVVAFKCENVATLDPITFETPESFISLPKWNAKKTGSISFDFRTTEPNGLILFSHGKPRHQKDAKHPQMIKVDFFAIEMLDGHLYLLLDMGSGTIKIKALLKKVNDGEWYHVDFQRDGRSGTISVNTLRTPYTAPGESEILDLDDELYLGGLPENKAGLVFPTEVWTALLNYGYVGCIRDLFIDGQSKDIRQMAEVQSTAGVKPSCSKETAKPCLSNPCKNNGMCRDGWNRYVCDCSGTGYLGRSCEREATVLSYDGSMFMKIQLPVVMHTEAEDVSLRFRSQRAYGILMATTSRDSADTLRLELDAGRVKLTVNLDCIRINCNSSKGPETLFAGYNLNDNEWHTVRVVRRGKSLKLTVDDQQAMTGQMAGDHTRLEFHNIETGIITERRYLSSVPSNFIGHLQSLTFNGMAYIDLCKNGDIDYCELNARFGFRNIIADPVTFKTKSSYVALATLQAYTSMHLFFQFKTTSLDGLILYNSGDGNDFIVVELVKGYLHYVFDLGNGANLIKGSSNKPLNDNQWHNVMISRDTSNLHTVKIDTKITTQITAGARNLDLKSDLYIGGVAKETYKSLPKLVHAKEGFQGCLASVDLNGRLPDLISDALFCNGQIERGCEGPSTTCQEDSCSNQGVCLQQWDGFSCDCSMTSFSGPLCNDPGTTYIFSKGGGQITYKWPPNDRPSTRADRLAIGFSTVQKEAVLVRVDSSSGLGDYLELHIHQGKIGVKFNVGTDDIAIEESNAIINDGKYHVVRFTRSGGNATLQVDSWPVIERYPAGRQLTIFNSQATIIIGGKEQGQPFQGQLSGLYYNGLKVLNMAAENDANIAIVGNVRLVGEVPSSMTTESTATAMQSEMSTSIMETTTTLATSTARRGKPPTKEPISQTTDDILVASAECPSDDEDIDPCEPSSGGLANPTRAGGREPYPGSAEVIRESSSTTGMVVGIVAAAALCILILLYAMYKYRNRDEGSYHVDESRNYISNSAQSNGAVVKEKQPSSAKSSNKNKKNKDKEYYV

SEQ ID NO: 9564 - protein, 278 aa, Homo sapiens
MGTALLQRGGCFLLCLSLLLLGCWAELGSGLEFPGAEGQWTRFPKWNACCESEMSFQLKTRSARGLVLYFDDEGFCDFLELILTRGGRLQLSFSIFCAEPATLLADTPVNDGAWHSVRIRRQFRNTTLFIDQVEAKWVEVKSKRRDMTVFSGLFVGGLPPELRAAALKLTLASVREREPFKGWIRDVRVNSSQVLPVDSGEVKLDDEPPNSGGGSPCEAGEEGEGGVCLNGGVCSVVDDQAVCDCSRTGFRGKDCSQEDNNVEGLAHLMMGDQGKSKD

SEQ ID NO: 9565 - protein, 1547 aa, Homo sapiens
MGTALLQRGGCFLLCLSLLLLGCWAELGSGLEFPGAEGQWTRFPKWNACCESEMSFQLKTRSARGLVLYFDDEGFCDFLELILTRGGRLQLSFSIFCAEPATLLADTPVNDGAWHSVRIRRQFRNTTLFIDQVEAKWVEVKSKRRDMTVFSGLFVGGLPPELRAAALKLTLASVREREPFKGWIRDVRVNSSQVLPVDSGEVKLDDEPPNSGGGSPCEAGEEGEGGVCLNGGVCSVVDDQAVCDCSRTGFRGKDCSQEIKFGLQCVLPVLLHDNDQGKYCCINTAKPLTEKDNNVEGLAHLMMGDQGKSKGKEEYIATFKGSEYFCYDLSQNPIQSSSDEITLSFKTLQRNGLMLHTGKSADYVNLALKNGAVSLVINLGSGAFEALVEPVNGKFNDNAWHDVKVTRNLRQHSGIGHAMVNKLHCSVTISVDGILTTTGYTQEDYTMLGSDDFFYVGGSPSTADLPGSPVSNNFMGCLKEVVYKNNDVRLELSRLAKQGDPKMKIHGVVAFKCENVATLDPITFETPESFISLPKWNAKKTGSISFDFRTTEPNGLILFSHGKPRHQKDAKHPQMIKVDFFAIEMLDGHLYLLLDMGSGTIKIKALLKKVNDGEWYHVDFQRDGRSGTISVNTLRTPYTAPGESEILDLDDELYLGGLPENKAGLVFPTEVWTALLNYGYVGCIRDLFIDGQSKDIRQMAEVQSTAGVKPSCSKETAKPCLSNPCKNNGMCRDGWNRYVCDCSGTGYLGRSCEREATVLSYDGSMFMKIQLPVVMHTEAEDVSLRFRSQRAYGILMATTSRDSADTLRLELDAGRVKLTVNLDCIRINCNSSKGPETLFAGYNLNDNEWHTVRVVRRGKSLKLTVDDQQAMTGQMAGDHTRLEFHNIETGIITERRYLSSVPSNFIGHLQSLTFNGMAYIDLCKNGDIDYCELNARFGFRNIIADPVTFKTKSSYVALATLQAYTSMHLFFQFKTTSLDGLILYNSGDGNDFIVVELVKGYLHYVFDLGNGANLIKGSSNKPLNDNQWHNVMISRDTSNLHTVKIDTKITTQITAGARNLDLKSDLYIGGVAKETYKSLPKLVHAKEGFQGCLASVDLNGRLPDLISDALFCNGQIERGCEGPSTTCQEDSCSNQGVCLQQWDGFSCDCSMTSFSGPLCNDPGTTYIFSKGGGQITYKWPPNDRPSTRADRLAIGFSTVQKEAVLVRVDSSSGLGDYLELHIHQGKIGVKFNVGTDDIAIEESNAIINDGKYHVVRFTRSGGNATLQVDSWPVIERYPAGNNDNERLAIARQRIPYRLGRVVDEWLLDKGRQLTIFNSQATIIIGGKEQGQPFQGQLSGLYYNGLKVLNMAAENDANIAIVGNVRLVGEVPSSMTTESTATAMQSEMSTSIMETTTTLATSTARRGKPPTKEPISQTTDDILVASAECPSDDEDIDPCEPSSGGLANPTRAGGREPYPGSAEVIRESSSTTGMVVGIVAAAALCILILLYAMYKYRNRDEGSYHVDESRNYISNSAQSNGAVVKEKQPSSAKSSNKNKKNKDKEYYV

SEQ ID NO: 9566 - protein, 1495 aa, Homo sapiens
MGTALLQRGGCFLLCLSLLLLGCWAELGSGLEFPGAEGQWTRFPKWNACCESEMSFQLKTRSARGLVLYFDDEGFCDFLELILTRGGRLQLSFSIFCAEPATLLADTPVNDGAWHSVRIRRQFRNTTLFIDQVEAKWVEVKSKRRDMTVFSGLFVGGLPPELRAAALKLTLASVREREPFKGWIRDVRVNSSQVLPVDSGEVKLDDEPPNSGGGSPCEAGEEGEGGVCLNGGVCSVVDDQAVCDCSRTGFRGKDCSQEDNNVEGLAHLMMGDQGKEEYIATFKGSEYFCYDLSQNPIQSSSDEITLSFKTLQRNGLMLHTGKSADYVNLALKNGAVSLVINLGSGAFEALVEPVNGKFNDNAWHDVKVTRNLRQVTISVDGILTTTGYTQEDYTMLGSDDFFYVGGSPSTADLPGSPVSNNFMGCLKEVVYKNNDVRLELSRLAKQGDPKMKIHGVVAFKCENVATLDPITFETPESFISLPKWNAKKTGSISFDFRTTEPNGLILFSHGKPRHQKDAKHPQMIKVDFFAIEMLDGHLYLLLDMGSGTIKIKALLKKVNDGEWYHVDFQRDGRSGTISVNTLRTPYTAPGESEILDLDDELYLGGLPENKAGLVFPTEVWTALLNYGYVGCIRDLFIDGQSKDIRQMAEVQSTAGVKPSCSKETAKPCLSNPCKNNGMCRDGWNRYVCDCSGTGYLGRSCEREATVLSYDGSMFMKIQLPVVMHTEAEDVSLRFRSQRAYGILMATTSRDSADTLRLELDAGRVKLTVNLDCIRINCNSSKGPETLFAGYNLNDNEWHTVRVVRRGKSLKLTVDDQQAMTGQMAGDHTRLEFHNIETGIITERRYLSSVPSNFIGHLQSLTFNGMAYIDLCKNGDIDYCELNARFGFRNIIADPVTFKTKSSYVALATLQAYTSMHLFFQFKTTSLDGLILYNSGDGNDFIVVELVKGYLHYVFDLGNGANLIKGSSNKPLNDNQWHNVMISRDTSNLHTVKIDTKITTQITAGARNLDLKSDLYIGGVAKETYKSLPKLVHAKEGFQGCLASVDLNGRLPDLISDALFCNGQIERGCEGPSTTCQEDSCSNQGVCLQQWDGFSCDCSMTSFSGPLCNDPGTTYIFSKGGGQITYKWPPNDRPSTRADRLAIGFSTVQKEAVLVRVDSSSGLGDYLELHIHQGKIGVKFNVGTDDIAIEESNAIINDGKYHVVRFTRSGGNATLQVDSWPVIERYPAGNNDNERLAIARQRIPYRLGRVVDEWLLDKGRQLTIFNSQATIIIGGKEQGQPFQGQLSGLYYNGLKVLNMAAENDANIAIVGNVRLVGEVPSSMTTESTATAMQSEMSTSIMETTTTLATSTARRGKPPTKEPISQTTDDILVASAECPSDDEDIDPCEPSSGGLANPTRAGGREPYPGSAEVIRESSSTTGMVVGIVAAAALCILILLYAMYKYRNRDEGSYHVDESRNYISNSAQSNGAVVKEKQPSSAKSSNKNKKNKDKEYYV

SEQ ID NO: 9567 - protein, 1507 aa, Homo sapiens
MGTALLQRGGCFLLCLSLLLLGCWAELGSGLEFPGAEGQWTRFPKWNACCESEMSFQLKTRSARGLVLYFDDEGFCDFLELILTRGGRLQLSFSIFCAEPATLLADTPVNDGAWHSVRIRRQFRNTTLFIDQVEAKWVEVKSKRRDMTVFSGLFVGGLPPELRAAALKLTLASVREREPFKGWIRDVRVNSSQVLPVDSGEVKLDDEPPNSGGGSPCEAGEEGEGGVCLNGGVCSVVDDQAVCDCSRTGFRGKDCSQEDNNVEGLAHLMMGDQGKSKGKEEYIATFKGSEYFCYDLSQNPIQSSSDEITLSFKTLQRNGLMLHTGKSADYVNLALKNGAVSLVINLGSGAFEALVEPVNGKFNDNAWHDVKVTRNLRQHSGIGHAMVTISVDGILTTTGYTQEDYTMLGSDDFFYVGGSPSTADLPGSPVSNNFMGCLKEVVYKNNDVRLELSRLAKQGDPKMKIHGVVAFKCENVATLDPITFETPESFISLPKWNAKKTGSISFDFRTTEPNGLILFSHGKPRHQKDAKHPQMIKVDFFAIEMLDGHLYLLLDMGSGTIKIKALLKKVNDGEWYHVDFQRDGRSGTISVNTLRTPYTAPGESEILDLDDELYLGGLPENKAGLVFPTEVWTALLNYGYVGCIRDLFIDGQSKDIRQMAEVQSTAGVKPSCSKETAKPCLSNPCKNNGMCRDGWNRYVCDCSGTGYLGRSCEREATVLSYDGSMFMKIQLPVVMHTEAEDVSLRFRSQRAYGILMATTSRDSADTLRLELDAGRVKLTVNLDCIRINCNSSKGPETLFAGYNLNDNEWHTVRVVRRGKSLKLTVDDQQAMTGQMAGDHTRLEFHNIETGIITERRYLSSVPSNFIGHLQSLTFNGMAYIDLCKNGDIDYCELNARFGFRNIIADPVTFKTKSSYVALATLQAYTSMHLFFQFKTTSLDGLILYNSGDGNDFIVVELVKGYLHYVFDLGNGANLIKGSSNKPLNDNQWHNVMISRDTSNLHTVKIDTKITTQITAGARNLDLKSDLYIGGVAKETYKSLPKLVHAKEGFQGCLASVDLNGRLPDLISDALFCNGQIERGCEGPSTTCQEDSCSNQGVCLQQWDGFSCDCSMTSFSGPLCNDPGTTYIFSKGGGQITYKWPPNDRPSTRADRLAIGFSTVQKEAVLVRVDSSSGLGDYLELHIHQGKIGVKFNVGTDDIAIEESNAIINDGKYHVVRFTRSGGNATLQVDSWPVIERYPAGNNDNERLAIARQRIPYRLGRVVDEWLLDKGRQLTIFNSQATIIIGGKEQGQPFQGQLSGLYYNGLKVLNMAAENDANIAIVGNVRLVGEVPSSMTTESTATAMQSEMSTSIMETTTTLATSTARRGKPPTKEPISQTTDDILVASAECPSDDEDIDPCEPSSGGLANPTRAGGREPYPGSAEVIRESSSTTGMVVGIVAAAALCILILLYAMYKYRNRDEGSYHVDESRNYISNSAQSNGAVVKEKQPSSAKSSNKNKKNKDKEYYV

SEQ ID NO: 9568 - protein, 1496 aa, Homo sapiens
MGTALLQRGGCFLLCLSLLLLGCWAELGSGLEFPGAEGQWTRFPKWNACCESEMSFQLKTRSARGLVLYFDDEGFCDFLELILTRGGRLQLSFSIFCAEPATLLADTPVNDGAWHSVRIRRQFRNTTLFIDQVEAKWVEVKSKRRDMTVFSGLFVGGLPPELRAAALKLTLASVREREPFKGWIRDVRVNSSQVLPVDSGEVKLDDEPPNSGGGSPCEAGEEGEGGVCLNGGVCSVVDDQAVCDCSRTGFRGKDCSQEDNNVEGLAHLMMGDQGKSKGKEEYIATFKGSEYFCYDLSQNPIQSSSDEITLSFKTLQRNGLMLHTGKSADYVNLALKNGAVSLVINLGSGAFEALVEPVNGKFNDNAWHDVKVTRNLRQVTISVDGILTTTGYTQEDYTMLGSDDFFYVGGSPSTADLPGSPVSNNFMGCLKEVVYKNNDVRLELSRLAKQGDPKMKIHGVVAFKCENVATLDPITFETPESFISLPKWNAKKTGSISFDFRTTEPNGLILFSHGKPRHQKDAKHPQMIKVDFFAIEMLDGHLYLLLDMGSGTIKIKALLKKVNDGEWYHVDFQRDGRSGTISVNTLRTPYTAPGESEILDLDDELYLGGLPENKAGLVFPTEVWTALLNYGYVGCIRDLFIDGQSKDIRQMAEVQSTAGVKPSCSKETAKPCLSNPCKNNGMCRDGWNRYVCDCSGTGYLGRSCEREATVLSYDGSMFMKIQLPVVMHTEAEDVSLRFRSQRAYGILMATTSRDSADTLRLELDAGRVKLTVNLDCIRINCNSSKGPETLFAGYNLNDNEWHTVRVVRRGKSLKLTVDDQQAMTGQMAGDHTRLEFHNIETGIITERRYLSSVPSNFIGHLQSLTFNGMAYIDLCKNGDIDYCELNARFGFRNIIADPVTFKTKSSYVALATLQAYTSMHLFFQFKTTSLDGLILYNSGDGNDFIVVELVKGYLHYVFDLGNGANLIKGSSNKPLNDNQWHNVMISRDTSNLHTVKIDTKITTQITAGARNLDLKSDLYIGGVAKETYKSLPKLVHAKEGFQGCLASVDLNGRLPDLISDALFCNGQIERGCEGPSTTCQEDSCSNQGVCLQQWDGFSCDCSMTSFSGPLCNDPGTTYIFSKGGGQITYKWPPNDRPSTRADRLAIGFSTVQKEAVLVRVDSSSGLGDYLELHIHQGKIGVKFNVGTDDIAIEESNAIINDGKYHVVRFTRSGGNATLQVDSWPVIERYPAGNNDNERLAIARQRIPYRLGRVVDEWLLDKGRQLTIFNSQATIIIGGKEQGQPFQGQLSGLYYNGLKVLNMAAENDANIAIVGNVRLVGEVPSSMTTESTATAMQSEMSTSIMETTTTLATSTARRGKPPTKEPISQTTDDILVASAECPSDDEDIDPCEPSSANPTRAGGREPYPGSAEVIRESSSTTGMVVGIVAAAALCILILLYAMYKYRNRDEGSYHVDESRNYISNSAQSNGAVVKEKQPSSAKSSNKNKKNKDKEYYV

SEQ ID NO: 9569 - protein, 459 aa, Homo sapiens
MGTALLQRGGCFLLCLSLLLLGCWAELGSGLEFPGAEGQWTRFPKWNACCESEMSFQLKTRSARGLVLYFDDEGFCDFLELILTRGGRLQLSFSIFCAEPATLLADTPVNDGAWHSVRIRRQFRNTTLFIDQVEAKWVEVKSKRRDMTVFSGLFVGGLPPELRAAALKLTLASVREREPFKGWIRDVRVNSSQVLPVDSGEVKLDDEPPNSGGGSPCEAGEEGEGGVCLNGGVCSVVDDQAVCDCSRTGFRGKDCSQGKEEYIATFKGSEYFCYDLSQNPIQSSSDEITLSFKTLQRNGLMLHTGKSADYVNLALKNGAVSLVINLGSGAFEALVEPVNGKFNDNAWHDVKVTRNLRQVTISVDGILTTTGYTQEDYTMLGSDDFFYVGGSPSTADLPGSPVSNNFMGCLKEVNIVAIRIIPNSWSHHFRSSMKAPLLKTRCSRVKRHNFKFNILLLFM

SEQ ID NO: 9570 - protein, 277 aa, Homo sapiens
MGTALLQRGGCFLLCLSLLLLGCWAELGSGLEFPGAEGQWTRFPKWNACCESEMSFQLKTRSARGLVLYFDDEGFCDFLELILTRGGRLQLSFSIFCAEPATLLADTPVNDGAWHSVRIRRQFRNTTLFIDQVEAKWVEVKSKRRDMTVFSGLFVGGLPPELRAAALKLTLASVREREPFKGWIRDVRVNSSQVLPVDSGEVKLDDEPPNSGGGSPCEAGEEGEGGVCLNGGVCSVVDDQAVCDCSRTGFRGKDCSQDNNVEGLAHLMMGDQGKSKD

SEQ ID NO: 9571 - protein, 293 aa, Homo sapiens
MGTALLQRGGCFLLCLSLLLLGCWAELGSGLEFPGAEGQWTRFPKWNACCESEMSFQLKTRSARGLVLYFDDEGFCDFLELILTRGGRLQLSFSIFCAEPATLLADTPVNDGAWHSVRIRRQFRNTTLFIDQVEAKWVEVKSKRRDMTVFSGLFVGGLPPELRAAALKLTLASVREREPFKGWIRDVRVNSSQVLPVDSGEVKLDDEPPNSGGGSPCEAGEEGEGGVCLNGGVCSVVDDQAVCDCSRTGFRGKDCSQEDNNVEGLAHLMMGDQGKSKEMNDYLNYKKVKICYT

SEQ ID NO: 9572 - protein, 1499 aa, Homo sapiens
MGTALLQRGGCFLLCLSLLLLGCWAELGSGLEFPGAEGQWTRFPKWNACCESEMSFQLKTRSARGLVLYFDDEGFCDFLELILTRGGRLQLSFSIFCAEPATLLADTPVNDGAWHSVRIRRQFRNTTLFIDQVEAKWVEVKSKRRDMTVFSGLFVGGLPPELRAAALKLTLASVREREPFKGWIRDVRVNSSQVLPVDSGEVKLDDEPPNSGGGSPCEAGEEGEGGVCLNGGVCSVVDDQAVCDCSRTGFRGKDCSQEDNNVEGLAHLMMGDQGKSKGKEEYIATFKGSEYFCYDLSQNPIQSSSDEITLSFKTLQRNGLMLHTGKSADYVNLALKNGAVSLVINLGSGAFEALVEPVNGKFNDNAWHDVKVTRNLRQVTISVDGILTTTGYTQEDYTMLGSDDFFYVGGSPSTADLPGSPVSNNFMGCLKEVVYKNNDVRLELSRLAKQGDPKMKIHGVVAFKCENVATLDPITFETPESFISLPKWNAKKTGSISFDFRTTEPNGLILFSHGKPRHQKDAKHPQMIKVDFFAIEMLDGHLYLLLDMGSGTIKIKALLKKVNDGEWYHVDFQRDGRSGTISVNTLRTPYTAPGESEILDLDDELYLGGLPENKAGLVFPTEVWTALLNYGYVGCIRDLFIDGQSKDIRQMAEVQSTAGVKPSCSKETAKPCLSNPCKNNGMCRDGWNRYVCDCSGTGYLGRSCEREATVLSYDGSMFMKIQLPVVMHTEAEDVSLRFRSQRAYGILMATTSRDSADTLRLELDAGRVKLTVNLDCIRINCNSSKGPETLFAGYNLNDNEWHTVRVVRRGKSLKLTVDDQQAMTGQMAGDHTRLEFHNIETGIITERRYLSSVPSNFIGHLQSLTFNGMAYIDLCKNGDIDYCELNARFGFRNIIADPVTFKTKSSYVALATLQAYTSMHLFFQFKTTSLDGLILYNSGDGNDFIVVELVKGYLHYVFDLGNGANLIKGSSNKPLNDNQWHNVMISRDTSNLHTVKIDTKITTQITAGARNLDLKSDLYIGGVAKETYKSLPKLVHAKEGFQGCLASVDLNGRLPDLISDALFCNGQIERGCEGPSTTCQEDSCSNQGVCLQQWDGFSCDCSMTSFSGPLCNDPGTTYIFSKGGGQITYKWPPNDRPSTRADRLAIGFSTVQKEAVLVRVDSSSGLGDYLELHIHQGKIGVKFNVGTDDIAIEESNAIINDGKYHVVRFTRSGGNATLQVDSWPVIERYPAGNNDNERLAIARQRIPYRLGRVVDEWLLDKGRQLTIFNSQATIIIGGKEQGQPFQGQLSGLYYNGLKVLNMAAENDANIAIVGNVRLVGEVPSSMTTESTATAMQSEMSTSIMETTTTLATSTARRGKPPTKEPISQTTDDILVASAECPSDDEDIDPCEPSSGGLANPTRAGGREPYPGSAEVIRESSSTTGMVVGIVAAAALCILILLYAMYKYRNRDEGSYHVDESRNYISNSAQSNGAVVKEKQPSSAKSSNKNKKNKDKEYYV

SEQ ID NO: 9573 - protein, 56 aa, Homo sapiens
MTSGSKCPSTDSASLLPRKSRGLMAYILPLVQLTSSVGEDCSFQISTFLFDLSSIS

SEQ ID NO: 9574 - protein, 176 aa, Homo sapiens
MTSGSKCPSTDSGKEEYIATFKGSEYFCYDLSQNPIQSSSDEITLSFKTLQRNGLMLHTGKSADYVNLALKNGAVSLVINLGSGAFEALVEPVNGKFNDNAWHDVKVTRNLRQVTISVDGILTTTGYTQEDYTMLGSDDFFYVGGSPSTADLPGSPIQHESTFAEDPMFQSQTAQL

SEQ ID NO: 9575 - protein, 903 aa, Homo sapiens
MTSGSKCPSTDSGKEEYIATFKGSEYFCYDLSQNPIQSSSDEITLSFKTLQRNGLMLHTGKSADYVNLALKNGAVSLVINLGSGAFEALVEPVNGKFNDNAWHDVKVTRNLRQVTISVDGILTTTGYTQEDYTMLGSDDFFYVGGSPSTADLPGSPVSNNFMGCLKEVVYKNNDVRLELSRLAKQGDPKMKIHGVVAFKCENVATLDPITFETPESFISLPKWNAKKTGSISFDFRTTEPNGLILFSHGKPRHQKDAKHPQMIKVDFFAIEMLDGHLYLLLDMGSGTIKIKALLKKVNDGEWYHVDFQRDGRSGTISVNTLRTPYTAPGESEILDLDDELYLGGLPENKAGLVFPTEVWTALLNYGYVGCIRDLFIDGQSKDIRQMAEVQSTAGVKPSCSKETAKPCLSNPCKNNGMCRDGWNRYVCDCSGTGYLGRSCEREATVLSYDGSMFMKIQLPVVMHTEAEDVSLRFRSQRAYGILMATTSRDSADTLRLELDAGRVKLTVNLGKGPETLFAGYNLNDNEWHTVRVVRRGKSLKLTVDDQQAMTGQMAGDHTRLEFHNIETGIITERRYLSSVPSNFIGHLQSLTFNGMAYIDLCKNGDIDYCELNARFGFRNIIADPVTFKTKSSYVALATLQAYTSMHLFFQFKTTSLDGLILYNSGDGNDFIVVELVKGYLHYVFDLGNGANLIKGSSNKPLNDNQWHNVMISRDTSNLHTVKIDTKITTQITAGARNLDLKSDLYIGGVAKETYKSLPKLVHAKEGFQGCLASVDLNGRLPDLISDALFCNGQIERGCEGPSTTCQEDSCSNQGVCLQQWDGFSCDCSMTSFSGPLCNDPGTTYIFSKGGGQITYKWPPNDRPSTRADRLAIGFSTVQKEAVLVRVDSSSGLGDYLELHITLQ

SEQ ID NO: 9576 - protein, 75 aa, Homo sapiens
MVVGIVAAAALCILILLYAMYKYRNRDEGSYHVDESRNYISNSAQSNGAVVKEKQPSSAKSSNKNKKNKDKEYYV

SEQ ID NO: 9577 - protein, 472 aa, Homo sapiens
MYQRMLRCGAELGSPGGGGGGGGGGGAGGRLALLWIVPLTLSGLLGVAWGASSLGAHHIHHFHGSSKHHSVPIAIYRSPASLRGGHAGTTYIFSKGGGQITYKWPPNDRPSTRADRLAIGFSTVQKEAVLVRVDSSSGLGDYLELHIHQGKIGVKFNVGTDDIAIEESNAIINDGKYHVVRFTRSGGNATLQVDSWPVIERYPAGNNDNERLAIARQRIPYRLGRVVDEWLLDKGRQLTIFNSQATIIIGGKEQGQPFQGQLSGLYYNGLKVLNMAAENDANIAIVGNVRLVGEVPSSMTTESTATAMQSEMSTSIMETTTTLATSTARRGKPPTKEPISQTTDDILVASAECPSDDEDIDPCEPSSGGLANPTRAGGREPYPGSAEVIRESSSTTGMVVGIVAAAALCILILLYAMYKYRNRDEGSYHVDESRNYISNSAQSNGAVVKEKQPSSAKSSNKNKKNKDKEYYV

SEQ ID NO: 9578 - protein, 469 aa, Homo sapiens
MYQRMLRCGAELGSPGGGGGGGGGGGAGGRLALLWIVPLTLSGLLGVAWGASSLGAHHIHHFHGSSKHHSVPIAIYRSPASLRGGHAGTTYIFSKGGGQITYKWPPNDRPSTRADRLAIGFSTVQKEAVLVRVDSSSGLGDYLELHIHQGKIGVKFNVGTDDIAIEESNAIINDGKYHVVRFTRSGGNATLQVDSWPVIERYPAGNNDNERLAIARQRIPYRLGRVVDEWLLDKGRQLTIFNSQATIIIGGKEQGQPFQGQLSGLYYNGLKVLNMAAENDANIAIVGNVRLVGEVPSSMTTESTATAMQSEMSTSIMETTTTLATSTARRGKPPTKEPISQTTDDILVASAECPSDDEDIDPCEPSSANPTRAGGREPYPGSAEVIRESSSTTGMVVGIVAAAALCILILLYAMYKYRNRDEGSYHVDESRNYISNSAQSNGAVVKEKQPSSAKSSNKNKKNKDKEYYV

SEQ ID NO: 9579 - protein, 442 aa, Homo sapiens
MYQRMLRCGAELGSPGGGGGGGGGGGAGGRLALLWIVPLTLSGLLGVAWGASSLGAHHIHHFHGSSKHHSVPIAIYRSPASLRGGHAGTTYIFSKGGGQITYKWPPNDRPSTRADRLAIGFSTVQKEAVLVRVDSSSGLGDYLELHIHQGKIGVKFNVGTDDIAIEESNAIINDGKYHVVRFTRSGGNATLQVDSWPVIERYPAGRQLTIFNSQATIIIGGKEQGQPFQGQLSGLYYNGLKVLNMAAENDANIAIVGNVRLVGEVPSSMTTESTATAMQSEMSTSIMETTTTLATSTARRGKPPTKEPISQTTDDILVASAECPSDDEDIDPCEPSSGGLANPTRAGGREPYPGSAEVIRESSSTTGMVVGIVAAAALCILILLYAMYKYRNRDEGSYHVDESRNYISNSAQSNGAVVKEKQPSSAKSSNKNKKNKDKEYYV

SEQ ID NO: 9580 - protein, 136 aa, Homo sapiens
SSQVLPVDSGEVKLDDEPPNSGGGSPCEAGEEGEGGVCLNGGVCSVVDDQAVCDCSRTGFRGKDCSQEIKFGLQCVLPVLLHDNDQGKYCCINTAKPLTEKDNNVEGLAHLMMGDQGKSKEKLEIFRWIRKDFTNF

SEQ ID NO: 9581 - protein, 123 aa, Homo sapiens
TLSGLLGVAWGASSLGAHHIHHFHGSSKHHSVPIAIYRSPASLRGGHAGTTYIFSKGGGQITYKWPPNDRPSTRADRLAIGFSTVQKEAVLVRVDSSSGLGDYLELHIAFESFTASRSSASRC

SEQ ID NO: 9582 - protein, 33 aa, Homo sapiens
  VARIANT 1: note = misc_feature - Xaa can be any naturally occurring amino acid
XFQRDGRSDFPFASSLVPPSTQNSCPGTISVNT

SEQ ID NO: 9583 - protein, 126 aa, Homo sapiens
  VARIANT 1: note = misc_feature - Xaa can be any naturally occurring amino acid
XPELRAAALKLTLASVREREPFKGWIRDVRVNSSQVLPVDSGEVKLDDEPPNSGGGSPCEAGEEGEGGVCLNGGVCSVVDDQAVCDCSRTGFRGKDCSQGLAHLMMGDQGMGSVPFPLCFQCFLVL

SEQ ID NO: 9584 - protein, 169 aa, Homo sapiens
  VARIANT 1: note = misc_feature - Xaa can be any naturally occurring amino acid
XSNNFMGCLKEVVYKNNDVRLELSRLAKQGDPKMKIHGVVAFKCENVATLDPITFETPESFISLPKWNAKKTGSISFDFRTTEPNGLILFSHGKPRHQKDAKHPQMIKVDFFAIEMLDGHLYLLLDMGSGTIKIKALLKKVNDGEWYHVDFQRDGRSGQMAGDHTRLEF

SEQ ID NO: 9585 - protein, 155 aa, Homo sapiens
  VARIANT 1: note = misc_feature - Xaa can be any naturally occurring amino acid
XVFSGLFVGGLPPELRAAALKLTLASVREREPFKGWIRDVRVNSSQVLPVDSGEVKLDDEPPNSGGGSPCEAGEEGEGGVCLNGGVCSVVDDQAVCDCSRTGFRGKDCSQEDNNVEGLAHLMMGDQGKSKELMLILLCSITTQGLETAKSLIMCT

SEQ ID NO: 9586 - protein, 276 aa, Homo sapiens
LLLLLLGAAEGARVSSSLSTTHHVHHFHSKHGTVPIAINRMPFLTRGGHAGTTYIFGKGGALITYTWPPNDRPSTRMDRLAVGFSTHQRSAVLVRVDSASGLGDYLQLHIDQGTVGVIFNVGTDDITIDEPNAIVSDGKYHVVRFTRSGGNATLQVDSWPVNERYPAGRQLTIFNSQAAIKIGGRDQGRPFQGQVSGLYYNGLKVLALAAESDPNVRTEGHLRLVGEGPSVLLSAETTATTLLADMATTIMETTTTMATTTTRRGRSPTLRDSTTQ

SEQ ID NO: 9587 - protein, 1712 aa, Homo sapiens
MASGSRWRPTPPPLLLLLLLALAARADGLEFGGGPGQWARYARWAGAASSGELSFSLRTNATRALLLYLDDGGDCDFLELLLVDGRLRLRFTLSCAEPATLQLDTPVADDRWHMVLLTRDARRTALAVDGEARAAEVRSKRREMQVASDLFVGGIPPDVRLSALTLSTVKYEPPFRGLLANLKLGERPPALLGSQGLRGATADPLCAPARNPCANGGLCTVLAPGEVGCDCSHTGFGGKFCSEEEHPMEGPAHLTLNSEVGSLLFSEGGAGRGGAGDVHQPTKGKEEFVATFKGNEFFCYDLSHNPIQSSTDEITLAFRTLQRNGLMLHTGKSADYVNLSLKSGAVWLVINLGSGAFEALVEPVNGKFNDNAWHDVRVTRNLRQHAGIGHAMVNKLHYLVTISVDGILTTTGYTQEDYTMLGSDDFFYIGGSPNTADLPGSPVSNNFMGCLKDVVYKNNDFKLELSRLAKEGDPKMKLQGDLSFRCEDVAALDPVTFESPEAFVALPRWSAKRTGSISLDFRTTEPNGLLLFSQGRRAGGGAGSHSSAQRADYFAMELLDGHLYLLLDMGSGGIKLRASSRKVNDGEWCHVDFQRDGRKGSISVNSRSTPFLATGDSEILDLESELYLGGLPEGGRVDLPLPPEVWTAALRAGYVGCVRDLFIDGRSRDLRGLAEAQGAVGVAPFCSRETLKQCASAPCRNGGVCREGWNRFICDCIGTGFLGRVCEREATVLSYDGSMYMKIMLPNAMHTEAEDVSLRFMSQRAYGLMMATTSRESADTLRLELDGGQMKLTVNLDCLRVGCAPSKGPETLFAGHKLNDNEWHTVRVVRRGKSLQLSVDNVTVEGQMAGAHMRLEFHNIETGIMTERRFISVVPSNFIGHLSGLVFNGQPYMDQCKDGDITYCELNARFGLRAIVADPVTFKSRSSYLALATLQAYASMHLFFQFKTTAPDGLLLFNSGNGNDFIVIELVKGYIHYVFDLGNGPSLMKGNSDKPVNDNQWHNVVVSRDPGNVHTLKIDSRTVTQHSNGARNLDLKGELYIGGLSKNMFSNLPKLVASRDGFQGCLASVDLNGRLPDLIADALHRIGQVERGCDGPSTTCTEESCANQGVCLQQWDGFTCDCTMTSYGGPVCNDPGTTYIFGKGGALITYTWPPNDRPSTRMDRLAVGFSTHQRSAVLVRVDSASGLGDYLQLHIDQGTVGVIFNVGTDDITIDEPNAIVSDGKYHVVRFTRSGGNATLQVDSWPVNERYPAGNFDNERLAIARQRIPYRLGRVVDEWLLDKGRQLTIFNSQAAIKIGGRDQGRPFQGQVSGLYYNGLKVLALAAESDPNVRTEGHLRLVGEGPSVLLSAETTATTLLADMATTIMETTTTMATTTTRRGRSPTLRDSTTQNTDDLLVASAECPSDDEDLEECEPSTGGELILPIITEDSLDPPPVATRSPFVPPPPTFYPFLTGVGATQDTLPPPAARRPPSGGPCQAERDDSDCEEPIEASGFASGEVFDSSLPPTDDEDFYTTFPLVTDRTTLLSPRKPAPRPNLRTDGATGAPGVLFAPSAPAPNLPAGKMNHRDPLQPLLENPPLGPGAPTSFEPRRPPPLRPGVTSAPGFPHLPTANPTGPGERGPPGAVEVIRESSSTTGMVVGIVAAAALCILILLYAMYKYRNRDEGSYQVDQSRNYISNSAQSNGAVVKEKAPAAPKTPSKAKKNKDKEYYV

SEQ ID NO: 9588 - protein, 1642 aa, Homo sapiens
MASGSRWRPTPPPLLLLLLLALAARADGLEFGGGPGQWARYARWAGAASSGELSFSLRTNATRALLLYLDDGGDCDFLELLLVDGRLRLRFTLSCAEPATLQLDTPVADDRWHMVLLTRDARRTALAVDGEARAAEVRSKRREMQVASDLFVGGIPPDVRLSALTLSTVKYEPPFRGLLANLKLGERPPALLGSQGLRGATADPLCAPARNPCANGGLCTVLAPGEVGCDCSHTGFGGKFCSEEEHPMEGPAHLTLNSEGKEEFVATFKGNEFFCYDLSHNPIQSSTDEITLAFRTLQRNGLMLHTGKSADYVNLSLKSGAVWLVINLGSGAFEALVEPVNGKFNDNAWHDVRVTRNLRQHAGIGHAMVTISVDGILTTTGYTQEDYTMLGSDDFFYIGGSPNTADLPGSPVSNNFMGCLKDVVYKNNDFKLELSRLAKEGDPKMKLQGDLSFRCEDVAALDPVTFESPEAFVALPRWSAKRTGSISLDFRTTEPNGLLLFSQGRRAGGGAGSHSSAQRADYFAMELLDGHLYLLLDMGSGGIKLRASSRKVNDGEWCHVDFQRDGRKGSISVNSRSTPFLATGDSEILDLESELYLGGLPEGGRVDLPLPPEVWTAALRAGYVGCVRDLFIDGRSRDLRGLAEAQGAVGVAPFCSRETLKQCASAPCRNGGVCREGWNRFICDCIGTGFLGRVCEREATVLSYDGSMYMKIMLPNAMHTEAEDVSLRFMSQRAYGLMMATTSRESADTLRLELDGGQMKLTVNLGKGPETLFAGHKLNDNEWHTVRVVRRGKSLQLSVDNVTVEGQMAGAHMRLEFHNIETGIMTERRFISVVPSNFIGHLSGLVFNGQPYMDQCKDGDITYCELNARFGLRAIVADPVTFKSRSSYLALATLQAYASMHLFFQFKTTAPDGLLLFNSGNGNDFIVIELVKGYIHYVFDLGNGPSLMKGNSDKPVNDNQWHNVVVSRDPGNVHTLKIDSRTVTQHSNGARNLDLKGELYIGGLSKNMFSNLPKLVASRDGFQGCLASVDLNGRLPDLIADALHRIGQVERGCDGPSTTCTEESCANQGVCLQQWDGFTCDCTMTSYGGPVCNDPGTTYIFGKGGALITYTWPPNDRPSTRMDRLAVGFSTHQRSAVLVRVDSASGLGDYLQLHIDQGTVGVIFNVGTDDITIDEPNAIVSDGKYHVVRFTRSGGNATLQVDSWPVNERYPAGRQLTIFNSQAAIKIGGRDQGRPFQGQVSGLYYNGLKVLALAAESDPNVRTEGHLRLVGEGPSVLLSAETTATTLLADMATTIMETTTTMATTTTRRGRSPTLRDSTTQNTDDLLVASAECPSDDEDLEECEPSTGGELILPIITEDSLDPPPVATRSPFVPPPPTFYPFLTGVGATQDTLPPPAARRPPSGGPCQAERDDSDCEEPIEASGFASGEVFDSSLPPTDDEDFYTTFPLVTDRTTLLSPRKPAPRPNLRTDGATGAPGVLFAPSAPAPNLPAGKMNHRDPLQPLLENPPLGPGAPTSFEPRRPPPLRPGVTSAPGFPHLPTANPTGPGERGPPGAVEVIRESSSTTGMVVGIVAAAALCILILLYAMYKYRNRDEGSYQVDQSRNYISNSAQSNGAVVKEKAPAAPKTPSKAKKNKDKEYYV

SEQ ID NO: 9589 - protein, 1712 aa, Homo sapiens; identical to SEQ ID NO: 9587

SEQ ID NO: 9590 - protein, 1705 aa, Homo sapiens
MASGSRWRPTPPPLLLLLLLALAARADGLEFGGGPGQWARYARWAGAASSGELSFSLRTNATRALLLYLDDGGDCDFLELLLVDGRLRLRFTLSCAEPATLQLDTPVADDRWHMVLLTRDARRTALAVDGEARAAEVRSKRREMQVASDLFVGGIPPDVRLSALTLSTVKYEPPFRGLLANLKLGERPPALLGSQGLRGATADPLCAPARNPCANGGLCTVLAPGEVGCDCSHTGFGGKFCSEEEHPMEGPAHLTLNSEVGSLLFSEGGAGRGGAGDVHQPTKGKEEFVATFKGNEFFCYDLSHNPIQSSTDEITLAFRTLQRNGLMLHTGKSADYVNLSLKSGAVWLVINLGSGAFEALVEPVNGKFNDNAWHDVRVTRNLRQHAGIGHAMVTISVDGILTTTGYTQEDYTMLGSDDFFYIGGSPNTADLPGSPVSNNFMGCLKDVVYKNNDFKLELSRLAKEGDPKMKLQGDLSFRCEDVAALDPVTFESPEAFVALPRWSAKRTGSISLDFRTTEPNGLLLFSQGRRAGGGAGSHSSAQRADYFAMELLDGHLYLLLDMGSGGIKLRASSRKVNDGEWCHVDFQRDGRKGSISVNSRSTPFLATGDSEILDLESELYLGGLPEGGRVDLPLPPEVWTAALRAGYVGCVRDLFIDGRSRDLRGLAEAQGAVGVAPFCSRETLKQCASAPCRNGGVCREGWNRFICDCIGTGFLGRVCEREATVLSYDGSMYMKIMLPNAMHTEAEDVSLRFMSQRAYGLMMATTSRESADTLRLELDGGQMKLTVNLDCLRVGCAPSKGPETLFAGHKLNDNEWHTVRVVRRGKSLQLSVDNVTVEGQMAGAHMRLEFHNIETGIMTERRFISVVPSNFIGHLSGLVFNGQPYMDQCKDGDITYCELNARFGLRAIVADPVTFKSRSSYLALATLQAYASMHLFFQFKTTAPDGLLLFNSGNGNDFIVIELVKGYIHYVFDLGNGPSLMKGNSDKPVNDNQWHNVVVSRDPGNVHTLKIDSRTVTQHSNGARNLDLKGELYIGGLSKNMFSNLPKLVASRDGFQGCLASVDLNGRLPDLIADALHRIGQVERGCDGPSTTCTEESCANQGVCLQQWDGFTCDCTMTSYGGPVCNDPGTTYIFGKGGALITYTWPPNDRPSTRMDRLAVGFSTHQRSAVLVRVDSASGLGDYLQLHIDQGTVGVIFNVGTDDITIDEPNAIVSDGKYHVVRFTRSGGNATLQVDSWPVNERYPAGNFDNERLAIARQRIPYRLGRVVDEWLLDKGRQLTIFNSQAAIKIGGRDQGRPFQGQVSGLYYNGLKVLALAAESDPNVRTEGHLRLVGEGPSVLLSAETTATTLLADMATTIMETTTTMATTTTRRGRSPTLRDSTTQNTDDLLVASAECPSDDEDLEECEPSTGGELILPIITEDSLDPPPVATRSPFVPPPPTFYPFLTGVGATQDTLPPPAARRPPSGGPCQAERDDSDCEEPIEASGFASGEVFDSSLPPTDDEDFYTTFPLVTDRTTLLSPRKPAPRPNLRTDGATGAPGVLFAPSAPAPNLPAGKMNHRDPLQPLLENPPLGPGAPTSFEPRRPPPLRPGVTSAPGFPHLPTANPTGPGERGPPGAVEVIRESSSTTGMVVGIVAAAALCILILLYAMYKYRNRDEGSYQVDQSRNYISNSAQSNGAVVKEKAPAAPKTPSKAKKNKDKEYYV

SEQ ID NO: 9591 - protein, 666 aa, Homo sapiens
MPPGGSGPGGCPRRPPALAGPLPPPPPPPPPPLLPLLPLLLLLLLGAAEGARVSSSLSTTHHVHHFHSKHGTVPIAINRMPFLTRGGHAGTTYIFGKGGALITYTWPPNDRPSTRMDRLAVGFSTHQRSAVLVRVDSASGLGDYLQLHIDQGTVGVIFNVGTDDITIDEPNAIVSDGKYHVVRFTRSGGNATLQVDSWPVNERYPAGNFDNERLAIARQRIPYRLGRVVDEWLLDKGRQLTIFNSQAAIKIGGRDQGRPFQGQVSGLYYNGLKVLALAAESDPNVRTEGHLRLVGEGPSVLLSAETTATTLLADMATTIMETTTTMATTTTRRGRSPTLRDSTTQNTDDLLVASAECPSDDEDLEECEPSTGGELILPIITEDSLDPPPVATRSPFVPPPPTFYPFLTGVGATQDTLPPPAARRPPSGGPCQAERDDSDCEEPIEASGFASGEVFDSSLPPTDDEDFYTTFPLVTDRTTLLSPRKPAPRPNLRTDGATGAPGVLFAPSAPAPNLPAGKMNHRDPLQPLLENPPLGPGAPTSFEPRRPPPLRPGVTSAPGFPHLPTANPTGPGERGPPGAVEVIRESSSTTGMVVGIVAAAALCILILLYAMYKYRNRDEGSYQVDQSRNYISNSAQSNGAVVKEKAPAAPKTPSKAKKNKDKEYYV

SEQ ID NO: 9592 - protein, 293 aa, Homo sapiens [sequence omitted]

SEQ ID NO: 9593 - protein, 215 aa, Homo sapiens
  VARIANT 1: note = misc_feature - Xaa can be any naturally occurring amino acid
XADPLCAPARNPCANGGLCTVLAPGEVGCDCSHTGFGGKFCSEEEHPMEVGSLLFSEGGAGRGGAGDVHQPTKGKEEFVATFKGNEFFCYDLSHNPIQSSTDEITLAFRTLQRNGLMLHTGKSADYVNLSLKSGAVWLVINLGSGAFEALVEPVNGKFNDNAWHDVRVTRNLRQVTISVDGILTTTGYTQEDYTMLGSDDFFYIGGSPNTADLPG

SEQ ID NO: 9594 - protein, 206 aa, Homo sapiens
  VARIANT 1: note = misc_feature - Xaa can be any naturally occurring amino acid
XCSEEEHPMEGPAHLTLNSEVGSLLFSEGGAGRGGAGDVHQPTKGKEEFVATFKGNEFFCYDLSHNPIQSSTDEITLAFRTLQRNGLMLHTGKSADYVNLSLKSGAVWLVINLGSGAFEALVEPVNGKFNDNAWHDVRVTRNLRQVTISVDGILTTTGYTQEDYTMLGSDDFFYIGGSPNTADLPGSPVSNNFMGCLKDVVYKNND

SEQ ID NO: 9595 - protein, 331 aa, Homo sapiens
MDRAAVARVGAVASASVCALVAGVVLAQYIFTLKRKTGRKTKIIEMMPEFQKSSVRIKNPTRVEEIICGLIKGGAAKLQIITDFDMTLSRFSYKGKRCPTCHNIIDNCKLVTDECRKKLLQLKEKYYAIEVDPVLTVEEKYPYMVEWYTKSHGLLVQQALPKAKLKEIVAESDVMLKEGYENFFDKLQQHSIPVFIFSAGIGDVLEEVIRQAGVYHPNVKVVSNFMDFDETGVLKGFKGELIHVFNKHDGALRNTEYFNQLKDNSNIILLGDSQGDLRMADGVANVEHILKIGYLNDRVDELLEKYMDSYDIVLVQDESLEVANSILQKIL

SEQ ID NO: 9596 - protein, 331 aa, Homo sapiens; identical to SEQ ID NO: 9595

SEQ ID NO: 9597 - protein, 42 aa, Homo sapiens
MPEFQKSSVRIKNPTRVEEIICGLIKGGAAKLQIITDFDMTL

SEQ ID NO: 9598 - protein, 285 aa, Homo sapiens
MPEFQKSSVRIKNPTRVEEIICGLIKGGAAKLQIITDFDMTLSRFSYKGKRCPTCHNIIDNCKLVTDECRKKLLQLKEKYYAIEVDPVLTVEEKYPYMVEWYTKSHGLLVQQALPKAKLKEIVAESDVMLKEGYENFFDKLQQHSIPVFIFSAGIGDVLEEVIRQAGVYHPNVKVVSNFMDFDETGVLKGFKGELIHVFNKHDGALRNTEYFNQLKDNSNIILLGDSQGDLRMADGVANVEHILKIGYLNDRVDELLEKYMDSYDIVLVQDESLEVANSILQKIL

SEQ ID NO: 9599 - protein, 285 aa, Homo sapiens; identical to SEQ ID NO: 9598

SEQ ID NO: 9600 - protein, 54 aa, Homo sapiens
MRAPSMDRAAVARVGAVASASVCALVAGVVLAQYIFTLKRKTGRKTKIIEMKIG

SEQ ID NO: 9601 - protein, 336 aa, Homo sapiens
MRAPSMDRAAVARVGAVASASVCALVAGVVLAQYIFTLKRKTGRKTKIIEMMPEFQKSSVRIKNPTRVEEIICGLIKGGAAKLQIITDFDMTLSRFSYKGKRCPTCHNIIDNCKLVTDECRKKLLQLKEKYYAIEVDPVLTVEEKYPYMVEWYTKSHGLLVQQALPKAKLKEIVAESDVMLKEGYENFFDKLQQHSIPVFIFSAGIGDVLEEVIRQAGVYHPNVKVVSNFMDFDETGVLKGFKGELIHVFNKHDGALRNTEYFNQLKDNSNIILLGDSQGDLRMADGVANVEHILKIGYLNDRVDELLEKYMDSYDIVLVQDESLEVANSILQKIL

SEQ ID NO: 9602 - protein, 297 aa, Homo sapiens
MTNQESAVHVKMMPEFQKSSVRIKNPTRVEEIICGLIKGGAAKLQIITDFDMTLSRFSYKGKRCPTCHNIIDNCKLVTDECRKKLLQLKEKYYAIEVDPVLTVEEKYPYMVEWYTKSHGLLVQQALPKAKLKEIVAESDVMLKEGYENFFDKLQQHSIPVFIFSAGIGDVLEEVIRQAGVYHPNVKVVSNFMDFDETGVLKGFKGELIHVFNKHDGALRNTEYFNQLKDNSNIILLGDSQGDLRMADGVANVEHILKIGYLNDRVDELLEKYMDSYDIVLVQDESLEVANSILQKIL

SEQ ID NO: 9603 - protein, 297 aa, Homo sapiens; identical to SEQ ID NO: 9602

SEQ ID NO: 9604 - protein, 297 aa, Homo sapiens; identical to SEQ ID NO: 9602

SEQ ID NO: 9605 - protein, 205 aa, Homo sapiens
MTNQESAVHVKMMPEFQKSSVRIKNPTRVEEIICGLIKGGAAKLQIITDFDMTLSRFSYKGKRCPTCHNIIDNCKLVTDECRKKLLQLKEKYYAIEVDPVLTVEEKYPYMVEWYTKSHGLLVQQALPKAKLKEIVAESDVMLKEGYENFFDKLQQHSIPVFIFSAGIGDVLEEVIRQAGVYHPNVKVVSNFMDFDETVRISNRSS

SEQ ID NO: 9606 - protein, 548 aa, Homo sapiens
MTMAAAAVVARGAGARAATAAALRGGCGTAARGRPCAGPARPLCTAPGTAPDMKRYLWERYREAKRSTEELVPSIMSNLLNPDAIFSNNEMSLSDIEIYGFDYDYTLVFYSKHLHTLIFNAARDLLINEHRYPAEIRKYEYDPNFAIRGLHYDVQRAVLMKIDAFHYIQLGTVYRGLSVVPDEEVIEMYEGSHVPLEQMSDFYGKSSHGNTMKQFMDIFSLPEMTLLSCVNEYFLKNNIDYEPVHLYKDVKDSIRDVHIKGIMYRAIEADIEKYICYAEQTRAVLAKLADHGKKMFLITNSPSSFVDKGMSYIVGKDWRDLFDVVIVQAEKPNFFNDKRRPFRKMNEKGVLLWDKIHKLQKGQIYKQGNLYEFLKLTGWRGSRVLYFGDHIYSDLADLTLKHGWRTGAIIPELRSELKIMNTEQYIQTMTWLQTLTGLLEQMQVHRDAESQLVLQEWKKERKEMREMTKSFFNAQFGSLFRTDQNPTYFLRRLSRFADIYMASLSCLLNYDVSHTFYPRRTPLQHELPAWSERPPTFGTPLLQEAQAK

SEQ ID NO: 9607 - protein, 135 aa, Homo sapiens
  VARIANT 1: note = misc_feature - Xaa can be any naturally occurring amino acid
XAKLADHGKKMFLITNSPSSFVDKGMSYIVGKDWRDLFDVVIVQAEKPNFFNDKRRPFRKMNEKGVLLWDKIHKLQKGQIYKQGNLYEFLKLTGWRGSRVLYFGDHIYSDLATMVNDSRPSVSAGVVTHGNYFQN

SEQ ID NO: 9608 - protein, 122 aa, Homo sapiens
  VARIANT 1: note = misc_feature - Xaa can be any naturally occurring amino acid
XTMTWLQTLTGLLEQMQVHRDAESQLVLQEWKKERKEMREMTKSFFNAQFGSLFRTDQNPTYFLRRLSRFADIYMASLSCLLNYDVSHTFYPRRTPLQHELPAWSERPPTFGTPLLQEAQAK

SEQ ID NO: 9609 - protein, 264 aa, Homo sapiens
MCPRAARAPATLLLALGAVLWPAAGAWELTILHTNDVHSRLEQTSEDSSKCVNASRCMGGVARLFTKVQQIRRAEPNVLLLDAGDQYQGTIWFTVYKGAEVAHFMNALRYDAMALGNHEFDNGVEGLIEPLLKEAKFPILSANIKAKGPLASQISGLYLPYKVLPVGDEVVGIVGYTSKETPFLSNPGTNLVFEDEITALQPEVDKLKTLNVNKIIALGHSGFEMDKLIAQKVRGVDVVVGGHSNTFLYTGNCFKRIAWARMSR

SEQ ID NO: 9610 - protein, 574 aa, Homo sapiens
MCPRAARAPATLLLALGAVLWPAAGAWELTILHTNDVHSRLEQTSEDSSKCVNASRCMGGVARLFTKVQQIRRAEPNVLLLDAGDQYQGTIWFTVYKGAEVAHFMNALRYDAMALGNHEFDNGVEGLIEPLLKEAKFPILSANIKAKGPLASQISGLYLPYKVLPVGDEVVGIVGYTSKETPFLSNPGTNLVFEDEITALQPEVDKLKTLNVNKIIALGHSGFEMDKLIAQKVRGVDVVVGGHSNTFLYTGNPPSKEVPAGKYPFIVTSDDGRKVPVVQAYAFGKYLGYLKIEFDERGNVISSHGNPILLNSSIPEDPSIKADINKWRIKLDNYSTQELGKTIVYLDGSSQSCRFRECNMGNLICDAMINNNLRHTDEMFWNHVSMCILNGGGIRSPIDERNNGTITWENLAAVLPFGGTFDLVQLKGSTLKKAFEHSVHRYGQSTGEFLQVGGIHVVYDLSRKPGDRVVKLDVLCTKCRVPSYDPLKMDEVYKVILPNFLANGGDGFQMIKDELLRHDSGDQDINVVSTYISKMKVIYPAVEGRIKFSTGSHCHGSFSLIFLSLWAVIFVLYQ

SEQ ID NO: 9611 - protein, 524 aa, Homo sapiens
MCPRAARAPATLLLALGAVLWPAAGAWELTILHTNDVHSRLEQTSEDSSKCVNASRCMGGVARLFTKVQQIRRAEPNVLLLDAGDQYQGTIWFTVYKGAEVAHFMNALRYDAMALGNHEFDNGVEGLIEPLLKEAKFPILSANIKAKGPLASQISGLYLPYKVLPVGDEVVGIVGYTSKETPFLSNPGTNLVFEDEITALQPEVDKLKTLNVNKIIALGHSGFEMDKLIAQKVRGVDVVVGGHSNTFLYTGNPPSKEVPAGKYPFIVTSDDGRKVPVVQAYAFGKYLGYLKIEFDERGNVISSHGNPILLNSSIPEDPSIKADINKWRIKLDNYSTQELGKTIVYLDGSSQSCRFRECNMGNLICDAMINNNLRHTDEMFWNHVSMCILNGGGIRSPIDERNNGIHVVYDLSRKPGDRVVKLDVLCTKCRVPSYDPLKMDEVYKVILPNFLANGGDGFQMIKDELLRHDSGDQDINVVSTYISKMKVIYPAVEGRIKFSTGSHCHGSFSLIFLSLWAVIFVLYQ

SEQ ID NO: 9612 - protein, 230 aa, Homo sapiens
  VARIANT 1: note = misc_feature - Xaa can be any naturally occurring amino acid
XDVVVGGHSNTFLYTGNPPSKEVPAGKYPFIVTSDDGRKVPVVQAYAFGKYLGYLKIEFDERGNVISSHGNPILLNSSIPEDPSIKADINKWRIKLDNYSTQELGKTIVYLDGSSQSCRFRECNMGNLICDAMINNNLRHTDEMFWNHVSMCILNGGGIRSPIDERNNGIHVVYDLSRKPGDRVVKLDVLCTKCRVPSYDPLKMDEVYKVILPNFLANGGDGFQMIKDEL

SEQ ID NO: 9613 - protein, 179 aa, Homo sapiens
  VARIANT 1: note = misc_feature - Xaa can be any naturally occurring amino acid
XNPILLNSSIPEDPSIKADINKWRIKLDNYSTQELGKTIVYLDGSSQSCRFRECNMGNLICDAMINNNLRHTDEMFWNHVSMCILNGGGIRSPIDERNNGTITWENLAAVLPFGGTFDLVQLKGSTLKKAFEHSVHRYGQSTGEFLQVGDLKECCPICINQDDSWKEQPTAQTYLNTWF

SEQ ID NO: 9614 - protein, 257 aa, Homo sapiens
MSILFYVIFLAYLRGIQGNNMDQRSLPEDSLNSLIIKLIQADILKNKLSKQMVDVKENYQSTLPKAEAPREPERGGPAKSAFQPVIAMDTELLRQQRRYNSPRVLLSDSTPLEPPPLYLMEDYVGSPVVANRTSRRKRYAEHKSHRGEYSVCDSESLWVTDKSSAIDIRGHQVTVLGEIKTGNSPVKQYFYETRCKEARPVKNGCRGIDDKHWNSQCKTSQTYVRALTSENNKLVGWRWIRIDTSCVCALSRKIGRT

SEQ ID NO: 9615 - protein, 270 aa, Homo sapiens
MVTFATILQVNKVMSILFYVIFLAYLRGIQGNNMDQRSLPEDSLNSLIIKLIQADILKNKLSKQMVDVKENYQSTLPKAEAPREPERGGPAKSAFQPVIAMDTELLRQQRRYNSPRVLLSDSTPLEPPPLYLMEDYVGSPVVANRTSRRKRYAEHKSHRGEYSVCDSESLWVTDKSSAIDIRGHQVTVLGEIKTGNSPVKQYFYETRCKEARPVKNGCRGIDDKHWNSQCKTSQTYVRALTSENNKLVGWRWIRIDTSCVCALSRKIGRT

SEQ ID NO: 9616 - protein, 143 aa, Homo sapiens
MLPLPSCSLPILLLFLLPSVPIESQPPPSTLPPFLAPEWDLLSPRVVLSRGAPAGPPLLFLLEAGAFRESAGAPANRSRRGVSETAPASRRGELAVCDAVSGWVTDRRTAVDLRGREVEVLGEVPAAGGSPLRQYFFETRCKA

SEQ ID NO: 9617 - protein, 210 aa, Homo sapiens
MLPLPSCSLPILLLFLLPSVPIESQPPPSTLPPFLAPEWDLLSPRVVLSRGAPAGPPLLFLLEAGAFRESAGAPANRSRRGVSETAPASRRGELAVCDAVSGWVTDRRTAVDLRGREVEVLGEVPAAGGSPLRQYFFETRCKADNAEEGGPGAGGGGCRGVDRRHWVSECKAKQSYVRALTADAQGRVGWRWIRIDTACVCTLLSRTGRA

SEQ ID NO: 9618 - protein, 316 aa, Homo sapiens
MGVCGYLFLPWKCLVVVSLRLLFLVPTGVPVRSGDATFPKAMDNVTVRQGESATLRCTIDNRVTRVAWLNRSTILYAGNDKWCLDPRVVLLSNTQTQYSIEIQNVDVYDEGPYTCSVQTDNHPKTSRVHLIVQVSPKIVEISSDISINEGNNISLTCIATGRPEPTVTWRHISPKAVGFVSEDEYLEIQGITREQSGDYECSASNDVAAPVVRRVKVTVNYPPYISEAKGTGVPVGQKGTLQCEASAVPSAEFQWYKDDKRLIEGKKGVKVENRPFLSKLIFFNVSEHDYGNYTCVASNKLGHTNASIMLFGETVL

SEQ ID NO: 9619 - protein, 344 aa, Homo sapiens
MGVCGYLFLPWKCLVVVSLRLLFLVPTGVPVRSGDATFPKAMDNVTVRQGESATLRCTIDNRVTRVAWLNRSTILYAGNDKWCLDPRVVLLSNTQTQYSIEIQNVDVYDEGPYTCSVQTDNHPKTSRVHLIVQVSPKIVEISSDISINEGNNISLTCIATGRPEPTVTWRHISPKAVGFVSEDEYLEIQGITREQSGDYECSASNDVAAPVVRRVKVTVNYPPYISEAKGTGVPVGQKGTLQCEASAVPSAEFQWYKDDKRLIEGKKGVKVENRPFLSKLIFFNVSEHDYGNYTCVASNKLGHTNASIMLFGPGAVSEVSNGTSRRAGCVWLLPLLVLHLLLKF

SEQ ID NO: 9620 - protein, 355 aa, Homo sapiens
MGVCGYLFLPWKCLVVVSLRLLFLVPTGVPVRSGDATFPKAMDNVTVRQGESATLRCTIDNRVTRVAWLNRSTILYAGNDKWCLDPRVVLLSNTQTQYSIEIQNVDVYDEGPYTCSVQTDNHPKTSRVHLIVQVSPKIVEISSDISINEGNNISLTCIATGRPEPTVTWRHISPKAVGFVSEDEYLEIQGITREQSGDYECSASNDVAAPVVRRVKVTVNYPPYISEAKGTGVPVGQKGTLQCEASAVPSAEFQWYKDDKRLIEGKKGVKVENRPFLSKLIFFNVSEHDYGNYTCVASNKLGHTNASIMLFEVKTTALTPWKGPGAVSEVSNGTSRRAGCVWLLPLLVLHLLLKF

SEQ ID NO: 9621 - protein, 344 aa, Homo sapiens
MKTIQPKMHNSISWAIFTGLAALCLFQGVPVRSGDATFPKAMDNVTVRQGESATLRCTIDNRVTRVAWLNRSTILYAGNDKWCLDPRVVLLSNTQTQYSIEIQNVDVYDEGPYTCSVQTDNHPKTSRVHLIVQVSPKIVEISSDISINEGNNISLTCIATGRPEPTVTWRHISPKAVGFVSEDEYLEIQGITREQSGDYECSASNDVAAPVVRRVKVTVNYPPYISEAKGTGVPVGQKGTLQCEASAVPSAEFQWYKDDKRLIEGKKGVKVENRPFLSKLIFFNVSEHDYGNYTCVASNKLGHTNASIMLFGPGAVSEVSNGTSRRAGCVWLLPLLVLHLLLKF

SEQ ID NO: 9622 - protein, 18 aa, Homo sapiens
MNGKRNGEGGKRWKWKGT

SEQ ID NO: 9623 - protein, 36 aa, Homo sapiens
MNGKRNGEGGKRWKWKGTGVPVRSGDATFPKAMDNV

SEQ ID NO: 9624 - protein, 191 aa, Homo sapiens
MNGKRNGEGGKRWKWKGTGVPVRSGDATFPKAMDNVTVRQGESATLRCTIDNRVTRVAWLNRSTILYAGNDKWCLDPRVVLLSNTQTQYSIEIQNVDVYDEGPYTCSVQTDNHPKTSRVHLIVQVSPKIVEISSDISINEGNNISLTCIATGRPEPTVTWRHISPKAVGFVSEDEYLEIQGITREQSGDYE

SEQ ID NO: 9625 - protein, 179 aa, Homo sapiens
VGFVSEDEYLEIQGITREQSGDYECSASNDVAAPVVRRVKVTVNYPPYISEAKGTGVPVGQKGTLQCEASAVPSAEFQWYKDDKRLIEGKKGVKVENRPFLSKLIFFNVSEHDYGNYTCVASNKLGHTNASIMLFEVKTTALTPWKGPGAVSEVSNGTSRRAGCVWLLPLLVLHLLLKF

SEQ ID NO: 9626 - protein, 168 aa, Homo sapiens
VGFVSEDEYLEIQGITREQSGDYECSASNDVAAPVVRRVKVTVNYPPYISEAKGTGVPVGQKGTLQCEASAVPSAEFQWYKDDKRLIEGKKGVKVENRPFLSKLIFFNVSEHDYGNYTCVASNKLGHTNASIMLFGPGAVSEVSNGTSRRAGCVWLLPLLVLHLLLKF

SEQ ID NO: 9627 - protein, 119 aa, Homo sapiens
  VARIANT 1: note = misc_feature - Xaa can be any naturally occurring amino acid
XSAEFQWYKDDKRLIEGKKGVKVENRPFLSKLIFFNVSEHDYGNYTCVASNKLGHTNASIMLFELNEPTSSTLLQEVKTTALTPWKGPGAVSEVSNGTSRRAGCVWLLPLLVLHLLLKF

SEQ ID NO: 9628 - protein, 153 aa, Homo sapiens
HYCKEGYYRDMGKPITHRKACKACDCHPVGAAGKTCNQTTGQCPCKDGVTGITCNRCAKGYQQSRSPIAPCIKIPVAPPTTAASSVEEPEAARQPNTFQAEGLSLLPGAAEKEGARCWGYRRRLGHRVAQAECRGPRSWAWGRITSSFSFASN

SEQ ID NO: 9629 - protein, 604 aa, Homo sapiens
MMRAVWEALAALAAVACLVGAVRGGPGLSMFAGQAAQPDPCSDENGHPRRCIPDFVNAAFGKDVRVSSTCGRPPARYCVVSERGEERLRSCHLCNASDPKKAHPPAFLTDLNNPHNLTCWQSENYLQFPHNVTLTLSLGKKFEVTYVSLQFCSPRPESMAIYKSMDYGRTWVPFQFYSTQCRKMYNRPHRAPITKQNEQEAVCTDSHTDMRPLSGGLIAFSTLDGRPSAHDFDNSPVLQDWVTATDIRVAFSRLHTFGDENEDDSELARDSYFYAVSDLQVGGRCKCNGHAARCVRDRDDSLVCDCRHNTAGPECDRCKPFHYDRPWQRATAREANECVACNCNLHARRCRFNMELYKLSGRKSGGVCLNCRHNTAGRHCHYCKEGYYRDMGKPITHRKACKACDCHPVGAAGKTCNQTTGQCPCKDGVTGITCNRCAKGYQQSRSPIAPCIKIPVAPPTTAASSVEEPEDCDSYCKASKGKLKINMKKYCKKDYAVQIHILKADKAGDWWKFTVNIISVYKQGTSRIRRGDQSLWIRSRDIACKCPKIKPLKKYLLLGNAEDSPDQSGIVADKSSLVIQWRDTWARRLRKFQQREKKGKCKKA

SEQ ID NO: 9630 - protein, 580 aa, Homo sapiens
MPGWPWGLLLTAGTLFAALSPGPPAPADPCHDEGGAPRGCVPGLVNAALGREVLASSTCGRPATRACDASDPRRAHSPALLTSPGGTASPLCWRSESLPRAPLNVTLTVPLGKAFELVFVSLRFCSAPPASVALLKSQDHGRSWAPLGFFSSHCDLDYGRLPAPANGPAGPGPEALCFPAPLAQPDGSGLLAFSMQDSSPPGLDLDSSPVLQDWVTATDVRVVLTRPSTAGDPRDMEAVVPYSYAATDLQVGGRCKCNGHASRCLLDTQGHLICDCRHGTEGPDCGRCKPFYCDRPWQRATARESHACLACSCNGHARRCRFNMELYRLSGRRSGGVCLNCRHNTAGRHCHYCREGFYRDPGRALSDRRACRACDCHPVGAAGKTCNQTTGQCPCKDGVTGLTCNRCAPGFQQSRSPVAPCVKTPIPGPTEDSSPVQPQDCDSHCKPARGSYRISLKKFCKKDYAVQVAVGARGEARGAWTRFPVAVLAVFRSGEERARRGSSALWVPAGDAACGCPRLLPGRRYLLLGGGPGAAAGGAGGRGPGLIAARGSLVLPWRDAWTRRLRRLQRRERRGRCSAA

SEQ ID NO: 9631 - protein, 176 aa, Homo sapiens
MGNLALGRKLWADTTCGQNATELYCFYSENTDLTCRQPKCDKCNAAYPHLAHLPSAMADSSFRFPRTWWQSAEDVHREKIQLDLEAEFYFTHLIVMFKSPRPAAMVLDRSQDFGKTWKPYKYFATNCSATFGLEDDVVKKGAICTSKYSSPFPCTGGEVIFKALSPPYDTENPYSA

SEQ ID NO: 9632 - protein, 591 aa, Homo sapiens
MGNLALGRKLWADTTCGQNATELYCFYSENTDLTCRQPKCDKCNAAYPHLAHLPSAMADSSFRFPRTWWQSAEDVHREKIQLDLEAEFYFTHLIVMFKSPRPAAMVLDRSQDFGKTWKPYKYFATNCSATFGLEDDVVKKGAICTSKYSSPFPCTGGEVIFKALSPPYDTENPYSAKVQEQLKITNLRVQLLKRQSCPCQRNDLNEEPQHFTHYAIYDFIVKGSCFCNGHADQCIPVHGFRPVKAPGTFHMVHGKCMCKHNTAGSHCQHCAPLYNDRPWEAADGKTGAPNECRTCKCNGHADTCHFDVNVWEASGNRSGGVCDDCQHNTEGQYCQRCKPGFYRDLRRPFSAPDACKPCSCHPVGSAVLPANSVTFCDPSNGDCPCKPGVAGRRCDRCMVGYWGFGDYGCRPCDCAGSCDPITGDCISSHTDIDWYHEVPDFRPVHNKSEPAWEWEDAQGFSALLHSGKCECKEQTLGNAKAFCGMKYSYVLKIKILSAHDKGTHVEVNVKIKKVLKSTKLKIFRGKRTLYPESWTDRGCTCPILNPGLEYLVAGHEDIRTGKLIVNMKSFVQHWKPSLGRKVMDILKRECK

SEQ ID NO: 9633 - protein, 591 aa, Homo sapiens; identical to SEQ ID NO: 9632

SEQ ID NO: 9634 - protein, 628 aa, Homo sapiens
MGSCARLLLLWGCTVVAAGLSGVAGVSSRCEKACNPRMGNLALGRKLWADTTCGQNATELYCFYSENTDLTCRQPKCDKCNAAYPHLAHLPSAMADSSFRFPRTWWQSAEDVHREKIQLDLEAEFYFTHLIVMFKSPRPAAMVLDRSQDFGKTWKPYKYFATNCSATFGLEDDVVKKGAICTSKYSSPFPCTGGEVIFKALSPPYDTENPYSAKVQEQLKITNLRVQLLKRQSCPCQRNDLNEEPQHFTHYAIYDFIVKGSCFCNGHADQCIPVHGFRPVKAPGTFHMVHGKCMCKHNTAGSHCQHCAPLYNDRPWEAADGKTGAPNECRTCKCNGHADTCHFDVNVWEASGNRSGGVCDDCQHNTEGQYCQRCKPGFYRDLRRPFSAPDACKPCSCHPVGSAVLPANSVTFCDPSNGDCPCKPGVAGRRCDRCMVGYWGFGDYGCRPCDCAGSCDPITGDCISSHTDIDWYHEVPDFRPVHNKSEPAWEWEDAQGFSALLHSGKCECKEQTLGNAKAFCGMKYSYVLKIKILSAHDKGTHVEVNVKIKKVLKSTKLKIFRGKRTLYPESWTDRGCTCPILNPGLEYLVAGHEDIRTGKLIVNMKSFVQHWKPSLGRKVMDILKRECK

SEQ ID NO: 9635 - protein, 605 aa, Homo sapiens
MGSCARLLLLWGCTVVAAGLSGVAGVSSRCEKACNPRMGNLALGRKLWADTTCGQNATELYCFYSENTDLTCRQPKCDKCNAAYPHLAHLPSAMADSSFRFPRTWWQSAEDVHREKIQLDLEAEFYFTHLIVMFKSPRPAAMVLDRSQDFGKTWKPYKYFATNCSATFGLEDDVVKKGAICTSKYSSPFPCTGGEVIFKALSPPYDTENPYSAKVQEQLKITNLRVQLLKRQSCPCQRNDLNEEPQHFTHYAIYDFIVKGSCFCNGHADQCIPVHGFRPVKAPGTFHMVHGKCMCKHNTAGSHCQHCAPLYNDRPWEAADGKTGAPNECRTCKCNGHADTCHFDVNVWEASGNRSGGVCDDCQHNTEGQYCQRCKPGFYRDLRRPFSAPDACKPCSCHPVGSAVLPANSVTFCDPSNGDCPCKPGVAGRRCDRCMVGYWGFGDYGCRPCDCAGSCDPITGDCISSHTDIDWYHEVPDFRPVHNKSEPAWEWEDAQGFSALLHSVLKIKILSAHDKGTHVEVNVKIKKVLKSTKLKIFRGKRTLYPESWTDRGCTCPILNPGLEYLVAGHEDIRTGKLIVNMKSFVQHWKPSLGRKVMDILKRECK

SEQ ID NO: 9636 - protein, 75 aa, Homo sapiens
MPCQRIPEATTTLATTPGAYSSDPQCQNYCNMSDTRVHMSLRRYCQQDHVLRAQVLASEAAGPAWQRLAVRVLAV

SEQ ID NO: 9637 - protein, 489 aa, Homo sapiens
MPVTFALLLLLGQATADPCYDPQGRPQFCLPPVTQLAAVAASCPQACALSPGNHLGARETCNGSLTLALGGPFLLTSVSLRFCTPGPPALILSAAWASGGPWRLLWHRPAWPGALGGPERVTFHSTPGPKATVAASHLRVEFGGQAGLAAAGLRGRCQCHGHAARCAARARPPRCHCRHHTTGPGCESCRPSHRDWPWRPATPRHPHPCLPCSCNQHARRCRFNSELFRLSGGRSGGVCERCRHHTAGRHCHYCQPGFWRDPSQPIFSRRACRACQCHPIGATGGTCNQTSGQCTCKLGVTGLTCNRCGPGYQQSRSPRMPCQRIPEATTTLATTPGAYSSDPQCQNYCNMSDTRVHMSLRRYCQQDHVLRAQVLASEAAGPAWQRLAVRVLAVYKQRAQPVRRGDQDAWVPRADLTCGCLRLQPGTDYLLLGSAVGDPDPTRLILDRHGLALPWRPRWARPLKRLQQEERAGGCRGVRAPTPSPRPEH

SEQ ID NO: 9638 - protein, 480 aa, Homo sapiens
MYLSRFLSIHALWVTVSSVMQPYPLVWGHYDLCKTQIYTEEGKVWDYMACQPESTDMTKYLKVKLDPPDITCGDPPETFCAMGNPYMCNNECDASTPELAHPPELMFDFEGRHPSTFWQSATWKEYPKPLQVNITLSWSKTIELTDNIVITFESGRPDQMILEKSLDYGRTWQPYQYYATDCLDAFHMDPKSVKDLSQHTVLEIICTEEYSTGYTTNSKIIHFEIKDRFAFFAGPRLRNMASLYGQLDTTKKLRDFFTVTDLRIRLLRPAVGEIFVDELHLARYFYAISDIKVRGRCKCNLHATVCVYDNSKLTCECEHNTTGPDCGKCKKNYQGRPWSPGSYLPIPKGTANTCIPSISSIGNPPKFNRIWPNISSLEVSNPKQVAPKLALSTVSSVQVANHKRANVCDNELLHCQNGGTCHNNVRCLCPAAYTGILCEKLRCEEAGSCGSDSGQGAPPHGSPALLLLTTLLGTASPLVF

SEQ ID NO: 9639 - protein, 539 aa, Homo sapiens
MYLSRFLSIHALWVTVSSVMQPYPLVWGHYDLCKTQIYTEEGKVWDYMACQPESTDMTKYLKVKLDPPDITCGDPPETFCAMGNPYMCNNECDASTPELAHPPELMFDFEGRHPSTFWQSATWKEYPKPLQVNITLSWSKTIELTDNIVITFESGRPDQMILEKSLDYGRTWQPYQYYATDCLDAFHMDPKSVKDLSQHTVLEIICTEEYSTGYTTNSKIIHFEIKDRFAFFAGPRLRNMASLYGQLDTTKKLRDFFTVTDLRIRLLRPAVGEIFVDELHLARYFYAISDIKVRGRCKCNLHATVCVYDNSKLTCECEHNTTGPDCGKCKKNYQGRPWSPGSYLPIPKGTANTCIPSISSIGNCECFGHSNRCSYIDLLNTVICVSCKHNTRGQHCELCRLGYFRNASAQLDDENVCIECYCNPLGSIHDRCNGSGFCECKTGTTGPKCDECLPGNSWHYGCQPNVCDNELLHCQNGGTCHNNVRCLCPAAYTGILCEKLRCEEAGSCGSDSGQGAPPHGSPALLLLTTLLGTASPLVF

SEQ ID NO: 9640 - protein, 539 aa, Homo sapiens; identical to SEQ ID NO: 9639

SEQ ID NO: 9641 - protein, 460 aa, Homo sapiens
MYLSRFLSIHALWVTVSSVMQPYPLVWGHYDLCKTQIYTEEGKVWDYMACQPESTDMTKYLKVKLDPPDITCGDPPETFCAMGNPYMCNNECDASTPELAHPPELMFDFEGRHPSTFWQSATWKEYPKPLQVNITLSWSKTIELTDNIVITFESGRPDQMILEKSLDYGRTWQPYQYYATDCLDAFHMDPKSVKDLSQHTVLEIICTEEYSTGYTTNSKIIHFEIKDRFAFFAGPRLRNMASLYGQLDTTKKLRDFFTVTDLRIRLLRPAVGEIFVDELHLARYFYAISDIKVRGRCKCNLHATVCVYDNSKLTCECEHNTTGPDCGKCKKNYQGRPWSPGSYLPIPKGTANTCIPSISSIGNPPKFNRIWPNISSLEVSNPKQANVCDNELLHCQNGGTCHNNVRCLCPAAYTGILCEKLRCEEAGSCGSDSGQGAPPHGSPALLLLTTLLGTASPLVF

SEQ ID NO: 9642 - protein, 480 aa, Homo sapiens; identical to SEQ ID NO: 9638

SEQ ID NO: 9643 - protein, 438 aa, Homo sapiens
MYLSRFLSIHALWVTVSSVMQPYPLVWGHYDLCKTQIYTEEGKVWDYMACQPESTDMTKYLKVKLDPPDITCGDPPETFCAMGNPYMCNNECDASTPELAHPPELMFDFEGRHPSTFWQSATWKEYPKPLQVNITLSWSKTIELTDNIVITFESGRPDQMILEKSLDYGRTWQPYQYYATDCLDAFHMDPKSVKDLSQHTVLEIICTEEYSTGYTTNSKIIHFEIKDRFAFFAGPRLRNMASLYGQLDTTKKLRDFFTVTDLRIRLLRPAVGEIFVDELHLARYFYAISDIKVRGRCKCNLHATVCVYDNSKLTCECEHNTTGPDCGKCKKNYQGRPWSPGSYLPIPKGTANTCIPSISSIGTNVCDNELLHCQNGGTCHNNVRCLCPAAYTGILCEKLRCEEAGSCGSDSGQGAPPHGSPALLLLTTLLGTASPLVF

SEQ ID NO: 9644 - protein, 494 aa, Homo sapiens
MYLSRFLSIHALWVTVSSVMQPYPLVWGHYDLCKTQIYTEEGKVWDYMACQPESTDMTKYLKVKLDPPDITCGDPPETFCAMGNPYMCNNECDASTPELAHPPELMFDFEGRHPSTFWQSATWKEYPKPLQVNITLSWSKTIELTDNIVITFESGRPDQMILEKSLDYGRTWQPYQYYATDCLDAFHMDPKSVKDLSQHTVLEIICTEEYSTGYTTNSKIIHFEIKDRFAFFAGPRLRNMASLYGQLDTTKKLRDFFTVTDLRIRLLRPAVGEIFVDELHLARYFYAISDIKVRGRCKCNLHATVCVYDNSKLTCECEHNTTGPDCGKCKKNYQGRPWSPGSYLPIPKGTANTCIPSISSIGNCECFGHSNRCSYIDLLNTVICVSCKHNTRGQHCELCRLGYFRNASAQLDDENVCIANVCDNELLHCQNGGTCHNNVRCLCPAAYTGILCEKLRCEEAGSCGSDSGQGAPPHGSPALLLLTTLLGTASPLVF

SEQ ID NO: 9645 - protein, 422 aa, Homo sapiens
MLHLLALFLHCLPLASGDYDICKSWVTTDEGPTWEFYACQPKVMRLKDYVKVKVEPSGITCGDPPERFCSHENPYLCSNECDASNPDLAHPPRLMFDKEEEGLATYWQSITWSRYPSPLEANITLSWNKTVELTDDVVMTFEYGRPTVMVLEKSLDNGRTWQPYQFYAEDCMEAFGMSARRARDMSSSSAHRVLCTEEYSRWAGSKKEKHVRFEVRDRFAIFAGPDLRNMDNLYTRLESAKGLKEFFTLTDLRMRLLRPALGGTYVQRENLYKYFYAISNIEVIGRCKCNLHANLCSMREGSLQCECEHNTTGPDCGKCKKNFRTRSWRAGSYLPLPHGSPNACATAGSFGTLQTPPPGRSPSALRGSRRGLANVKEPAGSRPQISEMLLGCTVTLHQGSVGPHIPPKLSLPDPGGPWLGSQ

SEQ ID NO: 9646 - protein, 530 aa, Homo sapiens
MLHLLALFLHCLPLASGDYDICKSWVTTDEGPTWEFYACQPKVMRLKDYVKVKVEPSGITCGDPPERFCSHENPYLCSNECDASNPDLAHPPRLMFDKEEEGLATYWQSITWSRYPSPLEANITLSWNKTVELTDDVVMTFEYGRPTVMVLEKSLDNGRTWQPYQFYAEDCMEAFGMSARRARDMSSSSAHRVLCTEEYSRWAGSKKEKHVRFEVRDRFAIFAGPDLRNMDNLYTRLESAKGLKEFFTLTDLRMRLLRPALGGTYVQRENLYKYFYAISNIEVIGRCKCNLHANLCSMREGSLQCECEHNTTGPDCGKCKKNFRTRSWRAGSYLPLPHGSPNACATAGSFGNCECYGHSNRCSYIDFLNVVTCVSCKHNTRGQHCQHCRLGYYRNGSAELDDENVCIECNCNQIGSVHDRCNETGFCECREGAAGPKCDDCLPTHYWRQGCYPNVCDDDQLLCQNGGTCLQNQRCACPRGYTGVRCEQPRCDPADDDGGLDCDRAPGAAPRPATLLGCLLLLGLAARLGR

SEQ ID NO: 9647 - protein, 170 aa, Homo sapiens
MMAGMKIQLVCMLLLAFSSWSLCSDSEEEMKALEADFLTNMHTSKISKAHVPSWKMTLLNVCSLVNNLNSPAEETGEVHEEELVARRKLPTALDGFSLEAMLTIYQLHKICHSRAFQHWELIQEDILDTGNDKNGKEEVIKRKIPYILKRQLYENKPRRPYILKRDSYYY

SEQ ID NO: 9648 - protein, 95 aa, Homo sapiens
MMAGMKIQLVCMLLLAFSSWSLCSDSEEEMKALEADFLTNMHTSKLIQEDILDTGNDKNGKEEVIKRKIPYILKRQLYENKPRRPYILKRDSYYY

SEQ ID NO: 9649 - protein, 103 aa, Homo sapiens
MGIWQRLLLFGGVSLRAGGGATAPLGGSRAMVCGRQLSGAGSETLKQRRTQIMSRGLPKQKPIEGVKQVIVVASGKGGVGKSTTAVETGFHRVNQDGLHLLIS

SEQ ID NO: 9650 - protein, 319 aa, Homo sapiens
MGIWQRLLLFGGVSLRAGGGATAPLGGSRAMVCGRQLSGAGSETLKQRRTQIMSRGLPKQKPIEGVKQVIVVASGKGGVGKSTTAVNLALALAANDSSKAIGLLDVDVYGPSVPKMMNLKGNPELSQSNLMRPLLNYGIACMSMGFLVEESEPVVWRGLMVMSAIEKLLRQVDWGQLDYLVVDMPPGTGDVQLSVSQNIPITGAVIVSTPQDIALMDAHKGAEMFRRVHVPVLGLVQNMSVFQCPKCKHKTHIFGADGARKLAQTLGLEVLGDIPLHLNIREASDTGQPIVFSQPESDEAKAYLRIAVEVVRRLPSPSE

SEQ ID NO: 9651 - protein, 173 aa, Homo sapiens
MGIWQRLLLFGGVSLRAGGGATAPLGGSRAMVCGRQLSGAGSETLKQRRTQIMSRGLPKQKPIEGVKQVIVVASGKGGVGKSTTAVNLALALAANDSSKAIGLLDVDVYGPSVPKMMNLKGNPELSQSNLMRPLLNYGIACMSMGFLVEESEPVVWRGLMVMSAIEKLLRQVL

SEQ ID NO: 9652 - protein, 167 aa, Homo sapiens
MGIWQRLLLFGGVSLRAGGGATAPLGGSRAMVCGRQLSGAGSETLKQRRTQIMSRGLPKQKPIEGVKQVIVVASGKGGVGKSTTAVNLALALAANDSVLGLVQNMSVFQCPKCKHKTHIFGADGARKLAQTLGLEVLGDIPLHLNIREASDTGQPIVFSQPESDEAK

SEQ ID NO: 9653 - protein, 54 aa, Homo sapiens
MMRIEVKVKMMLSGAGSETLKQRRTQIMSRGLPKQKPIEGVKQVIVVASGKGGV

SEQ ID NO: 9654 - protein, 133 aa, Homo sapiens
MSRGLPKQKPIEGVKQVIVVASGKGGVGKSTTAVNLALALAANDSSKAIGLLDVDVYGPSVPKMMNLKGNPELSQSNLMRPLLNYGIACMSMGFLVEESEPVVWRGLMVMSAIEKLLRQVDWGQLDYLVVDMP

SEQ ID NO: 9655 - protein, 130 aa, Homo sapiens
VSLRAGGGATAPLGGSRAMVCGRQLSGAGSETLKQRRTQIMSRGLPKQKPIEGVKQVIVVASGKGGVGKSTTAVNLALALAANDSSKAIGLLDVDVYGPSVPKMMNLKGNPELSQSISQRCCRSCSRPPQ

SEQ ID NO: 9656 - protein, 111 aa, Homo sapiens
MPPSGPRGTLLLLPLLLLLLLRAVLAVPLERGAPNKEETPATESPDTGLYYHRYLQEVIDVLETDGHFREKLQAANAEDIKSGKLSRELDFVSHHVRTKLDELKRQEVSRL

SEQ ID NO: 9657 - protein, 124 aa, Homo sapiens
MPPSGPRGTLLLLPLLLLLLLRAVLAVPLERGAPNKEETPATESPDTGLYYHRYLQEVIDVLETDGHFREKLQAANAEDIKSGKLSRELDFVSHHVRTKLDELKRQEVSRLRMLLKAKMDAEQD

SEQ ID NO: 9658 - protein, 268 aa, Homo sapiens
MPPSGPRGTLLLLPLLLLLLLRAVLAVPLERGAPNKEETPATESPDTGLYYHRYLQEVIDVLETDGHFREKLQAANAEDIKSGKLSRELDFVSHHVRTKLDELKRQEVSRLRMLLKAKMDAEQDPNVQVDHLNLLKQFEHLDPQNQHTFEARDLELLIQTATRDLAQYDAAHHEEFKRYEMLKEHERRRYLESLGEEQRKEAERKLEEQQRRHREHPKVNVPGSQAQLKEVWEELDGLDPNRDLTHPVLGPLRYLAILFPSDINSDGV

SEQ ID NO: 9659 - protein, 461 aa, Homo sapiens
MPPSGPRGTLLLLPLLLLLLLRAVLAVPLERGAPNKEETPATESPDTGLYYHRYLQEVIDVLETDGHFREKLQAANAEDIKSGKLSRELDFVSHHVRTKLDELKRQEVSRLRMLLKAKMDAEQDPNVQVDHLNLLKQFEHLDPQNQHTFEARDLELLIQTATRDLAQYDAAHHEEFKRYEMLKEHERRRYLESLGEEQRKEAERKLEEQQRRHREHPKVNVPGSQAQLKEVWEELDGLDPNRFNPKTFFILHDINSDGVLDEQELEALFTKELEKVYDPKNEEDDMREMEEERLRMREHVMKNVDTNQDRLVTLEEFLASTQRKEFGDTGEGWETVEMHPAYTEEELRRFEEELAAREAELNAKAQRLSQETEALGRSQGRLEAQKRELQQAVLHMEQRKQQQQQQQGHKAPAAHPEGQLKFHPDTDDVPVPAPAGDQKEVDTSEKKLLERLPEVEVPQHL

SEQ ID NO: 9660 - protein, 461 aa, Homo sapiens; identical to SEQ ID NO: 9659

SEQ ID NO: 9661 - protein, 75 aa, Homo sapiens
MPPSGPRGTLLLLPLLLLLLLRAVLAVPLERGAPNKEETPATESPVSGPALLSSQVFAVVLQLLQTPVPVGRMLQ

SEQ ID NO: 9662 - protein, 295 aa, Homo sapiens
  VARIANT 1: note = misc_feature - Xaa can be any naturally occurring amino acid
XPPSGPRGTLLLLPLLLLLLLRAVLAVPLERGAPNKEETPATESPDTGLYYHRYLQEVIDVLETDGHFREKLQAANAEDIKSGKLSRELDFVSHHVRTKLDELKRQEFEHLDPQNQHTFEARDLELLIQTATRDLAQYDAAHHEEFKRYEMLKEHERRRYLESLGEEQRKEAERKLEEQQRRHREHPKVNVPGSQAQLKEVWEELDGLDPNRFNPKTFFILHDINSDGVLDEQELEALFTKELEKVYDPKNEEDDMREMEEERLRMREHVMKNVDTNQDRLVTLEEFLASTQRKE

SEQ ID NO: 9663 - protein, 34 aa, Homo sapiens
MRWRTILLQYCFLLITCLLTALEAVPIDIDKTKV

SEQ ID NO: 9664 - protein, 34 aa, Homo sapiens; identical to SEQ ID NO: 9663

SEQ ID NO: 9665 - protein, 39 aa, Homo sapiens
MRWRTILLQYCFLLITCLLTALEAVPIDIDKTKVQNIHP

SEQ ID NO: 9666 - protein, 69 aa, Homo sapiens
MRWRTILLQYCFLLITCLLTALEAVPIDIDKTKVQNIHPVESAKIEPPDTGLYYDEYLKQVIDVLETDK

SEQ ID NO: 9667 - protein, 69 aa, Homo sapiens; identical to SEQ ID NO: 9666

SEQ ID NO: 9668 - protein, 90 aa, Homo sapiens
MRWRTILLQYCFLLITCLLTALEAVPIDIDKTKVQNIHPVESAKIEPPDTGLYYDEYLKQVIDVLETDKHFREKLQKADIEEIKSGRLSK

SEQ ID NO: 9669 - protein, 195 aa, Homo sapiens
MRWRTILLQYCFLLITCLLTALEAVPIDIDKTKVQNIHPVESAKIEPPDTGLYYDEYLKQVIDVLETDKHFREKLQKADIEEIKSGRLSKELDLVSHHVRTKLDELKRQEVGRLRMLIKAKLDSLQDIGMDHQALLKQFDHLNHLNPDKFESTDLDMLIKAATSDLEHYDKTRHEEFKKYEMMKEHERREYLKTL

SEQ ID NO: 9670 - protein, 198 aa, Homo sapiens
MRWRTILLQYCFLLITCLLTALEAVPIDIDKTKVQNIHPVESAKIEPPDTGLYYDEYLKQVIDVLETDKHFREKLQKADIEEIKSGRLSKELDLVSHHVRTKLDELKRQEVGRLRMLIKAKLDSLQDIGMDHQALLKQFDHLNHLNPDKFESTDLDMLIKAATSDLEHYDKTRHEEFKKYEMMKEHERREYLKTLNEE

SEQ ID NO: 9671 - protein, 420 aa, Homo sapiens
MRWRTILLQYCFLLITCLLTALEAVPIDIDKTKVQNIHPVESAKIEPPDTGLYYDEYLKQVIDVLETDKHFREKLQKADIEEIKSGRLSKELDLVSHHVRTKLDELKRQEVGRLRMLIKAKLDSLQDIGMDHQALLKQFDHLNHLNPDKFESTDLDMLIKAATSDLEHYDKTRHEEFKKYEMMKEHERREYLKTLNEEKRKEEESKFEEMKKKHENHPKVNHPGSKDQLKEVWEETDGLDPNDFDPKTFFKLHDVNSDGFLDEQELEALFTKELEKVYDPKNEEDDMVEMEEERLRMREHVMNEVDTNKDRLVTLEEFLKATEKKEFLEPDSWETLDQQQFFTEEELKEYENIIALQENELKKKADELQKQKEELQRQHDQLEAQKLEYHQVIQQMEQKKLQQGIPPSGPAGELKFEPRV

SEQ ID NO: 9672 - protein, 390 aa, Homo sapiens
MRWRTILLQYCFLLITCLLTALEAVPIDIDKTKVQNIHPVESAKIEPPDTGLYYDEYLKQVIDVLETDKHFREKLQKADIEEIKSGRLSKELDLVSHHVRTKLDELKRQEVGRLRMLIKAKLDSLQDIGMDHQALLKQFDHLNHLNPDKFESTDLDMLIKAATSDLEHYDKTRHEEFKKYEMMKEHERREYLKTLNEEKRKEEESKFEEMKKKHENHPKVNHPGSKDQLKEVWEETDGLDPNDFDPKTFFKLHDVNSDGFLDEQELEALFTKELEKVYDPKNEEDDMVEMEEERLRMREHVMNETLDQQQFFTEEELKEYENIIALQENELKKKADELQKQKEELQRQHDQLEAQKLEYHQVIQQMEQKKLQQGIPPSGPAGELKFEPHI

SEQ ID NO: 9673 - protein, 420 aa, Homo sapiens
MRWRTILLQYCFLLITCLLTALEAVPIDIDKTKVQNIHPVESAKIEPPDTGLYYDEYLKQVIDVLETDKHFREKLQKADIEEIKSGRLSKELDLVSHHVRTKLDELKRQEVGRLRMLIKAKLDSLQDIGMDHQALLKQFDHLNHLNPDKFESTDLDMLIKAATSDLEHYDKTRHEEFKKYEMMKEHERREYLKTLNEEKRKEEESKFEEMKKKHENHPKVNHPGSKDQLKEVWEETDGLDPNDFDPKTFFKLHDVNSDGFLDEQELEALFTKELEKVYDPKNEEDDMVEMEEERLRMREHVMNEVDTNKDRLVTLEEFLKATEKKEFLEPDSWETLDQQQFFTEEELKEYENIIALQENELKKKADELQKQKEELQRQHDQLEAQKLEYHQVIQQMEQKKLQQGIPPSGPAGELKFEPHI

SEQ ID NO: 9674 - protein, 338 aa, Homo sapiens
MRWRTILLQYCFLLITCLLTALEAVPIDIDKTKVQNIHPVESAKIEPPDTGLYYDEYLKQVIDVLETDKHFREKLQKADIEEIKSGRLSKELDLVSHHVRTKLDELKRQEVGRLRMLIKAKLDSLQDIGMDHQALLKQFDHLNHLNPDKFESTDLDMLIKAATSDLEHYDKTRHEEFKKYEMMKEHERREYLKTLNEEKRKEEESKFEEMKKKHENHPKVNHPGSKDQLKEVWEETDGLDPNDFDPKTFFKLHDVNSDGFLDEQELEALFTKELEKVYDPKNEEDDMVEMEEERLRMREHVMNEVDTNKDRLVTLEEFLKATEKKEFLEPDSWESPSI

SEQ ID NO: 9675 - protein, 420 aa, Homo sapiens; identical to SEQ ID NO: 9673

SEQ ID NO: 9676 - protein, 231 aa, Homo sapiens
MRWRTILLQYCFLLITCLLTALEAVPIDIDKTKVQNIHPVESAKIEPPDTGLYYDEYLKQVIDVLETDKHFREKLQKADIEEIKSGRLSKELDLVSHHVRTKLDELKRQEVGRLRMLIKAKLDSLQDIGMDHQALLKQFDHLNHLNPDKFESTDLDMLIKAATSDLEHYDKTRHEEFKKYEMMKEHERREYLKTLNEEKRKEEESKFEEMKKKHENHPKVNHPVHREAKIN

SEQ ID NO: 9677 - protein, 73 aa, Homo sapiens
  VARIANT 1: note = misc_feature - Xaa can be any naturally occurring amino acid
XEERLRMREHVMNEVDTNKDRLVTLEEFLKATEKKEFLEPDSWEVIQQMEQKKLQQGIPPSGPAGELKFEPHI

SEQ ID NO: 9678 - protein, 198 aa, Homo sapiens
  VARIANT 1: note = misc_feature - Xaa can be any naturally occurring amino acid
XTLNEEKRKEEESKFEEMKKKHENHPKVNHPGSKDQLKEVWEETDGLDPNDFDPKTFFKLHDVNSDGFLDEQELEALFTKELEKVYDPKNEEDDMVEMEEERLRMREHVMNETLDQQQFFTEEELKEYENIIALQENELKKKADELQKQKEELQRQHDQLEAQKLEYHQVIQQMEQKKLQQGIPPSGPAGELKFEPHI

SEQ ID NO: 9679 - protein, 375 aa, Homo sapiens
MSSSLRPGPSRWRRAASIVLAAGWSRPETATPPSRPPPAEGFRLLLLQRSPHQGFMPGAHVFSGGVLDAADRSADWLGLFAPHHGPPRFGLGPAPFSRTAFPSLPDTDDHKTDNTGTLPEDVAFRICAVREAFEEAGVLLLRPRTSPPGPAPGPGLALEPPPGLASWRDRVRQDPRHFLRLCAHLDCTPDIWALHNWSAWLTPFLRGTTRRFDTAFFLCCLREPPPVYPDLAEVVGYQWSSPSEATESFLSKEIWLPPPQFYEVRRLANFASLSDLHKFCLGRALEGLERWLPIILLTADGMVHLLPGDELYLEDSDFLENLMSTEKKTEEIMKEGKQFHRIVTYHRHLYDIHVTVQPKYKHVYPKNSVVRKSHL

SEQ ID NO: 9680 - protein, 77 aa, Homo sapiens
MAGRLLGKALAAVSLSLALASVTIRSSRCRGIQAFRNPAGRTGLVGRGLLGRWGPNHAADPIITRGWWIQERRLVPH

SEQ ID NO: 9681 - protein, 284 aa, Homo sapiens
MAGRLLGKALAAVSLSLALASVTIRSSRCRGIQAFRNSFSSSWFHLNTNVMSGSNGSKENSHNKARTSPYPGSKVERSQVPNEKVGWLVEWQDYKPVEYTAVSVLAGPRWADPQIRNPAGRTGLVGRGLLGRWGPNHAADPIITRWKRDSSGNKIMHPVSGKHILQFVAIKRKDCGEWAIPGGMVDPGEKISATLKREFGEEALNSLQKTSAEKREIEEKLHKLFSQDHLVIYKGYVDDPRNTDNAWMETEAVNYHDETGEIMDNLMLEAGDDAGKVKWVDIND

SEQ ID NO: 9682 - protein, 350 aa, Homo sapiens
MAGRLLGKALAAVSLSLALASVTIRSSRCRGIQAFRNSFSSSWFHLNTNVMSGSNGSKENSHNKARTSPYPGSKVERSQVPNEKVGWLVEWQDYKPVEYTAVSVLAGPRWADPQISESNFSPKFNEKDGHVERKSKNGLYEIENGRPRNPAGRTGLVGRGLLGRWGPNHAADPIITRWKRDSSGNKIMHPVSGKHILQFVAIKRKDCGEWAIPGGMVDPGEKISATLKREFGEEALNSLQKTSAEKREIEEKLHKLFSQDHLVIYKGYVDDPRNTDNAWMETEAVNYHDETGEIMDNLMLEAGDDAGKVKWVDINDKLKLYASHSQFIKLVAEKRDAHWSEDSEADCHAL

SEQ ID NO: 9683 - protein, 206 aa, Homo sapiens
MSGSNGSKENSHNKARTSPYPGSKVERSQVPNEKVGWLVEWQDYKPVEYTAVSVLAGPRWADPQISESNFSPKFNEKDGHVERKSKNGLYEIENGRPRNPAGRTGLVGRGLLGRWGPNHAADPIITRWKRDSSGNKIMHPVSGKHILQFVAIKRKDCGEWAIPGGMVDPGEKISATLKREFGEEALNSLQKTSAEKREIEEKLHKL

SEQ ID NO: 9684 - protein, 300 aa, Homo sapiens
MSGSNGSKENSHNKARTSPYPGSKVERSQVPNEKVGWLVEWQDYKPVEYTAVSVLAGPRWADPQISESNFSPKFNEKDGHVERKSKNGLYEIENGRPRNPAGRTGLVGRGLLGRWGPNHAADPIITRWKRDSSGNKIMHPVSGKHILQFVAIKRKDCGEWAIPGGMVDPGEKISATLKREFGEEALNSLQKTSAEKREIEEKLHKLFSQDHLVIYKGYVDDPRNTDNAWMETEAVNYHDETGEIMDNLMLEAGDDAGKVKWVDINDKLKLYASHSQFIKLVAEKRDAHWSEDSEADCHAL

SEQ ID NO: 9685 - protein, 1391 aa, Homo sapiens
MPSSLLGAAMPASTSAAALQEALENAGRLIDRQLQEDRMYPDLSELLMVSAPNNPTVSGMSDMDYPLQGPGLLSVPNLPEISSIRRVPLPPELVEQFGHMQCNCMMGVFPPISRAWLTIDSDIFMWNYEDGGDLAYFDGLSETILAVGLVKPKAGIFQPHVRHLLVLATPVDIVILGLSYANLQTGSGVLNDSLSGGMQLLPDPLYSLPTDNTYLLTITSTDNGRIFLAGKDGCLYEVAYQAEAGWFSQRCRKINHSKSSLSFLVPSLLQFTFSEDDPILQIAIDNSRNILYTRSEKGVIQVYDLGQDGQGMSRVASVSQNAIVSAAGNIARTIDRSVFKPIVQIAVIENSESLDCQLLAVTHAGVRLYFSTCPFRQPLARPNTLTLVHVRLPPGFSASSTVEKPSKVHRALYSKGILLMAASENEDNDILWCVNHDTFPFQKPMMETQMTAGVDGHSWALSAIDELKVDKIITPLNKDHIPITDSPVVVQQHMLPPKKFVLLSAQGSLMFHKLRPVDQLRHLLVSNVGGDGEEIERFFKLHQEDQACATCLILACSTAACDREVSAWATRAFFRYGGEAQMRFPTTLPPPSNVGPILGSPVYSSSPVPSGSPYPNPSFLGTPSHGIQPPAMSTPVCALGNPATQATNMSCVTGPEIVYSGKHNGICIYFSRIMGNIWDASLVVERIFKSGNREITAIESSVPCQLLESVLQELKGLQEFLDRNSQFAGGPLGNPNTTAKVQQRLIGFMRPENGNPQQMQQELQRKFHEAQLSEKISLQAIQQLVRKSYQALALWKLLCEHQFTIIVAELQKELQEQLKITTFKDLVIRDKELTGALIASLINCYIRDNAAVDGISLHLQDICPLLYSTDDAICSKANELLQRSRQVQNKTEKERMLRESLKEYQKISNQVDLSNVCAQYRQVRFYEGVVELSLTAAEKKDPQGLGLHFYKHGEPEEDIVGLQAFQERLNSYKCITDTLQELVNQSKAAPQSPSVPKKPGPPVLSSDPNMLSNEEAGHHFEQMLKLSQRSKDELFSIALYNWLIQVDLADKLLQVASPFLEPHLVRMAKVDQNRVRYMDLLWRYYEKNRSFSNAARVLSRLADMHSTEISLQQRLEYIARAILSAKSSTAISSIAADGEFLHELEEKMEVARIQLQIQETLQRQYSHHSSVQDAVSQLDSELMDITKLYGEFADPFKLAECKLAIIHCAGYSDPILVQTLWQDIIEKELSDSVTLSSSDRMHALSLKIVLLGKIYAGTPRFFPLDFIVQFLEQQVCTLNWDVGFVIQTMNEIGVPLPRLLEVYDQLFKSRDPFWNRMKKPLHLLDCIHVLLIRYVENPSQVLNCERRRFTNLCLDAVCGYLVELQSMSSSVAVQAITGNFKSLQAKLERLH

SEQ ID NO: 9686 - protein, 1327 aa, Homo sapiens
MPSSLLGAAMPASTSAAALQEALENAGRLIDRQLQEDRMYPDLSELLMVSAPNNPTVSGMSDMDYPLQGPGLLSVPNLPEISSIRRVPLPPELVEQFGHMQCNCMMGVFPPISRAWLTIDSDIFMWNYEDGGDLAYFDGLSETILAVGLVKPKAGIFQPHVRHLLVLATPVDIVILGLSYANLQTGSGVLNDSLSGGMQLLPDPLYSLPTDNTYLLTITSTDNGRIFLAGKDGCLYEVAYQAEAGWFSQRCRKINHSKSSLSFLVPSLLQFTFSEDDPILQIAIDNSRNILYTRSEKGVIQVYDLGQDGQGMSRVASVSQNAIVSAAGNIARTIDRSVFKPIVQIAVIENSESLDCQLLAVTHAGVRLYFSTCPFRQPLARPNTLTLVHVRLPPGFSASSTVEKPSKVHRALYSKGILLMAASENEDNDILWCVNHDTFPFQKPMMETQMTAGVDGHSWALSAIDELKVDKIITPLNKDHIPITDSPVVVQQHMLPPKKFVLLSAQGSLMFHKLRPVDQLRHLLVSNVGGDGEEIERFFKLHQEDQACATCLILACSTAACDREVSAWATRAFFRYGGEAQMRFPTTLPPPSNVGPILGSPVYSSSPVPSGSPYPNPSFLGTPSHGIQPPAMSTPVCALGNPATQATNMSCVTGPEIVYSGKHNGICIYFSRIMGNIWDASLVVERIFKSGNREITAIESSVPCQLLESVLQELKGLQEFLDRNSQFAGGPLGNPNTTAKVQQRLIGFMRPENGNPQQMQQELQRKFHEAQLSEKISLQAIQQLVRKSYQALALWKLLCEHQFTIIVAELQKANELLQRSRQVQNKTEKERMLRESLKEYQKISNQVDLSNVCAQYRQVRFYEGVVELSLTAAEKKDPQGLGLHFYKHGEPEEDIVGLQAFQERLNSYKCITDTLQELVNQSKAAPQSPSVPKKPGPPVLSSDPNMLSNEEAGHHFEQMLKLSQRSKDELFSIALYNWLIQVDLADKLLQVASPFLEPHLVRMAKVDQNRVRYMDLLWRYYEKNRSFSNAARVLSRLADMHSTEISLQQRLEYIARAILSAKSSTAISSIAADGEFLHELEEKMEVARIQLQIQETLQRQYSHHSSVQDAVSQLDSELMDITKLYGEFADPFKLAECKLAIIHCAGYSDPILVQTLWQDIIEKELSDSVTLSSSDRMHALSLKIVLLGKIYAGTPRFFPLDFIVQFLEQQVCTLNWDVGFVIQTMNEIGVPLPRLLEVYDQLFKSRDPFWNRMKKPLHLLDCIHVLLIRYVENPSQVLNCERRRFTNLCLDAVCGYLVELQSMSSSVAVQAITGNFKSLQAKLERLH

SEQ ID NO: 9687 - protein, 54 aa, Homo sapiens
MPSSLLGAAMPASTSAAALQEALENAGRLIDRQLQEDRMYPDLSELLMVSAPSE

SEQ ID NO: 9688 - protein, 1332 aa, Homo sapiens
MSDMDYPLQGPGLLSVPNLPEISSIRRVPLPPELVEQFGHMQCNCMMGVFPPISRAWLTIDSDIFMWNYEDGGDLAYFDGLSETILAVGLVKPKAGIFQPHVRHLLVLATPVDIVILGLSYANLQTGSGVLNDSLSGGMQLLPDPLYSLPTDNTYLLTITSTDNGRIFLAGKDGCLYEVAYQAEAGWFSQRCRKINHSKSSLSFLVPSLLQFTFSEDDPILQIAIDNSRNILYTRSEKGVIQVYDLGQDGQGMSRVASVSQNAIVSAAGNIARTIDRSVFKPIVQIAVIENSESLDCQLLAVTHAGVRLYFSTCPFRQPLARPNTLTLVHVRLPPGFSASSTVEKPSKVHRALYSKGILLMAASENEDNDILWCVNHDTFPFQKPMMETQMTAGVDGHSWALSAIDELKVDKIITPLNKDHIPITDSPVVVQQHMLPPKKFVLLSAQGSLMFHKLRPVDQLRHLLVSNVGGDGEEIERFFKLHQEDQACATCLILACSTAACDREVSAWATRAFFRYGGEAQMRFPTTLPPPSNVGPILGSPVYSSSPVPSGSPYPNPSFLGTPSHGIQPPAMSTPVCALGNPATQATNMSCVTGPEIVYSGKHNGICIYFSRIMGNIWDASLVVERIFKSGNREITAIESSVPCQLLESVLQELKGLQEFLDRNSQFAGGPLGNPNTTAKVQQRLIGFMRPENGNPQQMQQELQRKFHEAQLSEKISLQAIQQLVRKSYQALALWKLLCEHQFTIIVAELQKELQEQLKITTFKDLVIRDKELTGALIASLINCYIRDNAAVDGISLHLQDICPLLYSTDDAICSKANELLQRSRQVQNKTEKERMLRESLKEYQKISNQVDLSNVCAQYRQVRFYEGVVELSLTAAEKKDPQGLGLHFYKHGEPEEDIVGLQAFQERLNSYKCITDTLQELVNQSKAAPQSPSVPKKPGPPVLSSDPNMLSNEEAGHHFEQMLKLSQRSKDELFSIALYNWLIQVDLADKLLQVASPFLEPHLVRMAKVDQNRVRYMDLLWRYYEKNRSFSNAARVLSRLADMHSTEISLQQRLEYIARAILSAKSSTAISSIAADGEFLHELEEKMEVARIQLQIQETLQRQYSHHSSVQDAVSQLDSELMDITKLYGEFADPFKLAECKLAIIHCAGYSDPILVQTLWQDIIEKELSDSVTLSSSDRMHALSLKIVLLGKIYAGTPRFFPLDFIVQFLEQQVCTLNWDVGFVIQTMNEIGVPLPRLLEVYDQLFKSRDPFWNRMKKPLHLLDCIHVLLIRYVENPSQVLNCERRRFTNLCLDAVCGYLVELQSMSSSVAVQAITGNFKSLQAKLERLH

SEQ ID NO: 9689 - protein, 140 aa, Homo sapiens
CKDDEAVVQAPRHAPVVRTPSIQPSLLPHAAPFAKSHLVHGSSPGVMGTSVATSASKIIPQGADSTMLATKTVKHGAPSPSHPISAPQAAAAAALRRQMASQAPAVNTLTESTLKNVPQVVNVQELKNNPATPSTAMGGL

SEQ ID NO: 9690 - protein, 78 aa, Homo sapiens
GEGTAAASAGGFGFGSSSNTTSFGTLASQNAPTFGSLSQQTSGFGTQSSGFSGFGSGTGGFSFGSNNSSVQGFGGWRS

SEQ ID NO: 9691 - protein, 113 aa, Homo sapiens
LQCLAALLLLGDPLGLEGCQHSVQPQPLQALWARREAKCSERALQLPAQEDSGLGAAATPHPSARSRVRMPPLSDHCPNRLLVLGPRVADSLVLDQAQEGSALGQITRKYPPF

SEQ ID NO: 9692 - protein, 2090 aa, Homo sapiens
MGDEMDAMIPEREMKDFQFRALKKVRIFDSPEELPKERSSLLAVSNKYGLVFAGGASGLQIFPTKNLLIQNKPGDDPNKIVDKVQGLLVPMKFPIHHLALSCDNLTLSACMMSSEYGSIIAFFDVRTFSNEAKQQKRPFAYHKLLKDAGGMVIDMKWNPTVPSMVAVCLADGSIAVLQVTETVKVCATLPSTVAVTSVCWSPKGKQLAVGKQNGTVVQYLPTLQEKKVIPCPPFYESDHPVRVLDVLWIGTYVFAIVYAAADGTLETSPDVVMALLPKKEEKHPEIFVNFMEPCYGSCTERQHHYYLSYIEEWDLVLAASAASTEVSILARQSDQINWESWLLEDSSRAELPVTDKSDDSLPMGVVVDYTNQVEITISDEKTLPPAPVLMLLSTDGVLCPFYMINQNPGVKSLIKTPERLSLEGERQPKSPGSTPTTPTSSQAPQKLDASAAAAPASLPPSSPAAPIATFSLLPAGGAPTVFSFGSSSLKSSATVTGEPPSYSSGSDSSKAAPGPGPSTFSFVPPSKASLAPTPAASPVAPSAASFSFGSSGFKPTLESTPVPSVSAPNIAMKPSFPPSTSAVKVNLSEKFTAAATSTPVSSSQSAPPMSPFSSASKPAASGPLSHPTPLSAPPSSVPLKSSVLPSPSGRSAQGSSSPVPSMVQKSPRITPPAAKPGSPQAKSLQPAVAEKQGHQWKDSDPVMAGIGEEIAHFQKELEELKARTSKACFQVGTSEEMKMLRTESDDLHTFLLEIKETTESLHGDISSLKTTLLEGFAGVEEAREQNERNRDSGYLHLLYKRPLDPKSEAQLQEIRRLHQYVKFAVQDVNDVLDLEWDQHLEQKKKQRHLLVPERETLFNTLANNREIINQQRKRLNHLVDSLQQLRLYKQTSLWSLSSAVPSQSSIHSFDSDLESLCNALLKTTIESHTKSLPKVPAKLSPMKQAQLRNFLAKRKTPPVRSTAPASLSRSAFLSQRYYEDLDEVSSTSSVSQSLESEDARTSCKDDEAVVQAPRHAPVVRTPSIQPSLLPHAAPFAKSHLVHGSSPGVMGTSVATSASKIIPQGADSTMLATKTVKHGAPSPSHPISAPQAAAAAALRRQMASQAPAVNTLTESTLKNVPQVVNVQELKNNPATPSTAMGSSVPYSTAKTPHPVLTPVAANQAKQGSLINSLKPSGPTPASGQLSSGDKASGTAKIETAVTSTPSASGQFSKPFSFSPSGTGFNFGIITPTPSSNFTAAQGATPSTKESSQPDAFSSGGGSKPSYEAIPESSPPSGITSASNTTPGEPAASSSRPVAPSGTALSTTSSKLETPPSKLGELLFPSSLAGETLGSFSGLRVGQADDSTKPTNKASSTSLTSTQPTKTSGVPSGFNFTAPPVLGKHTEPPVTSSATTTSVAPPAATSTSSTAVFGSLPVTSAGSSGVISFGGTSLSAGKTSFSFGSQQTNSTVPPSAPPPTTAATPLPTSFPTLSFGSLLSSATTPSLPMSAGRSTEEATSSALPEKPGDSEVSASAASLLEEQQSAQLPQAPPQTSDSVKKEPVLAQPAVSNSGTAASSTSLVALSAEATPATTGVPDARTEAVPPASSFSVPGQTAVTAAAISSAGPVAVETSSTPIASSTTSIVAPGPSAEAAAFGTVTSGSSVFAQPPAASSSSAFNQLTNNTATAPSATPVFGQVAASTAPSLFGQQTGSTASTAAATPQVSSSGFSSPAFGTTAPGVFGQTTFGQASVFGQSASSAASVFSFSQPGFSSVPAFGQPASSTPTSTSGSVFGAASSTSSSSSFSFGQSSPNTGGGLFGQSNAPAFGQSPGFGQGGSVFGGTSAATTTAATSGFSFCQASGFGSSNTGSVFGQAASTGGIVFGQQSSSSSGSVFGSGNTGRGGGFFSGLGGKPSQDAANKNPFSSASGGFGSTATSNTSNLFGNSGAKTFGGFASSSFGEQKPTGTFSSGGGSVASQGFGFSSPNKTGGFGAAPVFGSPPTFGGSPGFGGVPAFGSAPAFTSPLGSTGGKVFGEGTAAASAGGFGFGSSSNTTSFGTLASQNAPTFGSLSQQTSGFGTQSSGFSGFGSGTGGFSFGSNNSSVQGFGGWRS

SEQ ID NO: 9693 - protein, 2080 aa, Homo sapiens
MGDEMDAMIPEREMKDFQFRALKKVRIFDSPEELPKERSSLLAVSNKYGLVFAGGASGLQIFPTKNLLIQNKPGDDPNKIVDKVQGLLVPMKFPIHHLALSCDNLTLSACMMSSEYGSIIAFFDVRTFSNEAKQQKRPFAYHKLLKDAGGMVIDMKWNPTVPSMVAVCLADGSIAVLQVTETVKVCATLPSTVAVTSVCWSPKGKQLAVGKQNGTVVQYLPTLQEKKVIPCPPFYESDHPVRVLDVLWIGTYVFAIVYAAADGTLETSPDVVMALLPKKEEKHPEIFVNFMEPCYGSCTERQHHYYLSYIEEWDLVLAASAASTEVSILARQSDQINWESWLLEDSSRAELPVTDKSDDSLPMGVVVDYTNQVEITISDEKTLPPAPVLMLLSTDGVLCPFYMINQNPGVKSLIKTPERLSLEGERQPKSPGSTPTTPTSSQAPQKLDASAAAAPASLPPSSPAAPIATFSLLPAGGAPTVFSFGSSSLKSSATVTGEPPSYSSGSDSSKAAPGPGPSTFSFVPPSKASLAPTPAASPVAPSAASFSFGSSGFKPTLESTPVPSVSAPNIAMKPSFPPSTSAVKVNLSENSSQSAPPMSPFSSASKPAASGPLSHPTPLSAPPSSVPLKSSVLPSPSAGRSAQGSSSPVPSMVQKSPRITPPAAKPGSPQAKSLQPAVAEKQGHQWKDSDPVMAGIGEEIAHFQKELEELKARTSKACFQVGTSEEMKMLRTESDDLHTFLLEIKETTESLHGDISSLKTTLLEGFAGVEEAREQNERNRDSGYLHLLYKRPLDPKSEAQLQEIRRLHQYVKFAVQDVNDVLDLEWDQHLEQKKKQRHLLVPERETLFNTLANNREIINQQRKRLNHLVDSLQQLRLYKQTSLWSLSSAVPSQSSIHSFDSDLESLCNALLKTTIESHTKSLPKVPAKLSPMKQAQLRNFLAKRKTPPVRSTAPASLSRSAFLSQRYYEDLDEVSSTSSVSQSLESEDARTSCKDDEAVVQAPRHAPVVRTPSIQPSLLPHAAPFAKSHLVHGSSPGVMGTSVATSASKIIPQGADSTMLATKTVKHGAPSPSHPISAPQAAAAAALRRQMASQAPAVNTLTESTLKNVPQVVNVQELKNNPATPSTAMGSSVPYSTAKTPHPVLTPVAANQAKQGSLINSLKPSGPTPASGQLSSGDKASGTAKIETAVTSTPSASGQFSKPFSFSPSGTGFNFGIITPTPSSNFTAAQGATPSTKESSQPDAFSSGGGSKPSYEAIPESSPPSGITSASNTTPGEPAASSSRPVAPSGTALSTTSSKLETPPSKLGELLFPSSLAGETLGSFSGLRVGQADDSTKPTNKASSTSLTSTQPTKTSGVPSGFNFTAPPVLGKHTEPPVTSSATTTSVAPPAATSTSSTAVFGSLPVTSAGSSGVISFGGTSLSAGKTSFSFGSQQTNSTVPPSAPPPTTAATPLPTSFPTLSFGSLLSSATTPSLPMSAGRSTEEATSSALPEKPGDSEVSASAASLLEEQQSAQLPQAPPQTSDSVKKEPVLAQPAVSNSGTAASSTSLVALSAEATPATTGVPDARTEAVPPASSFSVPGQTAVTAAAISSAGPVAVETSSTPIASSTTSIVAPGPSAEAAAFGTVTSGSSVFAQPPAASSSSAFNQLTNNTATAPSATPVFGQVAASTAPSLFGQQTGSTASTAAATPQVSSSGFSSPAFGTTAPGVFGQTTFGQASVFGQSASSAASVFSFSQPGFSSVPAFGQPASSTPTSTSGSVFGAASSTSSSSSFSFGQSSPNTGGGLFGQSNAPAFGQSPGFGQGGSVFGGTSAATTTAATSGFSFCQASGFGSSNTGSVFGQAASTGGIVFGQQSSSSSGSVFGSGNTGRGGGFFSGLGGKPSQDAANKNPFSSASGGFGSTATSNTSNLFGNSGAKTFGGFASSSFGEQKPTGTFSSGGGSVASQGFGFSSPNKTGGFGAAPVFGSPPTFGGSPGFGGVPAFGSAPAFTSPLGSTGGKVFGEGTAAASAGGFGFGSSSNTTSFGTLASQNAPTFGSLSQQTSGFGTQSSGFSGFGSGTGGFSFGSNNSSVQGFGGWRS

SEQ ID NO: 9694 - protein, 52 aa, Homo sapiens
MKFPIHHLALSCDNLTLSACMMSSEYGSIIAFFDVRTFSNEAKQQKRPFAYH

SEQ ID NO: 9695 - protein, 1519 aa, Homo sapiens
MKPSFPPSTSAVKVNLSEKFTAAATSTPVSSSQSAPPMSPFSSASKPAASGPLSHPTPLSAPPSSVPLKSSVLPSPSGRSAQGSSSPVPSMVQKSPRITPPAAKPGSPQAKSLQPAVAEKQGHQWKDSDPVMAGIGEEIAHFQKELEELKARTSKACFQVGTSEEMKMLRTESDDLHTFLLEIKETTESLHGDISSLKTTLLEGFAGVEEAREQNERNRDSGYLHLLYKRPLDPKSEAQLQEIRRLHQYVKFAVQDVNDVLDLEWDQHLEQKKKQRHLLVPERETLFNTLANNREIINQQRKRLNHLVDSLQQLRLYKQTSLWSLSSAVPSQSSIHSFDSDLESLCNALLKTTIESHTKSLPKVPAKLSPMKQAQLRNFLAKRKTPPVRSTAPASLSRSAFLSQRYYEDLDEVSSTSSVSQSLESEDARTSCKDDEAVVQAPRHAPVVRTPSIQPSLLPHAAPFAKSHLVHGSSPGVMGTSVATSASKIIPQGADSTMLATKTVKHGAPSPSHPISAPQAAAAAALRRQMASQAPAVNTLTESTLKNVPQVVNVQELKNNPATPSTAMGSSVPYSTAKTPHPVLTPVAANQAKQGSLINSLKPSGPTPASGQLSSGDKASGTAKIETAVTSTPSASGQFSKPFSFSPSGTGFNFGIITPTPSSNFTAAQGATPSTKESSQPDAFSSGGGSKPSYEAIPESSPPSGITSASNTTPGEPAASSSRPVAPSGTALSTTSSKLETPPSKLGELLFPSSLAGETLGSFSGLRVGQADDSTKPTNKASSTSLTSTQPTKTSGVPSGFNFTAPPVLGKHTEPPVTSSATTTSVAPPAATSTSSTAVFGSLPVTSAGSSGVISFGGTSLSAGKTSFSFGSQQTNSTVPPSAPPPTTAATPLPTSFPTLSFGSLLSSATTPSLPMSAGRSTEEATSSALPEKPGDSEVSASAASLLEEQQSAQLPQAPPQTSDSVKKEPVLAQPAVSNSGTAASSTSLVALSAEATPATTGVPDARTEAVPPASSFSVPGQTAVTAAAISSAGPVAVETSSTPIASSTTSIVAPGPSAEAAAFGTVTSGSSVFAQPPAASSSSAFNQLTNNTATAPSATPVFGQVAASTAPSLFGQQTGSTASTAAATPQVSSSGFSSPAFGTTAPGVFGQTTFGQASVFGQSASSAASVFSFSQPGFSSVPAFGQPASSTPTSTSGSVFGAASSTSSSSSFSFGQSSPNTGGGLFGQSNAPAFGQSPGFGQGGSVFGGTSAATTTAATSGFSFCQASGFGSSNTGSVFGQAASTGGIVFGQQSSSSSGSVFGSGNTGRGGGFFSGLGGKPSQDAANKNPFSSASGGFGSTATSNTSNLFGNSGAKTFGGFASSSFGEQKPTGTFSSGGGSVASQGFGFSSPNKTGGFGAAPVFGSPPTFGGSPGFGGVPAFGSAPAFTSPLGSTGGKVFGEGTAAASAGGFGFGSSSNTTSFGTLASQNAPTFGSLSQQTSGFGTQSSGFSGFGSGTGGFSFGSNNSSVQGFGGWRS

SEQ ID NO: 9696 - protein, 495 aa, Homo sapiens
MKSSLLLRGVHFCFHLPGATPSTKESSQPDAFSSGGGSKPSYEAIPESSPPSGITSASNTTPGEPAASSSRPVAPSGTALSTTSSKLETPPSKLGELLFPSSLAGETLGSFSGLRVGQADDSTKPTNKASSTSLTSTQPTKTSGVPSGFNFTAPPVLGKHTEPPVTSSATTTSVAPPAATSTSSTAVFGSLPVTSAGSSGVISFGGTSLSAGKTSFSFGSQQTNSTVPPSAPPPTTAATPLPTSFPTLSFGSLLSSATTPSLPMSAGRSTEEATSSALPEKPGDSEVSASAASLLEEQQSAQLPQAPPQTSDSVKKEPVLAQPAVSNSGTAASSTSLVALSAEATPATTGVPDARTEAVPPASSFSVPGQTAVTAAAISSAGPVAVETSSTPIASSTTSIVAPGPSAEAAAFGTVTSGSSVFAQPPAASSSSAFNQLTNNTATAPSATPVFGQVAASTAPSLFGQQTGSTASTAAATPQVSSSGFSSPAFGTTAP

SEQ ID NO: 9697 - protein, 916 aa, Homo sapiens
MKSSLLLRGVHFCFHLPGTAKIETAVTSTPSASGQFSKPFSFSPSGTGFNFGIITPTPSSNFTAAQGATPSTKESSQPDAFSSGGGSKPSYEAIPESSPPSGITSASNTTPGEPAASSSRPVAPSGTALSTTSSKLETPPSKLGELLFPSSLAGETLGSFSGLRVGQADDSTKPTNKASSTSLTSTQPTKTSGVPSGFNFTAPPVLGKHTEPPVTSSATTTSVAPPAATSTSSTAVFGSLPVTSAGSSGVISFGGTSLSAGKTSFSFGSQQTNSTVPPSAPPPTTAATPLPTSFPTLSFGSLLSSATTPSLPMSAGRSTEEATSSALPEKPGDSEVSASAASLLEEQQSAQLPQAPPQTSDSVKKEPVLAQPAVSNSGTAASSTSLVALSAEATPATTGVPDARTEAVPPASSFSVPGQTAVTAAAISSAGPVAVETSSTPIASSTTSIVAPGPSAEAAAFGTVTSGSSVFAQPPAASSSSAFNQLTNNTATAPSATPVFGQVAASTAPSLFGQQTGSTASTAAATPQVSSSGFSSPAFGTTAPGVFGQTTFGQASVFGQSASSAASVFSFSQPGFSSVPAFGQPASSTPTSTSGSVFGAASSTSSSSSFSFGQSSPNTGGGLFGQSNAPAFGQSPGFGQGGSVFGGTSAATTTAATSGFSFCQASGFGSSNTGSVFGQAASTGGIVFGQQSSSSSGSVFGSGNTGRGGGFFSGLGGKPSQDAANKNPFSSASGGFGSTATSNTSNLFGNSGAKTFGGFASSSFGEQKPTGTFSSGGGSVASQGFGFSSPNKTGGFGAAPVFGSPPTFGGSPGFGGVPAFGSAPAFTSPLGSTGGKVFGEGTAAASAGGFGFGSSSNTTSFGTLASQNAPTFGSLSQQTSGFGTQSSGFSGFGSGTGGFSFGSNNSSVQGFGGWRS

SEQ ID NO: 9698 - protein, 187 aa, Homo sapiens
  VARIANT 1: note = misc_feature - Xaa can be any naturally occurring amino acid
XARQSDQINWESWLLEDSSRAELPVTDKSDDSLPMGVVVDYTNQVEITISDEKTLPPAPVLMLLSTDGVLCPFYMINQNPGVKSLIKTPERLSLEGERQPKSPASLAPTPAASPVAPSAASFSFGSSGFKPTLESTPVPSVSAPNIAMKPSFPPSTSAVKVNLSEKFTAAATSTPVSSSQSAPPMSP

SEQ ID NO: 9699 - protein, 145 aa, Homo sapiens
  VARIANT 1: note = misc_feature - Xaa can be any naturally occurring amino acid
XGVPAFGSAPAFTSPLGSTGGKVFGEGTAAASAGGFGFGSSSNTTSFGTLASQNAPTFGSLSQQTSGFGTQSSGFSGFGSGTGGLSRVLVAGEAEGVSAGLSIPGTNRILSFFPEKCWSRLFRPTLPSKHIHPERNNRNQNSQGA

SEQ ID NO: 9700 - protein, 967 aa, Homo sapiens
  VARIANT 1: note = misc_feature - Xaa can be any naturally occurring amino acid
XKTPHPVLTPVAANQAKQGSLINSLKPSGPTPASGQLSSGDKASGTAKIETAVTSTPSASGQFSKPFSFSPSGTGFNFGIITPTPSSNFTAAQGATPSTKESSQPDAFSSGGGSKPSYEAIPESSPPSGITSASNTTPGEPAASSSRPVAPSGTALSTTSSKLETPPSKLGELLFPSSLAGETLGSFSGLRVGQADDSTKPTNKASSTSLTSTQPTKTSGVPSGFNFTAPPVLGKHTEPPVTSSATTTSVAPPAATSTSSTAVFGSLPVTSAGSSGVISFGGTSLSAGKTSFSFGSQQTNSTVPPSAPPPTTAATPLPTSFPTLSFGSLLSSATTPSLPMSAGRSTEEATSSALPEKPGDSEVSASAASLLEEQQSAQLPQAPPQTSDSVKKEPVLAQPAVSNSGTAASSTSLVALSAEATPATTGVPDARTEAVPPASSFSVPGQTAVTAAAISSAGPVAVETSSTPIASSTTSIVAPGPSAEAAAFGTVTSGSSVFAQPPAASSSSAFNQLTNNTATAPSATPVFGQVAASTAPSLFGQQTGSTASTAAATPQVSSSGFSSPAFGTTAPGVFGQTTFGQASVFGQSASSAASVFSFSQPGFSSVPAFGQPASSTPTSTSGSVFGAASSTSSSSSFSFGQSSPNTGGGLFGQSNAPAFGQSPGFGQGGSVFGGTSAATTTAATSGFSFCQASGFGSSNTGSVFGQAASTGGIVFGQQSSSSSGSVFGSGNTGRGGGFFSGLGGKPSQDAANKNPFSSASGGFGSTATSNTSNLFGNSGAKTFGGFASSSFGEQKPTGTFSSGGGSVASQGFGFSSPNKTGGFGAAPVFGSPPTFGGSPGFGGVPAFGSAPAFTSPLGSTGGKVFGEGTAAASAGGFGSLAMSLSPTLKGRLLLMRPKAGGGREQAAPGRKSNESRSLGHLCMERALTSPLKVWEQQQHHILRHARESECPHFRITVPTDFWFWDPE

SEQ ID NO: 9701 - protein, 114 aa, Homo sapiens
AMMLSDRLTFLGKYREFHRMYGEKRFADAASLLLSLMTSRIAPRSFWMTLLTDALPLLEQKQVIFSAEQTYELMRCLEDLTSRRPVHGESDTEQLQYGPLVLLSFTSIICWKLL

SEQ ID NO: 9702 - protein, 191 aa, Homo sapiens
LDWVRLHVCEVDSLSADVLGSENPSKHDSFWNLGRLDEARQMLSKEADASPASAGICRIMGDLMRTMPILSPGNTQTLTELELKWQHWHEECERYLQDSTFATSPHLESLLKIMLGDEAALLEQKELLSNWYHFLVTRLLYSNPTVKPIDLHYYAQSSLDLFLGGESSPEPLDNILLAAFEFDIHQVIKEC

SEQ ID NO: 9703 - protein, 19 aa, Homo sapiens
LLAAFEFDIHQVIKECSFL

SEQ ID NO: 9704 - protein, 18 aa, Homo sapiens
LTDALPLLEQKQQNRLMS

SEQ ID NO: 9705 - protein, 611 aa, Homo sapiens
MEELDGEPTVTLIPGVNSKKNQMYFDWGPGEMLVCETSFNKKEKSEMVPSCPFIYIIRKDVDVYSQILRKLFNESHGIFLGLQRIDEELTGKSRKSQLVRVSKNYRSVIRACMEEMHQVAIAAKDPANGRQFSSQVSILSAMELIWNLCEILFIEVAPAGPLLLHLLDWVRLHVCEVDSLSADVLGSENPSKHDSFWNLPGNTQTLTELELKWQHWHEECERYLQDSTFATSPHLESLLKIMLGDEAALLEQKELLSNWYHFLVTRLLYSNPTVKPIDLHYYAQSSLDLFLGGESSPEPLDNILLAAFEFDIHQVIKECSIALSNWWFVAHLTDLLDHCKLLQSHNLYFGSNMREFLLLEYASGLFAHPSLWQLGVDYFDYCPELGRVSLELHIERIPLNTEQKALKVLRICEQRQMTEQVRSICKILAMKAVRNNRLGSALSWSIRAKDAAFATLVSDRFLRDYCERGCFSDLDLIDNLGPAMMLSDRLTFLGKYREFHRMYGEKRFADAASLLLSLMTSRIAPRSFWMTLLTDALPLLEQKQVIFSAEQTYELMRCLEDLTSRRPVHGESDTEQLQDDDIETTKVEMLRLSLARNLARAIIREGSLEGS

SEQ ID NO: 9706 - protein, 656 aa, Homo sapiens
MEELDGEPTVTLIPGVNSKKNQMYFDWGPGEMLVCETSFNKKEKSEMVPSCPFIYIIRKDVDVYSQILRKLFNESHGIFLGLQRIDEELTGKSRKSQLVRVSKNYRSVIRACMEEMHQVAIAAKDPANGRQFSSQVSILSAMELIWNLCEILFIEVAPAGPLLLHLLDWVRLHVCEVDSLSADVLGSENPSKHDSFWNLVTILVLQGRLDEARQMLSKEADASPASAGICRIMGDLMRTMPILSPGNTQTLTELELKWQHWHEECERYLQDSTFATSPHLESLLKIMLGDEAALLEQKELLSNWYHFLVTRLLYSNPTVKPIDLHYYAQSSLDLFLGGESSPEPLDNILLAAFEFDIHQVIKECSIALSNWWFVAHLTDLLDHCKLLQSHNLYFGSNMREFLLLEYASGLFAHPSLWQLGVDYFDYCPELGRVSLELHIERIPLNTEQKALKVLRICEQRQMTEQVRSICKILAMKAVRNNRLGSALSWSIRAKDAAFATLVSDRFLRDYCERGCFSDLDLIDNLGPAMMLSDRLTFLGKYREFHRMYGEKRFADAASLLLSLMTSRIAPRSFWMTLLTDALPLLEQKQVIFSAEQTYELMRCLEDLTSRRPVHGESDTEQLQDDDIETTKVEMLRLSLARNLARAIIREGSLEGS

SEQ ID NO: 9707 - protein, 169 aa, Homo sapiens
MEELDGEPTVTLIPGVNSKKNQMYFDWGPGEMLVCETSFNKKEKSEMVPSCPFIYIIRKDVDVYSQILRKLFNESHGIFLGLQRIDEELTGKSRKSQLVRVSKNYRSVIRACMEEMHQVAIAAKDPANGRQFSSQVSILSAMELIWNLCEILFIEVAPGDHLGAAGPAG

SEQ ID NO: 9708 - protein, 544 aa, Homo sapiens
MEEMHQVAIAAKDPANGRQFSSQVSILSAMELIWNLCEILFIEVAPAGPLLLHLLDWVRLHVCEVDSLSADVLGSENPSKHDSFWNLVTILVLQGRLDEARQMLSKEADASPASAGICRIMGDLMRTMPILSPGNTQTLTELELKWQHWHEECERYLQDSTFATSPHLESLLKIMLGDEAALLEQKELLSNWYHFLVTRLLYSNPTVKPIDLHYYAQSSLDLFLGGESSPEPLDNILLAAFEFDIHQVIKECSIALSNWWFVAHLTDLLDHCKLLQSHNLYFGSNMREFLLLEYASGLFAHPSLWQLGVDYFDYCPELGRVSLELHIERIPLNTEQKALKVLRICEQRQMTEQVRSICKILAMKAVRNNRLGSALSWSIRAKDAAFATLVSDRFLRDYCERGCFSDLDLIDNLGPAMMLSDRLTFLGKYREFHRMYGEKRFADAASLLLSLMTSRIAPRSFWMTLLTDALPLLEQKQVIFSAEQTYELMRCLEDLTSRRPVHGESDTEQLQDDDIETTKVEMLRLSLARNLARAIIREGSLEGS

SEQ ID NO: 9709 - protein, 259 aa, Homo sapiens
MREFLLLEYASGLFAHPSLWQLGVDYFDYCPELGRVSLELHIERIPLNTEQKALKVLRICEQRQMTEQVRSICKILAMKAVRNNRLGSALSWSIRAKDAAFATLVSDRFLRDYCERGCFSDLDLIDNLGPAMMLSDRLTFLGKYREFHRMYGEKRFADAASLLLSLMTSRIAPRSFWMTLLTDALPLLEQKQVIFSAEQTYELMRCLEDLTSRRPVHGESDTEQLQDDDIETTKVEMLRLSLARNLARAIIREGSLEGS

SEQ ID NO: 9710 - protein, 120 aa, Homo sapiens
MYFDWGPGEMLVCETSFNKKEKSEMVPSCPFIYIIRKDVDVYSQILRKLFNESHGIFLGLQRIDEELTGKSRKSQLVRVSKNYRSVIRACMEEMHQVAIAAKDPANGRQFSSQVSILSAM

SEQ ID NO: 9711 - protein, 272 aa, Homo sapiens
VTILVLQGRLDEARQMLSKEADASPASAGICRIMGDLMRTMPILSPGNTQTLTELELKWQHWHEECERYLQDSTFATSPHLESLLKIMLGDEAALLEQKELLSNWYHFLVTRLLYSNPTVKPIDLHYYAQSSLDLFLGGESSPEPLDNILLAAFEFDIHQVIKECSFGSNMREFLLLEYASGLFAHPSLWQLGVDYFDYCPELGRVSLELHIERIPLNTEQKALKVLRICEQRQMTEQVRSICKILAMKAVRNNRLGSALSWSIRAKDAAFA

SEQ ID NO: 9712 - protein, 46 aa, Homo sapiens
  VARIANT 1: note = misc_feature - Xaa can be any naturally occurring amino acid
XEKRFADAASLLLSLMTSRIAPRSFWMTLLTDALPLLEQKQNRLMS

SEQ ID NO: 9713 - protein, 302 aa, Homo sapiens
  VARIANT 1: note = misc_feature - Xaa can be any naturally occurring amino acid
XHEECERYLQDSTFATSPHLESLLKSSLDLFLGGESSPEPLDNILLAAFEFDIHQVIKECSIALSNWWFVAHLTDLLDHCKLLQSHNLYFGSNMREFLLLEYASGLFAHPSLWQLGVDYFDYCPELGRVSLELHIERIPLNTEQKALKVLRICEQRQMTEQVRSICKILAMKAVRNNRLGSALSWSIRAKDAAFATLVSDRFLRDYCERGCFSDLDLIDNLGPAMMLSDRLTFLGKYREFHRMYGEKRFADAASLLLSLMTSRIAPRSFWMTLLTDALPLLEQKQVIFSAEQTYELMRCLED

SEQ ID NO: 9714 - protein, 100 aa, Homo sapiens
  VARIANT 1: note = misc_feature - Xaa can be any naturally occurring amino acid
XLFIEVAPAGPLLLHLLDWVRLHVCEVDSLSADVLGSENPSKHDSFWNLIMLGDEAALLEQKELLSNWYHFLVTRLLYSNPTVKPIDLHYYAQPGPVSGR

SEQ ID NO: 9715 - protein, 98 aa, Homo sapiens
  VARIANT 1: note = misc_feature - Xaa can be any naturally occurring amino acid
XSLMTSRIAPRSFWMTLLTDALPLLEQKQVKVIFSAEQTYELMRCLEDLTSRRPVHGESDTEQLQDDDIETTKVEMLRLSLARNLARAIIREGSLEGS

SEQ ID NO: 9716 - protein, 89 aa, Homo sapiens
MPVNSSGPDWVTVIPRRIKETNSLELSQGSGTFPSGYYYKDQWRPRKFKMRQFNDPTTLQSAYKEKWCIYLVTQQSGNGLNTLLHLFQI

SEQ ID NO: 9717 - skipped

SEQ ID NO: 9718 - protein, 53 aa, Homo sapiens
MWTNFFKLRLFCCLLAVLMVVVLVINVTQVEYLDHETVSATFIDSSGQFVSSQ

SEQ ID NO: 9719 - protein, 559 aa, Homo sapiens
MWTNFFKLRLFCCLLAVLMVVVLVINVTQVEYLDHETVSATFIDSSGQFVSSQVTGISRNPYCGYDQQTLSSQERMEEDSLLAALHRQVPDVGPVPFVKSTDPSSSYFVILNSAAFFKVGSQLEVLVHVQDFQRKPKKYGGDYLQARIHSLKLQAGAVGRVVDYQNGFYKVFFTLLWPGKVKVSVSLVHPSEGIRVLQRLQEDKPDRVYFKSLFRSGRISETTECNVCLPGNLPLCNFTDLYTGEPWFCFKPKKLPCSSRITHFKGGYLKGLLTAAESAFFQSGVNIKMPVNSSGPDWVTVIPRRIKETNSLELSQGSGTFPSGYYYKDQWRPRKFKMRQFNDPDNITECLQRKVVHLFGDSTIRQWFEYLTTFVPDLVEFNLGSPKNVGPFLAVDQKHNILLKYRCHGPPIRFTTVFSNELHYVANELNGIVGGKNTVVAIAVWSHFSTFPLEVYIRRLRNIRRAVVRLLDRSPKTVVVIRTANAQELGPEVSLFNSDWYNFQLDTILRRMFSGVGVYLVDAWEMTLAHYLPHKLHPDEVIVKNQLDMFLSFVCPLET

SEQ ID NO: 9720 - protein, 559 aa, Homo sapiens; identical to SEQ ID NO: 9719

SEQ ID NO: 9721 - protein, 559 aa, Homo sapiens; identical to SEQ ID NO: 9719

SEQ ID NO: 9722 - protein, 260 aa, Homo sapiens
MEKFNTISVSKCNKETVAMKEKCKFGMTSTIPSGHVWRNTWNPVSCSLATVKMKECLRGKLIYLMGDSTIRQWMEYFKASINTLKSVDLHESGKLQHQLAVDLDRNINIQWQKYCYPLIGSMTYSVKEMEYLTRAIDRTGGEKNTVIVISLGQHFRPFPIDVFIRRALNVHKAIQHLLLRSPDTMVIIKTENIREMYNDAERFSDFHGYIQYLIIKDIFQDLSVSIIDAWDITIAYGTNNVHPPQHVVGNQINILLNYIC

SEQ ID NO: 9723 - protein, 544 aa, Homo sapiens
MKISMINYKSLLALLFILASWIIFTVFQNSTKVWSALNLSISLHYWNNSTKSLFPKTPLISLKPLTETELRIKEIIEKLDQQIPPRPFTHVNTTTSATHSTATILNPRDTYCRGDQLHILLEVRDHLGRRKQYGGDFLRARMSSPALMAGASGKVTDFNNGTYLVSFTLFWEGQVSLSLLLIHPSEGVSALWSARNQGYDRVIFTGQFVNGTSQVHSECGLILNTNAELCQYLDNRDQEGFYCVRPQHMPCAALTHMYSKNKKVSYLSKQEKSLFERSNVGVEIMEKFNTISVSKCNKETVAMKEKCKFGMTSTIPSGHVWRNTWNPVSCSLATVKMKECLRGKLIYLMGDSTIRQWMEYFKASINTLKSVDLHESGKLQHQLAVDLDRNINIQWQKYCYPLIGSMTYSVKEMEYLTRAIDRTGGEKNTVIVISLGQHFRPFPIDVFIRRALNVHKAIQHLLLRSPDTMVIIKTENIREMYNDAERFSDFHGYIQYLIIKDIFQDLSVSIIDAWDITIAYGTNNVHPPQHVVGNQINILLNYIC

SEQ ID NO: 9724 - protein, 139 aa, Homo sapiens
MQAACWYVLFLLQPTVYLVTCANLTNGGKSELLKSGSSKSTLKHIWTESSKDLSISRLLSQTFRGKENDTDLDLRYDTPEPYSEQDLWDWLRNSTDLQEPRPRAKRRPIVKTGKFKKMFGWGDFHSNIKTVKLNLLITG

SEQ ID NO: 9725 - protein, 143 aa, Homo sapiens
MQAACWYVLFLLQPTVYLVTCANLTNGGKSELLKSGSSKSTLKHIWTESSKDLSISRLLSQTFRGKENDTDLDLRYDTPEPYSEQDLWDWLRNSTDLQEPRPRAKRRPIVKTGKFKKMFGWGDFHSNIKTVKLNLLITGKIVD

SEQ ID NO: 9726 - protein, 271 aa, Homo sapiens
MQAACWYVLFLLQPTVYLVTCANLTNGGKSELLKSGSSKSTLKHIWTESSKDLSISRLLSQTFRGKENDTDLDLRYDTPEPYSEQDLWDWLRNSTDLQEPRPRAKRRPIVKTGKFKKMFGWGDFHSNIKTVKLNLLITGKIVDHGNGTFSVYFRHNSTGQGNVSVSLVPPTKIVEFDLAQQTVIDAKDSKSFNCRIEYEKVDKATKNTLCNYDPSKTCYQEQTQSHVSWLCSKPFKVICIYISFYSTDYKLVQKVCPDYNYHSDTPYFPSG

SEQ ID NO: 9727 - protein, 253 aa, Homo sapiens
VTCANLTNGGKSELLKSGSSKSTLKHIWTESSKDLSISRLLSQTFRGKENDTDLDLRYDTPEPYSEQDLWDWLRNSTDLQEPRPRAKRRPIVKTGKFKKMFGWGDFHSNIKTVKLNLLITGKIVDHGNGTFSVYFRHNSTGQGNVSVSLVPPTKIVEFDLAQQTVIDAKDSKSFNCRIEYEKVDKATKNTLCNYDPSKTCYQEQTQSHVSWLCSKPFKVICIYISFYSTDYKLVQKVCPDYNYHSDTPYFPSG

SEQ ID NO: 9728 - protein, 264 aa, Homo sapiens
MRLRPLPLVVVPGLLQLLFCDSKEVVHATEGLDWEDKDAPGTLVGNVVHSRIISPLRLFVKQSPVPKPGPMAYADSMENFWDWLANITEIQEPLARTKRRPIVKTGKFKKMFGWGDFHSNIKTVKLNLLITGKIVDHGNGTFSVYFRHNSTGLGNVSVSLVPPSKVVEFEVSPQSTLETKESKSFNCRIEYEKTDRAKKTALCNFDPSKICYQEQTQSHVSWLCSKPFKVICIYIAFYSVDYKLVQKVCPDYNYHSETPYLSSG

SEQ ID NO: 9729 - protein, 354 aa, Homo sapiens
MQLTRCCFVFLVQGSLYLVICGQDDGPPGSEDPERDDHEGQPRPRVPRKRGHISPKSRPMANSTLLGLLAPPGEAWGILGQPPNRPNHSPPPSAKVKKIFGWGDFYSNIKTVALNLLVTGKIVDHGNGTFSVHFQHNATGQGNISISLVPPSKAVEFHQEQQIFIEAKASKIFNCRMEWEKVERGRRTSLCTHDPAKICSRDHAQSSATWSCSQPFKVVCVYIAFYSTDYRLVQKGPSLLSGDVRHTPLLQTTLRSPPWRLETAGTGAAHQWTPTVCRSASHSAVETAGRRRKQWGQRPWAPSPPPLAELSAGTGGTLTPLLLLSSCGEPDAGDSWRARPSWHTVLPAPGMDSF

SEQ ID NO: 9730 - protein, 252 aa, Homo sapiens
MQLTRCCFVFLVQGSLYLVICGQDDGPPGSEDPERDDHEGQPRPRVPRKRGHISPKSRPMANSTLLGLLAPPGEAWGILGQPPNRPNHSPPPSAKVKKIFGWGDFYSNIKTVALNLLVTGKIVDHGNGTFSVHFQHNATGQGNISISLVPPSKAVEFHQEQQIFIEAKASKIFNCRMEWEKVERGRRTSLCTHDPAKICSRDHAQSSATWSCSQPFKVVCVYIAFYSTDYRLVQKVCPDYNYHSDTPYYPSG

SEQ ID NO: 9731 - protein, 308 aa, Homo sapiens
MRLLPEWFLLLFGPWLLRKAVSAQIPESGRPQYLGLRPAAAGAGAPGQQLPEPRSSDGLGVGRAWSWAWPTNHTGALARAGAAGALPAQRTKRKPSIKAARAKKIFGWGDFYFRVHTLKFSLLVTGKIVDHVNGTFSVYFRHNSSSLGNLSVSIVPPSKRVEFGGVWLPGPVPHPLQSTLALEGVLPGLGPPLGMAAAAAGPGLGGSLGGALAGPLGGALGVPGAKESRAFNCHVEYEKTNRARKHRPCLYDPSQVCFTEHTQSQAAWLCAKPFKVICIFVSFLSFDYKLVQKVCPDYNFQSEHPYFG

SEQ ID NO: 9732 - protein, 36 aa, Homo sapiens
MRLLPEWFLLLFGPWLLRKPRPGLSLPPARSWEHPA

SEQ ID NO: 9733 - protein, 481 aa, Homo sapiens
MKGRGMLVLLLHAVVLGLPSAWAVGACARACPAACACSTVERGCSVRCDRAGLLRVPAELPCEAVSIDLDRNGLRFLGERAFGTLPSLRRLSLRHNNLSFITPGAFKGLPRLAELRLAHNGDLRYLHARTFAALSRLRRLDLAACRLFSVPERLLAELPALRELAAFDNLFRRVPGALRGLANLTHAHLERGRIEAVASSSLQGLRRLRSLSLQANRVRAVHAGAFGDCGVLEHLLLNDNLLAELPADAFRGLRRLRTLNLGGNALDRVARAWFADLAELELLYLDRNSIAFVEEGAFQNLSGLLALHLNGNRLTVLAWVAFQPGFFLGRLFLFRNPWCCDCRLEWLRDWMEGSGRVTDVPCASPGSVAGLDLSQVTFGRSSDGLCVDPEELNLTTSSPGPSPEPAATTVSRFSSLLSKLLAPRVPVEEAANTTGGLANASLSDSLSSRGVGGAGRQPWFLLASCLLPSVAQHVVFGLQMD

SEQ ID NO: 9734 - protein, 481 aa, Homo sapiens; identical to SEQ ID NO: 9733

SEQ ID NO: 9735 - protein, 157 aa, Homo sapiens
MAKLRQKNPRAVRQAEEVRGLEHLHMDVAVNFSQGALLSPHLHNVCAEAVDAIYTRQEDVRFWLEQGVDSSVFEALPKASEQAELPRCRQVGDHGKPCVCRYGLSLAWYPCMLKYCHSRDRPTPYKCGIRSCQKSYSFDFYVPQRQLCLWDEDPYPG

SEQ ID NO: 9736 - protein, 273 aa, Homo sapiens
MRLPGVPLARPALLLLLPLLAPLLGTGAPAELRVRVRLPDGQVTEESLQADSDADSISLELRKPDGTLVSFTADFKKDVKVFRALILGELEKGQSQFQALCFVTQLQHNEIIPSEAMAKLRQKNPRAVRQAEEVRGLEHLHMDVAVNFSQGALLSPHLHNVCAEAVDAIYTRQEDVRFWLEQGVDSSVFEALPKASEQAELPRCRQVGDHGKPCVCRYGLSLAWYPCMLKYCHSRDRPTPYKCGIRSCQKSYSFDFYVPQRQLCLWDEDPYPG

SEQ ID NO: 9737 - protein, 85 aa, Homo sapiens
MKTLFLGVTLGLAAALSFTLEEEDEGGSVHPEENPDAEDGGAWQIQRLWGQEAHIPAGAARDGRLRLLLQRPAPWGPALHGKACG

SEQ ID NO: 9738 - protein, 147 aa, Homo sapiens
MKTLFLGVTLGLAAALSFTLEEEDEGGSVHPEENPDAEDGGAWQIQRLWGQEAHIPAGAARDGRLRLLLQRPAPWGPALHGKACGICSLQGRAAVPTLAHLATSPAGRNPNTNLEALEEFKKLVQHKGLSEEDIFMPLQTGSCVLEH

SEQ ID NO: 9739 - protein, 228 aa, Homo sapiens
MKTLFLGVTLGLAAALSFTLEEEDITGTWYVKAMVVDKDFPEDRRPRKVSPVKVTALGGGNLEATFTFMREDRCIQKKILMRKTEEPGKFSAYGGRKLIYLQELPGTDDYVFYCKDQRRGGLRYMGKLVASAPCRAVPLSPPWLTWPPHLQVGILIPTWRPWKNLRNWCSTRDSRRRTFSCPCRREAAFSNTRQPPGLHLQSPPYHQTQSPDHLDLPSSHDPSLLPPT

SEQ ID NO: 9740 - protein, 220 aa, Homo sapiens
MKTLFLGVTLGLAAALSFTLEEEDITGTWYVKAMVVDKDFPEDRRPRKVSPVKVTALGGGNLEATFTFMREDRCIQKKILMRKTEEPGKFSAYGGRKLIYLQELPGTDDYVFYCKDQRRGGLRYMGKLVASAPCRAVPLSPPWLTWPPHLQVGILIPTWRPWKNLRNWCSTRDSRRRTFSCPCRREAAFSNTRVTPGSAPPEPTLPPDTEPGPPGPTLQP

SEQ ID NO: 9741 - protein, 146 aa, Homo sapiens
MKTLFLGVTLGLAAALSFTLEEEDITGTWYVKAMVVDKDFPEDRRPRKVSPVKVTALGGGNLEATFTFMREDRCIQKKILMRKTEEPGKFSAYGGRKLIYLQELPGTDDYVFYCKDQRRGGLRYMGKLVGPCRCPHLGSPGHLTCR

SEQ ID NO: 9742 - protein, 170 aa, Homo sapiens
MKTLFLGVTLGLAAALSFTLEEEDITGTWYVKAMVVDKDFPEDRRPRKVSPVKVTALGGGNLEATFTFMREDRCIQKKILMRKTEEPGKFSAYGGRKLIYLQELPGTDDYVFYCKDQRRGGLRYMGKLVGRNPNTNLEALEEFKKLVQHKGLSEEDIFMPLQTGSCVLEH

SEQ ID NO: 9743 - protein, 170 aa, Homo sapiens; identical to SEQ ID NO: 9742

SEQ ID NO: 9744 - protein, 165 aa, Homo sapiens
MKTLFLGVTLGLAAALSFTLEEEDITGTWYVKAMVVDKDFPEDRRPRKVSPVKVTALGGGKLEATFTFMREDRCIQKKILMRKTEEPGKYSACLSAVEMDQITPALWEALAIDTLRKLRIGTRRPRIRWGQEAHVPAGAAQEGPLHLLLQRPAPWGPAPHGKACG

SEQ ID NO: 9745 - protein, 220 aa, Homo sapiens [sequence omitted]

SEQ ID NO: 9746 - protein, 170 aa, Homo sapiens
MKTLFLGVTLGLAAALSFTLEEEDITGTWYVKAMVVDKDFPEDRRPRKVSPVKVTALGGGKLEATFTFMREDRCIQKKILMRKTEEPGKYSAYGGRKLMYLQELPRRDHYIFYCKDQHHGGLLHMGKLVGRNSDTNREALEEFKKLVQRKGLSEEDIFTPLQTGSCVPEH

SEQ ID NO: 9747 - protein, 170 aa, Homo sapiens; identical to SEQ ID NO: 9746

SEQ ID NO: 9748 - protein, 477 aa, Homo sapiens
MIAFLLTSVLMIPHAGGHPLDTPHLPQELPPGLPNNINITFFSGMFKNVESVAEIFDCLGPHFTWLQAVFTNFPVLIQFVNGMKCVAGLCPRDFEDYGCTCRFEMEGLPVDESDSCCFQHRRCYEEAAEMDCLQDPAKLSTEVNCVSKKIICESKDNCEHLLCTCDKAAIECLARSSLNSSLNLLDTSFCLAQTPETTIKEDLTTLLPRVVPVEPTDTSLTALSGEEAGHDQEGVGAARATSPPGSAEIVATRVTAKIVTLVPAGIKSLGLAVSSVENDPEETTEKACDRFTFLHLGSGDNMQVMPQLGEMLFCLTSRCPEEFESYGCYCGQEGRGEPRDDLDRCCLSHHCCLEQVRRLGCLLERLPWSPVVCVDHTPKCGGQSLCEKLLCACDQTAAECMTSASFNQSLKSPSRLGCPGQPAACEDSLHPVPAAPTLGSSSEEDSEEDPPQEDLGRAKRFLRKSLGPLGIGPLHGR

SEQ ID NO: 9749 - protein, 271 aa, Homo sapiens
MIIVAFALIIFFAVKTRRKMDRYDKSNILWDKEHIYDEQPPNVEEWVKNVSAGTQDVPSPPSDYVERVDSPMAYSSNGKVNDKRFYPESSYKSTPVPEVVQELPLTSPVDDFRQPRYSSGGNFETPSKRAPAKGRAGRSKRTEQDHYETDYTTGGESCDELEEDWIREYPPITSDQQRQLYKRNFDTGLQEYKSLQSELDEINKELSRLDKELDDYREESEEYMAAADEYNRLKQVKGSADYKSKKNHCKQLKSKLSHIKKMVGDYDRQKT

SEQ ID NO: 9750 - protein, 522 aa, Homo sapiens
MSSRPLESPPPYRPDEFKPNHYAPSNDIYGGEMHVRPMLSQPAYSFYPEDEILHFYKWTSPPGVIRILSMLIIVMCIAIFACVASTLAWDRGYGTSLLGGSVGYPYGGSGFGSYGSGYGYGYGYGYGYGGYTDPRAAKGFMLAMAAFCFIAALVIFVTSVIRSEMSRTRRYYLSVIIVSAILGIMVFIATIVYIMGVNPTAQSSGSLYGSQIYALCNQFYTPAATGLYVDQYLYHYCVVDPQEAIAIVLGFMIIVAFALIIFFAVKTRRKMDRYDKSNILWDKEHIYDEQPPNVEEWVKNVSAGTQDVPSPPSDYVERVDSPMAYSSNGKVNDKRFYPESSYKSTPVPEVVQELPLTSPVDDFRQPRYSSGGNFETPSKRAPAKGRAGRSKRTEQDHYETDYTTGGESCDELEEDWIREYPPITSDQQRQLYKRNFDTGLQEYKSLQSELDEINKELSRLDKELDDYREESEEYMAAADEYNRLKQVKGSADYKSKKNHCKQLKSKLSHIKKMVGDYDRQKT

SEQ ID NO: 9751 - protein, 522 aa, Homo sapiens; identical to SEQ ID NO: 9750

SEQ ID NO: 9752 - protein, 216 aa, Homo sapiens
GPLNSWIPPFSGILQQQQQAQIPGLSQFSLSALDQFAGLLPNQIPLTGEASFAQGAQAGQVDPLQLQTPPQTQPGPSHVMPYVFSFKMPQEQGQMFQYYPVYMVLPWEQPQQTVPRSPQQTRQQQYEEQAISGGQQQLAFDPQLGTAPEIAVMSTGEEIPYLQKEAINFRHDSAGVFMPSTSPKPSTTNVFTSAVDQTITPELPEEKDKTDSLREP

SEQ ID NO: 9753 - protein, 279 aa, Homo sapiens
MKIIILLGFLGATLSAPLIPQRLMSASNSNELLLNLNNGQLLPLQLQGPLNSWIPPFSGILQQQQQAQIPGLSQFSLSALDQFAGLLPNQIPLTGEASFAQGAQAGQVDPLQLQTPPQTQPGPSHVMPYVFSFKMPQEQGQMFQYYPVYMVLPWEQPQQTVPRSPQQTRQQQYEEQIPFYAQFGYIPQLAEPAISGGQQQLAFDPQLGTAPEIAVMSTGEEIPYLQKEAINFRHDSAGVFMPSTSPKPSTTNVFTSAVDQTITPELPEEKDKTDSLREP

SEQ ID NO: 9754 - protein, 253 aa, Homo sapiens
MKIIILLGFLGATLSAPLLLNLNNGQLLPLQLQGPLNSWIPPFSGILQQQQQAQIPGLSQFSLSALDQFAGLLPNQIPLTGEASFAQGAQAGQVDPLQLQTPPQTQPGPSHVMPYVFSFKMPQEQGQMFQYYPVYMVLPWEQPQQTVPRSPQQTRQQQYEEQIPFYAQFGYIPQLAEPAISGGQQQLAFDPQLGTAPEIAVMSTGEEIPYLQKEAINFRHDSAGVFMPSTSPKPSTTNVFTSAVDQTITPELP

SEQ ID NO: 9755 - protein, 30 aa, Homo sapiens
QTPPQTQPGPSHVMPYVFSFKMPQEQGQNI

SEQ ID NO: 9756 - protein, 176 aa, Homo sapiens
MARRHCFSYWLLVCWLVVTVAEALSTFYLQQHINLHMDKKRYLRLLEIHKIMRTLPTARSLHSPLHLPRGVRSQGPSPSQRHPGVPSIFFHEGPESILGFQTDLSSLQGVTTVFHSSHFIGHTVTLLIGISPEEDSREEAHLRKAEREEKPKHTEAKKSLSFRKKQQKDFCFIFRN

SEQ ID NO: 9757 - protein, 130 aa, Homo sapiens
MARRHCFSYWLLVCWLVVTVAEGQEEVFTPPGDSQNNADATDCQIFTLTPPPAPRSPVTRAQPITKTPRCPFHFFPRRPRIHFRFPNRPFVPSRCNHRFPFQPFYWPHRYLTYRYFPRRRLQRGSSSEES

SEQ ID NO: 9758 - protein, 85 aa, Homo sapiens
MARRHCFSYWLLVCWLVVTVAEGQEEVFTPPGDSQNNADATDCQIFTLTPPPAPRSPVTRAQPITKTPRYFPRRRLQRGSSSEES

SEQ ID NO: 9759 - protein, 40 aa, Homo sapiens
MARRHCFSYWLLVCWLVVTVAEVETGFHHVSQDGLDLLTS

SEQ ID NO: 9760 - protein, 52 aa, Homo sapiens
MPARALLPRRMGHRTLASTPALWASIPCPRSELRLDLVLPSGQSFRWLTASA

SEQ ID NO: 9761 - protein, 357 aa, Homo sapiens
MPARALLPRRMGHRTLASTPALWASIPCPRSELRLDLVLPSGQSFRWREQSPAHWSGVLADQVWTLTQTEEQLHCTVYRGDKSQASRPTPDELEAVRKYFQLDVTLAQLYHHWGSVDSHFQEVAQKFQGVRLLRQDPIECLFSFICSSNNNIARITGMVERLCQAFGPRLIQLDDVTYHGFPSLQALAGPEVEAHLRKLGLGYRARYVSASARAILEEQGGLAWLQQLRESSYEEAHKALCILPGVGTKGLLGNAFDGHQLLRPLIFCQDHLREGPPIGRGDSQGEELEPQLPSSLSSIPYGFCDHCWTKDVDDPPLVTHPSPGSRDGHMTQAWPVKVVSPLATVIGHVMQASLLAL

SEQ ID NO: 9762 - protein, 424 aa, Homo sapiens
MPARALLPRRMGHRTLASTPALWASIPCPRSELRLDLVLPSGQSFRWREQSPAHWSGVLADQVWTLTQTEEQLHCTVYRGDKSQASRPTPDELEAVRKYFQLDVTLAQLYHHWGSVDSHFQEVAQKFQGVRLLRQDPIECLFSFICSSNNNIARITGMVERLCQAFGPRLIQLDDVTYHGFPSLQALAGPEVEAHLRKLGLGYRARYVSASARAILEEQGGLAWLQQLRESSYEEAHKALCILPGVGTKVADCICLMALDKPQAVPVDVHMWHIAQRDYSWHPTTSQAKGPSPQTNKELGNFFRSLWGPYAGWAQAGLLGNAFDGHQLLRPLIFCQDHLREGPPIGRGDSQGEELEPQLPSSLSSIPYGFCDHCWTKDVDDPPLVTHPSPGSRDGHMTQAWPVKVVSPLATVIGHVMQASLLAL

SEQ ID NO: 9763 - protein, 410 aa, Homo sapiens
MPARALLPRRMGHRTLASTPALWASIPCPRSELRLDLVLPSGQSFRWREQSPAHWSGVLADQVWTLTQTEEQLHCTVYRGDKSQASRPTPDELEAVRKYFQLDVTLAQLYHHWGSVDSHFQEVAQKFQGVRLLRQDPIECLFSFICSSNNNIARITGMVERLCQAFGPRLIQLDDVTYHGFPSLQALAGPEVEAHLRKLGLGYRARYVSASARAILEEQGGLAWLQQLRESSYEEAHKALCILPGVGTKVADCICLMALDKPQAVPVDVHMWHIAQRDYSWHPTTSQAKGPSPQTNKELGNFFRSLWGPYAGWAQATPPSYRCCSVPTCANPAMLRSHQQSAERVPKGRKARWGTLDKEIPQAPSPPFPTSLSPSPPSLMLGRGLPVTTSKARHPQIKQSVCTTRWGGGY

SEQ ID NO: 9764 - protein, 356 aa, Homo sapiens
MPARALLPRRMGHRTLASTPALWASIPCPRSELRLDLVLPSGQSFRWREQSPAHWSGVLADQVWTLTQTEEQLHCTVYRGDKSQASRPTPDELEAVRKYFQLDVTLAQLYHHWGSVDSHFQEVAQKFQGVRLLRQDPIECLFSFICSSNNNIARITGMVERLCQAFGPRLIQLDDVTYHGFPSLQALAGPEVEAHLRKLGLGYRARYVSASARAILEEQGGLAWLQQLRESSYEEAHKALCILPGVGTKVADCICLMALDKPQAVPVDVHMWHIAQRDYSWHPTTSQAKGPSPQTNKELGNFFRSLWGPYAGWAQALCQVITTFMTFLGPHRLDQMPPEELQTSSSRLGGPPWQCI

SEQ ID NO: 9765 - protein, 324 aa, Homo sapiens
MPARALLPRRMGHRTLASTPALWASIPCPRSELRLDLVLPSGQSFRWREQSPAHWSGVLADQVWTLTQTEEQLHCTVYRGDKSQASRPTPDELEAVRKYFQLDVTLAQLYHHWGSVDSHFQEVAQKFQGVRLLRQDPIECLFSFICSSNNNIARITGMVERLCQAFGPRLIQLDDVTYHGFPSLQALAGPEVEAHLRKLGLGYRARYVSASARAILEEQGGLAWLQQLRESSYEEAHKALCILPGVGTKVADCICLMALDKPQAVPVDVHMWHIAQRDYSWHPTTSQAKGPSPQTNKELGNFFRSLWGPYAGWAQAVSVPRCPP

SEQ ID NO: 9766 - protein, 345 aa, Homo sapiens
MPARALLPRRMGHRTLASTPALWASIPCPRSELRLDLVLPSGQSFRWREQSPAHWSGVLADQVWTLTQTEEQLHCTVYRGDKSQASRPTPDELEAVRKYFQLDVTLAQLYHHWGSVDSHFQEVAQKFQGVRLLRQDPIECLFSFICSSNNNIARITGMVERLCQAFGPRLIQLDDVTYHGFPSLQALAGPEVEAHLRKLGLGYRARYVSASARAILEEQGGLAWLQQLRESSYEEAHKALCILPGVGTKVADCICLMALDKPQAVPVDVHMWHIAQRDYSWHPTTSQAKGPSPQTNKELGNFFRSLWGPYAGWAQAVLFSADLRQSRHAQEPPAKRRKGSKGPEG

SEQ ID NO: 9767 - protein, 322 aa, Homo sapiens
MPARALLPRRMGHRTLASTPALWASIPCPRSELRLDLVLPSGQSFRWREQSPAHWSGVLADQVWTLTQTEEQLHCTVYRGDKSQASRPTPDELEAVRKYFQLDVTLAQLYHHWGSVDSHFQEVAQKFQGVRLLRQDPIECLFSFICSSNNNIARITGMVERLCQAFGPRLIQLDDVTYHGFPSLQALAGPEVEAHLRKLGLGYRARYVSASARAILEEQGGLAWLQQLRESSYEEAHKALCILPGVGTKVADCICLMALDKPQAVPVDVHMWHIAQRDYSWHPTTSQAKGPSPQTNKELGNFFRSLWGPYAGWAQAAGSDAS

SEQ ID NO: 9768 - protein, 195 aa, Homo sapiens
MPARALLPRRMGHRTLASTPALWASIPCPRSELRLDLVLPSGQSFRWREQSPAHWSGVLADQVWTLTQTEEQLHCTVYRGDKSQASRPTPDELEAVRKYFQLDVTLAQLYHHWGSVDSHFQEVAQKFQGVRLLRQDPIECLFSFICSSNNNIARITGMVERLCQAFGPRLIQLDDVTYHGFPSLQALAGPPWQCI

SEQ ID NO: 9769 - protein, 168 aa, Homo sapiens
  VARIANT 1: note = misc_feature - Xaa can be any naturally occurring amino acid
XASIPCPRSELRLDLVLPSGQSFRWREQSPAHWSGVLADQVWTLTQTEEQLHCTVYRGDKSQASRPTPDELEAVRKYFQLDVTLAQLYHHWGSVDSHFQEVAQKFQGVRLLRQDPIECLFSFICSSNNNIARITGMVERLCQAFGPRLIQLDDVTYHGFPSLQALAGG

SEQ ID NO: 9770 - protein, 128 aa, Homo sapiens
  VARIANT 1: note = misc_feature - Xaa can be any naturally occurring amino acid
XELEAVRKYFQLDVTLAQLYHHWGSVDSHFQEVAQKFQGVRLLRQDPIECLFSFICSSNNNIARITGMVERLCQAFGPRLIQLDDVTYHGFPSLQALAGVPVPAEGLLTSASAFQSPLRSRQPEADRR

SEQ ID NO: 9771 - protein, 132 aa, Homo sapiens
  VARIANT 1: note = misc_feature - Xaa can be any naturally occurring amino acid
XMMSPTMASPACRPWLVADCICLMALDKPQAVPVDVHMWHIAQRDYSWHPTTSQAKGPSPQTNKELGNFFRSLWGPYAGWAQATPPSYRCCSVPTCANPAMLRSHQQSAERVPKGRKARWGTLDKEIPQAPS

SEQ ID NO: 9772 - protein, 222 aa, Homo sapiens
  VARIANT 1: note = misc_feature - Xaa can be any naturally occurring amino acid
XPCGPPSRALALSCAWTWFCLLDNLSGVRLLRQDPIECLFSFICSSNNNIARITGMVERLCQAFGPRLIQLDDVTYHGFPSLQALAGPEVEAHLRKLGLGYRARYVSASARAILEEQGGLAWLQQLRESSYEEAHKALCILPGVGTKVADCICLMALDKPQAVPVDVHMWHIAQRDYSWHPTTSQAKGPSPQTNKELGNFFRSLWGPYAGWAQAVSVPRCPP

SEQ ID NO: 9773 - protein, 263 aa, Homo sapiens
  VARIANT 1: note = misc_feature - Xaa can be any naturally occurring amino acid
XVRKYFQLDVTLAQLYHHWGSVDSHFQEVAQKFQGVRLLRQDPIECLFSFICSSNNNIARITGMVERLCQAFGPRLIQLDDVTYHGFPSLQALAGPEVEAHLRKLGLGYRARYVSASARAILEEQGGLAWLQQLRESSYEEAHKALCILPGVGTKGLLGNAFDGHQLLRPLIFCQDHLREGPPIGRGDSQGEELEPQLPSSLSSIPYGFCDHCWTKDVDDPPLVTHPSPGSRDGHMTQAWPVKVVSPLATVIGHVMQASLLAL

SEQ ID NO: 9774 - protein, 298 aa, Homo sapiens
MKTLQSTLLLLLLVPLIKPAPPTQQDSRIIYDYGTDNFEESIFSQDYEDKYLDGKNIKEKETVIIPNEKSLQLQKDEAITPLPPKKENDEMPTCLLCVCLSGSVYCEEVDIDAVPPLPKESAYLYARFNKIKKLTAKDFADIPNLRRLDFTGNLIEDIEDGTFSKLSLLEELSLAENQLLKLPVLPPKLTLFNAKYNKIKSRGIKANAFKKLNNLTFLYLDHNALESVPLNLPESLRVIHLQFNNIASITDDTFCKANDTSYIRDRIEEIRLEGNPIVLGKHPNSFICLKRLPIGSYF

SEQ ID NO: 9775 - protein, 298 aa, Homo sapiens; identical to SEQ ID NO: 9774

SEQ ID NO: 9776 - protein, 268 aa, Homo sapiens
MLAKISTTWKLFLKLLGPEILLSSLKSRHSFSHSPSHLGLMHRHEHLLRKTTKNFKTATTTLQSTLLLLLLVPLIKPAPPTQQDSRIIYDYGTDNFEESIFSQDYEDKYLDGKNIKEKETVIIPNEKSLQLQKDEAITPLPPKKENDEMPTCLLCVCLSGSVYCEEVDIDAVPPLPKESAYLYARFNKIKKLTAKDFADIPNLRRLDFTGNLIEDIEDGTFSKLSLLEELSLAENQLLKLPVLPPKLTLFNAKYNKIKSRGIKANAFK

SEQ ID NO: 9777 - protein, 545 aa, Homo sapiens
MPPFLLLTCLFITGTSVSPVALDPCSAYISLNEPWRNTDHQLDESQGPPLCDNHVNGEWYHFTGMAGDAMPTFCIPENHCGTHAPVWLNGSHPLEGDGIVQRQACASFNGNCCLWNTTVEVKACPGGYYVYRLTKPSVCFHVYCGHFYDICDEDCHGSCSDTSECTCAPGTVLGPDRQTCFDENECEQNNGGCSEICVNLKNSYRCECGVGRVLRSDGKTCEDVEGCHNNNGGCSHSCLGSEKGYQCECPRGLVLSEDNHTCQVPVLCKSNAIEVNIPRELVGGLELFLTNTSCRGVSNGTHVNILFSLKTCGTVVDVVNDKIVASNLVTGLPKQTPGSSGDFIIRTSKLLIPVTCEFPRLYTISEGYVPNLRNSPLEIMSRNHGIFPFTLEIFKDNEFEEPYREALPTLKLRDSLYFGIEPVVHVSGLESLVESCFATPTSKIDEVLKYYLIRDGCVSDDSVKQYTSRDHLAKHFQVPVFKFVGKDHKEVFLHCRVLVCGVLDERSRCAQGCHRRMRRGAGGEDSAGLQGQTLTGGPIRIDWED

SEQ ID NO: 9778 - protein, 321 aa, Homo sapiens
MPPFLLLTCLFITGTSVSPVALDPCSAYISLNEPWRNTDHQLDESQGPPLCDNHVNGEWYHFTGMAGDAMPTFCIPENHCGTHAPVWLNGSHPLEGDGIVQRQACASFNGNCCLWNTTVEVKACPGGYYVYRLTKPSVCFHVYCGHFYDICDEDCHGSCSDTSECTCAPGTVLGPDRQTCFDENECEQNNGGCSEICVNLKNSYRCECGVGRVLRSDGKTCEDVEGCHNNNGGCSHSCLGSEKGYQCECPRGLVLSEDNHTCQVPVLCKSNAIEVNIPRELVGGLELFLTNTSCRGVSNGTHVNILFSLKTCGTVVDLCFR

SEQ ID NO: 9779 - protein, 129 aa, Homo sapiens
MCSRDARTKQLRQLLEKVQNMSQSIEVLDRRTQRDLQYVEKMENQMKGLESKFKQVEESHKQHLARQFKAIKAKMDELRPLIPVLEEYKADAKLVLQFKEEVQNLTSVLNELQEEIGAYDYDELQSRVS

SEQ ID NO: 9780 - protein, 163 aa, Homo sapiens
MEGPGGSGFHLRLEAFCKCKSPINVFDPVRPALQVGLTRVLPTNPEESWQVYSSAQDSEGRCICTVVAPQQTMCSRDARTKQLRQLLEKVQNMSQSIEVLDRRTQRDLQYVEKMENQMKGLESKFKQVEESHKQHLARQFKAIKAKMDELRPLIPVLEEYKAD

SEQ ID NO: 9781 - protein, 458 aa, Homo sapiens
MGEAPGREGRGPCPQLESPRRRRVLPTNPEESWQVYSSAQDSEGRCICTVVAPQQTMCSRDARTKQLRQLLEKVQNMSQSIEVLDRRTQRDLQYVEKMENQMKGLESKFKQVEESHKQHLARQFKAIKAKMDELRPLIPVLEEYKADAKLVLQFKEEVQNLTSVLNELQEEIGAYDYDELQSRVSNLEERLRACMQKLACGKLTGISDPVTVKTSGSRFGSWMTDPLAPEGDNRVWYMDGYHNNRFVREYKSMVDFMNTDNFTSHRLPHPWSGTGQVVYNGSIYFNKFQSHIIIRFDLKTETILKTRSLDYAGYNNMYHYAWGGHSDIDLMVDESGLWAVYATNQNAGNIVVSRLDPVSLQTLQTWNTSYPKRSAGEAFIICGTLYVTNGYSGGTKVHYAYQTNASTYEYIDIPFQNKYSHISMLDYNPKDRALYAWNNGHQILYNVTLFHVIRSDEL

SEQ ID NO: 9782 - protein, 129 aa, Homo sapiens
MPGRWRWQRDMHPARKLLSLLFLILMGTELTQDSAAPDSLLRSSKGSTRGSLAAIVIWRGKSESRIAKTPGIFRGGGTLVLPPTHTPEWLILPLGITLPLGAPETGGGDCAAETWKGSQRAGQLCALLA

SEQ ID NO: 9783 - protein, 167 aa, Homo sapiens
MPGRWRWQRDMHPARKLLSLLFLILMGTELTQNKRENKAEKMGGPESERKTTGEKTLNELPLFCLEAHAGSLALPRMCSPNPNPAVGLCRPAYPQSPSPGAAQTISQSLLERFCMASRRGFLGPRKAWWRVVVVHCCWTDAFIHVHTHTHTCTHRGADTCREEPTRS

SEQ ID NO: 9784 - protein, 467 aa, Homo sapiens
MPGRWRWQRDMHPARKLLSLLFLILMGTELTQVLPTNPEESWQVYSSAQDSEGRCICTVVAPQQTMCSRDARTKQLRQLLEKVQNMSQSIEVLDRRTQRDLQYVEKMENQMKGLESKFKQVEESHKQHLARQFKAIKAKMDELRPLIPVLEEYKADAKLVLQFKEEVQNLTSVLNELQEEIGAYDYDELQSRVSNLEERLRACMQKLACGKLTGISDPVTVKTSGSRFGSWMTDPLAPEGDNRVWYMDGYHNNRFVREYKSMVDFMNTDNFTSHRLPHPWSGTGQVVYNGSIYFNKFQSHIIIRFDLKTETILKTRSLDYAGYNNMYHYAWGGHSDIDLMVDESGLWAVYATNQNAGNIVVSRLDPVSLQTLQTWNTSYPKRSAGEAFIICGTLYVTNGYSGGTKVHYAYQTNASTYEYIDIPFQNKYSHISMLDYNPKDRALYAWNNGHQILYNVTLFHVIRSDEL

SEQ ID NO: 9785 - protein, 135 aa, Homo sapiens
MPGRWRWQRDMHPARKLLSLLFLILMGTELTQVLPTNPEESWQVYSSAQDSEGRCICTVVAPQQTMCSRDARTKQLRQLLEKVQNMSQSIEVLDRRTQRDLQYVEKMENQMKGLESKFKQVEESHKQHLARQFKG

SEQ ID NO: 9786 - protein, 208 aa, Homo sapiens
MSQSIEVLDRRTQRDLQYVEKMENQMKGLESKFKQVEESHKQHLARQFKAIKAKMDELRPLIPVLEEYKADAKLVLQFKEEVQNLTSVLNELQEEIGAYDYDELQSRVSNLEERLRACMQKLACGKLTGISDPVTVKTSGSRFGSWMTDPLAPEGDNRVWYMDGYHNNRFVREYKSMVDFMNTDNFTSHRLPHPWSGTGQVVYNGSIY

SEQ ID NO: 9787 - protein, 485 aa, Homo sapiens
MSVPLLKIGVVLSTMAMITNWMSQTLPSLVGLNTTKLSAAGGGTLDRSTGVLPTNPEESWQVYSSAQDSEGRCICTVVAPQQTMCSRDARTKQLRQLLEKVQNMSQSIEVLDRRTQRDLQYVEKMENQMKGLESKFKQVEESHKQHLARQFKAIKAKMDELRPLIPVLEEYKADAKLVLQFKEEVQNLTSVLNELQEEIGAYDYDELQSRVSNLEERLRACMQKLACGKLTGISDPVTVKTSGSRFGSWMTDPLAPEGDNRVWYMDGYHNNRFVREYKSMVDFMNTDNFTSHRLPHPWSGTGQVVYNGSIYFNKFQSHIIIRFDLKTETILKTRSLDYAGYNNMYHYAWGGHSDIDLMVDESGLWAVYATNQNAGNIVVSRLDPVSLQTLQTWNTSYPKRSAGEAFIICGTLYVTNGYSGGTKVHYAYQTNASTYEYIDIPFQNKYSHISMLDYNPKDRALYAWNNGHQILYNVTLFHVIRSDEL

SEQ ID NO: 9788 - protein, 153 aa, Homo sapiens
MSVPLLKIGVVLSTMAMITNWMSQTLPSLVGLNTTKLSAAGGGTLDRSTGVLPTNPEESWQVYSSAQDSEGRCICTVVAPQQTMCSRDARTKQLRQLLEKVQNMSQSIEVLDRRTQRDLQYVEKMENQMKGLESKFKQVEESHKQHLARQFKG

SEQ ID NO: 9789 - protein, 99 aa, Homo sapiens
  VARIANT 1: note = misc_feature - Xaa can be any naturally occurring amino acid
XSHKQHLARQFKAIKAKMDELRPLIPVLEEYKADAKLVLQFKEEVQNLTSVLNELQEEIGAYDYDELQSRVSNLEERLRACMQKLGVVHGRLSQQPLRT

SEQ ID NO: 9790 - protein, 78 aa, Homo sapiens
MEVLELRTYRDLQYVRGMETLMRSLDARLRAADGSLSAKSFQELKDRMTELLPLSSVLEQYKADTRTIVRLREEAVGS

SEQ ID NO: 9791 - protein, 376 aa, Homo sapiens
MEVLELRTYRDLQYVRGMETLMRSLDARLRAADGSLSAKSFQELKDRMTELLPLSSVLEQYKADTRTIVRLREEVRNLSGSLAAIQEEMGAYGYEDLQQRVMALEARLHACAQKLGCGKLTGVSNPITVRAMGSRFGSWMTDTMAPSADSRVWYMDGYYKGRRVLEFRTLGDFIKGQNFIQHLLPQPWAGTGHVVYNGSLFYNKYQSNVVVKYHFRSRSVLVQRSLPGAGYNNTFPYSWGGFSDMDFMVDESGLWAVYTTNQNAGNIVVSRLDPHTLEVMRSWDTGYPKRSAGEAFMICGVLYVTNSHLAGAKVYFAYFTNTSSYEYTDVPFHNQYSHISMLDYNPRERALYTWNNGHQVLYNVTLFHVISTSGDP

SEQ ID NO: 9792 - protein, 336 aa, Homo sapiens
MSVPLLKIGAVLSTMAMVTNWMSQTLPSLVGLNGTVSRAGASEKITLFQNPEEGWQLYTSAQAPDGKCICTAVIPAQSTCSRDGRSRELRQLMEKVQNVSQSMEVLELRTYRDLQYVRGMETLMRSLDARLRAADGSLSAKSFQELKDRMTELLPLSSVLEQYKADTRTIVRLREEVRNLSGSLAAIQEEMGAYGYEDLQQRVMALEARLHACAQKLGCGKLTGVSNPITVRAMGSRFGSWMTDTMAPSADSRVWYMDGYYKGRRVLEFRTLGDFIKGQNFIQHLLPQPWAGTGHVVYNGSLFYNKYQSNVVVKYHFRSRSVLVQRSLPGAGYNNT

SEQ ID NO: 9793 - protein, 454 aa, Homo sapiens
MWPLTVPPPLLLLLCSGLAGQTLFQNPEEGWQLYTSAQAPDGKCICTAVIPAQSTCSRDGRSRELRQLMEKVQNVSQSMEVLELRTYRDLQYVRGMETLMRSLDARLRAADGSLSAKSFQELKDRMTELLPLSSVLEQYKADTRTIVRLREEVRNLSGSLAAIQEEMGAYGYEDLQQRVMALEARLHACAQKLGCGKLTGVSNPITVRAMGSRFGSWMTDTMAPSADSRVWYMDGYYKGRRVLEFRTLGDFIKGQNFIQHLLPQPWAGTGHVVYNGSLFYNKYQSNVVVKYHFRSRSVLVQRSLPGAGYNNTFPYSWGGFSDMDFMVDESGLWAVYTTNQNAGNIVVSRLDPHTLEVMRSWDTGYPKRSAGEAFMICGVLYVTNSHLAGAKVYFAYFTNTSSYEYTDVPFHNQYSHISMLDYNPRERALYTWNNGHQVLYNVTLFHVISTSGDP

SEQ ID NO: 9794 - protein, 458 aa, Homo sapiens
MQATSNLLNLLLLSLFAGLDPSKTQISPKEGWQVYSSAQDPDGRCICTVVAPEQNLCSRDAKSRQLRQLLEKVQNMSQSIEVLNLRTQRDFQYVLKMETQMKGLKAKFRQIEDDRKTLMTKHFQELKEKMDELLPLIPVLEQYKTDAKLITQFKEEIRNLSAVLTGIQEEIGAYDYEELHQRVLSLETRLRDCMKKLTCGKLMKITGPVTVKTSGTRFGAWMTDPLASEKNNRVWYMDSYTNNKIVREYKSIADFVSGAESRTYNLPFKWAGTNHVVYNGSLYFNKYQSNIIIKYSFDMGRVLAQRSLEYAGFHNVYPYTWGGFSDIDLMADEIGLWAVYATNQNAGNIVISQLNQDTLEVMKSWSTGYPKRSAGESFMICGTLYVTNSHLTGAKVYYSYSTKTSTYEYTDIPFHNQYFHISMLDYNARDRALYAWNNGHQVLFNVTLFHIIKTEDDT

SEQ ID NO: 9795 - protein, 478 aa, Homo sapiens
MSPPLLKLGAVLSTMAMISNWMSQTLPSLVGLNTTRLSTPDTLTQISPKEGWQVYSSAQDPDGRCICTVVAPEQNLCSRDAKSRQLRQLLEKVQNMSQSIEVLNLRTQRDFQYVLKMETQMKGLKAKFRQIEDDRKTLMTKHFQELKEKMDELLPLIPVLEQYKTDAKLITQFKEEIRNLSAVLTGIQEEIGAYDYEELHQRVLSLETRLRDCMKKLTCGKLMKITGPVTVKTSGTRFGAWMTDPLASEKNNRVWYMDSYTNNKIVREYKSIADFVSGAESRTYNLPFKWAGTNHVVYNGSLYFNKYQSNIIIKYSFDMGRVLAQRSLEYAGFHNVYPYTWGGFSDIDLMADEIGLWAVYATNQNAGNIVISQLNQDTLEVMKSWSTGYPKRSAGESFMICGTLYVTNSHLTGAKVYYSYSTKTSTYEYTDIPFHNQYFHISMLDYNARDRALYAWNNGHQVLFNVTLFHIIKTEDDT

SEQ ID NO: 9796 - protein, 140 aa, Homo sapiens
MSQSIEVLNLRTQRDFQYVLKMETQMKGLKAKFRQIEDDRKTLMTKHFQELKEKMDELLPLIPVLEQYKTDAKLITQFKEEIRNLSAVLTGIQEEIGAYDYEELHQRVLSLETRLRDCMKKLIDLKKRKEEEKRQQKGEA

SEQ ID NO: 9797 - protein, 510 aa, Homo sapiens
MRPGLSFLLALLFFLGQAAGDLGDVGPPIPSPGFSSFPGVDSSSSFSSSSRSGSSSSRSLGSGGSVSQLFSNFTGSVDDRGTCQCSVSLPDTTFPVDRVERLEFTAHVLSQKFEKELSKVREYVQLISVYEKKLLNLTVRIDIMEKDTISYTELDFELIKVEVKEMEKLVIQLKESFGGSSEIVDQLEVEIRNMTLLVEKLETLDKNNVLAIRREIVALKTKLKECEASKDQNTPVVHPPPTPGSCGHGGVVNISKPSVVQLNWRGFSYLYGAWGRDYSPQHPNKGLYWVAPLNTDGRLLEYYRLYNTLDDLLLYINARELRITYGQGSGTAVYNNNMYVNMYNTGNIARVNLTTNTIAVTQTLPNAAYNNRFSYANVAWQDIDFAVDENGLWVIYSTEASTGNMVISKLNDTTLQVLNTWYTKQYKPSASNAFMVCGVLYATRTMNTRTEEIFYYYDTNTGKEGKLDIVMHKMQEKVQSINYNPFDQKLYVYNDGYLLNYDLSVLQKPQ

SEQ ID NO: 9798 - protein, 68 aa, Homo sapiens
MMVALRGASALLVLFLAAFLPPPQCTQDPAMVHYIYQRFRVLEGWKNVPKQRGHTFKNSKSSQKIYLS

SEQ ID NO: 9799 - protein, 402 aa, Homo sapiens
MMVALRGASALLVLFLAAFLPPPQCTQDPAMVHYIYQRFRVLEQGLEKCTQATRAYIQEFQEFSKNISVMLGRCQTYTSEYKSAVGNLALRVERAQREIDYIQYLREADECIESEDKTLAEMLLQEAEEEKKIRTLLNASCDNMLMGIKSLKIVKKMMDTHGSWMKDAVYNSPKVYLLIGSRNNTVWEFANIRAFMEDNTKPAPRKQILTLSWQGTGQVIYKGFLFFHNQATSNEIIKYNLQKRTVEDRMLLPGGVGRALVYQHSPSTYIDLAVDEHGLWAIHSGPGTHSHLVLTKIEPGTLGVEHSWDTPCRSQDAEASFLLCGVLYVVYSTGGQGPHRITCIYDPLGTISEEDLPNLFFPKRPRSHSMIHYNPRDKQLYAWNEGNQIIYKLQTKRKLPLK

SEQ ID NO: 9800 - protein, 402 aa, Homo sapiens; identical to SEQ ID NO: 9799

SEQ ID NO: 9801 - protein, 56 aa, Homo sapiens
MMVALRGASALLVLFLAAFLPPPQCTQDPAMVHYIYQRFRVLEQGLEKCTQAVTTC

SEQ ID NO: 9802 - protein, 652 aa, Homo sapiens
MAAAALPPRPLLLLPLVLLLSGRPTRADSKVFGDLDQVRMTSEGSDCRCKCIMRPLSKDACSRVRSGRARVEDFYTVETVSSGTDCRCSCTAPPSSLNPCENEWKMEKLKKQAPELLKLQSMVDLLEGTLYSMDLMKVHAYVHKVASQMNTLEESIKANLSRENEVVKDSVRHLSEQLRHYENHSAIMLGIKKELSRLGLQLLQKDAAAAPATPATGTGSKAQDTARGKGKDISKYGSVQKSFADRGLPKPPKEKLLQVEKLRKESGKGSFLQPTAKPRALAQQQAVIRGFTYYKAGKQEVTEAVADNTLQGTSWLEQLPPKVEGRSNSAEPNSAEQDEAEPRSSERVDLASGTPTSIPATTTTATTTPTPTTSLLPTEPPSGPEVSSQGREASCEGTLRAVDPPVRHHSYGRHEGAWMKDPAARDDRIYVTNYYYGNSLVEFRNLENFKQGRWSNMYKLPYNWIGTGHVVYQGAFYYNRAFTKNIIKYDLRQRFVASWALLPDVVYEDTTPWKWRGHSDIDFAVDESGLWVIYPAVDDRDEAQPEVIVLSRLDPGDLSVHRETTWKTRLRRNSYGNCFLVCGILYAVDTYNQQEGQVAYAFDTHTGTDARPQLPFLNEHAYTTQIDYNPKERVLYAWDNGHQLTYTLHFVV

SEQ ID NO: 9803 - protein, 318 aa, Homo sapiens
MAAAALPPRPLLLLPLVLLLSGRPTRADSKVFGDLDQVRMTSEGSDCRCKCIMRPLSKDACSRVRSGRARVEDFYTVETVSSGTDCRCSCTAPPSSLNPCENEWKMEKLKKQAPELLKSIKANLSRENEVVKDSVRHLSEQLRHYENHSAIMLGIKKELSRLGLQLLQKDAAAAPATPATGTGSKAQDTARGKGKDISKYGSVQKSFADRGLPKPPKEKLLQVEKLRKESGKGSFLQPTAKPRALAQQQAVIRGFTYYKAGKQEVTEAVADNTLQGTSWLEQLPPKVEGRSNSAEPNSAEQDEAEPRSSERVDLASGT

SEQ ID NO: 9804 - protein, 438 aa, Homo sapiens
MSKRDKAGKDTARGKGKDISKYGSVQKSFADRGLPKPPKEKLLQVEKLRKESGKGSFLQPTAKPRALAQQQAVIRGFTYYKAGKQEVTEAVADNTLQGTSWLEQLPPKVEGRSNSAEPNSAEQDEAEPRSSERVDLASGTPTSIPATTTTATTTPTPTTSLLPTEPPSGPEVSSQGREASCEGTLRAVDPPVRHHSYGRHEGAWMKDPAARDDRIYVTNYYYGNSLVEFRNLENFKQGRWSNMYKLPYNWIGTGHVVYQGAFYYNRAFTKNIIKYDLRQRFVASWALLPDVVYEDTTPWKWRGHSDIDFAVDESGLWVIYPAVDDRDEAQPEVIVLSRLDPGDLSVHRETTWKTRLRRNSYGNCFLVCGILYAVDTYNQQEGQVAYAFDTHTGTDARPQLPFLNEHAYTTQIDYNPKERVLYAWDNGHQLTYTLHFVV

SEQ ID NO: 9805 - protein, 90 aa, Homo sapiens
ETTWRTGLRRNFYGNCFVICGVLYAVDSYNQRNANISYAFDTHTNTQIVPRLLFENEYSYTTQIDYNPKDRLLYAWDNGHQVTYHVIFAY

SEQ ID NO: 9806 - protein, 751 aa, Homo sapiens
MAKPRLLVLYFALIVVPAWVSSIVLTGTSEPPDAQTVAPAEDETLQNEADNQENVLSQLLGDYDKVKAMSEGSDCQCKCVVRPLGRDACQRINAGASRKEDFYTVETITSGSSCKCACVAPPSALNPCEGDFRLQKLREADSQDLKLSTIIDMLEGAFYGLDLLKLHSVTTKLVGRVDKLEEEVSKNLTKENEQIKEDMEEIRTEMNKRGKENCSENILDSMPDIRSALQRDAAAAYAHPEQYEERFLQEETVSQQINSIELLQTRPLALPEVVKSQRPLQRQVHLRGRPASQPTVIRGITYYKAKVSEEENDIEEQQDEFFSGDNGVDLLIEDQLLRHNGLMTSVTRRPAATRQGHSTAVTSDLNARTAPWSSALPQPSTSDPSIANHASVGPTLQTTSVSPDPTRESVLQPSPQVPATTVAHTATQQPAAPAPPAVSPREALMEAMHTVPVPPTTVRTDSLGKDAPAGWGTTPASPTLSPEEEDDIRNVIGRCKDTLSTITGPTTQNTYGRNEGAWMKDPLAKDERIYVTNYYYGNTLVEFRNLENFKQGRWSNSYKLPYSWIGTGHVVYNGAFYYNRAFTRNIIKYDLKQRYVAAWAMLHDVAYEEATPWRWQGHSDVDFAVDENGLWLIYPALDDEGFSQEVIVLSKLNAADLSTQKETTWRTGLRRNFYGNCFVICGVLYAVDSYNQRNANISYAFDTHTNTQIVPRLLFENEYSYTTQIDYNPKDRLLYAWDNGHQVTYHVIFAY

SEQ ID NO: 9807 - protein, 750 aa, Homo sapiens
MAKPRLLVLYFALIVVPAWVSSIVLTGTSEPPDAQTVAPAEDETLQNEADNQENVLSQLLGDYDKVKAMSEGSDCQCKCVVRPLGRDACQRINAGASRKEDFYTVETITSGSSCKCACVAPPSALNPCEGDFRLQKLREADSQDLKLSTIIDMLEGAFYGLDLLKLHSVTTKLVGRVDKLEEEVSKNLTKENEQIKEDMEEIRTEMNKRGKENCSENILDSMPDIRSALQRDAAAAYAHPEYEERFLQEETVSQQINSIELLQTRPLALPEVVKSQRPLQRQVHLRGRPASQPTVIRGITYYKAKVSEEENDIEEQQDEFFSGDNGVDLLIEDQLLRHNGLMTSVTRRPAATRQGHSTAVTSDLNARTAPWSSALPQPSTSDPSIANHASVGPTLQTTSVSPDPTRESVLQPSPQVPATTVAHTATQQPAAPAPPAVSPREALMEAMHTVPVPPTTVRTDSLGKDAPAGWGTTPASPTLSPEEEDDIRNVIGRCKDTLSTITGPTTQNTYGRNEGAWMKDPLAKDERIYVTNYYYGNTLVEFRNLENFKQGRWSNSYKLPYSWIGTGHVVYNGAFYYNRAFTRNIIKYDLKQRYVAAWAMLHDVAYEEATPWRWQGHSDVDFAVDENGLWLIYPALDDEGFSQEVIVLSKLNAADLSTQKETTWRTGLRRNFYGNCFVICGVLYAVDSYNQRNANISYAFDTHTNTQIVPRLLFENEYSYTTQIDYNPKDRLLYAWDNGHQVTYHVIFAY

SEQ ID NO: 9808 - protein, 233 aa, Homo sapiens
MKDPLAKDERIYVTNYYYGNTLVEFRNLENFKQGRWSNSYKLPYSWIGTGHVVYNGAFYYNRAFTRNIIKYDLKQRYVAAWAMLHDVAYEEATPWRWQGHSDVDFAVDENGLWLIYPALDDEGFSQEVIVLSKLNAADLSTQKETTWRTGLRRNFYGNCFVICGVLYAVDSYNQRNANISYAFDTHTNTQIVPRLLFENEYSYTTQIDYNPKDRLLYAWDNGHQVTYHVIFAY

SEQ ID NO: 9809 - protein, 88 aa, Homo sapiens
TWRTGLRRNFYGNCFVICGVLYAVDSYNQRNANISYAFDTHTNTQIVPRLLFENEYSYTTQIDYNPKDRLLYAWDNGHQVTYHVIFAY

SEQ ID NO: 9810 - protein, 386 aa, Homo sapiens
MAQWHCSQRTQAGGHGVGERLAQCQDQSSRHAAELRDFKNKMLPLLEVAEKEREALRTEADTISGRVDRLEREVDYLETQNPALPCVEFDEKVTGGPGTKGKGRRNEKYDMVTDCGYTISQVRSMKILKRFGGPAGLWTKDPLGQTEKIYVLDGTQNDTAFVFPRLRDFTLAMAARKASRVRVPFPWVGTGQLVYGGFLYFARRPPGRPGGGGEMENTLQLIKFHLANRTVVDSSVFPAEGLIPPYGLTADTYIDLAADEEGLWAVYATREDDRHLCLAKLDPQTLDTEQQWDTPCPRENAEAAFVICGTLYVVYNTRPASRARIQCSFDASGTLTPERAALPYFPRRYGAHASLRYNPRERQLYAWDDGYQIVYKLEMRKKEEEV

SEQ ID NO: 9811 - protein, 406 aa, Homo sapiens
MGPSTPLLILFLLSWSGPLQGQQHHLVEYMERRLAALEERLAQCQDQSSRHAAELRDFKNKMLPLLEVAEKEREALRTEADTISGRVDRLEREVDYLETQNPALPCVEFDEKVTGGPGTKGKGRRNEKYDMVTDCGYTISQVRSMKILKRFGGPAGLWTKDPLGQTEKIYVLDGTQNDTAFVFPRLRDFTLAMAARKASRVRVPFPWVGTGQLVYGGFLYFARRPPGRPGGGGEMENTLQLIKFHLANRTVVDSSVFPAEGLIPPYGLTADTYIDLAADEEGLWAVYATREDDRHLCLAKLDPQTLDTEQQWDTPCPRENAEAAFVICGTLYVVYNTRPASRARIQCSFDASGTLTPERAALPYFPRRYGAHASLRYNPRERQLYAWDDGYQIVYKLEMRKKEEEV

SEQ ID NO: 9812 - protein, 345 aa, Homo sapiens
MLPLLEVAEKEREALRTEADTISGRVDRLEREVDYLETQNPALPCVEFDEKVTGGPGTKGKGRRNEKYDMVTDCGYTISQVRSMKILKRFGGPAGLWTKDPLGQTEKIYVLDGTQNDTAFVFPRLRDFTLAMAARKASRVRVPFPWVGTGQLVYGGFLYFARRPPGRPGGGGEMENTLQLIKFHLANRTVVDSSVFPAEGLIPPYGLTADTYIDLAADEEGLWAVYATREDDRHLCLAKLDPQTLDTEQQWDTPCPRENAEAAFVICGTLYVVYNTRPASRARIQCSFDASGTLTPERAALPYFPRRYGAHASLRYNPRERQLYAWDDGYQIVYKLEMRKKEEEV

SEQ ID NO: 9813 - protein, 421 aa, Homo sapiens
MGFLSPIYVIFFFFGVKVHCQYETYQWDEDYDQEPDDDYQTGFPFRQNVDYGVPFHQYTLGCVSECFCPTNFPSSMYCDNRKLKTIPNIPMHIQQLYLQFNEIEAVTANSFINATHLKEINLSHNKIKSQKIDYGVFAKLPNLLQLHLEHNNLEEFPFPLPKSLERLLLGYNEISKLQTNAMDGLVNLTMLDLCYNYLHDSLLKDKIFAKMEKLMQLNLCSNRLESMPPGLPSSLMYLSLENNSISSIPEKYFDKLPKLHTLRMSHNKLQDIPYNIFNLPNIVELSVGHNKLKQAFYIPRNLEHLYLQNNEIEKMNLTVMCPSIDPLHYHHLTYIRVDQNKLKEPISSYIFFCFPHIHTIYYGEQRSTNGQTIQLKTQVFRRFPDDDDESEDHDDPDNAHESPEQEGAEGHFDLHYYENQE

SEQ ID NO: 9814 - protein, 440 aa, Homo sapiens
MEYQILKMSLCLFILLFLTPGILCICPLQCICTERHRHVDCSGRNLSTLPSGLQENIIHLNLSYNHFTDLHNQLTQYTNLRTLDISNNRLESLPAHLPRSLWNMSAANNNIKLLDKSDTAYQWNLKYLDVSKNMLEKVVLIKNTLRSLEVLNLSSNKLWTVPTNMPSKLHIVDLSNNSLTQILPGTLINLTNLTHLYLHNNKFTFIPDQSFDQLFQLQEITLYNNRWSCDHKQNITYLLKWMMETKAHVIGTPCSTQISSLKEHNMYPTPSGFTSSLFTVSGMQTVDTINSLSVVTQPKVTKIPKQYRTKETTFGATLSKDTTFTSTDKAFVPYPEDTSTETINSHEAAAATLTIHLQDGMVTNTSLTSSTKSSPTPMTLSITSGMPNNFSEMPQQSTTLNLWREETTTNVKTPLPSVANAWKVNASFLLLLNVVVMLAV

SEQ ID NO: 9815 - protein, 158 aa, Homo sapiens
MALEVLMLLAVLIWTGAENLHVKISCSLDWLMVSVIPVAESRNLYIFADELHLGMGCPANRIHTYVYEFIYLVRDCGIRTRVVSEETLLFQTELYFTPRNIDHDPQEIHLECSTSRKSVWLTPVSTENEIKLDPSPFIADFQTTAEELGLLSSSPNLL

SEQ ID NO: 9816 - protein, 86 aa, Homo sapiens
MVSVIPVAESRNLYIFADELHLGMGCPANRIHTYVYEFIYLVRDCGIRTRVVSEETLLFQTELYFTPRNIDHDPQEIHLECSTSSV

SEQ ID NO: 9817 - protein, 304 aa, Homo sapiens
MDNVTVRQGESATLRCTIDDRVTRVAWLNRSTILYAGNDKWSIDPRVIILVNTPTQYSIMIQNVDVYDEGPYTCSVQTDNHPKTSRVHLIVQVPPQIMNISSDITVNEGSSVTLLCLAIGRPEPTVTWRHLSVKEGQGFVSEDEYLEISDIKRDQSGEYECSALNDVAAPDVRKVKITVNYPPYISKAKNTGVSVGQKGILSCEASAVPMAEFQWFKEETRLATGLDGMRIENKGRMSTLTFFNVSEKDYGNYTCVATNKLGNTNASITLYGPGAVIDGVNSASRALACLWLSGTLLAHFFIKF

SEQ ID NO: 9818 - protein, 345 aa, Homo sapiens
MGVCGYLFLPWKCLVVVSLRLLFLVPTGVPVRSGDATFPKAMDNVTVRQGESATLRCTIDDRVTRVAWLNRSTILYAGNDKWSIDPRVIILVNTPTQYSIMIQNVDVYDEGPYTCSVQTDNHPKTSRVHLIVQVPPQIMNISSDITVNEGSSVTLLCLAIGRPEPTVTWRHLSVKEGQGFVSEDEYLEISDIKRDQSGEYECSALNDVAAPDVRKVKITVNYPPYISKAKNTGVSVGQKGILSCEASAVPMAEFQWFKEETRLATGLDGMRIENKGRMSTLTFFNVSEKDYGNYTCVATNKLGNTNASITLYGPGAVIDGVNSASRALACLWLSGTLLAHFFIKF

SEQ ID NO: 9819 - protein, 354 aa, Homo sapiens
MGVCGYLFLPWKCLVVVSLRLLFLVPTGVPVRSGDATFPKAMDNVTVRQGESATLRCTIDDRVTRVAWLNRSTILYAGNDKWSIDPRVIILVNTPTQYSIMIQNVDVYDEGPYTCSVQTDNHPKTSRVHLIVQVPPQIMNISSDITVNEGSSVTLLCLAIGRPEPTVTWRHLSVKEGQGFVSEDEYLEISDIKRDQSGEYECSALNDVAAPDVRKVKITVNYPPYISKAKNTGVSVGQKGILSCEASAVPMAEFQWFKEETRLATGLDGMRIENKGRMSTLTFFNVSEKDYGNYTCVATNKLGNTNASITLYEISPSSAVAGPGAVIDGVNSASRALACLWLSGTLLAHFFIKF

SEQ ID NO: 9820 - protein, 345 aa, Homo sapiens; identical to SEQ ID NO: 9818

SEQ ID NO: 9821 - protein, 338 aa, Homo sapiens
MYHPAYWVVFSATTALLFIPGVPVRSGDATFPKAMDNVTVRQGESATLRCTIDDRVTRVAWLNRSTILYAGNDKWSIDPRVIILVNTPTQYSIMIQNVDVYDEGPYTCSVQTDNHPKTSRVHLIVQVPPQIMNISSDITVNEGSSVTLLCLAIGRPEPTVTWRHLSVKEGQGFVSEDEYLEISDIKRDQSGEYECSALNDVAAPDVRKVKITVNYPPYISKAKNTGVSVGQKGILSCEASAVPMAEFQWFKEETRLATGLDGMRIENKGRMSTLTFFNVSEKDYGNYTCVATNKLGNTNASITLYGPGAVIDGVNSASRALACLWLSGTLLAHFFIKF

SEQ ID NO: 9822 - protein, 248 aa, Homo sapiens
MKLTFFLGLLALISCFTPSESQRFSRRPYLPGQLPPPPLYRPRWVPPSPPPPYDSRLNSPLSLPFVPGRVPPSSFSRFSQAVILSQLFPLESIRQPRLFPGYPNLHFPLRPYYVGPIRILKPPFPPIPFFLAIYLPISNPEPQINITTADTTITTNPPTTATATTSTSTKPTMTISSSTVPISSTPEPATSISAATPAASTENTTQILANRPHTVLLNATVQVTTSNQTILSSPAFKSFWQKLFAIFG

SEQ ID NO: 9823 - protein, 174 aa, Homo sapiens
MRLLAFLSLLALVLQETGTASLPRKERKRREEQMPREGDSFEVLPLRNDVLNPDNYGEVIDLSNYEELTDYGDQLPEVKVTSLAPATSISPAKSTTAPGTPSSNPTMTRPTTAGLLLSSQPNHEDIPPLPRRTAYLYARFNRISRIRAEDFKGLTKLKRIDLSNNLISSIDNDA

SEQ ID NO: 9824 - protein, 332 aa, Homo sapiens
MRLLAFLSLLALVLQETGTASLPRKERKRREEQMPREGDSFEVLPLRNDVLNPDNYGEVIDLSNYEELTDYGDQLPEVKVTSLAPATSISPAKSTTAPGTPSSNPTMTRPTTAGLLLSSQPNHGLPTCLVCVCLGSSVYCDDIDLEDIPPLPRRTAYLYARFNRISRIRAEDFKGLTKLKRIDLSNNLISSIDNDAFRLLHALQDLILPENQLEALPVLPSGIEFLDVRLNRLQSSGIQPAAFRAMEKLQFLYLSDNLLDSIPGPLPLSLRSVHLQNNLIETMQRDVFCDPEEHKHTRRQLEDIRLDGNPINLSLFPSAYFCLPRLPIGRFT

SEQ ID NO: 9825 - protein, 301 aa, Homo sapiens
MHPEPAPPPSRSSPELPPSGGSTTSGSRRSRRRSGDGEPPGAPPPPPSAVTYPDWIGQSYSEVMSLNEHSMQALSWRKLYLSRAKLKASSRTSALLSGFAMVAMVEVQLDADHDYPPGLLIAFSACTTVLVAVHLFALMISTCILPNIEAVSNVHNLNSVKESPHERMHRHIELAWAFSTVIGTLLFLAEVVLLCWVKFLPLKKQPGQPRPTSKPPASGAAANVSTSGITPGQAAAIASTTIMVPFGLIFIVFAVHFYRSLVSHKTDRQFQELNELAEFARLQDQLDHRGDHPLTPGSHYA

SEQ ID NO: 9826 - protein, 201 aa, Homo sapiens
MALSWVLTVLSLLPLLEAQIPLCANLVPVPITNATLDRITGKWFYIASAFRNEEYNKSVQEIQATFFYFTPNKTEDTIFLREYQTRQDQCIYNTTYLNVQRENGTISRYVGGQEHFAHLLILRDTKTYMLAFDVNDEKNWGLSVYADKPETTKEQLGEFYEALDCLRIPKSDVVYTDWKKDKCEPLEKQHEKERKQEEGES

SEQ ID NO: 9827 - protein, 201 aa, Homo sapiens
MALSWVLTVLSLLPLLEAQIPLCANLVPVPITNATLDRITGKWFYIASAFRNEEYNKSVQEIQATFFYFTPNKTEDTIFLREYQTRQNQCFYNSSYLNVQRENGTVSRYEGGREHVAHLLFLRDTKTLMFGSYLDDEKNWGLSFYADKPETTKEQLGEFYEALDCLCIPRSDVMYTDWKKDKCEPLEKQHEKERKQEEGES

SEQ ID NO: 9828 - protein, 65 aa, Homo sapiens
MDYGLQFTSSRKFLSISPIVLYLLASFYTKYDAAHFLINTASLLSVLLPKLPQFHGVRVFGINKY

SEQ ID NO: 9829 - protein, 153 aa, Homo sapiens
MNVGVAHSEVNPNTRVMNSRGIWLAYIILVGLLHMVLLSIPFFSIPVVWTLTNVIHNLATYVFLHTVKGTPFETPDQGKARLLTHWEQMDYGLQFTSSRKFLSISPIVLYLLASFYTKYDAAHFLINTASLLSVLLPKLPQFHGVRVFGINKY

SEQ ID NO: 9830 - protein, 153 aa, Homo sapiens; identical to SEQ ID NO: 9829

SEQ ID NO: 9831 - protein, 119 aa, Homo sapiens
MVLLSIPFFSIPVVWTLTNVIHNLATYVFLHTVKGTPFETPDQGKARLLTHWEQMDYGLQFTSSRKFLSISPIVLYLLASFYTKYDAAHFLINTASLLSVLLPKLPQFHGVRVFGINKY

SEQ ID NO: 9832 - protein, 75 aa, Homo sapiens
MAAETLLSSLLGLLLLGLLLPASLTGGVGSLNLEELSEMRYGIEILPLPVMGGQPFFASLPPDPPFFPRANLRTW

SEQ ID NO: 9833 - protein, 75 aa, Homo sapiens; identical to SEQ ID NO: 9832

SEQ ID NO: 9834 - protein, 125 aa, Homo sapiens
MAAETLLSSLLGLLLLGLLLPASLTGGVGSLNLEELSEMRYGIEILPLPVMGGQSQSSDVVIVSSKYKQRYECRLPAGAIHFQREREEETPAYQGPGIPELLSPMRDAPCLLKGGMERPQVENRL

SEQ ID NO: 9835 - protein, 406 aa, Homo sapiens
MAAETLLSSLLGLLLLGLLLPASLTGGVGSLNLEELSEMRYGIEILPLPVMGGQSQSSDVVIVSSKYKQRYECRLPAGAIHFQREREEETPAYQGPGIPELLSPMRDAPCLLKTKDWWTYEFCYGRHIQQYHMEDSASGAPNDFQNNVQVKVIRSPADLIRFIEELKGGTKKGKPNIGQEQPVDDAAEVPQREPEKERGDPERQREMEEEEDEDEDEDEDEDERQLLGEFEKELEGILLPSDRDRLRSEVKAGMERELENIIQETEKELDPDGLKKESERDRAMLALTSTLNKLIKRLEEKQSPELVKKHKKKRVVPKKPPPSPQPTGKIEIKIVRPWAEGTEEGARWLTDEDTRNLKEIFFNILVPGAEEAQKERQRQKELESNYRRVWGSPGGEGTGDLDEFDF

SEQ ID NO: 9836 - protein, 560 aa, Homo sapiens
MAAETLLSSLLGLLLLGLLLPASLTGGVGSLNLEELSEMRYGIEILPLPVMGGQSQSSDVVIVSSKYKQRYECRLPAGAIHFQREREEETPAYQGPGIPELLSPMRDAPCLLKTKDWWTYEFCYGRHIQQYHMEDSEIKGEFLCDEGAGISGDYIDRVDEPLSCSYVLTIRTPRLCPHPLLRPPPSAAPQAILCHPSLQPEEYMAYVQRQADSKQYGDKIIEELQDLGPQVWSETKSGVAPQKMAGASPTKDDSKDSDFWKMLNEPEDQAPGGEEVPAEEQDPSPEAADSASGAPNDFQNNVQVKVIRSPADLIRFIEELKGGTKKGKPNIGQEQPVDDAAEVPQREPEKERGDPERQREMEEEEDEDEDEDEDEDERQLLGEFEKELEGILLPSDRDRLRSEVKAGMERELENIIQETEKELDPDGLKKESERDRAMLALTSTLNKLIKRLEEKQSPELVKKHKKKRVVPKKPPPSPQPTGKIEIKIVRPWAEGTEEGARWLTDEDTRNLKEIFFNILVPGAEEAQKERQRQKELESNYRRVWGSPGGEGTGDLDEFDF

SEQ ID NO: 9837 - protein, 613 aa, Homo sapiens
MAAETLLSSLLGLLLLGLLLPASLTGGVGSLNLEELSEMRYGIEILPLPVMGGQSQSSDVVIVSSKYKQRYECRLPAGAIHFQREREEETPAYQGPGIPELLSPMRDAPCLLKTKDWWTYEFCYGRHIQQYHMEDSEIKGEVLYLGYYQSAFDWDDETAKASKQHRLKRYHSQTYGNGSKCDLNGRPREAEVRFLCDEGAGISGDYIDRVDEPLSCSYVLTIRTPRLCPHPLLRPPPSAAPQAILCHPSLQPEEYMAYVQRQAVDSKQYGDKIIEELQDLGPQVWSETKSGVAPQKMAGASPTKDDSKDSDFWKMLNEPEDQAPGGEEVPAEEQDPSPEAADSASGAPNDFQNNVQVKVIRSPADLIRFIEELKGGTKKGKPNIGQEQPVDDAAEVPQREPEKERGDPERQREMEEEEDEDEDEDEDEDERQLLGEFEKELEGILLPSDRDRLRSEVKAGMERELENIIQETEKELDPDGLKKESERDRAMLALTSTLNKLIKRLEEKQSPELVKKHKKKRVVPKKPPPSPQPTGKIEIKIVRPWAEGTEEGARWLTDEDTRNLKEIFFNILVPGAEEAQKERQRQKELESNYRRVWGSPGGEGTGDLDEFDF

SEQ ID NO: 9838 - protein, 667 aa, Homo sapiens
MAAETLLSSLLGLLLLGLLLPASLTGGVGSLNLEELSEMRYGIEILPLPVMGGQSQSSDVVIVSSKYKQRYECRLPAGAIHFQREREEETPAYQGPGIPELLSPMRDAPCLLKTKDWWTYEFCYGRHIQQYHMEDSEIKGEVLYLGYYQSAFDWDDETAKASKQHRLKRYHSQTYGNGSKCDLNGRPREAEVRFLCDEGAGISGDYIDRVDEPLSCSYVLTIRTPRLCPHPLLRPPPSAAPQAILCHPSLQPEEYMAYVQRQADSKQYGDKIIEELQDLGPQVWSETKSGVAPQKMAGASPTKDDSKDSDFWKMLNEPEDQAPGGEEVPAEEQDPSPEAADSASGAPNDFQNNVQVKVIRSPADLIRFIEELKGGTKKGKPNIGQEQPVDDAAEVPQREPEKERGDPERQREMEEEEDEDEDEDEDEDERQLLGEFEKELEGILLPSDRDRLRSEVKAGMERELENIIQETEKELDPDGLKKESERDRAMLALTSTLNKLIKRLEEKQSPELVKKHKKKRVVPKKPPPSPQPTEEDPEHRVRVRVTKLRLGGPNQDLTVLEMKRENPQLKQIEGLVKELLEREGLTAAGKIEIKIVRPWAEGTEEGARWLTDEDTRNLKEIFFNILVPGAEEAQKERQRQKELESNYRRVWGSPGGEGTGDLDEFDF

SEQ ID NO: 9839 - protein, 597 aa, Homo sapiens
MAAETLLSSLLGLLLLGLLLPASLTGGVGSLNLEELSEMRYGIEILPLPVMGGQSQSSDVVIVSSKYKQRYECRLPAGAIHFQREREEETPAYQGPGIPELLSPMRDAPCLLKTKDWWTYEFCYGRHIQQYHMEDSEIKGEVLYLGYYQSAFDWDDETAKASKQHRLKRYHSQTYGNGSKCDLNGRPREAEVRFLCDEGAGISGDYIDRVDEPLSCSYVLTIRTPRLCPHPLLRPPPSAAPQAILCHPSLQPEEYMAYVQRQADSKQYGDKIIEELQDLGPQVWSETKSGVAPQKMAGASPTKDDSKDSDFWKMLNEPEDQAPGGEEVPAEEQDPSPEAADSASGAPNDFQNNVQVKVIRSPADLIRFIEELKGGTKKGKPNIGQEQPVDDAAEVPQREPEKERGDPERQREMEEEEDEDEDEDEDEDERQLLGEFEKELEGILLPSDRDRLRSETEKELDPDGLKKESERDRAMLALTSTLNKLIKRLEEKQSPELVKKHKKKRVVPKKPPPSPQPTGKIEIKIVRPWAEGTEEGARWLTDEDTRNLKEIFFNILVPGAEEAQKERQRQKELESNYRRVWGSPGGEGTGDLDEFDF

SEQ ID NO: 9840 - protein, 652 aa, Homo sapiens
MAAETLLSSLLGLLLLGLLLPASLTGGVGSLNLEELSEMRYGIEILPLPVMGGQSQSSDVVIVSSKYKQRYECRLPAGAIHFQREREEETPAYQGPGIPELLSPMRDAPCLLKTKDWWTYEFCYGRHIQQYHMEDSEIKGEVLYLGYYQSAFDWDDETAKASKQHRLKRYHSQTYGNGSKCDLNGRPREAEVRFLCDEGAGISGDYIDRVDEPLSCSYVLTIRTPRLCPHPLLRPPPSAAPQAILCHPSLQPEEYMAYVQRQADSKQYGDKIIEELQDLGPQVWSETKSGVAPQKMAGASPTKDDSKDSDFWKMLNEPEDQAPGGEEVPAEEQDPSPEAADSASGAPNDFQNNVQVKVIRSPADLIRFIEELKGGTKKGKPNIGQEQPVDDAAEVPQREPEKERGDPERQREMEEEEDEDEDEDEDEDERQLLGEFEKELEGILLPSDRDRLRSETEKELDPDGLKKESERDRAMLALTSTLNKLIKRLEEKQSPELVKKHKKKRVVPKKPPPSPQPTEEDPEHRVRVRVTKLRLGGPNQDLTVLEMKRENPQLKQIEGLVKELLEREGLTAAGKIEIKIVRPWAEGTEEGARWLTDEDTRNLKEIFFNILVPGAEEAQKERQRQKELESNYRRVWGSPGGEGTGDLDEFDF

SEQ ID NO: 9841 - protein, 612 aa, Homo sapiens
MAAETLLSSLLGLLLLGLLLPASLTGGVGSLNLEELSEMRYGIEILPLPVMGGQSQSSDVVIVSSKYKQRYECRLPAGAIHFQREREEETPAYQGPGIPELLSPMRDAPCLLKTKDWWTYEFCYGRHIQQYHMEDSEIKGEVLYLGYYQSAFDWDDETAKASKQHRLKRYHSQTYGNGSKCDLNGRPREAEVRFLCDEGAGISGDYIDRVDEPLSCSYVLTIRTPRLCPHPLLRPPPSAAPQAILCHPSLQPEEYMAYVQRQADSKQYGDKIIEELQDLGPQVWSETKSGVAPQKMAGASPTKDDSKDSDFWKMLNEPEDQAPGGEEVPAEEQDPSPEAADSASGAPNDFQNNVQVKVIRSPADLIRFIEELKGGTKKGKPNIGQEQPVDDAAEVPQREPEKERGDPERQREMEEEEDEDEDEDEDEDERQLLGEFEKELEGILLPSDRDRLRSEVKAGMERELENIIQETEKELDPDGLKKESERDRAMLALTSTLNKLIKRLEEKQSPELVKKHKKKRVVPKKPPPSPQPTGKIEIKIVRPWAEGTEEGARWLTDEDTRNLKEIFFNILVPGAEEAQKERQRQKELESNYRRVWGSPGGEGTGDLDEFDF

SEQ ID NO: 9842 - protein, 580 aa, Homo sapiens
MAAETLLSSLLGLLLLGLLLPASLTGGVGSLNLEELSEMRYGIEILPLPVMGGQSQSSDVVIVSSKYKQRYECRLPAGAIHFQREREEETPAYQGPGIPELLSPMRDAPCLLKTKDWWTYEFCYGRHIQQYHMEDSEIKGEVLYLGYYQSAFDWDDETAKFLCDEGAGISGDYIDRVDEPLSCSYVLTIRTPRLCPHPLLRPPPSAAPQAILCHPSLQPEEYMAYVQRQAVDSKQYGDKIIEELQDLGPQVWSETKSGVAPQKMAGASPTKDDSKDSDFWKMLNEPEDQAPGGEEVPAEEQDPSPEAADSASGAPNDFQNNVQVKVIRSPADLIRFIEELKGGTKKGKPNIGQEQPVDDAAEVPQREPEKERGDPERQREMEEEEDEDEDEDEDEDERQLLGEFEKELEGILLPSDRDRLRSEVKAGMERELENIIQETEKELDPDGLKKESERDRAMLALTSTLNKLIKRLEEKQSPELVKKHKKKRVVPKKPPPSPQPTGKIEIKIVRPWAEGTEEGARWLTDEDTRNLKEIFFNILVPGAEEAQKERQRQKELESNYRRVWGSPGGEGTGDLDEFDF

SEQ ID NO: 9843 - protein, 146 aa, Homo sapiens
MAAETLLSSLLGLLLLGLLLPASLTGGVGSLNLEELSEMRYGIEILPLPVMGGQSQSSDVVIVSSKYKQRYECRLPAGAIHFQREREEETPAYQGPGIPELLSPMRDAPCLLKTKDWWTYEFCYGRHIQQYHMEDSEIKGLQAASS

SEQ ID NO: 9844 - protein, 186 aa, Homo sapiens
MAAETLLSSLLGLLLLGLLLPASLTGGVGSLNLEELSEMRYGIEILPLPVMGGQSQSSDVVIVSSKYKQRYECRLPAGAIHFQREREEETPAYQGPGIPELLSPMRDAPCLLKTKDWWTYEFCYGRHIQQYHMEGILLPSDRDRLRSEVKAGMERELENIIQETEKELDPDGLKKESERDRAMLAL

SEQ ID NO: 9845 - protein, 162 aa, Homo sapiens
MAAETLLSSLLGLLLLGLLLPASLTGGVGSLNLEELSEMRYGIEILPLPVMGGQSQSSDVVIVSSKYKQRYECRLPAGAIHFQREREEETPAYQGPGIPELLSPMRDAPCLLKTYGNGSKCDLNGRPREAEVRFLCDEGAGISGDYIDRVDEPLSCSYVLTI

SEQ ID NO: 9846 - protein, 538 aa, Homo sapiens
MAAETLLSSLLGLLLLGLLLPASLTGGVGSLNLEELSEMRYGIEILPLPVMGGQTKDWWTYEFCYGRHIQQYHMEDSEIKGEVLYLGYYQSAFDWDDETAKASKQHRLKRYHSQTYGNGSKCDLNGRPREAEVRFLCDEGAGISGDYIDRVDEPLSCSYVLTIRTPRLCPHPLLRPPPSAAPQAILCHPSLQPEEYMAYVQRQADSKQYGDKIIEELQDLGPQVWSETKSGVAPQKMAGASPTKDDSKDSDFWKMLNEPEDQAPGGEEVPAEEQDPSPEAADSASGAPNDFQNNVQVKVIRSPADLIRFIEELKGGTKKGKPNIGQEQPVDDAAEVPQREPEKERGDPERQREMEEEEDEDEDEDEDEDERQLLGEFEKELEGILLPSDRDRLRSETEKELDPDGLKKESERDRAMLALTSTLNKLIKRLEEKQSPELVKKHKKKRVVPKKPPPSPQPTGKIEIKIVRPWAEGTEEGARWLTDEDTRNLKEIFFNILVPGAEEAQKERQRQKELESNYRRVWGSPGGEGTGDLDEFDF

SEQ ID NO: 9847 - protein, 252 aa, Homo sapiens
MALVLILQLLTLFPPASYHPKPWLGAQPATVVTPGVNVTLRCRAPQPAWRFGLFKPGEIAPLLFRDVSSELAEFFLEEVTPAQGGSYRCCYRRPDWGPGVWSQPSDVLELLVTEELPRPSLVALPGPVVGPGANVSLRCAGRLRNMSFVLYREGVAAPLQYRHSAQPWADFTLLGARAPGTYSCYYHTPSAPYVLSQRSEVLVISWEDSGSSDYTRGNLVRLGLAGLVLISLGALVTFDWRSQNRAPAGIRP

SEQ ID NO: 9848 - protein, 271 aa, Homo sapiens
MALVLILQLLTLFPPASYHPKPWLGAQPATVVTPGVNVTLRCRAPQPAWRFGLFKPGEIAPLLFRDVSSELAEFFLEEVTPAQGGSYRCCYRRPDWGPGVWSQPSDVLELLVTEELPRPSLVALPGPVVGPGANVSLRCAGRLRNMSFVLYREGVAAPLQYRHSAQPWADFTLLGARAPGTYSCYYHTPSAPYVLSQRSEVLVISWEGEGPEARPASSAPGMQAPGPPPSDPGAQAPSLSSFRPRGLVLQPLLPQTQDSWDPAPPPSDPGV

SEQ ID NO: 9849 - protein, 271 aa, Homo sapiens; identical to SEQ ID NO: 9848

SEQ ID NO: 9850 - protein, 268 aa, Homo sapiens [sequence omitted]

SEQ ID NO: 9851 - protein, 161 aa, Homo sapiens
MALVLILQLLTLWPLCHTDITPSAGRILSGGGDSSPRGKLPLLLPKARLGAGCLVPAQRCPGAAGDRGAAAAVAGGAARAGGGSWRQREPALRGPPAEHELRAVPRGRGGPAAVPPLRAALGRLHAAGRPRPRHLQLLLSHALRALRAVAAQRGAGHQLGR

SEQ ID NO: 9852 - protein, 267 aa, Homo sapiens
MALVLILQLLTLWPLCHTDITPSVAIIVPPASYHPKPWLGAQPATVVTPGVNVTLRCRAPQPAWRFGLFKPGEIAPLLFRDVSSELAEFFLEEVTPAQGGSYRCCYRRPDWGPGVWSQPSDVLELLVTEELPRPSLVALPGPVVGPGANVSLRCAGRLRNMSFVLYREGVAAPLQYRHSAQPWADFTLLGARAPGTYSCYYHTPSAPYVLSQRSEVLVISWEDSGSSDYTRGNLVRLGLAGLVLISLGALVTFDWRSQNRAPAGIRP

SEQ ID NO: 9853 - protein, 267 aa, Homo sapiens; identical to SEQ ID NO: 9852

SEQ ID NO: 9854 - protein, 286 aa, Homo sapiens
MALVLILQLLTLWPLCHTDITPSVAIIVPPASYHPKPWLGAQPATVVTPGVNVTLRCRAPQPAWRFGLFKPGEIAPLLFRDVSSELAEFFLEEVTPAQGGSYRCCYRRPDWGPGVWSQPSDVLELLVTEELPRPSLVALPGPVVGPGANVSLRCAGRLRNMSFVLYREGVAAPLQYRHSAQPWADFTLLGARAPGTYSCYYHTPSAPYVLSQRSEVLVISWEGEGPEARPASSAPGMQAPGPPPSDPGAQAPSLSSFRPRGLVLQPLLPQTQDSWDPAPPPSDPGV

SEQ ID NO: 9855 - protein, 286 aa, Homo sapiens; identical to SEQ ID NO: 9854

SEQ ID NO: 9856 - protein, 263 aa, Homo sapiens
MALVLILQLLTLWPLCHTDITPSVPPASYHPKPWLGAQPATVVTPGVNVTLRCRAPQPAWRFGLFKPGEIAPLLFRDVSSELAEFFLEEVTPAQGGSYRCCYRRPDWGPGVWSQPSDVLELLVTEELPRPSLVALPGPVVGPGANVSLRCAGRLRNMSFVLYREGVAAPLQYRHSAQPWADFTLLGARAPGTYSCYYHTPSAPYVLSQRSEVLVISWEDSGSSDYTRGNLVRLGLAGLVLISLGALVTFDWRSQNRAPAGIRP

SEQ ID NO: 9857 - protein, 282 aa, Homo sapiens
MALVLILQLLTLWPLCHTDITPSVPPASYHPKPWLGAQPATVVTPGVNVTLRCRAPQPAWRFGLFKPGEIAPLLFRDVSSELAEFFLEEVTPAQGGSYRCCYRRPDWGPGVWSQPSDVLELLVTEELPRPSLVALPGPVVGPGANVSLRCAGRLRNMSFVLYREGVAAPLQYRHSAQPWADFTLLGARAPGTYSCYYHTPSAPYVLSQRSEVLVISWEGEGPEARPASSAPGMQAPGPPPSDPGAQAPSLSSFRPRGLVLQPLLPQTQDSWDPAPPPSDPGV

SEQ ID NO: 9858 - protein, 231 aa, Homo sapiens
MASMAAIGSCSKEYRVLLGQLQKQTDLMQDTSRLLDPYIRIQGLDVPKLREHCRERPGAFPSEETLRGLGRRGFLQTLNATLGCVLHRLADLEQRLPKAQDLERSGLNIEDLEKLQMARPNILGLRNNIYCMAQLLDNSDTAEPTKAGRGASQPPTPTPASDAFQRKLEGCRFLHGYHRFMHSVGRVFSKWGESPNRSRRHSPHQALRKGVRRTRPSRKGKRLMTRGQLPR

SEQ ID NO: 9859 - protein, 20 aa, Homo sapiens
MGVLLTQRTLLNTYPRPGCS

SEQ ID NO: 9860 - protein, 252 aa, Homo sapiens
MGVLLTQRTLLSLVLALLFPSMASMAAIGSCSKEYRVLLGQLQKQTDLMQDTSRLLDPYIRIQGLDVPKLREHCRERPGAFPSEETLRGLGRRGFLQTLNATLGCVLHRLADLEQRLPKAQDLERSGLNIEDLEKLQMARPNILGLRNNIYCMAQLLDNSDTAEPTKAGRGASQPPTPTPASDAFQRKLEGCRFLHGYHRFMHSVGRVFSKWGESPNRSRRHSPHQALRKGVRRTRPSRKGKRLMTRGQLPR

SEQ ID NO: 9861 - protein, 188 aa, Homo sapiens
LEPATEYMARVRCADASHFWKWSEWSGQNFTTLEAAPSEAPDVWRIVSLEPGNHTVTLFWKPLSKLHANGKILFYNVVVENLDKPSSSELHSIPAPANSTKLILDRCSYQICVIANNSVGASPASVIVISADPENSVSTCFSGTVPSVWGEGDFSHGSGHFCPGDSSTYMGNYLKFIQVTATLTNSHH

SEQ ID NO: 9862 - protein, 979 aa, Homo sapiens
MALFAVFQTTFFLTLLSLRTYQSEVLAERLPLTPVSLKVSTNSTRQSLHLQWTVHNLPYHQELKMVFQIQISRIETSNVIWVGNYSTTVKWNQVLHWSWESELPLECATHFVRIKSLVDDAKFPEPNFWSNWSSWEEVSVQDSTGQDILFVFPKDKLVEEGTNVTICYVSRNIQNNVSCYLEGKQIHGEQLDPHVTAFNLNSVPFIRNKGTNIYCEASQGNVSEGMKGIVLFVSKVLEEPKDFSCETEDFKTLHCTWDPGTDTALGWSKQPSQSYTLFESFSGEKKLCTHKNWCNWQITQDSQETYNFTLIAENYLRKRSVNILFNLTHRVYLMNPFSVNFENVNATNAIMTWKVHSIRNNFTYLCQIELHGEGKMMQYNVSIKVNGEYFLSELEPATEYMARVRCADASHFWKWSEWSGQNFTTLEAAPSEAPDVWRIVSLEPGNHTVTLFWKPLSKLHANGKILFYNVVVENLDKPSSSELHSIPAPANSTKLILDRCSYQICVIANNSVGASPASVIVISADPENKEVEEERIAGTEGGFSLSWKPQPGDVIGYVVDWCDHTQDVLGDFQWKNVGPNTTSTVISTDAFRPGVRYDFRIYGLSTKRIACLLEKKTGYSQELAPSDNPHVLVDTLTSHSFTLSWKDYSTESQPGFIQGYHVYLKSKARQCHPRFEKAVLSDGSECCKYKIDNPEEKALIVDNLKPESFYEFFITPFTSAGEGPSATFTKVTTPDEHSSMLIHILLPMVFCVLLIMVMCYLKSQWIKETCYPDIPDPYKSSILSLIKFKENPHLIIMNVSDCIPDAIEVVSKPEGTKIQFLGTRKSLTETELTKPNYLYLLPTEKNHSGPGPCICFENLTYNQAASDSGSCGHVPVSPKAPSMLGLMTSPENVLKALEKNYMNSLGEIPAGETSLNYVSQLASPMFGDKDSLPTNPVEAPHCSEYKMQMAVSLRLALPPPTENSSLSSITLLDPGEHYC

SEQ ID NO: 9863 - protein, 342 aa, Homo sapiens
MALFAVFQTTFFLTLLSLRTYQSEVLAERLPLTPVSLKVSTNSTRQSLHLQWTVHNLPYHQELKMVFQIQISRIETSNVIWVGNYSTTVKWNQVLHWSWESELPLECATHFVRIKSLVDDAKFPEPNFWSNWSSWEEVSVQDSTGQDILFVFPKDKLVEEGTNVTICYVSRNIQNNVSCYLEGKQIHGEQLDPHVTAFNLNSVPFIRNKGTNIYCEASQGNVSEGMKGIVLFVSKVLEEPKDFSCETEDFKTLHCTWDPGTDTALGWSKQPSQSYTLFESFSGEKKLCTHKNWCNWQITQDSQETYNFTLIAENYLRKRSVNILFNLTHRGETRVVTAHRGH

SEQ ID NO: 9864 - protein, 35 aa, Homo sapiens
  VARIANT 1: note = misc_feature - Xaa can be any naturally occurring amino acid
XIKETCYPDIPDPYKSSILSLIKFKISSKVWLNRR

SEQ ID NO: 9865 - protein, 62 aa, Homo sapiens
  VARIANT 1: note = misc_feature - Xaa can be any naturally occurring amino acid
XSMLIHILLPMVFCVLLIMVMCYLKSQWIKETCYPDIPDPYKSSILSLIKFKISSKVWLNRR

SEQ ID NO: 9866 - protein, 111 aa, Homo sapiens
MLDWRLASAHFILAVTLTLWSSGKVLSVDVTTTEAFDSGVIDVQSTPTVREEKSATDLTAKLLLLDELVSLENDVIETKKKRSFSGFGSPLDRLSAGSVDHKGKQRCNFLG

SEQ ID NO: 9867 - protein, 133 aa, Homo sapiens
MLDWRLASAHFILAVTLTLWSSGKVLSVDVTTTEAFDSGVIDVQSTPTVREEKSATDLTAKLLLLDELVSLENDVIETKKKRSFSGFGSPLDRLSAGSVDHKGKQRKVVDHPKRRFGIPMDRIGRNRLSNSRG

SEQ ID NO: 9868 - protein, 815 aa, Homo sapiens
MFRLGLLVCFYNDLELLDATVAQVLLYQMIKCSHLRGFQAGVQKLKAELLDIAMENQTLNETLGSLSDAVVGLTYSQLESLSPEAVHGAISTLNQVSGWAKSQVIILSAKYLAHEKVLSFYNVSQMGALLAGVSTQAFCSMKRKDISQVLRSAVSQYVSDLSPAQQQGILSKMVQAEDTAPGIVEIQGAFFKEVSLFDLRRQPGFNSTVLKDKELGRSQALFLYELLLKTTRRPEELLSAGQLVKGVTCSHIDAMSTDFFLAHFQDFQNNFALLSPYQVNCLAWKYWEVSRLSMPPFLLAALPARYLASVPASQCVPFLISLGKSWLDSLVLDSHKKTSVLRKVQQCLDDSIADEYTVDIMGNLLCHLPAAIIDRGISPRAWATALHGLRDCPDLNPEQKAAVRLKLLGQYGLPQHWTAETTKDLGPFLVLFSGDELSSIATKFPEILLQAASKMARTLPTKEFLWAVFQSVRNSSDKIPSYDPMPGCHGVVAPSSDDIFKLAEANACWALEDLRCMEEDTFIRTVELLGAVQGFSRPQLMTLKEKAIQVWDMPSYWREHHIVSLGRIALALNESELEQLDLSSIDTVASLSWQTEWTPGQAESILQGYLDDSGYSIQDLKSFHLVGLGATLCAINITEIPLIKISEFRVVVARIGTLLCSTHVLAEFKRKAEVVFGDPTEWTSSVLQELGTIAAGLTKAELRMLDKDLMPYFQPSAIKCLPDEIFKELSAEQIASLGPENAAAVTHAQRRRLSPLQLQSLQQALDGAKTHSWQDAPASAGPTRTSSSRSPAGALQSWGLWLGCPLLVLMAKLLW

SEQ ID NO: 9869 - protein, 1060 aa, Homo sapiens
MGNSITYRDQAAVENHLEQRLHQPQKLLEDLRKTDAQQFRTAMKCLLEDKKDGLDLKDIIIDLGEIRERALQSPGVNRSLFLITLERCFQMLNSLECVEILGKVLRGSSGSFLQPDITERLPRDLREDAFKNLSAVFKDLYDKTSAHSQRALYSWMTGILQTSSNATDDSASWVSAEHLWVLGRYMVHLSFEEITKISPIEIGLFISYDNATKQLDMVYDITPELAQAFLERISSSNFNMRNTSTIHRLGLLVCFYNDLELLDATVAQVLLYQMIKCSHLRGFQAGVQKLKAELLDIAMENQTLNETLGSLSDAVVGLTYSQLESLSPEAVHGAISTLNQVSGWAKSQVIILSAKYLAHEKVLSFYNVSQMGALLAGVSTQAFCSMKRKDISQVLRSAVSQYVSDLSPAQQQGILSKMVQAEDTAPGIVEIQGAFFKEVSLFDLRRQPGFNSTVLKDKELGRSQALFLYELLLKTTRRPEELLSAGQLVKGVTCSHIDAMSTDFFLAHFQDFQNNFALLSPYQVNCLAWKYWEVSRLSMPPFLLAALPARYLASVPASQCVPFLISLGKSWLDSLVLDSHKKTSVLRKVQQCLDDSIADEYTVDIMGNLLCHLPAAIIDRGISPRAWATALHGLRDCPDLNPEQKAAVRLKLLGQYGLPQHWTAETTKDLGPFLVLFSGDELSSIATKFPEILLQAASKMARTLPTKEFLWAVFQSVRNSSDKIPSYDPMPGCHGVVAPSSDDIFKLAEANACWALEDLRCMEEDTFIRTVELLGAVQGFSRPQLMTLKEKAIQVWDMPSYWREHHIVSLGRIALALNESELEQLDLSSIDTVASLSWQTEWTPGQAESILQGYLDDSGYSIQDLKSFHLVGLGATLCAINITEIPLIKISEFRVVVARIGTLLCSTHVLAEFKRKAEVVFGDPTEWTSSVLQELGTIAAGLTKAELRMLDKDLMPYFQPSAIKCLPDEIFKELSAEQIASLGPENAAAVTHAQRRRLSPLQLQSLQQALDGAKTHSWQDAPASAGPTRTSSSRSPAGALQSWGLWLGCPLLVLMAKLLW

SEQ ID NO: 9870 - protein, 1153 aa, Homo sapiens
MSQEPTTYSLFLFLFLSHGVSSYTVPNSRQDLHPLLQNMAEEIIDGSYLNALLDLIQFQSSHVWTDDLSHRVLAYLNSRNVAFTIPSLQAAVENHLEQRLHQPQKLLEDLRKTDAQQFRTAMKCLLEDKKDGLDLKDIIIDLGEIRERALQSPGVNRSLFLITLERCFQMLNSLECVEILGKVLRGSSGSFLQPDITERLPRDLREDAFKNLSAVFKDLYDKTSAHSQRALYSWMTGILQTSSNATDDSASWVSAEHLWVLGRYMVHLSFEEITKISPIEIGLFISYDNATKQLDMVYDITPELAQAFLERISSSNFNMRNTSTIHRQAHELWALEPFPKMLGLLVCFYNDLELLDATVAQVLLYQMIKCSHLRGFQAGVQKLKAELLDIAMENQTLNETLGSLSDAVVGLTYSQLESLSPEAVHGAISTLNQVSGWAKSQVIILSAKYLAHEKVLSFYNVSQMGALLAGVSTQAFCSMKRKDISQVLRSAVSQYVSDLSPAQQQGILSKMVQAEDTAPGIVEIQGAFFKEVSLFDLRRQPGFNSTVLKDKELGRSQALFLYELLLKTTRRPEELLSAGQLVKGVTCSHIDAMSTDFFLAHFQDFQNNFALLSPYQVNCLAWKYWEVSRLSMPPFLLAALPARYLASVPASQCVPFLISLGKSWLDSLVLDSHKKTSVLRKVQQCLDDSIADEYTVDIMGNLLCHLPAAIIDRGISPRAWATALHGLRDCPDLNPEQKAAVRLKLLGQYGLPQHWTAETTKDLGPFLVLFSGDELSSIATKFPEILLQAASKMARTLPTKEFLWAVFQSVRNSSDKIPSYDPMPGCHGVVAPSSDDIFKLAEANACWALEDLRCMEEDTFIRTVELLGAVQGFSRPQLMTLKEKAIQVWDMPSYWREHHIVSLGRIALALNESELEQLDLSSIDTVASLSWQTEWTPGQAESILQGYLDDSGYSIQDLKSFHLVGLGATLCAINITEIPLIKISEFRVVVARIGTLLCSTHVLAEFKRKAEVVFGDPTEWTSSVLQELGTIAAGLTKAELRMLDKDLMPYFQPSAIKCLPDEIFKELSAEQIASLGPENAAAVTHAQRRRLSPLQLQSLQQALDGAKTHSWQDAPASAGPTRTSSSRSPAGALQSWGLWLGCPLLVLMAKLLW

SEQ ID NO: 9871 - protein, 1139 aa, Homo sapiens
MSQEPTTYSLFLFLFLSHGVSSYTVPNSRQDLHPLLQNMAEEIIDGSYLNALLDLIQFQSSHVWTDDLSHRVLAYLNSRNVAFTIPSLQAAVENHLEQRLHQPQKLLEDLRKTDAQQFRTAMKCLLEDKKDGLDLKDIIIDLGEIRERALQSPGVNRSLFLITLERCFQMLNSLECVEILGKVLRGSSGSFLQPDITERLPRDLREDAFKNLSAVFKDLYDKTSAHSQRALYSWMTGILQTSSNATDDSASWVSAEHLWVLGRYMVHLSFEEITKISPIEIGLFISYDNATKQLDMVYDITPELAQAFLERISSSNFNMRNTSTIHRLGLLVCFYNDLELLDATVAQVLLYQMIKCSHLRGFQAGVQKLKAELLDIAMENQTLNETLGSLSDAVVGLTYSQLESLSPEAVHGAISTLNQVSGWAKSQVIILSAKYLAHEKVLSFYNVSQMGALLAGVSTQAFCSMKRKDISQVLRSAVSQYVSDLSPAQQQGILSKMVQAEDTAPGIVEIQGAFFKEVSLFDLRRQPGFNSTVLKDKELGRSQALFLYELLLKTTRRPEELLSAGQLVKGVTCSHIDAMSTDFFLAHFQDFQNNFALLSPYQVNCLAWKYWEVSRLSMPPFLLAALPARYLASVPASQCVPFLISLGKSWLDSLVLDSHKKTSVLRKVQQCLDDSIADEYTVDIMGNLLCHLPAAIIDRGISPRAWATALHGLRDCPDLNPEQKAAVRLKLLGQYGLPQHWTAETTKDLGPFLVLFSGDELSSIATKFPEILLQAASKMARTLPTKEFLWAVFQSVRNSSDKIPSYDPMPGCHGVVAPSSDDIFKLAEANACWALEDLRCMEEDTFIRTVELLGAVQGFSRPQLMTLKEKAIQVWDMPSYWREHHIVSLGRIALALNESELEQLDLSSIDTVASLSWQTEWTPGQAESILQGYLDDSGYSIQDLKSFHLVGLGATLCAINITEIPLIKISEFRVVVARIGTLLCSTHVLAEFKRKAEVVFGDPTEWTSSVLQELGTIAAGLTKAELRMLDKDLMPYFQPSAIKCLPDEIFKELSAEQIASLGPENAAAVTHAQRRRLSPLQLQSLQQALDGAKTHSWQDAPASAGPTRTSSSRSPAGALQSWGLWLGCPLLVLMAKLLW

SEQ ID NO: 9872 - protein, 1139 aa, Homo sapiens; identical to SEQ ID NO: 9871

SEQ ID NO: 9873 - protein, 353 aa, Homo sapiens
MSQEPTTYSLFLFLFLSHGVSSYTVPNSRQDLHPLLQNMAEEIIDGSYLNALLDLIQFQSSHVWTDDLSHRVLAYLNSRNVAFTIPSLQAAVENHLEQRLHQPQKLLEDLRKTDAQQFRTAMKCLLEDKKDGLDLKDIIIDLGEIRERALQSPGVNRSLFLITLERCFQMLNSLECVEILGKVLRGSSGSFLQPDITERLPRDLREDAFKNLSAVFKDLYDKTSAHSQRALYSWMTGILQTSSNATDDSASWVSAEHLWVLGRYMVHLSFEEITKISPIEIGLFISYDNATKQLDMVYDITPELAQAFLERISSSNFNMRNTSTIHSSKQNSWTLPWRTRPSMRPWVLCRMQL

SEQ ID NO: 9874 - protein, 94 aa, Homo sapiens
AMGDKATVVGGQAEAPDSVAMSSWERRLHRAKCAPSYLFSCFNGGECVHPAFCDCRRFNATGPRCQMVYNAGPERDSICRAWGQHHVETFDGLY

SEQ ID NO: 9875 - protein, 2913 aa, Homo sapiens
MGVLASALCWLLCVWLPWGEQAAESLRVQRLAAAPVLWGSAEPQPEPAGQPSSSHQEATLAMGDKATVVGGQQAEAPDSVAMSSWERRLHRAKCAPSYLFSCFNGGECVHPAFCDCRRFNATGPRCQMVYNAGPERDSICRAWGQHHVETFDGLYYYLSGKGSYTLVGRHEPEGQSFSIQVHNDPQCGSSPYTCSRAVSLFFVGEQEIHLAKEVTHGGMRVQLPHVMGSARLQQLAGYVIVRHQSAFTLAWDGASAVYIKMSPELLGWTHGLCGNNNADPKDDLVTSSGKLTDDVVEFVHSWQEQAPNQPPGPTTSSLPRPPCLQQNPGTMQGVYEQCEALLRPPFDACHAYVSPLPFTASCTSDLCQSMGDVATWCRALAEYARACAQAGRPLQGWRTQLRQCTVHCKEKAFTYNECIACCPASCHPRASCVDSEIACVDGCYCPNGLIFEDGGCVAPAECPCEFHGTLYPPGSVVKEDCNTCTCTSGKWECSTAVCPAECSVTGDIHFTTFDGRRYTFPATCQYILAKSRSSGTFTVTLQNAPCGLNQDGACVQSVSVILHQDPRRQVTLTQAGDVLLFDQYKIIPPYTDDAFEIRRLSSVFLRVRTNVGVRVLYDREGLRLYLQVDQRWVEDTVGLCGTFNGNTQDDFLSPVGVPESTPQLFGNSWKTLSACSPLVSGSPLDPCDVHLQAASYSVQACSVLTGEMFAPCSAFLSPVPYFEQCRRDACRCGQPCLCATLAHYAHLCRRHGLPVDFRARLPACALSCEASKEYSPCVAPCGRTCQDLASPEACGVDGGDDLSRDECVEGCACPPDTYLDTQADLCVPRNQCSCHFQGVDYPPGDSDIPSLGHCHCKDGVMSCDSRAPAAACPAGQVFVNCSDLHTDLELSRERTCEQQLLNLSVSARGPCLSGCACPQGLLRHGDACFLPEECPCTWKGKEYFPGDQVMSPCHTCVCQRGSFQCTLHPCASTCTAYGDRHYRTFDGLPFDFVGACKVHLVKSTSDVSFSVIVENVNCYSSGMICRKFISINVGNSLIVFDDDSGNPSPESFLDDKQEVHTWRVGFFTLVHFPQEHITLLWDQRTTVHVQAGPQWQGQLAGLCGNFDLKTINEMRTPENLELTNPQEFGSSWAAVECPDTLDPRDMCVLNPLREPFAKKECSILLSEVFEICHPVVDVTWFYSNCLTDTCGCSQGGDCECFCASVSAYAHQCCQHGVAVDWRTPRLCPYDCDFFNKVLGKGPYQLSSLAAGGALVGMKAVGDDIVLVRTEDVAPADIVSFLLTAALYKAKAHDPDVVSLEAADRPNFFLHVTANGSLELAKWQGRDTFQQHASFLLHRGTRQAGLVALESLAKPSSFLYVSGAVLALRLYEHTEVFRRGTLFRLLDAKPSGAAYPICEWRYDACASPCFQTCRDPRAASCRDVPRVEGCVPVCPTPQVLDEVTQRCVYLEDCVEPAVWVPTEALGNETLPPSQGLPTPSDEEPQLSQESPRTPTHRPALTPAAPLTTALNPPVTATEEPVVSPGPTQTTLQQPLELTASQLPAGPTESPASKGVTASLLAIPHTPESSSLPVALQTPTPGMVSGAMETTRVTVIFAGSPNITVSSRSPPAPRFPLMTKAVTVRGHGSLPVRTTPPQPSLTASPSSRPVASPGAISRSPTSSGSHKAVLTPAVTKVISRTGVPQPTQAQSASSPSTPLTVAGTAAEQVPVSPLATRSLEIVLSTEKGEAGHSQPMGSPASPQPHPLPSAPPRPAQHTTMATRSPALPPETPAAASLSTATDGLAATPFMSLESTRPSQLLSGLPPDTSLPLAKVGTSAPVATPGPKASVITTPLQPQATTLPAQTLSPVLPFTPAAMTQAHPPTHIAPPAAGTAPGLLLGATLPTSGVLPVAEGTASMVSVVPRKSTTGKVAILSKQVSLPTSMYGSAEGGPTELTPATSHPLTPLVAEPEGAQAGTALPVPTSYALSRVSARTAPQDSMLVLLPQLAEAHGTSAGPHLAAEPVDEATTEPSGRSAPALSIVEGLAEALATTTEANTSTTCVPIAEQDCVRHICLEGQLIRVNQSQHCPQGAAPPRCGILGLAVRVGGDRCCPLWECACRCSIFPDLSFVTFDGSHVALFKEAIYILSQSPDEMLTVHVLDCKSANLGHLNWPPFCLVMLNMTHLAHQVTIDRFNRKVTVDLQPVWPPVSRYGFRIEDTGHMYMILTPSDIQIQWLHSSGLMIVEASKTSKAQGHGLCGICDGDAANDLTLKDGSVVGGAEDPAPFLDSWQVPSSLTSVGQTRFRPDSCATTDCSPCLRMVSNRTFSACHRFVPPESFCELWIRDTKYVQQPCVALTVYVAMCHKFHVCIEWRRSDYCPFLCSSDSTYQACVTACEPPKTCQDGILGPLDPEHCQVLGEGCVCSEGTILHRRHSALCIPEAKCACTDSMGVPRALGETWNSSLSGCCQHQCQAPDTIVPVDLGCPSPRPESCLRFGEVALLLPTKDPCCLGTVCVCNQTLCEGLAPTCRPGHRLLTHFQEDSCCPSYSCECDPDLCEAELVPSCRQDQILITGRLGDSCCTSYFCACGDCPDSIPECQEGEALTVHRNTTELCCPLYQCVCENFRCPQVQCGLGTALVEVWSPDRCCPYKSCECDCDTIPVPRCHLWEKSQLDEEFMHSVENVCGCAKYECVKAPVCLSRELGVMQPGQTVVELSADGVCHTSRCTTVLDPLTNFYQINTTSVLCDIHCEANQEYEHPRDLAACCGSCRNVSCLFTFPNGTTSLFLPGASWIADCARHHCSSTPLGAVLVRSPISCPPLNETECAKVGGSVVPSLEGCCRTCKEDGRSCKKVTIRMTIRKNECRSSTPVNLVSCDGRCPSASIYNYNINTYARFCKCCREVGLQRRSVQLFCATNATWVPYTVQEPTDCACQWS

SEQ ID NO: 9876 - protein, 2925 aa, Homo sapiens
MGVLASALCWLLCVWLPWGEQAAESLRVQRLGERVVDSGRSGARGMRNVKGMRNGPAQTRVSSSSSHQEATLAMGDKATVVGGQQAEAPDSVAMSSWERRLHRAKCAPSYLFSCFNGGECVHPAFCDCRRFNATGPRCQMVYNAGPERDSICRAWGQHHVETFDGLYYYLSGKGSYTLVGRHEPEGQSFSIQVHNDPQCGSSPYTCSRAVSLFFVGEQEIHLAKEVTHGGMRVQLPHVMGSARLQQLAGYVIVRHQSAFTLAWDGASAVYIKMSPELLGWTHGLCGNNNADPKDDLVTSSGKLTDDVVEFVHSWQEQAPNQPPGPTTSSLPRPPCLQQNPGTMQGVYEQCEALLRPPFDACHAYVSPLPFTASCTSDLCQSMGDVATWCRALAEYARACAQAGRPLQGWRTQLRQCTVHCKEKAFTYNECIACCPASCHPRASCVDSEIACVDGCYCPNGLIFEDGGCVAPAECPCEFHGTLYPPGSVVKEDCNTCTCTSGKWECSTAVCPAECSVTGDIHFTTFDGRRYTFPATCQYILAKSRSSGTFTVTLQNAPCGLNQDGACVQSVSVILHQDPRRQVTLTQAGDVLLFDQYKIIPPYTDDAFEIRRLSSVFLRVRTNVGVRVLYDREGLRLYLQVDQRWVEDTVGLCGTFNGNTQDDFLSPVGVPESTPQLFGNSWKTLSACSPLVSGSPLDPCDVHLQAASYSVQACSVLTGEMFAPCSAFLSPVPYFEQCRRDACRCGQPCLCATLAHYAHLCRRHGLPVDFRARLPACALSCEASKEYSPCVAPCGRTCQDLASPEACGVDGGDDLSRDECVEGCACPPDTYLDTQADLCVPRNQCSCHFQGVDYPPGDSDIPSLGHCHCKDGVMSCDSRAPAAACPAGQVFVNCSDLHTDLELSRERTCEQQLLNLSVSARGPCLSGCACPQGLLRHGDACFLPEECPCTWKGKEYFPGDQVMSPCHTCVCQRGSFQCTLHPCASTCTAYGDRHYRTFDGLPFDFVGACKVHLVKSTSDVSFSVIVENVNCYSSGMICRKFISINVGNSLIVFDDDSGNPSPESFLDDKQEVHTWRVGFFTLVHFPQEHITLLWDQRTTVHVQAGPQWQGQLAGLCGNFDLKTINEMRTPENLELTNPQEFGSSWAAVECPDTLDPRDMCVLNPLREPFAKKECSILLSEVFEICHPVVDVTWFYSNCLTDTCGCSQGGDCECFCASVSAYAHQCCQHGVAVDWRTPRLCPYDCDFFNKVLGKGPYQLSSLAAGGALVGMKAVGDDIVLVRTEDVAPADIVSFLLTAALYKAKAHDPDVVSLEAADRPNFFLHVTANGSLELAKWQGRDTFQQHASFLLHRGTRQAGLVALESLAKPSSFLYVSGAVLALRLYEHTEVFRRGTLFRLLDAKPSGAAYPICEWRYDACASPCFQTCRDPRAASCRDVPRVEGCVPVCPTPQVLDEVTQRCVYLEDCVEPAVWVPTEALGNETLPPSQGLPTPSDEEPQLSQESPRTPTHRPALTPAAPLTTALNPPVTATEEPVVSPGPTQTTLQQPLELTASQLPAGPTESPASKGVTASLLAIPHTPESSSLPVALQTPTPGMVSGAMETTRVTVIFAGSPNITVSSRSPPAPRFPLMTKAVTVRGHGSLPVRTTPPQPSLTASPSSRPVASPGAISRSPTSSGSHKAVLTPAVTKVISRTGVPQPTQAQSASSPSTPLTVAGTAAEQVPVSPLATRSLEIVLSTEKGEAGHSQPMGSPASPQPHPLPSAPPRPAQHTTMATRSPALPPETPAAASLSTATDGLAATPFMSLESTRPSQLLSGLPPDTSLPLAKVGTSAPVATPGPKASVITTPLQPQATTLPAQTLSPVLPFTPAAMTQAHPPTHIAPPAAGTAPGLLLGATLPTSGVLPVAEGTASMVSVVPRKSTTGKVAILSKQVSLPTSMYGSAEGGPTELTPATSHPLTPLVAEPEGAQAGTALPVPTSYALSRVSARTAPQDSMLVLLPQLAEAHGTSAGPHLAAEPVDEATTEPSGRSAPALSIVEGLAEALATTTEANTSTTCVPIAEQDCVRHICLEGQLIRVNQSQHCPQGAAPPRCGILGLAVRVGGDRCCPLWECACRCSIFPDLSFVTFDGSHVALFKEAIYILSQSPDEMLTVHVLDCKSANLGHLNWPPFCLVMLNMTHLAHQVTIDRFNRKVTVDLQPVWPPVSRYGFRIEDTGHMYMILTPSDIQIQWLHSSGLMIVEASKTSKAQGHGLCGICDGDAANDLTLKDGSVVGGAEDPAPFLDSWQVPSSLTSVGQTRFRPDSCATTDCSPCLRMVSNRTFSACHRFVPPESFCELWIRDTKYVQQPCVALTVYVAMCHKFHVCIEWRRSDYCPFLCSSDSTYQACVTACEPPKTCQDGILGPLDPEHCQVLGEGCVCSEGTILHRRHSALCIPEAKCACTDSMGVPRALGETWNSSLSGCCQHQCQAPDTIVPVDLGCPSPRPESCLRFGEVALLLPTKDPCCLGTVCVCNQTLCEGLAPTCRPGHRLLTHFQEDSCCPSYSCECDPDLCEAELVPSCRQDQILITGRLGDSCCTSYFCACGDCPDSIPECQEGEALTVHRNTTELCCPLYQCVCENFRCPQVQCGLGTALVEVWSPDRCCPYKSCECDCDTIPVPRCHLWEKSQLDEEFMHSVENVCGCAKYECVKAPVCLSRELGVMQPGQTVVELSADGVCHTSRCTTVLDPLTNFYQINTTSVLCDIHCEANQEYEHPRDLAACCGSCRNVSCLFTFPNGTTSLFLPGASWIADCARHHCSSTPLGAVLVRSPISCPPLNETECAKVGGSVVPSLEGCCRTCKEDGRSCKKVTIRMTIRKNECRSSTPVNLVSCDGRCPSASIYNYNINTYARFCKCCREVGLQRRSVQLFCATNATWVPYTVQEPTDCACQWS

SEQ ID NO: 9877 - protein, 71 aa, Homo sapiens
GEFLTVDLNSTHFCCPQYYCVCEPNLCPMPLLNCAEDMNLVKENVSGQCCPTWHCECNCENLIMPTCEVIS

SEQ ID NO: 9878 - protein, 2344 aa, Homo sapiens
MIPWSIFLLHVLLFSLQEYICASSILMGTSKNGFNENRQKRALLAAQFEATSPRYFFHDAINWGESKIKGSCPYECLNGAFCSKTGTCDCQIFQALGTRCQIIPNMGNGRDGICKTWGQYHFETFDGIYYYFPGNCSYIFAKDCGDLEPRYTVWVHNSPKCLGSVYSCYRSISLFFSNQEEIRIYGHEIKKNGISLTLPQTIGQIFIEKLADYILVKTTFGFSLAWDGISGIYLKLSEDHKGKSCGLCGNYNDIQSDDFIILQEDYTEDIAMFANSWSVQTPDDTKCVLTPSDFPNPCSSGMPAFEAIFFKCQILLQFPFLSCHEYIDPYLYIASCVNDLCKTDDDETYCRAATEYARACSHAGYPIQDWRDDFPACTDKCDDSFVHRDCISCCPPTCTFEKQCLGSNLHCLDGCYCPDGLVMDNGTCISLENCPCGFHGLAYSVGSKIEQECTECVCVGGVWNCTEQDCPVQCSVVGDSHFTTFDGRHYSFIGMCQYILVKGTGKDKFTITLQKAPCEQNLGLVCLQSITLILEDDFNKQVTLGRGGQILTSPNQGFNLNGIVEIQTLSSLFILLKTTFGLKILFAIDGERIYIQLTSAWKRRTLGLCGTFNGNIRDDFLSPSGMIEGTPQLHANAWRVSSTCFAPVHVPVVDPCNINQQNIGYAAHCDVIHQELFAPCHIYISPGLYYQLCRHDACKCGSSCLCNALAHYAYLCGQHGVPIDFRTQISFCAVVCQKGMLYHHCSSFCLHSCISLSSPEQCSDDCAEGCNCPEGKFYEDTLNFCVPIFHCRCHYRGSVYQPGELIPTPSGLCQCSNGTVKCDELATPSAVHICPEGKEYFDCRFPDPELPAGGVNCETTCANLAMNFTCTPSSPCISGCVCAPGMAEHRGKCYVPESCPCIWKDWEYLSGEVIATPCYTCVCRRGMFNCTYYPCPAVCTIYGDRHYYSFDGLEYDYISDCQVFLIKSADDSDISVIAQNKKCFDNDIVCSKSVLISVGDTEIYLNDTPYKQKQSGFFLENKSTYQLWKAGYYIVVYFPEKDITILWDRKTTIHIKVGPQWKNKLSGLCGNFDKCTSNDMTTSNNLEVRNARVFGDSWALGQCESPDETIKPCEAHQNKFPYAKKECSILYSDIFASCRNVIDVTSFAKNCHEDTCNCNLGGDCECLCTSIAAYAYKCCQEGISIHWRSSTVCSLDCEYYNEGLGEGPYMLASYGQSGLVLGANMTSRSVFCLPRSSVHTSLFFYFMITPGLFKEKVSSLALVSLESAERPNYFLYVHDNDTLSLELWEANSAFHRRATFFHHQGLWIPGYSAFELYSKKGFFIIFTDSSVKASKYDDSEEFKHSSSFSIEEIQAAVPYRKMCEWRYEPCATPCFKTCSDPEALACKFLPPVEGCLPYCPKNMILDEVTLKCVYPRDCIPVIPTEPTLMPPAKPTVPMFTVWEMITPSDITVFDMLTPTTGLECEPQKFDPVYDCSQYICLNMEWQLYNWSLNCPKDVEMPDCGFRGRPVQVNSDICCPEWECPCRCSMLSELSIITFDGNNAALYSMASYILVRIPGEIIVAHIEKCSMNQNGNSLKKLAPSGRISGLCFKKLNVTTPIHKIIVNRLARKVEVDSIVVPLPFSSQELSIEDSGSMYVITTPAGLIIKWSHLTGIIDIHFGFRFNLSSYTEGLCGICNEDPDDDLRMQNGTIITNMEDIGLFIESWEIEKSFEVTMRRPVRNCTEHDCSQCIDLLNRRIFIPCHDKVSPEDFCEKMWINYTYFWNYECDALSAYVALCNKFDICIQWRTPDYCSLSCPEGKEYQPCVRPCEARTCLNQWFYGHTSCLNLREDCVCKVGTILHRPHSAQCIPEKECACTDSEDQPRTAGEIWNGGIDECTLYKCLENGSIIPIEPDCDEEPTPVCEREAEVVMGIIDKWTCCSKEVCGCDTTLCETSIPTCTNSQKLIVGHSPLSCCPQYKCECDPLKCPSISTPECREDQFMIQVRQEEPCCFSPFCVCESCTKPVPLCHDGEFLTVDLNSTHFCCPQYYCVCEPNLCPMPLLNCAEDMNLVKENVSGQCCPTWHCECNCENLIMPTCEVGEFTAIDHNFQSDCGCIQYLCEKDDVCVFQEVSVLNPGQSMIKYLEEDFCYAIECLEEKDNHTGFHTLNFTLVNCSKKCDVHQVYTPSPSDYGCCGTCKNVSCKFHMENGTSVVYAVGSTWHYNCTTYECVKTDEGAIILNYTMVCPPFNETECKMNEGIVKLYNEGCCKICKREERICQKVIIKSVIRKQDCMSQSPINVASCDGKCPSATIYNINIESHLRFCKCCRENGVRNLSVPLYCSGNGTEIMYTLQEPIDCTCQWN

SEQ ID NO: 9879 - protein, 2353 aa, Homo sapiens
MNIVRKLNLMIPWSIFLLHVLLFSLQEYICASSILMGTSKNGFNENRQKRALLAAQFEATSPRYFFHDAINWGESKIKGSCPYECLNGAFCSKTGTCDCQIFQALGTRCQIIPNMGNGRDGICKTWGQYHFETFDGIYYYFPGNCSYIFAKDCGDLEPRYTVWVHNSPKCLGSVYSCYRSISLFFSNQEEIRIYGHEIKKNGISLTLPQTIGQIFIEKLADYILVKTTFGFSLAWDGISGIYLKLSEDHKGKSCGLCGNYNDIQSDDFIILQEDYTEDIAMFANSWSVQTPDDTKCVLTPSDFPNPCSSGMPAFEAIFFKCQILLQFPFLSCHEYIDPYLYIASCVNDLCKTDDDETYCRAATEYARACSHAGYPIQDWRDDFPACTDKCDDSFVHRDCISCCPPTCTFEKQCLGSNLHCLDGCYCPDGLVMDNGTCISLENCPCGFHGLAYSVGSKIEQECTECVCVGGVWNCTEQDCPVQCSVVGDSHFTTFDGRHYSFIGMCQYILVKGTGKDKFTITLQKAPCEQNLGLVCLQSITLILEDDFNKQVTLGRGGQILTSPNQGFNLNGIVEIQTLSSLFILLKTTFGLKILFAIDGERIYIQLTSAWKRRTLGLCGTFNGNIRDDFLSPSGMIEGTPQLHANAWRVSSTCFAPVHVPVVDPCNINQQNIGYAAHCDVIHQELFAPCHIYISPGLYYQLCRHDACKCGSSCLCNALAHYAYLCGQHGVPIDFRTQISFCAVVCQKGMLYHHCSSFCLHSCISLSSPEQCSDDCAEGCNCPEGKFYEDTLNFCVPIFHCRCHYRGSVYQPGELIPTPSGLCQCSNGTVKCDELATPSAVHICPEGKEYFDCRFPDPELPAGGVNCETTCANLAMNFTCTPSSPCISGCVCAPGMAEHRGKCYVPESCPCIWKDWEYLSGEVIATPCYTCVCRRGMFNCTYYPCPAVCTIYGDRHYYSFDGLEYDYISDCQVFLIKSADDSDISVIAQNKKCFDNDIVCSKSVLISVGDTEIYLNDTPYKQKQSGFFLENKSTYQLWKAGYYIVVYFPEKDITILWDRKTTIHIKVGPQWKNKLSGLCGNFDKCTSNDMTTSNNLEVRNARVFGDSWALGQCESPDETIKPCEAHQNKFPYAKKECSILYSDIFASCRNVIDVTSFAKNCHEDTCNCNLGGDCECLCTSIAAYAYKCCQEGISIHWRSSTVCSLDCEYYNEGLGEGPYMLASYGQSGLVLGANMTSRSVFCLPRSSVHTSLFFYFMITPGLFKEKVSSLALVSLESAERPNYFLYVHDNDTLSLELWEANSAFHRRATFFHHQGLWIPGYSAFELYSKKGFFIIFTDSSVKASKYDDSEEFKHSSSFSIEEIQAAVPYRKMCEWRYEPCATPCFKTCSDPEALACKFLPPVEGCLPYCPKNMILDEVTLKCVYPRDCIPVIPTEPTLMPPAKPTVPMFTVWEMITPSDITVFDMLTPTTGLECEPQKFDPVYDCSQYICLNMEWQLYNWSLNCPKDVEMPDCGFRGRPVQVNSDICCPEWECPCRCSMLSELSIITFDGNNAALYSMASYILVRIPGEIIVAHIEKCSMNQNGNSLKKLAPSGRISGLCFKKLNVTTPIHKIIVNRLARKVEVDSIVVPLPFSSQELSIEDSGSMYVITTPAGLIIKWSHLTGIIDIHFGFRFNLSSYTEGLCGICNEDPDDDLRMQNGTIITNMEDIGLFIESWEIEKSFEVTMRRPVRNCTEHDCSQCIDLLNRRIFIPCHDKVSPEDFCEKMWINYTYFWNYECDALSAYVALCNKFDICIQWRTPDYCSLSCPEGKEYQPCVRPCEARTCLNQWFYGHTSCLNLREDCVCKVGTILHRPHSAQCIPEKECACTDSEDQPRTAGEIWNGGIDECTLYKCLENGSIIPIEPDCDEEPTPVCEREAEVVMGIIDKWTCCSKEVCGCDTTLCETSIPTCTNSQKLIVGHSPLSCCPQYKCECDPLKCPSISTPECREDQFMIQVRQEEPCCFSPFCVCESCTKPVPLCHDGEFLTVDLNSTHFCCPQYYCVCEPNLCPMPLLNCAEDMNLVKENVSGQCCPTWHCECNCENLIMPTCEVGEFTAIDHNFQSDCGCIQYLCEKDDVCVFQEVSVLNPGQSMIKYLEEDFCYAIECLEEKDNHTGFHTLNFTLVNCSKKCDVHQVYTPSPSDYGCCGTCKNVSCKFHMENGTSVVYAVGSTWHYNCTTYECVKTDEGAIILNYTMVCPPFNETECKMNEGIVKLYNEGCCKICKREERICQKVIIKSVIRKQDCMSQSPINVASCDGKCPSATIYNINIESHLRFCKCCRENGVRNLSVPLYCSGNGTEIMYTLQEPIDCTCQWN

SEQ ID NO: 9880 - protein, 2308 aa, Homo sapiens
MNIVRKLNLMIPWSIFLLHVLLFSLQEYICASSILMGTSKNGFNENRQKRALLAAQFEATSPRYFFHDAINWGESKIKGSCPYECLNGAFCSKTGTCDCQIFQALGTRCQIIPNMGNGRDGICKTWGQYHFETFDGIYYYFPGNCSYIFAKDCGDLEPRYTVWVHNSPKCLGSVYSCYRSISLFFSNQEEIRIYGHEIKKNGISLTLPQTIGQIFIEKLADYILVKTTFGFSLAWDGISGIYLKLSEDHKGKSCGLCGNYNDIQSDDFIILQEDYTEDIAMFANSWSVQTPDDTKCVLTPSDFPNPCSSGMPAFEAIFFKCQILLQFPFLSCHEYIDPYLYIASCVNDLCKTDDDETYCRAATEYARACSHAGYPIQDWRDDFPACTDKCDDSFVHRDCISCCPPTCTFEKQCLGSNLHCLDGCYCPDGLVMDNGTCISLENCPCGFHGLAYSVGSKIEQECTECVCVGGVWNCTEQDCPVQCSVVGDSHFTTFDGRHYSFIGMCQYILVKGTGKDKFTITLQKAPCEQNLGLVCLQSITLILEDDFNKQVTLGRGGQILTSPNQGFNLNGIVEIQTLSSLFILLKTTFGLKILFAIDGERIYIQLTSAWKRRTLGLCGTFNGNIRDDFLSPSGMIEGTPQLHANAWRVSSTCFAPVHVPVVDPCNINQQNIGYAAHCDVIHQELFAPCHIYISPGLYYQLCRHDACKCGSSCLCNALAHYAYLCGQHGVPIDFRTQISFCAVVCQKGMLYHHCSSFCLHSCISLSSPEQCSDDCAEGCNCPEGKFYEDTLNFCVPIFHCRCHYRGSVYQPGELIPTPSGLCQCSNGTVKCDELATPSAVHICPEGKEYFDCRFPDPELPAGGVNCETTCANLAMNFTCTPSSPCISGCVCAPGMAEHRGKCYVPESCPCIWKDWEYLSGEVIATPCYTCVCRRGMFNCTYYPCPAVCTIYGDRHYYSFDGLEYDYISDCQVFLIKKQSGFFLENKSTYQLWKAGYYIVVYFPEKDITILWDRKTTIHIKVGPQWKNKLSGLCGNFDKCTSNDMTTSNNLEVRNARVFGDSWALGQCESPDETIKPCEAHQNKFPYAKKECSILYSDIFASCRNVIDVTSFAKNCHEDTCNCNLGGDCECLCTSIAAYAYKCCQEGISIHWRSSTVCSLDCEYYNEGLGEGPYMLASYGQSGLVLGANMTSRSVFCLPRSSVHTSLFFYFMITPGLFKEKVSSLALVSLESAERPNYFLYVHDNDTLSLELWEANSAFHRRATFFHHQGLWIPGYSAFELYSKKGFFIIFTDSSVKASKYDDSEEFKHSSSFSIEEIQAAVPYRKMCEWRYEPCATPCFKTCSDPEALACKFLPPVEGCLPYCPKNMILDEVTLKCVYPRDCIPVIPTEPTLMPPAKPTVPMFTVWEMITPSDITVFDMLTPTTGLECEPQKFDPVYDCSQYICLNMEWQLYNWSLNCPKDVEMPDCGFRGRPVQVNSDICCPEWECPCRCSMLSELSIITFDGNNAALYSMASYILVRIPGEIIVAHIEKCSMNQNGNSLKKLAPSGRISGLCFKKLNVTTPIHKIIVNRLARKVEVDSIVVPLPFSSQELSIEDSGSMYVITTPAGLIIKWSHLTGIIDIHFGFRFNLSSYTEGLCGICNEDPDDDLRMQNGTIITNMEDIGLFIESWEIEKSFEVTMRRPVRNCTEHDCSQCIDLLNRRIFIPCHDKVSPEDFCEKMWINYTYFWNYECDALSAYVALCNKFDICIQWRTPDYCSLSCPEGKEYQPCVRPCEARTCLNQWFYGHTSCLNLREDCVCKVGTILHRPHSAQCIPEKECACTDSEDQPRTAGEIWNGGIDECTLYKCLENGSIIPIEPDCDEEPTPVCEREAEVVMGIIDKWTCCSKEVCGCDTTLCETSIPTCTNSQKLIVGHSPLSCCPQYKCECDPLKCPSISTPECREDQFMIQVRQEEPCCFSPFCVCESCTKPVPLCHDGEFLTVDLNSTHFCCPQYYCVCEPNLCPMPLLNCAEDMNLVKENVSGQCCPTWHCECNCENLIMPTCEVGEFTAIDHNFQSDCGCIQYLCEKDDVCVFQEVSVLNPGQSMIKYLEEDFCYAIECLEEKDNHTGFHTLNFTLVNCSKKCDVHQVYTPSPSDYGCCGTCKNVSCKFHMENGTSVVYAVGSTWHYNCTTYECVKTDEGAIILNYTMVCPPFNETECKMNEGIVKLYNEGCCKICKREERICQKVIIKSVIRKQDCMSQSPINVASCDGKCPSATIYNINIESHLRFCKCCRENGVRNLSVPLYCSGNGTEIMYTLQEPIDCTCQWN

SEQ ID NO: 9881 - protein, 101 aa, Homo sapiens
NFTLVNCSKKCDVHQVYTPSPSDYGCCGTCKNVSCKFHMENGTSVVYAVGSTWHYNCTTYECVKTDEGAIILNYTMVCPPFNETECKMVCTLLYLRKFIII

SEQ ID NO: 9882 - protein, 752 aa, Homo sapiens
  VARIANT 1: note = misc_feature - Xaa can be any naturally occurring amino acid
XEIIVAHIEKCSMNQNGNSLKKLAPSGRISGLCFKKLNVTTPIHKIIVNRLARKVEVDSIVVPLPFSSQELSIEDSGSMYVITTPAGLIIKWSHLTGIIDIHFGFRFNLSSYTEGLCGICNEDPDDDLRMQNGTIITNMEDIGLFIESWEIEKSFEVTMRRPVRNCTEHDCSQCIDLLNRRIFIPCHDKVSPEDFCEKMWINYTYFWNYECDALSAYVALCNKFDICIQWRTPDYCSLSCPEGKEYQPCVRPCEARTCLNQWFYGHTSCLNLREDCVCKVGTILHRPHSAQCIPEKECACTDSEDQPRTAGEIWNGGIDECTLYKCLENGSIIPIEPDCDEEPTPVCEREAEVVMGIIDKWTCCSKEVCGCDTTLCETSIPTCTNSQKLIVGHSPLSCCPQYKCECDPLKCPSISTPECREDQFMIQVRQEEPCCFSPFCVCESCTKPVPLCHDGEFLTVDLNSTHFCCPQYYCVCEPNLCPMPLLNCAEDMNLVKENVSGQCCPTWHCEKDDVCVFQEVSVLNPGQSMIKYLEEDFCYAIECLEEKDNHTGFHTLNFTLVNCSKKCDVHQVYTPSPSDYGCCGTCKNVSCKFHMENGTSVVYAVGSTWHYNCTTYECVKTDEGAIILNYTMVCPPFNETECKMNEGIVKLYNEGCCKICKREERICQKVIIKSVIRKQDCMSQSPINVASCDGKCPSATIYNINIESHLRFCKCCRENGVRNLSVPLYCSGNGTEIMYTLQEPIDCTCQWN

SEQ ID NO: 9883 - protein, 166 aa, Homo sapiens
  VARIANT 1: note = misc_feature - Xaa can be any naturally occurring amino acid
XHSPLSCCPQYKCECDPLKCPSISTPECREDQFMIQVRQEEPCCFSPFCVCESCTKPVPLCHDGEFLTVDLNSTHFCCPQYYCVCEPNLCPMPLLNCAEDMNLVKENVSGQCCPTWHCECNCENLIMPTCEVQPCADADIRTLGCLGRADQEHFHEAKFLRENLLQ

SEQ ID NO: 9884 - protein, 477 aa, Homo sapiens
MWMFSWLCAILIILAIAGMNTIAKTTPHTKFTKKSEEREMPKGLKPSSGPPPEEEETLFTEMAEMAEPITKPSALDSVFGTATLSPFENFTLDPADFFLNCCDCCSPVPGQKGEPGETGQPGPKGEAGNLGIPGPPGVVGPQGPRGYKGEKGLKGERGDQGVPGYPGKPGAQGEPGPKGDKGNIGLGGVKGQKGSKGDTCGNCTKGEKGDQGAMGSPGLHGGPGAKGEKGEMGEKGEMGDKGCCGDSGERGGKGQKGEGGMKGEKGSKGDSGMEGKSGRNGLPGAKGDPGIKGEKGELGPPGLLGPTGPKGDIGNKGVRGPTGKKGSRGFKGSKGELARVPRSAFSAGLSKPFPPPNIPIKFEKILYNDQGNYSPVTGKFNCSIPGTYVFSYHITVRGRPARISLVAQNKKQFKSRETLYGQEIDQASLLVILKLSAGDQVWLEVSKDWNGVYVSAEDDSIFTGFLLYPEETSGISP

SEQ ID NO: 9885 - protein, 128 aa, Homo sapiens
MARILLLFLPGLVAVCAVHGIFMDRLASKKLCADDECVYTISLASAQEDYNAPDCRFINVKKGQQIYVYSKLVKENGAGEFWAGSVYGDGQDEMGVVGYFPRNLVKEQRVYQEATKEVPTTDIDFFCE

SEQ ID NO: 9886 - protein, 89 aa, Homo sapiens
MQACMVPGLALCLLLGPLAGAKPVQEEGDPYAELPAMPYWPFSTSDFWNYVQHFQALGAYPQIEDMARTFFAHFPLGSTLGFHVPYQED

SEQ ID NO: 9887 - protein, 89 aa, Homo sapiens; identical to SEQ ID NO: 9886

SEQ ID NO: 9888 - protein, 1134 aa, Homo sapiens
MGLLASAGLLLLLVIGHPRSLGLKCGIRMVNMKSKEPAVGSRFFSRISSWRNSTVTGHPWQVSLKSDEHHFCGGSLIQEDRVVTAAHCLDSLSEKQLKNITVTSGEYSLFQKDKQEQNIPVSKIITHPEYNSREYMSPDIALLYLKHKVKFGNAVQPICLPDSDDKVEPGILCLSSGWGKISKTSEYSNVLQEMELPIMDDRACNTVLKSMNLPPLGRTMLCAGFPDWGMDACQGDSGGPLVCRRGGGIWILAGITSWVAGCAGGSVPVRNNHVKASLGIFSKVSELMDFITQNLFTGLDRGQPLSKVGSRYITKALSSVQEVNGSQRGKGILDMEKQVGCDHDYVSLRSSSGVLFNQRSLMEDDGKQNKRVCGKILPSPLLAETSEAMVPFVSDTEDSGSGFELTVTAVQKSEAGSGCGSLAILVEEGTNHSAKYPDLYPSNTRCHWFICAPEKHIIKLTFEDFAVKFSPNCIYDAVVIYGDSEEKHKLAKLCGMLTITSIFSSSNMTVIYFKSDGKNRLQGFKARFTILPSESLNKFEPKLPPQNNPVSTVKAILHDVCGIPPFSPQWLSRRIAGGEEACPHCWPWQVGLRFLGDYQCGGAIINPVWILTAAHCVQLKNNPLSWTIIAGDHDRNLKESTEQVRRAKHIIVHEDFNTLSYDSDIALIQLSSPLEYNSVVRPVCLPHSAEPLFSSEICAVTGWGSISADGGLASRLQQIQVHVLEREVCEHTYYSAHPGGITEKMICAGFAASGEKDFCQGDSGGPLVCRHENGPFVLYGIVSWGAGCVQPWKPGVFARVMIFLDWIQSKINGPASLQTNNKCKTLKQQLPPPTPSPDSASWPGCCSEAELEKPRGFFPTPRYLLDYRGRLECSWVLRVSASSMAKFTIEYLSLLGSPVCQDSVLIIYEERHSKRKTAGGLHGRRLYSMTFMSPGPLVRVTFHALVRGAFGISYIVLKVLGPKDSKITRLSQSSNREHLVPCEDVLLTKPEGIMQIPRNSHRTTMGCQWRLVAPLNHIIQLNIINFPMKPTTFVCHGHLRVYEGFGPGKKLIASFAGTLAMILTKDILKREKLNFINTYIMHIWENSVYDNVRSVGKRKQKKFASNLSYSMEAEKSRIQVPADLVPAKGSLSGS

SEQ ID NO: 9889 - protein, 80 aa, Homo sapiens
REHLVPCEDVLLTKPEGIMQIPRNSHRTTMGCQWRLVAPLNHIIQLNIINFPMKPTTFVCHGHLRVYEGFGPGKKLIGEC

SEQ ID NO: 9890 - protein, 121 aa, Homo sapiens
  VARIANT 1: note = misc_feature - Xaa can be any naturally occurring amino acid
XKITRLSQSSNREHLVPCEDVLLTKPEGIMQIPRNSHRTTMGCQWRLVAPLNHIIQLNIINFPMKPTTFVCHGHLRVYEGFGPGKKLIAHLHGSKKEFILISSAAYLTVHFKTDESERKRF

SEQ ID NO: 9891 - protein, 565 aa, Homo sapiens
MLISRNKLILLLGIVFFERGKSATLSLPKAPSCGQSLVKVQPWNYFNIFSRILGGSQVEKGSYPWQVSLKQRQKHICGGSIVSPQWVITAAHCIANRNIVSTLNVTAGEYDLSQTDPGEQTLTIETVIIHPHFSTKKPMDYDIALLKMAGAFQFGHFVGPICLPELREQFEAGFICTTAGWGRLTEGGVLSQVLQEVNLPILTWEECVAALLTLKRPISGKTFLCTGFPDGGRDACQGDSGGSLMCRNKKGAWTLAGVTSWGLGCGRGWRNNVRKSDQGSPGIFTDISKVLPWIHEHIQTGNRRKSSRAWCSEQDVIVSGAEGKLHFPESLHLYYESKQRCVWTLLVPEEMHVLLSFSHLDVESCHHSYLSMYSLEDRPIGKFCGESLPSSILIGSNSLRLKFVSDATDNAAGFNLTYKALKPNYIPDSGCSYLTVLFEEGLIQSLNYPENYSDKANCDWIFQASKHHLIKLSFQSLEIEESGDCTSDYVTVHSDVERKKEIARLCGYDVPTPVLSPSSIMLISFQSDENGTCRGFQATVSFIPKAVYPDLNISISEDESMFLET

SEQ ID NO: 9892 - protein, 565 aa, Homo sapiens; identical to SEQ ID NO: 9891

SEQ ID NO: 9893 - protein, 678 aa, Homo sapiens
MWKLLLWVGLVLVLKHHDGAAHKLVCYFTNWAHSRPGPASILPHDLDPFLCTHLIFAFASMNNNQIVAKDLQDEKILYPEFNKLKERNRELKTLLSIGGWNFGTSRFTTMLSTFANREKFIASVISLLRTHDFDGLDLFFLYPGLRGSPMHDRWTFLFLIEELLFAFRKEALLTMRPRLLLSAAVSGVPHIVQTSYDVRFLGRLLDFINVLSYDLHGSWERFTGHNSPLFSLPEDPKSSAYAMNYWRKLGAPSEKLIMGIPTYGRTFRLLKASKNGLQARAIGPASPGKYTKQEGFLAYFEICSFVWGAKKHWIDYQYVPYANKGKEWVGYDNAISFSYKAWFIRREHFGGAMVWTLDMDDVRGTFCGTGPFPLVYVLNDILVRAEFSSTSLPQFWLSSAVNSSSTDPERLAVTTAWTTDSKILPPGGEAGVTEIHGKCENMTITPRGTTVTPTKETVSLGKHTVALGEKTEITGAMTMTSVGHQSMTPGEKALTPVGHQSVTTGQKTLTSVGYQSVTPGEKTLTPVGHQSVTPVSHQSVSPGGTTMTPVHFQTETLRQNTVAPRRKAVAREKVTVPSRNISVTPEGQTMPLRGENLTSEVGTHPRMGNLGLQMEAENRMMLSSSPVIQLPEQTPLAFDNRFVPIYGNHSSVNSVTPQTSPLSLKKEIPENSAVDEEA

SEQ ID NO: 9894 - protein, 520 aa, Homo sapiens
MAALKLLSSGLRLCASARGSGATWYKGCVCSFSTSAHRHTKFYTDPVEAVKDIPDGATVLVGGFGLCGIPENLIDALLKTGVKGLTAVSNNAGVDNFGLGLLLRSKQIKRMVSSYVGENAEFERQYLSGELEVELTPQGTLAERIRAGGAGVPAFYTPTGYGTLVQEGGSPIKYNKDGSVAIASKPREVREFNGQHFILEEAITGDFALVKAWKADRAGNVIFRKSARNFNLPMCKAAETTVVEVEEIVDIGAFAPEDIHIPQIYVHRLIKGEKYEKRIERLSIRKEGDGEAKSAKPGDDVRERIIKRAALEFEDGMYANLGIGIPLLASNFISPNITVHLQSENGVLGLGPYPRQHEADADLINAGKETVTILPGASFFSSDESFAMIRGGHVDLTMLGAMQVSKYGDLANWMIPGKMVKGMGGAMDLVSSAKTKVVVTMEHSAKGNAHKIMEKCTLPLTGKQCVNRIITEKAVFDVDKKKGLTLIELWEGLTVDDVQKSTGCDFAVSPKLMPMQQIAN

SEQ ID NO: 9895 - protein, 123 aa, Homo sapiens
MLGAMQVSKYGDLANWMIPGKMVKGMGGAMDLVSSAKTKVVVTMEHSAKGNAHKIMEKCTLPLTGKQCVNRIITEKAVFDVDKKKGLTLIELWEGLTVDDVQKSTGCDFAVSPKLMPMQQIAN

SEQ ID NO: 9896 - protein, 123 aa, Homo sapiens; identical to SEQ ID NO: 9895

SEQ ID NO: 9897 - protein, 334 aa, Homo sapiens
MMVREFNGQHFILEEAITGDFALVKAWKADRAGNVIFRKSARNFNLPMCKAAETTVVEVEEIVDIGAFAPEDIHIPQIYVHRLIKGEKYEKRIERLSIRKEGDGEAKSAKPGDDVRERIIKRAALEFEDGMYANLGIGIPLLASNFISPNITVHLQSENGVLGLGPYPRQHEADADLINAGKETVTILPGASFFSSDESFAMIRGGHVDLTMLGAMQVSKYGDLANWMIPGKMVKGMGGAMDLVSSAKTKVVVTMEHSAKGNAHKIMEKCTLPLTGKQCVNRIITEKAVFDVDKKKGLTLIELWEGLTVDDVQKSTGCDFAVSPKLMPMQQIAN

SEQ ID NO: 9898 - protein, 517 aa, Homo sapiens
MAALRLLASVLGRGVPAGGSGLALSQGCARCFATSPRLRAKFYADPVEMVKDISDGATVMIGGFGLCGIPENLIAALLRTRVKDLQVVSSNVGVEDFGLGLLLAARQVRRIVCSYVGENTLCESQYLAGELELELTPQGTLAERIRAGGAGVPAFYTPTGYGTLVQEGGAPIRYTPDGHLALMSQPREVREFNGDHFLLERAIRADFALVKGWKADRAGNVVFRRSARNFNVPMCKAADVTAVEVEEIVEVGAFPPEDIHVPNIYVDRVIKGQKYEKRIERLTILKEEDGDAGKEEDARTRIIRRAALEFEDGMYANLGIGIPLLASNFISPSMTVHLHSENGILGLGPFPTEDEVDADLINAGKQTVTVLPGGCFFASDDSFAMIRGGHIQLTMLGAMQVSKYGDLANWMIPGKKVKGMGGAMDLVSSQKTRVVVTMQHCTKDNTPKIMEKCTMPLTGKRCVDRIITEKAVFDVHRKKELTLRELWEGLTVDDIKKSTGCAFAVSPNLRPMQQVAP

SEQ ID NO: 9899 - protein, 56 aa, Homo sapiens
MACAAVMIPGLLRCSVGAIRIEAASLRLTLSTLRHLTLTRLCQQLRCVELPVSHRQ

SEQ ID NO: 9900 - protein, 312 aa, Homo sapiens
MACAAVMIPGLLRCSVGAIRIEAASLRLTLSTLRHLTLTSIMKSKRKTDHMERTASVLRREIVSAAKVCGAASESPSVKSLRLLVADQDFSFKAGQWVDFFIPGVSVVGGFSICSSPRLLEQERVIELAVKYTNHPPALWVHNTCTLDCEVAVRVGGEFFFDPQPADASRNLVLIAGGVGINPLLSILRHAADLLREQANKRNGYEIGTIKLFYSAKNTSELLFKKNILDLVNEFPEKIACSLHVTKQTTQINAELKPYITEGRITEKEIRDHISKETLFYICGPPPMTDFFSKQLENNHVPKEHICFEKWW

SEQ ID NO: 9901 - protein, 312 aa, Homo sapiens; identical to SEQ ID NO: 9900

SEQ ID NO: 9902 - protein, 311 aa, Homo sapiens
MACAAVMIPGLLRCSVGAIRIEAASLRLTLSTLRHLTLTSIMKSKRKTDHMERTASVLRREIVSAAKVCGAASESPSVKSLRLLVADQDFSFKAGQWVDFFIPGVSVVGGFSICSSPRLLEQERVIELAVKYTNHPPALWVHNTCTLDCEVAVRVGGEFFFDPQPADASRNLVLIAGGVGINPLLSILRHAADLLREQANKRNGYEIGTIKLFYSAKNTSELLFKKNILDLVNEFPEKIACSLHVTKQTTQINAELKPYITGRITEKEIRDHISKETLFYICGPPPMTDFFSKQLENNHVPKEHICFEKWW

SEQ ID NO: 9903 - protein, 71 aa, Homo sapiens
MACAAVMIPGLLRCSVGAIRIEAASLRLTLSTLRHLTLTSIMKSKRKTDHMERTASVLRRESNLFHQGRKH

SEQ ID NO: 9904 - protein, 330 aa, Homo sapiens
MTPKISWTSKFSVCPESAMACAAVMIPGLLRCSVGAIRIEAASLRLTLSTLRHLTLTSIMKSKRKTDHMERTASVLRREIVSAAKVCGAASESPSVKSLRLLVADQDFSFKAGQWVDFFIPGVSVVGGFSICSSPRLLEQERVIELAVKYTNHPPALWVHNTCTLDCEVAVRVGGEFFFDPQPADASRNLVLIAGGVGINPLLSILRHAADLLREQANKRNGYEIGTIKLFYSAKNTSELLFKKNILDLVNEFPEKIACSLHVTKQTTQINAELKPYITEGRITEKEIRDHISKETLFYICGPPPMTDFFSKQLENNHVPKEHICFEKWW

SEQ ID NO: 9905 - protein, 330 aa, Homo sapiens; identical to SEQ ID NO: 9904

SEQ ID NO: 9906 - protein, 125 aa, Homo sapiens
MAGPSLACCLLGLLALTSACYIQNCPLGGKRAAPDLDVRKCLPCGPGGKGRCFGPNICCAEELGCFVGTAEALRCQEENYLPSPCQSGQKACGSGGRCAVLGLCCSPDGCHADPACDAEATFSQR

SEQ ID NO: 9907 - protein, 207 aa, Homo sapiens
MAVRALKLLTTLLAVVAAASQAEVESEAGWGMVTPDLLFAEGTAAYARGDWPGVVLSMERALRSRAALRALRLRCRTQCAADFPWELDPDWSPSPAQASGAAALRDLSFFGGLLRRAACLRRCLGPPAAHSLSEEMELEFRKRSPYNYLQVAYFKDLETQPHMQEFRLGVRLYSEEQPQEAVPHLEAALQEYFVAYEECRALCEGPY

SEQ ID NO: 9908 - protein, 804 aa, Homo sapiens
MAVRALKLLTTLLAVVAAASQAEVESEAGWGMVTPDLLFAEGTAAYARGDWPGVVLSMERALRSRAALRALRLRCRTQCAADFPWELDPDWSPSPAQASGAAALRDLSFFGGLLRRAACLRRCLGPPAAHSLSEEMELEFRKRSPYNYLQVAYFKINKLEKAVAAAHTFFVGNPEHMEMQQNLDYYQTMSGVKEADFKDLETQPHMQEFRLGVRLYSEEQPQEAVPHLEAALQEYFVAYEECRALCEGPYDYDGYNYLEYNADLFQAITDHYIQVLNCKQNCVTELASHPSREKPFEDFLPSHYNYLQFAYYNIGNYTQAVECAKTYLLFFPNDEVMNQNLAYYAAMLGEEHTRSIGPRESAKEYRQRSLLEKELLFFAYDVFGIPFVDPDSWTPEEVIPKRLQEKQKSERETAVRISQEIGNLMKEIETLVEEKTKESLDVSRLTREGGPLLYEGISLTMNSKLLNGSQRVVMDGVISDHECQELQRLTNVAATSGDGYRGQTSPHTPNEKFYGVTVFKALKLGQEGKVPLQSAHLYYNVTEKVRRIMESYFRLDTPLYFSYSHLVCRTAIEEVQAERKDDSHPVHVDNCILNAETLVCVKEPPAYTFRDYSAILYLNGDFDGGNFYFTELDAKTVTAEVQPQCGRAVGFSSGTENPHGVKAVTRGQRCAIALWFTLDPRHSERVRAARAGESSWCCGDPFPERPWFAFLFPKSHCQWLRHERSTWDTSSNALSLWSHCLVLPGPAVNGIQVGKEVKTGSDAEFLVPSLGPTSAVLFQRVGPAGKEMSLGPLRNLPCPLGSSS

SEQ ID NO: 9909 - protein, 736 aa, Homo sapiens
MAVRALKLLTTLLAVVAAASQAEVESEAGWGMVTPDLLFAEGTAAYARGDWPGVVLSMERALRSRAALRALRLRCRTQCAADFPWELDPDWSPSPAQASGAAALRDLSFFGGLLRRAACLRRCLGPPAAHSLSEEMELEFRKRSPYNYLQVAYFKINKLEKAVAAAHTFFVGNPEHMEMQQNLDYYQTMSGVKEADFKDLETQPHMQEFRLGVRLYSEEQPQEAVPHLEAALQEYFVAYEECRALCEGPYDYDGYNYLEYNADLFQAITDHYIQVLNCKQNCVTELASHPSREKPFEDFLPSHYNYLQFAYYNIGNYTQAVECAKTYLLFFPNDEVMNQNLAYYAAMLGEEHTRSIGPRESAKEYRQRSLLEKELLFFAYDVFGIPFVDPDSWTPEEVIPKRLQEKQKSERETAVRISQEIGNLMKEIETLVEEKTKESLDVSRLTREGGPLLYEGISLTMNSKLLNGSQRVVMDGVISDHECQELQRLTNVAATSGDGYRGQTSPHTPNEKFYGVTVFKALKLGQEGKVPLQSAHLYYNVTEKVRRIMESYFRLDTPLYFSYSHLVCRTAIEEVQAERKDDSHPVHVDNCILNAETLVCVKEPPAYTFRDYSAILYLNGDFDGGNFYFTELDAKTVTAEVQPQCGRAVGFSSGTENPHGVKAVTRGQRCAIALWFTLDPRHSERDRVQADDLVKMLFSPEEMDLSQEQPLDAQQGPPEPAQESLSGSESKPKDEL

SEQ ID NO: 9910 - protein, 697 aa, Homo sapiens
MAVRALKLLTTLLAVVAAASQAEVESEAGWGMVTPDLLFAEGTAAYARGDWPGVVLSMERALRSRAALRALRLRCRTQCAADFPWELDPDWSPSPAQASGAAALRDLSFFGGLLRRAACLRRCLGPPAAHSLSEEMELEFRKRSPYNYLQVAYFKINKLEKAVAAAHTFFVGNPEHMEMQQNLDYYQTMSGVKEADFKDLETQPHMQEFRLGVRLYSEEQPQEAVPHLEAALQEYFVAYEECRALCEGPYDYDGYNYLEYNADLFQAITDHYIQVLNCKQNCVTELASHPSREKPFEDFLPSHYNYLQFAYYNIGNYTQAVECAKTYLLFFPNDEVMNQNLAYYAAMLGEEHTRSIGPRESAKEYRQRSLLEKELLFFAYDVFGIPFVDPDSWTPEEVIPKRLQEKQKSERETAVRISQEIGNLMKEIETLVEEKTKESLDVSRLTREGGPLLYEGISLTMNSKLLNGSQRVVMDGVISDHECQELQRLTNVAATSGDGYRGQTSPHTPNEKFYGVTVFKALKLGQEGKVPLQSAHLYYNVTEKVRRIMESYFRLDTPLYFSYSHLVCRTAIEEVQAERKDDSHPVHVDNCILNAETLVCVKEPPAYTFRDYSAILYLNGDFDGGNFYFTELDAKTVTAEVQPQCGRAVGFSSGTENPHGVKAVTRGQRCAIALWFTLDPRHSERVRAARAGQGAGR

SEQ ID NO: 9911 - protein, 222 aa, Homo sapiens
  VARIANT 1: note = misc_feature - Xaa can be any naturally occurring amino acid
XTPEEVIPKRLQEKQKSERETAVRISQEIGNLMKEIETLVEEKTKESLDVSRLTREGGPLLYEGISLTMNSKLLNGSQRVVMDGVISDHECQELQRLTNVAATSGDGYRGQTSPHTPNEKFYGVTVFKALKFHVAGEASQSWWKAKRSKSHLTWMAAGKERTSAAGARRQSSSAECPPVLQRDGEGAAHHGVLLPPGYAPLLFLLSSGVPHCHRRGPGREEG

SEQ ID NO: 9912 - protein, 134 aa, Homo sapiens
MEMQQNIENYRATAGVEALQLVDREAKPHMESYNAGVKHYEADDFEMAIRHFEQALREYFVEDTECRTLCEGPQRFEEYEYLGYKAGLYEAIADHYMQVLVCQHECVRELATRPGRLSPIENFLPLHYDYLQFA

SEQ ID NO: 9913 - protein, 137 aa, Homo sapiens
MEMQQNIENYRATAGVEALQLVDREAKPHMESYNAGVKHYEADDFEMAIRHFEQALREYFVEDTECRTLCEGPQRFEEYEYLGYKAGLYEAIADHYMQVLVCQHECVRELATRPGRLSPIENFLPLHYDYLQFAYYR

SEQ ID NO: 9914 - protein, 527 aa, Homo sapiens
MEMQQNIENYRATAGVEALQLVDREAKPHMESYNAGVKHYEADDFEMAIRHFEQALREYFVEDTECRTLCEGPQRFEEYEYLGYKAGLYEAIADHYMQVLVCQHECVRELATRPGRLSPIENFLPLHYDYLQFAYYRVGEYVKALECAKAYLLCHPDDEDVLDNVDYYESLLDDSIDPASIEAREDLTMFVKRHKLESELIKSAAEGLGFSYTEPNYWIRYGGRQDENRVPSGVNVEGAEVHGFSMGKKLSPKIDRDLREGGPLLYENITFVYNSEQLNGTQRVLLDNVLSEEQCRELHSVASGIMLVGDGYRGKTSPHTPNEKFEGATVLKALKSGYEGRVPLKSARLFYDISEKARRIVESYFMLNSTLYFSYTHMVCRTALSGQQDRRNDLSHPIHADNCLLDPEANECWKEPPAYTFRDYSALLYMNDDFEGGEFIFTEMDAKTVTASIKPKCGRMISFSSGGENPHGVKAVTKGKRCAVALWFTLDPLYRELERIQADEVIAILDQEQQGKHELNINPKDEL

SEQ ID NO: 9915 - protein, 708 aa, Homo sapiens
MRERIWAPPLLLLLPLLLPPPLWGGPPDSPRRELELEPGPLQPFDLLYASGAAAYYSGDYERAVRDLEAALRSHRRLREIRTRCARHCAARHPLPPPPPGEGPGAELPLFRSLLGRARCYRSCETQRLGGPASRHRVSEDVRSDFQRRVPYNYLQRAYIKLNQLEKAVEAAHTFFVANPEHMEMQQNIENYRATAGVEALQLVDREAKPHMESYNAGVKHYEADDFEMAIRHFEQALREYFVEDTECRTLCEGPQRFEEYEYLGYKAGLYEAIADHYMQVLVCQHECVRELATRPGRLSPIENFLPLHYDYLQFAYYRVGEYVKALECAKAYLLCHPDDEDVLDNVDYYESLLDDSIDPASIEAREDLTMFVKRHKLESELIKSAAEGLGFSYTEPNYWIRYGGRQDENRVPSGVNVEGAEVHGFSMGKKLSPKIDRDLREGGPLLYENITFVYNSEQLNGTQRVLLDNVLSEEQCRELHSVASGIMLVGDGYRGKTSPHTPNEKFEGATVLKALKSGYEGRVPLKSARLFYDISEKARRIVESYFMLNSTLYFSYTHMVCRTALSGQQDRRNDLSHPIHADNCLLDPEANECWKEPPAYTFRDYSALLYMNDDFEGGEFIFTEMDAKTVTASIKPKCGRMISFSSGGENPHGVKAVTKGKRCAVALWFTLDPLYRELERIQADEVIAILDQEQQGKHELNINPKDEL

SEQ ID NO: 9916 - protein, 736 aa, Homo sapiens
MLRLLRPLLLLLLLPPPGSPEPPGLTQLSPGAPPQAPDLLYADGLRAYAAGAWAPAVALLREALRSQAALGRVRLDCGASCAADPGAALPAVLLGAPEPDSGPGPTQGSWERQLLRAALRRADCLTQCAARRLGPGGAARLRVGSALRDAFRRREPYNYLQRAYYQLKKLDLAAAAAHTFFVANPMHLQMREDMAKYRRMSGVRPQSFRDLETPPHWAAYDTGLELLGRQEAGLALPRLEEALQGSLAQMESCRADCEGPEEQQGAEEEEDGAASQGGLYEAIAGHWIQVLQCRQRCVGETATRPGRSFPVPDFLPNQLRRLHEAHAQVGNLSQAIENVLSVLLFYPEDEAAKRALNQYQAQLGEPRPGLGPREDIQRFILRSLGEKRQLYYAMEHLGTSFKDPDPWTPAALIPEALREKLREDQEKRPWDHEPVKPKPLTYWKDVLLLEGVTLTQDSRQLNGSERAVLDGLLTPAECGVLLQLAKDAAGAGARSGYRGRRSPHTPHERFEGLTVLKAAQLARAGTVGSQGAKLLLEVSERVRTLTQAYFSPERPLHLSFTHLVCRSAIEGEQEQRMDLSHPVHADNCVLDPDTGECWREPPAYTYRDYSGLLYLNDDFQGGDLFFTEPNALTVTARVRPRCGRLVAFSSGVENPHGVWAVTRGRRCALALWHTWAPEHREQEWIEAKELLQESQEEEEEEEEEMPSKDPSPEPPSRRHQRVQDKTGRAPRVREEL

SEQ ID NO: 9917 - protein, 85 aa, Homo sapiens
MARVAWGLLWLLLGSAGAQYEKYSFRGFPPEDLMPLAAAYGHALEQYEGESWRESARYLEAALRLHRLLRDSEAFCHANCSGPAP

SEQ ID NO: 9918 - protein, 437 aa, Homo sapiens
MARVAWGLLWLLLGSAGAQYEKYSFRGFPPEDLMPLAAAYGHALEQYEGESWRESARYLEAALRLHRLLRDSEAFCHANCSGPAPAAKPDPDGGRADEWACELRLFGRVLERAACLRRCKRTLPAFQVPYPPRQLLRDFQSRLPYQYLHYALFKANRLEKAVAAAYTFLQRNPKHELTAKYLNYYQGMLDVADESLTDLEAQPYEAVFLRAVKLYNSGDFRSSTEDMERALSEYLAVFARCLAGCEGAHEQVDFKDFYPAIADLFAESLQCKVDCEANLTPNVGGYFVDKFVATMYHYLQFAYYKLNDVRQAARSAASYMLFDPKDSVMQQNLVYYRFHRARWGLEEEDFQPREEAMLYHNQTAELRELLEFTHMYLQSDDEMELEETEPPLEPEDALSDAEFEGEGDYEEGMYADWWQEPDAKGDEAEAEPEPELA

SEQ ID NO: 9919 - protein, 437 aa, Homo sapiens; identical to SEQ ID NO: 9918

SEQ ID NO: 9920 - protein, 221 aa, Homo sapiens
  VARIANT 1: note = misc_feature - Xaa can be any naturally occurring amino acid
XKRTLPAFQVPYPPRQLLRDFQSRLPYQYLHYALFKANRLEKAVAAAYTFLQRNPKHELTAKYLNYYQGMLDVADESLTDLEAQPYEAVFLRAVKLYNSGDFRSSTEDMERALSEYLAVFARCLAGCEGAHEQVDFKDFYPAIAVNDVRQAARSAASYMLFDPKDSVMQQNLVYYRFHRARWGLEEEDFQPREEAMLYHNQTAELRELLEFTHMYLQSDDE

SEQ ID NO: 9921 - protein, 73 aa, Homo sapiens
  VARIANT 1: note = misc_feature - Xaa can be any naturally occurring amino acid
XLRELLEFTHMYLQSDDEMELEETEPPLEPEDALSDAEFEGEGDYEEGMYADWWQEPDAKGDEAEAEPEPELA

SEQ ID NO: 9922 - protein, 534 aa, Homo sapiens
MIWYILIIGILLPQSLAHPGFFTSIGQMTDLIHTEKDLVTSLKDYIKAEEDKLEQIKKWAEKLDRLTSTATKDPEGFVGHPVNAFKLMKRLNTEWSELENLVLKDMSDGFISNLTIQRQYFPNDEDQVGAAKALLRLQDTYNLDTDTISKGNLPGVKHKSFLTAEDCFELGKVAYTEADYYHTELWMEQALRQLDEGEISTIDKVSVLDYLSYAVYQQGDLDKALLLTKKLLELDPEHQRANGNLKYFEYIMAKEKDVNKSASDDQSDQKTTPKKKGVAVDYLPERQKYEMLCRGEGIKMTPRRQKKLFCRYHDGNRNPKFILAPAKQEDEWDKPRIIRFHDIISDAEIEIVKDLAKPRLSRATVHDPETGKLTTAQYRVSKSAWLSGYENPVVSRINMRIQDLTGLDVSTAEELQVANYGVGGQYEPHFDFARKDEPDAFKELGTGNRIATWLFYMSDVSAGGATVFPEVGASVWPKKGTAVFWYNLFASGEGDYSTRHAACPVLVGNKWVSNKWLHERGQEFRRPCTLSELE

SEQ ID NO: 9923 - protein, 534 aa, Homo sapiens
MIWYILIIGILLPQSLAHPGFFTSIGQMTDLIHTEKDLVTSLKDYIKAEEDKLEQIKKWAEKLDRLTSTATKDPEGFVGHPVNAFKLMKRLNTEWSELENLVLKDMSDGFISNLTIQRQYFPNDEDQVGAAKALLRLQDTYNLDTDTISKGNLPGVKHKSFLTAEDCFELGKVAYTEADYYHTELWMEQALRQLDEGEISTIDKVSVLDYLSYAVYQQGDLDKALLLTKKLLELDPEHQRANGNLKYFEYIMAKEKDVNKSASDDQSDQKTTPKKKGVAVDYLPERQKYEMLCRGEGIKMTPRRQKKLFCRYHDGNRNPKFILAPAKQEDEWDKPRIIRFHDIISDAEIEIVKDLAKPRLRRATISNPITGDLETVHYRISKSAWLSGYENPVVSRINMRIQDLTGLDVSTAEELQVANYGVGGQYEPHFDFARKDEPDAFKELGTGNRIATWLFYMSDVSAGGATVFPEVGASVWPKKGTAVFWYNLFASGEGDYSTRHAACPVLVGNKWVSNKWLHERGQEFRRPCTLSELE

SEQ ID NO: 9924 - protein, 534 aa, Homo sapiens; identical to SEQ ID NO: 9922

SEQ ID NO: 9925 - protein, 516 aa, Homo sapiens
MIWYILIIGILLPQSLAHPGFFTSIGQMTDLIHTEKDLVTSLKDYIKAEEDKLEQIKKWAEKLDRLTSTATKDPEGFVGHPVNAFKLMKRLNTEWSELENLVLKDMSDGFISNLTIQRQYFPNDEDQVGAAKALLRLQDTYNLDTDTISKGNLPGVKHKSFLTAEDCFELGKVAYTEADYYHTELWMEQALRQLDEGEISTIDKVSVLDYLSYAVYQQGDLDKALLLTKKLLELDPEHQRANGNLKYFEYIMAKEKDVNKSASDDQSDQKTTPKKKGVAVDYLPERQKYEMLCRGEGIKMTPRRQKKLFCRYHDGNRNPKFILAPAKQEDEWDKPRIIRFHDIISDAEIEIVKDLAKPRLSRATVHDPETGKLTTAQYRVSKSAWLSGYENPVVSRINMRIQDLTGLDVSTAEELQKDEPDAFKELGTGNRIATWLFYMSDVSAGGATVFPEVGASVWPKKGTAVFWYNLFASGEGDYSTRHAACPVLVGNKWVSNKWLHERGQEFRRPCTLSELE

SEQ ID NO: 9926 - protein, 534 aa, Homo sapiens; identical to SEQ ID NO: 9923

SEQ ID NO: 9927 - protein, 50 aa, Homo sapiens
MKLWVSALLMAWFGVLSCVQAEFFTSIGHMTDLIYAEKELVQSLKEYILV

SEQ ID NO: 9928 - protein, 101 aa, Homo sapiens
MKLWVSALLMAWFGVLSCVQAEFFTSIGHMTDLIYAEKELVQSLKEYILVEEAKLSKIKSWANKMEALTSKSAADAEGYLAHPVNAYKLVKRLNTDWPALE

SEQ ID NO: 9929 - protein, 114 aa, Homo sapiens
MKLWVSALLMAWFGVLSCVQAEFFTSIGHMTDLIYAEKELVQSLKEYILVEEAKLSKIKSWANKMEALTSKSAADAEGYLAHPVNAYKLVKRLNTDWPALEDLVLQDSAAGFIA

SEQ ID NO: 9930 - protein, 147 aa, Homo sapiens
MKLWVSALLMAWFGVLSCVQAEFFTSIGHMTDLIYAEKELVQSLKEYILVEEAKLSKIKSWANKMEALTSKSAADAEGYLAHPVNAYKLVKRLNTDWPALEDLVLQDSAAGFIANLSVQRQFFPTDEDEIGAAKALMRLQDTYRLDP

SEQ ID NO: 9931 - protein, 153 aa, Homo sapiens
MKLWVSALLMAWFGVLSCVQAEFFTSIGHMTDLIYAEKELVQSLKEYILVEEAKLSKIKSWANKMEALTSKSAADAEGYLAHPVNAYKLVKRLNTDWPALEDLVLQDSAAGFIANLSVQRQFFPTDEDEIGAAKALMRLQDTYRLDPGTISRG

SEQ ID NO: 9932 - protein, 167 aa, Homo sapiens
MKLWVSALLMAWFGVLSCVQAEFFTSIGHMTDLIYAEKELVQSLKEYILVEEAKLSKIKSWANKMEALTSKSAADAEGYLAHPVNAYKLVKRLNTDWPALEDLVLQDSAAGFIANLSVQRQFFPTDEDEIGAAKALMRLQDTYRLDPGTISRGELPGTKYQAMLSVD

SEQ ID NO: 9933 - protein, 184 aa, Homo sapiens
MKLWVSALLMAWFGVLSCVQAEFFTSIGHMTDLIYAEKELVQSLKEYILVEEAKLSKIKSWANKMEALTSKSAADAEGYLAHPVNAYKLVKRLNTDWPALEDLVLQDSAAGFIANLSVQRQFFPTDEDEIGAAKALMRLQDTYRLDPGTISRGELPGTKYQAMLSVDDCFGMGRSAYNEGDYYH

SEQ ID NO: 9934 - protein, 204 aa, Homo sapiens
MKLWVSALLMAWFGVLSCVQAEFFTSIGHMTDLIYAEKELVQSLKEYILVEEAKLSKIKSWANKMEALTSKSAADAEGYLAHPVNAYKLVKRLNTDWPALEDLVLQDSAAGFIANLSVQRQFFPTDEDEIGAAKALMRLQDTYRLDPGTISRGELPGTKYQAMLSVDDCFGMGRSAYNEGDYYHTVLWMEQVLKQLDAGEEATT

SEQ ID NO: 9935 - protein, 535 aa, Homo sapiens
MKLWVSALLMAWFGVLSCVQAEFFTSIGHMTDLIYAEKELVQSLKEYILVEEAKLSKIKSWANKMEALTSKSAADAEGYLAHPVNAYKLVKRLNTDWPALEDLVLQDSAAGFIANLSVQRQFFPTDEDEIGAAKALMRLQDTYRLDPGTISRGELPGTKYQAMLSVDDCFGMGRSAYNEGDYYHTVLWMEQVLKQLDAGEEATTTKSQVLDYLSYAVFQLGDLHRALELTRRLLSLDPSHERAGGNLRYFEQLLEEEREKTLTNQTEAELATPEGIYERPVDYLPERDVYESLCRGEGVKLTPRRQKRLFCRYHHGNRAPQLLIAPFKEEDEWDSPHIVRYYDVMSDEEIERIKEIAKPKLARATVRDPKTGVLTVASYRVSKSSWLEEDDDPVVARVNRRMQHITGLTVKTAELLQVANYGVGGQYEPHFDFSRNDERDTFKHLGTGNRVATFLNYMSDVEAGGATVFPDLGAAIWPKKGTAVFWYNLLRSGEGDYRTRHAACPVLVGCKWVSNKWFHERGQEFLRPCGSTEVD

SEQ ID NO: 9936 - protein, 533 aa, Homo sapiens
MKLWVSALLMAWFGVLSCVQAEFFTSIGHMTDLIYAEKELVQSLKEYILVEEAKLSKIKSWANKMEALTSKSAADAEGYLAHPVNAYKLVKRLNTDWPALEDLVLQDSAAGFIANLSVQRQFFPTDEDEIGAAKALMRLQDTYRLDPGTISRGELPGTKYQAMLSVDDCFGMGRSAYNEGDYYHTVLWMEQVLKQLDAGEEATTTKSQVLDYLSYAVFQLGDLHRALELTRRLLSLDPSHERAGGNLRYFEQLLEEEREKTLTNQTEAELATPEGIYERPVDYLPERDVYESLCRGEGVKLTPRRQKRLFCRYHHGNRAPQLLIAPFKEEDEWDSPHIVRYYDVMSDEEIERIKEIAKPKLARATVRDPKTGVLTVASYRVSKSSWLEEDDDPVVARVNRRMQHITGLTVKTAELLQVANYGVGGQYEPHFDFSRRPFDSGLKTEGNRLATFLNYMSDVEAGGATVFPDLGAAIWPKKGTAVFWYNLLRSGEGDYRTRHAACPVLVGCKWVSNKWFHERGQEFLRPCGSTEVD

SEQ ID NO: 9937 - protein, 533 aa, Homo sapiens; identical to SEQ ID NO: 9936

SEQ ID NO: 9938 - protein, 533 aa, Homo sapiens; identical to SEQ ID NO: 9936

SEQ ID NO: 9939 - protein, 535 aa, Homo sapiens; identical to SEQ ID NO: 9935

SEQ ID NO: 9940 - protein, 535 aa, Homo sapiens; identical to SEQ ID NO: 9935

SEQ ID NO: 9941 - protein, 236 aa, Homo sapiens
MKRQLVTNSFLHHLLIGQKRPRNAPRTLPSVTMKLWVSALLMAWFGVLSCVQAEFFTSIGHMTDLIYAEKELVQSLKEYILVEEAKLSKIKSWANKMEALTSKSAADAEGYLAHPVNAYKLVKRLNTDWPALEDLVLQDSAAGFIANLSVQRQFFPTDEDEIGAAKALMRLQDTYRLDPGTISRGELPGTKYQAMLSVDDCFGMGRSAYNEGDYYHTVLWMEQVLKQLDAGEEATT

SEQ ID NO: 9942 - protein, 104 aa, Homo sapiens
MGPGARLAALLAVLALGTGDPERAAARGDTFSALTSVARALAPERRLLGLLRRYLRGEEARLRDLTRFYDKVLSLHEDSTTPVANPLLAFTLIKRLQSDWRNVL

SEQ ID NO: 9943 - protein, 544 aa, Homo sapiens
MGPGARLAALLAVLALGTGDPERAAARGDTFSALTSVARALAPERRLLGLLRRYLRGEEARLRDLTRFYDKVLSLHEDSTTPVANPLLAFTLIKRLQSDWRNVVHSLEASENIRALKDGYEKVEQDLPAFEDLEGAARALMRLQDVYMLNVKGLARGVFQRVTGSAITDLYSPKRLFSLTGDDCFQVGKVAYDMGDYYHAIPWLEEAVSLFRGSYGEWKTEDEASLEDALDHLAFAYFRAGNVSCALSLSREFLLYSPDNKRMARNVLKYERLLAESPNHVVAEAVIQRPNIPHLQTRDTYEGLCQTLGSQPTLYQIPSLYCSYETNSNAYLLLQPIRKEVIHLEPYIALYHDFVSDSEAQKIRELAEPWLQRSVVASGEKQLQVEYRISKSAWLKDTVDPKLVTLNHRIAALTGLDVRPPYAEYLQVVNYGIGGHYEPHFDHATSPSSPLYRMKSGNRVATFMIYLSSVEAGGATAFIYANLSVPVVRNAALFWWNLHRSGEGDSDTLHAGCPVLVGDKWVANKWIHEYGQEFRRPCSSSPED

SEQ ID NO: 9944 - protein, 604 aa, Homo sapiens
MGPGARLAALLAVLALGTGDPERAAARGDTFSALTSVARALAPERRLLGLLRRYLRGEEARLRDLTRFYDKVLSLHEDSTTPVANPLLAFTLIKRLQSDWRNVVHSLEASENIRALKDGYEKVEQDLPAFEDLEGAARALMRLQDVYMLNVKGLARGVFQRVTGSAITDLYSPKRLFSLTGDDCFQVGKVAYDMGDYYHAIPWLEEAVSLFRGSYGEWKTEDEASLEDALDHLAFAYFRAGNVSCALSLSREFLLYSPDNKRMARNVLKYERLLAESPNHVVAEAVIQRPNIPHLQTRDTYEGLCQTLGSQPTLYQIPSLYCSYETNSNAYLLLQPIRKEVIHLEPYIALYHDFVSDSEAQKIRELAEPWLQRSVVASGEKQLQVEYRISKSAWLKDTVDPKLVTLNHRIAALTGLDVRPPYAEYLQVVNYGIGGHYEPHFDHATSPSSPLYRMKSGNRVATFMIYLSSVEAGGATAFIYANLSVPVVRHCFGGTCTGVVKGTVTHFMLAVLSWWEISGWPTSGYMSMDRNSADPAAPALKTELLAERSWWSPVAFQRSQEPKAGVGEEKAEQPPGRRPCQLCLCLANQRQGRGCYQGTLRMYI

SEQ ID NO: 9945 - protein, 257 aa, Homo sapiens
MGPGARLAALLAVLALGTGDPERAAARGDTFSALTSVARALAPERRLLGLLRRYLRGEEARLRDLTRFYDKVLSLHEDSTTPVANPLLAFTLIKRLQSDWRNVVHSLEASENIRALKDGYEKVEQDLPAFEDLEGAARALMRLQDVYMLNVKGLARGVFQRVTGSAITDLYSPKRLFSLTGDDCFQVGKVAYDMGDYYHAIPWLEEAVSLFRGSYGEWKTEDEASLEDALDHLAFAYFRAGNVSCALSLSREFLLYR

SEQ ID NO: 9946 - protein, 61 aa, Homo sapiens
SVPVVRNAALFWWNLHRSGEGDSDTLHAGCPVLVGDKWVANKWIHEYGQEFRRPCSSSPED

SEQ ID NO: 9947 - protein, 200 aa, Homo sapiens
METRLPPRNIQDVESDSAKQFLQAAEAIDDIPFGITSNSDVFSKYQLDKDGVVLFKKFDEGRNNFEGEVTKENLLDFIKHNQLPLVIEFTEQTAPKIFGGEIKTHILLFLPKSVSDYDGKLSNFKTAAESFKGKILFIFIDSDHTDNQRILEFFGLKKEECPAVRLITLEEEMTKYKPESEELTAERITEFCHRFLEGKI

SEQ ID NO: 9948 - protein, 117 aa, Homo sapiens
METRLPPRNIQFDEGRNNFEGEVTKENLLDFIKHNQLPLVIEFTEQTAPKIFGGEIKTHILLFLPKSVSDYDGKLSNFKTAAESFKGKILFIFIDSDHTDNQRILEFFGLKKEECPA

SEQ ID NO: 9949 - protein, 54 aa, Homo sapiens
MLRRALLCLAVAALVRADAPEEEDHVLVLRKSNFAEALAAHKCPLVWPLQGSGP

SEQ ID NO: 9950 - protein, 156 aa, Homo sapiens
MLRRALLCLAVAALVRADAPEEEDHVLVLRKSNFAEALAAHKYLLVDATEESDLAQQYGVRGYPTIKFFRNGDTASPKEYTAGREADDIVNWLKKRTGPAATTLPDGAAAESLVESSEVAVIGFFKDVESDSAKQFLQAAEAIDDIPFGITSNSDV

SEQ ID NO: 9951 - protein, 208 aa, Homo sapiens
MLRRALLCLAVAALVRADAPEEEDHVLVLRKSNFAEALAAHKYLLVEFSGREADDIVNWLKKRTGPAATTLPDGAAAESLVESSEVAVIGFFKDVESDSAKQFLQAAEAIDDIPFGITSNSDVFSKYQLDKDGVVLFKKFDEGRNNFEGEVTKENLLDFIKHNQLPLVIEFTEQTAPKIFGGEIKTHILLFLPKSVSDYDGKLSNFKT

SEQ ID NO: 9952 - protein, 148 aa, Homo sapiens
MLRRALLCLAVAALVRADAPEEEDHVLVLRKSNFAEALAAHKYLLVEFYAPWCGHCKALAPEYAKAAGKLKAEGSEIRLAKMDSTANEVEAVKVHSFPTLKFFPASADRTVIDYNGERTLDGFKKFLESGGQDGAGDDDDLEDLEEAE

SEQ ID NO: 9953 - protein, 188 aa, Homo sapiens
MLRRALLCLAVAALVRADAPEEEDHVLVLRKSNFAEALAAHKYLLVEFYAPWCGHCKALAPEYAKAAGKLKAEGSEIRLAKVDATEESDLAQQYGVRGYPTIKFFRNGDTASPKEYTAAESLVESSEVAVIGFFKDVESDSAKQFLQAAEAIDDIPFGITSNSDVFSKYQLDKDGVVLFKKFDEGRNN

SEQ ID NO: 9954 - protein, 508 aa, Homo sapiens
MLRRALLCLAVAALVRADAPEEEDHVLVLRKSNFAEALAAHKYLLVEFYAPWCGHCKALAPEYAKAAGKLKAEGSEIRLAKVDATEESDLAQQYGVRGYPTIKFFRNGDTASPKEYTAGREADDIVNWLKKRTGPAATTLPDGAAAESLVESSEVAVIGFFKDVESDSAKQFLQAAEAIDDIPFGITSNSDVFSKYQLDKDGVVLFKKFDEGRNNFEGEVTKENLLDFIKHNQLPLVIEFTEQTAPKIFGGEIKTHILLFLPKSVSDYDGKLSNFKTAAESFKGKILFIFIDSDHTDNQRILEFFGLKKEECPAVRLITLEEEMTKYKPESEELTAERITEFCHRFLEGKIKPHLMSQELPEDWDKQPVKVLVGKNFEDVAFDEKKNVFVEFYAPWCGHCKQLAPIWDKLGETYKDHENIVIAKMDSTANEVEAVKVHSFPTLKFFPASADRTVIDYNGERTLDGFKKFLESGGQDGAGDDDDLEDLEEAEEPDMEEDDDQKAVKDEL

SEQ ID NO: 9955 - protein, 464 aa, Homo sapiens
MLRRALLCLAVAALVRADAPEEEDHVLVLRKSNFAEALAAHKYLLVEFYAPWCGHCKALAPEYAKAAGKLKAEGSEIRLAKVDATEESDLAQQYGVRGYPTIKFFRNGDTASPKEYTGDVESDSAKQFLQAAEAIDDIPFGITSNSDVFSKYQLDKDGVVLFKKFDEGRNNFEGEVTKENLLDFIKHNQLPLVIEFTEQTAPKIFGGEIKTHILLFLPKSVSDYDGKLSNFKTAAESFKGKILFIFIDSDHTDNQRILEFFGLKKEECPAVRLITLEEEMTKYKPESEELTAERITEFCHRFLEGKIKPHLMSQELPEDWDKQPVKVLVGKNFEDVAFDEKKNVFVEFYAPWCGHCKQLAPIWDKLGETYKDHENIVIAKMDSTANEVEAVKVHSFPTLKFFPASADRTVIDYNGERTLDGFKKFLESGGQDGAGDDDDLEDLEEAEEPDMEEDDDQKAVKDEL

SEQ ID NO: 9956 - protein, 166 aa, Homo sapiens
MLRRALLCLAVAALVRADAPEEEDHVLVLRKSNFAEALAAHKYLLVEFYAPWCGHCKALAPEYAKAAGKLKAEGSEIRLAKVDATEESDLAQQYGVRGYPTIKFFRNGDTASPKEYTGFDEGRNNFEGEVTKENLLDFIKHNQLPLVIEFTEQTAPKIFGGEIKTH

SEQ ID NO: 9957 - protein, 106 aa, Homo sapiens
MLRRALLCLAVAALVRADAPEEEDHVLVLRKSNFAEALAAHKYLLVEFYAPWCGHCKALAPEYAKAAGKLKAEGSEIRPPRRSLSPVWEGRSRTGHGHSVPPAVSP

SEQ ID NO: 9958 - protein, 274 aa, Homo sapiens
  VARIANT 1: note = misc_feature - Xaa can be any naturally occurring amino acid
XFEGEVTKENLLDFIKHNQLPLVIEFTEQSVSDYDGKLSNFKTAAESFKGKILFIFIDSDHTDNQRILEFFGLKKEECPAVRLITLEEEMTKYKPESEELTAERITEFCHRFLEGKIKPHLMSQELPEDWDKQPVKVLVGKNFEDVAFDEKKNVFVEFYAPWCGHCKQLAPIWDKLGETYKDHENIVIAKMDSTANEVEAVKVHSFPTLKFFPASADRTVIDYNGERTLDGFKKFLESGGQDGAGDDDDLEDLEEAEEPDMEEDDDQKAVKDEL

SEQ ID NO: 9959 - protein, 132 aa, Homo sapiens
LMATLKAPLRVHITSLLPTPEDNLEIVLHRWENNSCVEKKVLGEKTENPKKFKINYTVANEATLLDTDYDNFLFLCLQDTTTPIQSMMCQYLARVLVEDDEIMQGFIRAFRPLPRHLWYLLDLKQMEEPCRF

SEQ ID NO: 9960 - protein, 143 aa, Homo sapiens
MLCLLLTLGVALVCGVPAMDIPQTKQDLELPKLAGTWHSMAMATNNISLMATLKAPLRVHITSLLPTPEDNLEIVLHRWENNSCVEKKVLGEKTENPKKFKINSRVLVEDDEIMQGFIRAFRPLPRHLWYLLDLKQMEEPCRF

SEQ ID NO: 9961 - protein, 180 aa, Homo sapiens
MLCLLLTLGVALVCGVPAMDIPQTKQDLELPKLAGTWHSMAMATNNISLMATLKAPLRVHITSLLPTPEDNLEIVLHRWENNSCVEKKVLGEKTENPKKFKINYTVANEATLLDTDYDNFLFLCLQDTTTPIQSMMCQYLARVLVEDDEIMQGFIRAFRPLPRHLWYLLDLKQMEEPCRF

SEQ ID NO: 9962 - protein, 180 aa, Homo sapiens; identical to SEQ ID NO: 9961

SEQ ID NO: 9963 - protein, 180 aa, Homo sapiens; identical to SEQ ID NO: 9961

SEQ ID NO: 9964 - protein, 169 aa, Homo sapiens
MLCLLLTLGVALVCGVPAMDIPQTKQDLELPKLAGTWHSMAMATNNISLMATLKAPLRVHITSLLPTPEDNLEIVLHRWENNSCVEKKVLGEKTENPKKFKINYTVANEATLLDTDYDNFLFLCLQDTTTPIQSMMCQYLESWWRTMRSCRDSSGLSGPCPGTYGTCWT

SEQ ID NO: 9965 - protein, 33 aa, Homo sapiens
  VARIANT 1: note = misc_feature - Xaa can be any naturally occurring amino acid
XEIMQGFIRAFRPLPRHLWYLLDLKQMEEPCRF

SEQ ID NO: 9966 - protein, 126 aa, Homo sapiens
  VARIANT 1: note = misc_feature - Xaa can be any naturally occurring amino acid
XPLRVHITSLLPTPEDNLEIVLHRWENNSCVEKKVLGEKTENPKKFKINYTVANEATLLDTDYDNFLFLCLQDTTTPIQSMMCQYLARVLVEDDEIMQGFIRAFRPLPRHLWYLLDLKQMEEPCRF

SEQ ID NO: 9967 - protein, 131 aa, Homo sapiens
  VARIANT 1: note = misc_feature - Xaa can be any naturally occurring amino acid
XVPAMDIPQTKQDLELPKAPLRVHITSLLPTPEDNLEIVLHRWENNSCVEKKVLGEKTENPKKFKINCKASGAPQLSWKPQGPRTDPASSTARVLVEDDEIMQGFIRAFRPLPRHLWYLLDLKQMEEPCRF

SEQ ID NO: 9968 - protein, 25 aa, Homo sapiens
MAGRVPSLLVLLVFPSSCLAFRSPL

SEQ ID NO: 9969 - protein, 28 aa, Homo sapiens
MAGRVPSLLVLLVFPSSCLAFRSPLSVF

SEQ ID NO: 9970 - protein, 29 aa, Homo sapiens
MAGRVPSLLVLLVFPSSCLAFRSPLSVFK

SEQ ID NO: 9971 - protein, 42 aa, Homo sapiens
MAGRVPSLLVLLVFPSSCLAFRSPLSVFKRFKETTRPFSNEC

SEQ ID NO: 9972 - protein, 53 aa, Homo sapiens
MAGRVPSLLVLLVFPSSCLAFRSPLSVFKRFKETTRPFSNECLGTTRPVVPID

SEQ ID NO: 9973 - protein, 68 aa, Homo sapiens
MAGRVPSLLVLLVFPSSCLAFRSPLSVFKRFKETTRPFSNECLGTTRPVVPIDSSDFALDIRMPGVTP

SEQ ID NO: 9974 - protein, 175 aa, Homo sapiens
MAGRVPSLLVLLVFPSSCLAFRSPLSVFKRFKETTRPFSNECLGTTRPVVPIDSSDFALDIRMPGVTPKQLTSSLEPAWILSITCYFLDAICLHPLEVTGFVMKEPVQIKPIFCMPGREMLPLPGSPKVLDSELEERLEVNTLYYRYTMGILVLLEIITRTVLVCPYTSHVCHSL

SEQ ID NO: 9975 - protein, 974 aa, Homo sapiens
MAGRVPSLLVLLVFPSSCLAFRSPLSVFKRFKETTRPFSNECLGTTRPVVPIDSSDFALDIRMPGVTPKQSDTYFCMSMRIPVDEEAFVIDFKPRASMDTVHHMLLFGCNMPSSTGSYWFCDEGTCTDKANILYAWARNAPPTRLPKGVGFRVGGETGSKYFVLQVHYGDISAFRDNNKDCSGVSLHLTRLPQPLIAGMYLMMSVDTVIPAGEKVVNSDISCHYKNYPMHVFAYRVHTHHLGKVVSGYRVRNGQWTLIGRQSPQLPQAFYPVGHPVDVSFGDLLAARCVFTGEGRTEATHIGGTSSDEMCNLYIMYYMEAKHAVSFMTCTQNVAPDMFRTIPPEANIPIPVKSDMVMMHEHHKETEYKDKIPLLQQPKREEEEVLDQGDFYSLLSKLLGEREDVVHVHKYNPTEKAESESDLVAEIANVVQKKDLGRSDAREGAEHERGNAILVRDRIHKFHRLVSTLRPPESRVFSLQQPPPGEGTWEPEHTGDFHMEEALDWPGVYLLPGQVSGVALDPKNNLVIFHRGDHVWDGNSFDSKFVYQQIGLGPIEEDTILVIDPNNAAVLQSSGKNLFYLPHGLSIDKDGNYWVTDVALHQVFKLDPNNKEGPVLILGRSMQPGSDQNHFCQPTDVAVDPGTGAIYVSDGYCNSRIVQFSPSGKFITQWGEESSGSSPLPGQFTVPHSLALVPLLGQLCVADRENGRIQCFKTDTKEFVREIKHSSFGRNVFAISYIPGLLFAVNGKPHFGDQEPVQGFVMNFSNGEIIDIFKPVRKHFDMPHDIVASEDGTVYIGDAHTNTVWKFTLTEKLEHRSVKKAGIEVQEIKEAEAVVETKMENKPTSSELQKMQEKQKLIKEPGSGVPVVLITTLLVIPVVVLLAIAIFIRWKKSRAFGADSEHKLETSSGRVLGRFRGKGSGGLNLGNFFASRKGYSRKGFDRLSTEGSDQEKEDDGSESEEEYSAPLPALAPSSS

SEQ ID NO: 9976 - protein, 887 aa, Homo sapiens
MAGRVPSLLVLLVFPSSCLAFRSPLSVFKRFKETTRPFSNECLGTTRPVVPIDSSDFALDIRMPGVTPKQSDTYFCMSMRIPVDEEAFVIDFKPRASMDTVHHMLLFGCNMPSSTGSYWFCDEGTCTDKANILYAWARNAPPTRLPKGVGFRVGGETGSKYFVLQVHYGDISAFRDNNKDCSGVSLHLTRLPQPLIAGMYLMMSVDTVIPAGEKVVNSDISCHYKNYPMHVFAYRVHTHHLGKVVSGYRVRNGQWTLIGRQSPQLPQAFYPVGHPVDVSFGDLLAARCVFTGEGRTEATHIGGTSSDEMCNLYIMYYMEAKHAVSFMTCTQNVAPDMFRTIPPEANIPIPVKSDMVMMHEHHKETEYKDKIPLLQQPKREEEEVLDQGDFYSLLSKLLGEREDVVHVHKYNPTEKAESESDLVAEIANVVQKKDLGRSDAREGAEHERGNAILVRDRIHKFHRLVSTLRPPESRVFSLQQPPPGEGTWEPEHTGDFHMEEALDWPGVYLLPGQVSGVALDPKNNLVIFHRGDHVWDGNSFDSKFVYQQIGLGPIEEDTILVIDPNNAAVLQSSGKNLFYLPHGLSIDKDGNYWVTDVALHQVFKLDPNNKEGPVLILGRSMQPGSDQNHFCQPTDVAVDPGTGAIYVSDGYCNSRIVQFSPSGKFITQWGEESSGSSPLPGQFTVPHSLALVPLLGQLCVADRENGRIQCFKTDTKEFVREIKHSSFGRNVFAISYIPGLLFAVNGKPHFGDQEPVQGFVMNFSNGEIIDIFKPVRKHFDMPHDIVASEDGTVYIGDAHTNTVWKFTLTEKLEHRSVKKAGIEVQEIKGKGSGGLNLGNFFASRKGYSRKGFDRLSTEGSDQEKEDDGSESEEEYSAPLPALAPSSS

SEQ ID NO: 9977 - protein, 866 aa, Homo sapiens
MAGRVPSLLVLLVFPSSCLAFRSPLSVFKRFKETTRPFSNECLGTTRPVVPIDSSDFALDIRMPGVTPKQSDTYFCMSMRIPVDEEAFVIDFKPRASMDTVHHMLLFGCNMPSSTGSYWFCDEGTCTDKANILYAWARNAPPTRLPKGVGFRVGGETGSKYFVLQVHYGDISAFRDNNKDCSGVSLHLTRLPQPLIAGMYLMMSVDTVIPAGEKVVNSDISCHYKNYPMHVFAYRVHTHHLGKVVSGYRVRNGQWTLIGRQSPQLPQAFYPVGHPVDVSFGDLLAARCVFTGEGRTEATHIGGTSSDEMCNLYIMYYMEAKHAVSFMTCTQNVAPDMFRTIPPEANIPIPVKSDMVMMHEHHKETEYKDKIPLLQQPKREEEEVLDQDFHMEEALDWPGVYLLPGQVSGVALDPKNNLVIFHRGDHVWDGNSFDSKFVYQQIGLGPIEEDTILVIDPNNAAVLQSSGKNLFYLPHGLSIDKDGNYWVTDVALHQVFKLDPNNKEGPVLILGRSMQPGSDQNHFCQPTDVAVDPGTGAIYVSDGYCNSRIVQFSPSGKFITQWGEESSGSSPLPGQFTVPHSLALVPLLGQLCVADRENGRIQCFKTDTKEFVREIKHSSFGRNVFAISYIPGLLFAVNGKPHFGDQEPVQGFVMNFSNGEIIDIFKPVRKHFDMPHDIVASEDGTVYIGDAHTNTVWKFTLTEKLEHRSVKKAGIEVQEIKEAEAVVETKMENKPTSSELQKMQEKQKLIKEPGSGVPVVLITTLLVIPVVVLLAIAIFIRWKKSRAFGDSEHKLETSSGRVLGRFRGKGSGGLNLGNFFASRKGYSRKGFDRLSTEGSDQEKEDDGSESEEEYSAPLPALAPSSS

SEQ ID NO: 9978 - protein, 905 aa, Homo sapiens
MAGRVPSLLVLLVFPSSCLAFRSPLSVFKRFKETTRPFSNECLGTTRPVVPIDSSDFALDIRMPGVTPKQSDTYFCMSMRIPVDEEAFVIDFKPRASMDTVHHMLLFGCNMPSSTGSYWFCDEGTCTDKANILYAWARNAPPTRLPKGVGFRVGGETGSKYFVLQVHYGDISAFRDNNKDCSGVSLHLTRLPQPLIAGMYLMMSVDTVIPAGEKVVNSDISCHYKNYPMHVFAYRVHTHHLGKVVSGYRVRNGQWTLIGRQSPQLPQAFYPVGHPVDVSFGDLLAARCVFTGEGRTEATHIGGTSSDEMCNLYIMYYMEAKHAVSFMTCTQNVAPDMFRTIPPEANIPIPVKSDMVMMHEHHKETEYKDKIPLLQQPKREEEEVLDQGDFYSLLSKLLGEREDVVHVHKYNPTEKAESESDLVAEIANVVQKKDLGRSDAREGAEHERGNAILVRDRIHKFHRLVSTLRPPESRVFSLQQPPPGEGTWEPEHTGDFHMEEALDWPGVYLLPGQVSGVALDPKNNLVIFHRGDHVWDGNSFDSKFVYQQIGLGPIEEDTILVIDPNNAAVLQSSGKNLFYLPHGLSIDKDGNYWVTDVALHQVFKLDPNNKEGPVLILGRSMQPGSDQNHFCQPTDVAVDPGTGAIYVSDGYCNSRIVQFSPSGKFITQWGEESSGSSPLPGQFTVPHSLALVPLLGQLCVADRENGRIQCFKTDTKEFVREIKHSSFGRNVFAISYIPGLLFAVNGKPHFGDQEPVQGFVMNFSNGEIIDIFKPVRKHFDMPHDIVASEDGTVYIGDAHTNTVWKFTLTEKLEHRSVKKAGIEVQEIKDSEHKLETSSGRVLGRFRGKGSGGLNLGNFFASRKGYSRKGFDRLSTEGSDQEKEDDGSESEEEYSAPLPALAPSSS

SEQ ID NO: 9979 - protein, 973 aa, Homo sapiens [sequence omitted]

SEQ ID NO: 9980 - protein, 679 aa, Homo sapiens
  VARIANT 1: note = misc_feature - Xaa can be any naturally occurring amino acid
XMHVFAYRVHTHHLGKVVSGYRVRNGQWTLIGRQSPQLPQAFYPVGHPVDVSFGDLLAARCVFTGEGRTEATHIGGTSSDEMCNLYIMYYMEAKHAVSFMTCTQNVAPDMFRTIPPEANIPIPVKSDMVMMHEHHKETEYKDKIPLLQQPKREEEEVLDQGDFYSLLSKLLGEREDVVHVHKYNPTEKAESESDLVAEIANVVQKKDLGRSDAREGAEHERGNAILVRDRIHKFHRLVSTLRPPESRVFSLQQPPPGEGTWEPEHTGDFHMEEALDWPGVYLLPGQVSGVALDPKNNLVIFHRGDHVWDGNSFDSKFVYQQIGLGPIEEDTILVIDPNNAAVLQSSGKNLFYLPHGLSIDKDGNYWVTDVALHQVFKLDPNNKEGPVLILGRSMQPGSDQNHFCQPTDVAVDPGTGAIYVSDGYCNSRIVQFSPSGKFITQWGEESSGSSPLPGQFTVPHSLALVPLLGQLCVADRENGRIQCFKTDTKEFVREIKHSSFGRNVFAISYIPGLLFAVNGKPHFGDQEPVQGFVMNFSNGEIIDIFKPVRKHFDMPHDIVASEDGTVYIGDAHTNTVWKFTLTEKLEHRSVKKAGIEVQEIKADSEHKLETSSGRVLGRFRGKGSGGLNLGNFFASRKGYSRKGFDRLSTEGSDQEKEDDGSESEEEYSAPLPALAPSSS

SEQ ID NO: 9981 - protein, 250 aa, Homo sapiens
  VARIANT 1: note = misc_feature - Xaa can be any naturally occurring amino acid
XRIQCFKTDTKEFVREIKHSSFGRNVFAISYIPGLLFAVNGKPHFGDQEPVQGFVMNFSNGEIIDIFKPVRKHFDMPHDIVASEDGTVYIGDAHTNTVWKFTLTEKLEHRSVKKAGIEVQEIKEAEAVVETKMENKPTSSELQKMQEKQKLIKEPGSGVPVVLITTLLVIPVVVLLAIAIFIRWKKSRAFGGKGSGGLNLGNFFASRKGYSRKGFDRLSTEGSDQEKEDDGSESEEEYSAPLPALAPSSS

SEQ ID NO: 9982 - protein, 675 aa, Homo sapiens
MCRECCEYDQIECVCPGKREVVGYTIPCCRNEENECDSCLIHPGCTIFENCKSCRNGSWGGTLDDFYVKGFYCAECRAGWYGGDCMRCGQVLRAPKGQILLESYPLNAHCEWTIHAKPGFVIQLRFVMLSLEFDYMCQYDYVEVRDGDNRDGQIIKRVCGNERPAPIQSIGSSLHVLFHSDGSKNFDGFHAIYEEITACSSSPCFHDGTCVLDKAGSYKCACLAGYTGQRCENLLEAGKSKIKASEDSLSVLEERNCSDPGGPVNGYQKITGGPGLINGRHAKIGTVVSFFCNNSYVLSGNEKRTCQQNGEWSGKQPICIKACREPKISDLVRRRVLPMQVQSRETPLHQLYSAAFSKQKLQSAPTKKPALPFGDLPMGYQHLHTQLQYECISPFYRRLGSSRRTCLRTGKWSGRAPSCIPICGKIENITAPKTQGLRWPWQAAIYRRTSGVHDGSLHKGAWFLVCSGALVNERTVVVAAHCVTDLGKVTMIKTADLKVVLGKFYRDDDRDEKTIQSLQISAIILHPNYDPILLDADIAILKLLDKARISTRVQPICLAASRDLSTSFQESHITVAGWNVLADVRSPGFKNDTLRSGVVSVVDSLLCEEQHEDHGIPVSVTDNMFCASWEPTAPSDICTAETGGIAAVSFPGRASPEPRWHLMGLVSWSYDKTCS

SEQ ID NO: 9983 - protein, 680 aa, Homo sapiens
MCRECCEYDQIECVCPGKREVVGYTIPCCRNEENECDSCLIHPGCTIFENCKSCRNGSWGGTLDDFYVKGFYCAECRAGWYGGDCMRCGQVLRAPKGQILLESYPLNAHCEWTIHAKPGFVIQLRFVMLSLEFDYMCQYDYVEVRDGDNRDGQIIKRVCGNERPAPIQSIGSSLHVLFHSDGSKNFDGFHAIYEEITACSSSPCFHDGTCVLDKAGSYKCACLAGYTGQRCENLLEERNCSDPGGPVNGYQKITGGPGLINGRHAKIGTVVSFFCNNSYVLSGNEKRTCQQNGEWSGKQPICIKACREPKISDLVRRRVLPMQVQSRETPLHQLYSAAFSKQKLQSAPTKKPALPFGDLPMGYQHLHTQLQYECISPFYRRLGSSRRTCLRTGKWSGRAPSCIPICGKIENITAPKTQGLRWPWQAAIYRRTSGVHDGSLHKGAWFLVCSGALVNERTVVVAAHCVTDLGKVTMIKTADLKVVLGKFYRDDDRDEKTIQSLQISAIILHPNYDPILLDADIAILKLLDKARISTRVQPICLAASRDLSTSFQESHITVAGWNVLADVRSPGFKNDTLRSGVVSVVDSLLCEEQHEDHGIPVSVTDNMFCASWEPTAPSDICTAETGGIAAVSFPGRASPEPRWHLMGLVSWSYDKTCSHRLSTAFTKVLPFKDWIERNMK

SEQ ID NO: 9984 - protein, 178 aa, Homo sapiens
MELGCWTQLGLTFLQLLLISSLPREYTVINEACPGAEWNIMCRECCEYDQIECVCPGKREVVGYTIPCCRNEENECDSCLIHPGCTIFENCKSCRNGSWGGTLDDFYVKGFYCAECRAGWYGGDCMPCSSSPCFHDGTCVLDKAGSYKCACLAGYTGQRCENLLEERNCSDPGGPVNG

SEQ ID NO: 9985 - protein, 609 aa, Homo sapiens
MELGCWTQLGLTFLQLLLISSLPREYTVINEACPGAEWNIMCRECCEYDQIECVCPGKREVVGYTIPCCRNEENECDSCLIHPGCTIFENCKSCRNGSWGGTLDDFYVKGFYCAECRAGWYGGDCMPCSSSPCFHDGTCVLDKAGSYKCACLAGYTGQRCENLLEERNCSDPGGPVNGYQKITGGPGLINGRHAKIGTVVSFFCNNSYVLSGNEKRTCQQNGEWSGKQPICIKACREPKISDLVRRRVLPMQVQSRETPLHQLYSAAFSKQKLQSAPTKKPALPFGDLPMGYQHLHTQLQYECISPFYRRLGSSRRTCLRTGKWSGRAPSCIPICGKIENITAPKTQGLRWPWQAAIYRRTSGVHDGSLHKGAWFLVCSGALVNERTVVVAAHCVTDLGKVTMIKTADLKVVLGKFYRDDDRDEKTIQSLQISAIILHPNYDPILLDADIAILKLLDKARISTRVQPICLAASRDLSTSFQESHITVAGWNVLADVRSPGFKNDTLRSGVVSVVDSLLCEEQHEDHGIPVSVTDNMFCASWEPTAPSDICTAETGGIAAVSFPGRASPEPRWHLMGLVSWSYDKTCSHRLSTAFTKVLPFKDWIERNMK

SEQ ID NO: 9986 - protein, 737 aa, Homo sapiens
MELGCWTQLGLTFLQLLLISSLPREYTVINEACPGAEWNIMCRECCEYDQIECVCPGKREVVGYTIPCCRNEENECDSCLIHPGCTIFENCKSCRNGSWGGTLDDFYVKGFYCAECRAGWYGGDCMRCGQVLRAPKGQILLESYPLNAHCEWTIHAKPGFVIQLRFVMLSLEFDYMCQYDYVEVRDGDNRDGQIIKRVCGNERPAPIQSIGSSLHVLFHSDGSKNFDGFHAIYEEITACSSSPCFHDGTCVLDKAGSYKCACLAGYTGQRCENLLEAGKSKIKASEDSLSVLEERNCSDPGGPVNGYQKITGGPGLINGRHAKIGTVVSFFCNNSYVLSGNEKRTCQQNGEWSGKQPICIKACREPKISDLVRRRVLPMQVQSRETPLHQLYSAAFSKQKLQSAPTKKPALPFGDLPMGYQHLHTQLQYECISPFYRRLGSSRRTCLRTGKWSGRAPSCIPICGKIENITAPKTQGLRWPWQAAIYRRTSGVHDGSLHKGAWFLVCSGALVNERTVVVAAHCVTDLGKVTMIKTADLKVVLGKFYRDDDRDEKTIQSLQISAIILHPNYDPILLDADIAILKLLDKARISTRVQPICLAASRDLSTSFQESHITVAGWNVLADVRSPGFKNDTLRSGVVSVVDSLLCEEQHEDHGIPVSVTDNMFCASWEPTAPSDICTAETGGIAAVSFPGRASPEPRWHLMGLVSWSYDKTCSHRLSTAFTKVLPFKDWIERNMK

SEQ ID NO: 9987 - protein, 720 aa, Homo sapiens
MELGCWTQLGLTFLQLLLISSLPREYTVINEACPGAEWNIMCRECCEYDQIECVCPGKREVVGYTIPCCRNEENECDSCLIHPGCTIFENCKSCRNGSWGGTLDDFYVKGFYCAECRAGWYGGDCMRCGQVLRAPKGQILLESYPLNAHCEWTIHAKPGFVIQLRFVMLSLEFDYMCQYDYVEVRDGDNRDGQIIKRVCGNERPAPIQSIGSSLHVLFHSDGSKNFDGFHAIYEEITACSSSPCFHDGTCVLDKAGSYKCACLAGYTGQRCENLLEERNCSDPGGPVNGYQKITGGPGLINGRHAKIGTVVSFFCNNSYVLSGNEKRTCQQNGEWSGKQPICIKACREPKISDLVRRRVLPMQVQSRETPLHQLYSAAFSKQKLQSAPTKKPALPFGDLPMGYQHLHTQLQYECISPFYRRLGSSRRTCLRTGKWSGRAPSCIPICGKIENITAPKTQGLRWPWQAAIYRRTSGVHDGSLHKGAWFLVCSGALVNERTVVVAAHCVTDLGKVTMIKTADLKVVLGKFYRDDDRDEKTIQSLQISAIILHPNYDPILLDADIAILKLLDKARISTRVQPICLAASRDLSTSFQESHITVAGWNVLADVRSPGFKNDTLRSGVVSVVDSLLCEEQHEDHGIPVSVTDNMFCASWEPTAPSDICTAETGGIAAVSFPGRASPEPRWHLMGLVSWSYDKTCSHRLSTAFTKVLPFKDWIERNMK

SEQ ID NO: 9988 - protein, 416 aa, Homo sapiens
MLKLAPWCLSFVTTPMFLVAMRKELASRMEWSGKQPICIKACREPKISDLVRRRVLPMQVQSRETPLHQLYSAAFSKQKLQSAPTKKPALPFGDLPMGYQHLHTQLQYECISPFYRRLGSSRRTCLRTGKWSGRAPSCIPICGKIENITAPKTQGLRWPWQAAIYRRTSGVHDGSLHKGAWFLVCSGALVNERTVVVAAHCVTDLGKVTMIKTADLKVVLGKFYRDDDRDEKTIQSLQISAIILHPNYDPILLDADIAILKLLDKARISTRVQPICLAASRDLSTSFQESHITVAGWNVLADVRSPGFKNDTLRSGVVSVVDSLLCEEQHEDHGIPVSVTDNMFCASWEPTAPSDICTAETGGIAAVSFPGRASPEPRWHLMGLVSWSYDKTCSHRLSTAFTKVLPFKDWIERNMK

SEQ ID NO: 9989 - protein, 1251 aa, Homo sapiens
MRLLLLVPLLLAPAPGSSAPKVRRQSDTWGPWSQWSPCSRTCGGGVSFRERPCYSQRRDGGSSCVGPARSHRSCRTESCPDGARDFRAEQCAEFDGAEFQGRRYRWLPYYSAPNKCELNCIPKGENFYYKHREAVVDGTPCEPGKRDVCVDGSCRVVGCDHELDSSKQEDKCLRCGGDGTTCYPVAGTFDANDLSRAVKNVRGEYYLNGHWTIEAARALPAASTILHYERGAEGDLAPERLHARGPTSEPLVIELISQEPNPGVHYEYHLPLRRPSPGFSWSHGSWSDCSAECGGGHQSRLVFCTIDHEAYPDHMCQRQPRPADRRSCNLHPCPETKRWKAGPWAPCSASCGGGSQSRSVYCISSDGAGIQEAVEEAECAGLPGKPPAIQACNLQRCAAWSPEPWGECSVSCGVGVRKRSVTCRGERGSLLHTAACSLEDRPPLTEPCVHEDCPLLSDQAWHVGTWGLCSKSCSSGTRRRQVICAIGPPSHCGSLQHSKPVDVEPCNTQPCHLPQEVPSMQDVHTPASNPWMPLGPQESPASDSRGQWWAAQEHPSARGDHRGERGDPRGDQGTHLSALGPAPSLQQPPYQQPLRSGSGPHDCRHSPHGCCPDGHTASLGPQWQGCPGAPCQQSRYGCCPDRVSVAEGPHHAGCTKSYGGDSTGGMPRSRAVASTVHNTHQPQAQQNEPSECRGSQFGCCYDNVATAAGPLGEGCVGQPSHAYPVRCLLPSAHGSCADWAARWYFVASVGQCNRFWYGGCHGNANNFASEQECMSSCQGSLHGPRRPQPGASGRSTHTDGGGSSPAGEQEPSQHRTGAAVQRKPWPSGGLWRQDQQPGPGEAPHTQAFGEWPWGQELGSRAPGLGGDAGSPAPPFHSSSYRISLAGVEPSLVQAALGQLVRLSCSDDTAPESQAAWQKDGQPISSDRHRLQFDGSLIIHPLQAEDAGTYSCGSTRPGRDSQKIQLRIIGGDMAVLSEAELSRFPQPRDPAQDFGQAGAAGPLGAIPSSHPQPANRLRLDQNQPRVVDASPGQRIRMTCRAEGFPPPAIEWQRDGQPVSSPRHQLQPDGSLVISRVAVEDGGFYTCVAFNGQDRDQRWVQLRVLGELTISGLPPTVTVPEGDTARLLCVVAGESVNIRWSRNGLPVQADGHRVHQSPDGTLLIYNLRARDEGSYTCSAYQGSQAVSRSTEVKVVSPAPTAQPRDPGRDCVDQPELANCDLILQAQLCGNEYYSSFCCASCSRFQPHAQPIWQ

SEQ ID NO: 9990 - protein, 929 aa, Homo sapiens
MRLLLLVPLLLAPAPGSSAPKVRRQSDTWGPWSQWSPCSRTCGGGVSFRERPCYSQRRDGGSSCVGPARSHRSCRTESCPDGARDFRAEQCAEFDGAEFQGRRYRWLPYYSAPNKCELNCIPKGENFYYKHREAVVDGTPCEPGKRDVCVDGSCRVVGCDHELDSSKQEDKCLRCGGDGTTCYPVAGTFDANDLSRAVKNVRGEYYLNGHWTIEAARALPAASTILHYERGAEGDLAPERLHARGPTSEPLVIELISQEPNPGVHYEYHLPLRRPSPGFSWSHGSWSDCSAECGGGHQSRLVFCTIDHEAYPDHMCQRQPRPADRRSCNLHPCPETKRWKAGPWAPCSASCGGGSQSRSVYCISSDGAGIQEAVEEAECAGLPGKPPAIQACNLQRCAAWSPEPWGECSVSCGVGVRKRSVTCRGERGSLLHTAACSLEDRPPLTEPCVHEDCPLLSDQAWHVGTWGLCSKSCSSGTRRRQVICAIGPPSHCGSLQHSKPVDVEPCNTQPCHLPQEVPSMQDVHTPASNPWMPLGPQESPASDSRGQWWAAQEHPSARGDHRGERGDPRGDQGTHLSALGPAPSLQQPPYQQPLRSGSGPHDCRHSPHGCCPDGHTASLGPQWQGCPGAPCQQSRYGCCPDRVSVAEGPHHAGCTKSYGGDSTGGMPRSRAVASTVHNTHQPQAQQNEPSECRGSQFGCCYDNVATAAGPLGEGCVGQPSHAYPVRCLLPSAHGSCADWAARWYFVASVGQCNRFWYGGCHGNANNFASEQECMSSCQGSLHGPRRPQPGASGRSTHTDGGGSSPAGEQEPSQHRTGAAVQRKPWPSGGLWRQDQQPGPGEAPHTQAFGEWPWGQELGSRAPGLGGDAGSPAPPFHSSSYRISLAGVEPSLVQAALGQLVRLSCSDDTAPESQAAWQKDGQPISSDRFT

SEQ ID NO: 9991 - protein, 808 aa, Homo sapiens
MRLLLLVPLLLAPAPGSSAPKVRRQSDTWGPWSQWSPCSRTCGGGVSFRERPCYSQRRDGGSSCVGPARSHRSCRTESCPDGARDFRAEQCAEFDGAEFQGRRYRWLPYYSAPNKCELNCIPKGENFYYKHREAVVDGTPCEPGKRDVCVDGSCRVVGCDHELDSSKQEDKCLRCGGDGTTCYPVAGTFDANDLSRGYNQILIVPMGATSILIDEAAASRNFLAVKNVRGEYYLNGHWTIEAARALPAASTILHYERGAEGDLAPERLHARGPTSEPLVIELISQEPNPGVHYEYHLPLRRPSPGFSWSHGSWSDCSAECGGGHQSRLVFCTIDHEAYPDHMCQRQPRPADRRSCNLHPCPETKRWKAGPWAPCSASCGGGSQSRSVYCISSDGAGIQEAVEEAECAGLPGKPPAIQACNLQRCAAWSPEPWGECSVSCGVGVRKRSVTCRGERGSLLHTAACSLEDRPPLTEPCVHEDCPLLSDQAWHVGTWGLCSKSCSSGTRRRQVICAIGPPSHCGSLQHSKPVDVEPCNTQPCHLPQEVPSMQDVHTPASNPWMPLGPQESPASDSRGQWWAAQEHPSARGDHRGERGDPRGDQGTHLSALGPAPSLQQPPYQQPLRSGSGPHDCRHSPHGCCPDGHTASLGPQWQGCPGAPCQQSRYGCCPDRVSVAEGPHHAGCTKSYGGDSTGGMPRSRAVASTVHNTHQPQAQQNEPSECRGSQFGCCYDNVATAAGPLGEGCVGQPSHGLAWQVWSPRWCRQPWGSWCGSPAQTTLPRNPRLPGRKMASPSPLTGVCDGPPTSSDRCV

SEQ ID NO: 9992 - protein, 1262 aa, Homo sapiens
MRLLLLVPLLLAPAPGSSAPKVRRQSDTWGPWSQWSPCSRTCGGGVSFRERPCYSQRRDGGSSCVGPARSHRSCRTESCPDGARDFRAEQCAEFDGAEFQGRRYRWLPYYSAPNKCELNCIPKGENFYYKHREAVVDGTPCEPGKRDVCVDGSCRVVGCDHELDSSKQEDKCLRCGGDGTTCYPVAGTFDANDLSRGYNQILIVPMGATSILIDEAAASRNFLAVKNVRGEYYLNGHWTIEAARALPAASTILHYERGAEGDLAPERLHARGPTSEPLVIELISQEPNPGVHYEYHLPLRRPSPGFSWSHGSWSDCSAECGGGHQSRLVFCTIDHEAYPDHMCQRQPRPADRRSCNLHPCPETKRWKAGPWAPCSASCGGGSQSRSVYCISSDGAGIQEAVEEAECAGLPGKPPAIQACNLQRCAAWSPEPWGECSVSCGVGVRKRSVTCRGERGSLLHTAACSLEDRPPLTEPCVHEDCPLLSDQAWHVGTWGLCSKSCSSGTRRRQVICAIGPPSHCGSLQHSKPVDVEPCNTQPCHLPQEVPSMQDVHTPASNPWMPLGPQESPASDSRGQWWAAQEHPSARGDHRGERGDPRGDQGTHLSALGPAPSLQQPPYQQPLRSGSGPHDCRHSPHGCCPDGHTASLGPQWQGCPGAPCQQSRYGCCPDRVSVAEGPHHAGCTKSYGGDSTGGMPRSRAVASTVHNTHQPQAQQNEPSECRGSQFGCCYDNVATAAGPLGEGCVGQPSHDWAARWYFVASVGQCNRFWYGGCHGNANNFASEQECMSSCQGSLHGPRRPQPGASGRSTHTDGGGSSPAGEQEPSQHRTGAAVQRKPWPSGGLWRQDQQPGPGEAPHTQAFGEWPWGQELGSRAPGLGGDAGSPAPPFHSSSYRISLAGVEPSLVQAALGQLVRLSCSDDTAPESQAAWQKDGQPISSDRHRLQFDGSLIIHPLQAEDAGTYSCGSTRPGRDSQKIQLRIIGGDMAVLSEAELSRFPQPRDPAQDFGQAGAAGPLGAIPSSHPQPANRLRLDQNQPRVVDASPGQRIRMTCRAEGFPPPAIEWQRDGQPVSSPRHQLQPDGSLVISRVAVEDGGFYTCVAFNGQDRDQRWVQLRVLGELTISGLPPTVTVPEGDTARLLCVVAGESVNIRWSRNGLPVQADGHRVHQSPDGTLLIYNLRARDEGSYTCSAYQGSQAVSRSTEVKVVSPAPTAQPRDPGRDCVDQPELANCDLILQAQLCGNEYYSSFCCASCSRFQPHAQPIWQ

SEQ ID NO: 9993 - protein, 1278 aa, Homo sapiens
MRLLLLVPLLLAPAPGSSAPKVRRQSDTWGPWSQWSPCSRTCGGGVSFRERPCYSQRRDGGSSCVGPARSHRSCRTESCPDGARDFRAEQCAEFDGAEFQGRRYRWLPYYSAPNKCELNCIPKGENFYYKHREAVVDGTPCEPGKRDVCVDGSCRVVGCDHELDSSKQEDKCLRCGGDGTTCYPVAGTFDANDLSRGYNQILIVPMGATSILIDEAAASRNFLAVKNVRGEYYLNGHWTIEAARALPAASTILHYERGAEGDLAPERLHARGPTSEPLVIELISQEPNPGVHYEYHLPLRRPSPGFSWSHGSWSDCSAECGGGHQSRLVFCTIDHEAYPDHMCQRQPRPADRRSCNLHPCPETKRWKAGPWAPCSASCGGGSQSRSVYCISSDGAGIQEAVEEAECAGLPGKPPAIQACNLQRCAAWSPEPWGECSVSCGVGVRKRSVTCRGERGSLLHTAACSLEDRPPLTEPCVHEDCPLLSDQAWHVGTWGLCSKSCSSGTRRRQVICAIGPPSHCGSLQHSKPVDVEPCNTQPCHLPQEVPSMQDVHTPASNPWMPLGPQESPASDSRGQWWAAQEHPSARGDHRGERGDPRGDQGTHLSALGPAPSLQQPPYQQPLRSGSGPHDCRHSPHGCCPDGHTASLGPQWQGCPGAPCQQSRYGCCPDRVSVAEGPHHAGCTKSYGGDSTGGMPRSRAVASTVHNTHQPQAQQNEPSECRGSQFGCCYDNVATAAGPLGEGCVGQPSHAYPVRCLLPSAHGSCADWAARWYFVASVGQCNRFWYGGCHGNANNFASEQECMSSCQGSLHGPRRPQPGASGRSTHTDGGGSSPAGEQEPSQHRTGAAVQRKPWPSGGLWRQDQQPGPGEAPHTQAFGEWPWGQELGSRAPGLGGDAGSPAPPFHSSSYRISLAGVEPSLVQAALGQLVRLSCSDDTAPESQAAWQKDGQPISSDRHRLQFDGSLIIHPLQAEDAGTYSCGSTRPGRDSQKIQLRIIGGDMAVLSEAELSRFPQPRDPAQDFGQAGAAGPLGAIPSSHPQPANRLRLDQNQPRVVDASPGQRIRMTCRAEGFPPPAIEWQRDGQPVSSPRHQLQPDGSLVISRVAVEDGGFYTCVAFNGQDRDQRWVQLRVLGELTISGLPPTVTVPEGDTARLLCVVAGESVNIRWSRNGLPVQADGHRVHQSPDGTLLIYNLRARDEGSYTCSAYQGSQAVSRSTEVKVVSPAPTAQPRDPGRDCVDQPELANCDLILQAQLCGNEYYSSFCCASCSRFQPHAQPIWQ

SEQ ID NO: 9994 - protein, 1278 aa, Homo sapiens; identical to SEQ ID NO: 9993

SEQ ID NO: 9995 - protein, 214 aa, Homo sapiens
VHNTHQPQAQQNEPSECRGSQFGCCYDNVATAAGPLGEGCVGQPSHAYPVRCLLPSAHGSCADWAARWYFVASVGQCNRFWYGGCHGNANNFASEQECMSSCQGSLHGPRRPQPGASGRSTHTDGGGSSPAGEQEPSQHRTGAAVQRKPWPSGGLWRQDQQPGPGEAPHTQAFGEWPWGQELGSRAPGLGGDAGSPAPPFHSSSYRSHFPPLQD

SEQ ID NO: 9996 - protein, 311 aa, Homo sapiens
  VARIANT 1: note = misc_feature - Xaa can be any naturally occurring amino acid
XCMSSCQGSLHGPRRPQPGASGRSTHTDGGGSSPAGEQEPSQHRTGAAVQRKPWPSGGLWRQDQQPGPGEAPHTQAFGEWPWGQELGSRAPGLGGDAGSPAPPFHSSSYRISLAGVEPSLVQAALGQLVRLSCSDDTAPESQAAWQKDGQPISSDRHRLQFDGSLIIHPLQAEDAGTYSCGSTRPGRDSQKIQLRIIGGDMAVLSEAELSRFPQPRDPAQDFGQAGAAGPLGAIPSSHPQPANRLRLDQNQPRVVDASPGQRIRMTCRAEGFPPPAIEWQRDGQPVSSPSTHRPAQGPWQGLRRPARAGQL

SEQ ID NO: 9997 - protein, 1627 aa, Homo sapiens
MRLWSWVLHLGLLSAALGCGLAERPRRARRDPRAGRPPRPAAGPATCATRAARGRRASPPPPPPPGGAWEAVRVPRRRQQREARGATEEPSPPSRALYFSGRGEQLRLRADLELPRDAFTLQVWLRAEGGQRSPAVITGLYDKCSYISRDRGWVVGIHTISDQDNKDPRYFFSLKTDRARQVTTINAHRSYLPGQWVYLAATYDGQFMKLYVNGAQVATSGEQVGGIFSPLTQKCKVLMLGGSALNHNYRGYIEHFSLWKVARTQREILSDMETHGAHTALPQLLLQENWDNVKHAWSPMKDGSSPKVEFSNAHGFLLDTSLEPPLCGQTLCDNTEVIASYNQLSSFRQPKVVRYRVVNLYEDDHKNPTVTREQVDFQHHQLAEAFKQYNISWELDVLEVSNSSLRRRLILANCDISKIGDENCDPECNHTLTGHDGGDCRHLRHPAFVKKQHNGVCDMDCNYERFNFDGGECCDPEITNVTQTCFDPDSPHRAYLDVNELKNILKLDGSTHLNIFFAKSSEEELAGVATWPWDKEALMHLGGIVLNPSFYGMPGHTHTMIHEIGHSLGLYHVFRGISEIQSCSDPCMETEPSFETGDLCNDTNPAPKHKSCGDPGPGNDTCGFHSFFNTPYNNFMSYADDDCTDSFTPNQVARMHCYLDLVYQGWQPSRKPAPVALAPQVLGHTTDSVTLEWFPPIDGHFFERELGSACHLCLEGRILVQYASNASSPMPCSPSGHWSPREAEGHPDVEQPCKSSVRTWSPNSAVNPHTVPPACPEPQGCYLELEFLYPLVPESLTIWVTFVSTDWDSSGAVNDIKLLAVSGKNISLGPQNVFCDVPLTIRLWDVGEEVYGIQIYTLDEHLEIDAAMLTSTADTPLCLQCKPLKYKVVRDPPLQMDVASILHLNRKFVDMDLNLGSVYQYWVITISGTEESEPSPAVTYIHGSGYCGDGIIQKDQGEQCDDMNKINGDGCSLFCRQEVSFNCIDEPSRCYFHDGDGVCEEFEQKTSIKDCGVYTPQGFLDQWASNASVSHQDQQCPGWVIIGQPAASQVCRTKVIDLSEGISQHAWYPCTISYPYSQLAQTTFWLRAYFSQPMVAAAVIVHLVTDGTYYGDQKQETISVQLLDTKDQSHDLGLHVLSCRNNPLIIPVVHDLSQPFYHSQAVRVSFSSPLVAISGVALRSFDNFDPVTLSSCQRGETYSPAEQSCVHFACEKTDCPELAVENASLNCSSSDRYHGAQCTVSCRTGYVLQIRRDDELIKSQTGPSVTVTCTEGKWNKQVACEPVDCSIPDHHQVYAASFSCPEGTTFGSQCSFQCRHPAQLKGNNSLLTCMEDGLWSFPEALCELMCLAPPPVPNADLQTARCRENKHKVGSFCKYKCKPGYHVPGSSRKSKKRAFKTQCTQDGSWQEGACVPVTCDPPPPKFHGLYQCTNGFQFNSECRIKCEDSDASQGLGSNVIHCRKDGTWNGSFHVCQEMQGQCSVPNELNSNLKLQCPDGYAIGSECATSCLDHNSESIILPMNVTVRDIPHWLNPTRVERVVCTAGLKWYPHPALIHCVKGCEPFMGDNYCDAINNRAFCNYDGGDCCTSTVKTKKVTPFPMSCDLQGDCACRDPQAQEHSRKDLRGYSHG

SEQ ID NO: 9998 - protein, 827 aa, Homo sapiens
MMCLKILRISLAILAGWALCSANSELGWTRKKSLVEREHLNQVLLEGERCWLGAKVRRPRASPQHHLFGVYPSRAGNYLRPYPVGEQEIHHTGRSKPDTEGNAVSLVPPDLTENPAGLRGAVEEPAAPWVGDSPIGQSELLGDDDAYLGNQRSKESLGEAGIQKGSAMAATTTTAIFTTLNEPKPETQRRGWAKSRQRRQVWKRRAEDGQGDSGISSHFQPWPKHSLKHRVKKSPPEESNQNGGEGSYREAETFNSQVGLPILYFSGRRERLLLRPEVLAEIPREAFTVEAWVKPEGGQNNPAIIAGVFDNCSHTVSDKGWALGIRSGKDKGKRDARFFFSLCTDRVKKATILISHSRYQPGTWTHVAATYDGRHMALYVDGTQVASSLDQSGPLNSPFMASCRSLLLGGDSSEDGHYFRGHLGTLVFWSTALPQSHFQHSSQHSSGEEEATDLVLTASFEPVNTEWVPFRDEKYPRLEVLQGFEPEPEILSPLQPPLCGQTVCDNVELISQYNGYWPLRGEKVIRYQVVNICDDEGLNPIVSEEQIRLQHEALNEAFSRYNISWQLSVHQVHNSTLRHRVVLVNCEPSKIGNDHCDPECEHPLTGYDGGDCRLQGRCYSWNRRDGLCHVECNNMLNDFDDGDCCDPQVADVRKTCFDPDSPKRAYMSVKELKEALQLNSTHFLNIYFASSVREDLAGAATWPWDKDAVTHLGGIVLSPAYYGMPGHTDTMIHEVGHVLGLYHVFKGVSERESCNDPCKETVPSMETGDLCADTAPTPKSELCREPEPTSDTCGFTRFPGAPFTNYMSYTGITTVLFCFLLRIHGGL

SEQ ID NO: 9999 - protein, 1791 aa, Homo sapiens
MMCLKILRISLAILAGWALCSANSELGWTRKKSLVEREHLNQVLLEGERCWLGAKVRRPRASPQHHLFGVYPSRAGNYLRPYPVGEQEIHHTGRSKPDTEGNAVSLVPPDLTENPAGLRGAVEEPAAPWVGDSPIGQSELLGDDDAYLGNQRSKESLGEAGIQKGSAMAATTTTAIFTTLNEPKPETQRRGWAKSRQRRQVWKRRAEDGQGDSGISSHFQPWPKHSLKHRVKKSPPEESNQNGGEGSYREAETFNSQVGLPILYFSGRRERLLLRPEVLAEIPREAFTVEAWVKPEGGQNNPAIIAGVFDNCSHTVSDKGWALGIRSGKDKGKRDARFFFSLCTDRVKKATILISHSRYQPGTWTHVAATYDGRHMALYVDGTQVASSLDQSGPLNSPFMASCRSLLLGGDSSEDGHYFRGHLGTLVFWSTALPQSHFQHSSQHSSGEEEATDLVLTASFEPVNTEWVPFRDEKYPRLEVLQGFEPEPEILSPLQPPLCGQTVCDNVELISQYNGYWPLRGEKVIRYQVVNICDDEGLNPIVSEEQIRLQHEALNEAFSRYNISWQLSVHQVHNSTLRHRVVLVNCEPSKIGNDHCDPECEHPLTGYDGGDCRLQGRCYSWNRRDGLCHVECNNMLNDFDDGDCCDPQVADVRKTCFDPDSPKRAYMSVKELKEALQLNSTHFLNIYFASSVREDLAGAATWPWDKDAVTHLGGIVLSPAYYGMPGHTDTMIHEVGHVLGLYHVFKGVSERESCNDPCKETVPSMETGDLCADTAPTPKSELCREPEPTSDTCGFTRFPGAPFTNYMSYTDDNCTDNFTPNQVARMHCYLDLVYQQWTESRKPTPIPIPPMVIGQTNKSLTIHWLPPISGVVYDRASGSLCGACTEDGTFRQYVHTASSRRVCDSSGYWTPEEAVGPPDVDQPCEPSLQAWSPEVHLYHMNMTVPCPTEGCSLELLFQHPVQADTLTLWVTSFFMESSQVLFDTEILLENKESVHLGPLDTFCDIPLTIKLHVDGKVSGVKVYTFDERIEIDAALLTSQPHSPLCSGCRPVRYQVLRDPPFASGLPVVVTHSHRKFTDVEVTPGQMYQYQVLAEAGGELGEASPPLNHIHGAPYCGDGKVSERLGEECDDGDLVSGDGCSKVCELEEGFNCVGEPSLCYMYEGDGICEPFERKTSIVDCGIYTPKGYLDQWATRAYSSHEDKKKCPVSLVTGEPHSLICTSYHPDLPNHRPLTGWFPCVASENETQDDRSEQPEGSLKKEDEVWLKVCFNRPGEARAIFIFLTTDGLVPGEHQQPTVTLYLTDVRGSNHSLGTYGLSCQHNPLIINVTHHQNVLFHHTTSVLLNFSSPRVGISAVALRTSSRIGLSAPSNCISEDEGQNHQGQSCIHRPCGKQDSCPSLLLDHADVVNCTSIGPGLMKCAITCQRGFALQASSGQYIRPMQKEILLTCSSGHWDQNVSCLPVDCGVPDPSLVNYANFSCSEGTKFLKRCSISCVPPAKLQGLSPWLTCLEDGLWSLPEVYCKLECDAPPIILNANLLLPHCLQDNHDVGTICKYECKPGYYVAESAEGKVRNKLLKIQCLEGGIWEQGSCIPVVCEPPPPVFEGMYECTNGFSLDSQCVLNCNQEREKLPILCTKEGLWTQEFKLCENLQGECPPPPSELNSVEYKCEQGYGIGAVCSPLCVIPPSDPVMLPENITADTLEHWMEPVKVQSIVCTGRRQWHPDPVLVHCIQSCEPFQADGWCDTINNRAYCHYDGGDCCSSTLSSKKVIPFAADCDLDECTCRDPKAEENQ

SEQ ID NO: 10000 - protein, 678 aa, Homo sapiens
MAAPGPLPAAALSPGAPTPRELMHGVAGVTSRAGRDREAGSVLPAGNRGARKASRRSSSRSMSRDNKFSKKDCLSIRNVVASIQTKEGLNLKLISGDVLYIWADVIVNSVPMNLQLGGGPLSRAFLQKAGPMLQKELDDRRRETEEKVGNIFMTSGCNLDCKAVLHAVAPYWNNGAETSWQIMANIIKKCLTTVEVLSFSSITFPMIGTGSLQFPKAVFAKLILSEVFEYSSSTRPITSPLQEVHFLVYTNDDEGCQAFLDEFTNWSRINPNKARIPMAGDTQGVVGTVSKPCFTAYEMKIGAITFQVATGDIATEQVDVIVNSTARTFNRKSGVSRAILEGAGQAVESECAVLAAQPHRDFIITPGGCLKCKIIIHVPGGKDVRKTVTSVLEECEQRKYTSVSLPAIGTGNAGKNPITVADNIIDAIVDFSSQHSTPSLKTVKVVIFQPELLNIFYDSMKKRDLSASLNFQSTFSMTTCNLPEHWTDMNHQLFCMVQLEPGQSEYNTIKDKFTRTCSSYAIEKIERIQNAFLWQSYQVKKRQMDIKNDHKNNERLLFHGTDADSVPYVNQHGFNRSCAGKNAVSYGKGTYFAVDASYSAKDTYSKPDSNGRKHMYVVRVLTGVFTKGRAGLVTPPPKNPHNPTDLFDSVTNNTRSPKLFVVFFDNQAYPEYLITFTA

SEQ ID NO: 10001 - protein, 483 aa, Homo sapiens
MAAPGPLPAAALSPGAPTPRELMHGVAGVTSRAGRDREAGSVLPAGNRGARKASRRSSSRSMSRDNKFSKKDCLSIRNVVASIQTKEGLNLKLISGDVLYIWADVIVNSVPMNLQLGGGPLSRAFLQKAGPMLQKELDDRRRETEEKVGNIFMTSGCNLDCKAVLHAVAPYWNNGAETSWQVATGDIATEQVDVIVNSTARTFNRKSGVSRAILEGAGQAVESECAVLAAQPHRDFIITPGGCLKCKIIIHVPGGKDVRKTVTSVLEECEQRKYTSVSLPAIGTGNLPEHWTDMNHQLFCMVQLEPGQSEYNTIKDKFTRTCSSYAIEKIERIQNAFLWQSYQVKKRQMDIKNDHKNNERLLFHGTDADSVPYVNQHGFNRSCAGKNAVSYGKGTYFAVDASYSAKDTYSKPDSNGRKHMYVVRVLTGVFTKGRAGLVTPPPKNPHNPTDLFDSVTNNTRSPKLFVVFFDNQAYPEYLITFTA

SEQ ID NO: 10002 - protein, 444 aa, Homo sapiens
MLQRIGLIFLHNIVVVSNCFYFQAFLDEFTNWSRINPNKARIPMAGDTQGVVGTVSKPCFTAYEMKIGAITFQVATGDIATEQVDVIVNSTARTFNRKSGVSRAILEGAGQAVESECAVLAAQPHRDFIITPGGCLKCKIIIHVPGGKDVRKTVTSVLEECEQRKYTSVSLPAIGTGNAGKNPITVADNIIDAIVDFSSQHSTPSLKTVKVVIFQPELLNIFYDSMKKRDLSASLNFQSTFSMTTCNLPEHWTDMNHQLFCMVQLEPGQSEYNTIKDKFTRTCSSYAIEKIERIQNAFLWQSYQVKKRQMDIKNDHKNNERLLFHGTDADSVPYVNQHGFNRSCAGKNAVSYGKGTYFAVDASYSAKDTYSKPDSNGRKHMYVVRVLTGVFTKGRAGLVTPPPKNPHNPTDLFDSVTNNTRSPKLFVVFFDNQAYPEYLITFTA

SEQ ID NO: 10003 - protein, 375 aa, Homo sapiens
MLQRIGLIFLHNIVVVSNCFYFQAFLDEFTNWSRINPNKARIPMAGDTQGVVGTVSKPCFTAYEMKIGAITFQVATGDIATEQVDVIVNSTARTFNRKSGVSRAILEGAGQAVESECAVLAAQPHRDFIITPGGCLKCKIIIHVPGGKDVRKTVTSVLEECEQRKYTSVSLPAIGTGNLPEHWTDMNHQLFCMVQLEPGQSEYNTIKDKFTRTCSSYAIEKIERIQNAFLWQSYQVKKRQMDIKNDHKNNERLLFHGTDADSVPYVNQHGFNRSCAGKNAVSYGKGTYFAVDASYSAKDTYSKPDSNGRKHMYVVRVLTGVFTKGRAGLVTPPPKNPHNPTDLFDSVTNNTRSPKLFVVFFDNQAYPEYLITFTA

SEQ ID NO: 10004 - protein, 397 aa, Homo sapiens
MHHVFKDHQRGEKRGFLSPENKNCRRLELRRGCSCSWGLCSQALMASLAGSLLPGSDRSGVETSEYAQGGVSDLQEEGKNAINSPMSPALVDVHPEDTQLEENEERTMIDPTSKEDPKFKELVKVLLDWINDVLVEERIIVKQLEEDLYDGQVLQKLLEKLAGCKLNVAEVTQSEIGQKQKLQTVLEAVHDLLRPRGWALRWSVDSIHGKNLVAILHLLVSLAMHFRAPIRLPEHVTVQVVVVRKREGLLHSSHISEELTTTTEMMMGRFERDAFDTLFDHAPDKLSVVKKSLITFVNKHLNKLNLEVTELETQFADGVYLVLLMGLLEDYFVPLHHFYLTPESFDQKVHNVSFAFELMLDGGLKKPKARPEDVVNLDLKSTLRVLYNLFTKYKNVE

SEQ ID NO: 10005 - protein, 194 aa, Homo sapiens
MPRLKCSGAVIAHCSLELLASSDPSASASQGARTTVSDLQEEGKNAINSPMSPALVDVHPEDTQLEENEERTMIDPTSKEDPKFKELVKVLLDWINDVLVEERIIVKQLEEDLYDGQVLQKLLEKLAGCKLNVAEVTQSEIGQKQKLQTVLEAVHDLLRPRGWALRWSVDSIHGKNLVAILHLLVSLAMHFRAP

SEQ ID NO: 10006 - protein, 327 aa, Homo sapiens
MSDLQEEGKNAINSPMSPALVDVHPEDTQLEENEERTMIDPTSKEDPKFKELVKVLLDWINDVLVEERIIVKQLEEDLYDGQVLQKLLEKLAGCKLNVAEVTQSEIGQKQKLQTVLEAVHDLLRPRGWALRWSVDSIHGKNLVAILHLLVSLAMHFRAPIRLPEHVTVQVVVVRKREGLLHSSHISEELTTTTEMMMGRFERDAFDTLFDHAPDKLSVVKKSLITFVNKHLNKLNLEVTELETQFADGVYLVLLMGLLEDYFVPLHHFYLTPESFDQKVHNVSFAFELMLDGGLKKPKARPEDVVNLDLKSTLRVLYNLFTKYKNVE

SEQ ID NO: 10007 - protein, 289 aa, Homo sapiens
MSPALVDVHPEDTQLEENEERTMIDPTSKEDPKFKELVKVLLDWINDVLVEERIIVKQLEEDLYDGQVLQKLLEKLAGCKLNVAEVTQSEIGQKQKLQTVLEAVHDLLRPRGWALRWSVDSIHGKNLVAILHLLVSLAMHFRAPIRLPEHVTVQVVVVRKREGLLHSSHISEELTTTTEMMMGRFERDAFDTLFDHAPDKLSVVKKFADGVYLVLLMGLLEDYFVPLHHFYLTPESFDQKVHNVSFAFELMLDGGLKKPKARPEDVVNLDLKSTLRVLYNLFTKYKNVE

SEQ ID NO: 10008 - protein, 364 aa, Homo sapiens
MSSAPRSPTPRPRRMKKDESFLGKLGGTLARKRRAREVSDLQEEGKNAINSPMSPALVDVHPEDTQLEENEERTMIDPTSKEDPKFKELVKVLLDWINDVLVEERIIVKQLEEDLYDGQVLQKLLEKLAGCKLNVAEVTQSEIGQKQKLQTVLEAVHDLLRPRGWALRWSVDSIHGKNLVAILHLLVSLAMHFRAPIRLPEHVTVQVVVVRKREGLLHSSHISEELTTTTEMMMGRFERDAFDTLFDHAPDKLSVVKKSLITFVNKHLNKLNLEVTELETQFADGVYLVLLMGLLEDYFVPLHHFYLTPESFDQKVHNVSFAFELMLDGGLKKPKARPEDVVNLDLKSTLRVLYNLFTKYKNVE

SEQ ID NO: 10009 - protein, 114 aa, Homo sapiens
MDKSLLLELPILLCCFRALSGSLSMRNDAVIEIVQCRMCHLQFPGEKCSRGRGICTATTEEACMVGRMFKRDGNPWLTFMGCLKNCADVKGIRWSVYLVNFRCCRSHDLCNEDL

SEQ ID NO: 10010 - protein, 126 aa, Homo sapiens
MDKSLLLELPILLCCFRALSGSLSMRNDAVNEIVAVKNNFPVIEIVQCRMCHLQFPGEKCSRGRGICTATTEEACMVGRMFKRDGNPWLTFMGCLKNCADVKGIRWSVYLVNFRCCRSHDLCNEDL

SEQ ID NO: 10011 - protein, 113 aa, Homo sapiens
MLVLFLLGTVFLLCPYWGELHDPIKATEIMCYECKKYHLGLCYGVMTSCSLKHKQSCAVENFYILTRKGQSMYHYSKLSCMTSCEDINFLGFTKRVELICCDHSNYCNLPEGV

SEQ ID NO: 10012 - protein, 70 aa, Homo sapiens
MLVLFLLGTVFLLCPYWGELHDPIKGQSMYHYSKLSCMTSCEDINFLGFTKRVELICCDHSNYCNLPEGV

SEQ ID NO: 10013 - protein, 98 aa, Homo sapiens
MNKHFLFLFLLYCLIVAVTSLQCITCHLRTRTDRCRRGFGVCTAQKGEACMLLRIYQRNTLQISYMVCQKFCRDMTFDLRNRTYVHTCCNYNYCNFKL

SEQ ID NO: 10014 - protein, 59 aa, Homo sapiens
MRKMNTLLLVSLSFLYLKEGDKHMYSTHMCKYKCREEESSKRGLLRVTLCCDRNFCNVF

SEQ ID NO: 10015 - protein, 98 aa, Homo sapiens
MRKMNTLLLVSLSFLYLKEVMGLKCNTCIYTEGWKCMAGRGTCIAKENELCSTTAYFRGDKHMYSTHMCKYKCREEESSKRGLLRVTLCCDRNFCNVF

SEQ ID NO: 10016 - protein, 125 aa, Homo sapiens
MLGMSLASLHFLWQTLDYLSPIPFWPTFPSTSSPAQHFGPRLPSPDPTLFCSLLTSWPPRFSHLTQLHPRHQRILQQQQHSQTPREPHFLLTTLLRKCQWWVSLKGCSSWLKVPQPRSLGLSSQT

SEQ ID NO: 10017 - protein, 543 aa, Homo sapiens
MNCLEGPGKTCGPLASEEELVSACQLEKEEENEGEEEEEEEDEEDLDPDLDPDLEEEENDLGDPAVLGAVHNTQRALLSSPGVKAPGMLGMSLASLHFLWQTLDYLSPIPFWPTFPSTSSPAQHFGPRLPSPDPTLFCSLLTSWPPRFSHLTQLHPRHQRILQQQQHSQTPSPPAKKPWSQQPDPYANLMTRKEKDWVIKVQMVQLQSAKPRLDDYYYQEYYQKLEKKQADEELLGRRNRVESLKLVTPYIPKAEAYESVVRIEGSLGQVAVSTCFSPRRAIDAVPHGTQEQDIEAASSQRLRVLYRIEKMFLQLLEIEEGWKYRPPPPCFSEQQSNQVEKLFQTLKTQEQNNLEEAADGFLQVLSVRKGKALVARLLPFLPQDQAVTILLAITHHLPLLVRRDVADQALQMLFKPLGKCISHLTLHELLQGLQGLTLLPPGSSERPVTVVLQNQFGISLLYALLSHGEQLVSLHSSLEEPNSDHTAWTDMVVLIAWEIAQMPTASLAEPLAFPSNLLPLFCHHVDKQLVQQLEARMEFAWIY

SEQ ID NO: 10018 - protein, 543 aa, Homo sapiens; identical to SEQ ID NO: 10017

SEQ ID NO: 10019 - protein, 354 aa, Homo sapiens
MTRKEKDWVIKVQMVQLQSAKPRLDDYYYQEYYQKLEKKQADEELLGRRNRVESLKLVTPYIPKAEAYESVVRIEGSLGQVAVSTCFSPRRAIDAVPHGTQEQDIEAASSQRLRVLYRIEKMFLQLLEIEEGWKYRPPPPCFSEQQSNQVEKLFQTLKTQEQNNLEEAADGFLQVLSVRKGKALVARLLPFLPQDQAVTILLAITHHLPLLVRRDVADQALQMLFKPLGKCISHLTLHELLQGLQGLTLLPPGSSERPVTVVLQNQFGISLLYALLSHGEQLVSLHSSLEEPNSDHTAWTDMVVLIAWEIAQMPTASLAEPLAFPSNLLPLFCHHVDKQLVQQLEARMEFAWIY

SEQ ID NO: 10020 - protein, 158 aa, Homo sapiens
QALQMLFKPLGKCISHLTLHELLQGLQGLTLLPPGSSERPVTVVLQNQDRHGGSDCLGDSPNAYSLSGRTPSFPQQPTSPVLSPRGQTIGSAAGGQDGVCLDLLICLFWNTCMWEVESSDTSYIDYVYRDPESLKTFLMPLYIGEPFPIFISFLQKSK

SEQ ID NO: 10021 - protein, 188 aa, Homo sapiens
  VARIANT 1: note = misc_feature - Xaa can be any naturally occurring amino acid
XENEGEEEEEEEDEEDLDPDLDPDLEEEENDLGDPAVLGAVHNTQRALLSSPGVKAPGMLGMSLASLHFLWQTLDYLSPIPFWPTFPSTSSPAQHFGPRLPSPDPTLFCSLLTSWPPRFSHLTQLHPRHQRILQQQQHSQTPREPHFLLTTLLRKCQWWVSLKGCSSWLKVPQPRSLGLSSQTPMLTS

SEQ ID NO: 10022 - protein, 304 aa, Homo sapiens
MAGPCCVWGVVFFSCLSPAGHGGVNQLGGVFVNGRPLPDVVRQRIVELAHQGVRPCDISRQLRVSHGCVSKILGRYYETGSIKPGVIGGSKPKVATPKVVDKIAEYKRQNPTMFAWEIRDRLLAEGICDNDTVPSVSSINRIIRTKVQQPFHPTPDGAGTGVTAPGHTIVPSTASPPVSSASNDPVGSYSINGILGIPRSNDVSEGSVPNGDSQSGVDSLRKHLRADTFTQQQLEALDRVFERPSYPDVFQASEHIKSEQGNEYSLPALTPGLDEVKSSLSASTNPELGSNVSGTQTYPVVTGR

SEQ ID NO: 10023 - protein, 396 aa, Homo sapiens
MDMHCKADPFSAMHPGHGGVNQLGGVFVNGRPLPDVVRQRIVELAHQGVRPCDISRQLRVSHGCVSKILGRYYETGSIKPGVIGGSKPKVATPKVVDKIAEYKRQNPTMFAWEIRDRLLAEGICDNDTVPSVSSINRIIRTKVQQPFHPTPDGAGTGVTAPGHTIVPSTASPPVSSASNDPVGSYSINGILGIPRSNGEKRKRDEDVSEGSVPNGDSQSGVDSLRKHLRADTFTQQQLEALDRVFERPSYPDVFQASEHIKSEQGNEYSLPALTPGLDEVKSSLSASTNPELGSNVSGTQTYPVVTGRDMASTTLPGYPPHVPPTGQGSYPTSTLAGMVPEAAVGPSSSLMSKPGRKLAEVPPCVQPTGASSPATRTATPSTRPTTRLGDSATPPY

SEQ ID NO: 10024 - protein, 394 aa, Homo sapiens
MDMHCKADPFSAMHPGHGGVNQLGGVFVNGRPLPDVVRQRIVELAHQGVRPCDISRQLRVSHGCVSKILGRYYETGSIKPGVIGGSKPKVATPKVVDKIAEYKRQNPTMFAWEIRDRLLAEGICDNDTVPSVSSINRIIRTKVQQPFHPTPDGAGTGVTAPGHTIVPSTASPPVSSASNDPVGSYSINGILGIPRSNGEKRKRDEDVSEGSVPNGDSQSGVDSLRKHLRADTFTQQQLEALDRVFERPSYPDVFQASEHIKSEQGNEYSLPALTPGLDEVKSSLSASTNPELGSNVSGTQTYPVVTGRDMASTTLPGYPPHVPPTGQGSYPTSTLAGMVPGSEFSGNPYSHPQYTAYNEAWRFSNPALLSSPYYYSAAPRGSAPAAAAAAYDRH

SEQ ID NO: 10025 - protein, 214 aa, Homo sapiens
MDMHCKADPFSAMHPGHGGVNQLGGVFVNGRPLPDVVRQRIVELAHQGVRPCDISRQLRVSHGCVSKILGRYYETGSIKPGVIGGSKPKVATPKVVDKIAEYKRQNPTMFAWEIRDRLLAEGICDNDTVPSVSSINRIIRTKVQQPFHPTPDGAGTGVTAPGHTIVPSTASPPVSSASNDPVGSYSINGILGIPRSNGEKRKRDEVEVYTDPAH

SEQ ID NO: 10026 - protein, 417 aa, Homo sapiens
MDMHCKADPFSAMHPGHGGVNQLGGVFVNGRPLPDVVRQRIVELAHQGVRPCDISRQLRVSHGCVSKILGRYYETGSIKPGVIGGSKPKVATPKVVDKIAEYKRQNPTMFAWEIRDRLLAEGICDNDTVPSVSSINRIIRTKVQQPFHPTPDGAGTGVTAPGHTIVPSTASPPVSSASNDPVGSYSINGILGIPRSNGEKRKRDEVEVYTDPAHIRGGGGLHLVWTLRDVSEGSVPNGDSQSGVDSLRKHLRADTFTQQQLEALDRVFERPSYPDVFQASEHIKSEQGNEYSLPALTPGLDEVKSSLSASTNPELGSNVSGTQTYPVVTGRDMASTTLPGYPPHVPPTGQGSYPTSTLAGMVPGSEFSGNPYSHPQYTAYNEAWRFSNPALLSSPYYYSAAPRGSAPAAAAAAYDRH

SEQ ID NO: 10027 - protein, 393 aa, Homo sapiens
MDMHCKADPFSAMHRHGGVNQLGGVFVNGRPLPDVVRQRIVELAHQGVRPCDISRQLRVSHGCVSKILGRYYETGSIKPGVIGGSKPKVATPKVVDKIAEYKRQNPTMFAWEIRDRLLAEGICDNDTVPSVSSINRIIRTKVQQPFHPTPDGAGTGVTAPGHTIVPSTASPPVSSASNDPVGSYSINGILGIPRSNGEKRKRDEDVSEGSVPNGDSQSGVDSLRKHLRADTFTQQQLEALDRVFERPSYPDVFQASEHIKSEQGNEYSLPALTPGLDEVKSSLSASTNPELGSNVSGTQTYPVVTGRDMASTTLPGYPPHVPPTGQGSYPTSTLAGMVPGSEFSGNPYSHPQYTAYNEAWRFSNPALLSSPYYYSAAPRGSAPAAAAAAYDRH

SEQ ID NO: 10028 - protein, 257 aa, Homo sapiens
MAWSSKSWLCLIASSCPRDTLLPSAHHASPVPASHLTQVSNGCVSKILGRYYRTGVLEPKGIGGSKPRLATPPVVARIAQLKGECPALFAWEIQRQLCAEGLCTQDKTPSVSSINRVLRALQEDQGLPCTRLRSPAVLAPAVLTPHSGSETPRGTHPGTGHRNRTIFSPSQAEALEKEFQRGQYPDSVARGKLATATSLPEDTVRVWFSNRRAKWRRQEKLKWEMQLPGASQGLTVPRVAPGIISAQGPTVFMSRKY

SEQ ID NO: 10029 - protein, 257 aa, Homo sapiens; identical to SEQ ID NO: 10028

SEQ ID NO: 10030 - protein, 341 aa, Homo sapiens
MAWSSKSWLCLIASSCPRDTLLPSAHHASPVPASHLTQVSNGCVSKILGRYYRTGVLEPKGIGGSKPRLATPPVVARIAQLKGECPALFAWEIQRQLCAEGLCTQDKTPSVSSINRVLRALQEDQGLPCTRLRSPAVLAPAVLTPHSGSETPRGTHPGTGHRNRTIFSPSQAEALEKEFQRGQYPDSVARGKLATATSLPEDTVRVWFSNRRAKWRRQEKLKWEMQLPGASQGLTVPRVAPGIISAQQSPGSVPTAALPALEPLGPSCYQLCWATAPERCLSDTPPKACLKPCWGHLPPQPNSLDSGLLCLPCPSSHCHLASLSGSQALLWPGCPLLYGLE

SEQ ID NO: 10031 - protein, 348 aa, Homo sapiens
MHQDGISSMNQLGGLFVNGRPLPLDTRQQIVRLAVSGMRPCDISRILKVSNGCVSKILGRYYRTGVLEPKGIGGSKPRLATPPVVARIAQLKGECPALFAWEIQRQLCAEGLCTQDKTPSVSSINRVLRALQEDQGLPCTRLRSPAVLAPAVLTPHSGSETPRGTHPGTGHRNRTIFSPSQAEALEKEFQRGQYPDSVARGKLATATSLPEDTVRVWFSNRRAKWRRQEKLKWEMQLPGASQGLTVPRVAPGIISAQQSPGSVPTAALPALEPLGPSCYQLCWATAPERCLSDTPPKACLKPCWDCGSFLLPVIAPSCVDVAWPCLDASLAHHLIGGAGKATPTHFSH

SEQ ID NO: 10032 - protein, 349 aa, Homo sapiens
MHQDGISSMNQLGGLFVNGRPLPLDTRQQIVRLAVSGMRPCDISRILKVSNGCVSKILGRYYRTGVLEPKGIGGSKPRLATPPVVARIAQLKGECPALFAWEIQRQLCAEGLCTQDKTPSVSSINRVLRALQEDQGLPCTRLRSPAVLAPAVLTPHSGSETPRGTHPGTGHRNRTIFSPSQAEALEKEFQRGQYPDSVARGKLATATSLPEDTVRVWFSNRRAKWRRQEKLKWEMQLPGASQGLTVPRVAPGIISAQQSPGSVPTAALPALEPLGPSCYQLCWATAPERCLSDTPPKACLKPCWDCGSFLLPVIAPSCVDVAWPCLDASLAHHLIGGAGKATPTHFSHP

SEQ ID NO: 10033 - protein, 351 aa, Homo sapiens
MHQDGISSMNQLGGLFVNGRPLPLDTRQQIVRLAVSGMRPCDISRILKVSNGCVSKILGRYYRTGVLEPKGIGGSKPRLATPPVVARIAQLKGECPALFAWEIQRQLCAEGLCTQDKTPSVSSINRVLRALQEDQGLPCTRLRSPAVLAPAVLTPHSGSETPRGTHPGTGHRNRTIFSPSQAEALEKEFQRGQYPDSVARGKLATATSLPEDTVRVWFSNRRAKWRRQEKLKWEMQLPGASQGLTVPRVAPGIISAQQSPGSVPTAALPALEPLGPSCYQLCWATAPERCLSDTPPKACLKPCWGHLPPQPNSLDSGLLCLPCPSSHCHLASLSGSQALLWPGCPLLYGLE

SEQ ID NO: 10034 - protein, 343 aa, Homo sapiens
MNQLGGLFVNGRPLPLDTRQQIVRLAVSGMRPCDISRILKVSNGCVSKILGRYYRTGVLEPKGIGGSKPRLATPPVVARIAQLKGECPALFAWEIQRQLCAEGLCTQDKTPSVSSINRVLRALQEDQGLPCTRLRSPAVLAPAVLTPHSGSETPRGTHPGTGHRNRTIFSPSQAEALEKEFQRGQYPDSVARGKLATATSLPEDTVRVWFSNRRAKWRRQEKLKWEMQLPGASQGLTVPRVAPGIISAQQSPGSVPTAALPALEPLGPSCYQLCWATAPERCLSDTPPKACLKPCWGHLPPQPNSLDSGLLCLPCPSSHCHLASLSGSQALLWPGCPLLYGLE

SEQ ID NO: 10035 - protein, 423 aa, Homo sapiens
MAAALRVAAVGARLSVLASGLRAAVRSLCSQAITVGAPVIGLNDSGGARIQEGVESLAGYADIFLRNVTASGVIPQISLIMGPCAGGAVYSPALTDFTFMVKDTSYLFITGPDVVKSVTNEDVTQEELGGAKTHTTMSGVAHRAFENDVDALCNLRDFFNYLPLSSQDPAPVRECHDPSDRLVPELDTIVPLESTKAYNMVDIIHSVVDEREFFEIMPNYAKNIIVGFARMNGRTVGIVGNQPKVASGCLDINSSVKGARFVRFCDAFNIPLITFVDVPGFLPGTAQEYGGIIRHGAKLLYAFAEATVPKVTVITRKAYGGAYDVMSSKHLCGDTNYAWPTAEIAVMGAKGAVEIIFKGHENVEAAQAEYIEKFANPFPAAVRGFVDDIIQPSSTRARICCDLDVLASKKVQRPWRKHANIPL

SEQ ID NO: 10036 - protein, 192 aa, Homo sapiens [sequence omitted]

SEQ ID NO: 10037 - protein, 516 aa, Homo sapiens
MAAALRVAAVGARLSVLASGLRAAVRSLCSQATSVNERIENKRRTALLGGGQRRIDAQHKRGKLTARERISLLLDPGSFVESDMFVEHRCADFGMAADKNKDFTVFGGSLSGAHAQKICKIMDQAITVGAPVIGLNDSGGARIQEGVESLAGYADIFLRNVTASGVIPQISLIMGPCAGGAVYSPALTDFTFMVKDTSYLFITGPDVVKSVTNEDVTQEELGGAKTHTTMSGVAHRAFENDVDALCNLRDFFNYLPLSSQDPAPVRECHDPSDRLVPELDTIVPLESTKAYNMVDIIHSVVDEREFFEIMPNYAKNIIVGFARMNGRTVGIVGNQPKVASGCLDINSSVKGARFVRFCDAFNIPLITFVDVPGFLPGTAQEYGGIIRHGAKLLYAFAEATVPKVTVITRKAYGGAYDVMSSKHLCGDTNYAWPTAEIAVMGAKGAVEIIFKGHENVEAAQAEYIEKFANPFPAAVRGFVDDIIQPSSTRARICCDLDVLASKKVQRPWRKHANIPL

SEQ ID NO: 10038 - protein, 539 aa, Homo sapiens
MAAALRVAAVGARLSVLASGLRAAVRSLCSQATSVNERIENKRRTALLGGGQRRIDAQHKRGKLTARERISLLLDPGSFVESDMFVEHRCADFGMAADKNKFPGDSVVTGRGRINGRLVYVFSQDFTVFGGSLSGAHAQKICKIMDQAITVGAPVIGLNDSGGARIQEGVESLAGYADIFLRNVTASGVIPQISLIMGPCAGGAVYSPALTDFTFMVKDTSYLFITGPDVVKSVTNEDVTQEELGGAKTHTTMSGVAHRAFENDVDALCNLRDFFNYLPLSSQDPAPVRECHDPSDRLVPELDTIVPLESTKAYNMVDIIHSVVDEREFFEIMPNYAKNIIVGFARMNGRTVGIVGNQPKVASGCLDINSSVKGARFVRFCDAFNIPLITFVDVPGFLPGTAQEYGGIIRHGAKLLYAFAEATVPKVTVITRKAYGGAYDVMSSKHLCGDTNYAWPTAEIAVMGAKGAVEIIFKGHENVEAAQAEYIEKFANPFPAAVRGFVDDIIQPSSTRARICCDLDVLASKKVQRPWRKHANIPL

SEQ ID NO: 10039 - protein, 559 aa, Homo sapiens
MAAALRVAAVGARLSVLASGLRAAVRSLCSQATSVNERIENKRRTALLGGGQRRIDAQHKRGKLTARERISLLLDPGSFVESDMFVEHRCADFGMAADKNKFPGDSVVTGRGRINGRLVYVFSQDFTVFGGSLSGAHAQKICKIMDQAITVGAPVIGLNDSGGARIQEGVESLAGYADIFLRNVTASGVIPQISLIMGPCAGGAVYSPALTDFTFMVKDTSYLFITGPDVVKSVTNEDVTQEELGGAKTHTTMSGVAHRAFENDVDALCNLRDFFNYLPLSSQDPAPVRECHDPSDRLVPELDTIVPLESTKAYNMVDIIHSVVDEREFFEIMPNYAKNIIVGFARMNGRTVGIVGNQPKVASDSISFTPWNYARRQYRPYFAGCLDINSSVKGARFVRFCDAFNIPLITFVDVPGFLPGTAQEYGGIIRHGAKLLYAFAEATVPKVTVITRKAYGGAYDVMSSKHLCGDTNYAWPTAEIAVMGAKGAVEIIFKGHENVEAAQAEYIEKFANPFPAAVRGFVDDIIQPSSTRARICCDLDVLASKKVQRPWRKHANIPL

SEQ ID NO: 10040 - protein, 303 aa, Homo sapiens
MAAALRVAAVGARLSVLASGLRAAVRSLCSQATSVNERIENKRRTALLGGGQRRIDAQHKRGKLTARERISLLLDPGSFVESDMFVEHRCADFGMAADKNKFPGDSVVTGRGRINGRLVYVFSQDFTVFGGSLSGAHAQKICKIMDQAITVGAPVIGLNDSGGARIQEGVESLAGYADIFLRNVTASGVIPQISLIMGPCAGGAVYSPALTDFTFMVKDTSYLFITGPDVVKSVTNEDVTQEELGGAKTHTTMSGVAHRAFENDVDALCNLRDFFNYLPLSSQDPAPVRECHDPSPTFCLWLH

SEQ ID NO: 10041 - protein, 550 aa, Homo sapiens
MAAALRVAAVGARLSVLASGLRAAVRSLCSQATSVNERIENKRRTALLGGGQRRIDAQHKRGKLTARERISLLLDPGSFVESDMFVEHRCADFGMAADKNKFPGDSVVTGRGRINGRLVYVFSQDFTVFGGSLSGAHAQKICKIMDQAITVGAPVIGLNDSGGARIQEGVESLAGYADIFLRNVTASGVIPQISLIMGPCAGGAVYSPALTDFTFMVKDTSYLFITGPDVVKSVTNEDVTQEELGGAKTHTTMSGVAHRAFENDVDALCNLRDFFNYLPLSSQDPAPVRECHDPSDRLVPELDTIVPLESTKAYNMVDIIHSVVDEREFFEIMPNYAKNIIVGFARMNGRTVGIVGNQPKVASGCLDINSSVKGARFVRFCDAFNIPLITFVDVPGFLPGTAQEYGGIIRHGAKLLYAFAEATVPKVTVITRKAYGGAYDVMSSKHLCGDTNYAWPTAEIAVMGAKGAVEIIFKGHENVEAAQAEYIEKFANPFPAAVRGFVDDIIQPSSTRARICCDLDVLASKKVRVQEVFHQVVQSGHRDGRGAVRW

SEQ ID NO: 10042 - protein, 405 aa, Homo sapiens
MAAALRVAAVGARLSVLASGLRAAVRSLCSQATSVNERIENKRRTALLGGGQRRIDAQHKRGKLTARERISLLLDPGSFVESDMFVEHRCADFGMAADKNKFPGDSVVTGRGRINGRLVYVFSQDFTVFGGSLSGAHAQKICKIMDQAITVGAPVIGLNDSGGARIQEGVESLAGYADIFLRNVTASGVIPQISLIMGPCAGGAVYSPALTDFTFMVKDTSYLFITGPDVVKSVTNEDVTQEELGGAKTHTTMSGVAHRAFENDVDALCNLRDFFNYLPLSSQDPAPVRECHDPSDRLVPELDTIVPLESTKAYNMVDIIHSVVDEREFFEIMPNYAKNIIVGFARMNGRTVGIVGNQPKVASGCLDINSSVKGARFVRFCDAFNIPLITFVDVPGFLPGLWRCL

SEQ ID NO: 10043 - protein, 520 aa, Homo sapiens
MAAALRVAAVGARLSVLASGLRAAVRSLCSQATSVNERIENKRRTALLGGGQRRIDAQHKRGKLTARERISLLLDPGSFVESDMFVEHRCADFGMAADKNKFPGDSVVTGRGRINGRLVYVFSQIMDQAITVGAPVIGLNDSGGARIQEGVESLAGYADIFLRNVTASGVIPQISLIMGPCAGGAVYSPALTDFTFMVKDTSYLFITGPDVVKSVTNEDVTQEELGGAKTHTTMSGVAHRAFENDVDALCNLRDFFNYLPLSSQDPAPVRECHDPSDRLVPELDTIVPLESTKAYNMVDIIHSVVDEREFFEIMPNYAKNIIVGFARMNGRTVGIVGNQPKVASGCLDINSSVKGARFVRFCDAFNIPLITFVDVPGFLPGTAQEYGGIIRHGAKLLYAFAEATVPKVTVITRKAYGGAYDVMSSKHLCGDTNYAWPTAEIAVMGAKGAVEIIFKGHENVEAAQAEYIEKFANPFPAAVRGFVDDIIQPSSTRARICCDLDVLASKKVQRPWRKHANIPL

SEQ ID NO: 10044 - protein, 570 aa, Homo sapiens
MAAALRVAAVGARLSVLASGLRAAVRSLCSQATSVNERIENKRRTALLGGGQRRIDAQHKRGKLTARERISLLLDPGSFVESDMFVEHRCADFGMAADKNKFPGDSVVTGRGRINGRLVYVFSQIRASAMSPRLVSDSWTQAIHLPWPPKVLGLQDFTVFGGSLSGAHAQKICKIMDQAITVGAPVIGLNDSGGARIQEGVESLAGYADIFLRNVTASGVIPQISLIMGPCAGGAVYSPALTDFTFMVKDTSYLFITGPDVVKSVTNEDVTQEELGGAKTHTTMSGVAHRAFENDVDALCNLRDFFNYLPLSSQDPAPVRECHDPSDRLVPELDTIVPLESTKAYNMVDIIHSVVDEREFFEIMPNYAKNIIVGFARMNGRTVGIVGNQPKVASGCLDINSSVKGARFVRFCDAFNIPLITFVDVPGFLPGTAQEYGGIIRHGAKLLYAFAEATVPKVTVITRKAYGGAYDVMSSKHLCGDTNYAWPTAEIAVMGAKGAVEIIFKGHENVEAAQAEYIEKFANPFPAAVRGFVDDIIQPSSTRARICCDLDVLASKKVQRPWRKHANIPL

SEQ ID NO: 10045 - protein, 559 aa, Homo sapiens
MAAALRVAAVGARLSVLASGLRAAVRSLCSQATSVNERIENKRRTALLGGGQRRIDAQHKRGKLTARERISLLLDPGSFVESDMFVEHRCADFGMAADKNKFPGDSVVTGRGRINGRLVYVFSQQIIGWAQWLPLVISALWEAEDFTVFGGSLSGAHAQKICKIMDQAITVGAPVIGLNDSGGARIQEGVESLAGYADIFLRNVTASGVIPQISLIMGPCAGGAVYSPALTDFTFMVKDTSYLFITGPDVVKSVTNEDVTQEELGGAKTHTTMSGVAHRAFENDVDALCNLRDFFNYLPLSSQDPAPVRECHDPSDRLVPELDTIVPLESTKAYNMVDIIHSVVDEREFFEIMPNYAKNIIVGFARMNGRTVGIVGNQPKVASGCLDINSSVKGARFVRFCDAFNIPLITFVDVPGFLPGTAQEYGGIIRHGAKLLYAFAEATVPKVTVITRKAYGGAYDVMSSKHLCGDTNYAWPTAEIAVMGAKGAVEIIFKGHENVEAAQAEYIEKFANPFPAAVRGFVDDIIQPSSTRARICCDLDVLASKKVQRPWRKHANIPL

SEQ ID NO: 10046 - protein, 482 aa, Homo sapiens
MAAALRVAAVGARLSVLASGLRAAVRSLCSQATSVNERIENKRRTALLGGGQRRIDAQHKRGKLTARERISLLLDPGSFVESDMFVEHRCADFGMAADKNKFPGDSVVTGRGRINGRLVYVFSQRNVTASGVIPQISLIMGPCAGGAVYSPALTDFTFMVKDTSYLFITGPDVVKSVTNEDVTQEELGGAKTHTTMSGVAHRAFENDVDALCNLRDFFNYLPLSSQDPAPVRECHDPSDRLVPELDTIVPLESTKAYNMVDIIHSVVDEREFFEIMPNYAKNIIVGFARMNGRTVGIVGNQPKVASGCLDINSSVKGARFVRFCDAFNIPLITFVDVPGFLPGTAQEYGGIIRHGAKLLYAFAEATVPKVTVITRKAYGGAYDVMSSKHLCGDTNYAWPTAEIAVMGAKGAVEIIFKGHENVEAAQAEYIEKFANPFPAAVRGFVDDIIQPSSTRARICCDLDVLASKKVQRPWRKHANIPL

SEQ ID NO: 10047 - protein, 84 aa, Homo sapiens
MFVEHRCADFGMAADKNKFPGDSVVTGRGRINGRLVYVFSQDFTVFGGSLSGAHAQKICKIMDQAITVGAPVIGLNDSGGARIQ

SEQ ID NO: 10048 - protein, 134 aa, Homo sapiens
MFVEHRCADFGMAADKNKFPGDSVVTGRGRINGRLVYVFSQDFTVFGGSLSGAHAQKICKIMDQAITVGAPVIGLNDSGGARIQEGVESLAGYADIFLRNVTASGVIPQISLIMGPCAGGAVYSPALTDFTFMV

SEQ ID NO: 10049 - protein, 163 aa, Homo sapiens
  VARIANT 1: note = misc_feature - Xaa can be any naturally occurring amino acid
XESSWPSEISWAAHFGEGKLTARERISLLLDPGSFVESDMFVEHRCADFGMAADKNKFPGDSVVTGRGRINGRLVYVFSQDFTVFGGSLSGAHAQKICKIMDQAITVGAPVIGLNDSGGARIQEGVESLAGYADIFLRNVTASGVIPQISLIMGPCAGGAVYS

SEQ ID NO: 10050 - protein, 1237 aa, Homo sapiens
MDSGAGGRRCPEAALLILGPPRMEHLRHSPGPGGQRLLLPSMLLALLLLLAPSPGHATRVVYKVPEEQPPNTLIGSLAADYGFPDVGHLYKLEVGAPYLRVDGKTGDIFTTETSIDREGLRECQNQLPGDPCILEFEVSITDLVQNGSPRLLEGQIEVQDINDNTPNFASPVITLAIPENTNIGSLFPIPLASDRDAGPNGVASYELQAGPEAQELFGLQVAEDQEEKQPQLIVMGNLDRERWDSYDLTIKVQDGGSPPRASSALLRVTVLDTNDNAPKFERPSYEAELSENSPIGHSVIQVKANDSDQGANAEIEYTFHQAPEVVRRLLRLDRNTGLITVQGPVDREDLSTLRFSVLAKDRGTNPKSARAQVVVTVKDMNDNAPTIEIRGIGLVTHQDGMANISEDVAEETAVALVQVSDRDEGENAAVTCVVAGDVPFQLRQASETGSDSKKKYFLQTTTPLDYEKVKDYTIEIVAVDSGNPPLSSTNSLKVQVVDVNDNAPVFTQSVTEVAFPENNKPGEVIAEITASDADSGSNAELVYSLEPEPAAKGLFTISPETGEIQVKTSLDREQRESYELKVVAADRGSPSLQGTATVLVNVLDCNDNDPKFMLSGYNFSVMENMPALSPVGMVTVIDGDKGENAQVQLSVEQDNGDFVIQNGTGTILSSLSFDREQQSTYTFQLKAVDGGVPPRSAYVGVTINVLDENDNAPYITAPSNTSHKLLTPQTRLGETVSQVAAEDFDSGVNAELIYSIAGGNPYGLFQIGSHSGAITLEKEIERRHHGLHRLVVKVSDRGKPPRYGTALVHLYVNETLANRTLLETLLGHSLDTPLDIDIAGDPEYERSKQRGNILFGVVAGVVAVALLIALAVLVRYCRQREAKSGYQAGKKETKDLYAPKPSGKASKGNKSKGKKSKSPKPVKPVEDEDEAGLQKSLKFNLMSDAPGDSPRIHLPLNYPPGSPDLGRHYRSNSPLPSIQLQPQSPSASKKHQVVQDLPPANTFVGTGDTTSTGSEQYSDYSYRTNPPKYPSKQLPHRRVTFSATSQAQELQDPSQHSYYDSGLEESETPSSKSSSGPRLGPLALPEDHYERTTPDGSIGEMEHPENDLRPLPDVAMTGTCTRECSEFGHSDTCWMPGQSSPSRRTKSSALKLSTFVPYQDRGGQEPAGAGSPSPPEDRNTKTAPVRLLPSYSAFSHSSHDSCKDSATLEEIPLTQTSDFPPAATPASAQTAKREIYL

SEQ ID NO: 10051 - protein, 1060 aa, Homo sapiens
MDSGAGGRRCPEAALLILGPPRMEHLRHSPGPGGQRLLLPSMLLALLLLLAPSPGHATRVVYKVPEEQPPNTLIGSLAADYGFPDVGHLYKLEVGAPYLRVDGKTGDIFTTETSIDREGLRECQNQLPGDPCILEFEVSITDLVQNGSPRLLEGQIEVQDINDNTPNFASPVITLAIPENTNIGSLFPIPLASDRDAGPNGVASYELQAGPEAQELFGLQVAEDQEEKQPQLIVMGNLDRERWDSYDLTIKVQDGGSPPRASSALLRVTVLDTNDNAPKFERPSYEAELSENSPIGHSVIQVKANDSDQGANAEIEYTFHQAPEVVRRLLRLDRNTGLITVQGPVDREDLSTLRFSVLAKDRGTNPKSARAQVVVTVKDMNDNAPTIEIRGIGLVTHQDGMANISEDVAEETAVALVQVSDRDEGENAAVTCVVAGDVPFQLRQASETGSDSKKKYFLQTTTPLDYEKVKDYTIEIVAVDSGNPPLSSTNSLKVQVVDVNDNAPVFTQSVTEVAFPENNKPGEVIAEITASDADSGSNAELVYSLEPEPAAKGLFTISPETGEIQVKTSLDREQRESYELKVVAADRGSPSLQGTATVLVNVLDCNDNDPKFMLSGYNFSVMENMPALSPVGMVTVIDGDKGENAQVQLSVEQDNGDFVIQNGTGTILSSLSFDREQQSTYTFQLKAVDGGVPPRSAYVGVTINVLDENDNAPYITAPSNTSHKLLTPQTRLGETVSQVAAEDFDSGVNAELIYSIAGGNPYGLFQIGSHSGAITLEKEIERRHHGLHRLVVKVSDRGKPPRYGTALVHLYVNETLANRTLLETLLGHSLDTPLDIDIAGDPEYERSKQRGNILFGVVAGVVAVALLIALAVLVRYCRQREAKSGYQAGKKETKDLYAPKPSGKASKGNKSKGKKSKSPKPVKPVEDEDEAGLQKSLKFNLMSDAPGDSPRIHLPLNYPPGSPDLGRHYRSNSPLPSIQLQPQSPSASKKHQVVQDLPPANTFVGTGDTTSTGSEQYSDYSYRTNPPKYPSKQVGQPFQLSTPQPLPHPYHGAIWTEVWE

SEQ ID NO: 10052 - protein, 382 aa, Homo sapiens
MDSGAGGRRCPEAALLILGPPRMEHLRHSPGPGGQRLLLPSMLLALLLLLAPSPGHATRVVYKVPEEQPPNTLIGSLAADYGFPDVGHLYKLEVGAPYLRVDGKTGDIFTTETSIDREGLRECQNQLPGDPCILEFEVSITDLVQNGSPRLLEGQIEVQDINDNTPNFASPVITLAIPENTNIGSLFPIPLASDRDAGPNGVASYELQAGPEAQELFGLQVAEDQEEKQPQLIVMGNLDRERWDSYDLTIKVQDGGSPPRASSALLRVTVLDTNDNAPKFERPSYEAELSENSPIGHSVIQLPHRRVTFSATSQAQELQDPSQHSYYDSGLEESETPSSKSSSGPRLGPLALPEDHYERTTPDGSIGEMEHPENEPAGRSRP

SEQ ID NO: 10053 - protein, 150 aa, Homo sapiens
MEHLRHSPGPGGQRLLLPSMLLALLLLLAPSPGHATRVVYKVPEEQPPNTLIGSLAADYGFPDVGHLYKLEVGAPYLRVDGKTGDIFTTETSIDREGLRECQNQLPGDPCILEFEVSITDLVQNGSPRLLEGQIEVQDINDNTPNFASPV

SEQ ID NO: 10054 - protein, 126 aa, Homo sapiens
  VARIANT 1: note = misc_feature - Xaa can be any naturally occurring amino acid
XGPNGVASYELQAGPEAQELFGLQVAEDQEEKQPQLIVMGNLDRERWDSYDLTIKVQDGGSPPRASSALLRVTVLDTNDNAPKFERPSYEAELSENSPIGHSVIQSLVDWDLEKRLRKKRETDSRG

SEQ ID NO: 10055 - protein, 17 aa, Homo sapiens
  VARIANT 1: note = misc_feature - Xaa can be any naturally occurring amino acid
XIQVRGPLRITVRVTHH

SEQ ID NO: 10056 - protein, 23 aa, Homo sapiens
MMQLLQLLLGLLGPGGYLFLLGD

SEQ ID NO: 10057 - protein, 1184 aa, Homo sapiens
MMQLLQLLLGLLGPGGYLFLLGDCQEVTTLTVKYQVSEEVPSGTVIGKLSQELGREERRRQAGAAFQVLQLPQALPIQVDSEEGLLSTGRRLDREQLCRQWDPCLVSFDVLATGDLALIHVEIQVLDINDHQPRFPKGEQELEISESASLRTRIPLDRALDPDTGPNTLHTYTLSPSEHFALDVIVGPDETKHAELIVVKELDREIHSFFDLVLTAYDNGNPPKSGTSLVKVNVLDSNDNSPAFAESSLALEIQEDAAPGTLLIKLTATDPDQGPNGEVEFFLSKHMPPEVLDTFSIDAKTGQVILRRPLDYEKNPAYEVDVQARDLGPNPIPAHCKVLIKVLDVNDNIPSIHVTWASQPSLVSEALPKDSFIALVMADDLDSGHNGLVHCWLSQELGHFRLKRTNGNTYMLLTNATLDREQWPKYTLTLLAQDQGLQPLSAKKQLSIQISDINDNAPVFEKSRYEVSTRENNLPSLHLITIKAHDADLGINGKVSYRIQDSPVAHLVAIDSNTGEVTAQRSLNYEEMAGFEFQVIAEDSGQPMLASSVSVWVSLLDANDNAPEVVQPVLSDGKASLSVLVNASTGHLLVPIETPNGLGPAGTDTPPLATHSSRPFLLTTIVARDADSGANGEPLYSIRSGNEAHLFILNPHTGQLFVNVTNASSLIGSEWELEIVVEDQGSPPLQTRALLRVMFVTSVDHLRDSARKPGALSMSMLTVICLAVLLGIFGLILALFMSICRTEKKDNRAYNCREAESTYRQQPKRPQKHIQKADIHLVPVLRGQAGEPCEVGQSHKDVDKEAMMEAGWDPCLQAPFHLTPTLYRTLRNQGNQGAPAESREVLQDTVNLLFNHPRQRNASRENLNLPEPQPATGQPRSRPLKVAGSPTGRLAGDQGSEEAPQRPPASSATLRRQRHLNGKVSPEKESGPRQILRSLVRLSVAAFAERNPVEELTVDSPPVQQISQLLSLLHQGQFQPKPNHRGNKYLAKPGGSRSAIPDTDGPSARAGGQTDPEQEEGPLDPEEDLSVKQLLEEELSSLLDPSTGLALDRLSAPDPAWMARLSLPLTTNYRDNVISPDAAATEEPRTFQTFGKAEAPELSPTGTRLASTFVSEMSSLLEMLLEQRSSMPVEAASEALRRLSVCGRTLSLDLATSAASGMKVQGDPGGKTGTEGKSRGSSSSSRCL

SEQ ID NO: 10058 - protein, 460 aa, Homo sapiens
LVEKKIEDLTEILDRYVQEQIPGAKVVVESIGARRHGDAFSLEDYTKCDLTVYAIDPQTNRAIDRNELFKFLDGKLLDINKDFQPYYGEGGRILEIRTPEAVTSIKKRGESLGYTEGALLALAFIIILCCIPAILVVLVSYRQFKVRQAECTKTARIQAALPAAKPAVPAPAPVAAPPPPPPPPPGAHLYEELGDSSMRGYGSEQQQLLRPSLLKPEELSMESGIDPGQEYGQDYYSYEHGYEMPQYGSRRRLLPPAGQEEYGEVVGEAEEEYEEEEWARKRMIKLVVDREYETSSTGEDSAPECQRNRLHHPSIHSNINGNIYIAQNGSVVRTRRACLTDNLKVASPVRLGGPFKKLDKLAVTHEENVPLNTLSKGPFSTEKMNARPTLVTFAPCPVGTDNTAVKPLRNRLKSTVEQESMIDSKNIKEALEFHSDHTQSDDEELWMGPWNNLHIPMTKL

SEQ ID NO: 10059 - protein, 92 aa, Homo sapiens
MFRQFYLWTCLASGIILGSLFEICLGQYDDDCKLARGGPPATIVAIDEESRNGTILVDNMLIKGTAGGPDPTIELSLKDNVDYWVLMDPVKQ

SEQ ID NO: 10060 - protein, 1915 aa, Homo sapiens
MFRQFYLWTCLASGIILGSLFEICLGQYDDDCKLARGGPPATIVAIDEESRNGTILVDNMLIKGTAGGPDPTIELSLKDNVDYWVLMDPVKQMLFLNSTGRVLDRDPPMNIHSIVVQVQCINKKVGTIIYHEVRIVVRDRNDNSPTFKHESYYATVNELTPVGTTIFTGFSGDNGATDIDDGPNGQIEYVIQYNPDDPDRAQNLNERRTTTTTLTVDVLDGDDLGPMFLPCVLVPNTRDCRPLTYQAAIPELRTPEELNPIIVTPPIQAIDQDRNIQPPSDRPGILYSILVGTPEDYPRFFHMHPRTAELSLLEPVNRDFHQKFDLVIKAEQDNGHPLPAFAGLHIEILDENNQSPYFTMPSYQGYILESAPVGATISDSLNLTSPLRIVALDKDIEDTKDPELHLFLNDYTSVFTVTQTGITRYLTLLQPVDREEQQTYTFSITAFDGVQESEPVIVNIQVMDANDNTPTFPEISYDVYVYTDMRPGDSVIQLTAVDADEGSNGEITYEILVGAQGDFIINKTTGLITIAPGVEMIVGRTYALTVQAADNAPPAERRNSICTVYIEVLPPNNQSPPRFPQLMYSLEISEAMRVGAVLLNLQATDREGDSITYAIENGDPQRVFNLSETTGILTLGKALDRESTDRYILIITASDGRPDGTSTATVNIVVTDVNDNAPVFDPYLPRNLSVVEEEANAFVGQVKATDPDAGINGQVHYSLGNFNNLFRITSNGSIYTAVKLNREVRDYYELVVVATDGAVHPRHSTLTLAIKVLDIDDNSPVFTNSTYTVLVEENLPAGTTILQIEAKDVDLGANVSYRIRSPEVKHFFALHPFTGELSLLRSLDYEAFPDQEASITFLVEAFDIYGTMPPGIATVTVIVKDMNDYPPVFSKRIYKGMVAPDAVKGTPITTVYAEDADPPGLPASRVRYRVDDVQFPYPASIFEVEEDSGRVITRVNLNEEPTTIFKLVVVAFDDGEPVMSSSATVKILVLHPGEIPRFTQEEYRPPPVSELATKGTMVGVISAAAINQSIVYSIVSGNEEDTFGINNITGVIYVNGPLDYETRTSYVLRVQADSLEVVLANLRVPSKSNTAKVYIEIQDENNHPPVFQKKFYIGGVSEDARMFTSVLRVKATDKDTGNYSVMAYRLIIPPIKEGKEGFVVETYTGLIKTAMLFHNMRRSYFKFQVIATDDYGKGLSGKADVLVSVVNQLDMQVIVSNVPPTLVEKKIEDLTEILDRYVQEQIPGAKVVVESIGARRHGDAFSLEDYTKCDLTVYAIDPQTNRAIDRNELFKFLDGKLLDINKDFQPYYGEGGRILEIRTPEAVTSIKKRGESLGYTEGALLALAFIIILCCIPAILVVLVSYRQRQAECTKTARIQAALPAAKPAVPAPAPVAAPPPPPPPPPGAHLYEELGDSSILFLLYHFQQSRGNNSVSEDRKHQQVVMPFSSNTIEAHKSAHVDGSLKSNKLKSARKFTFLSDEDDLSAHNPLYKENISQVSTNSDISQRTDFVDPFSPKIQAKSKSLRGPREKIQRLWSQSVSLPRRLMRKVPNRPEIIDLQQWQGTRQKAENENTGICTNKRGSSNPLLTTEEANLTEKEEIRQGETLMIEGTEQLKSLSSDSSFCFPRPHFSFSTLPTVSRTVELKSEPNVISSPAECSLELSPSRPCVLHSSLSRRETPICMLPIETERNIFENFAHPPNISPSACPLPPPPPISPPSPPPAPAPLAPPPDISPFSLFCPPPSPPSIPLPLPPPTFFPLSVSTSGPPTPPLLPPFPTPLPPPPPSIPCPPPPSASFLSTECVCITGVKCTTNLMPAEKIKSSMTQLSTTTVCKTDPQREPKGILRHVKNLAELEKSVANMYSQIEKNYLRTNVSELQTMCPSEVTNMEITSEQNKGSLNNIVEGTEKQSHSQSTSL

SEQ ID NO: 10061 - protein, 1955 aa, Homo sapiens
MFRQFYLWTCLASGIILGSLFEICLGQYDDDCKLARGGPPATIVAIDEESRNGTILVDNMLIKGTAGGPDPTIELSLKDNVDYWVLMDPVKQMLFLNSTGRVLDRDPPMNIHSIVVQVQCINKKVGTIIYHEVRIVVRDRNDNSPTFKHESYYATVNELTPVGTTIFTGFSGDNGATDIDDGPNGQIEYVIQYNPDDPTSNDTFEIPLMLTGNIVLRKRLNYEDKTRYFVIIQANDRAQNLNERRTTTTTLTVDVLDGDDLGPMFLPCVLVPNTRDCRPLTYQAAIPELRTPEELNPIIVTPPIQAIDQDRNIQPPSDRPGILYSILVGTPEDYPRFFHMHPRTAELSLLEPVNRDFHQKFDLVIKAEQDNGHPLPAFAGLHIEILDENNQSPYFTMPSYQGYILESAPVGATISDSLNLTSPLRIVALDKDIEDTKDPELHLFLNDYTSVFTVTQTGITRYLTLLQPVDREEQQTYTFSITAFDGVQESEPVIVNIQVMDANDNTPTFPEISYDVYVYTDMRPGDSVIQLTAVDADEGSNGEITYEILVGAQGDFIINKTTGLITIAPGVEMIVGRTYALTVQAADNAPPAERRNSICTVYIEVLPPNNQSPPRFPQLMYSLEISEAMRVGAVLLNLQATDREGDSITYAIENGDPQRVFNLSETTGILTLGKALDRESTDRYILIITASDGRPDGTSTATVNIVVTDVNDNAPVFDPYLPRNLSVVEEEANAFVGQVKATDPDAGINGQVHYSLGNFNNLFRITSNGSIYTAVKLNREVRDYYELVVVATDGAVHPRHSTLTLAIKVLDIDDNSPVFTNSTYTVLVEENLPAGTTILQIEAKDVDLGANVSYRIRSPEVKHFFALHPFTGELSLLRSLDYEAFPDQEASITFLVEAFDIYGTMPPGIATVTVIVKDMNDYPPVFSKRIYKGMVAPDAVKGTPITTVYAEDADPPGLPASRVRYRVDDVQFPYPASIFEVEEDSGRVITRVNLNEEPTTIFKLVVVAFDDGEPVMSSSATVKILVLHPGEIPRFTQEEYRPPPVSELATKGTMVGVISAAAINQSIVYSIVSGNEEDTFGINNITGVIYVNGPLDYETRTSYVLRVQADSLEVVLANLRVPSKSNTAKVYIEIQDENNHPPVFQKKFYIGGVSEDARMFTSVLRVKATDKDTGNYSVMAYRLIIPPIKEGKEGFVVETYTGLIKTAMLFHNMRRSYFKFQVIATDDYGKGLSGKADVLVSVVNQLDMQVIVSNVPPTLVEKKIEDLTEILDRYVQEQIPGAKVVVESIGARRHGDAFSLEDYTKCDLTVYAIDPQTNRAIDRNELFKFLDGKLLDINKDFQPYYGEGGRILEIRTPEAVTSIKKRGESLGYTEGALLALAFIIILCCIPAILVVLVSYRQFKVRQAECTKTARIQAALPAAKPAVPAPAPVAAPPPPPPPPPGAHLYEELGDSSILFLLYHFQQSRGNNSVSEDRKHQQVVMPFSSNTIEAHKSAHVDGSLKSNKLKSARKFTFLSDEDDLSAHNPLYKENISQVSTNSDISQRTDFVDPFSPKIQAKSKSLRGPREKIQRLWSQSVSLPRRLMRKVPNRPEIIDLQQWQGTRQKAENENTGICTNKRGSSNPLLTTEEANLTEKEEIRQGETLMIEGTEQLKSLSSDSSFCFPRPHFSFSTLPTVSRTVELKSEPNVISSPAECSLELSPSRPCVLHSSLSRRETPICMLPIETERNIFENFAHPPNISPSACPLPPPPPISPPSPPPAPAPLAPPPDISPFSLFCPPPSPPSIPLPLPPPTFFPLSVSTSGPPTPPLLPPFPTPLPPPPPSIPCPPPPSASFLSTECVCITGVKCTTNLMPAEKIKSSMTQLSTTTVCKTDPQREPKGILRHVKNLAELEKSVANMYSQIEKNYLRTNVSELQTMCPSEVTNMEITSEQNKGSLNNIVEGTEKQSHSQSTSL

SEQ ID NO: 10062 - protein, 961 aa, Homo sapiens
MFRQFYLWTCLASGIILGSLFEICLGQYDDDCKLARGGPPATIVAIDEESRNGTILVDNMLIKGTAGGPDPTIELSLKDNVDYWVLMDPVKQMLFLNSTGRVLDRDPPMNIHSIVVQVQCINKKVGTIIYHEVRIVVRDRNDNSPTFKHESYYATVNELTPVGTTIFTGFSGDNGATDIDDGPNGQIEYVIQYNPDDPTSNDTFEIPLMLTGNIVLRKRLNYEDKTRYFVIIQANDRAQNLNERRTTTTTLTVDVLDGDDLGPMFLPCVLVPNTRDCRPLTYQAAIPELRTPEELNPIIVTPPIQAIDQDRNIQPPSDRPGILYSILVGTPEDYPRFFHMHPRTAELSLLEPVNRDFHQKFDLVIKAEQDNGHPLPAFAGLHIEILDENNQSPYFTMPSYQGYILESAPVGATISDSLNLTSPLRIVALDKDIEDTKDPELHLFLNDYTSVFTVTQTGITRYLTLLQPVDREEQQTYTFSITAFDGVQESEPVIVNIQVMDANDNTPTFPEISYDVYVYTDMRPGDSVIQLTAVDADEGSNGEITYEILVGAQGDFIINKTTGLITIAPGVEMIVGRTYALTVQAADNAPPAERRNSICTVYIEVLPPNNQSPPRFPQLMYSLEISEAMRVGAVLLNLQATDREGDSITYAIENGDPQRVFNLSETTGILTLGKALDRESTDRYILIITASDGRPDGTSTATVNIVVTDVNDNAPVFDPYLPRNLSVVEEEANAFVGQVKATDPDAGINGQVHYSLGNFNNLFRITSNGSIYTAVKLNREVRDYYELVVVATDGAVHPRHSTLTLAIKVLDIDDNSPVFTNSTYTVLVEENLPAGTTILQIEAKDVDLGANVSYRIRSPEVKHFFALHPFTGELSLLRSLDYEAFPDQEASITFLVEAFDIYGTMPPGIATVTVIVKDMNDYPPVFSKRIYKGMVAPDAVKGTPITTVYAEDADPPVSRRH

SEQ ID NO: 10063 - protein, 654 aa, Homo sapiens
MFRQFYLWTCLASGIILGSLFEICLGQYDDDCKLARGGPPATIVAIDEESRNGTILVDNMLIKGTAGGPDPTIELSLKDNVDYWVLMDPVKQMLFLNSTGRVLDRDPPMNIHSIVVQVQCINKKVGTIIYHEVRIVVRDRNDNSPTFKHESYYATVNELTPVGTTIFTGFSGDNGATDIDDGPNGQIEYVIQYNPDDPTSNDTFEIPLMLTGNIVLRKRLNYEDKTRYFVIIQANDRAQNLNERRTTTTTLTVDVLDGDDLGPMFLPCVLVPNTRDCRPLTYQAAIPELRTPEELNPIIVTPPIQAIDQDRNIQPPSDRPGILYSILVGTPEDYPRFFHMHPRTAELSLLEPVNRDFHQKFDLVIKAEQDNGHPLPAFAGLHIEILDENNQSPYFTMPSYQGYILESAPVGATISDSLNLTSPLRIVALDKDIEDTKDPELHLFLNDYTSVFTVTQTGITRYLTLLQPVDREEQQTYTFSITAFDGVQESEPVIVNIQVMDANDNTPTFPEISYDVYVYTDMRPGDSVIQLTAVDADEGSNGEITYEILVGAQGDFIINKTTGLITIAPGVEMIVGRTYALTVQAADNAPPAERRNSICTVYIEVLPPNNQSPPRFPQLMYSLEISEAMRVGAVLLNLQHGDSNLRESTGQGKH

SEQ ID NO: 10064 - protein, 1677 aa, Homo sapiens
MFRQFYLWTCLASGIILGSLFEICLGQYDDDCKLARGGPPATIVAIDEESRNGTILVDNMLIKGTAGGPDPTIELSLKDNVDYWVLMDPVKQMLFLNSTGRVLDRDPPMNIHSIVVQVQCINKKVGTIIYHEVRIVVRDRNDNSPTFKHESYYATVNELTPVGTTIFTGFSGDNGATDIDDGPNGQIEYVIQYNPDDPTSNDTFEIPLMLTGNIVLRKRLNYEDKTRYFVIIQANDRAQNLNERRTTTTTLTVDVLDGDDLGPMFLPCVLVPNTRDCRPLTYQAAIPELRTPEELNPIIVTPPIQAIDQDRNIQPPSDRPGILYSILVGTPEDYPRFFHMHPRTAELSLLEPVNRDFHQKFDLVIKAEQDNGHPLPAFAGLHIEILDENNQSPYFTMPSYQGYILESAPVGATISDSLNLTSPLRIVALDKDIEDTKDPELHLFLNDYTSVFTVTQTGITRYLTLLQPVDREEQQTYTFSITAFDGVQESEPVIVNIQVMDANDNTPTFPEISYDVYVYTDMRPGDSVIQLTAVDADEGSNGEITYEILVGAQGDFIINKTTGLITIAPGVEMIVGRTYALTVQAADNAPPAERRNSICTVYIEVLPPNNQSPPRFPQLMYSLEISEAMRVGAVLLNLQATDREGDSITYAIENGDPQRVFNLSETTGILTLGKALDRESTDRYILIITASDGRPDGTSTATVNIVVTDVNDNAPVFDPYLPRNLSVVEEEANAFVGQVKATDPDAGINGQVHYSLGNFNNLFRITSNGSIYTAVKLNREVRDYYELVVVATDGAVHPRHSTLTLAIKVLDIDDNSPVFTNSTYTVLVEENLPAGTTILQIEAKDVDLGANVSYRIRSPEVKHFFALHPFTGELSLLRSLDYEAFPDQEASITFLVEAFDIYGTMPPGIATVTVIVKDMNDYPPVFSKRIYKGMVAPDAVKGTPITTVYAEDADPPGLPASRVRYRVDDVQFPYPASIFEVEEDSGRVITRVNLNEEPTTIFKLVVVAFDDGEPVMSSSATVKILVLHPGEIPRFTQEEYRPPPVSELATKGTMVGVISAAAINQSIVYSIVSGNEEDTFGINNITGVIYVNGPLDYETRTSYVLRVQADSLEVVLANLRVPSKSNTAKVYIEIQDENNHPPVFQKKFYIGGVSEDARMFTSVLRVKATDKDTGNYSVMAYRLIIPPIKEGKEGFVVETYTGLIKTAMLFHNMRRSYFKFQVIATDDYGKGLSGKADVLVSVVNQLDMQVIVSNVPPTLVEKKIEDLTEILDRYVQEQIPGAKVVVESIGARRHGDAFSLEDYTKCDLTVYAIDPQTNRAIDRNELFKFLDGKLLDINKDFQPYYGEGGRILEIRTPEAVTSIKKRGESLGYTEGALLALAFIIILCCIPAILVVLVSYRQFKVRQAECTKTARIQAALPAAKPAVPAPAPVAAPPPPPPPPPGAHLYEELGDSSMHKYEMPQYGSRRRLLPPAGQEEYGEVVGEAEEEYEEEEWARKRMIKLVVDREYETSSTGEDSAPECQRNRLHHPSIHSNINGNIYIAQNGSVVRTRRACLTDNLKVASPVRLGGPFKKLDKLAVTHEENVPLNTLSKGPFSTEKMNARPTLVTFAPCPVGTDNTAVKPLRNRLKSTVEQESMIDSKNIKEALEFHSDHTQSDDEELWMGPWNNLHIPMTKL

SEQ ID NO: 10065 - protein, 1957 aa, Homo sapiens
MFRQFYLWTCLASGIILGSLFEICLGQYDDDCKLARGGPPATIVAIDEESRNGTILVDNMLIKGTAGGPDPTIELSLKDNVDYWVLMDPVKQMLFLNSTGRVLDRDPPMNIHSIVVQVQCINKKVGTIIYHEVRIVVRDRNDNSPTFKHESYYATVNELTPVGTTIFTGFSGDNGATDIDDGPNGQIEYVIQYNPDDPTSNDTFEIPLMLTGNIVLRKRLNYEDKTRYFVIIQANDRAQNLNERRTTTTTLTVDVLDGDDLGPMFLPCVLVPNTRDCRPLTYQAAIPELRTPEELNPIIVTPPIQAIDQDRNIQPPSDRPGILYSILVGTPEDYPRFFHMHPRTAELSLLEPVNRDFHQKFDLVIKAEQDNGHPLPAFAGLHIEILDENNQSPYFTMPSYQGYILESAPVGATISDSLNLTSPLRIVALDKDIEDTKDPELHLFLNDYTSVFTVTQTGITRYLTLLQPVDREEQQTYTFSITAFDGVQESEPVIVNIQVMDANDNTPTFPEISYDVYVYTDMRPGDSVIQLTAVDADEGSNGEITYEILVGAQGDFIINKTTGLITIAPGVEMIVGRTYALTVQAADNAPPAERRNSICTVYIEVLPPNNQSPPRFPQLMYSLEISEAMRVGAVLLNLQATDREGDSITYAIENGDPQRVFNLSETTGILTLGKALDRESTDRYILIITASDGRPDGTSTATVNIVVTDVNDNAPVFDPYLPRNLSVVEEEANAFVGQVKATDPDAGINGQVHYSLGNFNNLFRITSNGSIYTAVKLNREVRDYYELVVVATDGAVHPRHSTLTLAIKVLDIDDNSPVFTNSTYTVLVEENLPAGTTILQIEAKDVDLGANVSYRIRSPEVKHFFALHPFTGELSLLRSLDYEAFPDQEASITFLVEAFDIYGTMPPGIATVTVIVKDMNDYPPVFSKRIYKGMVAPDAVKGTPITTVYAEDADPPGLPASRVRYRVDDVQFPYPASIFEVEEDSGRVITRVNLNEEPTTIFKLVVVAFDDGEPVMSSSATVKILVLHPGEIPRFTQEEYRPPPVSELATKGTMVGVISAAAINQSIVYSIVSGNEEDTFGINNITGVIYVNGPLDYETRTSYVLRVQADSLEVVLANLRVPSKSNTAKVYIEIQDENNHPPVFQKKFYIGGVSEDARMFTSVLRVKATDKDTGNYSVMAYRLIIPPIKEGKEGFVVETYTGLIKTAMLFHNMRRSYFKFQVIATDDYGKGLSGKADVLVSVVNQLDMQVIVSNVPPTLVEKKIEDLTEILDRYVQEQIPGAKVVVESIGARRHGDAFSLEDYTKCDLTVYAIDPQTNRAIDRNELFKFLDGKLLDINKDFQPYYGEGGRILEIRTPEAVTSIKKRGESLGYTEGALLALAFIIILCCIPAILVVLVSYRQFKVRQAECTKTARIQAALPAAKPAVPAPAPVAAPPPPPPPPPGAHLYEELGDSSMHNLFLLYHFQQSRGNNSVSEDRKHQQVVMPFSSNTIEAHKSAHVDGSLKSNKLKSARKFTFLSDEDDLSAHNPLYKENISQVSTNSDISQRTDFVDPFSPKIQAKSKSLRGPREKIQRLWSQSVSLPRRLMRKVPNRPEIIDLQQWQGTRQKAENENTGICTNKRGSSNPLLTTEEANLTEKEEIRQGETLMIEGTEQLKSLSSDSSFCFPRPHFSFSTLPTVSRTVELKSEPNVISSPAECSLELSPSRPCVLHSSLSRRETPICMLPIETERNIFENFAHPPNISPSACPLPPPPPISPPSPPPAPAPLAPPPDISPFSLFCPPPSPPSIPLPLPPPTFFPLSVSTSGPPTPPLLPPFPTPLPPPPPSIPCPPPPSASFLSTECVCITGVKCTTNLMPAEKIKSSMTQLSTTTVCKTDPQREPKGILRHVKNLAELEKSVANMYSQIEKNYLRTNVSELQTMCPSEVTNMEITSEQNKGSLNNIVEGTEKQSHSQSTSL

SEQ ID NO: 10066 - protein, 1540 aa, Homo sapiens
MFRQFYLWTCLASGIILGSLFEICLGQYDDDCKLARGGPPATIVAIDEESRNGTILVDNMLIKGTAGGPDPTIELSLKDNVDYWVLMDPVKQMLFLNSTGRVLDRDPPMNIHSIVVQVQCINKKVGTIIYHEVRIVVRDRNDNSPTFKHESYYATVNELTPVGTTIFTGFSGDNGATDIDDGPNGQIEYVIQYNPDDPTSNDTFEIPLMLTGNIVLRKRLNYEDKTRYFVIIQANDRAQNLNERRTTTTTLTVDVLDGDDLGPMFLPCVLVPNTRDCRPLTYQAAIPELRTPEELNPIIVTPPIQAIDQDRNIQPPSDRPGILYSILVGTPEDYPRFFHMHPRTAELSLLEPVNRDFHQKFDLVIKAEQDNGHPLPAFAGLHIEILDENNQSPYFTMPSYQGYILESAPVGATISDSLNLTSPLRIVALDKDIEDTKDPELHLFLNDYTSVFTVTQTGITRYLTLLQPVDREEQQTYTFSITAFDGVQESEPVIVNIQVMDANDNTPTFPEISYDVYVYTDMRPGDSVIQLTAVDADEGSNGEITYEILVGAQGDFIINKTTGLITIAPGVEMIVGRTYALTVQAADNAPPAERRNSICTVYIEVLPPNNQSPPRFPQLMYSLEISEAMRVGAVLLNLQATDREGDSITYAIENGDPQRVFNLSETTGILTLGKALDRESTDRYILIITASDGRPDGTSTATVNIVVTDVNDNAPVFDPYLPRNLSVVEEEANAFVGQVKATDPDAGINGQVHYSLGNFNNLFRITSNGSIYTAVKLNREVRDYYELVVVATDGAVHPRHSTLTLAIKVLDIDDNSPVFTNSTYTVLVEENLPAGTTILQIEAKDVDLGANVSYRIRSPEVKHFFALHPFTGELSLLRSLDYEAFPDQEASITFLVEAFDIYGTMPPGIATVTVIVKDMNDYPPVFSKRIYKGMVAPDAVKGTPITTVYAEDADPPGLPASRVRYRVDDVQFPYPASIFEVEEDSGRVITRVNLNEEPTTIFKLVVVAFDDGEPVMSSSATVKILVLHPGEIPRFTQEEYRPPPVSELATKGTMVGVISAAAINQSIVYSIVSGNEEDTFGINNITGVIYVNGPLDYETRTSYVLRVQADSLEVVLANLRVPSKSNTAKVYIEIQDENNHPPVFQKKFYIGGVSEDARMFTSVLRVKATDKDTGNYSVMAYRLIIPPIKEGKEGFVVETYTGLIKTAMLFHNMRRSYFKFQVIATDDYGKGLSGKADVLVSVVNQLDMQVIVSNVPPTLVEKKIEDLTEILDRYVQEQIPGAKVVVESIGARRHGDAFSLEDYTKCDLTVYAIDPQTNRAIDRNELFKFLDGKLLDINKDFQPYYGEGGRILEIRTPEAVTSIKKRGESLGYTEGALLALAFIIILCCIPAILVVLVSYRQVFKGRQAECTKTARIQAALPAAKPAVPAPAPVAAPPPPPPPPPGAHLYEELGDSSMNRNYPWSLELILARNMDKIITVMSMGMKCLNMGVAVDCYHQLDRRNMVRWLVKLRKNMRRKRKSQRKLKNQRLKLESLVRRKK

SEQ ID NO: 10067 - protein, 654 aa, Homo sapiens; identical to SEQ ID NO: 10063

SEQ ID NO: 10068 - protein, 1783 aa, Homo sapiens
MFRQFYLWTCLASGIILGSLFEICLGQYDDDCKLARGGPPATIVAIDEESRNGTILVDNMLIKGTAGGPDPTIELSLKDNVDYWVLMDPVKQMLFLNSTGRVLDRDPPMNIHSIVVQVQCINKKVGTIIYHEVRIVVRDRNDNSPTFKHESYYATVNELTPVGTTIFTGFSGDNGATDIDDGPNGQIEYVIQYNPDDPTSNDTFEIPLMLTGNIVLRKRLNYEDKTRYFVIIQANDRAQNLNERRTTTTTLTVDVLDGDDLGPMFLPCVLVPNTRDCRPLTYQAAIPELRTPEELNPIIVTPPIQAIDQDRNIQPPSDRPGILYSILVGTPEDYPRFFHMHPRTAELSLLEPVNRDFHQKFDLVIKAEQDNGHPLPAFAGLHIEILDENNQSPYFTMPSYQGYILESAPVGATISDSLNLTSPLRIVALDKDIEDVPPSGVPTKDPELHLFLNDYTSVFTVTQTGITRYLTLLQPVDREEQQTYTFSITAFDGVQESEPVIVNIQVMDANDNTPTFPEISYDVYVYTDMRPGDSVIQLTAVDADEGSNGEITYEILVGAQGDFIINKTTGLITIAPGVEMIVGRTYALTVQAADNAPPAERRNSICTVYIEVLPPNNQSPPRFPQLMYSLEISEAMRVGAVLLNLQATDREGDSITYAIENGDPQRVFNLSETTGILTLGKALDRESTDRYILIITASDGRPDGTSTATVNIVVTDVNDNAPVFDPYLPRNLSVVEEEANAFVGQVKATDPDAGINGQVHYSLGNFNNLFRITSNGSIYTAVKLNREVRDYYELVVVATDGAVHPRHSTLTLAIKVLDIDDNSPVFTNSTYTVLVEENLPAGTTILQIEAKDVDLGANVSYRIRSPEVKHFFALHPFTGELSLLRSLDYEAFPDQEASITFLVEAFDIYGTMPPGIATVTVIVKDMNDYPPVFSKRIYKGMVAPDAVKGTPITTVYAEDADPPGLPASRVRYRVDDVQFPYPASIFEVEEDSGRVITRVNLNEEPTTIFKLVVVAFDDGEPVMSSSATVKILVLHPGEIPRFTQEEYRPPPVSELATKGTMVGVISAAAINQSIVYSIVSGNEEDTFGINNITGVIYVNGPLDYETRTSYVLRVQADSLEVVLANLRVPSKSNTAKVYIEIQDENNHPPVFQKKFYIGGVSEDARMFTSVLRVKATDKDTGNYSVMAYRLIIPPIKEGKEGFVVETYTGLIKTAMLFHNMRRSYFKFQVIATDDYGKGLSGKADVLVSVVNQLDMQVIVSNVPPTLVEKKIEDLTEILDRYVQEQIPGAKVVVESIGARRHGDAFSLEDYTKCDLTVYAIDPQTNRAIDRNELFKFLDGKLLDINKDFQPYYGEGGRILEIRTPEAVTSIKKRGESLGYTEGALLALAFIIILCCIPAILVVLVSYRQFKVRQAECTKTARIQAALPAAKPAVPAPAPVAAPPPPPPPPPGAHLYEELGDSSMYEMPQYGSRRRLLPPAGQEEYGEVVGEAEEEYEEEEEEPKKIKKPKVEIREPSEEEEVVVTIEKPPAAEPTYTTWKRARIFPMIFKKVRGLADKRGIVDLEGEEWQRRLEEEDKDYLKLTLDQEEATESTVESEEESSSDYTEYSEEESEFSESETTEEESESETPSEEEESSTPESEESESTESEGEKARKNIVLARRRPMVEEVKEVKGRKEEPQEEQKEPKMEEEEHSEEEESGPAPVEESTDPEAQDIPEEGSAESASVEGGVESEEESESGSSSSSSESQSGGPWGYQVPAYDRSKNANQKKSPGANSEGYNTAL

SEQ ID NO: 10069 - protein, 1886 aa, Homo sapiens
MFRQFYLWTCLASGIILGSLFEICLGQYDDDCKLARGGPPATIVAIDEESRNGTILVDNMLIKGTAGGPDPTIELSLKDNVDYWVLMDPVKQMLFLNSTGRVLDRDPPMNIHSIVVQVQCINKKVGTIIYHEVRIVVRDRNDNSPTFKHESYYATVNELTPVGTTIFTGFSGDNGATDIDDGPNGQIEYVIQYNPDDPTSNDTFEIPLMLTGNIVLRKRLNYEDKTRYFVIIQANDRAQNLNERRTTTTTLTVDVLDGDDLGPMFLPCVLVPNTRDCRPLTYQAAIPELRTPEELNPIIVTPPIQAIDQDRNIQPPSDRPGILYSILVGTPEDYPRFFHMHPRTAELSLLEPVNRDFHQKFDLVIKAEQDNGHPLPAFAGLHIEILDENNQSPYFTMPSYQGYILESAPVGATISDSLNLTSPLRIVALDKDIEDTKDPELHLFLNDYTSVFTVTQTGITRYLTLLQPVDREEQQTYTFSITAFDGVQESEPVIVNIQVMDANDNTPTFPEISYDVYVYTDMRPGDSVIQLTAVDADEGSNGEITYEILVGAQGDFIINKTTGLITIAPGVEMIVGRTYALTVQAADNAPPAERSTGILTLGKALDRESTDRYILIITASDGRPDGTSTATVNIVVTDVNDNAPVFDPYLPRNLSVVEEEANAFVGQVKATDPDAGINGQVHYSLGNFNNLFRITSNGSIYTAVKLNREVRDYYELVVVATDGAVHPRHSTLTLAIKVLDIDDNSPVFTNSTYTVLVEENLPAGTTILQIEAKDVDLGANVSYRIRSPEVKHFFALHPFTGELSLLRSLDYEAFPDQEASITFLVEAFDIYGTMPPGIATVTVIVKDMNDYPPVFSKRIYKGMVAPDAVKGTPITTVYAEDADPPGLPASRVRYRVDDVQFPYPASIFEVEEDSGRVITRVNLNEEPTTIFKLVVVAFDDGEPVMSSSATVKILVLHPGEIPRFTQEEYRPPPVSELATKGTMVGVISAAAINQSIVYSIVSGNEEDTFGINNITGVIYVNGPLDYETRTSYVLRVQADSLEVVLANLRVPSKSNTAKVYIEIQDENNHPPVFQKKFYIGGVSEDARMFTSVLRVKATDKDTGNYSVMAYRLIIPPIKEGKEGFVVETYTGLIKTAMLFHNMRRSYFKFQVIATDDYGKGLSGKADVLVSVVNQLDMQVIVSNVPPTLVEKKIEDLTEILDRYVQEQIPGAKVVVESIGARRHGDAFSLEDYTKCDLTVYAIDPQTNRAIDRNELFKFLDGKLLDINKDFQPYYGEGGRILEIRTPEAVTSIKKRGESLGYTEGALLALAFIIILCCIPAILVVLVSYRQFKVRQAECTKTARIQAALPAAKPAVPAPAPVAAPPPPPPPPPGAHLYEELGDSSMHNLFLLYHFQQSRGNNSVSEDRKHQQVVMPFSSNTIEAHKSAHVDGSLKSNKLKSARKFTFLSDEDDLSAHNPLYKENISQVSTNSDISQRTDFVDPFSPKIQAKSKSLRGPREKIQRLWSQSVSLPRRLMRKVPNRPEIIDLQQWQGTRQKAENENTGICTNKRGSSNPLLTTEEANLTEKEEIRQGETLMIEGTEQLKSLSSDSSFCFPRPHFSFSTLPTVSRTVELKSEPNVISSPAECSLELSPSRPCVLHSSLSRRETPICMLPIETERNIFENFAHPPNISPSACPLPPPPPISPPSPPPAPAPLAPPPDISPFSLFCPPPSPPSIPLPLPPPTFFPLSVSTSGPPTPPLLPPFPTPLPPPPPSIPCPPPPSASFLSTECVCITGVKCTTNLMPAEKIKSSMTQLSTTTVCKTDPQREPKGILRHVKNLAELEKSVANMYSQIEKNYLRTNVSELQTMCPSEVTNMEITSEQNKGSLNNIVEGTEKQSHSQSTSL

SEQ ID NO: 10070 - protein, 1676 aa, Homo sapiens
MFRQFYLWTCLASGIILGSLFEICLGQYDDDCKLARGGPPATIVAIDEESRNGTILVDNMLIKGTAGGPDPTIELSLKDNVDYWVLMDPVKQMLFLNSTGRVLDRDPPMNIHSIVVQVQCINKKVGTIIYHEVRIVVRDRNDNSPTFKHESYYATVNELTPVGTTIFTGFSGDNGATDIDDGPNGQIEYVIQYNPDDPTSNDTFEIPLMLTGNIVLRKRLNYEDKTRYFVIIQANDRAQNLNERRTTTTTLTVDVLDGDDLGPMFLPCVLVPNTRDCRPLTYQAAIPELRTPEELNPIIVTPPIQAIDQDRNIQPPSDRPGILYSILVGTPEDYPRFFHMHPRTAELSLLEPVNRDFHQKFDLVIKAEQDNGHPLPAFAGLHIEILDENNQSPYFTMPSYQGYILESAPVGATISDSLNLTSPLRIVALDKDIEDTKDPELHLFLNDYTSVFTVTQTGITRYLTLLQPVDREEQQTYTFSITAFDGVQESEPVIVNIQVMDANDNTPTFPEISYDVYVYTDMRPGDSVIQLTAVDADEGSNGEITYEILVGAQGDFIINKTTGLITIAPGVEMIVGRTYALTVQAADNAPPAERRNSICTVYIEVLPPNNQSPPRFPQLMYSLEISEAMRVGAVLLNLQATDREGDSITYAIENGDPQRVFNLSETTGILTLGKALDRESTDRYILIITASDGRPDGTSTATVNIVVTDVNDNAPVFDPYLPRNLSVVEEEANAFVGQVKATDPDAGINGQVHYSLGNFNNLFRITSNGSIYTAVKLNREVRDYYELVVVATDGAVHPRHSTLTLAIKVLDIDDNSPVFTNSTYTVLVEENLPAGTTILQIEAKDVDLGANVSYRIRSPEVKHFFALHPFTGELSLLRSLDYEAFPDQEASITFLVEAFDIYGTMPPGIATVTVIVKDMNDYPPVFSKRIYKGMVAPDAVKGTPITTVYAEDADPPGLPASRVRYRVDDVQFPYPASIFEVEEDSGRVITRVNLNEEPTTIFKLVVVAFDDGEPVMSSSATVKILVLHPGEIPRFTQEEYRPPPVSELATKGTMVGVISAAAINQSIVYSIVSGNEEDTFGINNITGVIYVNGPLDYETRTSYVLRVQADSLEVVLANLRVPSKSNTAKVYIEIQDENNHPPVFQKKFYIGGVSEDARMFTSVLRVKATDKDTGNYSVMAYRLIIPPIKEGKEGFVVETYTGLIKTAMLFHNMRRSYFKFQVIATDDYGKGLSGKADVLVSVVNQLDMQVIVSNVPPTLVEKKIEDLTEILDRYVQEQIPGAKVVVESIGARRHGDAFSLEDYTKCDLTVYAIDPQTNRAIDRNELFKFLDGKLLDINKDFQPYYGEGGRILEIRTPEAVTSIKKRGESLGYTEGALLALAFIIILCCIPAILVVLVSYRQVFKGRQAECTKTARIQAALPAAKPAVPAPAPVAAPPPPPPPPPGAHLYEELGDSSMYEMPQYGSRRRLLPPAGQEEYGEVVGEAEEEYEEEEWARKRMIKLVVDREYETSSTGEDSAPECQRNRLHHPSIHSNINGNIYIAQNGSVVRTRRACLTDNLKVASPVRLGGPFKKLDKLAVTHEENVPLNTLSKGPFSTEKMNARPTLVTFAPCPVGTDNTAVKPLRNRLKSTVEQESMIDSKNIKEALEFHSDHTQSDDEELWMGPWNNLHIPMTKL

SEQ ID NO: 10071 - protein, 650 aa, Homo sapiens
MFRQFYLWTCLASGIILGSLFEICLGQYDDDCKLARGGPPATIVAIDEESRNGTILVDNMLIKGTAGGPDPTIELSLKDNVDYWVLMDPVKQMLFLNSTGRVLDRDPPMNIHSIVVQVQCINKKVGTIIYHEVRIVVRDRNDNSPTFKHESYYATVNELTPVGTTIFTGFSGDNGATDIDDGPNGQIEYVIQYNPDDPTSNDTFEIPLMLTGNIVLRKRLNYEDKTRYFVIIQANDRAQNLNERRTTTTTLTVDVLDGDDLGPMFLPCVLVPNTRDCRPLTYQAAIPELRTPEELNPIIVTPPIQAIDQDRNIQPPSDRPGILYSILVGTPEDYPRFFHMHPRTAELSLLEPVNRDFHQKFDLVIKEEPKKIKKPKVEIREPSEEEEVVVTIEKPPAAEPTYTTWKRARIFPMIFKKVRGLADKRGIVDLEGEEWQRRLEEEDKDYLKLTLDQEEATESTVESEEESSSDYTEYSEEESEFSESETTEEESESETPSEEEESSTPESEESESTESEGEKARKNIVLARRRPMVEEVKEVKGRKEEPQEEQKEPKMEEEEHSEEEESGPAPVEESTDPEAQDIPEEGSAESASVEGGVESEEESESGSSSSSSESQSGGPWGYQVPAYDRSKNANQKKSPGANSEGYNTAL

SEQ ID NO: 10072 - protein, 981 aa, Homo sapiens
MFRQFYLWTCLASGIILGSLFEICLGQYDDDCKLARGGPPATIVAIDEESRNGTILVDNMLIKGTAGGPDPTIELSLKDNVDYWVLMDPVKQMLFLNSTGRVLDRDPPMNIHSIVVQVQCINKKVGTIIYHEVRIVVRDRNDNSPTFKHESYYATVNELTPVGTTIFTGFSGDNGATDIDDGPNGQIEYVIQYNPDDPTSNDTFEIPLMLTGNIVLRKRLNYEDKTRYFVIIQANDRAQNLNERRTTTTTLTVDVLDGDDLGPMFLPCVLVPNTRDCRPLTYQAAIPELRTPEELNPIIVTPPIQAIDQDRNIQPPSDRPGILYSILVGTPEDYPRFFHMHPRTAELSLLEPVNRDFHQKFDLVIKAEQDNGHPLPAFAGLHIEILDENNQSPYFTMPSYQGYILESAPVGATISDSLNLTSPLRIVALDKDIEDTKDPELHLFLNDYTSVFTVTQTGITRYLTLLQPVDREEQQTYTFSITAFDGVQESEPVIVNIQVMDANDNTPTFPEISYDVYVYTDMRPGDSVIQLTAVDADEGSNGEITYEILVGAQGDFIINKTTGLITIAPGVEMIVGRTYALTVQAADNAPPAERRNSICTVYIEVLPPNNQSPPRFPQLMYSLEISEAMRVGAVLLNLQATDREGDSITYAIENGDPQRVFNLSETTGILTLGKALDRESTDRYILIITASDGRPDGEEPKKIKKPKVEIREPSEEEEVVVTIEKPPAAEPTYTTWKRARIFPMIFKKVRGLADKRGIVDLEGEEWQRRLEEEDKDYLKLTLDQEEATESTVESEEESSSDYTEYSEEESEFSESETTEEESESETPSEEEESSTPESEESESTESEGEKARKNIVLARRRPMVEEVKEVKGRKEEPQEEQKEPKMEEEEHSEEEESGPAPVEESTDPEAQDIPEEGSAESASVEGGVESEEESESGSSSSSSESQSGGPWGYQVPAYDRSKNANQKKSPGANSEGYNTAL

SEQ ID NO: 10073 - protein, 329 aa, Homo sapiens
MFRQFYLWTCLASGIILGSLFEICLGQYDDDCKLARGGPPATIVAIDEESRNGTILVDNMLIKGTAGGPDPTIELSLKDNVDYWVLMDPVKQMLFLNSTGRVLDRDPPMNIHSIVVQVQCINKKVGTIIYHEVRIVVRDRNDNSPTFKHESYYATVNELTPVGTTIFTGFSGDNGATDIDDGPNGQIEYVIQYNPDDPTSNDTFEIPLMLTGNIVLRKRLNYEDKTRYFVIIQANDRAQNLNERRTTTTTLTVDVLDGDDLGPMFLPCVLVPNTRDCRPLTYQAAIPELRTPDLGSLCSGTNSWCQGRSGVHWSSPAWRCLFPRRLHQM

SEQ ID NO: 10074 - protein, 719 aa, Homo sapiens
MFRQFYLWTCLASGIILGSLFEICLGQYDDDCKLARGGPPATIVAIDEESRNGTILVDNMLIKGTAGGPDPTIELSLKDNVDYWVLMDPVKQMLFLNSTGRVLDRDPPMNIHSIVVQVQCINKKVGTIIYHEVRIVVRDRNDNSPTFKHESYYATVNELTPVGTTIFTGFSGDNGATDIDDGPNGQIEYVIQYNPDDPTSNDTFEIPLMLTGNIVLRKRLNYEDKTRYFVIIQANDRAQNLNERRTTTTTLTVDVLDGDDLGPMFLPCVLVPNTRDCRPLTYQAAIPELRTPEELNPIIVTPPIQAIDQDRNIQPPSDRPGILYSILVGTPEDYPRFFHMHPRTAELSLLEPVNRDFHQKFDLVIKAEQDNGHPLPAFAGLHIEILDENNQSPYFTMPSYQGYILESAPVGATISDSLNLTSPLRIVALDKDIEDEEPKKIKKPKVEIREPSEEEEVVVTIEKPPAAEPTYTTWKRARIFPMIFKKVRGLADKRGIVDLEGEEWQRRLEEEDKDYLKLTLDQEEATESTVESEEESSSDYTEYSEEESEFSESETTEEESESETPSEEEESSTPESEESESTESEGEKARKNIVLARRRPMVEEVKEVKGRKEEPQEEQKEPKMEEEEHSEEEESGPAPVEESTDPEAQDIPEEGSAESASVEGGVESEEESESGSSSSSSESQSGGPWGYQVPAYDRSKNANQKKSPGANSEGYNTAL

SEQ ID NO: 10075 - protein, 1952 aa, Homo sapiens
MFRQFYLWTCLASGIILGSLFEICLGQYDDDCKLARGGPPATIVAIDEESRNGTILVDNMLIKGTAGGPDPTIELSLKDNVDYWVLMDPVKQMLFLNSTGRVLDRDPPMNIHSIVVQVQCINKKVGTIIYHEVRIVVRDRNDNSPTFKHESYYATVNELTPVGTTIFTGFSGDNGATDIDDGPNGQIEYVIQYNPDDPTSNDTFEIPLMLTGNIVLRKRLNYEDKTRYFVIIQANDRAQNLNERRTTTTTLTVDVLDGDDLGPMFLPCVLVPNTRDCRPLTYQAAIPELRTPEELNPIIVTPPIQAIDQDRNIQPPSDRPGILYSILVGTPEDYPRFFHMHPRTAELSLLEPVNRDFHQKFDLVIKAEQDNGHPLPAFAGLHIEILDENNQSPYFTMPSYQGYILESAPVGATISDSLNLTSPLRIVALDKDIEDTKDPELHLFLNDYTSVFTVTQTGITRYLTLLQPVDREEQQTYTFSITAFDGVQESEPVIVNIQVMDANDNTPTFPEISYDVYVYTDMRPGDSVIQLTAVDADEGSNGEITYEILVGAQGDFIINKTTGLITIAPGVEMIVGRTYALTVQAADNAPPAERRNSICTVYIEVLPPNNQSPPRFPQLMYSLEISEAMRVGAVLLNLQATDREGDSITYAIENGDPQRVFNLSETTGILTLGKALDRESTDRYILIITASDGRPDGTSTATVNIVVTDVNDNAPVFDPYLPRNLSVVEEEANAFVGQVKATDPDAGINGQVHYSLGNFNNLFRITSNGSIYTAVKLNREVRDYYELVVVATDGAVHPRHSTLTLAIKVLDIDDNSPVFTNSTYTVLVEENLPAGTTILQIEAKDVDLGANVSYRIRSPEVKHFFALHPFTGELSLLRSLDYEAFPDQEASITFLVEAFDIYGTMPPGIATVTVIVKDMNDYPPVFSKRIYKGMVAPDAVKGTPITTVYAEDADPPGLPASRVRYRVDDVQFPYPASIFEVEEDSGRVITRVNLNEEPTTIFKLVVVAFDDGEPVMSSSATVKILVLHPGEIPRFTQEEYRPPPVSELATKGTMVGVISAAAINQSIVYSIVSGNEEDTFGINNITGVIYVNGPLDYETRTSYVLRVQADSLEVVLANLRVPSKSNTAKVYIEIQDENNHPPVFQKKFYIGGVSEDARMFTSVLRVKATDKDTGNYSVMAYRLIIPPIKEGKEGFVVETYTGLIKTAMLFHNMRRSYFKFQVIATDDYGKGLSGKADVLVSVVNQLDMQVIVSNVPPTLVEKKIEDLTEILDRYVQEQIPGAKVVVESIGARRHGDAFSLEDYTKCDLTVYAIDPQTNRAIDRNELFKFLDGKLLDINKDFQPYYGEGGRILEIRTPEAVTSIKKRGESLGYTEGALLALAFIIILCCIPAILVVLVSYRQRQAECTKTARIQAALPAAKPAVPAPAPVAAPPPPPPPPPGAHLYEELGDSSILFLLYHFQQSRGNNSVSEDRKHQQVVMPFSSNTIEAHKSAHVDGSLKSNKLKSARKFTFLSDEDDLSAHNPLYKENISQVSTNSDISQRTDFVDPFSPKIQAKSKSLRGPREKIQRLWSQSVSLPRRLMRKVPNRPEIIDLQQWQGTRQKAENENTGICTNKRGSSNPLLTTEEANLTEKEEIRQGETLMIEGTEQLKSLSSDSSFCFPRPHFSFSTLPTVSRTVELKSEPNVISSPAECSLELSPSRPCVLHSSLSRRETPICMLPIETERNIFENFAHPPNISPSACPLPPPPPISPPSPPPAPAPLAPPPDISPFSLFCPPPSPPSIPLPLPPPTFFPLSVSTSGPPTPPLLPPFPTPLPPPPPSIPCPPPPSASFLSTECVCITGVKCTTNLMPAEKIKSSMTQLSTTTVCKTDPQREPKGILRHVKNLAELEKSVANMYSQIEKNYLRTNVSELQTMCPSEVTNMEITSEQNKGSLNNIVEGTEKQSHSQSTSL

SEQ ID NO: 10076 - protein, 1539 aa, Homo sapiens
MFRQFYLWTCLASGIILGSLFEICLGQYDDDCKLARGGPPATIVAIDEESRNGTILVDNMLIKGTAGGPDPTIELSLKDNVDYWVLMDPVKQMLFLNSTGRVLDRDPPMNIHSIVVQVQCINKKVGTIIYHEVRIVVRDRNDNSPTFKHESYYATVNELTPVGTTIFTGFSGDNGATDIDDGPNGQIEYVIQYNPDDPTSNDTFEIPLMLTGNIVLRKRLNYEDKTRYFVIIQANDRAQNLNERRTTTTTLTVDVLDGDDLGPMFLPCVLVPNTRDCRPLTYQAAIPELRTPEELNPIIVTPPIQAIDQDRNIQPPSDRPGILYSILVGTPEDYPRFFHMHPRTAELSLLEPVNRDFHQKFDLVIKAEQDNGHPLPAFAGLHIEILDENNQSPYFTMPSYQGYILESAPVGATISDSLNLTSPLRIVALDKDIEDTKDPELHLFLNDYTSVFTVTQTGITRYLTLLQPVDREEQQTYTFSITAFDGVQESEPVIVNIQVMDANDNTPTFPEISYDVYVYTDMRPGDSVIQLTAVDADEGSNGEITYEILVGAQGDFIINKTTGLITIAPGVEMIVGRTYALTVQAADNAPPAERRNSICTVYIEVLPPNNQSPPRFPQLMYSLEISEAMRVGAVLLNLQATDREGDSITYAIENGDPQRVFNLSETTGILTLGKALDRESTDRYILIITASDGRPDGTSTATVNIVVTDVNDNAPVFDPYLPRNLSVVEEEANAFVGQVKATDPDAGINGQVHYSLGNFNNLFRITSNGSIYTAVKLNREVRDYYELVVVATDGAVHPRHSTLTLAIKVLDIDDNSPVFTNSTYTVLVEENLPAGTTILQIEAKDVDLGANVSYRIRSPEVKHFFALHPFTGELSLLRSLDYEAFPDQEASITFLVEAFDIYGTMPPGIATVTVIVKDMNDYPPVFSKRIYKGMVAPDAVKGTPITTVYAEDADPPGLPASRVRYRVDDVQFPYPASIFEVEEDSGRVITRVNLNEEPTTIFKLVVVAFDDGEPVMSSSATVKILVLHPGEIPRFTQEEYRPPPVSELATKGTMVGVISAAAINQSIVYSIVSGNEEDTFGINNITGVIYVNGPLDYETRTSYVLRVQADSLEVVLANLRVPSKSNTAKVYIEIQDENNHPPVFQKKFYIGGVSEDARMFTSVLRVKATDKDTGNYSVMAYRLIIPPIKEGKEGFVVETYTGLIKTAMLFHNMRRSYFKFQVIATDDYGKGLSGKADVLVSVVNQLDMQVIVSNVPPTLVEKKIEDLTEILDRYVQEQIPGAKVVVESIGARRHGDAFSLEDYTKCDLTVYAIDPQTNRAIDRNELFKFLDGKLLDINKDFQPYYGEGGRILEIRTPEAVTSIKKRGESLGYTEGALLALAFIIILCCIPAILVVLVSYRQFKVRQAECTKTARIQAALPAAKPAVPAPAPVAAPPPPPPPPPGAHLYEELGDSSMHKNYPWSLELILARNMDKIITVMSMGMKCLNMGVAVDCYHQLDRRNMVRWLVKLRKNMRRKRKSQRKLKNQRLKLESLVRRKK

SEQ ID NO: 10077 - protein, 1675 aa, Homo sapiens
MFRQFYLWTCLASGIILGSLFEICLGQYDDDCKLARGGPPATIVAIDEESRNGTILVDNMLIKGTAGGPDPTIELSLKDNVDYWVLMDPVKQMLFLNSTGRVLDRDPPMNIHSIVVQVQCINKKVGTIIYHEVRIVVRDRNDNSPTFKHESYYATVNELTPVGTTIFTGFSGDNGATDIDDGPNGQIEYVIQYNPDDPTSNDTFEIPLMLTGNIVLRKRLNYEDKTRYFVIIQANDRAQNLNERRTTTTTLTVDVLDGDDLGPMFLPCVLVPNTRDCRPLTYQAAIPELRTPEELNPIIVTPPIQAIDQDRNIQPPSDRPGILYSILVGTPEDYPRFFHMHPRTAELSLLEPVNRDFHQKFDLVIKAEQDNGHPLPAFAGLHIEILDENNQSPYFTMPSYQGYILESAPVGATISDSLNLTSPLRIVALDKDIEDTKDPELHLFLNDYTSVFTVTQTGITRYLTLLQPVDREEQQTYTFSITAFDGVQESEPVIVNIQVMDANDNTPTFPEISYDVYVYTDMRPGDSVIQLTAVDADEGSNGEITYEILVGAQGDFIINKTTGLITIAPGVEMIVGRTYALTVQAADNAPPAERRNSICTVYIEVLPPNNQSPPRFPQLMYSLEISEAMRVGAVLLNLQATDREGDSITYAIENGDPQRVFNLSETTGILTLGKALDRESTDRYILIITASDGRPDGTSTATVNIVVTDVNDNAPVFDPYLPRNLSVVEEEANAFVGQVKATDPDAGINGQVHYSLGNFNNLFRITSNGSIYTAVKLNREVRDYYELVVVATDGAVHPRHSTLTLAIKVLDIDDNSPVFTNSTYTVLVEENLPAGTTILQIEAKDVDLGANVSYRIRSPEVKHFFALHPFTGELSLLRSLDYEAFPDQEASITFLVEAFDIYGTMPPGIATVTVIVKDMNDYPPVFSKRIYKGMVAPDAVKGTPITTVYAEDADPPGLPASRVRYRVDDVQFPYPASIFEVEEDSGRVITRVNLNEEPTTIFKLVVVAFDDGEPVMSSSATVKILVLHPGEIPRFTQEEYRPPPVSELATKGTMVGVISAAAINQSIVYSIVSGNEEDTFGINNITGVIYVNGPLDYETRTSYVLRVQADSLEVVLANLRVPSKSNTAKVYIEIQDENNHPPVFQKKFYIGGVSEDARMFTSVLRVKATDKDTGNYSVMAYRLIIPPIKEGKEGFVVETYTGLIKTAMLFHNMRRSYFKFQVIATDDYGKGLSGKADVLVSVVNQLDMQVIVSNVPPTLVEKKIEDLTEILDRYVQEQIPGAKVVVESIGARRHGDAFSLEDYTKCDLTVYAIDPQTNRAIDRNELFKFLDGKLLDINKDFQPYYGEGGRILEIRTPEAVTSIKKRGESLGYTEGALLALAFIIILCCIPAILVVLVSYRQFKVRQAECTKTARIQAALPAAKPAVPAPAPVAAPPPPPPPPPGAHLYEELGDSSMYEMPQYGSRRRLLPPAGQEEYGEVVGEAEEEYEEEEWARKRMIKLVVDREYETSSTGEDSAPECQRNRLHHPSIHSNINGNIYIAQNGSVVRTRRACLTDNLKVASPVRLGGPFKKLDKLAVTHEENVPLNTLSKGPFSTEKMNARPTLVTFAPCPVGTDNTAVKPLRNRLKSTVEQESMIDSKNIKEALEFHSDHTQSDDEELWMGPWNNLHIPMTKL

SEQ ID NO: 10078 - protein, 1740 aa, Homo sapiens
MFRQFYLWTCLASGIILGSLFEICLGQYDDDCKLARGGPPATIVAIDEESRNGTILVDNMLIKGTAGGPDPTIELSLKDNVDYWVLMDPVKQMLFLNSTGRVLDRDPPMNIHSIVVQVQCINKKVGTIIYHEVRIVVRDRNDNSPTFKHESYYATVNELTPVGTTIFTGFSGDNGATDIDDGPNGQIEYVIQYNPDDPTSNDTFEIPLMLTGNIVLRKRLNYEDKTRYFVIIQANDRAQNLNERRTTTTTLTVDVLDGDDLGPMFLPCVLVPNTRDCRPLTYQAAIPELRTPEELNPIIVTPPIQAIDQDRNIQPPSDRPGILYSILVGTPEDYPRFFHMHPRTAELSLLEPVNRDFHQKFDLVIKAEQDNGHPLPAFAGLHIEILDENNQSPYFTMPSYQGYILESAPVGATISDSLNLTSPLRIVALDKDIEDTKDPELHLFLNDYTSVFTVTQTGITRYLTLLQPVDREEQQTYTFSITAFDGVQESEPVIVNIQVMDANDNTPTFPEISYDVYVYTDMRPGDSVIQLTAVDADEGSNGEITYEILVGAQGDFIINKTTGLITIAPGVEMIVGRTYALTVQAADNAPPAERRNSICTVYIEVLPPNNQSPPRFPQLMYSLEISEAMRVGAVLLNLQATDREGDSITYAIENGDPQRVFNLSETTGILTLGKALDRESTDRYILIITASDGRPDGTSTATVNIVVTDVNDNAPVFDPYLPRNLSVVEEEANAFVGQVKATDPDAGINGQVHYSLGNFNNLFRITSNGSIYTAVKLNREVRDYYELVVVATDGAVHPRHSTLTLAIKVLDIDDNSPVFTNSTYTVLVEENLPAGTTILQIEAKDVDLGANVSYRIRSPEVKHFFALHPFTGELSLLRSLDYEAFPDQEASITFLVEAFDIYGTMPPGIATVTVIVKDMNDYPPVFSKRIYKGMVAPDAVKGTPITTVYAEDADPPGLPASRVRYRVDDVQFPYPASIFEVEEDSGRVITRVNLNEEPTTIFKLVVVAFDDGEPVMSSSATVKILVLHPGEIPRFTQEEYRPPPVSELATKGTMVGVISAAAINQSIVYSIVSGNEEDTFGINNITGVIYVNGPLDYETRTSYVLRVQADSLEVVLANLRVPSKSNTAKVYIEIQDENNHPPVFQKKFYIGGVSEDARMFTSVLRVKATDKDTGNYSVMAYRLIIPPIKEGKEGFVVETYTGLIKTAMLFHNMRRSYFKFQVIATDDYGKGLSGKADVLVSVVNQLDMQVIVSNVPPTLVEKKIEDLTEILDRYVQEQIPGAKVVVESIGARRHGDAFSLEDYTKCDLTVYAIDPQTNRAIDRNELFKFLDGKLLDINKDFQPYYGEGGRILEIRTPEAVTSIKKRGESLGYTEGALLALAFIIILCCIPAILVVLVSYRQFKVRQAECTKTARIQAALPAAKPAVPAPAPVAAPPPPPPPPPGAHLYEELGDSSIWSFCWQLVICMRTCAIWRTLTRRGYGSEQQQLLRPSLLKPEELSMESGIDPGQEYGQDYYSYEHGYEMPQYGSRRRLLPPAGQEEYGEVVGEAEEEYEEEEWARKRMIKLVVDREYETSSTGEDSAPECQRNRLHHPSIHSNINGNIYIAQNGSVVRTRRACLTDNLKVASPVRLGGPFKKLDKLAVTHEENVPLNTLSKGPFSTEKMNARPTLVTFAPCPVGTDNTAVKPLRNRLKSTVEQESMIDSKNIKEALEFHSDHTQSDDEELWMGPWNNLHIPMTKL

SEQ ID NO: 10079 - protein, 1888 aa, Homo sapiens
MFRQFYLWTCLASGIILGSLFEICLGQYDDDCKLARGGPPATIVAIDEESRNGTILVDNMLIKGTAGGPDPTIELSLKDNVDYWVLMDPVKQMLFLNSTGRVLDRDPPMNIHSIVVQVQCINKKVGTIIYHEVRIVVRDRNDNSPTFKHESYYATVNELTPVGTTIFTGFSGDNGATDIDDGPNGQIEYVIQYNPDDPTSNDTFEIPLMLTGNIVLRKRLNYEDKTRYFVIIQANDRAQNLNERRTTTTTLTVDVLDGDDLGPMFLPCVLVPNTRDCRPLTYQAAIPELRTPEELNPIIVTPPIQAIDQDRNIQPPSDRPGILYSILVGTPEDYPRFFHMHPRTAELSLLEPVNRDFHQKFDLVIKAEQDNGHPLPAFAGLHIEILDENNQSPYFTMPSYQGYILESAPVGATISDSLNLTSPLRIVALDKDIEDTKDPELHLFLNDYTSVFTVTQTGITRYLTLLQPVDREEQQTYTFSITAFDGVQESEPVIVNIQVMDANDNTPTFPEISYDVYVYTDMRPGDSVIQLTAVDADEGSNGEITYEILVGAQGDFIINKTTGLITIAPGVEMIVGRTYALTVQAADNAPPAERSTGILTLGKALDRESTDRYILIITASDGRPDGTSTATVNIVVTDVNDNAPVFDPYLPRNLSVVEEEANAFVGQVKATDPDAGINGQVHYSLGNFNNLFRITSNGSIYTAVKLNREVRDYYELVVVATDGAVHPRHSTLTLAIKVLDIDDNSPVFTNSTYTVLVEENLPAGTTILQIEAKDVDLGANVSYRIRSPEVKHFFALHPFTGELSLLRSLDYEAFPDQEASITFLVEAFDIYGTMPPGIATVTVIVKDMNDYPPVFSKRIYKGMVAPDAVKGTPITTVYAEDADPPGLPASRVRYRVDDVQFPYPASIFEVEEDSGRVITRVNLNEEPTTIFKLVVVAFDDGEPVMSSSATVKILVLHPGEIPRFTQEEYRPPPVSELATKGTMVGVISAAAINQSIVYSIVSGNEEDTFGINNITGVIYVNGPLDYETRTSYVLRVQADSLEVVLANLRVPSKSNTAKVYIEIQDENNHPPVFQKKFYIGGVSEDARMFTSVLRVKATDKDTGNYSVMAYRLIIPPIKEGKEGFVVETYTGLIKTAMLFHNMRRSYFKFQVIATDDYGKGLSGKADVLVSVVNQLDMQVIVSNVPPTLVEKKIEDLTEILDRYVQEQIPGAKVVVESIGARRHGDAFSLEDYTKCDLTVYAIDPQTNRAIDRNELFKFLDGKLLDINKDFQPYYGEGGRILEIRTPEAVTSIKKRGESLGYTEGALLALAFIIILCCIPAILVVLVSYRQVFKGRQAECTKTARIQAALPAAKPAVPAPAPVAAPPPPPPPPPGAHLYEELGDSSILSSLFLLYHFQQSRGNNSVSEDRKHQQVVMPFSSNTIEAHKSAHVDGSLKSNKLKSARKFTFLSDEDDLSAHNPLYKENISQVSTNSDISQRTDFVDPFSPKIQAKSKSLRGPREKIQRLWSQSVSLPRRLMRKVPNRPEIIDLQQWQGTRQKAENENTGICTNKRGSSNPLLTTEEANLTEKEEIRQGETLMIEGTEQLKSLSSDSSFCFPRPHFSFSTLPTVSRTVELKSEPNVISSPAECSLELSPSRPCVLHSSLSRRETPICMLPIETERNIFENFAHPPNISPSACPLPPPPPISPPSPPPAPAPLAPPPDISPFSLFCPPPSPPSIPLPLPPPTFFPLSVSTSGPPTPPLLPPFPTPLPPPPPSIPCPPPPSASFLSTECVCITGVKCTTNLMPAEKIKSSMTQLSTTTVCKTDPQREPKGILRHVKNLAELEKSVANMYSQIEKNYLRTNVSELQTMCPSEVTNMEITSEQNKGSLNNIVEGTEKQSHSQSTSL

SEQ ID NO: 10080 - protein, 1962 aa, Homo sapiens
MFRQFYLWTCLASGIILGSLFEICLGQYDDDWQYEDCKLARGGPPATIVAIDEESRNGTILVDNMLIKGTAGGPDPTIELSLKDNVDYWVLMDPVKQMLFLNSTGRVLDRDPPMNIHSIVVQVQCINKKVGTIIYHEVRIVVRDRNDNSPTFKHESYYATVNELTPVGTTIFTGFSGDNGATDIDDGPNGQIEYVIQYNPDDPTSNDTFEIPLMLTGNIVLRKRLNYEDKTRYFVIIQANDRAQNLNERRTTTTTLTVDVLDGDDLGPMFLPCVLVPNTRDCRPLTYQAAIPELRTPEELNPIIVTPPIQAIDQDRNIQPPSDRPGILYSILVGTPEDYPRFFHMHPRTAELSLLEPVNRDFHQKFDLVIKAEQDNGHPLPAFAGLHIEILDENNQSPYFTMPSYQGYILESAPVGATISDSLNLTSPLRIVALDKDIEDTKDPELHLFLNDYTSVFTVTQTGITRYLTLLQPVDREEQQTYTFSITAFDGVQESEPVIVNIQVMDANDNTPTFPEISYDVYVYTDMRPGDSVIQLTAVDADEGSNGEITYEILVGAQGDFIINKTTGLITIAPGVEMIVGRTYALTVQAADNAPPAERRNSICTVYIEVLPPNNQSPPRFPQLMYSLEISEAMRVGAVLLNLQATDREGDSITYAIENGDPQRVFNLSETTGILTLGKALDRESTDRYILIITASDGRPDGTSTATVNIVVTDVNDNAPVFDPYLPRNLSVVEEEANAFVGQVKATDPDAGINGQVHYSLGNFNNLFRITSNGSIYTAVKLNREVRDYYELVVVATDGAVHPRHSTLTLAIKVLDIDDNSPVFTNSTYTVLVEENLPAGTTILQIEAKDVDLGANVSYRIRSPEVKHFFALHPFTGELSLLRSLDYEAFPDQEASITFLVEAFDIYGTMPPGIATVTVIVKDMNDYPPVFSKRIYKGMVAPDAVKGTPITTVYAEDADPPGLPASRVRYRVDDVQFPYPASIFEVEEDSGRVITRVNLNEEPTTIFKLVVVAFDDGEPVMSSSATVKILVLHPGEIPRFTQEEYRPPPVSELATKGTMVGVISAAAINQSIVYSIVSGNEEDTFGINNITGVIYVNGPLDYETRTSYVLRVQADSLEVVLANLRVPSKSNTAKVYIEIQDENNHPPVFQKKFYIGGVSEDARMFTSVLRVKATDKDTGNYSVMAYRLIIPPIKEGKEGFVVETYTGLIKTAMLFHNMRRSYFKFQVIATDDYGKGLSGKADVLVSVVNQLDMQVIVSNVPPTLVEKKIEDLTEILDRYVQEQIPGAKVVVESIGARRHGDAFSLEDYTKCDLTVYAIDPQTNRAIDRNELFKFLDGKLLDINKDFQPYYGEGGRILEIRTPEAVTSIKKRGESLGYTEGALLALAFIIILCCIPAILVVLVSYRQFKVRQAECTKTARIQAALPAAKPAVPAPAPVAAPPPPPPPPPGAHLYEELGDSSMHNLFLLYHFQQSRGNNSVSEDRKHQQVVMPFSSNTIEAHKSAHVDGSLKSNKLKSARKFTFLSDEDDLSAHNPLYKENISQVSTNSDISQRTDFVDPFSPKIQAKSKSLRGPREKIQRLWSQSVSLPRRLMRKVPNRPEIIDLQQWQGTRQKAENENTGICTNKRGSSNPLLTTEEANLTEKEEIRQGETLMIEGTEQLKSLSSDSSFCFPRPHFSFSTLPTVSRTVELKSEPNVISSPAECSLELSPSRPCVLHSSLSRRETPICMLPIETERNIFENFAHPPNISPSACPLPPPPPISPPSPPPAPAPLAPPPDISPFSLFCPPPSPPSIPLPLPPPTFFPLSVSTSGPPTPPLLPPFPTPLPPPPPSIPCPPPPSASFLSTECVCITGVKCTTNLMPAEKIKSSMTQLSTTTVCKTDPQREPKGILRHVKNLAELEKSVANMYSQIEKNYLRTNVSELQTMCPSEVTNMEITSEQNKGSLNNIVEGTEKQSHSQSTSL

SEQ ID NO: 10081 - protein, 1789 aa, Homo sapiens
MFRQFYLWTCLASGIILGSLFEICLGQYDDDWQYEDCKLARGGPPATIVAIDEESRNGTILVDNMLIKGTAGGPDPTIELSLKDNVDYWVLMDPVKQMLFLNSTGRVLDRDPPMNIHSIVVQVQCINKKVGTIIYHEVRIVVRDRNDNSPTFKHESYYATVNELTPVGTTIFTGFSGDNGATDIDDGPNGQIEYVIQYNPDDPTSNDTFEIPLMLTGNIVLRKRLNYEDKTRYFVIIQANDRAQNLNERRTTTTTLTVDVLDGDDLGPMFLPCVLVPNTRDCRPLTYQAAIPELRTPEELNPIIVTPPIQAIDQDRNIQPPSDRPGILYSILVGTPEDYPRFFHMHPRTAELSLLEPVNRDFHQKFDLVIKAEQDNGHPLPAFAGLHIEILDENNQSPYFTMPSYQGYILESAPVGATISDSLNLTSPLRIVALDKDIEDVPPSGVPTKDPELHLFLNDYTSVFTVTQTGITRYLTLLQPVDREEQQTYTFSITAFDGVQESEPVIVNIQVMDANDNTPTFPEISYDVYVYTDMRPGDSVIQLTAVDADEGSNGEITYEILVGAQGDFIINKTTGLITIAPGVEMIVGRTYALTVQAADNAPPAERRNSICTVYIEVLPPNNQSPPRFPQLMYSLEISEAMRVGAVLLNLQATDREGDSITYAIENGDPQRVFNLSETTGILTLGKALDRESTDRYILIITASDGRPDGTSTATVNIVVTDVNDNAPVFDPYLPRNLSVVEEEANAFVGQVKATDPDAGINGQVHYSLGNFNNLFRITSNGSIYTAVKLNREVRDYYELVVVATDGAVHPRHSTLTLAIKVLDIDDNSPVFTNSTYTVLVEENLPAGTTILQIEAKDVDLGANVSYRIRSPEVKHFFALHPFTGELSLLRSLDYEAFPDQEASITFLVEAFDIYGTMPPGIATVTVIVKDMNDYPPVFSKRIYKGMVAPDAVKGTPITTVYAEDADPPGLPASRVRYRVDDVQFPYPASIFEVEEDSGRVITRVNLNEEPTTIFKLVVVAFDDGEPVMSSSATVKILVLHPGEIPRFTQEEYRPPPVSELATKGTMVGVISAAAINQSIVYSIVSGNEEDTFGINNITGVIYVNGPLDYETRTSYVLRVQADSLEVVLANLRVPSKSNTAKVYIEIQDENNHPPVFQKKFYIGGVSEDARMFTSVLRVKATDKDTGNYSVMAYRLIIPPIKEGKEGFVVETYTGLIKTAMLFHNMRRSYFKFQVIATDDYGKGLSGKADVLVSVVNQLDMQVIVSNVPPTLVEKKIEDLTEILDRYVQEQIPGAKVVVESIGARRHGDAFSLEDYTKCDLTVYAIDPQTNRAIDRNELFKFLDGKLLDINKDFQPYYGEGGRILEIRTPEAVTSIKKRGESLGYTEGALLALAFIIILCCIPAILVVLVSYRQVFKGRQAECTKTARIQAALPAAKPAVPAPAPVAAPPPPPPPPPGAHLYEELGDSSMYEMPQYGSRRRLLPPAGQEEYGEVVGEAEEEYEEEEEEPKKIKKPKVEIREPSEEEEVVVTIEKPPAAEPTYTTWKRARIFPMIFKKVRGLADKRGIVDLEGEEWQRRLEEEDKDYLKLTLDQEEATESTVESEEESSSDYTEYSEEESEFSESETTEEESESETPSEEEESSTPESEESESTESEGEKARKNIVLARRRPMVEEVKEVKGRKEEPQEEQKEPKMEEEEHSEEEESGPAPVEESTDPEAQDIPEEGSAESASVEGGVESEEESESGSSSSSSESQSGGPWGYQVPAYDRSKNANQKKSPGANSEGYNTAL

SEQ ID NO: 10082 - protein, 1682 aa, Homo sapiens
MFRQFYLWTCLASGIILGSLFEICLGQYDDDWQYEDCKLARGGPPATIVAIDEESRNGTILVDNMLIKGTAGGPDPTIELSLKDNVDYWVLMDPVKQMLFLNSTGRVLDRDPPMNIHSIVVQVQCINKKVGTIIYHEVRIVVRDRNDNSPTFKHESYYATVNELTPVGTTIFTGFSGDNGATDIDDGPNGQIEYVIQYNPDDPTSNDTFEIPLMLTGNIVLRKRLNYEDKTRYFVIIQANDRAQNLNERRTTTTTLTVDVLDGDDLGPMFLPCVLVPNTRDCRPLTYQAAIPELRTPEELNPIIVTPPIQAIDQDRNIQPPSDRPGILYSILVGTPEDYPRFFHMHPRTAELSLLEPVNRDFHQKFDLVIKAEQDNGHPLPAFAGLHIEILDENNQSPYFTMPSYQGYILESAPVGATISDSLNLTSPLRIVALDKDIEDTKDPELHLFLNDYTSVFTVTQTGITRYLTLLQPVDREEQQTYTFSITAFDGVQESEPVIVNIQVMDANDNTPTFPEISYDVYVYTDMRPGDSVIQLTAVDADEGSNGEITYEILVGAQGDFIINKTTGLITIAPGVEMIVGRTYALTVQAADNAPPAERRNSICTVYIEVLPPNNQSPPRFPQLMYSLEISEAMRVGAVLLNLQATDREGDSITYAIENGDPQRVFNLSETTGILTLGKALDRESTDRYILIITASDGRPDGTSTATVNIVVTDVNDNAPVFDPYLPRNLSVVEEEANAFVGQVKATDPDAGINGQVHYSLGNFNNLFRITSNGSIYTAVKLNREVRDYYELVVVATDGAVHPRHSTLTLAIKVLDIDDNSPVFTNSTYTVLVEENLPAGTTILQIEAKDVDLGANVSYRIRSPEVKHFFALHPFTGELSLLRSLDYEAFPDQEASITFLVEAFDIYGTMPPGIATVTVIVKDMNDYPPVFSKRIYKGMVAPDAVKGTPITTVYAEDADPPGLPASRVRYRVDDVQFPYPASIFEVEEDSGRVITRVNLNEEPTTIFKLVVVAFDDGEPVMSSSATVKILVLHPGEIPRFTQEEYRPPPVSELATKGTMVGVISAAAINQSIVYSIVSGNEEDTFGINNITGVIYVNGPLDYETRTSYVLRVQADSLEVVLANLRVPSKSNTAKVYIEIQDENNHPPVFQKKFYIGGVSEDARMFTSVLRVKATDKDTGNYSVMAYRLIIPPIKEGKEGFVVETYTGLIKTAMLFHNMRRSYFKFQVIATDDYGKGLSGKADVLVSVVNQLDMQVIVSNVPPTLVEKKIEDLTEILDRYVQEQIPGAKVVVESIGARRHGDAFSLEDYTKCDLTVYAIDPQTNRAIDRNELFKFLDGKLLDINKDFQPYYGEGGRILEIRTPEAVTSIKKRGESLGYTEGALLALAFIIILCCIPAILVVLVSYRQFKVRQAECTKTARIQAALPAAKPAVPAPAPVAAPPPPPPPPPGAHLYEELGDSSMHKYEMPQYGSRRRLLPPAGQEEYGEVVGEAEEEYEEEEWARKRMIKLVVDREYETSSTGEDSAPECQRNRLHHPSIHSNINGNIYIAQNGSVVRTRRACLTDNLKVASPVRLGGPFKKLDKLAVTHEENVPLNTLSKGPFSTEKMNARPTLVTFAPCPVGTDNTAVKPLRNRLKSTVEQESMIDSKNIKEALEFHSDHTQSDDEELWMGPWNNLHIPMTKL

SEQ ID NO: 10083 - protein, 1964 aa, Homo sapiens
MFRQFYLWTCLASGIILGSLFEICLGQYDDDWQYEDCKLARGGPPATIVAIDEESRNGTILVDNMLIKGTAGGPDPTIELSLKDNVDYWVLMDPVKQMLFLNSTGRVLDRDPPMNIHSIVVQVQCINKKVGTIIYHEVRIVVRDRNDNSPTFKHESYYATVNELTPVGTTIFTGFSGDNGATDIDDGPNGQIEYVIQYNPDDPTSNDTFEIPLMLTGNIVLRKRLNYEDKTRYFVIIQANDRAQNLNERRTTTTTLTVDVLDGDDLGPMFLPCVLVPNTRDCRPLTYQAAIPELRTPEELNPIIVTPPIQAIDQDRNIQPPSDRPGILYSILVGTPEDYPRFFHMHPRTAELSLLEPVNRDFHQKFDLVIKAEQDNGHPLPAFAGLHIEILDENNQSPYFTMPSYQGYILESAPVGATISDSLNLTSPLRIVALDKDIEDTKDPELHLFLNDYTSVFTVTQTGITRYLTLLQPVDREEQQTYTFSITAFDGVQESEPVIVNIQVMDANDNTPTFPEISYDVYVYTDMRPGDSVIQLTAVDADEGSNGEITYEILVGAQGDFIINKTTGLITIAPGVEMIVGRTYALTVQAADNAPPAERRNSICTVYIEVLPPNNQSPPRFPQLMYSLEISEAMRVGAVLLNLQATDREGDSITYAIENGDPQRVFNLSETTGILTLGKALDRESTDRYILIITASDGRPDGTSTATVNIVVTDVNDNAPVFDPYLPRNLSVVEEEANAFVGQVKATDPDAGINGQVHYSLGNFNNLFRITSNGSIYTAVKLNREVRDYYELVVVATDGAVHPRHSTLTLAIKVLDIDDNSPVFTNSTYTVLVEENLPAGTTILQIEAKDVDLGANVSYRIRSPEVKHFFALHPFTGELSLLRSLDYEAFPDQEASITFLVEAFDIYGTMPPGIATVTVIVKDMNDYPPVFSKRIYKGMVAPDAVKGTPITTVYAEDADPPGLPASRVRYRVDDVQFPYPASIFEVEEDSGRVITRVNLNEEPTTIFKLVVVAFDDGEPVMSSSATVKILVLHPGEIPRFTQEEYRPPPVSELATKGTMVGVISAAAINQSIVYSIVSGNEEDTFGINNITGVIYVNGPLDYETRTSYVLRVQADSLEVVLANLRVPSKSNTAKVYIEIQDENNHPPVFQKKFYIGGVSEDARMFTSVLRVKATDKDTGNYSVMAYRLIIPPIKEGKEGFVVETYTGLIKTAMLFHNMRRSYFKFQVIATDDYGKGLSGKADVLVSVVNQLDMQVIVSNVPPTLVEKKIEDLTEILDRYVQEQIPGAKVVVESIGARRHGDAFSLEDYTKCDLTVYAIDPQTNRAIDRNELFKFLDGKLLDINKDFQPYYGEGGRILEIRTPEAVTSIKKRGESLGYTEGALLALAFIIILCCIPAILVVLVSYRQVFKGRQAECTKTARIQAALPAAKPAVPAPAPVAAPPPPPPPPPGAHLYEELGDSSILSSLFLLYHFQQSRGNNSVSEDRKHQQVVMPFSSNTIEAHKSAHVDGSLKSNKLKSARKFTFLSDEDDLSAHNPLYKENISQVSTNSDISQRTDFVDPFSPKIQAKSKSLRGPREKIQRLWSQSVSLPRRLMRKVPNRPEIIDLQQWQGTRQKAENENTGICTNKRGSSNPLLTTEEANLTEKEEIRQGETLMIEGTEQLKSLSSDSSFCFPRPHFSFSTLPTVSRTVELKSEPNVISSPAECSLELSPSRPCVLHSSLSRRETPICMLPIETERNIFENFAHPPNISPSACPLPPPPPISPPSPPPAPAPLAPPPDISPFSLFCPPPSPPSIPLPLPPPTFFPLSVSTSGPPTPPLLPPFPTPLPPPPPSIPCPPPPSASFLSTECVCITGVKCTTNLMPAEKIKSSMTQLSTTTVCKTDPQREPKGILRHVKNLAELEKSVANMYSQIEKNYLRTNVSELQTMCPSEVTNMEITSEQNKGSLNNIVEGTEKQSHSQSTSL

SEQ ID NO: 10084 - protein, 1681 aa, Homo sapiens
MFRQFYLWTCLASGIILGSLFEICLGQYDDDWQYEDCKLARGGPPATIVAIDEESRNGTILVDNMLIKGTAGGPDPTIELSLKDNVDYWVLMDPVKQMLFLNSTGRVLDRDPPMNIHSIVVQVQCINKKVGTIIYHEVRIVVRDRNDNSPTFKHESYYATVNELTPVGTTIFTGFSGDNGATDIDDGPNGQIEYVIQYNPDDPTSNDTFEIPLMLTGNIVLRKRLNYEDKTRYFVIIQANDRAQNLNERRTTTTTLTVDVLDGDDLGPMFLPCVLVPNTRDCRPLTYQAAIPELRTPEELNPIIVTPPIQAIDQDRNIQPPSDRPGILYSILVGTPEDYPRFFHMHPRTAELSLLEPVNRDFHQKFDLVIKAEQDNGHPLPAFAGLHIEILDENNQSPYFTMPSYQGYILESAPVGATISDSLNLTSPLRIVALDKDIEDTKDPELHLFLNDYTSVFTVTQTGITRYLTLLQPVDREEQQTYTFSITAFDGVQESEPVIVNIQVMDANDNTPTFPEISYDVYVYTDMRPGDSVIQLTAVDADEGSNGEITYEILVGAQGDFIINKTTGLITIAPGVEMIVGRTYALTVQAADNAPPAERRNSICTVYIEVLPPNNQSPPRFPQLMYSLEISEAMRVGAVLLNLQATDREGDSITYAIENGDPQRVFNLSETTGILTLGKALDRESTDRYILIITASDGRPDGTSTATVNIVVTDVNDNAPVFDPYLPRNLSVVEEEANAFVGQVKATDPDAGINGQVHYSLGNFNNLFRITSNGSIYTAVKLNREVRDYYELVVVATDGAVHPRHSTLTLAIKVLDIDDNSPVFTNSTYTVLVEENLPAGTTILQIEAKDVDLGANVSYRIRSPEVKHFFALHPFTGELSLLRSLDYEAFPDQEASITFLVEAFDIYGTMPPGIATVTVIVKDMNDYPPVFSKRIYKGMVAPDAVKGTPITTVYAEDADPPGLPASRVRYRVDDVQFPYPASIFEVEEDSGRVITRVNLNEEPTTIFKLVVVAFDDGEPVMSSSATVKILVLHPGEIPRFTQEEYRPPPVSELATKGTMVGVISAAAINQSIVYSIVSGNEEDTFGINNITGVIYVNGPLDYETRTSYVLRVQADSLEVVLANLRVPSKSNTAKVYIEIQDENNHPPVFQKKFYIGGVSEDARMFTSVLRVKATDKDTGNYSVMAYRLIIPPIKEGKEGFVVETYTGLIKTAMLFHNMRRSYFKFQVIATDDYGKGLSGKADVLVSVVNQLDMQVIVSNVPPTLVEKKIEDLTEILDRYVQEQIPGAKVVVESIGARRHGDAFSLEDYTKCDLTVYAIDPQTNRAIDRNELFKFLDGKLLDINKDFQPYYGEGGRILEIRTPEAVTSIKKRGESLGYTEGALLALAFIIILCCIPAILVVLVSYRQVFKGRQAECTKTARIQAALPAAKPAVPAPAPVAAPPPPPPPPPGAHLYEELGDSSMYEMPQYGSRRRLLPPAGQEEYGEVVGEAEEEYEEEEWARKRMIKLVVDREYETSSTGEDSAPECQRNRLHHPSIHSNINGNIYIAQNGSVVRTRRACLTDNLKVASPVRLGGPFKKLDKLAVTHEENVPLNTLSKGPFSTEKMNARPTLVTFAPCPVGTDNTAVKPLRNRLKSTVEQESMIDSKNIKEALEFHSDHTQSDDEELWMGPWNNLHIPMTKL

SEQ ID NO: 10085 - protein, 1790 aa, Homo sapiens
MFRQFYLWTCLASGIILGSLFEICLGQYDDDWQYEDCKLARGGPPATIVAIDEESRNGTILVDNMLIKGTAGGPDPTIELSLKDNVDYWVLMDPVKQMLFLNSTGRVLDRDPPMNIHSIVVQVQCINKKVGTIIYHEVRIVVRDRNDNSPTFKHESYYATVNELTPVGTTIFTGFSGDNGATDIDDGPNGQIEYVIQYNPDDPTSNDTFEIPLMLTGNIVLRKRLNYEDKTRYFVIIQANDRAQNLNERRTTTTTLTVDVLDGDDLGPMFLPCVLVPNTRDCRPLTYQAAIPELRTPEELNPIIVTPPIQAIDQDRNIQPPSDRPGILYSILVGTPEDYPRFFHMHPRTAELSLLEPVNRDFHQKFDLVIKAEQDNGHPLPAFAGLHIEILDENNQSPYFTMPSYQGYILESAPVGATISDSLNLTSPLRIVALDKDIEDVPPSGVPTKDPELHLFLNDYTSVFTVTQTGITRYLTLLQPVDREEQQTYTFSITAFDGVQESEPVIVNIQVMDANDNTPTFPEISYDVYVYTDMRPGDSVIQLTAVDADEGSNGEITYEILVGAQGDFIINKTTGLITIAPGVEMIVGRTYALTVQAADNAPPAERRNSICTVYIEVLPPNNQSPPRFPQLMYSLEISEAMRVGAVLLNLQATDREGDSITYAIENGDPQRVFNLSETTGILTLGKALDRESTDRYILIITASDGRPDGTSTATVNIVVTDVNDNAPVFDPYLPRNLSVVEEEANAFVGQVKATDPDAGINGQVHYSLGNFNNLFRITSNGSIYTAVKLNREVRDYYELVVVATDGAVHPRHSTLTLAIKVLDIDDNSPVFTNSTYTVLVEENLPAGTTILQIEAKDVDLGANVSYRIRSPEVKHFFALHPFTGELSLLRSLDYEAFPDQEASITFLVEAFDIYGTMPPGIATVTVIVKDMNDYPPVFSKRIYKGMVAPDAVKGTPITTVYAEDADPPGLPASRVRYRVDDVQFPYPASIFEVEEDSGRVITRVNLNEEPTTIFKLVVVAFDDGEPVMSSSATVKILVLHPGEIPRFTQEEYRPPPVSELATKGTMVGVISAAAINQSIVYSIVSGNEEDTFGINNITGVIYVNGPLDYETRTSYVLRVQADSLEVVLANLRVPSKSNTAKVYIEIQDENNHPPVFQKKFYIGGVSEDARMFTSVLRVKATDKDTGNYSVMAYRLIIPPIKEGKEGFVVETYTGLIKTAMLFHNMRRSYFKFQVIATDDYGKGLSGKADVLVSVVNQLDMQVIVSNVPPTLVEKKIEDLTEILDRYVQEQIPGAKVVVESIGARRHGDAFSLEDYTKCDLTVYAIDPQTNRAIDRNELFKFLDGKLLDINKDFQPYYGEGGRILEIRTPEAVTSIKKRGESLGYTEGALLALAFIIILCCIPAILVVLVSYRQFKVRQAECTKTARIQAALPAAKPAVPAPAPVAAPPPPPPPPPGAHLYEELGDSSMHKYEMPQYGSRRRLLPPAGQEEYGEVVGEAEEEYEEEEEEPKKIKKPKVEIREPSEEEEVVVTIEKPPAAEPTYTTWKRARIFPMIFKKVRGLADKRGIVDLEGEEWQRRLEEEDKDYLKLTLDQEEATESTVESEEESSSDYTEYSEEESEFSESETTEEESESETPSEEEESSTPESEESESTESEGEKARKNIVLARRRPMVEEVKEVKGRKEEPQEEQKEPKMEEEEHSEEEESGPAPVEESTDPEAQDIPEEGSAESASVEGGVESEEESESGSSSSSSESQSGGPWGYQVPAYDRSKNANQKKSPGANSEGYNTAL

SEQ ID NO: 10086 - protein, 72 aa, Homo sapiens
MFRQFYLWTCLASGIILGSLFEICLGQYDDGTILVDNMLIKGTAGGPDPTIELSLKDNVDYWVLMDPVKQML

SEQ ID NO: 10087 - protein, 1932 aa, Homo sapiens
MFRQFYLWTCLASGIILGSLFEICLGQYDDGTILVDNMLIKGTAGGPDPTIELSLKDNVDYWVLMDPVKQMLFLNSTGRVLDRDPPMNIHSIVVQVQCINKKVGTIIYHEVRIVVRDRNDNSPTFKHESYYATVNELTPVGTTIFTGFSGDNGATDIDDGPNGQIEYVIQYNPDDPTSNDTFEIPLMLTGNIVLRKRLNYEDKTRYFVIIQANDRAQNLNERRTTTTTLTVDVLDGDDLGPMFLPCVLVPNTRDCRPLTYQAAIPELRTPEELNPIIVTPPIQAIDQDRNIQPPSDRPGILYSILVGTPEDYPRFFHMHPRTAELSLLEPVNRDFHQKFDLVIKAEQDNGHPLPAFAGLHIEILDENNQSPYFTMPSYQGYILESAPVGATISDSLNLTSPLRIVALDKDIEDTKDPELHLFLNDYTSVFTVTQTGITRYLTLLQPVDREEQQTYTFSITAFDGVQESEPVIVNIQVMDANDNTPTFPEISYDVYVYTDMRPGDSVIQLTAVDADEGSNGEITYEILVGAQGDFIINKTTGLITIAPGVEMIVGRTYALTVQAADNAPPAERRNSICTVYIEVLPPNNQSPPRFPQLMYSLEISEAMRVGAVLLNLQATDREGDSITYAIENGDPQRVFNLSETTGILTLGKALDRESTDRYILIITASDGRPDGTSTATVNIVVTDVNDNAPVFDPYLPRNLSVVEEEANAFVGQVKATDPDAGINGQVHYSLGNFNNLFRITSNGSIYTAVKLNREVRDYYELVVVATDGAVHPRHSTLTLAIKVLDIDDNSPVFTNSTYTVLVEENLPAGTTILQIEAKDVDLGANVSYRIRSPEVKHFFALHPFTGELSLLRSLDYEAFPDQEASITFLVEAFDIYGTMPPGIATVTVIVKDMNDYPPVFSKRIYKGMVAPDAVKGTPITTVYAEDADPPGLPASRVRYRVDDVQFPYPASIFEVEEDSGRVITRVNLNEEPTTIFKLVVVAFDDGEPVMSSSATVKILVLHPGEIPRFTQEEYRPPPVSELATKGTMVGVISAAAINQSIVYSIVSGNEEDTFGINNITGVIYVNGPLDYETRTSYVLRVQADSLEVVLANLRVPSKSNTAKVYIEIQDENNHPPVFQKKFYIGGVSEDARMFTSVLRVKATDKDTGNYSVMAYRLIIPPIKEGKEGFVVETYTGLIKTAMLFHNMRRSYFKFQVIATDDYGKGLSGKADVLVSVVNQLDMQVIVSNVPPTLVEKKIEDLTEILDRYVQEQIPGAKVVVESIGARRHGDAFSLEDYTKCDLTVYAIDPQTNRAIDRNELFKFLDGKLLDINKDFQPYYGEGGRILEIRTPEAVTSIKKRGESLGYTEGALLALAFIIILCCIPAILVVLVSYRQRQAECTKTARIQAALPAAKPAVPAPAPVAAPPPPPPPPPGAHLYEELGDSSMHNLFLLYHFQQSRGNNSVSEDRKHQQVVMPFSSNTIEAHKSAHVDGSLKSNKLKSARKFTFLSDEDDLSAHNPLYKENISQVSTNSDISQRTDFVDPFSPKIQAKSKSLRGPREKIQRLWSQSVSLPRRLMRKVPNRPEIIDLQQWQGTRQKAENENTGICTNKRGSSNPLLTTEEANLTEKEEIRQGETLMIEGTEQLKSLSSDSSFCFPRPHFSFSTLPTVSRTVELKSEPNVISSPAECSLELSPSRPCVLHSSLSRRETPICMLPIETERNIFENFAHPPNISPSACPLPPPPPISPPSPPPAPAPLAPPPDISPFSLFCPPPSPPSIPLPLPPPTFFPLSVSTSGPPTPPLLPPFPTPLPPPPPSIPCPPPPSASFLSTECVCITGVKCTTNLMPAEKIKSSMTQLSTTTVCKTDPQREPKGILRHVKNLAELEKSVANMYSQIEKNYLRTNVSELQTMCPSEVTNMEITSEQNKGSLNNIVEGTEKQSHSQSTSL

SEQ ID NO: 10088 - protein, 1150 aa, Homo sapiens
MPSYQGYILESAPVGATISDSLNLTSPLRIVALDKDIEDVPPSGVPTKDPELHLFLNDYTSVFTVTQTGITRYLTLLQPVDREEQQTYTFSITAFDGVQESEPVIVNIQVMDANDNTPTFPEISYDVYVYTDMRPGDSVIQLTAVDADEGSNGEITYEILVGAQGDFIINKTTGLITIAPGVEMIVGRTYALTVQAADNAPPAERRNSICTVYIEVLPPNNQSPPRFPQLMYSLEISEAMRVGAVLLNLQATDREGDSITYAIENGDPQRVFNLSETTGILTLGKALDRESTDRYILIITASDGRPDGTSTATVNIVVTDVNDNAPVFDPYLPRNLSVVEEEANAFVGQVKATDPDAGINGQVHYSLGNFNNLFRITSNGSIYTAVKLNREVRDYYELVVVATDGAVHPRHSTLTLAIKVLDIDDNSPVFTNSTYTVLVEENLPAGTTILQIEAKDVDLGANVSYRIRSPEVKHFFALHPFTGELSLLRSLDYEAFPDQEASITFLVEAFDIYGTMPPGIATVTVIVKDMNDYPPVFSKRIYKGMVAPDAVKGTPITTVYAEDADPPGLPASRVRYRVDDVQFPYPASIFEVEEDSGRVITRVNLNEEPTTIFKLVVVAFDDGEPVMSSSATVKILVLHPGEIPRFTQEEYRPPPVSELATKGTMVGVISAAAINQSIVYSIVSGNEEDTFGINNITGVIYVNGPLDYETRTSYVLRVQADSLEVVLANLRVPSKSNTAKVYIEIQDENNHPPVFQKKFYIGGVSEDARMFTSVLRVKATDKDTGNYSVMAYRLIIPPIKEGKEGFVVETYTGLIKTAMLFHNMRRSYFKFQVIATDDYGKGLSGKADVLVSVVNQLDMQVIVSNVPPTLVEKKIEDLTEILDRYVQEQIPGAKVVVESIGARRHGDAFSLEDYTKCDLTVYAIDPQTNRAIDRNELFKFLDGKLLDINKDFQPYYGEGGRILEIRTPEAVTSIKKRGESLGYTEGALLALAFIIILCCIPAILVVLVSYRQFKVRQAECTKTARIQAALPAAKPAVPAPAPVAAPPPPPPPPPGAHLYEELGDSSMHKNYPWSLELILARNMDKIITVMSMGMKCLNMGVAVDCYHQLDRRNMVRWLVKLRKNMRRKRKSQRKLKNQRLKLESLVRRKK

SEQ ID NO: 10089 - protein, 416 aa, Homo sapiens
MQVIVSNVPPTLVEKKIEDLTEILDRYVQEQIPGAKVVVESIGARRHGDAFSLEDYTKCDLTVYAIDPQTNRAIDRNELFKFLDGKLLDINKDFQPYYGEGGRILEIRTPEAVTSIKKRGESLGYTEGALLALAFIIILCCIPAILVVLVSYRQRGYGSEQQQLLRPSLLKPEELSMESGIDPGQEYGQDYYSYEHGYEMPQYGSRRRLLPPAGQEEYGEVVGEAEEEYEEEEWARKRMIKLVVDREYETSSTGEDSAPECQRNRLHHPSIHSNINGNIYIAQNGSVVRTRRACLTDNLKVASPVRLGGPFKKLDKLAVTHEENVPLNTLSKGPFSTEKMNARPTLVTFAPCPVGTDNTAVKPLRNRLKSTVEQESMIDSKNIKEALEFHSDHTQSDDEELWMGPWNNLHIPMTKL

SEQ ID NO: 10090 - protein, 1360 aa, Homo sapiens
  VARIANT 1: note = misc_feature - Xaa can be any naturally occurring amino acid
XHIEILDENNQSPYFTMPSYQGYILESAPVGATISDSLNLTSPLRIVALDKDIEDTKDPELHLFLNDYTSVFTVTQTGITRYLTLLQPVDREEQQTYTFSITAFDGVQESEPVIVNIQVMDANDNTPTFPEISYDVYVYTDMRPGDSVIQLTAVDADEGSNGEITYEILVGAQGDFIINKTTGLITIAPGVEMIVGRTYALTVQAADNAPPAERRNSICTVYIEVLPPNNQSPPRFPQLMYSLEISEAMRVGAVLLNLQATDREGDSITYAIENGDPQRVFNLSETTGILTLGKALDRESTDRYILIITASDGRPDGTSTATVNIVVTDVNDNAPVFDPYLPRNLSVVEEEANAFVGQVKATDPDAGINGQVHYSLGNFNNLFRITSNGSIYTAVKLNREVRDYYELVVVATDGAVHPRHSTLTLAIKVLDIDDNSPVFTNSTYTVLVEENLPAGTTILQIEAKDVDLGANVSYRIRSPEVKHFFALHPFTGELSLLRSLDYEAFPDQEASITFLVEAFDIYGTMPPGIATVTVIVKDMNDYPPVFSKRIYKGMVAPDAVKGTPITTVYAEDADPPGLPASRVRYRVDDVQFPYPASIFEVEEDSGRVITRVNLNEEPTTIFKLVVVAFDDGEPVMSSSATVKILVLHPGEIPRFTQEEYRPPPVSELATKGTMVGVISAAAINQSIVYSIVSGNEEDTFGINNITGVIYVNGPLDYETRTSYVLRVQADSLEVVLANLRVPSKSNTAKVYIEIQDENNHPPVFQKKFYIGGVSEDARMFTSVLRVKATDKDTGNYSVMAYRLIIPPIKEGKEGFVVETYTGLIKTAMLFHNMRRSYFKFQVIATDDYGKGLSGKADVLVSVVNQLDMQVIVSNVPPTLVEKKIEDLTEILDRYVQEQIPGAKVVVESIGARRHGDAFSLEDYTKCDLTVYAIDPQTNRAIDRNELFKFLDGKLLDINKDFQPYYGEGGRILEIRTPEAVTSIKKRGESLGYTEGALLALAFIIILCCIPAILVVLVSYRQFKVRQAECTKTARIQAALPAAKPAVPAPAPVAAPPPPPPPPPGAHLYEELGDSSIWSFCWQLVICMRTCAIWRTLTRRGYGSEQQQLLRPSLLKPEELSMESGIDPGQEYGQDYYSYEHGYEMPQYGSRRRLLPPAGQEEYGEVVGEAEEEYEEEEWARKRMIKLVVDREYETSSTGEDSAPECQRNRLHHPSIHSNINGNIYIAQNGSVVRTRRACLTDNLKVASPVRLGGPFKKLDKLAVTHEENVPLNTLSKGPFSTEKMNARPTLVTFAPCPVGTDNTAVKPLRNRLKSTVEQESMIDSKNIKEALEFHSDHTQSDDEELWMGPWNNLHIPMTKL

SEQ ID NO: 10091 - protein, 37 aa, Homo sapiens
  VARIANT 1: note = misc_feature - Xaa can be any naturally occurring amino acid
XMKCLNMGVAVDCYHQLDRRNMVRWLVKLRKNMRRKR

SEQ ID NO: 10092 - protein, 807 aa, Homo sapiens
MVFSRRGGLGARDLLLWLLLLAAWEVGSGQLHYSIPEEAKHGTFVGRVAQDLGLELAELVPRLFRVASKTHRDLLEVNLQNGILFVNSRIDREELCQWSAECSIHLELIADRPLQVFHVEVKVKDINDNPPVFRGREQIIFIPESRLLNSRFPIEGAADADIGANALLTYTLSPSDYFSLDVEASDELSKSLWLELRKYLDREETPELHLLLTATDGGKPELQGTVELLITVLDVNDNAPLFDQAVYRVHLLETTANGTLVTTLNASDADEGVNGEVVFSFDSGISRDIQEKFKVDSSSGEIRLIDKLDYEETKSYEIQVKAVDKGSPPMSNHCKVLVKVLDVNDNAPELAVTSLYLPIREDAPLSTVIALITVSDRDSGANGQVTCSLMPHVPFKLVSTFKNYYSLVLDSALDRESLSVYELVVTARDGGSPSLWATARVSVEVADVNDNAPAFAQPEYTVFVKENNPPGCHIFTVSARDADAQENALVSYSLVERRVGERALSNYVSVHAESGKVYALQPLDHEELELLQFQVSARDAGVPPLGSNVTLQVFVLDENDNAPALLAPRVGGTIGAVSELVPRLVGAGHVVAKVRAVDADSGYNAWLSYELQPAAGGARIPFRVGLYTGEISTTRVLDEADLSRYRLLVLVKDHGEPALTATATVLVSLVESGQAPKASSRASVGVAGPEAALVDVNVYLIIAICAVSSLLVLTLLLYTALRCSVPPTEGAYVPGKPTLVCSSALGSWSNSQQRRQRVCSSEGPPKTDLMAFSPGLSPSLNTSERNEQPEANLDLSGNVSPTFEFWL

SEQ ID NO: 10093 - protein, 686 aa, Homo sapiens
MVFSRRGGLGARDLLLWLLLLAAWEVGSGQLHYSIPEEAKHGTFVGRVAQDLGLELAELVPRLFRVASKTHRDLLEVNLQNGILFVNSRIDREELCQWSAECSIHLELIADRPLQVFHVEVKVKDINDNPPVFRGREQIIFIPESRLLNSRFPIEGAADADIGANALLTYTLSPSDYFSLDVEASDELSKSLWLELRKYLDREETPELHLLLTATDGGKPELQGTVELLITVLDVNDNAPLFDQAVYRVHLLETTANGTLVTTLNASDADEGVNGEVVFSFDSGISRDIQEKFKVDSSSGEIRLIDKLDYEETKSYEIQVKAVDKGSPPMSNHCKVLVKVLDVNDNAPELAVTSLYLPIREDAPLSTVIALITVSDRDSGANGQVTCSLMPHVPFKLVSTFKNYYSLVLDSALDRESLSVYELVVTARDGGSPSLWATARVSVEVADVNDNAPAFAQPEYTVFVKENNPPGCHIFTVSARDADAQENALVSYSLVERRVGERALSNYVSVHAESGKVYALQPLDHEELELLQFQPRQPNPDWRYSASLRAGMHSSVHLEEAGILRAGPGGPDQQWPTVSSATPEPEAGEVSPPVGAGVNSNSWTFKYGPGNPKQSGPGELPDKFIIPGSPAIISIRQEPTNSQIDKSDFITFGKKEETKKKKKKKKGNKTQEKKEKGNSTTDNSDQ

SEQ ID NO: 10094 - protein, 950 aa, Homo sapiens
MVFSRRGGLGARDLLLWLLLLAAWEVGSGQLHYSIPEEAKHGTFVGRVAQDLGLELAELVPRLFRVASKTHRDLLEVNLQNGILFVNSRIDREELCQWSAECSIHLELIADRPLQVFHVEVKVKDINDNPPVFRGREQIIFIPESRLLNSRFPIEGAADADIGANALLTYTLSPSDYFSLDVEASDELSKSLWLELRKYLDREETPELHLLLTATDGGKPELQGTVELLITVLDVNDNAPLFDQAVYRVHLLETTANGTLVTTLNASDADEGVNGEVVFSFDSGISRDIQEKFKVDSSSGEIRLIDKLDYEETKSYEIQVKAVDKGSPPMSNHCKVLVKVLDVNDNAPELAVTSLYLPIREDAPLSTVIALITVSDRDSGANGQVTCSLMPHVPFKLVSTFKNYYSLVLDSALDRESLSVYELVVTARDGGSPSLWATARVSVEVADVNDNAPAFAQPEYTVFVKENNPPGCHIFTVSARDADAQENALVSYSLVERRVGERALSNYVSVHAESGKVYALQPLDHEELELLQFQVSARDAGVPPLGSNVTLQVFVLDENDNAPALLAPRVGGTIGAVSELVPRLVGAGHVVAKVRAVDADSGYNAWLSYELQPAAGGARIPFRVGLYTGEISTTRVLDEADLSRYRLLVLVKDHGEPALTATATVLVSLVESGQAPKASSRASVGVAGPEAALVDVNVYLIIAICAVSSLLVLTLLLYTALRCSVPPTEGAYVPGKPTLVCSSALGSWSNSQQRRQRVCSSEGPPKTDLMAFSPGLSPSLNTSERNEQPEANLDLSGNPRQPNPDWRYSASLRAGMHSSVHLEEAGILRAGPGGPDQQWPTVSSATPEPEAGEVSPPVGAGVNSNSWTFKYGPGNPKQSGPGELPDKFIIPGSPAIISIRQEPTNSQIDKSDFITFGKKEETKKKKKKKKGNKTQEKKEKGNSTTDNSDQ

SEQ ID NO: 10095 - protein, 948 aa, Homo sapiens
MVSRCSCLGVQCLLLSLLLLAAWEVGSGQLHYSVYEEARHGTFVGRIAQDLGLELAELVQRLFRVASKRHGDLLEVNLQNGILFVNSRIDREELCGRSVECSIHLEVIVDRPLQVFHVDVEVKDINDNPPRFSVTEQKLSIPESRLLDSRFPLEGASDADVGENALLTYKLSPNEYFVLDIINKKDKDKFPVLVLRKLLDREENPQLKLLLTATDGGKPEFTGSVSLLILVLDANDNAPIFDRPVYEVKMYENQVNQTLVIRLNASDSDEGINKEMMYSFSSLVPPTIRRKFWINERTGEIKVNDAIDFEDSNTYEIHVDVTDKGNPPMVGHCTVLVELLDENDNSPEVIVTSLSLPVKEDAQVGTVIALISVSDHDSGANGQVTCSLTPHVPFKLVSTYKNYYSLVLDSALDRERVSAYELVVTARDGGSPPLWATASVSVEVADVNDNAPAFAQSEYTVFVKENNPPGCHIFTVSAWDADAQENALVSYSLVERRLGERSLSSYVSVHAESGKVYALQPLDHEELELLQFQVSARDGGVPPLGSNLTLQVFVLDENDNAPALLASPAGSAGGAVSELVLRSVVAGHVVAKVRAVDADSGYNAWLSYELQSAAVGARIPFRVGLYTGEISTTRALDETDSPRQRLLVLVKDHGEPSLTATATVLVSLVEGSQAPKASSRASVGVAPEVALVDVNVYLIIAICAVSSLLVLTLLLYTALRCSAAPTEGACGPVKPTLVCSSAVGSWSYSQQRRQRVCSGEGLPKADLMAFSPSLPPCPMVDVDGEDQSIGGDHSRKPRQPNPDWRYSASLRAGMHSSVHLEEAGILRAGPGGPDQQWPTVSSATPEPEAGEVSPPVGAGVNSNSWTFKYGPGNPKQSGPGELPDKFIIPGSPAIISIRQEPTNSQIDKSDFITFGKKEETKKKKKKKKGNKTQEKKEKGNSTTDNSDQ

SEQ ID NO: 10096 - protein, 844 aa, Homo sapiens
MVSRCSCLGVQCLLLSLLLLAAWEVGSGQLHYSVYEEARHGTFVGRIAQDLGLELAELVQRLFRVASKRHGDLLEVNLQNGILFVNSRIDREELCGRSVECSIHLEVIVDRPLQVFHVDVEVKDINDNPPRFSVTEQKLSIPESRLLDSRFPLEGASDADVGENALLTYKLSPNEYFVLDIINKKDKDKFPVLVLRKLLDREENPQLKLLLTATDGGKPEFTGSVSLLILVLDANDNAPIFDRPVYEVKMYENQVNQTLVIRLNASDSDEGINKEMMYSFSSLVPPTIRRKFWINERTGEIKVNDAIDFEDSNTYEIHVDVTDKGNPPMVGHCTVLVELLDENDNSPEVIVTSLSLPVKEDAQVGTVIALISVSDHDSGANGQVTCSLTPHVPFKLVSTYKNYYSLVLDSALDRERVSAYELVVTARDGGSPPLWATASVSVEVADVNDNAPAFAQSEYTVFVKENNPPGCHIFTVSAWDADAQENALVSYSLVERRLGERSLSSYVSVHAESGKVYALQPLDHEELELLQFQVSARDGGVPPLGSNLTLQVFVLDENDNAPALLASPAGSAGGAVSELVLRSVVAGHVVAKVRAVDADSGYNAWLSYELQSAAVGARIPFRVGLYTGEISTTRALDETDSPRQRLLVLVKDHGEPSLTATATVLVSLVEGSQAPKASSRASVGVAPEVALVDVNVYLIIAICAVSSLLVLTLLLYTALRCSAAPTEGACGPVKPTLVCSSAVGSWSYSQQRRQRVCSGEGLPKADLMAFSPSLPPCPMVDVDGEDQSIGGDHSRKVGYYVFIFLLCFMNNIFSYRIFSNMYQNISFLSTFHLCLNISSDTFVI

SEQ ID NO: 10097 - protein, 685 aa, Homo sapiens
MVSRCSCLGVQCLLLSLLLLAAWEVGSGQLHYSVYEEARHGTFVGRIAQDLGLELAELVQRLFRVASKRHGDLLEVNLQNGILFVNSRIDREELCGRSVECSIHLEVIVDRPLQVFHVDVEVKDINDNPPRFSVTEQKLSIPESRLLDSRFPLEGASDADVGENALLTYKLSPNEYFVLDIINKKDKDKFPVLVLRKLLDREENPQLKLLLTATDGGKPEFTGSVSLLILVLDANDNAPIFDRPVYEVKMYENQVNQTLVIRLNASDSDEGINKEMMYSFSSLVPPTIRRKFWINERTGEIKVNDAIDFEDSNTYEIHVDVTDKGNPPMVGHCTVLVELLDENDNSPEVIVTSLSLPVKEDAQVGTVIALISVSDHDSGANGQVTCSLTPHVPFKLVSTYKNYYSLVLDSALDRERVSAYELVVTARDGGSPPLWATASVSVEVADVNDNAPAFAQSEYTVFVKENNPPGCHIFTVSAWDADAQENALVSYSLVERRLGERSLSSYVSVHAESGKVYALQPLDHEELELLQFQPRQPNPDWRYSASLRAGMHSSVHLEEAGILRAGPGGPDQQWPTVSSATPEPEAGEVSPPVGAGVNSNSWTFKYGPGNPKQSGPGELPDKFIIPGSPAIISIRQEPTNSQIDKSDFITFGKKEETKKKKKKKKGNKTQEKKEKGNSTTDNSDQ

SEQ ID NO: 10098 - protein, 949 aa, Homo sapiens
MFGFQRRGLGTPRLQLWLLLLEFWEVGSGQLHYSVSEEAKHGTFVGRIAQDLGLELAELVQRLFRVASKTHGDLLEVNLQNGILFVNSRIDREELCGQSAECSIHLEVIVDRPLQVFHVNVEVKDINDNPPVFSLREQKLLIAESKQSDSRFPLEGASDADIEENALLTYRLSKNEYFSLDSPTNGKQIKRLSLILKKSLDREKTPELNLLLTATDGGKPELTGTVRLLVQVLDVNDNDPEFDKSEYKVSLMENAAKETLVLKLNATDRDEGVNGEVTYSLMSIKPNGRHLFTLDQNNGEVRVNGTLDYEENKFYKIEVQATDKGTPPMAGHCTVWVEILDTNDNSPEVAVTSLSLPVREDAQPSTVIALISVSDRDSGVNGQVTCSLTPHVPFKLVSTFKNYYSLVLDSALDRENVWAYELVVTARDGGSPSLWATARVSVEVADVNDNAPAFAQPEYTVFVKENNPPGCHIFTVSARDADAQENALVSYSLVERRLGDRALSSYVSVHAESGKVYALQPLDHEELELLQFQVSARDAGVPPLSSNVTLQVFVLDENDNAPALLATQAGSAGGAVNKLVPRSVGAGHVVAKVRAVDADSGYNAWLSYELQPAAGGSRIPFRVGLYTGEISTTRALDEADSPRHRLLVLVKDHGEPALTATATVLVSLVESGQAPKASSRTLAGAASPEAALVDVNVYLIIAICVVSSLLVLTLLLYTALWWSATPTEGACAPGKPTLVCSRAVGSWSYSQQRRQRVCSEEGPPKTDLMAFSPSLPLGLNKEEEGERQEPGSNHPGQPRQPNPDWRYSASLRAGMHSSVHLEEAGILRAGPGGPDQQWPTVSSATPEPEAGEVSPPVGAGVNSNSWTFKYGPGNPKQSGPGELPDKFIIPGSPAIISIRQEPTNSQIDKSDFITFGKKEETKKKKKKKKGNKTQEKKEKGNSTTDNSDQ

SEQ ID NO: 10099 - protein, 810 aa, Homo sapiens
MFGFQRRGLGTPRLQLWLLLLEFWEVGSGQLHYSVSEEAKHGTFVGRIAQDLGLELAELVQRLFRVASKTHGDLLEVNLQNGILFVNSRIDREELCGQSAECSIHLEVIVDRPLQVFHVNVEVKDINDNPPVFSLREQKLLIAESKQSDSRFPLEGASDADIEENALLTYRLSKNEYFSLDSPTNGKQIKRLSLILKKSLDREKTPELNLLLTATDGGKPELTGTVRLLVQVLDVNDNDPEFDKSEYKVSLMENAAKETLVLKLNATDRDEGVNGEVTYSLMSIKPNGRHLFTLDQNNGEVRVNGTLDYEENKFYKIEVQATDKGTPPMAGHCTVWVEILDTNDNSPEVAVTSLSLPVREDAQPSTVIALISVSDRDSGVNGQVTCSLTPHVPFKLVSTFKNYYSLVLDSALDRENVWAYELVVTARDGGSPSLWATARVSVEVADVNDNAPAFAQPEYTVFVKENNPPGCHIFTVSARDADAQENALVSYSLVERRLGDRALSSYVSVHAESGKVYALQPLDHEELELLQFQVSARDAGVPPLSSNVTLQVFVLDENDNAPALLATQAGSAGGAVNKLVPRSVGAGHVVAKVRAVDADSGYNAWLSYELQPAAGGSRIPFRVGLYTGEISTTRALDEADSPRHRLLVLVKDHGEPALTATATVLVSLVESGQAPKASSRTLAGAASPEAALVDVNVYLIIAICVVSSLLVLTLLLYTALWWSATPTEGACAPGKPTLVCSRAVGSWSYSQQRRQRVCSEEGPPKTDLMAFSPSLPLGLNKEEEGERQEPGSNHPGQVSFLQIPPIRKCM

SEQ ID NO: 10100 - protein, 199 aa, Homo sapiens
  VARIANT 1: note = misc_feature - Xaa can be any naturally occurring amino acid
XVSSLLVLTLLLYTALWWSATPTEGACAPGKPTLVCSRAVGSWSYSQQRRQRVCSEEGPPKTDLMAFSPSLPLGLNKEEEGERQEPGSNHPGQPRQPNPDWRYSASLRAGMHSSVHLEEAGILRAGPGGPDQQWPTVSSATPEPEAGEVSPPVGAGVNSNSWTFKYGPGNPKQSGPEPKKQTQVSFLLRRKGEASQPRQ

SEQ ID NO: 10101 - protein, 803 aa, Homo sapiens
MVFTPEDRLGKQCLLLPLLLLAAWKVGSGQLHYSVPEEAKHGTFVGRIAQDLGLELAELVPRLFRMASKDREDLLEVNLQNGILFVNSRIDREELCGRSAECSIHLEVIVDRPLQVFHVDVEVRDINDNPPLFPVEEQRVLIYESRLPDSVFPLEGASDADVGSNSILTYKLSSSEYFGLDVKINSDDNKQIGLLLKKSLDREEAPAHNLFLTATDGGKPELTGTVQLLVTVLDVNDNAPTFEQSEYEVRIFENADNGTTVIRLNASDRDEGANGAISYSFNSLVAAMVIDHFSIDRNTGEIVIRGNLDFEQENLYKILIDATDKGHPPMAGHCTVLVRILDKNDNVPEIALTSLSLPVREDAQFGTVIALISVNDLDSGANGQVNCSLTPHVPFKLVSTFKNYYSLVLDSALDRESVSAYELVVTARDGGSPSLWATASLSVEVADMNDNAPAFAQPEYTVFVKENNPPGCHIFTVSARDADAQENALVSYSLVERRVGERALSSYISVHAESGKVYALQPLDHEELELLQFQVSARDAGVPPLGSNVTLQVFVLDENDNAPALLAPRVGGTGGAVSELVPRSLGAGQVVAKVRAVDADSGYNAWLSYELQPPASSARFPFRVGLYTGEISTTRVLDEADSPRHRLLVLVKDHGEPALTATATVLVSLVESGQAPKASSRASVGAAGPEAALVDVNVYLIIAICAVSSLLVLTLLLYTALRCSAPPTEGACTADKPTLVCSSAVGSWSYSQQRRQRVCSGEGPPKMDLMAFSPSLSPCPIMMGKAENQDLNEDHDAKVSEFS

SEQ ID NO: 10102 - protein, 686 aa, Homo sapiens
MVFTPEDRLGKQCLLLPLLLLAAWKVGSGQLHYSVPEEAKHGTFVGRIAQDLGLELAELVPRLFRMASKDREDLLEVNLQNGILFVNSRIDREELCGRSAECSIHLEVIVDRPLQVFHVDVEVRDINDNPPLFPVEEQRVLIYESRLPDSVFPLEGASDADVGSNSILTYKLSSSEYFGLDVKINSDDNKQIGLLLKKSLDREEAPAHNLFLTATDGGKPELTGTVQLLVTVLDVNDNAPTFEQSEYEVRIFENADNGTTVIRLNASDRDEGANGAISYSFNSLVAAMVIDHFSIDRNTGEIVIRGNLDFEQENLYKILIDATDKGHPPMAGHCTVLVRILDKNDNVPEIALTSLSLPVREDAQFGTVIALISVNDLDSGANGQVNCSLTPHVPFKLVSTFKNYYSLVLDSALDRESVSAYELVVTARDGGSPSLWATASLSVEVADMNDNAPAFAQPEYTVFVKENNPPGCHIFTVSARDADAQENALVSYSLVERRVGERALSSYISVHAESGKVYALQPLDHEELELLQFQPRQPNPDWRYSASLRAGMHSSVHLEEAGILRAGPGGPDQQWPTVSSATPEPEAGEVSPPVGAGVNSNSWTFKYGPGNPKQSGPGELPDKFIIPGSPAIISIRQEPTNSQIDKSDFITFGKKEETKKKKKKKKGNKTQEKKEKGNSTTDNSDQ

SEQ ID NO: 10103 - protein, 950 aa, Homo sapiens
MVFTPEDRLGKQCLLLPLLLLAAWKVGSGQLHYSVPEEAKHGTFVGRIAQDLGLELAELVPRLFRMASKDREDLLEVNLQNGILFVNSRIDREELCGRSAECSIHLEVIVDRPLQVFHVDVEVRDINDNPPLFPVEEQRVLIYESRLPDSVFPLEGASDADVGSNSILTYKLSSSEYFGLDVKINSDDNKQIGLLLKKSLDREEAPAHNLFLTATDGGKPELTGTVQLLVTVLDVNDNAPTFEQSEYEVRIFENADNGTTVIRLNASDRDEGANGAISYSFNSLVAAMVIDHFSIDRNTGEIVIRGNLDFEQENLYKILIDATDKGHPPMAGHCTVLVRILDKNDNVPEIALTSLSLPVREDAQFGTVIALISVNDLDSGANGQVNCSLTPHVPFKLVSTFKNYYSLVLDSALDRESVSAYELVVTARDGGSPSLWATASLSVEVADMNDNAPAFAQPEYTVFVKENNPPGCHIFTVSARDADAQENALVSYSLVERRVGERALSSYISVHAESGKVYALQPLDHEELELLQFQVSARDAGVPPLGSNVTLQVFVLDENDNAPALLAPRVGGTGGAVSELVPRSLGAGQVVAKVRAVDADSGYNAWLSYELQPPASSARFPFRVGLYTGEISTTRVLDEADSPRHRLLVLVKDHGEPALTATATVLVSLVESGQAPKASSRASVGAAGPEAALVDVNVYLIIAICAVSSLLVLTLLLYTALRCSAPPTEGACTADKPTLVCSSAVGSWSYSQQRRQRVCSGEGPPKMDLMAFSPSLSPCPIMMGKAENQDLNEDHDAKPRQPNPDWRYSASLRAGMHSSVHLEEAGILRAGPGGPDQQWPTVSSATPEPEAGEVSPPVGAGVNSNSWTFKYGPGNPKQSGPGELPDKFIIPGSPAIISIRQEPTNSQIDKSDFITFGKKEETKKKKKKKKGNKTQEKKEKGNSTTDNSDQ

SEQ ID NO: 10104 - protein, 458 aa, Homo sapiens
MDVNDNAPEITVSSITSPIPENTPETVVMVFRIRDRDSGDNGKMVCSIPEDIPFVLKSSVNNYYTLETERPLDRESRAEYNITITVTDLGTPRLKTEHNITVLVSDVNDNAPAFTQTSYALFVRENNSPALHIGSISATDRDSGTNAQVNYSLLPSQDPHLPLASLVSINADNGHLFALRSLDYEALQGFQFRVGATDHGSPALSSEALVRVLVLDANDNSPFVLYPLQNGSAPCTELVPWAAEPGYLVTKVVAVDGDSGQNAWLSYQLLKATEPGLFGVWAHNGEVRTARLLSERDAAKHRLVVLVKDNGEPPRSATATLHVLLVDGFSQPYLPLPEAAPAQAQADSLTVYLVVALASVSSLFLFSVLLFVAVRLCRRSRAAPVGRCSVPEGPFPGHLVDVSGTGTLSQSYHYEVCVTGGSRSNKFKFLKPIIPNFLPQSTGSEVEENPPFQNNLGF

SEQ ID NO: 10105 - protein, 67 aa, Homo sapiens
MENGGAGTLQIRQVLLFFVLLGMSQAGSETGNFLVMEELQSGSFVGNLAKTLGLEHLWILKQLSHTQ

SEQ ID NO: 10106 - protein, 795 aa, Homo sapiens
MENGGAGTLQIRQVLLFFVLLGMSQAGSETGNFLVMEELQSGSFVGNLAKTLGLEVSELSSRGARVVSNDNKECLQLDTNTGDLLLREMLDREELCGSNEPCVLYFQVLMKNPTQFLQIELQVRDINDHSPVFLEKEMLLEIPENSPVGAVFLLESAKDLDVGINAVKSYTINPNSHFHVKIRVNPDNRKYPELVLDKALDYEERPELSFILTALDGGSPPRSGTALVRVVVVDINDNSPEFEQAFYEVKILENSILGSLVVTVSAWDLDSGTNSELSYTFSHASEDIRKTFEINQKSGDITLTAPLDFEAIESYSIIIQATDGGGLFGKSTVRIQVMDVNDNAPEITVSSITSPIPENTPETVVMVFRIRDRDSGDNGKMVCSIPEDIPFVLKSSVNNYYTLETERPLDRESRAEYNITITVTDLGTPRLKTEHNITVLVSDVNDNAPAFTQTSYALFVRENNSPALHIGSISATDRDSGTNAQVNYSLLPSQDPHLPLASLVSINADNGHLFALRSLDYEALQGFQFRVGATDHGSPALSSEALVRVLVLDANDNSPFVLYPLQNGSAPCTELVPWAAEPGYLVTKVVAVDGDSGQNAWLSYQLLKATEPGLFGVWAHNGEVRTARLLSERDAAKHRLVVLVKDNGEPPRSATATLHVLLVDGFSQPYLPLPEAAPAQAQADSLTVYLVVALASVSSLFLFSVLLFVAVRLCRRSRAAPVGRCSVPEGPFPGHLVDVSGTGTLSQSYHYEVCVTGGSRSNKFKFLKPIIPNFLPQSTGSEVEENPPFQNNLGF

SEQ ID NO: 10107 - protein, 935 aa, Homo sapiens
MANRLQRGDRSRLLLLLCIFLGTLRGFRARQIRYSVPEETEKGSFVGNISKDLGLEPRELAKRGVRIVSRGKTQLFAVNPRSGSLITAGRIDREELCETVSSCFLNMELLVEDTLKIYGVEVEIIDINDNAPSFQEDEVEIKVSEHAIPGARFALPNARDPDVGVNSLQSYQLSPNNYFSLQLRGRTDGAKNPELVLEGSLDREKEAAHLLLLTALDGGDPIRKGAVPIRVVVLDVNDHIPMFTQSVYRVSVPENISSGTRVLMVNATDPDEGINGEVMYSFRNMESKASEIFQLDSQTGEVQVRGSLDFEKYRFYEMEIQGQDGGGLFTTTTMLITVVDVNDNAPEITITSSINSILENSPPGTVIALLNVQDQDSGENGQVSCFIPNHLPFKLEKTYGNYYKLITSRVLDRELVQSYNITLTATDQGSPPLSAETHVWLNVADDNDNPPVFPHSSYSAYIPENNPRGASIFSVTALDPDSKQNALVTYSLTDDTVQGVPLSSYVSINSNTGVLYALQSFDYEQFRDLELRVIARDSGDPPLSSNVSLSLFVLDQNDNAPEILYPALPTDGSTGVELAPRSAEPGYLVTKVVAVDKDSGQNAWLSYRLLKASEPGLFAVGEHTGEVRTARALLDRDALKQSLVVAVQDHGQPPLSATVTLTVAVADSIPEVLADLGSLESLANSETSDLSLYLVVAVAAVSCIFLVFVIVLLALRLWRWHKSRLLQASEGGLAGMPTSHFVGVDGVQAFLQTYSHEVSLIADSQKSHLIFPQPNYGDTLISQESCEKSEPLLIAEDSAIILGKCDPTSNQQAPPNTDWRFSQAQRPGTSGSQNGDDTGTWPNNQFDTEMLQAMILASASEAADGSSTLGGGAGTMGLSARYGPQFTLQHVPDYRQNVYIPGSNATLTNAAGKRDGKAPAGGNGNKKKSGKKEKK

SEQ ID NO: 10108 - protein, 750 aa, Homo sapiens
MANRLQRGDRSRLLLLLCIFLGTLRGFRARQIRYSVPEETEKGSFVGNISKDLGLEPRELAKRGVRIVSRGKTQLFAVNPRSGSLITAGRIDREELCETVSSCFLNMELLVEDTLKIYGVEVEIIDINDNAPSFQEDEVEIKVSEHAIPGARFALPNARDPDVGVNSLQSYQLSPNNYFSLQLRGRTDGAKNPELVLEGSLDREKEAAHLLLLTALDGGDPIRKGAVPIRVVVLDVNDHIPMFTQSVYRVSVPENISSGTRVLMVNATDPDEGINGEVMYSFRNMESKASEIFQLDSQTGEVQVRGSLDFEKYRFYEMEIQGQDGGGLFTTTTMLITVVDVNDNAPEITITSSINSILENSPPGTVIALLNVQDQDSGENGQVSCFIPNHLPFKLEKTYGNYYKLITSRVLDRELVQSYNITLTATDQGSPPLSAETHVWLNVADDNDNPPVFPHSSYSAYIPENNPRGASIFSVTALDPDSKQNALVTYSLTDDTVQGVPLSSYVSINSNTGVLYALQSFDYEQFRDLELRVIARDSGDPPLSSNVSLSLFVLDQNDNAPEILYPALPTDGSTGVELAPRSAEPGYLVTKVVAVDKDSGQNAWLSYRLLKASEPGLFAVGEHTGEQAPPNTDWRFSQAQRPGTSGSQNGDDTGTWPNNQFDTEMLQAMILASASEAADGSSTLGGGAGTMGLSARYGPQFTLQHVPDYRQNVYIPGSNATLTNAAGKRDGKAPAGGNGNKKKSGKKEKK

SEQ ID NO: 10109 - protein, 837 aa, Homo sapiens
MANRLQRGDRSRLLLLLCIFLGTLRGFRARQIRYSVPEETEKGSFVGNISKDLGLEPRELAKRGVRIVSRGKTQLFAVNPRSGSLITAGRIDREELCETVSSCFLNMELLVEDTLKIYGVEVEIIDINDNAPSFQEDEVEIKVSEHAIPGARFALPNARDPDVGVNSLQSYQLSPNNYFSLQLRGRTDGAKNPELVLEGSLDREKEAAHLLLLTALDGGDPIRKGAVPIRVVVLDVNDHIPMFTQSVYRVSVPENISSGTRVLMVNATDPDEGINGEVMYSFRNMESKASEIFQLDSQTGEVQVRGSLDFEKYRFYEMEIQGQDGGGLFTTTTMLITVVDVNDNAPEITITSSINSILENSPPGTVIALLNVQDQDSGENGQVSCFIPNHLPFKLEKTYGNYYKLITSRVLDRELVQSYNITLTATDQGSPPLSAETHVWLNVADDNDNPPVFPHSSYSAYIPENNPRGASIFSVTALDPDSKQNALVTYSLTDDTVQGVPLSSYVSINSNTGVLYALQSFDYEQFRDLELRVIARDSGDPPLSSNVSLSLFVLDQNDNAPEILYPALPTDGSTGVELAPRSAEPGYLVTKVVAVDKDSGQNAWLSYRLLKASEPGLFAVGEHTGEVRTARALLDRDALKQSLVVAVQDHGQPPLSATVTLTVAVADSIPEVLADLGSLESLANSETSDLSLYLVVAVAAVSCIFLVFVIVLLALRLWRWHKSRLLQASEGGLAGMPTSHFVGVDGVQAFLQTYSHEVSLIADSQKSHLIFPQPNYGDTLISQESCEKSEPLLIAEDSAIILGKCDPTSNQVRFISLPPNCWCLGTSLLRRCFLSLL

SEQ ID NO: 10110 - protein, 198 aa, Homo sapiens
MLTCLVLSGVAQPVAFGQGQQFLPVHPQNPGFVQNPSGALPKAYPDNHLSQVDVNELFSKLLKTGILKLSQTDSATTQVSEVTAQPPPEEEEDQNEDQDVPDLTNFTVEELKQRYDSVINRLYTGIQCYSCGMRFTTSQTDVYADHLDWHYRQNRTEKDVSRKVTHRRWYYSLTDWIEFEEIADLEERAKSQFFEKVH

SEQ ID NO: 10111 - protein, 1555 aa, Homo sapiens
MSEQTPAEAGAAGAREDACRDYQSSLEDLTFNSKPHINMLTILAEENLPFAKEIVSLIEAQTAKAPSSEKLPVMYLMDSIVKNVGREYLTAFTKNLVATFICVFEKVDENTRKSLFKLRSTWDEIFPLKKLYALDVRVNSLDPAWPIKPLPPNVNTSSIHVNPKFLNKSPEEPSTPGTVVSSPSISTPPIVPDIQKNLTQEQLIRQQLLAKQKQLLELQQKKLELELEQAKAQLAVSLSVQQETSNLGPGSAPSKLHVSQIPPMAVKAPHQVPVQSEKSRPGPSLQIQDLKGTNRDPRLNRISQHSHGKDQSHRKEFLMNTLNQSDTKTSKTIPSEKLNSSKQEKSKSGEKITKKELDQLDSKSKSKSKSPSPLKNKLSHTKDLKNQESESMRLSDMNKRDPRLKKHLQDKTDGKDDDVKEKRKTAEKKDKDEHMKSSEHRLAGSRNKIINGIVQKQDTITEESEKQGTKPGRSSTRKRSRSRSPKSRSPIIHSPKRRDRRSPKRRQRSMSPTSTPKAGKIRQSGAKQSHMEEFTPPSREDRNAKRSTKQDIRDPRRMKKTEEERPQETTNQHSTKSGTEPKENVENWQSSKSAKRWKSGWEENKSLQQVDEHSKPPHLRHRESWSSTKGILSPRAPKQQQHRLSVDANLQIPKELTLASKRELLQKTSERLASGEITQDDFLVVVHQIRQLFQYQEGVREEQRSPFNDRFPLKRPRYEDSDKPFVDSPASRFAGLDTNQRLTALAEDRPLFDGPSRPSVARDGPTKMIFEGPNKLSPRIDGPPTPASLRFDGSPGQMGGGGPLRFEGPQGQLGGGCPLRFEGPPGPVGTPLRFEGPIGQAGGGGFRFEGSPGLRFEGSPGGLRFEGPGGQPVGGLRFEGHRGQPVGGLRFEGPHGQPVGGLRFDNPRGQPVGGLRFEGGHGPSGAAIRFDGPHGQPGGGIRFEGPLLQQGVGMRFEGPHGQSVAGLRFEGQHNQLGGNLRFEGPHGQPGVGIRFEGPLVQQGGGMRFEGPSVPGGGLRIEGPLGQGGPRFEGCHALRFDGQPGQPSLLPRFDGLHGQPGPRFERTPGQPGPQRFDGPPGQQVQPRFDGVPQRFDGPQHQQASRFDIPLGLQGTRFDNHPSQRLESVSFNQTGPYNDPPGNAFNAPSQGLQFQRHEQIFDSPQGPNFNGPHGPGNQSFSNPLNRASGHYFDEKNLQSSQFGNFGNIPAPMTVGNIQASQQVLSGVAQPVAFGQGQQFLPVHPQNPGFVQNPSGALPKAYPDNHLSQVDVNELFSKLLKTGILKLSQTDSATTQVSEVTAQPPPEEEEDQNEDQDVPDLTNFTVEELKQRYDSVINRLYTGIQCYSCGMRFTTSQTDVYADHLDWHYRQNRTEKDVSRKVTHRRWYYSLTDWIEFEEIADLEERAKSQFFEKVHEEVVLKTQEAAKEKEFQSVPAGPAGAVESCEICQEQFEQYWDEEEEEWHLKNAIRVDGKIYHPSCYEDYQNTSSFDCTPSPSKTPVENPLNIMLNIVKNELQEPCDSPKVKEERIDTPPACTEESIATPSEIKTENDTVESV

SEQ ID NO: 10112 - protein, 999 aa, Homo sapiens
MSEQTPAEAGAAGAREDACRDYQSSLEDLTFNSKPHINMLTILAEENLPFAKEIVSLIEAQTAKAPSSEKLPVMYLMDSIVKNVGREYLTAFTKNLVATFICVFEKVDENTRKSLFKLRSTWDEIFPLKKLYALDVRVNSLDPAWPIKPLPPNVNTSSIHVNPKFLNKSPEEPSTPGTVVSSPSISTPPIVPDIQKNLTQEQLIRQQLLAKQKQLLELQQKKLELELEQAKAQLAVSLSVQQETSNLGPGSAPSKLHVSQIPPMAVKAPHQVPVQSEKSRPGPSLQIQDLKGTNRDPRLNRISQHSHGKDQSHRKEFLMNTLNQSDTKTSKTIPSEKLNSSKQEKSKSGEKITKKELDQLDSKSKSKSKSPSPLKNKLSHTKDLKNQESESMRLSDMNKRDPRLKKHLQDKTDGKDDDVKEKRKTAEKKDKDEHMKSSEHRLAGSRNKIINGIVQKQDTITEESEKQGTKPGRSSTRKRSRSRSPKSRSPIIHSPKRRDRRSPKRRQRSMSPTSTPKAGKIRQSGAKQSHMEEFTPPSREDRNAKRSTKQDIRDPRRMKKTEEERPQETTNQHSTKSGTEPKENVENWQSSKSAKRWKSGWEENKSLQQVDEHSKPPHLRHRESWSSTKGILSPRAPKQQQHRLSVDANLQIPKELTLASKRELLQKTSERLASGEITQDDFLVVVHQIRQLFQYQEGKHRCNVRDSPTEENKGGLKKKPLLSDAELTYYEHKAKLKRTQVQHSFPRLDLLDPDIFDYPLTDALLSGIECEPSKSKHASRNSGAQFDRKEQFSERARRLSPISGSRTYAENLSPHEGRRRHDEQVSAKGVREEQRSPFNDRFPLKRPRYEDSDKPFVDSPASRFAGLDTNQRLTALAEDRPLFDGPSRPSVARDGPTKMIFEGPNKLSPRIDGPPTPASLRFDGSPGQMGGGGPLRFEGPQGQLGGGCPLRFEGPPGPVGTPLRFEGPIGQAGGGGFRFEGSPGLRFEGSPGGLRFEGP

SEQ ID NO: 10113 - protein, 784 aa, Homo sapiens
MSEQTPAEAGAAGAREDACRDYQSSLEDLTFNSKPHINMLTILAEENLPFAKEIVSLIEAQTAKAPSSEKLPVMYLMDSIVKNVGREYLTAFTKNLVATFICVFEKVDENTRKSLFKLRSTWDEIFPLKKLYALDVRVNSLDPAWPIKPLPPNVNTSSIHVNPKFLNKSPEEPSTPGTVVSSPSISTPPIVPDIQKNLTQEQLIRQQLLAKQKQLLELQQKKLELELEQAKAQLAVSLSVQQETSNLGPGSAPSKLHVSQIPPMAVKAPHQVPVQSEKSRPGPSLQIQDLKGTNRDPRLNRISQHSHGKDQSHRKEFLMNTLNQSDTKTSKTIPSEKLNSSKQEKSKSGEKITKKELDQLDSKSKSKSKSPSPLKNKLSHTKDLKNQESESMRLSDMNKRDPRLKKHLQDKTDGKDDDVKEKRKTAEKKDKDEHMKSSEHRLAGSRNKIINGIVQKQDTITEESEKQGTKPGRSSTRKRSRSRSPKSRSPIIHSPKRRDRRSPKRRQRSMSPTSTPKAGKIRQSGAKQSHMEEFTPPSREDRNAKRSTKQDIRDPRRMKKTEEERPQETTNQHSTKSGTEPKENVENWQSSKSAKRWKSGWEENKSLQQVDEHSKPPHLRHRESWSSTKGILSPRAPKQQQHRLSVDANLQIPKELTLASKRELLQKTSERLASGEITQDDFLVVVHQIRQLFQYQEGVREEQRSPFNDRFPLKRPRYEDSDKPFVDSPASRFAGLDTNQRLTALAEDRPLFDGPSRPSVARDGPTKMIFEGPNKLSPRIDGPP

SEQ ID NO: 10114 - protein, 99 aa, Homo sapiens
MSEQTPAEAGAAGAREDACRDYQSSLEDLTFNSKPHINMLTILAEENLPFAKEIVSLIEAQTAKVDENTRKSLFKLRSTWDEIFPLKKLYALDVRVNSL

SEQ ID NO: 10115 - protein, 449 aa, Homo sapiens
MLPAATASLLGPLLTACALLPFAQGQTPNYTRPVFLCGGDVKGESGYVASEGFPNLYPPNKECIWTITVPEGQTVSLSFRVFDLELHPACRYDALEVFAGSGTSGQRLGRFCGTFRPAPLVAPGNQVTLRMTTDEGTGGRGFLLWYSGRATSGTEHQFCGGRLEKAQGTLTTPNWPESDYPPGISCSWHIIAPPDQVIALTFEKFDLEPDTYCRYDSVSVFNGAVSDDSRRLGKFCGDAVPGSISSEGNELLVQFVSDLSVTADGFSASYKTLPRGTAKEGQGPGPKRGTEPKVKLPPKSQPPEKTEESPSAPDAPTCPKQCRRTGTLQSNFCASSLVVTATVKSMVREPGEGLAVTVSLIGAYKTGGLDLPSPPTGASLKFYVPCKQCPPMKKGVSYLLMGQVEENRGPVLPPESFVVLHRPNQDQILTNLSKRKCPSQPVRAAASQD

SEQ ID NO: 10116 - protein, 303 aa, Homo sapiens
MRGANAWAPLCLLLAAATQLSRQQSPERPVFTCGGILTGESGFIGSEGFPGVYPPNSKCTWKITVPEGKVVVLNFRFIDLESDNLCRYDFVDVYNGHANGQRIGRFCGTFRPGALVSSGNKMMVQMISDANTAGNGFMAMFSAAEPNERGDQYCGGLLDRPSGSFKTPNWPDRDYPAGVTCVWHIVAPKNQLIELKFEKFDVERDNYCRYDYVAVFNGGEVNDARRIGKYCGDSPPAISRHCYHNHHSRWEFARHSLDHQHLQRGKFGDSAGGQEHECQADCRLQAVPSPQKRSKLHYYGPSR

SEQ ID NO: 10117 - protein, 415 aa, Homo sapiens
MRGANAWAPLCLLLAAATQLSRQQSPERPVFTCGGILTGESGFIGSEGFPGVYPPNSKCTWKITVPEGKVVVLNFRFIDLESDNLCRYDFVDVYNGHANGQRIGRFCGTFRPGALVSSGNKMMVQMISDANTAGNGFMAMFSAAEPNERGDQYCGGLLDRPSGSFKTPNWPDRDYPAGVTCVWHIVAPKNQLIELKFEKFDVERDNYCRYDYVAVFNGGEVNDARRIGKYCGDSPPAPIVSERNELLIQFLSDLSLTADGFIGHYIFRPKKLPTTTEQPVTTTFPVTTGLKPTVALCQQKCRRTGTLEGNYCSSDFVLAGTVITTITRDGSLHATVSIINIYKEGNLAIQQAGKNMSARLTVVCKQCPLLRRGLNYIIMGQVGEDGRGKIMPNSFIMMFKTKNQKLLDALKNKQC

SEQ ID NO: 10118 - protein, 140 aa, Homo sapiens
TEQPVTTTFPVTTGLKPTVALCQQKCRRTGTLEGNYCSSDFVLAGTVITTITRDGSLHATVSIINIYKEGNLAIQQAGKNMSARLTVVCKQCPLLRRGLNYIIMGQVGEDGRGKIMPNSFIMMFKTKNQKLLDALKNKQC

SEQ ID NO: 10119 - protein, 101 aa, Homo sapiens
  VARIANT 1: note = misc_feature - Xaa can be any naturally occurring amino acid
XGTFRPGALVSSGNKMMVQMISDANTAGNGFMAMFSAAEPNERGKKKKRGPESTSPLSRVAMLCQGISIVEDSLTDLPALLKPPTGQTGITLQESLVCGTL

SEQ ID NO: 10120 - protein, 158 aa, Homo sapiens
MERRAWSLQCTAFVLFCAWCALNSAKAKRQFVNEWAAEIPGGPEAASAIAEELGYDLLGQIGSLENHYLFKHKNHPRRSRRSAFHITKRLSDDDRVIWAEQQYEKERSKRSALRDSALNLFNDPMWNQQWYLQDTRMTAALPKLDLHVIPVWQKGITG

SEQ ID NO: 10121 - protein, 753 aa, Homo sapiens
MERRAWSLQCTAFVLFCAWCALNSAKAKRQFVNEWAAEIPGGPEAASAIAEELGYDLLGQIGSLENHYLFKHKNHPRRSRRSAFHITKRLSDDDRVIWAEQQYEKERSKRSALRDSALNLFNDPMWNQQWYLQDTRMTAALPKLDLHVIPVWQKGITGKGVVITVLDDGLEWNHTDIYANYDPEASYDFNDNDHDPFPRYDPTNENKHGTRCAGEIAMQANNHKCGVGVAYNSKVGGIRMLDGIVTDAIEASSIGFNPGHVDIYSASWGPNDDGKTVEGPGRLAQKAFEYGVKQGRQGKGSIFVWASGNGGRQGDNCDCDGYTDSIYTISISSASQQGLSPWYAEKCSSTLATSYSSGDYTDQRITSADLHNDCTETHTGTSASAPLAAGIFALALEANPNLTWRDMQHLVVWTSEYDPLANNPGWKKNGAGLMVNSRFGFGLLNAKALVDLADPRTWRSVPEKKECVVKDNDFEPRALKANGEVIIEIPTRACEGQENAIKSLEHVQFEATIEYSRRGDLHVTLTSAAGTSTVLLAERERDTSPNGFKNWDFMSVHTWGENPIGTWTLRITDMSGRIQNEGRIVNWKLILHGTSSQPEHMKQPRVYTSYNTVQNDRRGVEKMVDPGEEQPTQENPKENTLVSKSPSSSSVGGRRDELEEGAPSQAMLRLLQSAFSKNSPPKQSPKKSPSAKLNIPYENFYEALEKLNKPSQLKDSEDSLYNDYVDVFYNTKPYKHRDDRLLQALVDILNEEN

SEQ ID NO: 10122 - protein, 706 aa, Homo sapiens
MGKGSISFLFFSQIGSLENHYLFKHKNHPRRSRRSAFHITKRLSDDDRVIWAEQQYEKERSKRSALRDSALNLFNDPMWNQQWYLQDTRMTAALPKLDLHVIPVWQKGITGKGVVITVLDDGLEWNHTDIYANYDPEASYDFNDNDHDPFPRYDPTNENKHGTRCAGEIAMQANNHKCGVGVAYNSKVGGIRMLDGIVTDAIEASSIGFNPGHVDIYSASWGPNDDGKTVEGPGRLAQKAFEYGVKQGRQGKGSIFVWASGNGGRQGDNCDCDGYTDSIYTISISSASQQGLSPWYAEKCSSTLATSYSSGDYTDQRITSADLHNDCTETHTGTSASAPLAAGIFALALEANPNLTWRDMQHLVVWTSEYDPLANNPGWKKNGAGLMVNSRFGFGLLNAKALVDLADPRTWRSVPEKKECVVKDNDFEPRALKANGEVIIEIPTRACEGQENAIKSLEHVQFEATIEYSRRGDLHVTLTSAAGTSTVLLAERERDTSPNGFKNWDFMSVHTWGENPIGTWTLRITDMSGRIQNEGRIVNWKLILHGTSSQPEHMKQPRVYTSYNTVQNDRRGVEKMVDPGEEQPTQENPKENTLVSKSPSSSSVGGRRDELEEGAPSQAMLRLLQSAFSKNSPPKQSPKKSPSAKLNIPYENFYEALEKLNKPSQLKDSEDSLYNDYVDVFYNTKPYKHRDDRLLQALVDILNEEN

SEQ ID NO: 10123 - protein, 260 aa, Homo sapiens
MAGSPLLWGPRAGGVGLLVLLLLGLFRPPPALCARPVKEPRGLSAASPPLAETGAPRRFRRSVPRGEAAGAVQELARALAHLLEAERQERARAEAQEAEDQQARVLAQLLRVWGAPRNSDPALGLDDDPDAPAAQLARALLRARLDPAALAAQLVPAPVPAAALRPRPPVYDDGPAGPDAEEAGDETPDVDPELLRYLLGRILAGSADSEGVAAPRRLRRAADHDVGSELPPEGVLGALLRVKRLETPAPQVPARRLLPP

SEQ ID NO: 10124 - protein, 638 aa, Homo sapiens
MKGGCVSQWKAAAGFLFCVMVFASAERPVFTNHFLVELHKGGEDKARQVAAEHGFGVRKLPFAEGLYHFYHNGLAKAKRRRSLHHKQQLERDPRVKMALQQEGFDRKKRGYRDINEIDINMNDPLFTKQWYLINTGQADGTPGLDLNVAEAWELGYTGKGVTIGIMDDGIDYLHPDLASNYNAEASYDFSSNDPYPYPRYTDDWFNSHGTRCAGEVSAAANNNICGVGVAYNSKVAGIRMLDQPFMTDIIEASSISHMPQLIDIYSASWGPTDNGKTVDGPRELTLQAMADGVNKGRGGKGSIYVWASGDGGSYDDCNCDGYASSMWTISINSAINDGRTALYDESCSSTLASTFSNGRKRNPEAGVATTDLYGNCTLRHSGTSAAAPEAAGVFALALEANLGLTWRDMQHLTVLTSKRNQLHDEVHQWRRNGVGLEFNHLFGYGVLDAGAMVKMAKDWKTVPERFHCVGGSVQDPEKIPSTGKLVLTLTTDACEGKENFVRYLEHVQAVITVNATRRGDLNINMTSPMGTKSILLSRRPRDDDSKVGFDKWPFMTTHTWGEDARGTWTLELGFVGSAPQKGVLKEWTLMLHGTQSAPYIDQVVRDYQSKLAMSKKEELEEELDEAVERSLKSILNKN

SEQ ID NO: 10125 - protein, 603 aa, Homo sapiens
MKGGCVSQWKAAAGFLFCVMVFASAERPVFTNHFLVELHKGGEDKARQVAAEHGFGVRKVKMALQQEGFDRKKRGYRDINEIDINMNDPLFTKQWYLINTGQADGTPGLDLNVAEAWELGYTGKGVTIGIMDDGIDYLHPDLASNYNAEASYDFSSNDPYPYPRYTDDWFNSHGTRCAGEVSAAANNNICGVGVAYNSKVAGIRMLDQPFMTDIIEASSISHMPQLIDIYSASWGPTDNGKTVDGPRELTLQAMADGVNKGRGGKGSIYVWASGDGGSYDDCNCDGYASSMWTISINSAINDGRTALYDESCSSTLASTFSNGRKRNPEAGVATTDLYGNCTLRHSGTSAAAPEAAGVFALALEANLGLTWRDMQHLTVLTSKRNQLHDEVHQWRRNGVGLEFNHLFGYGVLDAGAMVKMAKDWKTVPERFHCVGGSVQDPEKIPSTGKLVLTLTTDACEGKENFVRYLEHVQAVITVNATRRGDLNINMTSPMGTKSILLSRRPRDDDSKVGFDKWPFMTTHTWGEDARGTWTLELGFVGSAPQKGVLKEWTLMLHGTQSAPYIDQVVRDYQSKLAMSKKEELEEELDEAVERSLKSILNKN

SEQ ID NO: 10126 - protein, 619 aa, Homo sapiens
MVFASAERPVFTNHFLVELHKGGEDKARQVAAEHGFGVRKLPFAEGLYHFYHNGLAKAKRRRSLHHKQQLERDPRVKMALQQEGFDRKKRGYRDINEIDINMNDPLFTKQWYLINTGQADGTPGLDLNVAEAWELGYTGKGVTIGIMDDGIDYLHPDLASNYNAEASYDFSSNDPYPYPRYTDDWFNSHGTRCAGEVSAAANNNICGVGVAYNSKVAGIRMLDQPFMTDIIEASSISHMPQLIDIYSASWGPTDNGKTVDGPRELTLQAMADGVNKGRGGKGSIYVWASGDGGSYDDCNCDGYASSMWTISINSAINDGRTALYDESCSSTLASTFSNGRKRNPEAGVATTDLYGNCTLRHSGTSAAAPEAAGVFALALEANLGLTWRDMQHLTVLTSKRNQLHDEVHQWRRNGVGLEFNHLFGYGVLDAGAMVKMAKDWKTVPERFHCVGGSVQDPEKIPSTGKLVLTLTTDACEGKENFVRYLEHVQAVITVNATRRGDLNINMTSPMGTKSILLSRRPRDDDSKVGFDKWPFMTTHTWGEDARGTWTLELGFVGSAPQKGVLKEWTLMLHGTQSAPYIDQVVRDYQSKLAMSKKEELEEELDEAVERSLKSILNKN

SEQ ID NO: 10127 - protein, 755 aa, Homo sapiens
MRPAPIALWLRLVLALALVRPRAVGWAPVRAPIYVSSWAVQVSQGNREVERLARKFGFVNLGPIFPDGQYFHLRHRGVVQQSLTPHWGHRLHLKKNPKVQWFQQQTLQRRVKRSVVVPTDPWFSKQWYMNSEAQPDLSILQAWSQGLSGQGIVVSVLDDGIEKDHPDLWANYDPLASYDFNDYDPDPQPRYTPSKENRHGTRCAGEVAAMANNGFCGVGVAFNARIGGVRMLDGTITDVIEAQSLSLQPQHIHIYSASWGPEDDGRTVDGPGILTREAFRRGVTKGRGGLGTLFIWASGNGGLHYDNCNCDGYTNSIHTLSVGSTTQQGRVPWYSEACASTLTTTYSSGVATDPQIVTTDLHHGCTDQHTGTSASAPLAAGMIALALEANPFLTWRDMQHLVVRASKPAHLQAEDWRTNGVGRQVSHHYGYGLLDAGLLVDTARTWLPTQPQRKCAVRVQSRPTPILPLIYIRENVSACAGLHNSIRSLEHVQAQLTLSYSRRGDLEISLTSPMGTRSTLVAIRPLDVSTEGYNNWVFMSTHFWDENPQGVWTLGLENKGYYFNTGTLYRYTLLLYGTAEDMTARPTGPQVTSSACVQRDTEGLCQACDGPAYILGQLCLAYCPPRFFNHTRLVTAGPGHTAAPALRVCSSCHASCYTCRGGSPRDCTSCPPSSTLDQQQGSCMGPTTPDSRPRLRAAACPHHRCPASAMVLSLLAVTLGGPVLCGMSMDLPLYAWLSRARATPTKPQVWLPAGT

SEQ ID NO: 10128 - protein, 230 aa, Homo sapiens
MRPAPIALWLRLVLALALVRPRAVGWAPVRAPIYVSSWAVQVSQGNREVERLARKFGFVNLGPIFPDGQYFHLRHRGVVQQSLTPHWGHRLHLKKNPKVQWFQQQTLQRRVKRSVVVPTDPWFSKQWYMNSEAQPDLSILQAWSQGLSGQGIVVSVLDDGIEKDHPDLWANYDPLASYDFNDYDPDPQPRYTPSKENRRTDAGRYHHRCHRGPVAEPAAAAHPHLQRQLG

SEQ ID NO: 10129 - protein, 318 aa, Homo sapiens
  VARIANT 1: note = misc_feature - Xaa can be any naturally occurring amino acid
XPIALWLRLVLALALVRPRAVGWAPVRAPIYVSSWAVQVSQGNREVERLARKFGFVNLGPIFPDGQYFHLRHRGVVQQSLTPHWGHRLHLKKNPKVQWFQQQTLQRRVKRSVVVPTDPWFSKQWYMNSEAQPDLSILQAWSQGLSGQGIVVSVLDDGIEKDHPDLWANYDPLASYDFNDYDPDPQPRYTPSKENRRTDAGRYHHRCHRGPVAEPAAAAHPHLQRQLGSRGRRPHGGRPRHPHPRGLPAWCDQASTRFPWAAPPSRAACPGTAKPAPPPSPPPTAAAWPPTPRSSPRTCITGAQTSTRAPRPQPHWRPA

SEQ ID NO: 10130 - protein, 101 aa, Homo sapiens
CQPCHRFCATCAGAGADGCINCTEGYFMEDGRCVQSCSISYYFDHSSENGYKSCKKCDISCLTCNGPGFKNCTSCPSGYLLDLGMCQMGAICKDVSLFRGA

SEQ ID NO: 10131 - protein, 690 aa, Homo sapiens
MGWGSRCCCPGRLDLLCVLALLGGCLLPVCRTRVYTNHWAVKIAGGFPEANRIASKYGFINIGQIGALKDYYHFYHSRTIKRSVISSRGTHSFISMEPKVEWIQQQVVKKRTKRDYDFSRAQSTYFNDPKWPSMWYMHCSDNTHPCQSDMNIEGAWKRGYTGKNIVVTILDDGIERTHPDLMQNYDALASCDVNGNDLDPMPRYDASNENKHGTRCAGEVAAAANNSHCTVGIAFNAKIGGVRMLDGDVTDMVEAKSVSFNPQHVHIYSASWGPDDDGKTVDGPAPLTRQAFENGVRMGRRGLGSVFVWASGNGGRSKDHCSCDGYTNSIYTISISSTAESGKKPWYLEECSSTLATTYSSGESYDKKIITTDLRQRCTDNHTGTSASAPMAAGIIALALEANPFLTWRDVQHVIVRTSRAGHLNANDWKTNAAGFKVSHLYGFGLMDAEAMVMEAEKWTTVPRQHVCVESTDRQIKTIRPNSAVRSIYKASGCSDNPNRHVNYLEHVVVRITITHPRRGDLAIYLTSPSGTRSQLLANRLFDHSMEGFKNWEFMTIHCWGERAAGDWVLEVYDTPSQLRNFKTPGKLKEWSLVLYGTSVQPYSPTNEFPKVERFRYSRVEDPTDDYGTEDYAGELASSGTQAKKRQLMHHPTTWENRMEWNGMKWNGMKWNGMEWNGMEWNRIESNRIE

SEQ ID NO: 10132 - protein, 913 aa, Homo sapiens
MGWGSRCCCPGRLDLLCVLALLGGCLLPVCRTRVYTNHWAVKIAGGFPEANRIASKYGFINIGQIGALKDYYHFYHSRTIKRSVISSRGTHSFISMEPKVEWIQQQVVKKRTKRDYDFSRAQSTYFNDPKWPSMWYMHCSDNTHPCQSDMNIEGAWKRGYTGKNIVVTILDDGIERTHPDLMQNYDALASCDVNGNDLDPMPRYDASNENKHGTRCAGEVAAAANNSHCTVGIAFNAKIGGVRMLDGDVTDMVEAKSVSFNPQHVHIYSASWGPDDDGKTVDGPAPLTRQAFENGVRMGRRGLGSVFVWASGNGGRSKDHCSCDGYTNSIYTISISSTAESGKKPWYLEECSSTLATTYSSGESYDKKIITTDLRQRCTDNHTGTSASAPMAAGIIALALEANPFLTWRDVQHVIVRTSRAGHLNANDWKTNAAGFKVSHLYGFGLMDAEAMVMEAEKWTTVPRQHVCVESTDRQIKTIRPNSAVRSIYKASGCSDNPNRHVNYLEHVVVRITITHPRRGDLAIYLTSPSGTRSQLLANRLFDHSMEGFKNWEFMTIHCWGERAAGDWVLEVYDTPSQLRNFKTPGKLKEWSLVLYGTSVQPYSPTNEFPKVERFRYSRVEDPTDDYGTEDYAGPCDPECSEVGCDGPGPDHCNDCLHYYYKLKNNTRICVSSCPPGHYHADKKRCRKCAPNCESCFGSHGDQCMSCKYGYFLNEETNSCVTHCPDGSYQDTKKNLCRKCSENCKTCTEFHNCTECRDGLSLQGSRCSVSCEDGRYFNGQDCQPCHRFCATCAGAGADGCINCTEGYFMEDGRCVQSCSISYYFDHSSENGYKSCKKCDISCLTCNGPGFKNCTSCPSGYLLDLGMCQMGAICKDATEESWAEGGFCMLVKKNNLCQRKVLQQLCCKTCTFQG

SEQ ID NO: 10133 - protein, 1860 aa, Homo sapiens
MGWGSRCCCPGRLDLLCVLALLGGCLLPVCRTRVYTNHWAVKIAGGFPEANRIASKYGFINIGQIGALKDYYHFYHSRTIKRSVISSRGTHSFISMEPKVEWIQQQVVKKRTKRDYDFSRAQSTYFNDPKWPSMWYMHCSDNTHPCQSDMNIEGAWKRGYTGKNIVVTILDDGIERTHPDLMQNYDALASCDVNGNDLDPMPRYDASNENKHGTRCAGEVAAAANNSHCTVGIAFNAKIGGVRMLDGDVTDMVEAKSVSFNPQHVHIYSASWGPDDDGKTVDGPAPLTRQAFENGVRMGRRGLGSVFVWASGNGGRSKDHCSCDGYTNSIYTISISSTAESGKKPWYLEECSSTLATTYSSGESYDKKIITTDLRQRCTDNHTGTSASAPMAAGIIALALEANPFLTWRDVQHVIVRTSRAGHLNANDWKTNAAGFKVSHLYGFGLMDAEAMVMEAEKWTTVPRQHVCVESTDRQIKTIRPNSAVRSIYKASGCSDNPNRHVNYLEHVVVRITITHPRRGDLAIYLTSPSGTRSQLLANRLFDHSMEGFKNWEFMTIHCWGERAAGDWVLEVYDTPSQLRNFKTPGKLKEWSLVLYGTSVQPYSPTNEFPKVERFRYSRVEDPTDDYGTEDYAGPCDPECSEVGCDGPGPDHCNDCLHYYYKLKNNTRICVSSCPPGHYHADKKRCRKCAPNCESCFGSHGDQCMSCKYGYFLNEETNSCVTHCPDGSYQDTKKNLCRKCSENCKTCTEFHNCTECRDGLSLQGSRCSVSCEDGRYFNGQDCQPCHRFCATCAGAGADGCINCTEGYFMEDGRCVQSCSISYYFDHSSENGYKSCKKCDISCLTCNGPGFKNCTSCPSGYLLDLGMCQMGAICKDGEYVDEHGHCQTCEASCAKCQGPTQEDCTTCPMTRIFDDGRCVSNCPSWKFEFENQCHPCHHTCQRCQGSGPTHCTSCGADNYGREHFLYQGECGDSCPEGHYATEGNTCLPCPDNCELCHSVHVCTRCMKGYFIAPTNHTCQKLECGQGEVQDPDYEECVPCEEGCLGCSLDDPGTCTSCAMGYYRFDHHCYKTCPEKTYSEEVECKACDSNCGSCDQNGCYWCEEGFFLLGGSCVRKCGPGFYGDQEMGECESCHRACETCTGPGHDECSSCQEGLQLLRGMCVHATKTQEEGKFWNDILRKLQPCHSSCKTCNGSATLCTSCPKGAYLLAQACVSSCPQGTWPSVRSGSCENCTEACAICSGADLCKKCQMQPGHPLFLHEGRCYSKCPEGSYAEDGICERCSSPCRTCEGNATNCHSCEGGHVLHHGVCQENCPERHVAVKGVCKHCPEMCQDCIHEKTCKECTPEFFLHDDMCHQSCPRGFYADSRHCVPCHKDCLECSGPKADDCELCLESSWVLYDGLCLEECPAGTYYEKETKECRDCHKSCLTCSSSGTCTTCQKGLIMNPRGSCMANEKCSPSEYWDEDAPGCKPCHVKCFHCMGPAEDQCQTCPMNSLLLNTTCVKDCPEGYYADEDSNRCAHCHSSCRTCEGRHSRQCHSCRPGWFQLGKECLLQCREGYYADNSTGRCERCNRSCKGCQGPRPTDCLSCDRFFFLLRSKGECHRSCPDHYYVEQSTQTCERCHPTCDQCKGKGALNCLSCVWSYHLMGGICTSDCLVGEYRVGEGEKFNCEKCHESCMECKGPGAKNCTLCPANLVLHMDDSHCLHCCNTSDPPSAQECCDCQDTTDECILRTSKVRPATEHFKTALFITSSMMLVLLLGAAVVVWKKSRGRVQPAAKAGYEKLADPNKSYSSYKSSYRESTSFEEDQVIEYRDRDYDEDDDDDIVYMGQDGTVYRKFKYGLLDDDDIDELEYDDESYSYYQ

SEQ ID NO: 10134 - protein, 1560 aa, Homo sapiens
NSIYTISISSTAESGKKPWYLEECSSTLATTYSSGESYDKKIITTDLRQRCTDNHTGTSASAPMAAGIIALALEANPFLTWRDVQHVIVRTSRAGHLNANDWKTNAAGFKVSHLYGFGLMDAEAMVMEAEKWTTVPRQHVCVESTDRQIKTIRPNSAVRSIYKASGCSDNPNRHVNYLEHVVVRITITHPRRGDLAIYLTSPSGTRSQLLANRLFDHSMEGFKNWEFMTIHCWGERAAGDWVLEVYDTPSQLRNFKTPGKLKEWSLVLYGTSVQPYSPTNEFPKVERFRYSRVEDPTDDYGTEDYAGPCDPECSEVGCDGPGPDHCNDCLHYYYKLKNNTRICVSSCPPGHYHADKKRCRKCAPNCESCFGSHGDQCMSCKYGYFLNEETNSCVTHCPDGSYQDTKKNLCRKCSENCKTCTEFHNCTECRDGLSLQGSRCSVSCEDGRYFNGQDCQPCHRFCATCAGAGADGCINCTEGYFMEDGRCVQSCSISYYFDHSSENGYKSCKKCDISCLTCNGPGFKNCTSCPSGYLLDLGMCQMGAICKDGEYVDEHGHCQTCEASCAKCQGPTQEDCTTCPMTRIFDDGRCVSNCPSWKFEFENQCHPCHHTCQRCQGSGPTHCTSCGADNYGREHFLYQGECGDSCPEGHYATEGNTCLPCPDNCELCHSVHVCTRCMKGYFIAPTNHTCQKLECGQGEVQDPDYEECVPCEEGCLGCSLDDPGTCTSCAMGYYRFDHHCYKTCPEKTYSEEVECKACDSNCGSCDQNGCYWCEEGFFLLGGSCVRKCGPGFYGDQEMGECESCHRACETCTGPGHDECSSCQEGLQLLRGMCVHATKTQEEGKFWNEAVSTANLSVVKSLLQERRRWKVQIKRDILRKLQPCHSSCKTCNGSATLCTSCPKGAYLLAQACVSSCPQGTWPSVRSGSCENCTEACAICSGADLCKKCQMQPGHPLFLHEGRCYSKCPEGSYAEDGICERCSSPCRTCEGNATNCHSCEGGHVLHHGVCQENCPERHVAVKGVCKHCPEMCQDCIHEKTCKECTPEFFLHDDMCHQSCPRGFYADSRHCVPCHKDCLECSGPKADDCELCLESSWVLYDGLCLEECPAGTYYEKETKECRDCHKSCLTCSSSGTCTTCQKGLIMNPRGSCMANEKCSPSEYWDEDAPGCKPCHVKCFHCMGPAEDQCQTCPMNSLLLNTTCVKDCPEGYYADEDSNRCAHCHSSCRTCEGRHSRQCHSCRPGWFQLGKECLLQCREGYYADNSTGRCERCNRSCKGCQGPRPTDCLSCDRFFFLLRSKGECHRSCPDHYYVEQSTQTCERCHPTCDQCKGKGALNCLSCVWSYHLMGGICTSDCLVGEYRVGEGEKFNCEKCHESCMECKGPGAKNCTLCPANLVLHMDDSHCLHCCNTSDPPSAQECCDCQDTTDECILRTSKVRPATEHFKTALFITSSMMLVLLLGAAVVVWKKSRGRVQPAAKAGYEKLADPNKSYSSYKSSYRESTSFEEDQVIEYRDRDYDEDDDDDIVYMGQDGTVYRKFKYGLLDDDDIDELEYDDESYSYYQ

SEQ ID NO: 10135 - protein, 692 aa, Homo sapiens
MGTVSSRRSWWPLPLLLLLLLLLGPAGARAQEDEDGDYEELVLALRSEEDGLAEAPEHGTTATFHRCAKDPWRLPGTYVVVLKEETHLSQSERTARRLQAQAARRGYLTKILHVFHGLLPGFLVKMSGDLLELALKLPHVDYIEEDSSVFAQSIPWNLERITPPRYRADEYQPPDGGSLVEVYLLDTSIQSDHREIEGRVMVTDFENVPEEDGTRFHRQASKCDSHGTHLAGVVSGRDAGVAKGASMRSLRVLNCQGKGTVSGTLIGLEFIRKSQLVQPVGPLVVLLPLAGGYSRVLNAACQRLARAGVVLVTAAGNFRDDACLYSPASAPEVITVGATNAQDQPVTLGTLGTNFGRCVDLFAPGEDIIGASSDCSTCFVSQSGTSQAAAHVAGIAAMMLSAEPELTLAELRQRLIHFSAKDVINEAWFPEDQRVLTPNLVAALPPSTHGAGWQLFCRTVWSAHSGPTRMATAVARCAPDEELLSCSSFSRSGKRRGERMEAQGGKLVCRAHNAFGGEGVYAIARCCLLPQANCSVHTAPPAEASMGTRVHCHQQGHVLTGCSSHWEVEDLGTHKPPVLRPRGQPNQCVGHREASIHASCCHAPGLECKVKEHGIPAPQEQVTVACEEGWTLTGCSALPGTSHVLGAYAVDNTCVVRSRDVSTTGSTSEGAVTAVAICCRSRHLAQASQELQ

SEQ ID NO: 10136 - protein, 293 aa, Homo sapiens
MGRVVAELVSSLLGLWLLLCSCGCPEGAELRAPPDKIAIIGAGIGGTSAAYYLRQKFGKDVKIDLFEREEVGGRLATMMVQGQEYEAGGSVIHPLNLHMKRFVKDLGLSAVQASGGLLGIYNGETLVFEESNWFIINVIKLVWRYGFQSLRMHMWVEDVLDKFMRIYRYQSHDYAFSSVEKLLHALGGDDFLGMLNRTLLETLQKAGFSEKFLNEMIAPVMRVNYGQSTDINAFVGAVSLSCSDSGLWAVEGGNKLVCSGLLQASKSNLISGSVMYIEEKTKTKYTVLGLCPL

SEQ ID NO: 10137 - protein, 505 aa, Homo sapiens
MGRVVAELVSSLLGLWLLLCSCGCPEGAELRAPPDKIAIIGAGIGGTSAAYYLRQKFGKDVKIDLFEREEVGGRLATMMVQGQEYEAGGSVIHPLNLHMKRFVKDLGLSAVQASGGLLGIYNGETLVFEESNWFIINVIKLVWRYGFQSLRMHMWVEDVLDKFMRIYRYQSHDYAFSSVEKLLHALGGDDFLGMLNRTLLETLQKAGFSEKFLNEMIAPVMRVNYGQSTDINAFVGAVSLSCSDSGLWAVEGGNKLVCSGLLQASKSNLISGSVMYIEEKTKTKYTGNPTKMYEVVYQIGTETRSDFYDIVLVATPLNRKMSNITFLNFDPPIEEFHQYYQHIVTTLVKGELNTSIFSSRPIDKFGLNTVLTTDNSDLFINSIGIVPSVREKEDPEPSTDGTYVWKIFSQETLTKAQILKLFLSYDYAVKKPWLAYPHYKPPEKCPSIILHDRLYYLNGIECAASAMEMSAIAAHNAALLAYHRWNGHTDMIDQDGLYEKLKTEL

SEQ ID NO: 10138 - protein, 130 aa, Homo sapiens
MMVQGQEYEAGGSVIHPLNLHMKRFVKDLGLSAVQASGGLLGIYNGETLVFEESNWFIINVIKLVWRYGFQSLRMHMWVEDVLDKFMRIYRYQSHDYAFSSVEKLLHALGGDDFLGMLNRTLLETLQKAG

SEQ ID NO: 10139 - protein, 154 aa, Homo sapiens
MMVQGQEYEAGGSVIHPLNLHMKRFVKDLGLSAVQASGGLLGIYNGETLVFEESNWFIINVIKLVWRYGFQSLRMHMWVEDVLDKFMRIYRYQSHDYAFSSVEKLLHALGGDDFLGMLNRTLLETLQKAGFSEKFLNEMIAPVMRVNYGQSTDI

SEQ ID NO: 10140 - protein, 209 aa, Homo sapiens
MMVQGQEYEAGGSVIHPLNLHMKRFVKDLGLSAVQASGGLLGIYNGETLVFEESNWFIINVIKLVWRYGFQSLRMHMWVEDVLDKFMRIYRYQSHDYAFSSVEKLLHALGGDDFLGMLNRTLLETLQKAGFSEKFLNEMIAPVMRVNYGQSTDINAFVGAVSLSCSDSGLWAVEGGNKLVCSGLLQASKSNLISGSVMYIEEKTKTKYT

SEQ ID NO: 10141 - protein, 111 aa, Homo sapiens
MARAAPLLAALTALLAAAAAGGDAPPGKIAVVGAGIGGSAVAHFLQQHFGPRVQIDVYEKGTVGGRLATISVNKQHYESGAASFHSLSLHMQDFVKLLDGATETREGKELA

SEQ ID NO: 10142 - protein, 494 aa, Homo sapiens
MARAAPLLAALTALLAAAAAGGDAPPGKIAVVGAGIGGSAVAHFLQQHFGPRVQIDVYEKGTVGGRLATISVNKQHYESGAASFHSLSLHMQDFVKLLGLRHRREVVGRSAIFGGEHFMLEETDWYLLNLFRLWWHYGISFLRLQMWVEEVMEKFMRIYKYQAHGYAFSGVEELLYSLGESTFVNMTQHSVAESLLQVGVTQRFIDDVVSAVLRASYGQSAAMPAFAGAMSLAGAQGSLWSVEGGNKLVCSGLLKLTKANVIHATVTSVTLHSTEGKALYQVAYENEVGNSSDFYDIVVIATPLHLDNSSSNLTFAGFHPPIDDVQGSFQPTVVSLVHGYLNSSYFGFPDPKLFPFANILTTDFPSFFCTLDNICPVNISASFRRKQPQEAAVWRVQSPKPLFRTQLKTLFRSYYSVQTAEWQAHPLYGSRPTLPRFALHDQLFYLNALEWAASSVEVMAVAAKNVALLAYNRWYQDLDKIDQKDLMHKVKTEL

SEQ ID NO: 10143 - protein, 82 aa, Homo sapiens
MARAAPLLAALTALLAAAAAGGDAPPGKIGAGRTRGGWGWDWGLCCGPFSPAALWTSGADRRVREGNRGWPLGHHLSQQAAL

SEQ ID NO: 10144 - protein, 82 aa, Homo sapiens; identical to SEQ ID NO: 10143

SEQ ID NO: 10145 - protein, 404 aa, Homo sapiens
MQDFVKLLGLRHRREVVGRSAIFGGEHFMLEETDWYLLNLFRLWWHYGISFLRLQMWVEEVMEKFMRIYKYQAHGYAFSGVEELLYSLGESTFVNMTQHSVAESLLQVGVTQRFIDDVVSAVLRASYGQSAAMPAFAGAMSLAGAQGSLWSVEGGNKLVCSGLLKLTKANVIHATVTSVTLHSTEGKALYQVAYENEVGNSSDFYDIVVIATPLHLDNSSSNLTFAGFHPPIDDVQGSFQPTVVSLVHGYLNSSYFGFPDPKLFPFANILTTDFPSFFCTLDNICPVNISASFRRKQPQEAAVWRVQSPKPLFRTQLKTLFRSYYSVQTAEWQAHPLYGSRPTLPRFALHDQLFYLNALEWAASSVEVMAVAAKNVALLAYNRWYQDLDKIDQKDLMHKVKTEL

SEQ ID NO: 10146 - protein, 933 aa, Homo sapiens
MAASRLDFGEVETFLDRHPELFEDYLMRKGKQEMVEKWLQRHSQGQGALGPRPSLAGTSSLAHSTCRGGSSVGGGTGPNGSAHSQPLPGGGDCGGVPLSPSWAGGSRGDGNLQRRASQKELRKSFARSKAIHVNRTYDEQVTSRAQEPLSSVRRRALLRKASSLPPTTAHILSALLESRVNLPRYPPTAIDYKCHLKKHNERQFFLELVKDISNDLDLTSLSYKILIFVCLMVDADRCSLFLVEGAAAGKKTLVSKFFDVHAGTPLLPCSSTENSNEVQVPWGKGIIGYVGEHGETVNIPDAYQDRRFNDEIDKLTGYKTKSLLCMPIRSSDGEIIGVAQAINKIPEGAPFTEDDEKVMQMYLPFCGIAISNAQLFAASRKEYERSRALLEVVNDLFEEQTDLEKIVKKIMHRAQTLLKCERCSVLLLEDIESPVVKFTKSFELMSPKCSADAENSFKESMEKSSYSDWLINNSIAELVASTGLPVNISDAYQDPRFDAEADQISGFHIRSVLCVPIWNSNHQIIGVAQVLNRLDGKPFDDADQRLFEAFVIFCGLGINNTIMYDQVKKSWAKQSVALDVLSYHATCSKAEVDKFKAANIPLVSELAIDDIHFDDFSLDVDAMITAALRMFMELGMVQKFKIDYETLCRWLLTVRKNYRMVLYHNWRHAFNVCQLMFAMLTTAGFQDILTEVEILAVIVGCLCHDLDHRGTNNAFQAKSGSALAQLYGTSATLEHHHFNHAVMILQSEGHNIFANLSSKEYSDLMQLLKQSILATDLTLYFERRTEFFELVSKGEYDWNIKNHRDIFRSMLMTACDLGAVTKPWEISRQVAELVTSEFFEQGDRERLELKLTPSAIFDRNRKDELPRLQLEWIDSICMPLYQALVKVNVKLKPMLDSVATNRSKWEELHQKRLLASTASSSPASVMVAKEDRN

SEQ ID NO: 10147 - protein, 575 aa, Homo sapiens
MQMYLPFCGIAISNAQLFAASRKEYERSRALLEVVNDLFEEQTDLEKIVKKIMHRAQTLLKCERCSVLLLEDIESPVVKFTKSFELMSPKCSADAENSFKESMEKSSYSDWLINNSIAELVASTGLPVNISDAYQDPRFDAEADQISGFHIRSVLCVPIWNSNHQIIGVAQVLNRLDGKPFDDADQRLFEAFVIFCGLGINNTIMYDQVKKSWAKQSVALDVLSYHATCSKAEVDKFKAANIPLVSELAIDDIHFDDFSLDVDAMITAALRMFMELGMVQKFKIDYETLCRWLLTVRKNYRMVLYHNWRHAFNVCQLMFAMLTTAGFQDILTEVEILAVIVGCLCHDLDHRGTNNAFQAKSGSALAQLYGTSATLEHHHFNHAVMILQSEGHNIFANLSSKEYSDLMQLLKQSILATDLTLYFERRTEFFELVSKGEYDWNIKNHRDIFRSMLMTACDLGAVTKPWEISRQVAELVTSEFFEQGDRERLELKLTPSAIFDRNRKDELPRLQLEWIDSICMPLYQALVKVNVKLKPMLDSVATNRSKWEELHQKRLLASTASSSPASVMVAKEDRN

SEQ ID NO: 10148 - protein, 36 aa, Homo sapiens
MQMYLPFCGIAISNAQLFAASRKEYERSRSYVRDVY

SEQ ID NO: 10149 - protein, 489 aa, Homo sapiens
MSPKCSADAENSFKESMEKSSYSDWLINNSIAELVASTGLPVNISDAYQDPRFDAEADQISGFHIRSVLCVPIWNSNHQIIGVAQVLNRLDGKPFDDADQRLFEAFVIFCGLGINNTIMYDQVKKSWAKQSVALDVLSYHATCSKAEVDKFKAANIPLVSELAIDDIHFDDFSLDVDAMITAALRMFMELGMVQKFKIDYETLCRWLLTVRKNYRMVLYHNWRHAFNVCQLMFAMLTTAGFQDILTEVEILAVIVGCLCHDLDHRGTNNAFQAKSGSALAQLYGTSATLEHHHFNHAVMILQSEGHNIFANLSSKEYSDLMQLLKQSILATDLTLYFERRTEFFELVSKGEYDWNIKNHRDIFRSMLMTACDLGAVTKPWEISRQVAELVTSEFFEQGDRERLELKLTPSAIFDRNRKDELPRLQLEWIDSICMPLYQALVKVNVKLKPMLDSVATNRSKWEELHQKRLLASTASSSPASVMVAKEDRN

SEQ ID NO: 10150 - protein, 437 aa, Homo sapiens
  VARIANT 1: note = misc_feature - Xaa can be any naturally occurring amino acid
XLPFCGIAISNAQLFAASRKEYERSRALLEVVNDLFEEQTDLEKIVKKIMHRAQTLLKCERCSVLLLEDIESPVVKFTKSFELMSPKCSADAENSFKESMEKSSYSDWLINNSIAELVASTGLPVNISDAYQDPRFDAEADQISGFHIRSVLCVPIWNSNHQIIGVAQVLNRLDGKPFDDADQRLFEVLSYHATCSKAEVDKFKAANIPLVSELAIDDIHFDDFSLDVDAMITAALRMFMELGMVQKFKIDYETLCRWLLTVRKNYRMVLYHNWRHAFNVCQLMFAMLTTAGFQDILTEVEILAVIVGCLCHDLDHRGTNNAFQAKSGSALAQLYGTSATLEHHHFNHAVMILQSEGHNIFANLSSKEYSDLMQLLKQSILATDLTLYFERRTEFFELVSKGEYDWNIKNHRDIFRSMLMTACDLGAVTKPWEISRQ

SEQ ID NO: 10151 - protein, 136 aa, Homo sapiens
  VARIANT 1: note = misc_feature - Xaa can be any naturally occurring amino acid
XVLPLVEERKISMLMTACDLGAVTKPWEISRQVAELVTSEFFEQGDRERLELKLTPSAIFDRNRKDELPRLQLEWIDSICMPLYQALVKVNVKLKPMLDSVATNRSKWEELHQKRLLASTASSSPASVMVAKEDRN

SEQ ID NO: 10152 - protein, 327 aa, Homo sapiens
FPTASSVPEHKGVGFHAWDVRNLRKLRGQVPAGSLPPTDPSLHRWFLAPLPSPEVIGVAELVNKINGPWFSKFDEDLATAFSIYCGISIAHSLLYKKVNEAQYRSHLANEMMMYHMKVSDDEYTKLLHDGIQPVAAIDSNFASFTYTPRSLPEDDTSMAILSMLQDMNFINNYKIDCPTLARFCLMVKKGYRDPPYHNWMHAFSVSHFCYLLYKNLELTNYLEDIEIFALFISCMCHDLDHRGTNNSFQVASKSVLAALYSSEGSVMERHHFAQAIAILNTHGCNIFDHFSRKDYQRMLDLMRDIILATDLAHHLRIFKDLQKMAEG

SEQ ID NO: 10153 - protein, 38 aa, Homo sapiens
MGQACGHSILCRSQQYPAARPAEPQPGPPCKGARTPRE

SEQ ID NO: 10154 - protein, 941 aa, Homo sapiens
MGQACGHSILCRSQQYPAARPAEPRGQQVFLKPDEPPPPPQPCADSLQDALLSLGSVIDISGLQRAVKEALSAVLPRVETVYTYLLDGESQLVCEDPPHELPQEGKVREAIISQKRLGCNGLGFSDLPGKPLARLVAPLAPDTQVLVMPLADKEAGAVAAVILVHCGQLSDNEEWSLQAVEKHTLVALRRVQVLQQRGPREAPRAVQNPPEGTAEDQKGGAAYTDRDRKILQLCGELYDLDASSLQLKVLQYLQQETRASRCCLLLVSEDNLQLSCKVIGDKVLGEEVSFPLTGCLGQVVEDKKSIQLKDLTSEDVQQLQSMLGCELQAMLCVPVISRATDQVVALACAFNKLEGDLFTDEDEHVIQHCFHYTSTVLTSTLAFQKEQKLKCECQALLQVAKNLFTHLDDVSVLLQEIITEARNLSNAEICSVFLLDQNELVAKVFDGGVVDDESYEIRIPADQGIAGHVATTGQILNIPDAYAHPLFYRGVDDSTGFRTRNILCFPIKNENQEVIGVAELVNKINGPWFSKFDEDLATAFSIYCGISIAHSLLYKKVNEAQYRSHLANEMMMYHMKVSDDEYTKLLHDGIQPVAAIDSNFASFTYTPRSLPEDDTSMAILSMLQDMNFINNYKIDCPTLARFCLMVKKGYRDPPYHNWMHAFSVSHFCYLLYKNLELTNYLEDIEIFALFISCMCHDLDHRGTNNSFQVASKSVLAALYSSEGSVMERHHFAQAIAILNTHGCNIFDHFSRKDYQRMLDLMRDIILATDLAHHLRIFKDLQKMAEVGYDRNNKQHHRLLLCLLMTSCDLSDQTKGWKTTRKIAELIYKEFFSQGDLEKAMGNRPMEMMDREKAYIPELQISFMEHIAMPIYKLLQDLFPKAAELYERVASNREHWTKVSHKFTIRGLPSNNSLDFLDEEYEVPDLDGTRAPINGCCSLDAE

SEQ ID NO: 10155 - protein, 826 aa, Homo sapiens
MGQACGHSILCRSQQYPAARPAEPRGQQVFLKPDEPPPPPQPCADSLQVHCGQLSDNEEWSLQAVEKHTLVALRRVQVLQQRGPREAPRAVQNPPEGTAEDQKGGAAYTDRDRKILQLCGELYDLDASSLQLKVLQYLQQETRASRCCLLLVSEDNLQLSCKVIGDKVLGEEVSFPLTGCLGQVVEDKKSIQLKDLTSEDVQQLQSMLGCELQAMLCVPVISRATDQVVALACAFNKLEGDLFTDEDEHVIQHCFHYTSTVLTSTLAFQKEQKLKCECQALLQVAKNLFTHLDDVSVLLQEIITEARNLSNAEICSVFLLDQNELVAKVFDGGVVDDESYEIRIPADQGIAGHVATTGQILNIPDAYAHPLFYRGVDDSTGFRTRNILCFPIKNENQEVIGVAELVNKINGPWFSKFDEDLATAFSIYCGISIAHSLLYKKVNEAQYRSHLANEMMMYHMKVSDDEYTKLLHDGIQPVAAIDSNFASFTYTPRSLPEDDTSMAILSMLQDMNFINNYKIDCPTLARFCLMVKKGYRDPPYHNWMHAFSVSHFCYLLYKNLELTNYLEDIEIFALFISCMCHDLDHRGTNNSFQVASKSVLAALYSSEGSVMERHHFAQAIAILNTHGCNIFDHFSRKDYQRMLDLMRDIILATDLAHHLRIFKDLQKMAEVGYDRNNKQHHRLLLCLLMTSCDLSDQTKGWKTTRKIAELIYKEFFSQGDLEKAMGNRPMEMMDREKAYIPELQISFMEHIAMPIYKLLQDLFPKAAELYERVASNREHWTKVSHKFTIRGLPSNNSLDFLDEEYEVPDLDGTRAPINGCCSLDAE

SEQ ID NO: 10156 - protein, 39 aa, Homo sapiens
MGQACGHSILCRSQQYPAARPAEPSLQLPEHCFHTCDLI

SEQ ID NO: 10157 - protein, 932 aa, Homo sapiens
MKKQRIQEGKSLAHRRGQQVFLKPDEPPPPPQPCADSLQDALLSLGSVIDISGLQRAVKEALSAVLPRVETVYTYLLDGESQLVCEDPPHELPQEGKVREAIISQKRLGCNGLGFSDLPGKPLARLVAPLAPDTQVLVMPLADKEAGAVAAVILVHCGQLSDNEEWSLQAVEKHTLVALRRVQVLQQRGPREAPRAVQNPPEGTAEDQKGGAAYTDRDRKILQLCGELYDLDASSLQLKVLQYLQQETRASRCCLLLVSEDNLQLSCKVIGDKVLGEEVSFPLTGCLGQVVEDKKSIQLKDLTSEDVQQLQSMLGCELQAMLCVPVISRATDQVVALACAFNKLEGDLFTDEDEHVIQHCFHYTSTVLTSTLAFQKEQKLKCECQALLQVAKNLFTHLDDVSVLLQEIITEARNLSNAEICSVFLLDQNELVAKVFDGGVVDDESYEIRIPADQGIAGHVATTGQILNIPDAYAHPLFYRGVDDSTGFRTRNILCFPIKNENQEVIGVAELVNKINGPWFSKFDEDLATAFSIYCGISIAHSLLYKKVNEAQYRSHLANEMMMYHMKVSDDEYTKLLHDGIQPVAAIDSNFASFTYTPRSLPEDDTSMAILSMLQDMNFINNYKIDCPTLARFCLMVKKGYRDPPYHNWMHAFSVSHFCYLLYKNLELTNYLEDIEIFALFISCMCHDLDHRGTNNSFQVASKSVLAALYSSEGSVMERHHFAQAIAILNTHGCNIFDHFSRKDYQRMLDLMRDIILATDLAHHLRIFKDLQKMAEVGYDRNNKQHHRLLLCLLMTSCDLSDQTKGWKTTRKIAELIYKEFFSQGDLEKAMGNRPMEMMDREKAYIPELQISFMEHIAMPIYKLLQDLFPKAAELYERVASNREHWTKVSHKFTIRGLPSNNSLDFLDEEYEVPDLDGTRAPINGCCSLDAE

SEQ ID NO: 10158 - protein, 198 aa, Homo sapiens
MLQDMNFINNYKIDCPTLARFCLMVKKGYRDPPYHNWMHAFSVSHFCYLLYKNLELTNYLEDIEIFALFISCMCHDLDHRGTNNSFQVASKSVLAALYSSEGSVMERHHFAQAIAILNTHGCNIFDHFSRKDYQRMLDLMRDIILATDLAHHLRIFKDLQKMAEVGYDRNNKQHHRLLLCLLMTSCDLSDQTKGWKTT

SEQ ID NO: 10159 - protein, 178 aa, Homo sapiens
MMMYHMKVSDDEYTKLLHDGIQPVAAIDSNFASFTYTPRSLPEDDTSMAILSMLQDMNFINNYKIDCPTLARFCLMVKKGYRDPPYHNWMHAFSVSHFCYLLYKNLELTNYLEDIEIFALFISCMCHDLDHRGTNNSFQVASKSVLAALYSSEGSVMERHHFAQAIAILNTHGCNIFD

SEQ ID NO: 10160 - protein, 87 aa, Homo sapiens
MRRQPAASLDPLAKEPGPPGSRDDRLEDALLSLGSVIDISGLQRAVKEALSAVLPRVETVYTYLLDGESQLVCEDPPHELPQEGKVR

SEQ ID NO: 10161 - protein, 144 aa, Homo sapiens
MRRQPAASLDPLAKEPGPPGSRDDRLEDALLSLGSVIDISGLQRAVKEALSAVLPRVETVYTYLLDGESQLVCEDPPHELPQEGKVREAIISQKRLGCNGLGFSDLPGKPLARLVAPLAPDTQVLVMPLADKEAGAVAAVILVH

SEQ ID NO: 10162 - protein, 920 aa, Homo sapiens
MRRQPAASLDPLAKEPGPPGSRDDRLEDALLSLGSVIDISGLQRAVKEALSAVLPRVETVYTYLLDGESQLVCEDPPHELPQEGKVREAIISQKRLGCNGLGFSDLPGKPLARLVAPLAPDTQVLVMPLADKEAGAVAAVILVHCGQLSDNEEWSLQAVEKHTLVALRRVQVLQQRGPREAPRAVQNPPEGTAEDQKGGAAYTDRDRKILQLCGELYDLDASSLQLKVLQYLQQETRASRCCLLLVSEDNLQLSCKVIGDKVLGEEVSFPLTGCLGQVVEDKKSIQLKDLTSEDVQQLQSMLGCELQAMLCVPVISRATDQVVALACAFNKLEGDLFTDEDEHVIQHCFHYTSTVLTSTLAFQKEQKLKCECQALLQVAKNLFTHLDDVSVLLQEIITEARNLSNAEICSVFLLDQNELVAKVFDGGVVDDESYEIRIPADQGIAGHVATTGQILNIPDAYAHPLFYRGVDDSTGFRTRNILCFPIKNENQEVIGVAELVNKINGPWFSKFDEDLATAFSIYCGISIAHSLLYKKVNEAQYRSHLANEMMMYHMKVSDDEYTKLLHDGIQPVAAIDSNFASFTYTPRSLPEDDTSMAILSMLQDMNFINNYKIDCPTLARFCLMVKKGYRDPPYHNWMHAFSVSHFCYLLYKNLELTNYLEDIEIFALFISCMCHDLDHRGTNNSFQVASKSVLAALYSSEGSVMERHHFAQAIAILNTHGCNIFDHFSRKDYQRMLDLMRDIILATDLAHHLRIFKDLQKMAEVGYDRNNKQHHRLLLCLLMTSCDLSDQTKGWKTTRKIAELIYKEFFSQGDLEKAMGNRPMEMMDREKAYIPELQISFMEHIAMPIYKLLQDLFPKAAELYERVASNREHWTKVSHKFTIRGLPSNNSLDFLDEEYEVPDLDGTRAPINGCCSLDAE

SEQ ID NO: 10163 - protein, 92 aa, Homo sapiens
MSYILKMPGTCLPGEGTTYELPPSSLHPSSAPVTSGGTCPALLTEAGWEAPIMAFTEAASAVGPSWTHSGASRSSSSRTSRRRRRSHAPTAC

SEQ ID NO: 10164 - protein, 106 aa, Homo sapiens
MVLVLHHILIAVVQFLRRGQQVFLKPDEPPPPPQPCADSLQDALLSLGSVIDISGLQRAVKEALSAVLPRVETVYTYLLDGESQLVCEDPPHELPQEGKVRCTVAS

SEQ ID NO: 10165 - protein, 934 aa, Homo sapiens
MVLVLHHILIAVVQFLRRGQQVFLKPDEPPPPPQPCADSLQDALLSLGSVIDISGLQRAVKEALSAVLPRVETVYTYLLDGESQLVCEDPPHELPQEGKVREAIISQKRLGCNGLGFSDLPGKPLARLVAPLAPDTQVLVMPLADKEAGAVAAVILVHCGQLSDNEEWSLQAVEKHTLVALRRVQVLQQRGPREAPRAVQNPPEGTAEDQKGGAAYTDRDRKILQLCGELYDLDASSLQLKVLQYLQQETRASRCCLLLVSEDNLQLSCKVIGDKVLGEEVSFPLTGCLGQVVEDKKSIQLKDLTSEDVQQLQSMLGCELQAMLCVPVISRATDQVVALACAFNKLEGDLFTDEDEHVIQHCFHYTSTVLTSTLAFQKEQKLKCECQALLQVAKNLFTHLDDVSVLLQEIITEARNLSNAEICSVFLLDQNELVAKVFDGGVVDDESYEIRIPADQGIAGHVATTGQILNIPDAYAHPLFYRGVDDSTGFRTRNILCFPIKNENQEVIGVAELVNKINGPWFSKFDEDLATAFSIYCGISIAHSLLYKKVNEAQYRSHLANEMMMYHMKVSDDEYTKLLHDGIQPVAAIDSNFASFTYTPRSLPEDDTSMAILSMLQDMNFINNYKIDCPTLARFCLMVKKGYRDPPYHNWMHAFSVSHFCYLLYKNLELTNYLEDIEIFALFISCMCHDLDHRGTNNSFQVASKSVLAALYSSEGSVMERHHFAQAIAILNTHGCNIFDHFSRKDYQRMLDLMRDIILATDLAHHLRIFKDLQKMAEVGYDRNNKQHHRLLLCLLMTSCDLSDQTKGWKTTRKIAELIYKEFFSQGDLEKAMGNRPMEMMDREKAYIPELQISFMEHIAMPIYKLLQDLFPKAAELYERVASNREHWTKVSHKFTIRGLPSNNSLDFLDEEYEVPDLDGTRAPINGCCSLDAE

SEQ ID NO: 10166 - protein, 685 aa, Homo sapiens
MVLVLHHILIAVVQFLRRGQQVFLKPDEPPPPPQPCADSLQDALLSLGSVIDISGLQRAVKEALSAVLPRVETVYTYLLDGESQLVCEDPPHELPQEGKVRFTDEDEHVIQHCFHYTSTVLTSTLAFQKEQKLKCECQALLQVAKNLFTHLDDVSVLLQEIITEARNLSNAEICSVFLLDQNELVAKVFDGGVVDDESYEIRIPADQGIAGHVATTGQILNIPDAYAHPLFYRGVDDSTGFRTRNILCFPIKNENQEVIGVAELVNKINGPWFSKFDEDLATAFSIYCGISIAHSLLYKKVNEAQYRSHLANEMMMYHMKVSDDEYTKLLHDGIQPVAAIDSNFASFTYTPRSLPEDDTSMAILSMLQDMNFINNYKIDCPTLARFCLMVKKGYRDPPYHNWMHAFSVSHFCYLLYKNLELTNYLEDIEIFALFISCMCHDLDHRGTNNSFQVASKSVLAALYSSEGSVMERHHFAQAIAILNTHGCNIFDHFSRKDYQRMLDLMRDIILATDLAHHLRIFKDLQKMAEVGYDRNNKQHHRLLLCLLMTSCDLSDQTKGWKTTRKIAELIYKEFFSQGDLEKAMGNRPMEMMDREKAYIPELQISFMEHIAMPIYKLLQDLFPKAAELYERVASNREHWTKVSHKFTIRGLPSNNSLDFLDEEYEVPDLDGTRAPINGCCSLDAE

SEQ ID NO: 10167 - protein, 92 aa, Homo sapiens
MVLVLHHILIAVVQFLRRGQQVFLKPDEPPPPPQPCADSLQETVYTYLLDGRLSSPRSGWAAMGWASQTCQGSPWPGWWLHWLLIPKCWSCR

SEQ ID NO: 10168 - protein, 65 aa, Homo sapiens
MVLVLHHILIAVVQFLRRGQQVFLKPDEPPPPPQPCADSLQPAWTPLQRSQDPQGVETTDWRTPC

SEQ ID NO: 10169 - protein, 65 aa, Homo sapiens; identical to SEQ ID NO: 10168

SEQ ID NO: 10170 - protein, 65 aa, Homo sapiens; identical to SEQ ID NO: 10168

SEQ ID NO: 10171 - protein, 336 aa, Homo sapiens
PGLDRSRGRGRAELGGEVGGLGDPGSRRRARRGAERRLRDPDTEVRRGPLSDRRLALAGELYDLDASSLQLKVLQYLQQETRASRCCLLLVSEDNLQLSCKVIGDKVLGEEVSFPLTGCLGQVVEDKKSIQLKDLTSEDVQQLQSMLGCELQAMLCVPVISRATDQVVALACAFNKLEGDLFTDEDEHVIQHCFHYTSTVLTSTLAFQKEQKLKCECQALLQVAKNLFTHLDDVSVLLQEIITEARNLSNAEICSVFLLDQNELVAKVFDGGVVDDESYEIRIPADQGIAGHVATTGQILNIPDAYAHPLFYRGVDDSTGFRTRNILCFPIKNENQ

SEQ ID NO: 10172 - protein, 75 aa, Homo sapiens
  VARIANT 1: note = misc_feature - Xaa can be any naturally occurring amino acid
XLWLVASGGRHSAFPVSHPKGVGLACLPSTVASTGGCHWETGRAWEFRELRPAWTPLQRSQDPQGVETTDWRTPC

SEQ ID NO: 10173 - protein, 172 aa, Homo sapiens
  VARIANT 1: note = misc_feature - Xaa can be any naturally occurring amino acid
XSAVTPSPCLSLSQLQQETRASRCCLLLVSEDNLQLSCKVIGDKVLGEEVSFPLTGCLGQVVEDKKSIQLKDLTSEDVQQLQSMLGCELQAMLCVPVISRATDQVVALACAFNKLEGDLFTDEDEHVIQHCFHYTSTVLTSTLAFQKEQKLKCECQALLQVAKNLFTHLDDV

SEQ ID NO: 10174 - protein, 482 aa, Homo sapiens
MEVCYQLPVLPLDRPVPQHVLSRRGAISFSSSSALFGCPNPRQLSQRRGAISYDSSDQTALYIRMLGDVRVRSRAGFESERRGSHPYIDFRIFHSQSEIEVSVSARNIRRLLSFQRYLRSSRFFRGTAVSNSLNILDDDYNGQAKCMLEKVGNWNFDIFLFDRLTNGNSLVSLTFHLFSLHGLIEYFHLDMMKLRRFLVMIQEDYHSQNPYHNAVHAADVTQAMHCYLKEPKLANSVTPWDILLSLIAAATHDLDHPGVNQPFLIKTNHYLATLYKNTSVLENHHWRSAVGLLRESGLFSHLPLESRQQMETQIGALILATDISRQNEYLSLFRSHLDRGDLCLEDTRHRHLVLQMALKCADICNPCRTWELSKQWSEKVTEEFFHQGDIEKKYHLGVSPLCDRHTESIANIQIGFMTYLVEPLFTEWARFSNTRLSQTMLGHVGLNKASWKGLQREQSSSEDTDAAFELNSQLLPQENRLS

SEQ ID NO: 10175 - protein, 424 aa, Homo sapiens
MEVCYQLPVLPLDRPVPQHVLSRRGAISFSSSSALFGCPNPRQLSQRRGAISYDSSDQTALYIRMLGDVRVRSRAGFESERRGSHPYIDFRIFHSQSEIEVSVSARNIRRLLSFQRYLRSSRFFRGTAVSNSLNILDDDYNGQAKCMLEKVGNWNFDIFLFDRLTNGNSLVSLTFHLFSLHGLIEYFHLDMMKLRRFLVMIQEDYHSQNPYHNAVHAADVTQAMHCYLKEPKLANSVTPWDILLSLIAAATHDLDHPGVNQPFLIKTNHYLATLYKNTSVLENHHWRSAVGLLRESGLFSHLPLESRQQMETQIGALILATDISRQNEYLSLFRSHLDRGDLCLEDTRHRHLVLQMALKCADICNPCRTWELSKQWSEKVTEEFFHQGDIEKKYHLGVSPLCDRHTESIANIQIGNYTYLDIAG

SEQ ID NO: 10176 - protein, 86 aa, Homo sapiens
MGITLIWCLALVLIKWITSKRRGAISYDSSDQTALYIRMLGDVRVRSRAGFESERRGSHPYIDFRIFHSQSEIEVSVSARNIRRLL

SEQ ID NO: 10177 - protein, 456 aa, Homo sapiens
MGITLIWCLALVLIKWITSKRRGAISYDSSDQTALYIRMLGDVRVRSRAGFESERRGSHPYIDFRIFHSQSEIEVSVSARNIRRLLSFQRYLRSSRFFRGTAVSNSLNILDDDYNGQAKCMLEKVGNWNFDIFLFDRLTNGNSLVSLTFHLFSLHGLIEYFHLDMMKLRRFLVMIQEDYHSQNPYHNAVHAADVTQAMHCYLKEPKLANSVTPWDILLSLIAAATHDLDHPGVNQPFLIKTNHYLATLYKNTSVLENHHWRSAVGLLRESGLFSHLPLESRQQMETQIGALILATDISRQNEYLSLFRSHLDRGDLCLEDTRHRHLVLQMALKCADICNPCRTWELSKQWSEKVTEEFFHQGDIEKKYHLGVSPLCDRHTESIANIQIGFMTYLVEPLFTEWARFSNTRLSQTMLGHVGLNKASWKGLQREQSSSEDTDAAFELNSQLLPQENRLS

SEQ ID NO: 10178 - protein, 243 aa, Homo sapiens
MARLWGALSLWPLWAAVPWGGAAAVGVRACSSTAAPDGVEGPALRRSYWRHLRRLVLGPPEPPFSHVCQVGDPVLRGVAAPVERAQLGGPELQRLTQRLVQVMRRRRCVGLSAPQLGVPRQVLALELPEALCRECPPRQRALRQMEPFPLRVFVNPSLRVLDSRLVTFPEGCESVAGFLACVPRFQAVQISGLDPNGEQVVWQASGWAARIIQHEMDHLQGCLFIDKMDSRTFTNVYWMKVND

SEQ ID NO: 10179 - protein, 86 aa, Homo sapiens
MRTLACLLLLGCGYLAHVLAEEAEIPREVIERLARSQIHSIRDLQRLLEIDSVGSEDSLDTSLRAHGVHATKHVPEKRPLPIRRKR

SEQ ID NO: 10180 - protein, 196 aa, Homo sapiens
MRTLACLLLLGCGYLAHVLAEEAEIPREVIERLARSQIHSIRDLQRLLEIDSVGSEDSLDTSLRAHGVHATKHVPEKRPLPIRRKRSIEEAVPAVCKTRTVIYEIPRSQVDPTSANFLIWPPCVEVKRCTGCCNTSSVKCQPSRVHHRSVKVAKVEYVRKKPKLKEVQVRLEEHLECACATTSLNPDYREEDTDVR

SEQ ID NO: 10181 - protein, 211 aa, Homo sapiens [sequence omitted]

SEQ ID NO: 10182 - protein, 205 aa, Homo sapiens
QRQAAALGSQSPSPAGLRAGAVPPARACLQEAEIPREVIERLARSQIHSIRDLQRLLEIDSVGSEDSLDTSLRAHGVHATKHVPEKRPLPIRRKRSIEEAVPAVCKTRTVIYEIPRSQVDPTSANFLIWPPCVEVKRCTGCCNTSSVKCQPSRVHHRSVKVAKVEYVRKKPKLKEVQVRLEEHLECACATTSLNPDYREEDTDVR

SEQ ID NO: 10183 - protein, 226 aa, Homo sapiens
MFIMGLGDPIPEELYEMLSDHSIRSFDDLQRLLHGDPGEEDGAELDLNMTRSHSGGELESLARGRRSLGSLTIAEPAMIAECKTRTEVFEISRRLIDRTNANFLVWPPCVEVQRCSGCCNNRNVQCRPTQVQLRPVQVRKIEIVRKKPIFKKATVTLEDHLACKCETVAAARPVTRSPGGSQEQRAKTPQTRVTIRTVRVRRPPKGKHRKFKHTHDKTALKETLGA

SEQ ID NO: 10184 - protein, 136 aa, Homo sapiens
MLSDHSIRSFDDLQRLLHGDPGEEDGAELDLNMTRSHSGGELESLARGRRSLGSLTIAEPAMIAECKTRTEVFEISRRLIDRTNANFLVWPPCVEVQRCSGCCNNRNVQCRPTQVQLRPVQVRKIEIVRKKPIFKK

SEQ ID NO: 10185 - protein, 144 aa, Homo sapiens
MLSDHSIRSFDDLQRLLHGDPGEEDGAELDLNMTRSHSGGELESLARGRRSLGSLTIAEPAMIAECKTRTEVFEISRRLIDRTNANFLVWPPCVEVQRCSGCCNNRNVQCRPTQVQLRPVQVRKIEIVRKKPIFKKATVTLEDH

SEQ ID NO: 10186 - protein, 241 aa, Homo sapiens
MNRCWALFLSLCCYLRLVSAEGDPIPEELYEMLSDHSIRSFDDLQRLLHGDPGEEDGAELDLNMTRSHSGGELESLARGRRSLGSLTIAEPAMIAECKTRTEVFEISRRLIDRTNANFLVWPPCVEVQRCSGCCNNRNVQCRPTQVQLRPVQVRKIEIVRKKPIFKKATVTLEDHLACKCETVAAARPVTRSPGGSQEQRAKTPQTRVTIRTVRVRRPPKGKHRKFKHTHDKTALKETLGA

SEQ ID NO: 10187 - protein, 50 aa, Homo sapiens
MSLFGLLLLTSALAGQRQGTQAESNLSSKFQFSSNKEQNGRNYIQASGLA

SEQ ID NO: 10188 - protein, 282 aa, Homo sapiens
MSLFGLLLLTSALAGQRQGTQAESNLSSKFQFSSNKEQNGVQDPQHERIITVSTNGSIHSPRFPHTYPRNTVLVWRLVAVEENVWIQLTFDERFGLEDPEDDICKYDFVEVEEPSDGTILGRWCGSGTVPGKQISKGNQIRIRFVSDEYFPSEPGFCIHYNIVMPQFTEAVSPSVLPPSALPLDLLNNAITAFSTLEDLIRYLEPERWQLDLEDLYRPTWQLLGKAFVFGRKSRVVDLNLLTEEVLQLRPKTGVRGLHKSLTDVALEHHEECDCVCRGSTGG

SEQ ID NO: 10189 - protein, 345 aa, Homo sapiens
MSLFGLLLLTSALAGQRQGTQAESNLSSKFQFSSNKEQNGVQDPQHERIITVSTNGSIHSPRFPHTYPRNTVLVWRLVAVEENVWIQLTFDERFGLEDPEDDICKYDFVEVEEPSDGTILGRWCGSGTVPGKQISKGNQIRIRFVSDEYFPSEPGFCIHYNIVMPQFTEAVSPSVLPPSALPLDLLNNAITAFSTLEDLIRYLEPERWQLDLEDLYRPTWQLLGKAFVFGRKSRVVDLNLLTEEVRLYSCTPRNFSVSIREELKRTDTIFWPGCLLVKRCGGNCACCLHNCNECQCVPSKVTKKYHEVLQLRPKTGVRGLHKSLTDVALEHHEECDCVCRGSTGG

SEQ ID NO: 10190 - protein, 53 aa, Homo sapiens
  VARIANT 1: note = misc_feature - Xaa can be any naturally occurring amino acid
XTFDERFGLEDPEDDICKYDFVEVEEPSDGTILGRWCGSGFCIHYNIVMPNLP

SEQ ID NO: 10191 - protein, 206 aa, Homo sapiens
IFEAVGAQGTVVLDEESLHVDDLDLFDGDSGLRFAEDLEVSELKVGADLEREGDLGEVPPHAVHESNHLTDLYRRDETIQVKGNGYVQSPRFPNSYPRNLLLTWRLHSQENTRIQLVFDNQFGLEEAENDICRYDFVEVEDISETSTIIRGRWCGHKEVPPRIKSRTNQIKITFKSDDYFVAKPGFKIYYSLLEDFQPAAASETNW

SEQ ID NO: 10192 - protein, 364 aa, Homo sapiens
MHRLIFVYTLICANFCSCRDTSATPQSASIKALRNANLRRDDLYRRDETIQVKGNGYVQSPRFPNSYPRNLLLTWRLHSQENTRIQLVFDNQFGLEEAENDICRYDFVEVEDISETSTIIRGRWCGHKEVPPRIKSRTNQIKITFKSDDYFVAKPGFKIYYSLLEDFQPAAASETNWESVTSSISGVSYNSPSVTDPTLIADALDKKIAEFDTVEDLLKYFNPESWQEDLENMYLDTPRYRGRSYHDRKSKVDLDRLNDDAKRYSCTPRNYSVNIREELKLANVVFFPRCLLVQRCGGNCGCGTVNWRSCTCNSGKTVKKYHEVLQFEPGHIKRRGRAKTMALVDIQLDHHERCDCICSSRPPR

SEQ ID NO: 10193 - protein, 370 aa, Homo sapiens
MHRLIFVYTLICANFCSCRDTSATPQSASIKALRNANLRRDESNHLTDLYRRDETIQVKGNGYVQSPRFPNSYPRNLLLTWRLHSQENTRIQLVFDNQFGLEEAENDICRYDFVEVEDISETSTIIRGRWCGHKEVPPRIKSRTNQIKITFKSDDYFVAKPGFKIYYSLLEDFQPAAASETNWESVTSSISGVSYNSPSVTDPTLIADALDKKIAEFDTVEDLLKYFNPESWQEDLENMYLDTPRYRGRSYHDRKSKVDLDRLNDDAKRYSCTPRNYSVNIREELKLANVVFFPRCLLVQRCGGNCGCGTVNWRSCTCNSGKTVKKYHEVLQFEPGHIKRRGRAKTMALVDIQLDHHERCDCICSSRPPR

SEQ ID NO: 10194 - protein, 154 aa, Homo sapiens
MGTSHPAFLVLGCLLTGLSLILCQLSLPSILPNENEKVVQLNSSFSLRCFGESEVSWQYPMSEEESSDVEIRNEENNSGLFVTVLEVSSASAAHTGLYTCYYNHTQTEENELEGRHIYIYVPDPDVAFVPLGMTDYLVIVEDDDSAIIPCRTTD

SEQ ID NO: 10195 - protein, 158 aa, Homo sapiens
MGTSHPAFLVLGCLLTGLSLILCQLSLPSILPNENEKVVQLNSSFSLRCFGESEVSWQYPMSEEESSDVEIRNEENNSGLFVTVLEVSSASAAHTGLYTCYYNHTQTEENELEGRHIYIYVPDPDVAFVPLGMTDYLVIVEDDDSAIIPCRTTDPETP

SEQ ID NO: 10196 - protein, 159 aa, Homo sapiens
MGTSHPAFLVLGCLLTGLSLILCQLSLPSILPNENEKVVQLNSSFSLRCFGESEVSWQYPMSEEESSDVEIRNEENNSGLFVTVLEVSSASAAHTGLYTCYYNHTQTEENELEGRHIYIYVPDPDVAFVPLGMTDYLVIVEDDDSAIIPCRTTDPETPV

SEQ ID NO: 10197 - protein, 1089 aa, Homo sapiens
MGTSHPAFLVLGCLLTGLSLILCQLSLPSILPNENEKVVQLNSSFSLRCFGESEVSWQYPMSEEESSDVEIRNEENNSGLFVTVLEVSSASAAHTGLYTCYYNHTQTEENELEGRHIYIYVPDPDVAFVPLGMTDYLVIVEDDDSAIIPCRTTDPETPVTLHNSEGVVPASYDSRQGFNGTFTVGPYICEATVKGKKFQTIPFNVYALKATSELDLEMEALKTVYKSGETIVVTCAVFNNEVVDLQWTYPGEVKGKGITMLEEIKVPSIKLVYTLTVPEATVKDSGDYECAARQATREVKEMKKVTISVHEKGFIEIKPTFSQLEAVNLHEVKHFVVEVRAYPPPRISWLKNNLTLIENLTEITTDVEKIQEIRYRSKLKLIRAKEEDSGHYTIVAQNEDAVKSYTFELLTQVPSSILDLVDDHHGSTGGQTVRCTAEGTPLPDIEWMICKDIKKCNNETSWTILANNVSNIITEIHSRDRSTVEGRVTFAKVEETIAVRCLAKNLLGAENRELKLVAPTLRSELTVAAAVLVLLVIVIISLIVLVVIWKQKPRYEIRWRVIESISPDGHEYIYVDPMQLPYDSRWEFPRDGLVLGRVLGSGAFGKVVEGTAYGLSRSQPVMKVAVKMLKPTARSSEKQALMSELKIMTHLGPHLNIVNLLGACTKSGPIYIITEYCFYGDLVNYLHKNRDSFLSHHPEKPKKELDIFGLNPADESTRSYVILSFENNGDYMDMKQADTTQYVPMLERKEVSKYSDIQRSLYDRPASYKKKSMLDSEVKNLLSDDNSEGLTLLDLLSFTYQVARGMEFLASKNCVHRDLAARNVLLAQGKIVKICDFGLARDIMHDSNYVSKGSTFLPVKWMAPESIFDNLYTTLSDVWSYGILLWEIFSLGGTPYPGMMVDSTFYNKIKSGYRMAKPDHATSEVYEIMVKCWNSEPEKRPSFYHLSEIVENLLPGQYKKSYEKIHLDFLKSDHPAVARMRVDSDNAYIGVTYKNEEDKLKDWEGGLDEQRLSADSGYIIPLPDIDPVPEEEDLGKRNRHSSQTSEESAIETGSSSSTFIKREDETIEDIDMMDDIGIDSSDLVEDSFL

SEQ ID NO: 10198 - protein, 743 aa, Homo sapiens
MGTSHPAFLVLGCLLTGLSLILCQLSLPSILPNENEKVVQLNSSFSLRCFGESEVSWQYPMSEEESSDVEIRNEENNSGLFVTVLEVSSASAAHTGLYTCYYNHTQTEENELEGRHIYIYVPDPDVAFVPLGMTDYLVIVEDDDSAIIPCRTTDPETPVTLHNSEGVVPASYDSRQGFNGTFTVGPYICEATVKGKKFQTIPFNVYALKATSELDLEMEALKTVYKSGETIVVTCAVFNNEVVDLQWTYPGEVKGKGITMLEEIKVPSIKLVYTLTVPEATVKDSGDYECAARQATREVKEMKKVTISVHEKGFIEIKPTFSQLEAVNLHEVKHFVVEVRAYPPPRISWLKNNLTLIENLTEITTDVEKIQEIRYRSKLKLIRAKEEDSGHYTIVAQNEDAVKSYTFELLTQVPSSILDLVDDHHGSTGGQTVRCTAEGTPLPDIEWMICKDIKKCNNETSWTILANNVSNIITEIHSRDRSTVEGRVTFAKVEETIAVRCLAKNLLGAENRELKLVAPTLRSELTVAAAVLVLLVIVIISLIVLVVIWKQKPRYEIRWRVIESISPDGHEYIYVDPMQLPYDSRWEFPRDGLVLGRVLGSGAFGKVVEGTAYGLSRSQPVMKVAVKMLKPTARSSEKQALMSELKIMTHLGPHLNIVNLLGACTKSGPIYIITEYCFYGDLVNYLHKNRDSFLSHHPEKPKKELDIFGLNPADESTRSSGQGCLSSGTLQELSVDLQARGPC

SEQ ID NO: 10199 - protein, 218 aa, Homo sapiens
MGTSHPAFLVLGCLLTGLSLILCQLSLPSILPNENEKVVQLNSSFSLRCFGESEVSWQYPMSEEESSDVEIRNEENNSGLFVTVLEVSSASAAHTGLYTCYYNHTQTEENELEGRHIYIYVPDPDVAFVPLGMTDYLVIVEDDDSAIIPCRTTDPETPVTLHNSEGVVPASYDSRQGFNGTFTVGPYICEATVKGKKFQTIPFNVYALKGTCIISFLL

SEQ ID NO: 10200 - protein, 147 aa, Homo sapiens
MLPRLVLNSWAQMICLPQLPKFPRAMGTSHPAFLVLGCLLTGLSLILCQLSLPSILPNENEKVVQLNSSFSLRCFGESEVSWQYPMSEEESSDVEIRNEENNSGLFVTVLEVSSASAAHTGLYTCYYNHTQTEENELEGRHIYIYVP

SEQ ID NO: 10201 - protein, 174 aa, Homo sapiens
MRLPGAMPALALKGELLLLSLLLLLEPQISQGLVVTPPGPELVLNVSSTFVLTCSGSAPVVWERMSQEPPQEMAKAQDGTFSSVLTLTNLTGLDTGEYFCTHNDSRGLETDERKRLYIFVPDPTVGFLPNDAEELFIFLTEITEITIPCRVTDPQLVVTLHEKKGDVALPVPYD

SEQ ID NO: 10202 - protein, 239 aa, Homo sapiens
MRLPGAMPALALKGELLLLSLLLLLEPQISQGLVVTPPGPELVLNVSSTFVLTCSGSAPVVWERMSQEPPQEMAKAQDGTFSSVLTLTNLTGLDTGEYFCTHNDSRGLETDERKRLYIFVPDPTVGFLPNDAEELFIFLTEITEITIPCRVTDPQLVVTLHEKKGDVALPVPYDHQRGFSGIFEDRSYICKTTIGDREVDSDAYYVYRLQGEPPFWPDAQQSVIHQRLCERSADCGPPG

SEQ ID NO: 10203 - protein, 1106 aa, Homo sapiens
MRLPGAMPALALKGELLLLSLLLLLEPQISQGLVVTPPGPELVLNVSSTFVLTCSGSAPVVWERMSQEPPQEMAKAQDGTFSSVLTLTNLTGLDTGEYFCTHNDSRGLETDERKRLYIFVPDPTVGFLPNDAEELFIFLTEITEITIPCRVTDPQLVVTLHEKKGDVALPVPYDHQRGFSGIFEDRSYICKTTIGDREVDSDAYYVYRLQVSSINVSVNAVQTVVRQGENITLMCIVIGNEVVNFEWTYPRKESGRLVEPVTDFLLDMPYHIRSILHIPSAELEDSGTYTCNVTESVNDHQDEKAINITVVESGYVRLLGEVGTLQFAELHRSRTLQVVFEAYPPPTVLWFKDNRTLGDSSAGEIALSTRNVSETRYVSELTLVRVKVAEAGHYTMRAFHEDAEVQLSFQLQINVPVRVLELSESHPDSGEQTVRCRGRGMPQPNIIWSACRDLKRCPRELPPTLLGNSSEEESQLETNVTYWEEEQEFEVVSTLRLQHVDRPLSVRCTLRNAVGQDTQEVIVVPHSLPFKVVVISAILALVVLTIISLIILIMLWQKKPRYEIRWKVIESVSSDGHEYIYVDPMQLPYDSTWELPRDQLVLGRTLGSGAFGQVVEATAHGLSHSQATMKVAVKMLKSTARSSEKQALMSELKIMSHLGPHLNVVNLLGACTKGGPIYIITEYCRYGDLVDYLHRNKHTFLQHHSDKRRPPSAELYSNALPVGLPLPSHVSLTGESDGGYMDMSKDESVDYVPMLDMKGDVKYADIESSNYMAPYDNYVPSAPERTCRATLINESPVLSYMDLVGFSYQVANGMEFLASKNCVHRDLAARNVLICEGKLVKICDFGLARDIMRDSNYISKGSTFLPLKWMAPESIFNSLYTTLSDVWSFGILLWEIFTLGGTPYPELPMNEQFYNAIKRGYRMAQPAHASDEIYEIMQKCWEEKFEIRPPFSQLVLLLERLLGEGYKKKYQQVDEEFLRSDHPAILRSQARLPGFHGLRSPLDTSSVLYTAVQPNEGDNDYIIPLPDPKPEVADEGPLEGSPSLASSTLNEVNTSSTISCDSPLEPQDEPEPEPQLELQVEPEPELEQLPDSGCPAPRAEAEDSFL

SEQ ID NO: 10204 - protein, 146 aa, Homo sapiens
MSQEPPQEMAKAQDGTFSSVLTLTNLTGLDTGEYFCTHNDSRGLETDERKRLYIFVPDPTVGFLPNDAEELFIFLTEITEITIPCRVTDPQLVVTLHEKKGDVALPVPYDHQRGFSGIFEDRSYICKTTIGDREVDSDAYYVYRLQ

SEQ ID NO: 10205 - protein, 375 aa, Homo sapiens
MKVWLLLGLLLVHEALEDVTGQHLPKNKRPKEPGENRIKPTNKKVKPKIPKMKDRDSANSAPKTQSIMMQVLDKGRFQKPAATLSLLAGQTVELRCKGSRIGWSYPAYLDTFKDSRLSVKQNERYGQLTLVNSTSADTGEFSCWVQLCSGYICRKDEAKTGSTYIFFTEKGELFVPSPSYFDVVYLNPDRQAVVPCRVTVLSAKVTLHREFPAKEIPANGTDIVYDMKRGFVYLQPHSEHQGVVYCRAEAGGRSQISVKYQLLYVAVPSGPPSTTILASSNKVKSGDDISVLCTVLGEPDVEVEFTWIFPGQKDERPVTIQDTWRLIHRGLGHTTRISQSVITVEDFETIDAGYYICTAQNLQGQTTVATTVEFS

SEQ ID NO: 10206 - protein, 375 aa, Homo sapiens; identical to SEQ ID NO: 10205

SEQ ID NO: 10207 - protein, 109 aa, Homo sapiens
MELQTYRYHGHSMSDPGVSYRTREEIQEVRSKSDPIMLLKDRMVNSNLASVEELKEIDVEVRKEIEDAAQFATADPEPPLEELGYHIYSSDPPFEVRGANQWIKFKSVS

SEQ ID NO: 10208 - protein, 359 aa, Homo sapiens
MRKMLAAVSRVLSGASQKPASRVLVASRNFANDATFEIKKCDLHRLEEGPPVTTVLTREDGLKYYRMMQTVRRMELKADQLYKQKIIRGFCHLCDGQEACCVGLEAGINPTDHLITAYRAHGFTFTRGLSVREILAELTGRKGGCAKGKGGSMHMYAKNFYGGNGIVGAQGQIFEAYNMAALWKLPCIFICENNRYGMGTSVERAAASTDYYKRGDFIPGLRVDGMDILCVREATRFAAAYCRSGKGPILMELQTYRYHGHSMSDPGVSYRTREEIQEVRSKSDPIMLLKDRMVNSNLASVEELKEIDVEVRKEIEDAAQFATADPEPPLEELGYHIYSSDPPFEVRGANQWIKFKSVS

SEQ ID NO: 10209 - protein, 390 aa, Homo sapiens
MRKMLAAVSRVLSGASQKPASRVLVASRNFANDATFEIKKCDLHRLEEGPPVTTVLTREDGLKYYRMMQTVRRMELKADQLYKQKIIRGFCHLCDGQEACCVGLEAGINPTDHLITAYRAHGFTFTRGLSVREILAELTGRKGGCAKGKGGSMHMYAKNFYGGNGIVGAQVPLGAGIALACKYNGKDEVCLTLYGDGAANQGQIFEAYNMAALWKLPCIFICENNRYGMGTSVERAAASTDYYKRGDFIPGLRVDGMDILCVREATRFAAAYCRSGKGPILMELQTYRYHGHSMSDPGVSYRTREEIQEVRSKSDPIMLLKDRMVNSNLASVEELKEIDVEVRKEIEDAAQFATADPEPPLEELGYHIYSSDPPFEVRGANQWIKFKSVS

SEQ ID NO: 10210 - protein, 180 aa, Homo sapiens
MRKMLAAVSRVLSGASQKPASRVLVASRNFANDATFEIKKCDLHRLEEGPPVTTVLTREDGLKYYRMMQTVRRMELKADQLYKQKIIRGFCHLCDGQEACCVGLEAGINPTDHLITAYRAHGFTFTRGLSVREILAELTGRKGGCAKGKGGSMHMYAKNFYGGNGIVGAQVVKDEDCVLL

SEQ ID NO: 10211 - protein, 204 aa, Homo sapiens
MRKMLAAVSRVLSGASQKPASRVLVASRNFANDATFEIKKCDLHRLEEGPPVTTVLTREDGLKYYRMMQTVRRMELKADQLYKQKIIRGFCHLCDGQFLLPLTQEACCVGLEAGINPTDHLITAYRAHGFTFTRGLSVREILAELTGRKGGCAKGKGGSMHMYAKNFYGGNGIVGAQVPLGAGIALACKYNGKDEVCLTLYGDG

SEQ ID NO: 10212 - protein, 397 aa, Homo sapiens
MRKMLAAVSRVLSGASQKPASRVLVASRNFANDATFEIKKCDLHRLEEGPPVTTVLTREDGLKYYRMMQTVRRMELKADQLYKQKIIRGFCHLCDGQFLLPLTQEACCVGLEAGINPTDHLITAYRAHGFTFTRGLSVREILAELTGRKGGCAKGKGGSMHMYAKNFYGGNGIVGAQVPLGAGIALACKYNGKDEVCLTLYGDGAANQGQIFEAYNMAALWKLPCIFICENNRYGMGTSVERAAASTDYYKRGDFIPGLRVDGMDILCVREATRFAAAYCRSGKGPILMELQTYRYHGHSMSDPGVSYRTREEIQEVRSKSDPIMLLKDRMVNSNLASVEELKEIDVEVRKEIEDAAQFATADPEPPLEELGYHIYSSDPPFEVRGANQWIKFKSVS

SEQ ID NO: 10213 - protein, 121 aa, Homo sapiens
MRKMLAAVSRVLSGASQKPFAGSPPPRHLTVGRKLSSRYEVTFESAQASRVLVASRNFANDATFEIKKCDLHRLEEGPPVTTVLTREDGLKYYRMMQTVRRMELKADQLYKQKIIRGFCHL

SEQ ID NO: 10214 - protein, 205 aa, Homo sapiens
MRKMLAAVSRVLSGASQKPRHGLATLPSLVSISRLKQSSHLGLPKCWDYSHSLKTRQASRVLVASRNFANDATFEIKKCDLHRLEEGPPVTTVLTREDGLKYYRMMQTVRRMELKADQLYKQKIIRGFCHLCDGQEACCVGLEAGINPTDHLITAYRAHGFTFTRGLSVREILAELTGRKGGCAKGKGGSMHMYAKNFYGGNGIV

SEQ ID NO: 10215 - protein, 428 aa, Homo sapiens
MRKMLAAVSRVLSGASQKPRHGLATLPSLVSISRLKQSSHLGLPKCWDYSHSLKTRQASRVLVASRNFANDATFEIKKCDLHRLEEGPPVTTVLTREDGLKYYRMMQTVRRMELKADQLYKQKIIRGFCHLCDGQEACCVGLEAGINPTDHLITAYRAHGFTFTRGLSVREILAELTGRKGGCAKGKGGSMHMYAKNFYGGNGIVGAQVPLGAGIALACKYNGKDEVCLTLYGDGAANQGQIFEAYNMAALWKLPCIFICENNRYGMGTSVERAAASTDYYKRGDFIPGLRVDGMDILCVREATRFAAAYCRSGKGPILMELQTYRYHGHSMSDPGVSYRTREEIQEVRSKSDPIMLLKDRMVNSNLASVEELKEIDVEVRKEIEDAAQFATADPEPPLEELGYHIYSSDPPFEVRGANQWIKFKSVS

SEQ ID NO: 10216 - protein, 154 aa, Homo sapiens
AVLNGQVKEIPPDWDQRPVKTLVGKNFEQVAFDETKNVFVKFYAPWCTHCKEMAPAWEALAEKYQDHEDIIIAELDATANELDAFAVHGFPTLKYFPAGPGRKVIEYKSTRDLETFSKFLDNGGVLPTEEPPEEPAAPFPEPPANSTMGSKEEL

SEQ ID NO: 10217 - protein, 522 aa, Homo sapiens
MSRQLLPVLLLLLLRASCPWGQEQGARSPSEEPPEEEIPKEDGILVLSRHTLGLALREHPALLVEFYAPWCGHCQALAPEYSKAAAVLAAESMVVTLAKVDGPAQRELAEEFGVTEYPTLKFFRNGNRTHPEEYTGPRDAEGIAEWLRRRVGPSAMRLEDEAAAQALIGGRDLVVIGFFQDEDVATFLALAQDALDMTFGLTDRPRLFQQFGLTKDTVVLFKKFDEGRADFPVDEELGLDLGDLSRFLVTHSMRLVTEFNSQTSAKIFAARILNHLLLFVNQTLAAHRELLAGFGEAAPRFRGQVLFVVVDVAADNEHVLQYFGLKAEAAPTLRLVNLETTKKYAPVDGGPVTAASITAFCHAVLNGQVKPYLLSQEIPPDWDQRPVKTLVGKNFEQVAFDETKNVFVKFYAPWCTHCKEMAPAWEALAEKYQDHEDIIIAELDATANELDAFAVHGFPTLKYFPAGPGRKVIEYKSTRDLETFSKFLDNGGVLPTEEPPEEPAAPFPEPPANSTMGSKEEL

SEQ ID NO: 10218 - protein, 525 aa, Homo sapiens
MSRQLLPVLLLLLLRASCPWGQEQGARSPSEEPPEEEIPKEDGILVLSRHTLGLALREHPALLVEFYAPWCGHCQALAPEYSKAAAVLAAESMVVTLAKVDGPAQRELAEEFGVTEYPTLKFFRNGNRTHPEEYTGPRDAEGIAEWLRRRVGPSAMRLEDEAAAQALIGGRDLVVIGFFQDLQDEDVATFLALAQDALDMTFGLTDRPRLFQQFGLTKDTVVLFKKFDEGRADFPVDEELGLDLGDLSRFLVTHSMRLVTEFNSQTSAKIFAARILNHLLLFVNQTLAAHRELLAGFGEAAPRFRGQVLFVVVDVAADNEHVLQYFGLKAEAAPTLRLVNLETTKKYAPVDGGPVTAASITAFCHAVLNGQVKPYLLSQEIPPDWDQRPVKTLVGKNFEQVAFDETKNVFVKFYAPWCTHCKEMAPAWEALAEKYQDHEDIIIAELDATANELDAFAVHGFPTLKYFPAGPGRKVIEYKSTRDLETFSKFLDNGGVLPTEEPPEEPAAPFPEPPANSTMGSKEEL

SEQ ID NO: 10219 - protein, 227 aa, Homo sapiens
  VARIANT 1: note = misc_feature - Xaa can be any naturally occurring amino acid
XLLPVLLLLLLRASCPWGQEQGARSPSEEPPEEEIPKEDGILVLSRHTLGLALREHPALLVEFYAPWCGHCQALAPEYSKAAAVLAAESMVVTLAKVDGPAQRELAEEFGVTEYPTLKFFRNGNRTHPEEYTGPRDAEGIAEWLRRRVGPSAMRLEDEAAAQALIGGRDLVVIGFFQDALDMTFGLTDRPRLFQQFGLTKDTVVLFKKFDEGRADFPVDEELGLDLG

SEQ ID NO: 10220 - protein, 71 aa, Homo sapiens
MRLRRLALFPGVALLLAAARLAAASDVLELTDDNFESRISDTGSAGLMLVEFFAPCSIPAGFEEESLLQPH

SEQ ID NO: 10221 - protein, 505 aa, Homo sapiens
MRLRRLALFPGVALLLAAARLAAASDVLELTDDNFESRISDTGSAGLMLVEFFAPWCGHCKRLAPEYEAAATRLKGIVPLAKVDCTANTNTCNKYGVSGYPTLKIFRDGEEAGAYDGPRTADGIVSHLKKQAGPASVPLRTEEEFKKFISDKDASIVGFFDDSFSEAHSEFLKAASNLRDNYRFAHTNVESLVNEYDDNGEGIILFRPSHLTNKFEDKTVAYTEQKMTSGKIKKFIQENIFGICPHMTEDNKDLIQGKDLLIAYYDVDYEKNAKGSNYWRNRVMMVAKKFLDAGHKLNFAVASRKTFSHELSDFGLESTAGEIPVVAIRTAKGEKFVMQEEFSRDGKALERFLQDYFDGNLKRYLKSEPIPESNDGPVKVVVAENFDEIVNNENKDVLIEFYAPWCGHCKNLEPKYKELGEKLSKDPNIVIAKMDATANDVPSPYEVRGFPTIYFSPANKKLNPKKYEGGRELSDFISYLQREATNPPVIQEEKPKKKKKAQEDL

SEQ ID NO: 10222 - protein, 75 aa, Homo sapiens
MRLRRLALFPGVALLLAAARLAAASDVLELTDDNFESRISDTGSAGLMLVEFFAPWLQNSPSQRDPSATLWLLKR

SEQ ID NO: 10223 - protein, 123 aa, Homo sapiens
SDVLELTDDNFESRISDTGSAGLMLVEFFAPWCGHCKRLAPEYEAAATRLKGIVPLAKVDCTANTNTCNKYGVSGYPTLKIFRDGEEAGAYDGPRTAGVSSYFVLHISLTSLRTRLWHIQSKK

SEQ ID NO: 10224 - protein, 163 aa, Homo sapiens
MRPRKAFLLLLLLGLVQLLAVAGAEGPDEDFRQVQANSRRTRPGSGKGEGEPLERRGEGVKKQVRVLWNSKHSFSKCDSSNRENAIEDEEEEEEEDDDEEEDDLEVKEENGVLVLNDANFDNFVADKDTVLLEFYAPWCGHCKQFAPEYEKIANILKDKDPPI

SEQ ID NO: 10225 - protein, 645 aa, Homo sapiens
MRPRKAFLLLLLLGLVQLLAVAGAEGPDEDSSNRENAIEDEEEEEEEDDDEEEDDLEVKEENGVLVLNDANFDNFVADKDTVLLEFYAPWCGHCKQFAPEYEKIANILKDKDPPIPVAKIDATSASVLASRFDVSGYPTIKILKKGQAVDYEGSRTQEEIVAKVREVSQPDWTPPPEVTLVLTKENFDEVVNDADIILVEFYAPWCGHCKKLAPEYEKAAKELSKRSPPIPLAKVDATAETDLAKRFDVSGYPTLKIFRKGRPYDYNGPREKYGIVDYMIEQSGPPSKEILTLKQVQEFLKDGDDVIIIGVFKGESDPAYQQYQDAANNLREDYKFHHTFSTEIAKFLKVSQGQLVVMQPEKFQSKYEPRSHMMDVQGSTQDSAIKDFVLKYALPLVGHRKVSNDAKRYTRRPLVVVYYSVDFSFDYRAATQFWRSKVLEVAKDFPEYTFAIADEEDYAGEVKDLGLSESGEDVNAAILDESGKKFAMEPEEFDSDTLREFVTAFKKGKLKPVIKSQPVPKNNKGPVKVVVGKTFDSIVMDPKKDVLIEFYAPWCGHCKQLEPVYNSLAKKYKGQKGLVIAKMDATANDVPSDRYKVEGFPTIYFAPSGDKKNPVKFEGGDRDLEHLSKFIEEHATKLSRTKEEL

SEQ ID NO: 10226 - protein, 519 aa, Homo sapiens
MARAGPAWLLLAIWVVLPSWLSSAKVSSLIERISDPKDLKKLLRTRNNVLVLYSKSEVAAENHLRLLSTVAQAVKGQGTICWVDCGDAESRKLCKKMKVDLSPKDKKVELFHYQDGAFHTEYNRAVTFKSIVAFLKDPKGPPLWEEDPGAKDVVHLDSEKDFRRLLKKEEKPLLIMFYAPWCSMCKRMMPHFQKAATQLRGHAVLAGMNVYSSEFENIKEEYSVRGFPTICYFEKGRFLFQYDNYGSTAEDIVEWLKNPQPPQPQVPETPWADEGGSVYHLTDEDFDQFVKEHSSVLVMFHAPWCGHCKKMKPEFEKAAEALHGEADSSGVLAAVDATVNKALAERFHISEFPTLKYFKNGEKYAVPVLRTKKKFLEWMQNPEAPPPPEPTWEEQQTSVLHLVGDNFRETLKKKKHTLVMFYAPWCPHCKKVIPHFTATADAFKDDRKIACAAVDCVKDKNQDLCQQEAVKGYPTFHYYHYGKFAEKYDSDRTELGFTNYIRALREGDHERLGKKKEEL

SEQ ID NO: 10227 - protein, 262 aa, Homo sapiens
MARAGPAWLLLAIWVVLPSWLSSAKVSSLIERISDPKDLKKLLRTRNNVLVLYSKSEVAAENHLRLLSTVAQAVKGQGTICWVDCGDAESRKLCKKMKVDLSPKDKKVELFHYQDGAFHTEYNRAVTFKSIVAFLKDPKGPPLWEEDPGAKDVVHLDSEKDFRRLLKKEEKPLLIMFYAPWCSMCKRMMPHFQKAATQLRGHAVLAGMNVYSSEFENIKEEYSVRGFPTICYFEKGRFLFQYDNYGSTAEDIVEWLKKVWPL

SEQ ID NO: 10228 - protein, 64 aa, Homo sapiens
MKVDLSPKDKKVELFHYQDGAFHTEYNRAVTFKSIVAFLKDPKGPPLWEEDPGAKDVVHLDSEK

SEQ ID NO: 10229 - protein, 83 aa, Homo sapiens
  VARIANT 1: note = misc_feature - Xaa can be any naturally occurring amino acid
XTLVMFYAPWCPHCKKVIPHFTATADAFKDDRKIACAAVDCVKDKNQDLCQQEAVKGYPTFHYYHYGKFAEKYDSDRTVFSVG

SEQ ID NO: 10230 - protein, 440 aa, Homo sapiens
MALLVLGLVSCTFFLAVNGLYSSSDDVIELTPSNFNREVIQSDSLWLVEFYAPWCGHCQRLTPEWKKAATALKDVVKVGAVDADKHHSLGGQYGVQGFPTIKIFGSNKNRPEDYQGGRTGEAIVDAALSALRQLVKDRLGGRSGGYSSGKQGRSDSSSKKDVIELTDDSFDKNVLDSEDVWMVEFYAPWCGHCKNLEPEWAAAASEVKEQTKGKVKLAAVDATVNQVLASRYGIRGFPTIKIFQKGESPVDYDGGRTRSDIVSRALDLFSDNAPPPELLEIINEDIAKRTCEEHQLCVVAVLPHILDTGAAGRNSYLEVLLKLADKYKKKMWGWLWTEAGAQSELETALGIGGFGYPAMAAINARKMKFALLKGSFSEQGINEFLRELSFGRGSTAPVGGGAFPTIVEREPWDGRDGELPVEDDIDLSDVELDDLGKDEL

SEQ ID NO: 10231 - protein, 437 aa, Homo sapiens
MILGLVSCTFFLAVNGLYSSSDDVIELTPSNFNREVIQSDSLWLVEFYAPWCGHCQRLTPEWKKAATALKDVVKVGAVDADKHHSLGGQYGVQGFPTIKIFGSNKNRPEDYQGGRTGEAIVDAALSALRQLVKDRLGGRSGGYSSGKQGRSDSSSKKDVIELTDDSFDKNVLDSEDVWMVEFYAPWCGHCKNLEPEWAAAASEVKEQTKGKVKLAAVDATVNQVLASRYGIRGFPTIKIFQKGESPVDYDGGRTRSDIVSRALDLFSDNAPPPELLEIINEDIAKRTCEEHQLCVVAVLPHILDTGAAGRNSYLEVLLKLADKYKKKMWGWLWTEAGAQSELETALGIGGFGYPAMAAINARKMKFALLKGSFSEQGINEFLRELSFGRGSTAPVGGGAFPTIVEREPWDGRDGELPVEDDIDLSDVELDDLGKDEL

SEQ ID NO: 10232 - protein, 488 aa, Homo sapiens
MRIITAPASKVSRGSNELMILARRSDRGSPTSPAHSLSRKSPIMYPSTTMANAPGLVSCTFFLAVNGLYSSSDDVIELTPSNFNREVIQSDSLWLVEFYAPWCGHCQRLTPEWKKAATALKDVVKVGAVDADKHHSLGGQYGVQGFPTIKIFGSNKNRPEDYQGGRTGEAIVDAALSALRQLVKDRLGGRSGGYSSGKQGRSDSSSKKDVIELTDDSFDKNVLDSEDVWMVEFYAPWCGHCKNLEPEWAAAASEVKEQTKGKVKLAAVDATVNQVLASRYGIRGFPTIKIFQKGESPVDYDGGRTRSDIVSRALDLFSDNAPPPELLEIINEDIAKRTCEEHQLCVVAVLPHILDTGAAGRNSYLEVLLKLADKYKKKMWGWLWTEAGAQSELETALGIGGFGYPAMAAINARKMKFALLKGSFSEQGINEFLRELSFGRGSTAPVGGGAFPTIVEREPWDGRDGELPVEDDIDLSDVELDDLGKDEL

SEQ ID NO: 10233 - protein, 492 aa, Homo sapiens
MRRDLREKLVWVCRPLAPVEVPANISSDFQPCSPTSPAHSLSRKSPIMYPSTTMANAPGLVSCTFFLAVNGLYSSSDDVIELTPSNFNREVIQSDSLWLVEFYAPWCGHCQRLTPEWKKAATALKDVVKVGAVDADKHHSLGGQYGVQGFPTIKIFGSNKNRPEDYQGGRTGEAIVDAALSALRQLVKDRLGGRSGGYSSGKQGRSDSSSKKDVIELTDDSFDKNVLDSEDVWMVEFYAPWCGHCKNLEPEWAAAASEVKEQTKGKVKLAAVDATVNQVLASRYGIRGFPTIKIFQKGESPVDYDGGRTRSDIVSRALDLFSDNAPPPELLEIINEDIAKRTCEEHQLCVVAVLPHILDTGAAGRNSYLEVLLKLADKYKKKMWGWLWTEAGAQSELETALGIGGFGYPAMAAINARKMKFALLKGSFSEQGINEFLRELSFGRGSTAPVGGGAFPTIVEREPWDGRDGELPVEDDIDLSDVELDDLGKDEL

SEQ ID NO: 10234 - protein, 492 aa, Homo sapiens; identical to SEQ ID NO: 10233

SEQ ID NO: 10235 - protein, 11 aa, Homo sapiens
MYPSTTMANAP

SEQ ID NO: 10236 - protein, 445 aa, Homo sapiens
MYPSTTMANAPGLVSCTFFLAVNGLYSSSDDVIELTPSNFNREVIQSDSLWLVEFYAPWCGHCQRLTPEWKKAATALKDVVKVGAVDADKHHSLGGQYGVQGFPTIKIFGSNKNRPEDYQGGRTGEAIVDAALSALRQLVKDRLGGRSGGYSSGKQGRSDSSSKKDVIELTDDSFDKNVLDSEDVWMVEFYAPWCGHCKNLEPEWAAAASEVKEQTKGKVKLAAVDATVNQVLASRYGIRGFPTIKIFQKGESPVDYDGGRTRSDIVSRALDLFSDNAPPPELLEIINEDIAKRTCEEHQLCVVAVLPHILDTGAAGRNSYLEVLLKLADKYKKKMWGWLWTEAGAQSELETALGIGGFGYPAMAAINARKMKFALLKGSFSEQGINEFLRELSFGRGSTAPVGGGAFPTIVEREPWDGRDGELPVEDDIDLSDVELDDLGKDEL

SEQ ID NO: 10237 - protein, 177 aa, Homo sapiens
MDLLWMPLLLVAACVSAVHSSPEVNAGVSSIHITKPVHILEERSLLVLTPAGLTQMLNQTRFLMVLFHEVLLLLPRLKYNGAILAHRNLHLPGSSDSPASASQVAGITDNPSSKQSRNLAEELGKAVEIMGKGKNGIGFGKVDITIEKELQQEFGITKAPELKLFFEGNRSEPISCK

SEQ ID NO: 10238 - protein, 584 aa, Homo sapiens
MDLLWMPLLLVAACVSAVHSSPEVNAGVSSIHITKPVHILEERSLLVLTPAGLTQMLNQTRFLMVLFHNPSSKQSRNLAEELGKAVEIMGKGKNGIGFGKVDITIEKELQQEFGITKAPELKLFFEGNRSEPISCKGVVESAALVVWLRRQISQKAFLFNSSEQVAEFVISRPLVIVGFFQDLEEEVAELFYDVIKDFPELTFGVITIGNVIGRFHVTLDSVLVFKKGKIVNRQKLINDSTNKQELNRVIKQHLTDFVIEYNTENKDLISELHIMSHMLLFVSKSSESYGIIIQHYKLASKEFQNKILFILVDADEPRNGRVFKYFRVTEVDIPSVQILNLSSDARYKMPSDDITYESLKKFGRSFLSKNATKHQSSEEIPKYWDQGLVKQLVGKNFNVVVFDKEKDVFVMFYAPWSKKCKMLFPLLEELGRKYQNHSTIIIAKIDVTANDIQLMYLDRYPFFRLFPSGSQQAVLYKGEHTLKGFSDFLESHIKTKIEDEDELLSVEQNEVIEEEVLAEEKEVPMMRKGLPEQQSPELENMTKYVSKLEEPAGKKKTSEEVVVVVAKPKGPPVQKKKPKVKEEL

SEQ ID NO: 10239 - protein, 254 aa, Homo sapiens [sequence omitted]

SEQ ID NO: 10240 - protein, 254 aa, Homo sapiens [sequence omitted]

SEQ ID NO: 10241 - protein, 254 aa, Homo sapiens [sequence omitted]

SEQ ID NO: 10242 - protein, 1154 aa, Homo sapiens
MGLLLMILASAVLGSFLTLLAQFFLLYRRQPEPPADEAARAGEGFRYIKPVPGLLLREYLYGGGRDEEPSGAAPEGGATPTAAPETPAPPTRETCYFLNATILFLFRELRDTALTRRWVTKKIKVEFEELLQTKTAGRLLEGLSLRDVFLGETVPFIKTIRLVRPVVPSATGEPDGPEGEALPAACPEELAFEAEVEYNGGFHLAIDVDLVFGKSAYLFVKLSRVVGRLRLVFTRVPFTHWFFSFVEDPLIDFEVRSQFEGRPMPQLTSIIVNQLKKIIKRKHTLPNYKIRFKPFFPYQTLQGFEEDEEHIHIQQWALTEGRLKVTLLECSRLLIFGSYDREANVHCTLELSSSVWEEKQRSSIKTVELIKGNLQSVGLTLRLVQSTDGYAGHVIIETVAPNSPAAIADLQRGDRLIAIGGVKITSTLQVLKLIKQAGDRVLVYYERPVGQSNQGAVLQDNFGQLEENFLSSSCQSGYEEEAAGLTVDTESRELDSEFEDLASDVRAQNEFKDEAQSLSHSPKRVPTTLSIKPLGAISPVLNRKLAVGSHPLPPKIQSKDGNKPPPLKTSEITDPAQVSKPTQGSAFKPPVPPRPQAKVPLPSADAPNQAEPDVLVEKPEKVVPPPLVDKSAEKQAKNVDAIDDAAAPKQFLAKQEVAKDVTSETSCPTKDSSDDRQTWESSEILYRNKLGKWTRTRASCLFDIEACHRYLNIALWCRDPFKLGGLICLGHVSLKLEDVALGCLATSNTEYLSKLRLEAPSPKAIVTRTALRNLSMQKGFNDKFCYGDITIHFKYLKEGESDHHVVTNVEKEKEPHLVEEVSVLPKEEQFVGQMGLTENKHSFQDTQFQNPTWCDYCKKKVWTKAASQCMFCAYVCHKKCQEKCLAETSVCGATDRRIDRTLKNLRLEGQETLLGLPPRVDAEASKSVNKTTGLTRHIINTSSRLLNLRQVSKTRLSEPGTDLVEPSPKHTPNTSDNEGSDTEVCGPNSPSKRGNSTGIKLVRKEGGLDDSVFIAVKEIGRDLYRGLPTEERIQKLEFMLDKLQNEIDQELEHNNSLVREEKETTDTRKKSLLSAALAKSGERLQALTLLMIHYRAGIEDIETLESLSLDQHSKKISKYTDDTEEDLDNEISQLIDSQPFSSISDDLFGPSESV

SEQ ID NO: 10243 - protein, 778 aa, Homo sapiens
MGCNLCTFQKREEHYKLLYEVSQVNGKDLSKATHEEAVEAFRNAKEPIVVQVLRRTPLSRPAYGMASEVQLMNASTQTDITFEHIMALAKLRPPTPPVPDICPFLLSDSCHSLHPMEHEFYEDNEYISSLPADADRTEDFEYEEVELCRVSSQEKLGLTVCYRTDDEEDTGIYVSEVDPNSIAAKDGRIREGDRILQINGEDVQNREEAVALLSNDECKRIVLLVARPEIQLDEGWLEDERNEFLEELNLEMLEEEHNEAMQPTANEVEQPKKQEEEEGTTDTATSSSNNHEKDSGVGRTDESLRNDESSEQENAAEDPNSTSLKSKRDLGQSQDTLGSVELQYNESLVSGEYIDSDCIGNPDEDCERFRQLLELKCKIRNHGEYDLYYSSSTIECNQGEQEGVEHELQLLNEELRNIELECQNIMQAHRLQKVTDQYGDIWTLHDGGFRNYNTSIDMQRGKLDDIMEHPEKSDKDSSSAYNTAESCRSTPLTVDRSPDSSLPRVINLTNKKNLRSTMAATQSSSGQSSKESTSTKAKTTEQGCSAESKEKVLEGSKLPDQEKAVSEHIPYLSPYHSSSYRYANIPAHARHYQSYMQLIQQKSAVEYAQSQLSLVSMCKESQKCSEPKMEWKVKIRSDGTRYITKRPVRDRILKERALKIKEERSGMTTDDDTMSEMKMGRYWSKEERKQHLVRAKEQRRRREFMMRSRLECLKESPQSGSEGKKEINIIELSHKKMMKKRNKKILDNWMTIQELMTHGAKSPDGTRVHNAFLSVTTV

SEQ ID NO: 10244 - protein, 1036 aa, Homo sapiens
MGFALERFAEAVDPALECKLCGQVLEEPLCTPCGHVFCASCLLPWAVRRRRCPLQCQPLAPGELYRVLPLRSLIQKLRVQCDYRARGCGHSVRLHELEAHVEHCDFGPARRLRSRGGCASGLGGGEVPARGGCGPTPRAGRGGGARGGPPGGRWGRGRGPGPRVLAWRRREKALLAQLWALQGEVQLTARRYQEKFTQYMAHVRNFVGDLGGGHRRDGEHKPFTIVLERENDTLGFNIIGGRPNQNNQEGTSTEGIYVSKILENGPADRADGLEIHDKIMEVNGKDLSKATHEEAVEAFRNAKEPIVVQVLRRTPLSRPAYGMASEVQLMNASTQTDITFEHIMALAKLRPPTPPVPDICPFLLSDSCHSLHPMEHEFYEDNEYISSLPADADRTEDFEYEEVELCRVSSQEKLGLTVCYRTDDEEDTGIYVSEVDPNSIAAKDGRIREGDRILQINGEDVQNREEAVALLSNDECKRIVLLVARPEIQLDEGWLEDERNEFLEELNLEMLEEEHNEAMQPTANEVEQPKKQEEEEGTTDTATSSSNNHEKDSGVGRTDESLRNDESSEQENAAEDPNSTSLKSKRDLGQSQDTLGSVELQYNESLVSGEYIDSDCIGNPDEDCERFRQLLELKCKIRNHGEYDLYYSSSTIECNQGEQEGVEHELQLLNEELRNIELECQNIMQAHRLQKVTDQYGDIWTLHDGGFRNYNTSIDMQRGKLDDIMEHPEKSDKDSSSAYNTAESCRSTPLTVDRSPDSSLPRVINLTNKKNLRSTMAATQSSSGQSSKESTSTKAKTTEQGCSAESKEKVLEGSKLPDQEKAVSEHIPYLSPYHSSSYRYANIPAHARHYQSYMQLIQQKSAVEYAQSQLSLVSMCKESQKCSEPKMEWKVKIRSDGTRYITKRPVRDRILKERALKIKEERSGMTTDDDTMSEMKMGRYWSKEERKQHLVRAKEQRRRREFMMRSRLECLKESPQSGSEGKKEINIIELSHKKMMKKRNKKILDNWMTIQELMTHGAKSPDGTRVHNAFLSVTTV

SEQ ID NO: 10245 - protein, 776 aa, Homo sapiens
MSGKRQFFLKPLALLTCWPSTVNGKDLSKATHEEAVEAFRNAKEPIVVQVLRRTPLSRPAYGMASEVQLMNASTQTDITFEHIMALAKLRPPTPPVPDICPFLLSDSCHSLHPMEHEFYEDNEYISSLPADADRTEDFEYEEVELCRVSSQEKLGLTVCYRTDDEEDTGIYVSEVDPNSIAAKDGRIREGDRILQINGEDVQNREEAVALLSNDECKRIVLLVARPEIQLDEGWLEDERNEFLEELNLEMLEEEHNEAMQPTANEVEQPKKQEEEEGTTDTATSSSNNHEKDSGVGRTDESLRNDESSEQENAAEDPNSTSLKSKRDLGQSQDTLGSVELQYNESLVSGEYIDSDCIGNPDEDCERFRQLLELKCKIRNHGEYDLYYSSSTIECNQGEQEGVEHELQLLNEELRNIELECQNIMQAHRLQKVTDQYGDIWTLHDGGFRNYNTSIDMQRGKLDDIMEHPEKSDKDSSSAYNTAESCRSTPLTVDRSPDSSLPRVINLTNKKNLRSTMAATQSSSGQSSKESTSTKAKTTEQGCSAESKEKVLEGSKLPDQEKAVSEHIPYLSPYHSSSYRYANIPAHARHYQSYMQLIQQKSAVEYAQSQLSLVSMCKESQKCSEPKMEWKVKIRSDGTRYITKRPVRDRILKERALKIKEERSGMTTDDDTMSEMKMGRYWSKEERKQHLVRAKEQRRRREFMMRSRLECLKESPQSGSEGKKEINIIELSHKKMMKKRNKKILDNWMTIQELMTHGAKSPDGTRVHNAFLSVTTV

SEQ ID NO: 10246 - protein, 77 aa, Homo sapiens
MSPPLCPLLLLAVGLRLAGTLNPSDPNTCSFWESFTTTTKESHSRPFSLLPSEPCERPWEGPHTCPQPTNSEETPGF

SEQ ID NO: 10247 - protein, 173 aa, Homo sapiens
MSPPLCPLLLLAVGLRLAGTLNPSDPNTCSFWESFTTTTKESHSRPFSLLPSEPCERPWEGPHTCPQPTVVYRTVYRQVVKTDHRQRLQCCHGFYESRGFCVPLCAQECVHGRCVAPNQCQCVPGWRGDDCSSECAPGMWGPQCDKPCSCGNNSSCDPKSGVCSCPSGLQPPN

SEQ ID NO: 10248 - protein, 1037 aa, Homo sapiens
MSPPLCPLLLLAVGLRLAGTLNPSDPNTCSFWESFTTTTKESHSRPFSLLPSEPCERPWEGPHTCPQPTVVYRTVYRQVVKTDHRQRLQCCHGFYESRGFCVPLCAQECVHGRCVAPNQCQCVPGWRGDDCSSECAPGMWGPQCDKPCSCGNNSSCDPKSGVCSCPSGLQPPNCLQPCTPGYYGPACQFRCQCHGAPCDPQTGACFCPAERTGPSCDVSCSQGTSGFFCPSTHSCQNGGVFQTPQGSCSCPPGWMGTICSLPCPEGFHGPNCSQECRCHNGGLCDRFTGQCRCAPGYTGDRCREECPVGRFGQDCAETCDCAPDARCFPANGACLCEHGFTGDRCTDRLCPDGFYGLSCQAPCTCDREHSLSCHPMNGECSCLPGWAGLHCNESCPQDTHGPGCQEHCLCLHGGVCQATSGLCQCAPGYTGPHCASLCPPDTYGVNCSARCSCENAIACSPIDGECVCKEGWQRGNCSVPCPPGTWGFSCNASCQCAHEAVCSPQTGACTCTPGWHGAHCQLPCPKGQFGEGCASRCDCDHSDGCDPVHGRCQCQAGWMGARCHLSCPEGLWGVNCSNTCTCKNGGTCLPENGNCVCAPGFRGPSCQRSCQPGRYGKRCVPCKCANHSFCHPSNGTCYCLAGWTGPDCSQPCPPGHWGENCAQTCQCHHGGTCHPQDGSCICPLGWTGHHCLEGCPLGTFGANCSQPCQCGPGEKCHPETGACVCPPGHSGAPCRIGIQEPFTVMPTTPVAYNSLGAVIGIAVLGSLVVALVALFIGYRHWQKGKEHHHLAVAYSSGRLDGSEYVMPDVPPSYSHYYSNPSYHTLSQCSPNPPPPNKVPGPLFASLQNPERPGGAQGHDNHTTLPADWKHRREPPPGPLDRGSSRLDRSYSYSYSNGPGPFYNKGLISEEELGASVASLSSENPYATIRDLPSLPGGPRESSYMEMKGPPSGSPPRQPPQFWDSQRRRQPQPQRDSGTYEQPSPLIHDRDSVGSQPPLPPGLPPGHYDSPKNSHIPGHYDLPPVRHPPSPPLRRQDR

SEQ ID NO: 10249 - protein, 1037 aa, Homo sapiens; identical to SEQ ID NO: 10248

SEQ ID NO: 10250 - protein, 227 aa, Homo sapiens
MGWTMRLVTAALLLGLMMVVTGDEDENSPCAHEALLDEDTLFCQGLEVFYPELGNIGCKVVPDCNNYRQKITSWMEPIVKFPGAVDGATYILVMVDPDAPSRAEPRQRFWRHWLVTDIKGADLKKGKIQGQELSAYQAPSPPAHSGFHRYQFFVYLQEGKVISLLPKENKTRGSWKMDRFLNRFHLGEPEASTQFMTQNYQDSPTLQAPRERASEPKHKNQAEIAAC

SEQ ID NO: 10251 - protein, 93 aa, Homo sapiens
MSRRRAEPGCGGSGRRAGAPGEGRGRRRYAPGPAAKALPRRRLALQSQVPMGWTMRLVTAALLLGLMMVVTGDEDENSPCAHEALLDEDTLFC

SEQ ID NO: 10252 - protein, 135 aa, Homo sapiens
MQPRWAQGATMWLGVLLTLLLCSSLEGQENSFTINSVDMKSLPDWTVQNGKNLTLQCFADVSTTSHVKPQHQMLFYKDDVLFYNISSMKSTESYFIPEVRIYDSGTYKCTVIVNNKEKTTAEYQVLVEGVPSPRV

SEQ ID NO: 10253 - protein, 230 aa, Homo sapiens
MQPRWAQGATMWLGVLLTLLLCSSLEGQENSFTINSVDMKSLPDWTVQNGKNLTLQCFADVSTTSHVKPQHQMLFYKDDVLFYNISSMKSTESYFIPEVRIYDSGTYKCTVIVNNKEKTTAEYQVLVEGVPSPRVTLDKKEAIQGGIVRVNCSVPEEKAPIHFTIEKLELNEKMVKLKREKNSRDQNFVILEFPVEEQDRVLSFRCQARIISGIHMQTSESTKSELVTVT

SEQ ID NO: 10254 - protein, 738 aa, Homo sapiens
MQPRWAQGATMWLGVLLTLLLCSSLEGQENSFTINSVDMKSLPDWTVQNGKNLTLQCFADVSTTSHVKPQHQMLFYKDDVLFYNISSMKSTESYFIPEVRIYDSGTYKCTVIVNNKEKTTAEYQVLVEGVPSPRVTLDKKEAIQGGIVRVNCSVPEEKAPIHFTIEKLELNEKMVKLKREKNSRDQNFVILEFPVEEQDRVLSFRCQARIISGIHMQTSESTKSELVTVTESFSTPKFHISPTGMIMEGAQLHIKCTIQVTHLAQEFPEIIIQKDKAIVAHNRHGNKAVYSVMAMVEHSGNYTCKVESSRISKVSSIVVNITELFSKPELESSFTHLDQGERLNLSCSIPGAPPANFTIQKEDTIVSQTQDFTKIASKSDSGTYICTAGIDKVVKKSNTVQIVVCEMLSQPRISYDAQFEVIKGQTIEVRCESISGTLPISYQLLKTSKVLENSTKNSNDPAVFKDNPTEDVEYQCVADNCHSHAKMLSEVLRVKVIAPVDEVQISILSSKVVESGEDIVLQCAVNEGSGPITYKFYREKEGKPFYQMTSNATQAFWTKQKASKEQEGEYYCTAFNRANHASSVPRSKILTVRVILAPWKKGLIAVVIIGVIIALLIIAAKCYFLRKAKAKQMPVEMSRPAVPLLNSNNEKMSDPNMEANSHYGHNDDVRNHAMKPINDNKEPLNSDVQYTEVQVSSAESHKDLGKKDTETVYSEVRKAVPDAVESRYSRTEGSLDGT

SEQ ID NO: 10255 - protein, 184 aa, Homo sapiens [sequence omitted]

SEQ ID NO: 10256 - protein, 88 aa, Homo sapiens
FLTLCTWLLLLGPGLLATVRAECSQDCATCSYRLVRPADINFLKHPRIDQFIHSTNEYLMEEAPDGGKSQCNASKWRHGVLMEKQQDL

SEQ ID NO: 10257 - protein, 105 aa, Homo sapiens
MARFLTLCTWLLLLGPGLLATVRAECSQDCATCSYRLVRPADINFLACVMECEGKLPSLKIWETCKELLQLSKPELPQDGTSTLRENSKPEESHLLAKRYGGFMK

SEQ ID NO: 10258 - protein, 267 aa, Homo sapiens
MARFLTLCTWLLLLGPGLLATVRAECSQDCATCSYRLVRPADINFLACVMECEGKLPSLKIWETCKELLQLSKPELPQDGTSTLRENSKPEESHLLAKRYGGFMKRYGGFMKKMDELYPMEPEEEANGSEILAKRYGGFMKKDAEEDDSLANSSDLLKELLETGDNRERSHHQDGSDNEEEVSKRYGGFMRGLKRSPQLEDEAKELQKRYGGFMRRVGRPEWWMDYQKRYGGFLKRFAEALPSDEEGESYSKEVPEMEKRYGGFMRF

SEQ ID NO: 10259 - protein, 267 aa, Homo sapiens; identical to SEQ ID NO: 10258

SEQ ID NO: 10260 - protein, 79 aa, Homo sapiens
MARFLTLCTWLLLLGPGLLATVRAECSQDCATCSYRLVRPADINFLDCGGGEEEGCSFQNFPYCFLCSCCYHLLLLSLL

SEQ ID NO: 10261 - protein, 92 aa, Homo sapiens
MARFLTLCTWLLLLGPGLLATVRAECSQDCATCSYRLVRPADINFLVSVARGECCAPCETEFPQQYADCLRPTARRVWRFAPGRSRSGASPW

SEQ ID NO: 10262 - protein, 81 aa, Homo sapiens
MSRSSKVVLGLSVLLTAATVAGVHVKQQWDQQRLRDGVIRDIERQIRKKENIRLLGEQIILTEQLEAEREKMLLAKGSQKS

SEQ ID NO: 10263 - protein, 101 aa, Homo sapiens
MSSAAGFCASRPGLLFLGLLLLPLVVAFASAEAEEDGDLQCLCVKTTSQVRPRHITSLEVIKAGPHCPTAQLIATLKNGRKICLDLQAPLYKKIIKKLLES

SEQ ID NO: 10264 - protein, 104 aa, Homo sapiens
MSSAARSRLTRATRQEMLFLALLLLPVVVAFARAEAEEDGDLQCLCVKTTSQVRPRHITSLEVIKAGPHCPTAQLIATLKNGRKICLDLQALLYKKIIKEHLES

SEQ ID NO: 10265 - protein, 776 aa, Homo sapiens
MCGYERCRPCRGAHGYLRGGQGVLHLRGLPGHGGRRLKHRRGRLGECLQHPASGAVRGDWREKPGCWSHRFPCPGRHALVGGTIIGSARCQAFRTREGRLKAACNLLQRGITNLCVIGGDGSLTGANLFRKEWSGLLEELARNGQIDKEAVQKYAYLNVVGMVGSIDNDFCGTDMTIGTDSALHRIIEVVDAIMTTAQSHQRTFVLEVMGRHCGYLALVSALACGADWVFLPESPPEEGWEEQMCVKLSENRARKKRLNIIIVAEGAIDTQNKPITSEKIKELVVTQLGYDTRVTILGHVQRGGTPSAFDRILASRMGVEAVIALLEATPDTPACVVSLNGNHAVRLPLMECVQMTQDVQKAMDERRFQDAVRLRGRSFAGNLNTYKRLAIKLPDDQIPKTNCNVAVINVGAPAAGMNAAVRSAVRVGIADGHRMLAIYDGFDGFAKGQIKEIGWTDVGGWTGQGGSILGTKRVLPGKYLEEIATQMRTHSINALLIIGGFEAYLGLLELSAAREKHEEFCVPMVMVPATVSNNVPGSDFSIGADTALNTITDTCDRIKQSASGTKRRVFIIETMGGYCGYLANMGGLAAGADAAYIFEEPFDIRDLQSNVEHLTEKMKTTIQRGLVLRNESCSENYTTDFIYQLYSEEGKGVFDCRKNVLGHMQQGGAPSPFDRNFGTKISARAMEWITAKLKEARGRGKKFTTDDSICVLGISKRNVIFQPVAELKKQTDFEHRIPKEQWWLKLRPLMKILAKYKASYDVSDSGQLEHVQPWSV

SEQ ID NO: 10266 - protein, 784 aa, Homo sapiens
MDADDSRAPKGSLRKFLEHLSGAGKAIGVLTSGGDAQGMNAAVRAVVRMGIYVGAKVYFIYEGYQGMVDGGSNIAEADWESVSSILQVGGTIIGSARCQAFRTREGRLKAACNLLQRGITNLCVIGGDGSLTGANLFRKEWSGLLEELARNGQIDKEAVQKYAYLNVVGMVGSIDNDFCGTDMTIGTDSALHRIIEVVDAIMTTAQSHQRTFVLEVMGRHCGYLALVSALACGADWVFLPESPPEEGWEEQMCVKLSENRARKKRLNIIIVAEGAIDTQNKPITSEKIKELVVTQLGYDTRVTILGHVQRGGTPSAFDRILASRMGVEAVIALLEATPDTPACVVSLNGNHAVRLPLMECVQMTQDVQKAMDERRFQDAVRLRGRSFAGNLNTYKRLAIKLPDDQIPKTNCNVAVINVGAPAAGMNAAVRSAVRVGIADGHRMLAIYDGFDGFAKGQIKEIGWTDVGGWTGQGGSILGTKRVLPGKYLEEIATQMRTHSINALLIIGGFEAYLGLLELSAAREKHEEFCVPMVMVPATVSNNVPGSDFSIGADTALNTITDTCDRIKQSASGTKRRVFIIETMGGYCGYLANMGGLAAGADAAYIFEEPFDIRDLQSNVEHLTEKMKTTIQRGLVLRNESCSENYTTDFIYQLYSEEGKGVFDCRKNVLGHMQQGGAPSPFDRNFGTKISARAMEWITAKLKEARGRGKKFTTDDSICVLGISKRNVIFQPVAELKKQTDFEHRIPKEQWWLKLRPLMKILAKYKASYDVSDSGQLEHVQPWSV

SEQ ID NO: 10267 - protein, 202 aa, Homo sapiens
MGGYCGYLANMGGLAAGADAAYIFEEPFDIRDLQSNVEHLTEKMKTTIQRGLVLRNESCSENYTTDFIYQLYSEEGKGVFDCRKNVLGHMQQGGAPSPFDRNFGTKISARAMEWITAKLKEARGRGKKFTTDDSICVLGISKRNVIFQPVAELKKQTDFEHRIPKEQWWLKLRPLMKILAKYKASYDVSDSGQLEHVQPWSV

SEQ ID NO: 10268 - protein, 118 aa, Homo sapiens
MGRHCGYLALVSALACGADWVFLPESPPEEGWEEQMCVKLSENRARKKRLNIIIVAEGAIDTQNKPITSEKIKELVVTQLGYDTRVTILGHVQRGGTPSAFDRILASRMGVEAVIALL

SEQ ID NO: 10269 - protein, 240 aa, Homo sapiens
MGRHCGYLALVSALACGADWVFLPESPPEEGWEEQMCVKLSENRARKKRLNIIIVAEGAIDTQNKPITSEKIKELVVTQLGYDTRVTILGHVQRGGTPSAFDRILASRMGVEAVIALLEATPDTPACVVSLNGNHAVRLPLMECVQMTQDVQKAMDERRFQDAVRLRGRSFAGNLNTYKRLAIKLPDDQIPKTNCNVAVINVGAPAAGMNAAVRSAVRVGIADGHRMLAIYDGFDGFAKG

SEQ ID NO: 10270 - protein, 113 aa, Homo sapiens
MNAAVRAVVRMGIYVGAKVYFIYEGYQGMVDGGSNIAEADWESVSSILQVGGTIIGSARCQAFRTREGRLKAACNLLQRGITNLCVIGGDGSLTGANLFRKEWSGLLEELARN

SEQ ID NO: 10271 - protein, 210 aa, Homo sapiens
MNAAVRAVVRMGIYVGAKVYFIYEGYQGMVDGGSNIAEADWESVSSILQVGGTIIGSARCQAFRTREGRLKAACNLLQRGITNLCVIGGDGSLTGANLFRKEWSGLLEELARNGQIDKEAVQKYAYLNVVGMVGSIDNDFCGTDMTIGTDSALHRIIEVVDAIMTTAQSHQRTFVLEVMGRHCGYLALVSALACGADWVFLPESPPEEGW

SEQ ID NO: 10272 - protein, 166 aa, Homo sapiens
  VARIANT 1: note = misc_feature - Xaa can be any naturally occurring amino acid
XADGHRMLAIYDGFDGFAKGQIKEIGWTDVGGWTGQGGSILGTKRVLPGKYLEEIATQMRTHSINALLIIGGFEAYKSACDMAEARGRHQELCIPLCVVPATISNNVPGTEISLGSDTGLNAVVETCDRIKQSASGTKRRVFIIETMGGYCGYLANMGGLAAGADA

SEQ ID NO: 10273 - protein, 103 aa, Homo sapiens
  VARIANT 1: note = misc_feature - Xaa can be any naturally occurring amino acid
XFIYQLYSEEGKGVFDCRKNVLGHMQQGGAPSPFDRNFGTKISARAMEWITAKLKEARGRGKKFTTDDSICVLGISKRNVIFQPVAELKKQTDFETVSMQPPR

SEQ ID NO: 10274 - protein, 140 aa, Homo sapiens
MAGWNAYIDNLMADGTCQDAAIVGYKDSPSVWAAVPGKTFVNITPAEVGVLVGKDRSSFYVNGLTLGGQKCSVIRDSLLQDGEFSMDLRTKSTGGAPTFNVTVTKTDKTLVLLMGKEGVHGGLINKKCYEMASHLRRSQY

SEQ ID NO: 10275 - protein, 104 aa, Homo sapiens
MGAWFLFQPAEVGVLVGKDRSSFYVNGLTLGGQKCSVIRDSLLQDGEFSMDLRTKSTGGAPTFNVTVTKTDKTLVLLMGKEGVHGGLINKKCYEMASHLRRSQY

SEQ ID NO: 10276 - protein, 165 aa, Homo sapiens
MHSRPRRRRRRGHTRRRPPVLPFGGGSGGARAAAQRAEPRSGRQRVPRALRLPPPASRGSSSPVRGPSSSAESSPSSSAMAGWNAYIDNLMADGTCQDAAIVGYKDSPSVWAAVPGKTFVNITPAEVGVLVGKDRSSFYVNGLTLGGQKCSVIRDSLLQDGEFSM

SEQ ID NO: 10277 - protein, 265 aa, Homo sapiens
MEYFGTIGIGTPAQDFTVVFDTGSSNLWVPSVYCSSLACTNHNRFNPEDSSTYQSTSETVSITYGTGSMTGILGYDTVQVGGISDTNQIFGLSETEPGSFLYYAPFDGILGLAYPSISSSGATPVFDNIWNQGLVSQDLFSVYLSADDQSGSVVIFGGIDSSYYTGSLNWVPVTVEGYWQITVDSITMNGEAIACAEGCQAIVDTGTSLLTGPTSPIANIQSDIGASENSDGDMVVSCSAISSLPDIVFTINGVQYPVPPSAYIL

SEQ ID NO: 10278 - protein, 388 aa, Homo sapiens
MKWLLLLGLVALSECIMYKVPLIRKKSLRRTLSERGLLKDFLKKHNLNPARKYFPQWKAPTLVDEQPLENYLDMEYFGTIGIGTPAQDFTVVFDTGSSNLWVPSVYCSSLACTNHNRFNPEDSSTYQSTSETVSITYGTGSMTGILGYDTVQVGGISDTNQIFGLSETEPGSFLYYAPFDGILGLAYPSISSSGATPVFDNIWNQGLVSQDLFSVYLSADDQSGSVVIFGGIDSSYYTGSLNWVPVTVEGYWQITVDSITMNGEAIACAEGCQAIVDTGTSLLTGPTSPIANIQSDIGASENSDGDMVVSCSAISSLPDIVFTINGVQYPVPPSAYILQSEGSCISGFQGMNLPTESGELWILGDVFIRQYFTVFDRANNQVGLAPVA

SEQ ID NO: 10279 - protein, 128 aa, Homo sapiens
MNGEAIACAEGCQAIVDTGTSLLTGPTSPIANIQSDIGASENSDGDMVVSCSAISSLPDIVFTINGVQYPVPPSAYILQSEGSCISGFQGMNLPTESGELWILGDVFIRQYFTVFDRANNQVGLAPVA

SEQ ID NO: 10280 - protein, 234 aa, Homo sapiens
MVSGNNSDSAHCIGTGLRGKETTLVTPQDSPRKCPIKGSPEEATADGHTNGRTKKFMSSPLTFHSDDQSGSVVIFGGIDSSYYTGSLNWVPVTVEGYWQITVDSITMNGEAIACAEGCQAIVDTGTSLLTGPTSPIANIQSDIGASENSDGDMVVSCSAISSLPDIVFTINGVQYPVPPSAYILQSEGSCISGFQGMNLPTESGELWILGDVFIRQYFTVFDRANNQVGLAPVA

SEQ ID NO: 10281 - protein, 388 aa, Homo sapiens
MKWLLLLGLVALSECIMYKVPLIRKKSLRRTLSERGLLKDFLKKHNLNPARKYFPQWEAPTLVDEQPLENYLDMEYFGTIGIGTPAQDFTVVFDTGSSNLWVPSVYCSSLACTNHNRFNPEDSSTYQSTSETVSITYGTGSMTGILGYDTVQVGGISDTNQIFGLSETEPGSFLYYAPFDGILGLAYPSISSSGATPVFDNIWNQGLVSQDLFSVYLSADDQSGSVVIFGGIDSSYYTGSLNWVPVTVEGYWQITVDSITMNGEAIACAEGCQAIVDTGTSLLTGPTSPIANIQSDIGASENSDGDMVVSCSAISSLPDIVFTINGVQYPVPPSAYILQSEGSCISGFQGMNLPTESGELWILGDVFIRQYFTVFDRANNQVGLAPVA

SEQ ID NO: 10282 - protein, 128 aa, Homo sapiens; identical to SEQ ID NO: 10279

SEQ ID NO: 10283 - protein, 234 aa, Homo sapiens; identical to SEQ ID NO: 10280

SEQ ID NO: 10284 - protein, 388 aa, Homo sapiens
MKWLLLLGLVALSECIMYKVPLIRKKSLRRTLSERGLLKDFLKKHNLNPARKYFPQWEAPTLVDEQPLENYLDMEYFGTIGIGTPAQDFTVVFDTGSSNLWVPSVYCSSLACTNHNRFNPEDSSTYQSTSETVSITYGTGSMTGILGYDTVQVGGISDTNQIFGLSETEPGSFLYYAPFDGILGLAYPSISSSGATPVFDNIWNQGLVSQDLFSVYLSADDKSGSVVIFGGIDSSYYTGSLNWVPVTVEGYWQITVDSITMNGETIACAEGCQAIVDTGTSLLTGPTSPIANIQSDIGASENSDGDMVVSCSAISSLPDIVFTINGVQYPVPPSAYILQSEGSCISGFQGMNVPTESGELWILGDVFIRQYFTVFDRANNQVGLAPVA

SEQ ID NO: 10285 - protein, 128 aa, Homo sapiens
MNGETIACAEGCQAIVDTGTSLLTGPTSPIANIQSDIGASENSDGDMVVSCSAISSLPDIVFTINGVQYPVPPSAYILQSEGSCISGFQGMNVPTESGELWILGDVFIRQYFTVFDRANNQVGLAPVA

SEQ ID NO: 10286 - protein, 234 aa, Homo sapiens
MVSGNNSDGAHCMGPGLRGKETTLVTPQDSPGKCPINGRSEEATADGHTNGRTKKFMSSPLTFHSDDKSGSVVIFGGIDSSYYTGSLNWVPVTVEGYWQITVDSITMNGETIACAEGCQAIVDTGTSLLTGPTSPIANIQSDIGASENSDGDMVVSCSAISSLPDIVFTINGVQYPVPPSAYILQSEGSCISGFQGMNVPTESGELWILGDVFIRQYFTVFDRANNQVGLAPVA

SEQ ID NO: 10287 - protein, 289 aa, Homo sapiens
MAFRQALQLAACGLAGGSAAVLFSAVAVGKPRAGGDAEPRPAEPPAWAGGARPGPGVWDPNWDRREPLSLINVRKRNVESGEEELASKLDHYKAKATRHIFLIRHSQYHVDGSLEKDRTLTPLGREQAELTGLRLASLGLKFNKIVHSSMTRAIETTDIISRHLPGVCKVSTDLLREGAPIEPDPPVSHWKPEAVQYYEDGARIEAAFRNYIHRADARQEEDSYEIFICHANVIRYIVCRALQFPPEGWLRLSLNNGSITHLVIRPNGRVALRTLGDTGFMPPDKITRS

SEQ ID NO: 10288 - protein, 255 aa, Homo sapiens
MAFRQALQLAACGLAGGSAAVLFSAVAVGKPRAGGDAEPRPAEPPAWAGGARPGPGVWDPNWDRREPLSLINVRKRNVESGEEELASKLDHYKAKATRHIFLIRHSQYHVDGSLEKDRTLTPLGREQAELTGLRLASLGLKFNKIVHSSMTRAIETTDIISRHLPGVCKVSTDLLREGAPIEPDPPVSHWKPEAVQYYEDGARIEAAFRNYIHRADARQEEDSYEIFICHANVIRYIVCSIPPLLSAGDFVLLGS

SEQ ID NO: 10289 - protein, 140 aa, Homo sapiens
MTRAIETTDIISRHLPGVCKVSTDLLREGAPIEPDPPVSHWKPEAVQYYEDGARIEAAFRNYIHRADARQEEDSYEIFICHANVIRYIVCRALQFPPEGWLRLSLNNGSITHLVIRPNGRVALRTLGDTGFMPPDKITRS

SEQ ID NO: 10290 - protein, 140 aa, Homo sapiens; identical to SEQ ID NO: 10289

SEQ ID NO: 10291 - protein, 269 aa, Homo sapiens
MAGLAARLVLLAGAAALASGSQGDREPVYRDCVLQCEEQNCSGGALNHFRSRQPIYMSLAGWTCRDDCKYECMWVTVGLYLQEGHKVPQFHGKVSLNAWFWSTVFHTRDTDLTEKMDYFCASTVILHSIYLCCVRTVGLQHPAVVSAFRALLLLMLTVHVSYLSLIRFDYGYNLVANVAIGLVNVVWWLAWCLWNQRRLPHVRKCVVVVLLLQGLSLLELLDFPPLFWVLDAHAIWHISTIPVHVLFFSFLEDDSLYLLKESEDKFKLD

SEQ ID NO: 10292 - protein, 299 aa, Homo sapiens
MAGLAARLVLLAGAAALASGSQGDREPVYRDCVLQCEEQNCSGGALNHFRSRQPIYMSLAGWTCRDDCKYECMWVTVGLYLQEGHKVPQFHGKWPFSRFLFFQEPASAVASFLNGLASLVMLCRYRTFVPASSPMYHTCVAFAWKMDYFCASTVILHSIYLCCVRTVGLQHPAVVSAFRALLLLMLTVHVSYLSLIRFDYGYNLVANVAIGLVNVVWWLAWCLWNQRRLPHVRKCVVVVLLLQGLSLLELLDFPPLFWVLDAHAIWHISTIPVHVLFFSFLEDDSLYLLKESEDKFKLD

SEQ ID NO: 10293 - protein, 148 aa, Homo sapiens
MAGLAARLVLLAGAAALASGSQGDREPVYRDCVLQCEEQNCSGGALNHFRSRQPIYMSLAGWTCRDDCKYECMWVTVGLYLQEGHKVPQFHGKWPFSRFLFFQEPASAVASFLNGLASLVMLCRYRTFVPASSPMYHTCVAFAWLSGR

SEQ ID NO: 10294 - protein, 320 aa, Homo sapiens
MAGLAARLVLLAGAAALASGSQGDREPVYRDCVLQCEEQNCSGGALNHFRSRQPIYMSLAGWTCRDDCKYECMWVTVGLYLQEGHKVPQFHGKWPFSRFLFFQEPASAVASFLNGLASLVMLCRYRTFVPASSPMYHTCVAFAWVSLNAWFWSTVFHTRDTDLTEKMDYFCASTVILHSIYLCCVRTVGLQHPAVVSAFRALLLLMLTVHVSYLSLIRFDYGYNLVANVAIGLVNVVWWLAWCLWNQRRLPHVRKCVVVVLLLQGLSLLELLDFPPLFWVLDAHAIWHISTIPVHVLFFSFLEDDSLYLLKESEDKFKLD

SEQ ID NO: 10295 - protein, 240 aa, Homo sapiens
MKDVGPESCGQPTPCWPSPALESVLGKASQHLGLESGQPLYLLELNWGGTECALSSTGRTAACFLPISLLPTSPAAWLGPEALCLPGRPGTTGLRDTGGPLLLPPPTLLQDTTRWCWMLVLWPAKVHGDSPHGILRDQAAGIGKEFHPDHCPSQVPRRPHHTPFQGQGSSKPRARILCCCLVESLPPCVGSVGQAECIGDRAVSMGLGVCELRPRCAVWRRVLSGKRCGFKVCVCRGWVC

SEQ ID NO: 10296 - protein, 70 aa, Homo sapiens
MWVTVGLYLQEGHKVPQFHGKWPFSRFLFFQEPASAVASFLNGLASLVMLCRYRTFVPASSPMYHTCVAF

SEQ ID NO: 10297 - protein, 44 aa, Homo sapiens
SFLNGLASLVMLCRYRTFVPASSPMYHTCVAFAWMRKLRHSKAK

SEQ ID NO: 10298 - protein, 150 aa, Homo sapiens
  VARIANT 1: note = misc_feature - Xaa can be any naturally occurring amino acid
XARLVLLAGAAALASGSQGDREPVYRDCVLQCEEQNCSGGALNHFRSRQPIYMSLAGWTCRDDCKYECMWVTVGLYLQEGHKVPQFHGKWPFSRFLFFQEPASAVASFLNGLASLVMLCRYRTFVPASSPMYHTCVAFAWMRKLRHSKAK

SEQ ID NO: 10299 - protein, 86 aa, Homo sapiens
MCLHPSSTPPFHQPRKEAVICKQRVPLKKFKSIRETMKEKGLLGEFLRTHKYDPAWKYRFGDLSVTYEPMAYMDAAYFGEISIGTP

SEQ ID NO: 10300 - protein, 315 aa, Homo sapiens
MKWMVVVLVCLQLLEAAVVKVPLKKFKSIRETMKEKGLLGEFLRTHKYDPAWKYRFGDLSVTYEPMAYMDAAYFGEISIGTPPQNFLVLFDTGSSNLWVPSVYCQSQACTSHSRFNPSESSTYSTNGQTFSLQYGSGSLTGFFGYDTLTVQSIQVPNQEFGLSENEPGTNFVYAQFDGIMGLAYPALSVDEATTAMQGMVQEGALTSPVFSVYLSNLVLESSGLGPLLTPSRAAPPSSTLQLPEKPLEQTWNILTPFTKTLPVSNLSRKVTSWAGVGIPVTCLPEAGSGGERRAECGLGVPTTRGPPRSQHHSGA

SEQ ID NO: 10301 - protein, 388 aa, Homo sapiens
MKWMVVVLVCLQLLEAAVVKVPLKKFKSIRETMKEKGLLGEFLRTHKYDPAWKYRFGDLSVTYEPMAYMDAAYFGEISIGTPPQNFLVLFDTGSSNLWVPSVYCQSQACTSHSRFNPSESSTYSTNGQTFSLQYGSGSLTGFFGYDTLTVQSIQVPNQEFGLSENEPGTNFVYAQFDGIMGLAYPALSVDEATTAMQGMVQEGALTSPVFSVYLSNQQGSSGGAVVFGGVDSSLYTGQIYWAPVTQELYWQIGIEEFLIGGQASGWCSEGCQAIVDTGTSLLTVPQQYMSALLQATGAQEDEYGQFLVNCNSIQNLPSLTFIINGVEFPLPPSSYILSNNGYCTVGVEPTYLSSQNGQPLWILGDVFLRSYYSVYDLGNNRVGFATAA

SEQ ID NO: 10302 - protein, 140 aa, Homo sapiens [sequence omitted]

SEQ ID NO: 10303 - protein, 221 aa, Homo sapiens
MPVMRLFPCFLQLLAGLALPAVPPQQWALSAGNGSSEVEVVPFQEVWGRSYCRALERLVDVVSEYPSEVEHMFSPSCVSLLRCTGCCGDENLHCVPVETANVTMQLLKIRSGDRPSYVELTFSQHVRCECRHSPGRQSPDMPGDFRADAPSFLPPRRSLPMLFRMEWGCALTGSQSAVWPSSPVPEEIPRMHPGRNGKKQQRKPLREKMKPERCGDAVPRR

SEQ ID NO: 10304 - protein, 149 aa, Homo sapiens
MPVMRLFPCFLQLLAGLALPAVPPQQWALSAGNGSSEVEVVPFQEVWGRSYCRALERLVDVVSEYPSEVEHMFSPSCVSLLRCTGCCGDENLHCVPVETANVTMQLLKIRSGDRPSYVELTFSQHVRCECRPLREKMKPERCGDAVPRR

SEQ ID NO: 10305 - protein, 170 aa, Homo sapiens
MPVMRLFPCFLQLLAGLALPAVPPQQWALSAGNGSSEVEVVPFQEVWGRSYCRALERLVDVVSEYPSEVEHMFSPSCVSLLRCTGCCGDENLHCVPVETANVTMQLLKIRSGDRPSYVELTFSQHVRCECRPLREKMKPERRRPKGRGKRRREKQRPTDCHLCGDAVPRR

SEQ ID NO: 10306 - protein, 169 aa, Homo sapiens
MPVMRLFPCFLQLLAGLALPAVPPQWALSAGNGSSEVEVVPFQEVWGRSYCRALERLVDVVSEYPSEVEHMFSPSCVSLLRCTGCCGDENLHCVPVETANVTMQLLKIRSGDRPSYVELTFSQHVRCECRPLREKMKPERRRPKGRGKRRREKQRPTDCHLCGDAVPRR

SEQ ID NO: 10307 - protein, 196 aa, Homo sapiens
MSRRSMLLAWALPSLLRLGAAQETEDPACCSPIVPRNEWKALASECAQHLSLPLRYVVVSHTAGSSCNTPASCQQQARNVQHYHMKTLGWCDVGYNFLIGEDGLVYEGRGWNFTGAHSGHLWNPMSIGISFMGNYMDRVPTPQAIRAAQGLLACGVAQGALRSNYVLKGHRDVQRTLSPGNQLYHLIQNWPHYRSP

SEQ ID NO: 10308 - protein, 105 aa, Homo sapiens
MAQGVLWILLGLLLWSDPGTASLPLLMDSVIQALAELEQKVPAAKTRHTASAWLMSAPNSGPHNRLYHFLLGAWSLNATELDPCPLSPELLGLTKEVARHDVREG

SEQ ID NO: 10309 - protein, 634 aa, Homo sapiens
MAQGVLWILLGLLLWSDPGTASLPLLMDSVIQALAELEQKVPAAKTRHTASAWLMSAPNSGPHNRLYHFLLGAWSLNATELDPCPLSPELLGLTKEVARHDVREGKEYGVVLAPDGSTVAVEPLLAGLEAGLQGRRVINLPLDSMAAPWETGDTFPDVVAIAPDVRATSSPGLRDGSPDVTTADIGANTPDATKGCPDVQASLPDAKAKSPPTMVDSLLAVTLAGNLGLTFLRGSQTQSHPDLGTEGCWDQLSAPRTFTLLDPKASLLTMAFLNGALDGVILGDYLSRTPEPRPSLSHLLSQYYGAGVARDPGFRSNFRRQNGAALTSASILAQQVWGTLVLLQRLEPVHLQLQCMSQEQLAQVAANATKEFTEAFLGCPAIHPRCRWGAAPYRGRPKLLQLPLGFLYVHHTYVPAPPCTDFTRCAANMRSMQRYHQDTQGWGDIGYSFVVGSDGYVYEGRGWHWVGAHTLGHNSRGFGVAIVGNYTAALPTEAALRTVRDTLPSCAVRAGLLRPDYALLGHRQLVRTDCPGDALFDLLRTWPHFTAVSLRSLHYTARRPSVYTSSTRPLPPACNSCARTASARPPTSRRHVYSGNLGPAFAGHSAGNIPDPVTSAYAASAQPQTQPACPFPSS

SEQ ID NO: 10310 - protein, 576 aa, Homo sapiens
MAQGVLWILLGLLLWSDPGTASLPLLMDSVIQALAELEQKVPAAKTRHTASAWLMSAPNSGPHNRLYHFLLGAWSLNATELDPCPLSPELLGLTKEVARHDVREGKEYGVVLAPDGSTVAVEPLLAGLEAGLQGRRVINLPLDSMAAPWETGDTFPDVVAIAPDVRATSSPGLRDGSPDVTTADIGANTPDATKGCPDVQASLPDAKAKSPPTMVDSLLAVTLAGNLGLTFLRGSQTQSHPDLGTEGCWDQLSAPRTFTLLDPKASLLTMAFLNGALDGVILGDYLSRTPEPRPSLSHLLSQYYGAGVARDPGFRSNFRRQNGAALTSASILAQQVWGTLVLLQRLEPVHLQLQCMSQEQLAQVAANATKEFTEAFLGCPAIHPRCRWGAAPYRGRPKLLQLPLGFLYVHHTYVPAPPCTDFTRCAANMRSMQRYHQDTQGWGDIGYSFVVGSDGYVYEGRGWHWVGAHTLGHNSRGFGVAIVGNYTAALPTEAALRTVRDTLPSCAVRAGLLRPDYALLGHRQLVRTDCPGDALFDLLRTWPHFTATVKPRPARSVSKRSRREPPPRTLPATDLQ

SEQ ID NO: 10311 - protein, 181 aa, Homo sapiens
MGTRRRGRTFHCQPSTAEVLCRGQPEIPLGSWNPATMAQGVLWILLGLLLWSDPGTASLPLLMDSVIQALAELEQKVPAAKTRHTASAWLMSAPNSGPHNRLYHFLLGAWSLNATELDPCPLSPELLGLTKEVARHDVREGKEYGVVLAPDGSTVAVEPLLAGLEAGLQGRRVINLPLDSM

SEQ ID NO: 10312 - protein, 341 aa, Homo sapiens
MGTLPWLLAFFILGLQAWDTPTIVSRKEWGARPLACRALLTLPVAYIITDQLPGMQCQQQSVCSQMLRGLQSHSVYTIGWCDVAYNFLVGDDGRVYEGVGWNIQGLHTQGYNNISLGIAFFGNKIGSSPSPAALSAAEGLISYAIQKGHLSPRYIQPLLLKEETCLDPQHPVMPRKVCPNIIKRSAWEARETHCPKMNLPAKYVIIIHTAGTSCTVSTDCQTVVRNIQSFHMDTRNFCDIGYHFLVGQDGGVYEGVGWHIQGSHTYGFNDIALGIAFIGYFVEKPPNAAALEAAQDLIQCAVVEGYLTPNYLLMGHSDVVNILSPGQALYNIISTWPHFKH

SEQ ID NO: 10313 - protein, 369 aa, Homo sapiens
MLPWLLVFSALGIQAWGDSSWNKTQAKQVSEGLQYLFENISQLTEKDVSTTVSRKAWGAEAVGCSIQLTTPVNVLVIHHVPGLECHDQTVCSQRLRELQAHHVHNNSGCDVAYNFLVGDDGRVYEGVGWNIQGVHTQGYNNISLGFAFFGTKKGHSPSPAALSAMENLITYAVQKGHLSSSYVQPLLGKGENCLAPRQKTSLKKACPGVVPRSVWGARETHCPRMTLPAKYGIIIHTAGRTCNISDECRLLVRDIQSFYIDRLKSCDIGYNFLVGQDGAIYEGVGWNVQGSSTPGYDDIALGITFMGTFTGIPPNAAALEAAQDLIQCAMVKGYLTPNYLLVGHSDVARTLSPGQALYNIISTWPHFKH

SEQ ID NO: 10314 - protein, 373 aa, Homo sapiens
MLPWLLVFSALGIQAWGDSSWNKTQAKQVSEGLQYLFENISQLTEKGLPTDVSTTVSRKAWGAEAVGCSIQLTTPVNVLVIHHVPGLECHDQTVCSQRLRELQAHHVHNNSGCDVAYNFLVGDDGRVYEGVGWNIQGVHTQGYNNISLGFAFFGTKKGHSPSPAALSAMENLITYAVQKGHLSSSYVQPLLGKGENCLAPRQKTSLKKACPGVVPRSVWGARETHCPRMTLPAKYGIIIHTAGRTCNISDECRLLVRDIQSFYIDRLKSCDIGYNFLVGQDGAIYEGVGWNVQGSSTPGYDDIALGITFMGTFTGIPPNAAALEAAQDLIQCAMVKGYLTPNYLLVGHSDVARTLSPGQALYNIISTWPHFKH

SEQ ID NO: 10315 - protein, 580 aa, Homo sapiens
MDYPKMDYFLDVESAHRLLDVESAQRFFYSQGAQARRATLLLPPTLMAASSEDDIDRRPIRRVRSKSDTPYLAEARISFNLGAAEEVERLAAMRSDSLVPGTHTPPIRRRSKFANLGRIFKPWKWRKKKSEKFKHTSAALERKISMRQSREELIKRGVLKEIYDKDGELSISNEEDSLENGQSLSSSQLSLPALSEMEPVPMPRDPCSYEVLQPSDIMDGPDPGAPVKLPCLPVKLSPPLPPKKVMICMPVGGPDLSLVSYTAQKSGQQGVAQHHHTVLPSQIQHQLQYGSHGQHLPSTTGSLPMHPSGCRMIDELNKTLAMTMQRLESSEQRVPCSTSYHSSGLHSGDGVTKAGPMGLPEIRQVPTVVIECDDNKENVPHESDYEDSSCLYTREEEEEEEDEDDDSSLYTSSLAMKVCRKDSLAIKLSNRPSKRELEEKNILPRQTDEERLELRQQIGTKLTRRLSQRPTAEELEQRNILKPRNEQEEQEEKREIKRRLTRKLSQRPTVEELRERKILIRFSDYVEVADAQDYDRRADKPWTRLTAADKAAIRKELNEFKSTEMEVHELSRHLTRFHRP

SEQ ID NO: 10316 - protein, 484 aa, Homo sapiens
MDYPKMDYFLDVESAHRLLDVESAQRFFYSQGAQARRATLLLPPTLMAASSEDDIDRRPIRRVRSKSDTPYLAEARISFNLGAAEEVERLAAMRSDSLVPGTHTPPIRRRSKFANLGRIFKPWKWRKKKSEKFKHTSAALERKISMRQSREELIKRGVLKEIYDKDGELSISNEEDSLENGQSLSSSQLSLPALSEMEPVPMPRDPCSYEVLQPSDIMDGPDPGAPVKLPCLPVKLSPPLPPKKVMICMPVGGPDLSLVSYTAQKSGQQGVAQHHHTVLPSQIQHQLQYGSHGQHLPSTTGSLPMHPSGCRMIDELNKTLAMTMQRLESSEQRVPCSTSYHSSGLHSGDGVTKAGPMGLPEIRQVPTVVIECDDNKENVPHESDYEDSSCLYTREEEEEEEDEDDDSSLYTSSLAMKVCRKDSLAIKLSNRPSKRELEEKNILPRQTDEERLELRQQIGTKLTRRLSQRPTAEELEQRNILKRK

SEQ ID NO: 10317 - protein, 169 aa, Homo sapiens
MDYPKMDYFLDVESAHRLLDVESAQRFFYSQGAQARRATLLLPPTLMAASSEDDIDRRPIRRVRSKSDTPYLAEARISFNLGAGVSLFGDMDEARMGPAVPTLGRPLGLELCSLENHGLLKTAPTYTTSAHICSGPSTGGQFSTQGMSPVQGAKRRRVVWLPLEGEEFG

SEQ ID NO: 10318 - protein, 144 aa, Homo sapiens
MYLQGPRKLMTQGGYDMVQKLFLDFFRRRLSQRPTAEELEQRNILKPRNEQEEQEEKREIKRRLTRKLSQRPTVEELRERKILIRFSDYVEVADAQDYDRRADKPWTRLTAADKAAIRKELNEFKSTEMEVHELSRHLTRFHRP

SEQ ID NO: 10319 - protein, 140 aa, Homo sapiens
MYLQGPRKLMTQGGYDMVQKLFLDFFRRRLSQRPTAEELEQRNILKPRNEQEEQEEKREIKRRLTRKLSQRPTVEELRERKILIRFSDYVEVADAQDYDRRADKPWTRLTAADKVSRGECWRVGGRTVCWVSLGSPLGSV

SEQ ID NO: 10320 - protein, 230 aa, Homo sapiens
NLGRIFKPWKWRKKKSEKFKHTSAALERKISMRQSREELIKRGVLKEIYDKDGELSISNEEDSLENGQSLSSSQLSLPALSEMEPVPMPRDPCSYEVLQPSDIMDGPVSEESPSASESGVLLSQDPSAKPVLLLPPKKPAAFPGDHEETPVKQLPLLKQPPALPPKPTTRIANHLTDWHQAHQVGQRHPLPPWQWAFSSPGSSKRIQSRPGAVAYACNPSTLGGRGRWIT

SEQ ID NO: 10321 - protein, 265 aa, Homo sapiens
  VARIANT 1: note = misc_feature - Xaa can be any naturally occurring amino acid
XSPFTPFSPLLSFFLSPFFFLFPSLSHSLPTPSLPLPSPFPSPSPVREPLPLPSSPFRLSPSPSVSFSLSARRATLLLPPTLMAASSEDDIDRRPIRRVRSKSDTPYLAEARISFNLGAAEEVERLAAMRSDSLVPGTHTPPIRRRSKFANLGRIFKPWKWRKKKSEKFKHTSAALERKISMRQSREELIKRGVLKEIYDKDGELSISNEEDSLENGQSLSSSQLSLPALSEMEPVPMPRDPCSYEVLQPSDIMDGPVSEESPSA

SEQ ID NO: 10322 - protein, 124 aa, Homo sapiens
MAAKVFESIGKFGLALAVAGGVVNSALYNVDAGHRAVIFDRFRGVQDIVVGEGTHFLIPWVQKPIIFDCRSRPRNVPVITGSKDLQNVNITLRILFRPVASQLPRIFTSIGEDYDERVLPSITT

SEQ ID NO: 10323 - protein, 201 aa, Homo sapiens
MAAKVFESIGKFGLALAVAGGVVNSALYNVDAGHRAVIFDRFRGVQDIVVGEGTHFLIPWVQKPIIFDCRSRPRNVPVITGSKDLQNVNITLRILFRPVASQLPRIFTSIGEDYDERVLPSITTEILKSVVARFDAGELITQRELVSRQVSDDLTERAATFGLILDDVSLTHLTFGKEFTEAVEAKQVAQQEAERARFVVE

SEQ ID NO: 10324 - protein, 202 aa, Homo sapiens
MAAKVFESIGKFGLALAVAGGVVNSALYNVDAGHRAVIFDRFRGVQDIVVGEGTHFLIPWVQKPIIFDCRSRPRNVPVITGSKDLQNVNITLRILFRPVASQLPRIFTSIGEDYDERVLPSITTEILKSVVARFDAGELITQRELVSRQVSDDLTERAATFGLILDDVSLTHLTFGKEFTEAVEAKQVAQQEAERARFVVEK

SEQ ID NO: 10325 - protein, 216 aa, Homo sapiens
MAAKVFESIGKFGLALAVAGGVVNSALYNVDAGHRAVIFDRFRGVQDIVVGEGTHFLIPWVQKPIIFDCRSRPRNVPVITGSKDLQNVNITLRILFRPVASQLPRIFTSIGEDYDERVLPSITTEILKSVVARFDAGELITQRELVSRQVSDDLTERAATFGLILDDVSLTHLTFGKEFTEAVEAKQVAQQEAERARFVVEKAEQQKKAAIISAEG

SEQ ID NO: 10326 - protein, 246 aa, Homo sapiens
MAAKVFESIGKFGLALAVAGGVVNSALYNVDAGHRAVIFDRFRGVQDIVVGEGTHFLIPWVQKPIIFDCRSRPRNVPVITGSKDLQNVNITLRILFRPVASQLPRIFTSIGEDYDERVLPSITTEILKSVVARFDAGELITQRELVSRQVSDDLTERAATFGLILDDVSLTHLTFGKEFTEAVEAKQVAQQEAERARFVVEKAEQQKKAAIISAEGDSKAAELIANSLATAGDGLIELRKLEAAED

SEQ ID NO: 10327 - protein, 272 aa, Homo sapiens
MAAKVFESIGKFGLALAVAGGVVNSALYNVDAGHRAVIFDRFRGVQDIVVGEGTHFLIPWVQKPIIFDCRSRPRNVPVITGSKDLQNVNITLRILFRPVASQLPRIFTSIGEDYDERVLPSITTEILKSVVARFDAGELITQRELVSRQVSDDLTERAATFGLILDDVSLTHLTFGKEFTEAVEAKQVAQQEAERARFVVEKAEQQKKAAIISAEGDSKAAELIANSLATAGDGLIELRKLEAAEDIAYQLSRSRNITYLPAGQSVLLQLPQ

SEQ ID NO: 10328 - protein, 272 aa, Homo sapiens; identical to SEQ ID NO: 10327

SEQ ID NO: 10329 - protein, 272 aa, Homo sapiens; identical to SEQ ID NO: 10327

SEQ ID NO: 10330 - protein, 155 aa, Homo sapiens
MAAKVFESIGKFGLALAVAGGVVNSALYNVDAGHRAVIFDRFRGVQDIVVGEGTHFLIPWVQKPIIFDCRSRPRNVPVITGSKDLQNVNITLRILFRPVASQLPRIFTSIGEDYDERVLPSITTEILKSVVARFDAGELITYLPAGQSVLLQLPQ

SEQ ID NO: 10331 - protein, 258 aa, Homo sapiens
MIAISAVSSALLFSLLCEASTVVLLNSTDSSPPTNNFTDIEAALKAQLDSADIPKARRKRYISQNDMIAILDYHNQVRGKVFPPAANMEYMVWDENLAKSAEAWAATCIWDHGPSYLLRFLGQNLSVRTGRYRSILQLVKPWYDEVKDYAFPYPQDCNPRCPMRCFGPMCTHYTQMVWATSNRIGCAIHTCQNMNVWGSVWRRAVYLVCNYAPKGNWIGEAPYKVGVPCSSCPPSYGGSCTDNLCFPGVTSNYLYWFK

SEQ ID NO: 10332 - protein, 258 aa, Homo sapiens; identical to SEQ ID NO: 10331

SEQ ID NO: 10333 - protein, 117 aa, Homo sapiens
MRASSFLIVVVFLIAGTLVLEAAVTGVPVKGQDTVKGRVPFNGQDPVKGQVSVKGQDKVKAQEPVKGPVSTKPGSCPIILIRCAMLNPPNRCLKDTDCPGIKKCCEGSCGMACFVPQ

SEQ ID NO: 10334 - protein, 77 aa, Homo sapiens [sequence omitted]

SEQ ID NO: 10335 - protein, 111 aa, Homo sapiens
MESRMWPALLLSHLLPLWPLLLLPLPPPAQGSSSSPRTPPAPARPPCARGGPSAPRHVCVWERAPPPSRSPRVPRSRRQVLPGTAPPATPSGFEEGPPSSQYPWAIVWGPT

SEQ ID NO: 10336 - protein, 172 aa, Homo sapiens
MESRMWPALLLSHLLPLWPLLLLPLPPPAQGSSSSPRTPPAPARPPCARGGPSAPRHVCVWERAPPPSRSPRVPRSRRQVLPGTAPPATPSGFEEGPPSSQYPWAIVWGPTVSREDGGDPNSANPGFLDYGFAAPHGLATPHPNSDSMRGDGDGLILGEAPATLRPFLFGGR

SEQ ID NO: 10337 - protein, 282 aa, Homo sapiens
MESRMWPALLLSHLLPLWPLLLLPLPPPAQGSSSSPRTPPAPARPPCARGGPSAPRHVCVWERAPPPSRSPRVPRSRRQVLPGTAPPATPSGFEEGPPSSQYPWAIVWGPTVSREDGGDPNSANPGFLDYGFAAPHGLATPHPNSDSMRGDGDGLILGEAPATLRPFLFGGRGEGVDPQLYVTITISIIIVLVATGIIFKFCWDRSQKRRRPSGQQGALRQEESQQPLTDLSPAGVTVLGAFGDSPTPTPDHEEPRGGPRPGMPHPKGAPAFQLNRIPLVNL

SEQ ID NO: 10338 - protein, 282 aa, Homo sapiens; identical to SEQ ID NO: 10337
